United States Patent Application Publication US 2025/0333808 A1 - sequence listing, part 10

SEQ ID NO: 161999 - DNA, 80 bp, synthetic construct
  source 1..80: mol_type = other DNA
cgggactctgcaaaataatgacccagtatctaactttatagatacaactctacaagaggtccttgtagttcctgacacca

SEQ ID NO: 162000 - DNA, 80 bp, synthetic construct
  source 1..80: mol_type = other DNA
ggaacactatttcaagttcagaaatgatattaaggcaactgtagaaacagcaggacccagtgatttgtttgtacacactc

SEQ ID NO: 162001 - DNA, 80 bp, synthetic construct
  source 1..80: mol_type = other DNA
gactggttcagaggagtgtactgcatgcacagagctttttgcggctgcaacgatcctgtcaggcatcttgctagcctggc

SEQ ID NO: 162002 - DNA, 80 bp, synthetic construct
  source 1..80: mol_type = other DNA
gacaataaagcaattagattattgaattatcaaggctataattgctggcaagttggacattggctgtgtactgtgttaga

SEQ ID NO: 162003 - DNA, 80 bp, synthetic construct
  source 1..80: mol_type = other DNA
aggagtgggtaaccatgtgtggtttcaatacaactctaaagcagacacacaaatagccagcagcggcttatattgtcata

SEQ ID NO: 162004 - DNA, 80 bp, synthetic construct
  source 1..80: mol_type = other DNA
caaaaacaaaactaatgtgaactttgagaccgcgccagtgactgaaactaggggaaaaattacccactcacacctcacca

SEQ ID NO: 162005 - DNA, 80 bp, synthetic construct
  source 1..80: mol_type = other DNA
cctatggtgacttttctcaaggatgagcttagaaagaaagaaaagattgctgctgggaaaactagagttatagaagctag

SEQ ID NO: 162006 - DNA, 80 bp, synthetic construct
  source 1..80: mol_type = other DNA
tagtacaccctatctatcctgaggaagaggtgtgggagtctattagatggacaaagaatcccagaaatatgcaggagcat

SEQ ID NO: 162007 - DNA, 80 bp, synthetic construct
  source 1..80: mol_type = other DNA
ggacattggggagaattgggaggggaatactcgcagctccaagaagaatcagacaggtggcagaaatcgccctcctgtga

SEQ ID NO: 162008 - DNA, 80 bp, synthetic construct
  source 1..80: mol_type = other DNA
tgccagttggaccatcacaacacgcgaagttgctcaactgagaagaaaattggaaatgttcacatatttaaggtttgacc

SEQ ID NO: 162009 - DNA, 80 bp, synthetic construct
  source 1..80: mol_type = other DNA
tgggagaagttctaaattacttcacaaactggtcaggtagcataaccatcacatttatgtgtgtctgtgatgcatttagt

SEQ ID NO: 162010 - DNA, 80 bp, synthetic construct
  source 1..80: mol_type = other DNA
agagacattctgaataaagagacccaggacacagaaaagatgaagttttatctagacaagtatggcattgacttgcctct

SEQ ID NO: 162011 - DNA, 80 bp, synthetic construct
  source 1..80: mol_type = other DNA
agagtacctatgactgggaaaactatagcaatgcctctaactacaaattaaccaaaaccaagtgggacgacgccaaaaag

SEQ ID NO: 162012 - DNA, 80 bp, synthetic construct
  source 1..80: mol_type = other DNA
aagactccttaaattctgtactagcctacggagagtggcctacctacctgtcagacatagatgcaacatctgtggataag

SEQ ID NO: 162013 - DNA, 80 bp, synthetic construct
  source 1..80: mol_type = other DNA
aaggtttgatagtgaaataacaatagtccctacaattaggctatacacgtctactggtgcatcatattcgggtcttccca

SEQ ID NO: 162014 - DNA, 80 bp, synthetic construct
  source 1..80: mol_type = other DNA
tttatgaattcttactcatactttagaggatcacttataatcagattgtcaatttatgcgagtactttcaataggggaag

SEQ ID NO: 162015 - DNA, 80 bp, synthetic construct
  source 1..80: mol_type = other DNA
tcaacttggcagcagacaagaagaacaccatggatatgtatagagttcctgtcaccaccagtgcagacacaaacaatccc

SEQ ID NO: 162016 - DNA, 80 bp, synthetic construct
  source 1..80: mol_type = other DNA
ggatcactcaggttttcattgatgtatacaggtcctgcattatcaagtgctaaacttatattggcatacacaccccctgg

SEQ ID NO: 162017 - DNA, 80 bp, synthetic construct
  source 1..80: mol_type = other DNA
gtcgggcgtccccaccacggccggtggccccgtcggacgacaccagatctacttcataagtgaccggtcgcaggatgtcc

SEQ ID NO: 162018 - DNA, 80 bp, synthetic construct
  source 1..80: mol_type = other DNA
atgaccacagattttgaacagaaacagtgcaagtgtgtccttgaaaatattcccctatggtcagcgtttcacgggtaccc

SEQ ID NO: 162019 - DNA, 80 bp, synthetic construct
  source 1..80: mol_type = other DNA
ggtcacattacgtaaaccctaataaacttacaacaacacctacatcagaaataacccataataacacatggtacagaggc

SEQ ID NO: 162020 - DNA, 80 bp, synthetic construct
  source 1..80: mol_type = other DNA
gattacactcacaaatttatccccaactatcacacaaataagggaacaactactgaacttgaagagaagcactacatcaa

SEQ ID NO: 162021 - DNA, 80 bp, synthetic construct
  source 1..80: mol_type = other DNA
ccagcactaaaacctgaaacaaatgcatcagacaaaaccaaaaaaacactaggacaagaggtaccagaacttcaatacaa

SEQ ID NO: 162022 - DNA, 80 bp, synthetic construct
  source 1..80: mol_type = other DNA
ggacccgagcaagctcggcccggcgaccgtcttccacaagtgggacatcagacgcggacagtttagcaaaagaagtattg

SEQ ID NO: 162023 - DNA, 80 bp, synthetic construct
  source 1..80: mol_type = other DNA
tggcaaaccagcctgaaccaactattataagtgtgggtgatgtcatttcctatggtaacatattactcagtggtaaccaa

SEQ ID NO: 162024 - DNA, 80 bp, synthetic construct
  source 1..80: mol_type = other DNA
aggaccacgggtgtcaccagcaccgccacgggaatctccaccgaggcgtccagaagcaggtctgagccgagcgtgcaggt

SEQ ID NO: 162025 - DNA, 80 bp, synthetic construct
  source 1..80: mol_type = other DNA
tctggctgctcgctataatatgcagccagggccgtcgccgggtggtgatcgtaggccgcagagacaggcaccagtgagag

SEQ ID NO: 162026 - DNA, 80 bp, synthetic construct
  source 1..80: mol_type = other DNA
actaatgatgctattaaagacatgtcatgtgttgatcttgttatggataatcacaatgtttcattatctgaattgcttag

SEQ ID NO: 162027 - DNA, 80 bp, synthetic construct
  source 1..80: mol_type = other DNA
ccatatatcccaatctcgtggttttgccgttggttcccttgcatcactcaccaacgtgaagcaatggagtcagttgtggc

SEQ ID NO: 162028 - DNA, 80 bp, synthetic construct
  source 1..80: mol_type = other DNA
tagtagaggaaaagaagttcggggcagaagtagtgccaggatttcaggcactctcagaaggctgcacgccctatgatatt

SEQ ID NO: 162029 - DNA, 80 bp, synthetic construct
  source 1..80: mol_type = other DNA
tgttgcctcttcctgtaaagtagtactacaagacaaacccctctggtgcatggcctatggctactcagactttatccaga

SEQ ID NO: 162030 - DNA, 80 bp, synthetic construct
  source 1..80: mol_type = other DNA
cctgtgtccaccccagtcccgtccaggggggactttatgtgacccttgggcctggctccccatagactcccatgtaagcc

SEQ ID NO: 162031 - DNA, 80 bp, synthetic construct
  source 1..80: mol_type = other DNA
agcaagcagcataccagctgtataaggtcaagcacttctgtctccccggtcgacgttgatatgcttcaacaaggcaaaaa

SEQ ID NO: 162032 - DNA, 80 bp, synthetic construct
  source 1..80: mol_type = other DNA
tcaatcagcggcgccgatcgccatgaatccgagtacccacgtgagcagtaacggcccaacgactcccccccacggggccc

SEQ ID NO: 162033 - DNA, 80 bp, synthetic construct
  source 1..80: mol_type = other DNA
cttggtacacatttagtttgggatgtagggttacaatccactgcttcattggtagtaccatgggttagtgctagtcattt

SEQ ID NO: 162034 - DNA, 80 bp, synthetic construct
  source 1..80: mol_type = other DNA
aattccattttctcaaaatacaaaggtaatgaagcggttaaaatttcagaaaatatgctagttgccgctgcgcattacac

SEQ ID NO: 162035 - DNA, 80 bp, synthetic construct
  source 1..80: mol_type = other DNA
ctacatttataaaacctacccaaacaacccactacaaacccgaagacgcagcaaagtttgtcagttcagcagacagcaac

SEQ ID NO: 162036 - DNA, 80 bp, synthetic construct
  source 1..80: mol_type = other DNA
ttgtgtgggggagagacagcgaagagctttgaccagaacgcagccacgggcgaaacggctgtgcaggcagctgtgtgcaa

SEQ ID NO: 162037 - DNA, 80 bp, synthetic construct
  source 1..80: mol_type = other DNA
gacctggtttcggtggggcgtttgtgggctcatacaagatcataaactaccacctagccacagaaaatgaaaaacgtgat

SEQ ID NO: 162038 - DNA, 80 bp, synthetic construct
  source 1..80: mol_type = other DNA
gacgggctctgcccgcgccggcggcccccgagaaccagcctgaaccagagctatggcgtggtcgtggtggtggaggcgac

SEQ ID NO: 162039 - DNA, 80 bp, synthetic construct
  source 1..80: mol_type = other DNA
tgatgacaagaggatactagttataccactagatatgagcaacactctcttttccacaacacttctgggggaggttttga

SEQ ID NO: 162040 - DNA, 80 bp, synthetic construct
  source 1..80: mol_type = other DNA
tgtaaacatgatagttgaacaacttaggactgagtatgggaatagaagaagtgttaagacaaatctggctgcaattttcc

SEQ ID NO: 162041 - DNA, 80 bp, synthetic construct
  source 1..80: mol_type = other DNA
tacagacagcaactatggctactgctcatacaagcctaccacagatttagtacaaaaaattaaaaactacagagacatac

SEQ ID NO: 162042 - DNA, 80 bp, synthetic construct
  source 1..80: mol_type = other DNA
acaggtcatttaacacactgtgctgggtatcaacatgatgaaatcatcttacacgggcactcaataaaatacctggaaca

SEQ ID NO: 162043 - DNA, 80 bp, synthetic construct
  source 1..80: mol_type = other DNA
gggcccataccacaagcggtggacgattataactggcaaacttccaccaaccccagcgtattttggactgaggggaacgc

SEQ ID NO: 162044 - DNA, 80 bp, synthetic construct
  source 1..80: mol_type = other DNA
aaagaaatggcacttataatagcctactaaacatagtaactatatacaacacaacacagacagcagcacaactatctaaa

SEQ ID NO: 162045 - DNA, 80 bp, synthetic construct
  source 1..80: mol_type = other DNA
aaacaagatacgtgatgaatgacaacacaaatgctgaggcagcagtagagaacttcctgggaagatctgctttgtgggca

SEQ ID NO: 162046 - DNA, 80 bp, synthetic construct
  source 1..80: mol_type = other DNA
ggttccaacctggagggtgccaggcaggatggagagatggcacagcttggtgaaataccttaagcatagaacaaaggaat

SEQ ID NO: 162047 - DNA, 80 bp, synthetic construct
  source 1..80: mol_type = other DNA
cacactaacaaaaacacattagaaaactggctatacggaacaggagccctgtaccacacttttcacacacaagaatacct

SEQ ID NO: 162048 - DNA, 80 bp, synthetic construct
  source 1..80: mol_type = other DNA
atccccaaacatcctcccggagtattctcctacaaaaatgatccatataccaggaagaattgacaacatcctacacatgg

SEQ ID NO: 162049 - DNA, 80 bp, synthetic construct
  source 1..80: mol_type = other DNA
aaaaaagctaagaatgtaaacttcgatgtagaggctgtcacagtggaacgagcaagcttgataaccacaggccccaatgg

SEQ ID NO: 162050 - DNA, 80 bp, synthetic construct
  source 1..80: mol_type = other DNA
ttggcacagatttataaccaaattcttgatgaagataaaagacgtagacaggtaattgatgttatgtctgctattttcca

SEQ ID NO: 162051 - DNA, 80 bp, synthetic construct
  source 1..80: mol_type = other DNA
agtgaacctattagaaattgcacaggttgattctcttattccaattaataatatagcaaataatgataacttggagaggt

SEQ ID NO: 162052 - DNA, 80 bp, synthetic construct
  source 1..80: mol_type = other DNA
ttttctgtgcagggccgcatgcgtgtacatagtgagttacaaaacacaaggcggcgagcagactgataaatacgccagtt

SEQ ID NO: 162053 - DNA, 80 bp, synthetic construct
  source 1..80: mol_type = other DNA
acatgggtaagttatgttttaggacattaaacagtaacacaacaacagacactataaggatatttggaaagcccaaacac

SEQ ID NO: 162054 - DNA, 80 bp, synthetic construct
  source 1..80: mol_type = other DNA
ctgcacaaattcagcaccaattacaacaagataaaggttgaagccaccaaagaattggagcagaagcactttcttaaacc

SEQ ID NO: 162055 - DNA, 80 bp, synthetic construct
  source 1..80: mol_type = other DNA
tcatgagcgattcgtcctccttgcctttaggctttttggcctttttgtgtatcatctggccgccggcctccataaccacc

SEQ ID NO: 162056 - DNA, 80 bp, synthetic construct
  source 1..80: mol_type = other DNA
aacataaatgctcatggttcagaaaccgttccacaatgtaattgtacttcaggagtttactattcaaggtactacaataa

SEQ ID NO: 162057 - DNA, 80 bp, synthetic construct
  source 1..80: mol_type = other DNA
ctttcaataaaaacaccctttcactgtactaggccgtgggagtttcactggtcggtgtctacctctaaaggtcactaagc

SEQ ID NO: 162058 - DNA, 80 bp, synthetic construct
  source 1..80: mol_type = other DNA
tacattccaaacaatagcacaccttagagaaacaggcaaacaagaaaatgccaatccacagtggaacacatgtgtaaatt

SEQ ID NO: 162059 - DNA, 80 bp, synthetic construct
  source 1..80: mol_type = other DNA
aacgtctcacccagagatgttaagggcaagcacttctgtttccccggatgtgtgaataggcttcacccgaggctgaaact

SEQ ID NO: 162060 - DNA, 80 bp, synthetic construct
  source 1..80: mol_type = other DNA
ctgcagactgaaccgctacaaccacctatacacatgagcctgtggagacccccggtatacaatgtcccgggacaagaaag

SEQ ID NO: 162061 - DNA, 80 bp, synthetic construct
  source 1..80: mol_type = other DNA
aacctgatgcctcagctaatagattttacacactagagagtatcacatgggaaaaatcatcacgtgggtggtggtggaag

SEQ ID NO: 162062 - DNA, 80 bp, synthetic construct
  source 1..80: mol_type = other DNA
tctccgagctgctcgaccttatagaaaacgcagagtaaggagattgcggaggaggaggaggcgtgggtgggctcgcagaa

SEQ ID NO: 162063 - DNA, 80 bp, synthetic construct
  source 1..80: mol_type = other DNA
caggagctcgtgtttttcagtttgtcgtagtataaagttgtcgcgttgatagggcgctttgaaaagtacgcgtggaagat

SEQ ID NO: 162064 - DNA, 80 bp, synthetic construct
  source 1..80: mol_type = other DNA
ggtacatacccctccacgagaggagcaagtggtacgtgatgctaagataccagacggacgtactccatgacatagtaacc

SEQ ID NO: 162065 - DNA, 80 bp, synthetic construct
  source 1..80: mol_type = other DNA
tgcaggcgaacccaggtgaaactggcggtgtgtttactgacacatacaaccctagtacagagacagcaggggcgcgtaag

SEQ ID NO: 162066 - DNA, 80 bp, synthetic construct
  source 1..80: mol_type = other DNA
cgacgccgtctaacaggtatagcaatccccgtcacgcctctgttcatattttattaaaaaaaaacacaacataacgacag

SEQ ID NO: 162067 - DNA, 80 bp, synthetic construct
  source 1..80: mol_type = other DNA
agaccccaatagcaaaaactgcaatcagcacgccaaacgcagcgtgtcttttaactttcccagcggtacgtggaaaggcg

SEQ ID NO: 162068 - DNA, 80 bp, synthetic construct
  source 1..80: mol_type = other DNA
accaggtattgaagccccaagtggtatcagtgataagaagtgggatggtgcttcaaaccccagcatcttttatcaaccca

SEQ ID NO: 162069 - DNA, 80 bp, synthetic construct
  source 1..80: mol_type = other DNA
ggggccgaccgaggaaggccgccgccacggccgcctcaaaaacggagacggggatggtgtcaccggagcccctcttagga

SEQ ID NO: 162070 - DNA, 80 bp, synthetic construct
  source 1..80: mol_type = other DNA
tacatgatggatggcacactaattggaaacagtctcattttcccacaccagtttattaatttgagaactaataatacagc

SEQ ID NO: 162071 - DNA, 80 bp, synthetic construct
  source 1..80: mol_type = other DNA
accaccgacgtcaccgaagacgacgcagcccgccacccgcaccccgagggccggcccacacacgcttccagggacccgac

SEQ ID NO: 162072 - DNA, 80 bp, synthetic construct
  source 1..80: mol_type = other DNA
ctacaaagttctaccgcaaggatggaaagggtcaccagccatctttcagtatactatgagaaaagtgctagaccccttta

SEQ ID NO: 162073 - DNA, 80 bp, synthetic construct
  source 1..80: mol_type = other DNA
cccctgcagcatcacactcagtgaaggtcggtgcagcactgacacttctgtctgcccatgctgagaacccaggagcaatg

SEQ ID NO: 162074 - DNA, 80 bp, synthetic construct
  source 1..80: mol_type = other DNA
ccttttctttctccacttccgaatggctgagttttccacgcccgtccgcagcgaggaggccacggagcgaccgccgcgcg

SEQ ID NO: 162075 - DNA, 80 bp, synthetic construct
  source 1..80: mol_type = other DNA
gagtttataacaccaatggccaaccttgaggacaagggtagggcattcaccagtgactatgtcattgccagcacaaacat

SEQ ID NO: 162076 - DNA, 80 bp, synthetic construct
  source 1..80: mol_type = other DNA
aggctggcaacgcttgtgacaacagttaatgggactccaatgttaatttcagagggacccctcaaaatggaggagaaggc

SEQ ID NO: 162077 - DNA, 80 bp, synthetic construct
  source 1..80: mol_type = other DNA
ataagaccccctaacatgtttgaagacaagtggtatacgcaagaggacctgtgttccgttggtcttgtgtcacttgcggt

SEQ ID NO: 162078 - DNA, 80 bp, synthetic construct
  source 1..80: mol_type = other DNA
cttacacagaaccgccctgcgttaacaaaaacgagggcaaaaagaactggggctacgtattctatgacactaactttggc

SEQ ID NO: 162079 - DNA, 80 bp, synthetic construct
  source 1..80: mol_type = other DNA
gccccagtacaaaaaacaccttagtattagctccactatggatgcaactaacaaacaacattatactactaatcttttta

SEQ ID NO: 162080 - DNA, 80 bp, synthetic construct
  source 1..80: mol_type = other DNA
tttcgaggcagcgacagctcgtcgtcgtcatcctcgtcaaacatgatcatggggtcaggggtttttttgggatgttgaca

SEQ ID NO: 162081 - DNA, 80 bp, synthetic construct
  source 1..80: mol_type = other DNA
caggccagccattacgctcgtcatcaaaatcactcgcatcaaccaaaccgttattcattcgtgattgcgcctgagcgaga

SEQ ID NO: 162082 - DNA, 80 bp, synthetic construct
  source 1..80: mol_type = other DNA
tattattctggagagttgaatgtgcatgttctatatctcagtgataatggatttctcagggtcacccatgcatatgatca

SEQ ID NO: 162083 - DNA, 80 bp, synthetic construct
  source 1..80: mol_type = other DNA
attccaagccatttgggaaagattgatatatactcacttcaggttaccaggaaagagaatgaaagaaacatactgatttt

SEQ ID NO: 162084 - DNA, 80 bp, synthetic construct
  source 1..80: mol_type = other DNA
ctcacatcagcccaagatgatggaccattgggtagtgaaaaaccaaattacttcttaaattttagatcaatgaatgttga

SEQ ID NO: 162085 - DNA, 80 bp, synthetic construct
  source 1..80: mol_type = other DNA
ataagtaccttacagtttagtctacagttcctatacgaagaatatcagaaacacagaaacacttggagcagatcaaatgt

SEQ ID NO: 162086 - DNA, 80 bp, synthetic construct
  source 1..80: mol_type = other DNA
ctgtacgcttgctcaaagacactccatttgttagacaggaccagtatgtcaacacacaagggattgaggatacaatcgaa

SEQ ID NO: 162087 - DNA, 80 bp, synthetic construct
  source 1..80: mol_type = other DNA
tgccccttatcatctgtggctcagggagcacacagaacaattttataactcacatggacgacttccctcccatgggctac

SEQ ID NO: 162088 - DNA, 80 bp, synthetic construct
  source 1..80: mol_type = other DNA
cagcgatgcttggtacacacgtcatttgggattttggattacaatcatcagtcacacttgtggtaccgtggatatcgaac

SEQ ID NO: 162089 - DNA, 80 bp, synthetic construct
  source 1..80: mol_type = other DNA
gagtagaaggtttgccttcgatatggacgtgtataccatgtctgagcattccattaagggcaaactcaatatggctactg

SEQ ID NO: 162090 - DNA, 80 bp, synthetic construct
  source 1..80: mol_type = other DNA
ctcaccatatggcactgtagttactaatgacatgggcacactgtgcatgagaatggttacagatcagcaacagcataagg

SEQ ID NO: 162091 - DNA, 80 bp, synthetic construct
  source 1..80: mol_type = other DNA
aactgactcagtggaaccccgccactgttaaaaaatgcataatcaagggctacatccccttgataatatgcggtaccggt

SEQ ID NO: 162092 - DNA, 80 bp, synthetic construct
  source 1..80: mol_type = other DNA
acaggtaactgtgttctagcctgcgtggcggccagcccagcttctgctgggacgcctttcaagagacatggtgtgaagac

SEQ ID NO: 162093 - DNA, 80 bp, synthetic construct
  source 1..80: mol_type = other DNA
ctaccccctgggcccacttcttcggagccgcgcgctacgccttcggctgcgcgcggcacctcagacccccgctcgtgctg

SEQ ID NO: 162094 - DNA, 80 bp, synthetic construct
  source 1..80: mol_type = other DNA
cccacctcccctccccgactacaaccgctgttgttcttcccaacactcctgtctgaattctccatgttctctctggctgt

SEQ ID NO: 162095 - DNA, 80 bp, synthetic construct
  source 1..80: mol_type = other DNA
tactgcagtaaagtaacaggagacacaaacatagatcacaactgcagatgtgttattagaagcccctacacagtgccaca

SEQ ID NO: 162096 - DNA, 80 bp, synthetic construct
  source 1..80: mol_type = other DNA
atgaccgatgggacggtgaccgccactaacttaactaatggtgagacagcccaccagttcactaaagccaaggtgtcaag

SEQ ID NO: 162097 - DNA, 80 bp, synthetic construct
  source 1..80: mol_type = other DNA
gcagtacagctcaggagaaaattggaattcttcacatacataagatttgatctagagctcacctttgttattacgagcac

SEQ ID NO: 162098 - DNA, 80 bp, synthetic construct
  source 1..80: mol_type = other DNA
aatgatctctacggagactatcaggcccaatacaccagacactgactttatagtatacttcactaacaatccccccatga

SEQ ID NO: 162099 - DNA, 80 bp, synthetic construct
  source 1..80: mol_type = other DNA
agacccgagcaagtttaccagccccgtcttggatgcgctacgagaggtggcacctcccttgaaatccccttcagcagagg

SEQ ID NO: 162100 - DNA, 80 bp, synthetic construct
  source 1..80: mol_type = other DNA
tggagcctgacctgtgaccgtcgcatcatagaccgccagtagacctgggagcagattcaccgccgcggccgtctccttta

SEQ ID NO: 162101 - DNA, 80 bp, synthetic construct
  source 1..80: mol_type = other DNA
cagcagcatttgcaaaaggccgtctgaacgatgaatcttcgcctcctaaaccgcctctatactgcccttatcctgtttct

SEQ ID NO: 162102 - DNA, 80 bp, synthetic construct
  source 1..80: mol_type = other DNA
cagggttcccctatgtaactatgggcataaagaaaaaagacatagtcaataaggtgacaaaggatgtaaccaaactccag

SEQ ID NO: 162103 - DNA, 80 bp, synthetic construct
  source 1..80: mol_type = other DNA
ggcagagcgtcgcccagacagacttccacagtggcgggcgcgctctcggcggtcagtacggtttgccgatcgacctcgcg

SEQ ID NO: 162104 - DNA, 80 bp, synthetic construct
  source 1..80: mol_type = other DNA
ataaccagttatcagcatcaaggaaccattaaccaggacatgcccccaatgactcatcagataatgtacatcccccccgg

SEQ ID NO: 162105 - DNA, 80 bp, synthetic construct
  source 1..80: mol_type = other DNA
aacactaattctgttctatgaccctgtgtttttcagatgccgttggacgtgtcactgagctgattttggacgcagctact

SEQ ID NO: 162106 - DNA, 80 bp, synthetic construct
  source 1..80: mol_type = other DNA
ccccgaaagccacagtgcgacccccctgcccggtagcaacttcctcggggtccggcgctacgccttcggctgcgccggac

SEQ ID NO: 162107 - DNA, 80 bp, synthetic construct
  source 1..80: mol_type = other DNA
attttctttccagttgaacccaggcaatagcaccgtgttacgccgcacgctactgggcgagatactgaattattacgcac

SEQ ID NO: 162108 - DNA, 80 bp, synthetic construct
  source 1..80: mol_type = other DNA
acaacccagtgatgataactggctaaattgtaatggtactttgatggggaatctaccaattttcccacatcaattcatca

SEQ ID NO: 162109 - DNA, 80 bp, synthetic construct
  source 1..80: mol_type = other DNA
atgagtatgttggcgtttgtcagtgcgtgcaatgacttttctgctcgcttactaaaagacacaccttttattacacaaca

SEQ ID NO: 162110 - DNA, 80 bp, synthetic construct
  source 1..80: mol_type = other DNA
acacacagtggattgatgaattcatttaagaatatatatagtacaatgtttagctgaacaaagtattttaaaaaaaaaaa

SEQ ID NO: 162111 - DNA, 80 bp, synthetic construct
  source 1..80: mol_type = other DNA
tctatccacgctattgattatggatgtgacttcctcctctgtactatcaccttcttgcaaagccctcatgcaatgtttaa

SEQ ID NO: 162112 - DNA, 80 bp, synthetic construct
  source 1..80: mol_type = other DNA
tactggcgactttttctgcaaagtcaacatgtggaaacacccattacagtaacgcagggagacacagtctacctaaatgc

SEQ ID NO: 162113 - DNA, 80 bp, synthetic construct
  source 1..80: mol_type = other DNA
gtacgtggcttggaatcagtaaacccccaagtaagcaaggagacaactggttgaagaaattcacagaatgctgcaatgct

SEQ ID NO: 162114 - DNA, 80 bp, synthetic construct
  source 1..80: mol_type = other DNA
aaagaagaggggaccagtaagaccatacaggctgcagtttgtaatgcaggaatgggcgtcggggttggtaacctgactat

SEQ ID NO: 162115 - DNA, 80 bp, synthetic construct
  source 1..80: mol_type = other DNA
tacagctgccctatgctacacccaggcatgatgattcagtataaaaaaaaaatattaatacctagctatcaaacaaaacc

SEQ ID NO: 162116 - DNA, 80 bp, synthetic construct
  source 1..80: mol_type = other DNA
atgtatcagataaactaacaggaaaggtaatcaaatggaccattagattgattagtgccctggcaattatggttagaaac

SEQ ID NO: 162117 - DNA, 80 bp, synthetic construct
  source 1..80: mol_type = other DNA
gtgggactctgcatccccctctttttggcccggtcaagcacgttgtttccccggtcaatctggatatgctttaccaaagg

SEQ ID NO: 162118 - DNA, 80 bp, synthetic construct
  source 1..80: mol_type = other DNA
agaaacaggtggtcagcctccaaccacgacctcgaactctgcagatacaagggtaccaccctaaaactgtacaggcaccc

SEQ ID NO: 162119 - DNA, 80 bp, synthetic construct
  source 1..80: mol_type = other DNA
aattagcatgggagggtcttttagcaccactacatggagcctaaaagcactatatgatgaattccaaaaattccacaaca

SEQ ID NO: 162120 - DNA, 80 bp, synthetic construct
  source 1..80: mol_type = other DNA
aacaccgtagaaacacccgccccgtccccggcgccggtccgcgaaaaaaaacaccgcgggacgccacgcaacggcagtgc

SEQ ID NO: 162121 - DNA, 80 bp, synthetic construct
  source 1..80: mol_type = other DNA
ctcctccggagggtgaccaccagccgccacggcgtggtggtgaggccggtggcgccggagatggccacgcaggagatgga

SEQ ID NO: 162122 - DNA, 80 bp, synthetic construct
  source 1..80: mol_type = other DNA
actactgctaaaatgctttgctttgtttcaggatgcaaggatttctgtttgagaatggcacgtgatacaaacctacactt

SEQ ID NO: 162123 - DNA, 80 bp, synthetic construct
  source 1..80: mol_type = other DNA
ccttatgaggacccatattggggcaatggcgaccgtcactcggactatcaaccactaggaacccaagatcaaagtctgta

SEQ ID NO: 162124 - DNA, 80 bp, synthetic construct
  source 1..80: mol_type = other DNA
tggtgcattggagatagctttcacccaacaactttcccaactaacccgtgtctggacagtgaagaacgcttccctgatca

SEQ ID NO: 162125 - DNA, 80 bp, synthetic construct
  source 1..80: mol_type = other DNA
agatgggcgcgagaggctccgtcttgagagggaaaaaagcagatgaattagaaaaagttaggttacggcccggcggaaag

SEQ ID NO: 162126 - DNA, 80 bp, synthetic construct
  source 1..80: mol_type = other DNA
caaatgtgattagcatagctggtattatatttgtgatttacaaattgttttgcactcttcaaggtccatactctggtgag

SEQ ID NO: 162127 - DNA, 80 bp, synthetic construct
  source 1..80: mol_type = other DNA
tatcaaccacttcttctcccgctctggattagtgggagtagttaacctcacagatggggggacggacactactgggtacg

SEQ ID NO: 162128 - DNA, 80 bp, synthetic construct
  source 1..80: mol_type = other DNA
taagatcagtgaacatcggaagatgtttgaatctgcctgaatacagcgtgctgagaaagcgctggttagacatgttctaa

SEQ ID NO: 162129 - DNA, 80 bp, synthetic construct
  source 1..80: mol_type = other DNA
gtcgtgttggtatcaaacatctctaatactcccaccacaaacacaaggtcaggtgtatttattgtcttttatcagtgcat

SEQ ID NO: 162130 - DNA, 80 bp, synthetic construct
  source 1..80: mol_type = other DNA
gataaagcacattcagctgagatagtactcaaccagttatgcgtgcgtttcttcggcttggatttggactccggactgtt

SEQ ID NO: 162131 - DNA, 80 bp, synthetic construct
  source 1..80: mol_type = other DNA
agtgttgccgctggtcgggcactgtatatacctggatacgaagtacttgagcatgagtggtatgacaaattttaaattct

SEQ ID NO: 162132 - DNA, 80 bp, synthetic construct
  source 1..80: mol_type = other DNA
acactgtcacctttctcaaaagaggatttaggaatgactcaaaataccctttcttggtacatccagtatatccaatggaa

SEQ ID NO: 162133 - DNA, 80 bp, synthetic construct
  source 1..80: mol_type = other DNA
ccatggaagcaacttctgacttcaaacaatcaacatggagtgaggggggtctattgagatccatggatgccgaacttgat

SEQ ID NO: 162134 - DNA, 80 bp, synthetic construct
  source 1..80: mol_type = other DNA
caaccttggagaggcatttggtgctgggttcatagataacatcagagaacaaattcaggtaattaaccccatcaacaaga

SEQ ID NO: 162135 - DNA, 80 bp, synthetic construct
  source 1..80: mol_type = other DNA
accattaccatagctcctctcaactcggaatttgggggattgcggcaagctgtgagtcagggcatcccagctgagctcag

SEQ ID NO: 162136 - DNA, 80 bp, synthetic construct
  source 1..80: mol_type = other DNA
acctcacgaagggtgaaacggcgcacaagtttgaaccaaccaaaaccacaggcggccacacagtgcaatccatagtgtgc

SEQ ID NO: 162137 - DNA, 80 bp, synthetic construct
  source 1..80: mol_type = other DNA
aaagacatagcagacctaggcctctttcaggtgtgggccacctgctgtgaactcagaaacccctggctcagatcaggcac

SEQ ID NO: 162138 - DNA, 80 bp, synthetic construct
  source 1..80: mol_type = other DNA
taaaaccatgtgttaaattaaccccactgtgtgtgacaatgaagtgtaataagacgtggagctcagctagcaaagagacc

SEQ ID NO: 162139 - DNA, 80 bp, synthetic construct
  source 1..80: mol_type = other DNA
gttgctcgatactatgctttgcttctgcgtgtaacgacttttcagtacgattgctacgcgacaccccgtttataagtcaa

SEQ ID NO: 162140 - DNA, 80 bp, synthetic construct
  source 1..80: mol_type = other DNA
aatgcaagagcatgtcctatcgttgtgtcatttaatgtggcataatggtagagatgtgtacaagaaatttgaggagcgga

SEQ ID NO: 162141 - DNA, 80 bp, synthetic construct
  source 1..80: mol_type = other DNA
aagtcgcacagttgaggcgcaaattggaaatgttcacctacctacggttcgacatggagatcaccgtagtcattaccagt

SEQ ID NO: 162142 - DNA, 80 bp, synthetic construct
  source 1..80: mol_type = other DNA
aaccaaagcatgtgaaggcgtggatcccacgaccaccacggctatgtccgtacatcaacgcaggcgatgtgaatttcaaa

SEQ ID NO: 162143 - DNA, 80 bp, synthetic construct
  source 1..80: mol_type = other DNA
caaaccaaatgcagtacatctacaaagcttaagaaaatactactttaaatgggaaacatggcaatcagtagctacttcac

SEQ ID NO: 162144 - DNA, 80 bp, synthetic construct
  source 1..80: mol_type = other DNA
ggttgcgccggggacggggggtgtgcgtggacggggagtgtacgagcccagggaggttagcggggacggagggtgtgcgg

SEQ ID NO: 162145 - DNA, 80 bp, synthetic construct
  source 1..80: mol_type = other DNA
aattctcaagacttcaaaaagaactgagccagtaggcatattgtttcatggagaaccgggtactggaaaatcaatcacca

SEQ ID NO: 162146 - DNA, 80 bp, synthetic construct
  source 1..80: mol_type = other DNA
gttagaggggatatagccacggccaccgagagtgtcatagtgaacgcagccaatagcaaaggacaaccaggaggtggagt

SEQ ID NO: 162147 - DNA, 80 bp, synthetic construct
  source 1..80: mol_type = other DNA
ggaaaagaggaagtccctaggggaaacgacagacgaagtacggcacaacccgcgtcgaggacacacgcagaggcgatcgc

SEQ ID NO: 162148 - DNA, 80 bp, synthetic construct
  source 1..80: mol_type = other DNA
accccttcagaagggccaacaatgatgtcaccataatccagtacatggatgacatccttgtggcaagcgatagaagtgat

SEQ ID NO: 162149 - DNA, 80 bp, synthetic construct
  source 1..80: mol_type = other DNA
ggccccataacatatgccgatgatgtctttcaggacagtcagctcaaagaagctcttggccaaccagcggaggtccacgc

SEQ ID NO: 162150 - DNA, 80 bp, synthetic construct
  source 1..80: mol_type = other DNA
aattgaataatctattagagggaaacgatagtgataacgatctatcactcgaagatttctgattagttaccaatcttcac

SEQ ID NO: 162151 - DNA, 80 bp, synthetic construct
  source 1..80: mol_type = other DNA
cttatgctgttctcaatctctgcactggcaacatgtgcactctcgatgttccttacatcggtcccacccctacttcttcc

SEQ ID NO: 162152 - DNA, 80 bp, synthetic construct
  source 1..80: mol_type = other DNA
ttgaatatcaagcctattaatacacccacaaagacaaaactacttcccagtgtattttacaatgttttccccgggtctaa

SEQ ID NO: 162153 - DNA, 80 bp, synthetic construct
  source 1..80: mol_type = other DNA
agatcatacttcagtgaaacccaaggtcagataacatcaaaaaagaaagtccaggaatgtgggtatcccaccatacacgc

SEQ ID NO: 162154 - DNA, 80 bp, synthetic construct
  source 1..80: mol_type = other DNA
gactggtgggggtaaatttgttataaccagaatagcaaaaaaaagaaagggaaatctcgcctgatagaggctagcagcct

SEQ ID NO: 162155 - DNA, 80 bp, synthetic construct
  source 1..80: mol_type = other DNA
ggcgcgctgcttgtcttggccatggctgaggggctgggtgatatcacccctgcagactcctccacttggttcaacttccc

SEQ ID NO: 162156 - DNA, 80 bp, synthetic construct
  source 1..80: mol_type = other DNA
acgctcaggtttggtgggtgttgtcaatctaactgacggaggcaccgatacaacgggatatgcagtgtgggacattgaca

SEQ ID NO: 162157 - DNA, 80 bp, synthetic construct
  source 1..80: mol_type = other DNA
gcttctaataactgctttctaaaagtgagcagtctatggggagaccacgtatacgacaaacagaaattaatagacgcgtg

SEQ ID NO: 162158 - DNA, 80 bp, synthetic construct
  source 1..80: mol_type = other DNA
ggatgccaaattgcagggagatgacagggagatagccaccgttgctgacacattgcctagtacctcaagaaacacggaac

SEQ ID NO: 162159 - DNA, 80 bp, synthetic construct
  source 1..80: mol_type = other DNA
gcaaaccagacaagaaaggcagccaaagaagttgtagactggttcagtagtaagattaaatcaatgttaagttttgtgga

SEQ ID NO: 162160 - DNA, 80 bp, synthetic construct
  source 1..80: mol_type = other DNA
caacccacaaagtcagggagtagtagaagcaatgaatcatcatctgaaaaatcaaatagataggatcagagatcaggcag

SEQ ID NO: 162161 - DNA, 80 bp, synthetic construct
  source 1..80: mol_type = other DNA
caggcaatacatcagtacactacaactttgccacatacaagccaaagtatgatcacctaacaaaactaagagaatactac

SEQ ID NO: 162162 - DNA, 80 bp, synthetic construct
  source 1..80: mol_type = other DNA
gcaggggctgtagaatttggagttgtagcctagacgttcgcgatgtcgggtgttgtagagtacgtcgctcagacagccgg

SEQ ID NO: 162163 - DNA, 80 bp, synthetic construct
  source 1..80: mol_type = other DNA
actgcacttacaatcccctaaatgaccacgcaaaaggtaacagaatgtggttccagtatttaacaaaaccagacaccaca

SEQ ID NO: 162164 - DNA, 80 bp, synthetic construct
  source 1..80: mol_type = other DNA
ctgctatagagaagtacctaaaggatcaggcacagctaaattcatggggatgtgcgtttagacaagtctgccacactact

SEQ ID NO: 162165 - DNA, 80 bp, synthetic construct
  source 1..80: mol_type = other DNA
aaagaacctaatggcacaaagtggtacaattggcaatatacatacaacaaagtaatgaaacccatttactatgcagcttc

SEQ ID NO: 162166 - DNA, 80 bp, synthetic construct
  source 1..80: mol_type = other DNA
aacaactagcgcaggttatccatataccactttaggaattaagaagagggatatattcaacaagcagtcaaaggatgtag

SEQ ID NO: 162167 - DNA, 80 bp, synthetic construct
  source 1..80: mol_type = other DNA
atggtctgagagctatagtccatcctcacctgaggaacacacgcggcatatttcttggggtctccccacctcgtagacaa

SEQ ID NO: 162168 - DNA, 80 bp, synthetic construct
  source 1..80: mol_type = other DNA
gggcaacccgggtgtggtaaatccttactaacaacagttttggctagaggtctgactactgaagcagagatttattcact

SEQ ID NO: 162169 - DNA, 80 bp, synthetic construct
  source 1..80: mol_type = other DNA
cctctcacgtggctagtcacgtgactgctacgtcatcgccgccattttacatcacaaaatggccgacttccttcctcttt

SEQ ID NO: 162170 - DNA, 80 bp, synthetic construct
  source 1..80: mol_type = other DNA
gaggatagtttgaggcttttgacacccatacctgagagagatctagcaatagttgatgcaagagcccatggttcagaaac

SEQ ID NO: 162171 - DNA, 80 bp, synthetic construct
  source 1..80: mol_type = other DNA
ggactttgtacttaccaccatatgagtacttagaaagaagatggatagacaaattcatataattaaatatggtattcaag

SEQ ID NO: 162172 - DNA, 80 bp, synthetic construct
  source 1..80: mol_type = other DNA
ttatagcaaccactaacaaatcagacttttcaagcactgtcctgcaagattctggtgcattgaagagaaggtttccctat

SEQ ID NO: 162173 - DNA, 80 bp, synthetic construct
  source 1..80: mol_type = other DNA
atgtggtatatttgacctacctctatgggcagccttctttggatatgcagagttctgctccaaaagcacaggagacacag

SEQ ID NO: 162174 - DNA, 80 bp, synthetic construct
  source 1..80: mol_type = other DNA
ttaatgatgaagcagcagattgggacacacagcacccaaaccaaggcccaccaccagcagggcaacttagagagccaaga

SEQ ID NO: 162175 - DNA, 80 bp, synthetic construct
  source 1..80: mol_type = other DNA
ttatgctcccccccccacttgtaacttagaagttttaaactcaaagaccaataggcggtgattatccaaatcatcaacgg

SEQ ID NO: 162176 - DNA, 80 bp, synthetic construct
  source 1..80: mol_type = other DNA
ttaaaagcatctacatttgactgggaaaactacagcaacccaactaattactctaaatgctaccaacaatacacacagca

SEQ ID NO: 162177 - DNA, 80 bp, synthetic construct
  source 1..80: mol_type = other DNA
gcttaataaaacataacacctgtgtggtgacaacagagaatggaaagtttacaggattgggtgtgtatgataatgttatg

SEQ ID NO: 162178 - DNA, 80 bp, synthetic construct
  source 1..80: mol_type = other DNA
tcgcatttagtttgactgtccgtctgggtgatgatgaggctttggcctacgacggtggtggagacagggtaggagatacc

SEQ ID NO: 162179 - DNA, 80 bp, synthetic construct
  source 1..80: mol_type = other DNA
cacactggaagcacaaacttagtaccaaaagaaggtgatattaaaactcatattagatatagaaatactgtcacagacct

SEQ ID NO: 162180 - DNA, 80 bp, synthetic construct
  source 1..80: mol_type = other DNA
gttggattatgattcaggcgcgactccaaatgtgcctattacagtcaccattgccccaatgtgctgcgagttcaacgggc

SEQ ID NO: 162181 - DNA, 80 bp, synthetic construct
  source 1..80: mol_type = other DNA
ctttaaaactcttattagcatatacaccaccagggattgctaaacccaccactaggaaacaagctatgttaggaacacac

SEQ ID NO: 162182 - DNA, 80 bp, synthetic construct
  source 1..80: mol_type = other DNA
ctactagtcaagttgacccatcagacctaatagaaactagacatgttattaataaccgcctcagatctgagtgcacaata

SEQ ID NO: 162183 - DNA, 80 bp, synthetic construct
  source 1..80: mol_type = other DNA
atgcaagaaaattccactatacaaggaacaagttaaggcctttgctactgcatcagaagaagcacaagatgaactactag

SEQ ID NO: 162184 - DNA, 80 bp, synthetic construct
  source 1..80: mol_type = other DNA
acctcaaacaaacaagctttagaagagtggctgtacaacacaggcagtctatatcacacgtttcacactagtgagtactt

SEQ ID NO: 162185 - DNA, 80 bp, synthetic construct
  source 1..80: mol_type = other DNA
aacatggtcacagctgctgctcactatgcagcacaattagctactctagatatcaacccagagcctatcagtttagaaga

SEQ ID NO: 162186 - DNA, 80 bp, synthetic construct
  source 1..80: mol_type = other DNA
gtgttttgattcatggaacacctgggtcaggtaagtctttgacaacctcaattgtaggccgtgcactagctgaacacctt

SEQ ID NO: 162187 - DNA, 80 bp, synthetic construct
  source 1..80: mol_type = other DNA
ggggttggggtagtcactgctggggtgaggctggtggcatttgtggttggagtagtcactgctgaggtggtgctggtcat

SEQ ID NO: 162188 - DNA, 80 bp, synthetic construct
  source 1..80: mol_type = other DNA
aaactggcaggagcagggagtcacgtaggcactagcctcttcatgtgaggtaagagatcgctaaaaatgggatcagggta

SEQ ID NO: 162189 - DNA, 80 bp, synthetic construct
  source 1..80: mol_type = other DNA
aagtacctatgactgggaaaattatagcacagaagtcaactataaaaacacaaaatcaaaatgggacgaagccaaacaac

SEQ ID NO: 162190 - DNA, 80 bp, synthetic construct
  source 1..80: mol_type = other DNA
atctagaaggactggatctcaccactagtgctggattcccctatgttaccaagggtatcaagaaaagagacatactgaac

SEQ ID NO: 162191 - DNA, 80 bp, synthetic construct
  source 1..80: mol_type = other DNA
aaatgttaacaaaatggaagcatacccaataccattgcaggcttcaaagccaaacgcttcggagtccatcttctccattt

SEQ ID NO: 162192 - DNA, 80 bp, synthetic construct
  source 1..80: mol_type = other DNA
atagtcccattcaatggacgtgtaccggatgtttaggagaggcagggaggcgatgatctggcatgtgtgccgcaggtgtg

SEQ ID NO: 162193 - DNA, 80 bp, synthetic construct
  source 1..80: mol_type = other DNA
cccgtgaacaacacagtggattcagtgcacaacatggatgtatacaaaataccagttagtggcggaaaccagctgtccac

SEQ ID NO: 162194 - DNA, 80 bp, synthetic construct
  source 1..80: mol_type = other DNA
agatcttgtagagcaagatggcctattcaacaagggagatactgttagccctgtgtatacgggacagtcgtgtgcatgga

SEQ ID NO: 162195 - DNA, 80 bp, synthetic construct
  source 1..80: mol_type = other DNA
gacggaaacgcatacatacctgtaagatacagattccactggtatctgtgtatgttccaccaacaaaactttatggaaga

SEQ ID NO: 162196 - DNA, 80 bp, synthetic construct
  source 1..80: mol_type = other DNA
atcagggtgacaggacattaaaagtaggaaaatttgccaaggtaaagaatactcatacaaatggagttcgcctgctagca

SEQ ID NO: 162197 - DNA, 80 bp, synthetic construct
  source 1..80: mol_type = other DNA
taggcttctctgtactcaacaactcctactacaccaaccttagtaaccttccacaacaccaaaccgaaagaaaaaacatt

SEQ ID NO: 162198 - DNA, 80 bp, synthetic construct
  source 1..80: mol_type = other DNA
ctttgatattgccatacatgaattgtgtgcctatggactcgatgctgagacacaacaactggtcattgttaataatccct

SEQ ID NO: 162199 - DNA, 80 bp, synthetic construct
  source 1..80: mol_type = other DNA
tcacgatgtctacacggatgcaggaaacatcacctgttggtaccagaccagcatcgtgattccaccagatgtgccgacta

SEQ ID NO: 162200 - DNA, 80 bp, synthetic construct
  source 1..80: mol_type = other DNA
acttctgtgaagcccagggtgcaatcttaacaacccaacatgtcagtgaagtgggtatcaaccctattaacacaccaaat

SEQ ID NO: 162201 - DNA, 80 bp, synthetic construct
  source 1..80: mol_type = other DNA
tatcttccaccttactcagtcctgtaccgcgcctggattgataagttcatttaattagtaaacttaaatgcatatagaat

SEQ ID NO: 162202 - DNA, 80 bp, synthetic construct
  source 1..80: mol_type = other DNA
gcccgatcccgcctccggtaggcgatttgcatctgtttggtaaaaagctcataagtctgtatgtgacctatatatatatt

SEQ ID NO: 162203 - DNA, 80 bp, synthetic construct
  source 1..80: mol_type = other DNA
gggccgcgcgctgcgcgcgcggcccccggtggaggcacagcctcccccgcccgcgcgcatgcgcgcgggtccgcccgcct

SEQ ID NO: 162204 - DNA, 80 bp, synthetic construct
  source 1..80: mol_type = other DNA
tcctgcgatgagcttttggtgtccccctgctcacgatgtacgcgggcgcgaacatcagtggtatgaggcttgctaccgta

SEQ ID NO: 162205 - DNA, 80 bp, synthetic construct
  source 1..80: mol_type = other DNA
agacacgccccaggaagtgtacgtagtagtatctgattggcctgtttgaaagagagagcgcgagcgaagcgagcgatcga

SEQ ID NO: 162206 - DNA, 80 bp, synthetic construct
  source 1..80: mol_type = other DNA
aaaacccactatgagaccaacttatttaaacaaactgccctgtacaacacttttcaaacaatagctcagctaaaagaaac

SEQ ID NO: 162207 - DNA, 80 bp, synthetic construct
  source 1..80: mol_type = other DNA
ggttagttgagtccatggtgggtttacaaatagacaccgtgaaaaacaccttaccaagtgggccagtacactcgcaacaa

SEQ ID NO: 162208 - DNA, 80 bp, synthetic construct
  source 1..80: mol_type = other DNA
ccgcttcgaggtcccagccctggctgccgaaggaagctcaaatacacgccgatcagagttgccatggcaaacctcagaag

SEQ ID NO: 162209 - DNA, 80 bp, synthetic construct
  source 1..80: mol_type = other DNA
ataagtaactgcacttccgaatggctgagtttttcacgcccgtccgcagcggtggagcagcgcagcagcgacccccgcgt

SEQ ID NO: 162210 - DNA, 80 bp, synthetic construct
  source 1..80: mol_type = other DNA
cagtcttaaattattgattgcatatacaccaccaggagttgcaaagccgaccacaagaaccatggcaatgttggggaccc

SEQ ID NO: 162211 - DNA, 80 bp, synthetic construct
  source 1..80: mol_type = other DNA
aacaaaaagccagacaccacaaatgccaaagacctctttacaacatggaggatcacttacctgcaaacttatcaactgag

SEQ ID NO: 162212 - DNA, 80 bp, synthetic construct
  source 1..80: mol_type = other DNA
tcgtgatcctgccattgtctaaactggactacagcccagatgccaataccaaattgcccattacggtcactatagcaccc

SEQ ID NO: 162213 - DNA, 80 bp, synthetic construct
  source 1..80: mol_type = other DNA
gaaatcgtgatgaggaggggcaggttgttggtcaagggatgcttaacgaaaacggtaggctgggcggtctcgtaaaaagc

SEQ ID NO: 162214 - DNA, 80 bp, synthetic construct
  source 1..80: mol_type = other DNA
tggagagggacgagtacacaactgctggctacatttcgtgttggtaccaaaccaacataatagtccccccggatacaccg

SEQ ID NO: 162215 - DNA, 80 bp, synthetic construct
  source 1..80: mol_type = other DNA
ggcagtgcgcaggcagcgtcggacacaacacgccgcaaacgcggcgcggcgcgctcacgcacctcaacactccctgagcc

SEQ ID NO: 162216 - DNA, 80 bp, synthetic construct
  source 1..80: mol_type = other DNA
cgcttcagacacacctagtactagtggagtgaacagtcaagaggtcccggcgttaacagctgttgaaaccggagcctcgg

SEQ ID NO: 162217 - DNA, 80 bp, synthetic construct
  source 1..80: mol_type = other DNA
aaagcacaagagacgcttagtactgactcaatggcaacccgcctttataagacgctgctatatagtgggcttcctgcccc

SEQ ID NO: 162218 - DNA, 80 bp, synthetic construct
  source 1..80: mol_type = other DNA
cactgggcggccgcacctagggagcgcgagccccgtgccgggcatgggccgcggcggtggaaaattaccgctccgcccac

SEQ ID NO: 162219 - DNA, 80 bp, synthetic construct
  source 1..80: mol_type = other DNA
tcttcaacagaaattatacacaaactgcacatactttgaaacaacacaagtaatagcccaactatctccacactttcagc

SEQ ID NO: 162220 - DNA, 80 bp, synthetic construct
  source 1..80: mol_type = other DNA
atgggttgtgctgacataactagagtggtgaacgccgcagcgttatctggaggggagctagctaaggaattcaaggaagc

SEQ ID NO: 162221 - DNA, 80 bp, synthetic construct
  source 1..80: mol_type = other DNA
cacagaacctaagctatttgtaccagaaaaaccccaagaaggctttgtattctatgactccctatttggacagggaaaaa

SEQ ID NO: 162222 - DNA, 80 bp, synthetic construct
  source 1..80: mol_type = other DNA
cccttcgacgtacacttcctgacgcgccaccggcgagatgccgcataggcgacggaggagctccagcagctgcgcgcaga

SEQ ID NO: 162223 - DNA, 80 bp, synthetic construct
  source 1..80: mol_type = other DNA
agcctggcgatgacaatgtatttaagagaactttgttgggggaaatactaaactactttgccaattggtctgggagtatt

SEQ ID NO: 162224 - DNA, 80 bp, synthetic construct
  source 1..80: mol_type = other DNA
cgggtcgtagacgatggcctgttcctggtaggtatgtccggctattctcgcaatgttgctctcgaggggcacaaagtcca

SEQ ID NO: 162225 - DNA, 80 bp, synthetic construct
  source 1..80: mol_type = other DNA
tgaacaaatggagctacccaaacacacaactagacctcgccagatacaaggggtgcaccttctacttctacagagactta

SEQ ID NO: 162226 - DNA, 80 bp, synthetic construct
  source 1..80: mol_type = other DNA
tgagctacgtttccgggaagacatcttatgaagccagacaataaactgtaacattctgtaagactcggcgttcaaaggaa

SEQ ID NO: 162227 - DNA, 80 bp, synthetic construct
  source 1..80: mol_type = other DNA
tgttgatgcccaagacggcttcctcgttgcagaagtgggcacgccagcaaggctcaggcggcgttaaggtgacactcaat

SEQ ID NO: 162228 - DNA, 80 bp, synthetic construct
  source 1..80: mol_type = other DNA
aaaccaaagcacatccgatgttggtgcccacgcccacctcgagctgtaccctacagaggggaaggagtggatatcaagac

SEQ ID NO: 162229 - DNA, 80 bp, synthetic construct
  source 1..80: mol_type = other DNA
acaagtggactaggacaaaaatggatattgctgagggaccaggttccatgaatatggcaaatgtgctcagtaccactggg

SEQ ID NO: 162230 - DNA, 80 bp, synthetic construct
  source 1..80: mol_type = other DNA
gggatggtggaagcgaaggcgcaagtggtggtggagacgccggtggacccgtggccgagttcgcttccaccatccacgga

SEQ ID NO: 162231 - DNA, 80 bp, synthetic construct
  source 1..80: mol_type = other DNA
gtgtcgctcagcactaccccactgtatatccggtcgatgagtcaccgtattcacaaagggctaccgtggcggtggctgcg

SEQ ID NO: 162232 - DNA, 80 bp, synthetic construct
  source 1..80: mol_type = other DNA
gagaacatactaataaaaaacatgattacataccatgaaaaactaagagagtttccaaattcataccaaggaaacaaggc

SEQ ID NO: 162233 - DNA, 80 bp, synthetic construct
  source 1..80: mol_type = other DNA
gcgtcgggggggtcgggagctttattaaacggactccgaagtgctcttggacactgaggtggtgaacagcaacgaaagtg

SEQ ID NO: 162234 - DNA, 80 bp, synthetic construct
  source 1..80: mol_type = other DNA
tgactgtgagtactgctgttgctgctgttgctggccgtcatcaaagtcgtacccgtccccgacatcgcctcccgtccacg

SEQ ID NO: 162235 - DNA, 80 bp, synthetic construct
  source 1..80: mol_type = other DNA
gctcaagtttccgcgcagaataacggtactcatgaaaattccaatagtgcgagtggtggatcaactatcaattacaccac

SEQ ID NO: 162236 - DNA, 80 bp, synthetic construct
  source 1..80: mol_type = other DNA
cgtgttgcggggacgggtgttgcggggacgagatgttgcgtggacgggggcgggaacaggggggggttgcggcaaggacg

SEQ ID NO: 162237 - DNA, 80 bp, synthetic construct
  source 1..80: mol_type = other DNA
ccgtagagaatttcctatgcagggcggcatgtgtatacatagtgagttacaaaacgcaggacaatgaacaaacagaaaaa

SEQ ID NO: 162238 - DNA, 80 bp, synthetic construct
  source 1..80: mol_type = other DNA
agccggttacgagggatttgggtgcgacggggaaactttaatggagctcaaggataacctgacactatggacgggcccca

SEQ ID NO: 162239 - DNA, 80 bp, synthetic construct
  source 1..80: mol_type = other DNA
gcactaatcactccattctgaatcctccaactattacttctaccactgctatgaatagaaggttttaccttgacttggat

SEQ ID NO: 162240 - DNA, 80 bp, synthetic construct
  source 1..80: mol_type = other DNA
attataaagttaaaggtaaacaagaagagacagcaatcaaatacagaagagacatcaaagttgtcaagaatgtaggtcct

SEQ ID NO: 162241 - DNA, 80 bp, synthetic construct
  source 1..80: mol_type = other DNA
tatatcagccaccaatgacatgggcaccttatgttttcgtgccctagaggacacagctaaacaggatgttaaagtcttta

SEQ ID NO: 162242 - DNA, 80 bp, synthetic construct
  source 1..80: mol_type = other DNA
taaatcctataaacacacccagcacctccaaattaagacctagtgtcttctttgatgtcttcccaggagctaaggaacct

SEQ ID NO: 162243 - DNA, 80 bp, synthetic construct
  source 1..80: mol_type = other DNA
ttacgcccagtaatagtacaaggacctaatactgagttcgctttatctttactcagaaaaaatatagtaactgtaacaac

SEQ ID NO: 162244 - DNA, 80 bp, synthetic construct
  source 1..80: mol_type = other DNA
atgacacaggaacaagcgccacaggatttgttaattgggacatagacatcatggggtacgcacaattgcgtagaaaatta

SEQ ID NO: 162245 - DNA, 80 bp, synthetic construct
  source 1..80: mol_type = other DNA
cccgagggcgaggcccagccccctcccgcccaagctgctttgattcctgggatatttttgggaatggtgttaactttctc

SEQ ID NO: 162246 - DNA, 80 bp, synthetic construct
  source 1..80: mol_type = other DNA
atgccctacagttatcgcaaccgcagcgaccagctctccccccagctgagcaatcggtacctaacaccaaccagagcact

SEQ ID NO: 162247 - DNA, 80 bp, synthetic construct
  source 1..80: mol_type = other DNA
aactacacgtgatgttaccaaactacaaaagatgatagacaaatttggtctggatctcccatatgttacatacttaaaag

SEQ ID NO: 162248 - DNA, 80 bp, synthetic construct
  source 1..80: mol_type = other DNA
cttgctattccacaatgtcgtcttacaccattgagtcgtctcccctttggaatggcccctggacccggcccacaacctgg

SEQ ID NO: 162249 - DNA, 80 bp, synthetic construct
  source 1..80: mol_type = other DNA
tgaaaaatttgaacagtaccaaaaaggggtagatttgattcaaaaattgagaactgttcactcaatggcacaggttgatt

SEQ ID NO: 162250 - DNA, 80 bp, synthetic construct
  source 1..80: mol_type = other DNA
tcagcattaactgaaggtttggaggatgacttggtagaagttattgttgacaaaactcagcaagcactagcttcgatcaa

SEQ ID NO: 162251 - DNA, 80 bp, synthetic construct
  source 1..80: mol_type = other DNA
agggatggattgtaaacgtgtccagtcaagtccagttggagcgcaacatcaatagagcaatgattattcttcaagcagtg

SEQ ID NO: 162252 - DNA, 80 bp, synthetic construct
  source 1..80: mol_type = other DNA
atgtcattaataacaggcttagatcagaatgcactgtggaagctttcttcggtagatctgcatgtgtcgccattcttggt

SEQ ID NO: 162253 - DNA, 80 bp, synthetic construct
  source 1..80: mol_type = other DNA
aaacaaatacccaaagctcaaaccacaaaagcaaatgaagtactcactaccaagcccaaagaaacgccaaccatcccccc

SEQ ID NO: 162254 - DNA, 80 bp, synthetic construct
  source 1..80: mol_type = other DNA
ggagagatatcaaacaaatcagtaattatggaccttcggacatgtatgtccatatggatgatctaatatacagaaatctc

SEQ ID NO: 162255 - DNA, 80 bp, synthetic construct
  source 1..80: mol_type = other DNA
acaagacgtgaagatggtggcctggtgggtagggatagaacaaaccttcggggtaccctataacccacaaagtcagggag

SEQ ID NO: 162256 - DNA, 80 bp, synthetic construct
  source 1..80: mol_type = other DNA
gtagtattcaacacatttaaaacagaagaacacataaaagacccaggaatagtaccatctaccagtgaaagtgccccaac

SEQ ID NO: 162257 - DNA, 80 bp, synthetic construct
  source 1..80: mol_type = other DNA
attcaacagatccctatccgcaaacaccggggacagccagccaacgaagaaacagaagacgaaggtggagacgaaggggt

SEQ ID NO: 162258 - DNA, 80 bp, synthetic construct
  source 1..80: mol_type = other DNA
cttccatgtctacagcacttacaagcttgatacctactacacaactgtcatctactttagaaaccaccggaatgtctacc

SEQ ID NO: 162259 - DNA, 80 bp, synthetic construct
  source 1..80: mol_type = other DNA
atggcctcctcggcttgcacacccgtttcgcacacccagcctcgggccgccaaccacagccgttcgaggatgacgtacgc

SEQ ID NO: 162260 - DNA, 80 bp, synthetic construct
  source 1..80: mol_type = other DNA
ggccccccagatataacctgtcctctcctcccttctaccccaggtgcccttcaaaattccatgtaaaatttagcctgggc

SEQ ID NO: 162261 - DNA, 80 bp, synthetic construct
  source 1..80: mol_type = other DNA
gatactgttcactttcgtatcacttttggtaatctattttcaaaattccaccagaatccaggtatagtgacaggttcagc

SEQ ID NO: 162262 - DNA, 80 bp, synthetic construct
  source 1..80: mol_type = other DNA
gtccagcatccgataaaaggctacagtataccatgttaggggagatacttaactattacactcactggactggttcgctg

SEQ ID NO: 162263 - DNA, 80 bp, synthetic construct
  source 1..80: mol_type = other DNA
aatccagttgaaaagtacacagaagccatccttaatgaagttcttgttgtacccaatattagtgctagtaatggacacac

SEQ ID NO: 162264 - DNA, 80 bp, synthetic construct
  source 1..80: mol_type = other DNA
ccaaaaatttgtagccaaaaagggctgtgaatcctaccttgaatagtcaggtagaagtgtgggagatgggcgcgagaagc

SEQ ID NO: 162265 - DNA, 80 bp, synthetic construct
  source 1..80: mol_type = other DNA
taaaaaaaacggccctgcggcggcgcgcgcggacaaagtaccggagacgccgctggaaacccagaaggcggcccgcgtgg

SEQ ID NO: 162266 - DNA, 80 bp, synthetic construct
  source 1..80: mol_type = other DNA
tggagtctactgcacggctactcagagtacctagagacacagatacaatatggaaatatggacctagagggcaaggtact

SEQ ID NO: 162267 - DNA, 80 bp, synthetic construct
  source 1..80: mol_type = other DNA
aatatgcctcctacagcttgcgacaaattggctaaaaaacttttttccaaagtcaaggatgagtttgagtggcatgtccc

SEQ ID NO: 162268 - DNA, 80 bp, synthetic construct
  source 1..80: mol_type = other DNA
gacatctgtgaccttacactgttaaacctcaatgtggtgcaagctgacttgcggtttccgttctgctcaccacaaactga

SEQ ID NO: 162269 - DNA, 80 bp, synthetic construct
  source 1..80: mol_type = other DNA
tactgaagccaaaagggcttgttatcctacctttagacaggtagaagattgtgggagatgggcgcgagaaactccgtctt

SEQ ID NO: 162270 - DNA, 80 bp, synthetic construct
  source 1..80: mol_type = other DNA
tttaacagaccctttaggattggttcaaacctggattgttgtggaaaacacttagtacctgctgatttggtagtagtgca

SEQ ID NO: 162271 - DNA, 80 bp, synthetic construct
  source 1..80: mol_type = other DNA
ctcgaatcatcatttttactcctcaatgaagcattgaatatttacgatggtaatagaatgccttccagtttttttgaacc

SEQ ID NO: 162272 - DNA, 80 bp, synthetic construct
  source 1..80: mol_type = other DNA
acatctactacaagtttctagataataagcctaaacagagttcagaccctaatgacgaaaacagaataaaattctggcac

SEQ ID NO: 162273 - DNA, 80 bp, synthetic construct
  source 1..80: mol_type = other DNA
aggaaaaaaaactgtaaaaataagactagcacccccaacactatttgtagataagtggtactttcaaaaggacatatgtg

SEQ ID NO: 162274 - DNA, 80 bp, synthetic construct
  source 1..80: mol_type = other DNA
caaaacagttggagcaaaaaaagtgacgtatggactggagcagaatcatatccacaacatactactcaaatgtacaaaat

SEQ ID NO: 162275 - DNA, 80 bp, synthetic construct
  source 1..80: mol_type = other DNA
ggcacaatgtggattggattaaatatgaagaaccctattcttcatacaagatgtgcgaattaggcaactaccatcagact

SEQ ID NO: 162276 - DNA, 80 bp, synthetic construct
  source 1..80: mol_type = other DNA
actttttattaaaaaaaggggaacacaagtcccgacacgtaccgtggcaccttggaggaagggccctcgtcaggattatc

SEQ ID NO: 162277 - DNA, 80 bp, synthetic construct
  source 1..80: mol_type = other DNA
gccgcctccagatggccgaggccgaagctgcgcctggaaaaggaggccgcccggagtaggtagtaggcgtggtggcggag

SEQ ID NO: 162278 - DNA, 80 bp, synthetic construct
  source 1..80: mol_type = other DNA
tcaccgtggaagtttttaaagactaaactgtgtgattggttaggcgttcaaaagcccccttctaagcaaggagatagctg

SEQ ID NO: 162279 - DNA, 80 bp, synthetic construct
  source 1..80: mol_type = other DNA
ccctatgagatatgaagatgaatctaggaacaccgaaaacaccatcggaagtagcatcatagaaaccatgcagaaagcta

SEQ ID NO: 162280 - DNA, 80 bp, synthetic construct
  source 1..80: mol_type = other DNA
gtaccggcggacttagtacaaactagacatgtcatacaaacacgcagtagaagcgagtccacagtcgaatcattctttgc

SEQ ID NO: 162281 - DNA, 80 bp, synthetic construct
  source 1..80: mol_type = other DNA
cagacttcataagcgtgtatgatatcagcgccccttataagctagacaaatacagcagtcccagctaccacccgggaaag

SEQ ID NO: 162282 - DNA, 80 bp, synthetic construct
  source 1..80: mol_type = other DNA
ttacctgaattgcctatcattacagtggtttcaccgttcttaccgcaatccagcccgcgcagaaaacccatcatgtcaaa

SEQ ID NO: 162283 - DNA, 80 bp, synthetic construct
  source 1..80: mol_type = other DNA
tattcaaatcacaatatgtacctggtgaaactactgaagtagcaagggaattttgccccattgattacttgttcgggtca

SEQ ID NO: 162284 - DNA, 80 bp, synthetic construct
  source 1..80: mol_type = other DNA
cctccagagaacactaggcccctaccaggacgtagagaccgtgggcatagtctgcttcataagcccctacaccgacccgc

SEQ ID NO: 162285 - DNA, 80 bp, synthetic construct
  source 1..80: mol_type = other DNA
aagctcgcccgtacacgctacagtacatgtatgtgcctcccggtgctcctaagcctactggtagggacgcatttcagtgg

SEQ ID NO: 162286 - DNA, 80 bp, synthetic construct
  source 1..80: mol_type = other DNA
aaccattggacttaacaactagtgctggttttccctacgtctcaatgggtgtaaagaagaaagacttaataaataaaacc

SEQ ID NO: 162287 - DNA, 80 bp, synthetic construct
  source 1..80: mol_type = other DNA
tgaatagagcaatgacaatcctgcaagccgtaaccacttttgcagcagttgctggggtggtgtacgtgatgtacaaactg

SEQ ID NO: 162288 - DNA, 80 bp, synthetic construct
  source 1..80: mol_type = other DNA
ttcacttgccgatgcggcaagtgcaaataaaactaatatccacagcatgttcgttactatataattgatatacgaacccg

SEQ ID NO: 162289 - DNA, 80 bp, synthetic construct
  source 1..80: mol_type = other DNA
gtatggcacccacgcgcacaaaaaattgcgtcgcggttactacgcctacgatttggccatgtcgtttcgcgtcggcactc

SEQ ID NO: 162290 - DNA, 80 bp, synthetic construct
  source 1..80: mol_type = other DNA
aatgaggtcacatcggaggcggggaaagttcaaactgcagtttgcaatgcaggtatgggtgttgcagtgggaaatctcac

SEQ ID NO: 162291 - DNA, 80 bp, synthetic construct
  source 1..80: mol_type = other DNA
tccccatcacgatcacagtcgcacccatggatgccgagtacaatgggctgcgacttgcggggcaccaaggactgccaacc

SEQ ID NO: 162292 - DNA, 80 bp, synthetic construct
  source 1..80: mol_type = other DNA
tgcgcctggcgcgggttctttaaccaggtcctcctctggactgtggccctctgcaagtttcgcagatgcatttactataa

SEQ ID NO: 162293 - DNA, 80 bp, synthetic construct
  source 1..80: mol_type = other DNA
cccgtctgtatactgctgcacggacaacctggatgtggcaagtcactggcctctaaggtaatagcaaggggcttatcatc

SEQ ID NO: 162294 - DNA, 80 bp, synthetic construct
  source 1..80: mol_type = other DNA
cagtaccgtgtaaactttaaacttggatttcaataaagctaggccgtgggactttcacttgtcggtgtctgcttataaaa

SEQ ID NO: 162295 - DNA, 80 bp, synthetic construct
  source 1..80: mol_type = other DNA
tgttatggatagactggctaagcaaaaaaaacatgaactatgacaaagtacaaagtaaatgcttagtatcagacctacct

SEQ ID NO: 162296 - DNA, 80 bp, synthetic construct
  source 1..80: mol_type = other DNA
aaagagcagaagccgaagaagactcaggttcggaaaaagcgtcgttcacctcgtcgcaagagagagaagccgaagcccaa

SEQ ID NO: 162297 - DNA, 80 bp, synthetic construct
  source 1..80: mol_type = other DNA
atgaaaatggacgaactgacagccccaaacactcatcccgctttgctgctacagagcaagaaaaaagttaaaatatatag

SEQ ID NO: 162298 - DNA, 80 bp, synthetic construct
  source 1..80: mol_type = other DNA
taccagcaagtcttagtacagtcctttattaaaaagatcacttcaaacccagatggctctaccacaatacaaggacctaa

SEQ ID NO: 162299 - DNA, 80 bp, synthetic construct
  source 1..80: mol_type = other DNA
actacatagaaaccagagcatccgtcaagacagcaggtcctagtgatatgtatgtacatactaaagaagccatttataaa

SEQ ID NO: 162300 - DNA, 80 bp, synthetic construct
  source 1..80: mol_type = other DNA
ttaagacaattccactgtgctgaggaacaaggtataacagactacatccatatgcttggtgaagcttttggtaatggatt

SEQ ID NO: 162301 - DNA, 80 bp, synthetic construct
  source 1..80: mol_type = other DNA
cacatatgttcataaaaagaatgatggcactactatagatttgactgttgaccaagcctggagaggtaaaggagagggtc

SEQ ID NO: 162302 - DNA, 80 bp, synthetic construct
  source 1..80: mol_type = other DNA
tccattcaaccaaacaaattcacatacctggtgaaattaagacaattatggatatggctcgcgtagactccttcatgcct

SEQ ID NO: 162303 - DNA, 80 bp, synthetic construct
  source 1..80: mol_type = other DNA
acaggggattgaccaaattgctcgatgtgcgtgtcggacaggtgtatacttctgtgagtcaaaaggaaaacactatccca

SEQ ID NO: 162304 - DNA, 80 bp, synthetic construct
  source 1..80: mol_type = other DNA
caaccaccaacgcggagcgcgcagtggccgtcatcaaacaaggtgccgccgccgccacgccggacgtggaccccgacgac

SEQ ID NO: 162305 - DNA, 80 bp, synthetic construct
  source 1..80: mol_type = other DNA
agctctgtcggaaggagaacaggccaaggaatttaaggaggcttcaactactggctccaacgtcgtgcaagcggccgcac

SEQ ID NO: 162306 - DNA, 80 bp, synthetic construct
  source 1..80: mol_type = other DNA
aaactaaaattccagaaagaagagtggtggctcagggtccagaagaagagtttggaagatcacttattaaacataactca

SEQ ID NO: 162307 - DNA, 80 bp, synthetic construct
  source 1..80: mol_type = other DNA
acaagacaagtttcataaccttttaaagggtaaccaaatcactactattttcaatacttgccttaaggatgagctaagga

SEQ ID NO: 162308 - DNA, 80 bp, synthetic construct
  source 1..80: mol_type = other DNA
cagtgttgggtgatgtgatggatgcagtattggtagtagtactgttgcatgtaactctatgcagaatatagaatattatg

SEQ ID NO: 162309 - DNA, 80 bp, synthetic construct
  source 1..80: mol_type = other DNA
tggagatgttcacttactctcgttttgatacagagttcacctttgtaatcacagaaaggtattacacacaaaattcagga

SEQ ID NO: 162310 - DNA, 80 bp, synthetic construct
  source 1..80: mol_type = other DNA
tgaattcactctattgaccacccacttactaagtcttattaaaattctcttgttgattagattaacacaccacaatgggt

SEQ ID NO: 162311 - DNA, 80 bp, synthetic construct
  source 1..80: mol_type = other DNA
gcacacctaagaatgcaaagatggtctgtatggtttcagcttgtaaagacttctgcttgaggttagccagagatactaac

SEQ ID NO: 162312 - DNA, 80 bp, synthetic construct
  source 1..80: mol_type = other DNA
cttacccacgagacatacgacaatgattatctttgtcgtctatataaacgcgggcttaaagtccgtgtcgcgctcgatcg

SEQ ID NO: 162313 - DNA, 80 bp, synthetic construct
  source 1..80: mol_type = other DNA
atgaaatataattatcctacaaaacctgggcaatgtggtggagtgattctaaatacaggaaacatcattgcaatacatgt

SEQ ID NO: 162314 - DNA, 80 bp, synthetic construct
  source 1..80: mol_type = other DNA
attacaacgagcgctgtgtggccgtctttcaggagacgggtacggcgcgccgcatccccaactgctcgcaccgtctgcgc

SEQ ID NO: 162315 - DNA, 80 bp, synthetic construct
  source 1..80: mol_type = other DNA
ggaggatcaggcagggatttgaacttgccctcctatgagggacaggcatatagtgaagggcagttcatgaataccccgtg

SEQ ID NO: 162316 - DNA, 80 bp, synthetic construct
  source 1..80: mol_type = other DNA
ctacatttcaagtgttgcaaagaaattacaacagtgtaataggttaccccataaattatgacacctcagcttccacaaaa

SEQ ID NO: 162317 - DNA, 80 bp, synthetic construct
  source 1..80: mol_type = other DNA
aactactggcaggtaacatggatcccagactgggactttgtatccaccccaccactggtcaggttagtatttaacctagt

SEQ ID NO: 162318 - DNA, 80 bp, synthetic construct
  source 1..80: mol_type = other DNA
gtgaaggcaaacaactgctcaggattgagggaagaagacatggtcagttgtcaatttaatatgtcaggactagtacaaga

SEQ ID NO: 162319 - DNA, 80 bp, synthetic construct
  source 1..80: mol_type = other DNA
tggttaatcgtatgggggcactgtgtatgaggattgtcacaaacaaacaagttcatgatgttgaggtcacaactaatatt

SEQ ID NO: 162320 - DNA, 80 bp, synthetic construct
  source 1..80: mol_type = other DNA
tcaggcacagacggcatatattacaaaaaaacagacagcaactatggctaccactcctttcaagttaaaaacaaaaaaac

SEQ ID NO: 162321 - DNA, 80 bp, synthetic construct
  source 1..80: mol_type = other DNA
gcatgctctgacatgtcagtccgcatgttacgagacacacccatgatgaagcaagaagataacatcacccaaaacccagt

SEQ ID NO: 162322 - DNA, 80 bp, synthetic construct
  source 1..80: mol_type = other DNA
taaaaaactacagaaataaaagattttcatggctcactgatatgccagccagcaacacgtgccacataaatgccacctat

SEQ ID NO: 162323 - DNA, 80 bp, synthetic construct
  source 1..80: mol_type = other DNA
cacaacacagcaactaatgcaaaaaacataaatatgtacacagtgcaacttggtggtgaacccaaccctaaaactccagt

SEQ ID NO: 162324 - DNA, 80 bp, synthetic construct
  source 1..80: mol_type = other DNA
aaatcagtaagctaccatctaggaaaatacagccccatatttttaagctcatatagaactaatctacagtttataactgc

SEQ ID NO: 162325 - DNA, 80 bp, synthetic construct
  source 1..80: mol_type = other DNA
tgggccgtgggggtcgtcatcatctccaccggaaccagaagtacccaaaagcagtgtaggaaggtgtggatcaccgccgc

SEQ ID NO: 162326 - DNA, 80 bp, synthetic construct
  source 1..80: mol_type = other DNA
taccctgcttgaatgtaagaagttaaccctttatgaagatcaagtcaaggctttcccccaatcctcagaaacttttcaaa

SEQ ID NO: 162327 - DNA, 80 bp, synthetic construct
  source 1..80: mol_type = other DNA
ctatatgaagagtactgcaaacacagaaatcggtggagccgcacaaatacagacctagaactcataagatacaagggatg

SEQ ID NO: 162328 - DNA, 80 bp, synthetic construct
  source 1..80: mol_type = other DNA
gagtagtcataaggtgtccctacacataccctcagttgctaaaacacaacgacaaacagtttggcttcgtagtctacagc

SEQ ID NO: 162329 - DNA, 80 bp, synthetic construct
  source 1..80: mol_type = other DNA
ggtggaaactaccagatgctttaaaggatatgggagtctttggacaaaatctctattaccatgctatggtgagggctggt

SEQ ID NO: 162330 - DNA, 80 bp, synthetic construct
  source 1..80: mol_type = other DNA
ggttcattatagacctccttagtgcttctaaagacccaaaagtcatagagttctgtgagaaagagggatggattaagcag

SEQ ID NO: 162331 - DNA, 80 bp, synthetic construct
  source 1..80: mol_type = other DNA
ttgaatcaatcagatggacaagggacccaaagaacacacaagaccatgtgtactctttgtgccttttgatgtggcataat

SEQ ID NO: 162332 - DNA, 80 bp, synthetic construct
  source 1..80: mol_type = other DNA
catggatacccagaccacccagagcgctaccatatacttccataggtagaactaattttcctaatactcatggtaaagtc

SEQ ID NO: 162333 - DNA, 80 bp, synthetic construct
  source 1..80: mol_type = other DNA
tataaaggtaataaaaaatttgagatgaatgatcacataagagtagcagttgcacactattcggctcagttaatgacttt

SEQ ID NO: 162334 - DNA, 80 bp, synthetic construct
  source 1..80: mol_type = other DNA
agaagacgacgataagcactacccatcataaacactccagtcccaaaaaatccaccacccctaacagtcacgtagaacat

SEQ ID NO: 162335 - DNA, 80 bp, synthetic construct
  source 1..80: mol_type = other DNA
acccatccaggagaaaaaggcaggactgttggagatcgccgtgatcaccacgataaacaacctagtgatgataattggtt

SEQ ID NO: 162336 - DNA, 80 bp, synthetic construct
  source 1..80: mol_type = other DNA
acagtggtccttcggcgaccacccacgcaaaaggtgactggccctgccggttcactgagtgtccaggctcagctggagcc

SEQ ID NO: 162337 - DNA, 80 bp, synthetic construct
  source 1..80: mol_type = other DNA
agcatgggctcacaggtgtccactcagcgatccggctcccacgagaactccaattcagctacaggaggctccaccattaa

SEQ ID NO: 162338 - DNA, 80 bp, synthetic construct
  source 1..80: mol_type = other DNA
agaaggcgcgtgtacaacaggagacgcagaatcagacgaaagagacgcagacagaaactgacaataagacagtggcagcc

SEQ ID NO: 162339 - DNA, 80 bp, synthetic construct
  source 1..80: mol_type = other DNA
accatacatacttgatgagcaccaaggattcgtctcagactatgttacccagcttggcagtgcttttggggagggattca

SEQ ID NO: 162340 - DNA, 80 bp, synthetic construct
  source 1..80: mol_type = other DNA
tgaagacagttggggggtcttcgtatgtgcccgtcaccattaccatagcacccatgtgtgccgaatataacgggttaaga

SEQ ID NO: 162341 - DNA, 80 bp, synthetic construct
  source 1..80: mol_type = other DNA
aggtggagaacttcaatgccacgcaagatgcagataggaagaaacagttcacagtgtggcctattacatacacaaacaca

SEQ ID NO: 162342 - DNA, 80 bp, synthetic construct
  source 1..80: mol_type = other DNA
gggccttaccatacacatcaattggacgtaccaattatcctaaaaatccacaaccagtaatcaagaagagagaaggggac

SEQ ID NO: 162343 - DNA, 80 bp, synthetic construct
  source 1..80: mol_type = other DNA
aagccctaccagcacctacgggccaaaatacgcaggtaagcagtcatcggttagatactggtaaagtcccagcactccaa

SEQ ID NO: 162344 - DNA, 80 bp, synthetic construct
  source 1..80: mol_type = other DNA
gtggaggaaacagaaaaggaaagtgcttctgctggctgtgcgagctacacagaagacatcttccatgagtatctggcgtc

SEQ ID NO: 162345 - DNA, 80 bp, synthetic construct
  source 1..80: mol_type = other DNA
tcacgtcaaatgaaactttacacaacgtatctgccaatacctcatttatgagcacgccatggcctacaaattgcaacgct

SEQ ID NO: 162346 - DNA, 80 bp, synthetic construct
  source 1..80: mol_type = other DNA
gacgtgggatctttggccacaaagctattaaaagaatgtgcgaacaaccgctcgctgctgactttattacagggcctcca

SEQ ID NO: 162347 - DNA, 80 bp, synthetic construct
  source 1..80: mol_type = other DNA
acacccataagtattcaccaaattaccatacacaaactagagaaaataatggcacacttgaggaaaagcattacatcaag

SEQ ID NO: 162348 - DNA, 80 bp, synthetic construct
  source 1..80: mol_type = other DNA
ctgagttccaactggattctggttttggtaagtggaacatcaacttccaggaacaagcccacattaggaggaaactagaa

SEQ ID NO: 162349 - DNA, 80 bp, synthetic construct
  source 1..80: mol_type = other DNA
agtcagctgcattattgcacattctgtgaactgtgcagtgcatagggaacatatcaccattatggcattagagaatgcct

SEQ ID NO: 162350 - DNA, 80 bp, synthetic construct
  source 1..80: mol_type = other DNA
agctggaacacctacgtcatgttcaattatgtgctttgtgtcagcctgcaatgatttctctgtccgtctactgaaagata

SEQ ID NO: 162351 - DNA, 80 bp, synthetic construct
  source 1..80: mol_type = other DNA
gcgaggtgctaaactacttttctacttgggcagggagcatcacattgagctttttgtgtgtttgtgatagttttagcaca

SEQ ID NO: 162352 - DNA, 80 bp, synthetic construct
  source 1..80: mol_type = other DNA
atcaccccttcccctttgtaacttagaagaatcaaattcagaccaataggaagcgacaaaccagtcgtgataggtcaagc

SEQ ID NO: 162353 - DNA, 80 bp, synthetic construct
  source 1..80: mol_type = other DNA
ttctctgggacagccggtggcgcggtaagcgggtgccacgctttcagggtgggtaaaacagtcgcgggcgaagcagtagt

SEQ ID NO: 162354 - DNA, 80 bp, synthetic construct
  source 1..80: mol_type = other DNA
tagtcactgatgatatgggaacattatgctcacggatagtgacaagtgagcaagtgcacaaggtgaaaatagtaacaaga

SEQ ID NO: 162355 - DNA, 80 bp, synthetic construct
  source 1..80: mol_type = other DNA
atggttatgataaccaagacatccacctcattgatgacttgggacagactagaaaagaaaaagatattgagatgctctgt

SEQ ID NO: 162356 - DNA, 80 bp, synthetic construct
  source 1..80: mol_type = other DNA
tgtgtggctgacggtgccgtgttccaccgccacttgttcatcgaccatggtaccccctttatcttaaccagcaagtggcc

SEQ ID NO: 162357 - DNA, 80 bp, synthetic construct
  source 1..80: mol_type = other DNA
gtggtacactgtggttacggtcactttgtacgcctgtttactgccccatcccaactttctatcattctttatttccagta

SEQ ID NO: 162358 - DNA, 80 bp, synthetic construct
  source 1..80: mol_type = other DNA
gtccaccaggccagccggagggaccccggcagcccgggcgagtcgccttccctctcccctggcctctccttcccgcctcc

SEQ ID NO: 162359 - DNA, 80 bp, synthetic construct
  source 1..80: mol_type = other DNA
tttgtccaaactcatcaatgtatcttaagcttataacttcgtataatgtatgctatacgaagttatggatcaacataagg

SEQ ID NO: 162360 - DNA, 80 bp, synthetic construct
  source 1..80: mol_type = other DNA
tggccgatctgttgcgcgaatgcacgtcgccgctcggcgcggcgcacgaggacgtggcgcgctgtggactcgaagcaccc

SEQ ID NO: 162361 - DNA, 80 bp, synthetic construct
  source 1..80: mol_type = other DNA
gtgtcagcgtaaacctcatttccgataataatctggggggcccggtcactaacggtgagaagatgggtgaaaatgtctgt

SEQ ID NO: 162362 - DNA, 80 bp, synthetic construct
  source 1..80: mol_type = other DNA
ttaagtatactaaaactattttatcaaatcagggaccttttaagggtttcaatgaggtttccaccgctttcagacacatt

SEQ ID NO: 162363 - DNA, 80 bp, synthetic construct
  source 1..80: mol_type = other DNA
aagccttaaaggaggccatgggaccaccccctatcccattcgcagcagcccagcagagaaggacgattaaatgctggaat

SEQ ID NO: 162364 - DNA, 80 bp, synthetic construct
  source 1..80: mol_type = other DNA
aagtgtctactgatacctgaatacagtgtcttacgccggcgctggttggatctcttttaaatatagatttgtaatttgat

SEQ ID NO: 162365 - DNA, 80 bp, synthetic construct
  source 1..80: mol_type = other DNA
agacgagacgccttctatcaccctcacagccgaatacaagtttcgctttaactgggggggcgactctatatttccacaga

SEQ ID NO: 162366 - DNA, 80 bp, synthetic construct
  source 1..80: mol_type = other DNA
cactccagttgtctcagcctaagcccaacacttcacagcagtgcctgcccaacactaacagctcggagccagtacattcc

SEQ ID NO: 162367 - DNA, 80 bp, synthetic construct
  source 1..80: mol_type = other DNA
caaatgcattacaattatcacaacccacccgacccgcacttccgccagcagagcaaagtgtgccaaacaccaatcaatcc

SEQ ID NO: 162368 - DNA, 80 bp, synthetic construct
  source 1..80: mol_type = other DNA
cgccgaccctggtggggtagtgctgtccaatgctctcacggatggcgagcgtgcgaaagagtttacatcaggtaatgcca

SEQ ID NO: 162369 - DNA, 80 bp, synthetic construct
  source 1..80: mol_type = other DNA
gtgttacatttataccacctatggctgatttaccagacaagggaaaaccttttgattctagatttgtattatgtagtact

SEQ ID NO: 162370 - DNA, 80 bp, synthetic construct
  source 1..80: mol_type = other DNA
gataccaaattaaaagcattttttaatgaagctttacccacaacaggcacaaaaaacacagagtttaatatactaaacac

SEQ ID NO: 162371 - DNA, 80 bp, synthetic construct
  source 1..80: mol_type = other DNA
actagacacaatggacatcttccgtattcccgtccagagtgggaaccatcagagcacgcaggtctttggcttccaggttc

SEQ ID NO: 162372 - DNA, 80 bp, synthetic construct
  source 1..80: mol_type = other DNA
gtgttttgatacacggctctcctgggtcagggaaatctctaaccacttccattattggtagagctatagcagaaagattt

SEQ ID NO: 162373 - DNA, 80 bp, synthetic construct
  source 1..80: mol_type = other DNA
acggagaggaggtatatgaaagcctttactgatcagataaagtcaacacatctgggcaaaatactgcatctgccgcctta

SEQ ID NO: 162374 - DNA, 80 bp, synthetic construct
  source 1..80: mol_type = other DNA
agttggcagagattgactccatgatcccgatgaactcagtaactggtaaagcaaatacgatggagatgtacccaatacca

SEQ ID NO: 162375 - DNA, 80 bp, synthetic construct
  source 1..80: mol_type = other DNA
ctgcacaccttcgggtgtgaagccataatattgacagggtgcgaagagcctactgtgctcaccttgagtcctccggcccc

SEQ ID NO: 162376 - DNA, 80 bp, synthetic construct
  source 1..80: mol_type = other DNA
ccaaaatctacaaaaaacaatacttgacaataacacagtatggtttgacaaagctaaaaaagcatggactaacttacatt

SEQ ID NO: 162377 - DNA, 80 bp, synthetic construct
  source 1..80: mol_type = other DNA
accactaataactcagctccatactacacatttgcagacacttggtacagaggcacagcctacaacgacaaaataaaaca

SEQ ID NO: 162378 - DNA, 80 bp, synthetic construct
  source 1..80: mol_type = other DNA
ggggcaagaaatacatctctgtcagaataagaccccccaaactattccagcacaagtggtacactcagtcagacctgtgt

SEQ ID NO: 162379 - DNA, 80 bp, synthetic construct
  source 1..80: mol_type = other DNA
aatgtacagaataccactggacacgaccggttctaatgatcccatattttgtttgagcctctcacccgcttctgatcaac

SEQ ID NO: 162380 - DNA, 80 bp, synthetic construct
  source 1..80: mol_type = other DNA
tctccaaactgaaacaactcgaaatgatagaaaaccagatggccacgttacatcaatcatgtcctagtcaggaggagcag

SEQ ID NO: 162381 - DNA, 80 bp, synthetic construct
  source 1..80: mol_type = other DNA
agcgattggaggttaattttgaggagtccttattttccaaatacaagggtaatatagaaagtgaaattactgaaaacatg

SEQ ID NO: 162382 - DNA, 80 bp, synthetic construct
  source 1..80: mol_type = other DNA
atttctcagtgcgcttgttgagagacacaccccatgttagacaagatctctatgtcaacacacaagggatagaagacacg

SEQ ID NO: 162383 - DNA, 80 bp, synthetic construct
  source 1..80: mol_type = other DNA
gaatgagcacaataactttctctctgaaagccttgtatgaccagtacctgaaacaccaaaacaggtggactttctcaaac

SEQ ID NO: 162384 - DNA, 80 bp, synthetic construct
  source 1..80: mol_type = other DNA
ttgctggtatcaaacaaacatagtggtgcctgcagacgcccagagctcatgttatattatgtgctttgtctccgcatgca

SEQ ID NO: 162385 - DNA, 80 bp, synthetic construct
  source 1..80: mol_type = other DNA
tagttaagatccttgttcggattctgtgttacatggtgctctactgccataagccaaatattttgaccactgcatgtcta

SEQ ID NO: 162386 - DNA, 80 bp, synthetic construct
  source 1..80: mol_type = other DNA
agtgcaagaaaataccactatataaagaacaagtgagagcttttgcgtcagcttcagaggatgctcaggatgaattaatg

SEQ ID NO: 162387 - DNA, 80 bp, synthetic construct
  source 1..80: mol_type = other DNA
aaacggtttggtcgttttttgatggtaaaaatgataccgacgtgtgtagtgtggaggggacgaagaattacacgctagca

SEQ ID NO: 162388 - DNA, 80 bp, synthetic construct
  source 1..80: mol_type = other DNA
gacatggaagatcagcttgcaagaaatggcacagattaggagaaaatttgaattattcacatatactaggtttgactcag

SEQ ID NO: 162389 - DNA, 80 bp, synthetic construct
  source 1..80: mol_type = other DNA
agaagcagtattagaaaccctatacacacaaaacagttattgggaatccaatttaactcaattttatgtacttaatgtta

SEQ ID NO: 162390 - DNA, 80 bp, synthetic construct
  source 1..80: mol_type = other DNA
aaaatggccgttccgtgacgtcacggccgccattttgagggagccacgctgctggtgacgtataaggtcaaaggtcccat

SEQ ID NO: 162391 - DNA, 80 bp, synthetic construct
  source 1..80: mol_type = other DNA
agtggcaaccaaactttatcagaaactgttttattgtgggttatatgccactgatattttgtggtgagaatactgtaagc

SEQ ID NO: 162392 - DNA, 80 bp, synthetic construct
  source 1..80: mol_type = other DNA
agagaccagcaatcaccaatacagctgcagataccccagcaacatccggggtgaactcccaagaagtgcctgcattgacc

SEQ ID NO: 162393 - DNA, 80 bp, synthetic construct
  source 1..80: mol_type = other DNA
aaaaacactgatgagtccataccagacacacaaattaaaatcagagatgatatcaggcaaattagaacagttggaccttc

SEQ ID NO: 162394 - DNA, 80 bp, synthetic construct
  source 1..80: mol_type = other DNA
tttcctcttgtagcaacgtgaggacgactactccgtgtggctcgacggtacggtggtcaaaggctgttggggatgcagcg

SEQ ID NO: 162395 - DNA, 80 bp, synthetic construct
  source 1..80: mol_type = other DNA
ccccggttgaactagatatgcttcacccgaggcaaaaactaaatcaatcgttacccgcaaagtgcctacgggaagcctag

SEQ ID NO: 162396 - DNA, 80 bp, synthetic construct
  source 1..80: mol_type = other DNA
tacaaattacaaggggtgacacaactatcacatcacaagacatagcaaatgcagttgttgcctatggtgtatggcccaca

SEQ ID NO: 162397 - DNA, 80 bp, synthetic construct
  source 1..80: mol_type = other DNA
cgcgcgcacacctaggtggacgcctgacctccattccgggccgtgtgctgggtccccgaggggcgtgagggtgttttcat

SEQ ID NO: 162398 - DNA, 80 bp, synthetic construct
  source 1..80: mol_type = other DNA
gtcacttactgttccaacactacagggcttgccaactatggctacaccagggtctaatcagtttctcacctcagacgatt

SEQ ID NO: 162399 - DNA, 80 bp, synthetic construct
  source 1..80: mol_type = other DNA
gtacacttcctggggtgtgtcctgccactaaatataagcaacagaggtgacgaatggtagagttttttctggcccgtccg

SEQ ID NO: 162400 - DNA, 80 bp, synthetic construct
  source 1..80: mol_type = other DNA
gaagctactacattaattcaatctctcactcggttagtcaaacagagctcagatagagtaaaacatcattaacgcgatgg

SEQ ID NO: 162401 - DNA, 80 bp, synthetic construct
  source 1..80: mol_type = other DNA
taaagtctccctgtgactccacattgacgcaaagatccagagacaccccaaaaatgccatccgtgggactaatcataaag

SEQ ID NO: 162402 - DNA, 80 bp, synthetic construct
  source 1..80: mol_type = other DNA
aaccctctgttgtcaaaaaatgctatatagtgggctacgaccccataatagtatgtggacgaaacaggactagcactaac

SEQ ID NO: 162403 - DNA, 80 bp, synthetic construct
  source 1..80: mol_type = other DNA
ggctacaagataattaattaccacttagccactgcagcagattaccagaattgtgtgaggagttactgggaaagagatct

SEQ ID NO: 162404 - DNA, 80 bp, synthetic construct
  source 1..80: mol_type = other DNA
ccccggttagatttgatacgctccaacagggcgaaaacagatctaatcgttatccgcaagatgcctacgcaaagcttagt

SEQ ID NO: 162405 - DNA, 80 bp, synthetic construct
  source 1..80: mol_type = other DNA
ccattccgggccgtgtgttgggtccccgcggggcgggggggtgtttttagcgtggaggttaatttttgcgtcttgcggtg

SEQ ID NO: 162406 - DNA, 80 bp, synthetic construct
  source 1..80: mol_type = other DNA
agatcccaccactcgttctgtggctgtggtgatcccgtgcttcattttactaaccttgctactcgctttaactatctgcc

SEQ ID NO: 162407 - DNA, 80 bp, synthetic construct
  source 1..80: mol_type = other DNA
tccaggtcgggtgccggaggtgagtttacacaccgcagtcaagaggcaattcgggctggagactggccgggcgccgggca

SEQ ID NO: 162408 - DNA, 80 bp, synthetic construct
  source 1..80: mol_type = other DNA
caactgacactggggcagcgtattatggggctgtctcaataaacgacttcggtcttcttgcagttagagtggttaacgag

SEQ ID NO: 162409 - DNA, 80 bp, synthetic construct
  source 1..80: mol_type = other DNA
tacacctgaaaaatgaagaaagcgtggctcagcagagcacagcaagccgatgccgggggggcatctggctccgaggaccc

SEQ ID NO: 162410 - DNA, 80 bp, synthetic construct
  source 1..80: mol_type = other DNA
aggtcttacttttctgaaacacaaggtgaaataacaatttcaaaatctacaagtgcttgtgggttacccagcatccacac

SEQ ID NO: 162411 - DNA, 80 bp, synthetic construct
  source 1..80: mol_type = other DNA
ggggacaatgggcatgtagtaatacagtacatgtatgtaccaccaggtgctccaatacctaaaactagagatgattacac

SEQ ID NO: 162412 - DNA, 80 bp, synthetic construct
  source 1..80: mol_type = other DNA
caaaacagttggagcaaaaaaaatgagacatggtcagggacacaaaattacccacaaactacatcacaaatgtacaaaat

SEQ ID NO: 162413 - DNA, 80 bp, synthetic construct
  source 1..80: mol_type = other DNA
ttgtggttgtggcaattttattaatcaccttgttgctctgggcgatctctatggcttcaggccgggtccgcgggctcccg

SEQ ID NO: 162414 - DNA, 80 bp, synthetic construct
  source 1..80: mol_type = other DNA
tctcagcatataaagattactatgatacaaatttatataacaatgtacaactttaccagacattccaaacaatagctcaa

SEQ ID NO: 162415 - DNA, 80 bp, synthetic construct
  source 1..80: mol_type = other DNA
caagggttgagaccagagttagggtttacatgaagcccaaacatgtgagggtgtggtgcccaagaccacctagagccgtg

SEQ ID NO: 162416 - DNA, 80 bp, synthetic construct
  source 1..80: mol_type = other DNA
attgggtgttctgtcatttcatgtggtaaagtgttttcaaagatgttagaaactgtttttaattggcagatggattcgag

SEQ ID NO: 162417 - DNA, 80 bp, synthetic construct
  source 1..80: mol_type = other DNA
acaaggacaacgtcgattatgagccaaaaggggttacaacatcaaggacctcgattaccatctcaaacaccacccacatg

SEQ ID NO: 162418 - DNA, 80 bp, synthetic construct
  source 1..80: mol_type = other DNA
ggtttgaaacactcgatgatctcatttggcacatcctggacgaggtcaagcgacgcgagcgcttcggcaattgcctcaat

SEQ ID NO: 162419 - DNA, 80 bp, synthetic construct
  source 1..80: mol_type = other DNA
gtcctggtgtggattacaagggtgatagtttaaccccactcagcaccaagaacctaactacatatggatttggtcaccaa

SEQ ID NO: 162420 - DNA, 80 bp, synthetic construct
  source 1..80: mol_type = other DNA
gatatggtgagtggccacaatttcttaattcggccgatgcaaacccagtagatgcccccaccttacctgattcttcgagc

SEQ ID NO: 162421 - DNA, 80 bp, synthetic construct
  source 1..80: mol_type = other DNA
ggtggaaaatacctgactgcctgaaagatatgggcatgttcggtcagaacatgtatcatcactccatgggtagatcaggc

SEQ ID NO: 162422 - DNA, 80 bp, synthetic construct
  source 1..80: mol_type = other DNA
ttcaggtcacagaactcagctacctcagttgccacccgctcttaatgcttctcagcaaacaccacatagtggtaaaaagc

SEQ ID NO: 162423 - DNA, 80 bp, synthetic construct
  source 1..80: mol_type = other DNA
cactgtggtcagccttctatggctactctgactttataatacaagagctaagcataagcacagaaatatacaacataggc

SEQ ID NO: 162424 - DNA, 80 bp, synthetic construct
  source 1..80: mol_type = other DNA
ttggaaatgcaaggtgctgcccactcatttgtggcaaagctataacctttatcaacaggcacaataatgaagagttgaca

SEQ ID NO: 162425 - DNA, 80 bp, synthetic construct
  source 1..80: mol_type = other DNA
cattcctatgaacaacacgcatacaaaagatgaggttaacagttacctcataccactaaatgcaaacaggcaaaatgagc

SEQ ID NO: 162426 - DNA, 80 bp, synthetic construct
  source 1..80: mol_type = other DNA
aggatatacttcaagcctagacacattcgcgcgtgggtccccagaccacccaggttgtgccagtatgtctacaaggcaaa

SEQ ID NO: 162427 - DNA, 80 bp, synthetic construct
  source 1..80: mol_type = other DNA
cggaagaggagcagccacaaaaccaagagatccaagaaaaactactcctccagctccagcagcagcgacaacagcagcga

SEQ ID NO: 162428 - DNA, 80 bp, synthetic construct
  source 1..80: mol_type = other DNA
ctttggcagctcatggagattctatagacacgaggacgtggactatatagtgtactacagcagaaagagtcccctgggag

SEQ ID NO: 162429 - DNA, 80 bp, synthetic construct
  source 1..80: mol_type = other DNA
aaatttcttctttcctgttccagcaccaaaaaccacaccacgttcacaaagtcgcgctcttcgaggtgatatggctaatt

SEQ ID NO: 162430 - DNA, 80 bp, synthetic construct
  source 1..80: mol_type = other DNA
gtactcgttcgaagagagccagacgccgagcctctcctcggaggaggacccggcggagacgacgagggagctcctccagc

SEQ ID NO: 162431 - DNA, 80 bp, synthetic construct
  source 1..80: mol_type = other DNA
gaagtagtaggaaaaagagtaagagcaacagtaatgacaggggacaccccaataaacatttttggcagaaatattttaaa

SEQ ID NO: 162432 - DNA, 80 bp, synthetic construct
  source 1..80: mol_type = other DNA
catttgtgagtgcatgcccggattttagtgtaagattattgagagacaccacgcacatcagtcagtcagctctaatagcc

SEQ ID NO: 162433 - DNA, 80 bp, synthetic construct
  source 1..80: mol_type = other DNA
gtggagggaaattactctgtaaacatggagtgattggaataattactgccggtggagagggacatgtggcctttatagat

SEQ ID NO: 162434 - DNA, 80 bp, synthetic construct
  source 1..80: mol_type = other DNA
atagacgccgcagacatgtaaggagacggaggcgcgggaggtggaggaggaggtacagaaaatggcgcagaaaaggcagg

SEQ ID NO: 162435 - DNA, 80 bp, synthetic construct
  source 1..80: mol_type = other DNA
gctgccgctacttctgctactactgccttacactggaaagtgaggagcgcccaccgaccccatatcgcaacactgtataa

SEQ ID NO: 162436 - DNA, 80 bp, synthetic construct
  source 1..80: mol_type = other DNA
aattagacaaaaatacttagctgctacaagggccgcactcactatcatggcaacactaggtaatgaacttttagaatacc

SEQ ID NO: 162437 - DNA, 80 bp, synthetic construct
  source 1..80: mol_type = other DNA
atgctcttaaagacatgggtgtgtttggacaaaatatgttctttcactcacttggtaggtctggctacaccatacatgtg

SEQ ID NO: 162438 - DNA, 80 bp, synthetic construct
  source 1..80: mol_type = other DNA
ttcctgagtttgttgtggccgagcaggacgccacccagaagcccaatacagcaaagcacccttcgttggaagccacgcaa

SEQ ID NO: 162439 - DNA, 80 bp, synthetic construct
  source 1..80: mol_type = other DNA
caaagccttacagacaccccttactacccttggatgctacccccaaaacagccattctctgtaacatttaaactaggctt

SEQ ID NO: 162440 - DNA, 80 bp, synthetic construct
  source 1..80: mol_type = other DNA
ttactacggggcttaaaattccatttccaaataataacgaccctacaactgttggaaatggtacagtacaaacactaacc

SEQ ID NO: 162441 - DNA, 80 bp, synthetic construct
  source 1..80: mol_type = other DNA
aaacaatgatccacgctggaacaggggctgtggtaaaatatttcaatgttaactattacaaggatgcagcaagttctggg

SEQ ID NO: 162442 - DNA, 80 bp, synthetic construct
  source 1..80: mol_type = other DNA
agatactataatgtctgtgggtcacattacgatggctggcataatcaatttgagtaacacacccacagccagaatgatta

SEQ ID NO: 162443 - DNA, 80 bp, synthetic construct
  source 1..80: mol_type = other DNA
gccgtgactgtcgttggaaacgccgacgctgccactactgccggagccgacgctgaaaacgccgacgctgctactactgt

SEQ ID NO: 162444 - DNA, 80 bp, synthetic construct
  source 1..80: mol_type = other DNA
caaaaatggccgatttagtgacgtcacggcggccattttaagtaaggcggaagcgcacccgctgtgtcacaaaatggcgg

SEQ ID NO: 162445 - DNA, 80 bp, synthetic construct
  source 1..80: mol_type = other DNA
ctctgccgctgctacaaaagtagactctgtattctctgatattctctacaaacactgcacatactatcagagctttctaa

SEQ ID NO: 162446 - DNA, 80 bp, synthetic construct
  source 1..80: mol_type = other DNA
tcgacgaagaagagtaaggaggaggaggaggtggaggagagggcgacccagacggagactgtacagacgcggcagacggt

SEQ ID NO: 162447 - DNA, 80 bp, synthetic construct
  source 1..80: mol_type = other DNA
atcacactatggtacagtagtcactaatgacatgggaacactatgttcaagaatagtcactgaagatcatgggacacgtg

SEQ ID NO: 162448 - DNA, 80 bp, synthetic construct
  source 1..80: mol_type = other DNA
tgtaatcttttcgtacaagtacgcacttgatatggaagcaattgcatcagagggcacaaaatatggcttgactataacac

SEQ ID NO: 162449 - DNA, 80 bp, synthetic construct
  source 1..80: mol_type = other DNA
ccgggagcccctttacccaataaaaggaatgattacacatggcaatcaggtacaaatgcctctgttttctggcaacatgg

SEQ ID NO: 162450 - DNA, 80 bp, synthetic construct
  source 1..80: mol_type = other DNA
cttccactcgtgggactacagacgtgactactttaacagaaagactattaagagaatgtcagaacaaccagaaacttttg

SEQ ID NO: 162451 - DNA, 80 bp, synthetic construct
  source 1..80: mol_type = other DNA
gcctgagcataactggtggaaagccagctgaatattggacacagctaaaagcttatttaactcaaggctggggcaggtca

SEQ ID NO: 162452 - DNA, 80 bp, synthetic construct
  source 1..80: mol_type = other DNA
acaatgctaagcatacagtttgaacactgcaaacgaaattatgaagctttaatgagttatttaaaaaatcattggagcaa

SEQ ID NO: 162453 - DNA, 80 bp, synthetic construct
  source 1..80: mol_type = other DNA
gtcacactagatcagacaagtacacatcaggtggctatgttaccttatggtatcagacgaactttgttccaagcatgaat

SEQ ID NO: 162454 - DNA, 80 bp, synthetic construct
  source 1..80: mol_type = other DNA
ccgtggaaaactttctaagtcgctccgcttgtgtgtacatcgaagagtactacaccaaggaccaagacaatgttaatagg

SEQ ID NO: 162455 - DNA, 80 bp, synthetic construct
  source 1..80: mol_type = other DNA
tcttgggaccaaattgtcatgcgtctacttccatgccagaaaataaagatgtagtccaagcaaccacaacagtaaatact

SEQ ID NO: 162456 - DNA, 80 bp, synthetic construct
  source 1..80: mol_type = other DNA
tctccagaaatatttggactgtacacagaaataatttacaacccttacacagacaaaggaactggaaacaaagtatggat

SEQ ID NO: 162457 - DNA, 80 bp, synthetic construct
  source 1..80: mol_type = other DNA
tattgcaattttatggtgacatttatagtatttaagtgttaccatatattgcgcaaatacattgtaataatacagagtta

SEQ ID NO: 162458 - DNA, 80 bp, synthetic construct
  source 1..80: mol_type = other DNA
agccccttcatgccccgtgaccaggacatgaacggttgggatatcacaataggttacaaaatggacttcttatggtgcgg

SEQ ID NO: 162459 - DNA, 80 bp, synthetic construct
  source 1..80: mol_type = other DNA
aatcctacttaatggagttatgcctccatggaaaagacatttactaattggagttgctgcttaaatgtgctaaagttctt

SEQ ID NO: 162460 - DNA, 80 bp, synthetic construct
  source 1..80: mol_type = other DNA
aaattgatgtgtctaacacaaggtgcttactctggaaatccaacgccagtgattaaaaagccagaactcaggaaagccac

SEQ ID NO: 162461 - DNA, 80 bp, synthetic construct
  source 1..80: mol_type = other DNA
gtcataggcataatcacagctgggggagaaaatcatgtggctttcacagatttaagaccatacaacaatttggctcaaac

SEQ ID NO: 162462 - DNA, 80 bp, synthetic construct
  source 1..80: mol_type = other DNA
aagtttcccttagataaaaactctccacaacacagagacaccctctacgggggcagtccatataacaccaacatatttaa

SEQ ID NO: 162463 - DNA, 80 bp, synthetic construct
  source 1..80: mol_type = other DNA
caacatatccacaaatgaaacaacgtctaaagccatcactccaactgctacgacaaataccgcaaaaacaacgtcaagcc

SEQ ID NO: 162464 - DNA, 80 bp, synthetic construct
  source 1..80: mol_type = other DNA
gctattccagaacaccaattggcatatataagtacaggaaatgtaacagtaggatacaaacacacccacccaggggaaac

SEQ ID NO: 162465 - DNA, 80 bp, synthetic construct
  source 1..80: mol_type = other DNA
ggctaatgtcaccttcccatgcgcacagccaccgatgtgctatgacaaacaaccatcggagacccttgcactgctgagtg

SEQ ID NO: 162466 - DNA, 80 bp, synthetic construct
  source 1..80: mol_type = other DNA
gataaactttccaagttcattgactggcttaaaggaaaaatactacccacactccggcgtaaaacagagactctgaagga

SEQ ID NO: 162467 - DNA, 80 bp, synthetic construct
  source 1..80: mol_type = other DNA
ttgagtggctaagcgagggtaccatcgctgttgccagaaaatgtctacctgtccgcgtccgtcagacattttgccgtccc

SEQ ID NO: 162468 - DNA, 80 bp, synthetic construct
  source 1..80: mol_type = other DNA
ctacagttttatgcaaagagtgccccaaaccagccaatttcaagaagtgttgccccctgatttgtggtaaggctatacaa

SEQ ID NO: 162469 - DNA, 80 bp, synthetic construct
  source 1..80: mol_type = other DNA
cactgttgggaagcacggagactgcgatcaatttcggcaacgcaactacggttattccacaacctgtggaacacccggct

SEQ ID NO: 162470 - DNA, 80 bp, synthetic construct
  source 1..80: mol_type = other DNA
cctaacagtgtagcagctgaaaacagcttaacaccaaatgaatacagagtaggaggagacacagggtaccaatggtaccc

SEQ ID NO: 162471 - DNA, 80 bp, synthetic construct
  source 1..80: mol_type = other DNA
atcctggcccggaacaaaaaagtcaaattggatcacctgggccggaacgccaacgtgctgacggtgtgtcggcacgtgga

SEQ ID NO: 162472 - DNA, 80 bp, synthetic construct
  source 1..80: mol_type = other DNA
attggcagaagacctgttggaaaacaaacaaggatgtcaaagaatattagaagttttaaccccattaatgccaacaggct

SEQ ID NO: 162473 - DNA, 80 bp, synthetic construct
  source 1..80: mol_type = other DNA
gacattttctggcaacagcgatggtaccctcgcttagccactcagacgcgagtcatgcacgacatcaccatgacgggccc

SEQ ID NO: 162474 - DNA, 80 bp, synthetic construct
  source 1..80: mol_type = other DNA
taaacaccgtaaacggttgaagccacaaatgtcgttacccgcgcatgaactacgcaaagcctagtatccccctgaaaatc

SEQ ID NO: 162475 - DNA, 80 bp, synthetic construct
  source 1..80: mol_type = other DNA
ggctcaggaactggttctgtacgctcagtacatactacgtccagcaacgatactcgtgcagagtttagcgcaaacaggac

SEQ ID NO: 162476 - DNA, 80 bp, synthetic construct
  source 1..80: mol_type = other DNA
agcaattacacctctggtggttatataactttatggtaccagacaaactttgtagccactactactggtgggactgggac

SEQ ID NO: 162477 - DNA, 80 bp, synthetic construct
  source 1..80: mol_type = other DNA
gtaggaaagatgcaatgcttggcactcacattatatgggatctggggttacaatctagttgcaccatggtggcaccctgg

SEQ ID NO: 162478 - DNA, 80 bp, synthetic construct
  source 1..80: mol_type = other DNA
aaggatagtcagttcagacaaaacatatggaatacagaaacagtagtaaaaacagtaaaacacattgcaaagttaaatat

SEQ ID NO: 162479 - DNA, 80 bp, synthetic construct
  source 1..80: mol_type = other DNA
gggaccacccgcacccccacatcacgagaccagagacggagatgtataaaaaaaagctacttttattaaacagcattctc

SEQ ID NO: 162480 - DNA, 80 bp, synthetic construct
  source 1..80: mol_type = other DNA
acatgacagatagaggaagagacaaggtaaaagtgttagagcaaaccaccaatcagcaagcagaattagaagcctttgca

SEQ ID NO: 162481 - DNA, 80 bp, synthetic construct
  source 1..80: mol_type = other DNA
cctgttccaagaccgttggtacttccaaaaagacttaagaaacattccgttgctaaccacacaggccataaccgcaaacc

SEQ ID NO: 162482 - DNA, 80 bp, synthetic construct
  source 1..80: mol_type = other DNA
tgtgttttgtatcagcgtgcaaggatttctgcttgcgtatggccagagacacggatatgcacaaacaagatgatgccatt

SEQ ID NO: 162483 - DNA, 80 bp, synthetic construct
  source 1..80: mol_type = other DNA
gagagcgagtcctctcactccagctcacggagcagcagcgagtcggagagcagctccgattcctgctacagcaagtcctc

SEQ ID NO: 162484 - DNA, 80 bp, synthetic construct
  source 1..80: mol_type = other DNA
tccatatgacagcaactttggctaccctacatacaaagcacaacctcaatatattaaaaacagaagagccttaaacttta

SEQ ID NO: 162485 - DNA, 80 bp, synthetic construct
  source 1..80: mol_type = other DNA
cccgcagcccgagccttttgggggcggcatgtccacagtgacattcagtctactggtgctatatgaccagcacgagagac

SEQ ID NO: 162486 - DNA, 80 bp, synthetic construct
  source 1..80: mol_type = other DNA
tcttagcccaaaagacccaaggttggaaacagatttggatacagcagtgttgtccaaatataagggtaatacagaagtaa

SEQ ID NO: 162487 - DNA, 80 bp, synthetic construct
  source 1..80: mol_type = other DNA
gaaagaggagctactccaccagctccagctccagagacgccaccagcgagtcctcagacgagggctcaagctcgtcttta

SEQ ID NO: 162488 - DNA, 80 bp, synthetic construct
  source 1..80: mol_type = other DNA
aagcaacgcaagcccggtggaccatggagaccagagccaaacacctccagtcctagcatgccagaactaagtccagtcct

SEQ ID NO: 162489 - DNA, 80 bp, synthetic construct
  source 1..80: mol_type = other DNA
ctgcttaaatacagacttttttagacacccacactttcaatattcagcacaaccatttacaccagacggaggaaactcac

SEQ ID NO: 162490 - DNA, 80 bp, synthetic construct
  source 1..80: mol_type = other DNA
catctaaagttatcaaatggctgatacgcattatcagtgccctcacaatcatggttagaaatagtgcagacaccccaact

SEQ ID NO: 162491 - DNA, 80 bp, synthetic construct
  source 1..80: mol_type = other DNA
aaaaaaataacgtgattgtgaacgcggttatcgtgtttttgcagcgtgacggtggaacaacccagtaccagcactaactc

SEQ ID NO: 162492 - DNA, 80 bp, synthetic construct
  source 1..80: mol_type = other DNA
atcactcttgaccgatcatcccacaatcctttgtcaaatactggcgcctttgggcaacagtcaggggctgtatatgtggg

SEQ ID NO: 162493 - DNA, 80 bp, synthetic construct
  source 1..80: mol_type = other DNA
ttaatcagcgtcacaataggaggagactgttacctatataactaactacacttccgaatggctgagttttccacgcccgt

SEQ ID NO: 162494 - DNA, 80 bp, synthetic construct
  source 1..80: mol_type = other DNA
gatccaaaaacagcaactactcaagcagctcaacctgcagcgacagcagcagcgagtcctcagagagggactcaaacaag

SEQ ID NO: 162495 - DNA, 80 bp, synthetic construct
  source 1..80: mol_type = other DNA
ccggcgcctacccgctctcccggctgctccccaagagcccggtgatcgagcaccatggcctatgggtggtgtgcccggag

SEQ ID NO: 162496 - DNA, 80 bp, synthetic construct
  source 1..80: mol_type = other DNA
ttgaggagtatttcaccaaagatcaggacagtgctaacagatacatgtcatggaccataaatgctaggaggatggtgcaa

SEQ ID NO: 162497 - DNA, 80 bp, synthetic construct
  source 1..80: mol_type = other DNA
tatagacctccagtctcccccacctccagctatagctgatcttctcagatctgtgaagacaccagaaattattaaatatt

SEQ ID NO: 162498 - DNA, 80 bp, synthetic construct
  source 1..80: mol_type = other DNA
atcagccgacgcaaccggatgttgccacatgccgtttttacaccttagactcagttcaatggcagagtaattcaccaggg

SEQ ID NO: 162499 - DNA, 80 bp, synthetic construct
  source 1..80: mol_type = other DNA
gtctatccctacttgtgcaaaagtgcaccactttcttctcctctgctgccacagaaattttggataatgacttggtgaag

SEQ ID NO: 162500 - DNA, 80 bp, synthetic construct
  source 1..80: mol_type = other DNA
agggaagttttttcaggcatcgtgtgtaagcagaatatataagtgctgttccctggtgcttcctcgctcactcgagggct

SEQ ID NO: 162501 - DNA, 80 bp, synthetic construct
  source 1..80: mol_type = other DNA
tgttttcccagggtgcaaggaaccagctgcattatcaaatagtgatccacgcttggagaccaacctggatgatgctgtat

SEQ ID NO: 162502 - DNA, 80 bp, synthetic construct
  source 1..80: mol_type = other DNA
gtggttgtggcaattttattaatcatctctcttatctgggtgagcgttatggcttcaggccgggccctcgggctcctggg

SEQ ID NO: 162503 - DNA, 80 bp, synthetic construct
  source 1..80: mol_type = other DNA
ggagtatgtactggtaatattaaaataatgaactatcaccttatgacacatgaggataatcttaacctcgtgacacccat

SEQ ID NO: 162504 - DNA, 80 bp, synthetic construct
  source 1..80: mol_type = other DNA
tcctgccgcggggcctcctgccgcggggcctcctgccgcgggacctcctgccgcggagcctcctgccgcggagcctcctg

SEQ ID NO: 162505 - DNA, 80 bp, synthetic construct
  source 1..80: mol_type = other DNA
cgtgactcccgtggacaccaccttccacgggttgcgttacgtggccccccaacattggaaaaccagaatcgttccaggcg

SEQ ID NO: 162506 - DNA, 80 bp, synthetic construct
  source 1..80: mol_type = other DNA
tggatatacccccactcactcaacttcattaagtttgttttatagacaaaataccactattacaatgggcgctcaagttt

SEQ ID NO: 162507 - DNA, 80 bp, synthetic construct
  source 1..80: mol_type = other DNA
gatacaagaaagtgaatactatcctaagcacatacaatacaacctgctgattggcgaaggaccttgtgaaccaggtgact

SEQ ID NO: 162508 - DNA, 80 bp, synthetic construct
  source 1..80: mol_type = other DNA
cccggtggcggtggactgcctccaagagtacaagtggagaacccgaaacatctccacgaggggatgttcttcagagcgtg

SEQ ID NO: 162509 - DNA, 80 bp, synthetic construct
  source 1..80: mol_type = other DNA
aatatgtccttaaaaatgtttcaagacattaatgttaaatctaacaaagacagtaattatgactggtttccatttactcc

SEQ ID NO: 162510 - DNA, 80 bp, synthetic construct
  source 1..80: mol_type = other DNA
ggaggtccctgaactcccttccgccatagcggacggccacatccaggcattgcctgaaataggccctgaggtcattatat

SEQ ID NO: 162511 - DNA, 80 bp, synthetic construct
  source 1..80: mol_type = other DNA
ggtaccccaccctgttccaccaaaaagaagtgttagaagccatagcccagggaggccccttcgcgtcccacagtgatcaa

SEQ ID NO: 162512 - DNA, 80 bp, synthetic construct
  source 1..80: mol_type = other DNA
ataaaaacatcaacctagacaagttgaaaatcatagcttatggggatgacatactagcatcttacccagaggagctggat

SEQ ID NO: 162513 - DNA, 80 bp, synthetic construct
  source 1..80: mol_type = other DNA
gctggtcggcaagagccggaaacaccgcgagtatcgggccgtcgcttgccgttcgacgatctttagtccggaggacgacg

SEQ ID NO: 162514 - DNA, 80 bp, synthetic construct
  source 1..80: mol_type = other DNA
ccatactccagtctgtacaggcagtggatagatgaatttatttgaatgatataatattatgtttgcattagaactagata

SEQ ID NO: 162515 - DNA, 80 bp, synthetic construct
  source 1..80: mol_type = other DNA
tattatcagcaatgttagcgagcatccactgcttgagggccatagcgcgagtgagccggcaggttgacgcgcgtctgctt

SEQ ID NO: 162516 - DNA, 80 bp, synthetic construct
  source 1..80: mol_type = other DNA
tcaatgcctccacagtgaactttacaccggaaggggtcaccgaatcccgaacaaacctaatgacgacaggggccttcggt

SEQ ID NO: 162517 - DNA, 80 bp, synthetic construct
  source 1..80: mol_type = other DNA
tacatactaaaaaattatccaaattatgatggagccaagatagattctacatccaaagacaggcagagtattaaaaccac

SEQ ID NO: 162518 - DNA, 80 bp, synthetic construct
  source 1..80: mol_type = other DNA
aacataaccagacaatggttcgttcccatatataatggacacaaatacacaaaagaaacagaaacagacaacagtgggtt

SEQ ID NO: 162519 - DNA, 80 bp, synthetic construct
  source 1..80: mol_type = other DNA
aagattcatacacagatgcaggattcataacttgctggtaccaaactagtattgtcactccaccagccacacagagcaaa

SEQ ID NO: 162520 - DNA, 80 bp, synthetic construct
  source 1..80: mol_type = other DNA
gttgtggtaaatctcttgctacgtccgtcattgcacgtggcctcacaacagaagcaggtgtttattcactccctccagat

SEQ ID NO: 162521 - DNA, 80 bp, synthetic construct
  source 1..80: mol_type = other DNA
gctggctaacaacacctagcactaacaaccagtgtcacataaacatgacatacagcaagggcaaatatgaagaatacgag

SEQ ID NO: 162522 - DNA, 80 bp, synthetic construct
  source 1..80: mol_type = other DNA
cgacccaagattatcgtacacaatgttaggagaaattctcaattattacactcactgggctggttccttaaaatttagtt

SEQ ID NO: 162523 - DNA, 80 bp, synthetic construct
  source 1..80: mol_type = other DNA
ctaaggcaagagaagaaaaataggaaatgtgtagagcataacttgtctgccattttccagggtctcggtgatgatactac

SEQ ID NO: 162524 - DNA, 80 bp, synthetic construct
  source 1..80: mol_type = other DNA
ttgtgctttagagcactagatgatgcaactaacaaccatgtgaaggtcttcattaaacccaaacacaccactgcgtggtg

SEQ ID NO: 162525 - DNA, 80 bp, synthetic construct
  source 1..80: mol_type = other DNA
cccctatttaaattgtgttcccatggataatatgttgagacacaacaacgtctcattggtgattatacctcttgtcaagt

SEQ ID NO: 162526 - DNA, 80 bp, synthetic construct
  source 1..80: mol_type = other DNA
gacttcccaaagaaggggcatggtgcactaactcaattatttgcatattattcaggtgagttgaatatacatgttttgtt

SEQ ID NO: 162527 - DNA, 80 bp, synthetic construct
  source 1..80: mol_type = other DNA
tccggaggtgcctcctccgagaaaacccacaccgtttccggctcctccaacaaagtcggatcccgcttttccaagtggtg

SEQ ID NO: 162528 - DNA, 80 bp, synthetic construct
  source 1..80: mol_type = other DNA
aacctcacgaaaggcgagtcggcacacgagtttgctcgaaccaaggccaatggtgaacacacagtgcagtcaatagtgtg

SEQ ID NO: 162529 - DNA, 80 bp, synthetic construct
  source 1..80: mol_type = other DNA
tacaaaaatggcggattccgtgacgtcatggccgccattttaagtaaggcggaacaggctgtcaccctgtgtcaaaggtc

SEQ ID NO: 162530 - DNA, 80 bp, synthetic construct
  source 1..80: mol_type = other DNA
ctcctataactttgggcacggcaagatgccggggggagacaaatacatacccatagagttcaaagacaggtggtacccct

SEQ ID NO: 162531 - DNA, 80 bp, synthetic construct
  source 1..80: mol_type = other DNA
atgacctcctcgaggctctggcccaccataaacctgccccagtgtccctctccctttcccaagctatttccaacaatacc

SEQ ID NO: 162532 - DNA, 80 bp, synthetic construct
  source 1..80: mol_type = other DNA
tgtggctgtggtgactgtgctggtcattttagccgtctggctgctgacctgggcagaccacctgcgccacaagttcccgt

SEQ ID NO: 162533 - DNA, 80 bp, synthetic construct
  source 1..80: mol_type = other DNA
ccggtacttgcaccatacataccgttgagctggttttgcaagtggtatcccaacatagctcaccagaaggaagtacttga

SEQ ID NO: 162534 - DNA, 80 bp, synthetic construct
  source 1..80: mol_type = other DNA
gcatatacagccccttctacctcacacccacaagaatcagcctagactggcacacggcctacacctatgtcaggtacaac

SEQ ID NO: 162535 - DNA, 80 bp, synthetic construct
  source 1..80: mol_type = other DNA
ccaggaatatattccacaaggccacgctacaattttttgaagatttcgaccgtgtcgacacactacgcgattgcggtttc

SEQ ID NO: 162536 - DNA, 80 bp, synthetic construct
  source 1..80: mol_type = other DNA
agagccaggtttaaaaaggcaactcaagcagccctgccaaactaccccacaatcatatccacagacttatatgaatacca

SEQ ID NO: 162537 - DNA, 80 bp, synthetic construct
  source 1..80: mol_type = other DNA
gcattttatataagatagggttagtattaggtattcatgtgggaggaaatggaagaaatggattttctgcaatggttctg

SEQ ID NO: 162538 - DNA, 80 bp, synthetic construct
  source 1..80: mol_type = other DNA
accagtcagacctgtgtgaccgccccctactcaccatctttgcaagtgcagctgacatgcaatatccgttcggctaccca

SEQ ID NO: 162539 - DNA, 80 bp, synthetic construct
  source 1..80: mol_type = other DNA
atacagtaacagaacaagcaatagaagatgtctggaggctatttgagacatcgataaaaccatgtgtcaagttgacacct

SEQ ID NO: 162540 - DNA, 80 bp, synthetic construct
  source 1..80: mol_type = other DNA
ttaaaacagctgtgtggttgcacccaccaccaggcacaatgtgcgttgtacactgggattccggtcactttgtacgcctg

SEQ ID NO: 162541 - DNA, 80 bp, synthetic construct
  source 1..80: mol_type = other DNA
cgctggacgcgcgctgtatatccctccttatgagctgctcctgcatgagtggtatgaaaaattttaaattacatatatag

SEQ ID NO: 162542 - DNA, 80 bp, synthetic construct
  source 1..80: mol_type = other DNA
tccaagcaagactaaactacaacctagcatcttttatgatgtgtttccaggcaataaagagccagctgtactttctgatc

SEQ ID NO: 162543 - DNA, 80 bp, synthetic construct
  source 1..80: mol_type = other DNA
gtcgtccatagtgtgcgcgtgctgacggacgtgggagcgcacctccaccgggaacaaagcgttccaatactccagcacga

SEQ ID NO: 162544 - DNA, 80 bp, synthetic construct
  source 1..80: mol_type = other DNA
agaaggacaaaagtaaatggagaatgttaatagatttcagggagttaaataaggccacacagaacttcacagaagtacag

SEQ ID NO: 162545 - DNA, 80 bp, synthetic construct
  source 1..80: mol_type = other DNA
caggagcagaagcaaatcaagtcaaagctcaaacacctcatcaagcaattagtaaaaacccaacatcacctacaaggccc

SEQ ID NO: 162546 - DNA, 80 bp, synthetic construct
  source 1..80: mol_type = other DNA
aaactggctaacatctgaaatctcaaatagtacatttaaaactggaaacaatagtatatatggtcaagttaactatagac

SEQ ID NO: 162547 - DNA, 80 bp, synthetic construct
  source 1..80: mol_type = other DNA
tacccatcactgttaccgtagccccgatgtctgcagagtataacgggttacgacttgccagcacacagggcctgccaacc

SEQ ID NO: 162548 - DNA, 80 bp, synthetic construct
  source 1..80: mol_type = other DNA
tcacaacaagcgttgcaccgacctggactttggcgacctgctcaagtacatggagttcggtatcccgctcaaggaggagc

SEQ ID NO: 162549 - DNA, 80 bp, synthetic construct
  source 1..80: mol_type = other DNA
tatgccattacccccctcacaattgccaccaccagcagcaccagcacagccacctccaggggtcatcaacgaccaacaat

SEQ ID NO: 162550 - DNA, 80 bp, synthetic construct
  source 1..80: mol_type = other DNA
gggggggcgcgctgcgctcgcggcccccggggagaggctcaacctccccgcctctctcgcatgggggggggggttctccc

SEQ ID NO: 162551 - DNA, 80 bp, synthetic construct
  source 1..80: mol_type = other DNA
aacaaaacagtcgtgccagtaacaattatgtcaggtctaatcttccattcacagcctattaatcaaagacccaggcaagc

SEQ ID NO: 162552 - DNA, 80 bp, synthetic construct
  source 1..80: mol_type = other DNA
agtcgttgacccgatcaccgtgggcccccgattcgtcttccactcctgggactggcgtagaggcttccttagcgaagcag

SEQ ID NO: 162553 - DNA, 80 bp, synthetic construct
  source 1..80: mol_type = other DNA
gtttgctccactctatgcacttgagaacaaaaaagtcactgagcttcaaaaagaactaaaacacatgttagcatacaaga

SEQ ID NO: 162554 - DNA, 80 bp, synthetic construct
  source 1..80: mol_type = other DNA
cagctagcgatttcaggaactgtgttcgcagtttgtggcagagagatcttatggttgtggaatcaaaagcacaaggcata

SEQ ID NO: 162555 - DNA, 80 bp, synthetic construct
  source 1..80: mol_type = other DNA
gggttggtgtaggggtgacgggggctggccaggatgggaaacacatcagcctcctgatgaggatgatcaacagccacgtg

SEQ ID NO: 162556 - DNA, 80 bp, synthetic construct
  source 1..80: mol_type = other DNA
gtcattttagcccgttgggtttcattaaggtgtgtcaccaggtgggtggtacctggaggttattctattgggataacgag

SEQ ID NO: 162557 - DNA, 80 bp, synthetic construct
  source 1..80: mol_type = other DNA
tggctgtaaataaaatgtcataacctggagtctgcatgtctgttgttttattcagtaaaccagtagtgcgcgtgagttct

SEQ ID NO: 162558 - DNA, 80 bp, synthetic construct
  source 1..80: mol_type = other DNA
actatagaaataagaccaacttggaatgaggtacaaaactcaacacaacttaattcatcaggtacaaatgcaactgaaag

SEQ ID NO: 162559 - DNA, 80 bp, synthetic construct
  source 1..80: mol_type = other DNA
gaaagtttttaatagcatacaccccccctggtgctagcatcccagccagccgtaccgacgcaatgcttggtacacatatc

SEQ ID NO: 162560 - DNA, 80 bp, synthetic construct
  source 1..80: mol_type = other DNA
tataacatatgaaaaagccaaccctggtgagacggggggtactttccagaagactgctaccttgaccacaggagatggca

SEQ ID NO: 162561 - DNA, 80 bp, synthetic construct
  source 1..80: mol_type = other DNA
ttgggagagcctctatatctaaaggcctttcctcccaatacaaatgttactaacatctgccctctggagacctgctatgt

SEQ ID NO: 162562 - DNA, 80 bp, synthetic construct
  source 1..80: mol_type = other DNA
acaggtggtcttttagcaacgaagacctagacctagccctttacttcgggtgcagtttcactttctacagacaccgcact

SEQ ID NO: 162563 - DNA, 80 bp, synthetic construct
  source 1..80: mol_type = other DNA
caactcaactagaggagccggatttgtaaaccaaaatgtcagtgttcactataattattgtcagtacaaccctaacaatg

SEQ ID NO: 162564 - DNA, 80 bp, synthetic construct
  source 1..80: mol_type = other DNA
tgtccaacagtgagacccctattgaatttgacagaacaagcacaacaccagaagttggagtggtacagaaggcagtgtac

SEQ ID NO: 162565 - DNA, 80 bp, synthetic construct
  source 1..80: mol_type = other DNA
gcacataagcaagggggaaaccgcctccaactttagtgctagtaccagcactgaagagcatggagtgcaggcagctgtgt

SEQ ID NO: 162566 - DNA, 80 bp, synthetic construct
  source 1..80: mol_type = other DNA
catgctaaccctggtatcctgaccggatcagctgtgggatgtaatccagacaccttttggtcccagatgtatgcctccat

SEQ ID NO: 162567 - DNA, 80 bp, synthetic construct
  source 1..80: mol_type = other DNA
atacgggtacacagaatactgcagcaaagtaacaggagactcaaacatagaacacaactgcagatgtgttataagaagcc

SEQ ID NO: 162568 - DNA, 80 bp, synthetic construct
  source 1..80: mol_type = other DNA
agtctaaagtatatacttatcactcaaaccgtatgtattctgattgtctagcaacttctgaaaccaattatggctatttg

SEQ ID NO: 162569 - DNA, 80 bp, synthetic construct
  source 1..80: mol_type = other DNA
aacccccacactacaaacagtgctgcccaattttatgtgggaaagccatagtcctccagaaccgtagatcacaggttagt

SEQ ID NO: 162570 - DNA, 80 bp, synthetic construct
  source 1..80: mol_type = other DNA
catgatgatgcaaagaaaaaagaaactcattgtacctagctttcaaacaagacccaagggcaaaaagagatacagggtcc

SEQ ID NO: 162571 - DNA, 80 bp, synthetic construct
  source 1..80: mol_type = other DNA
ggcagaatttgcggccggtggagccagtactcgggcatagaagacagcggcggggctccgctccccatcccaggcaacct

SEQ ID NO: 162572 - DNA, 80 bp, synthetic construct
  source 1..80: mol_type = other DNA
tctcagcacactgtatgacgagtaccagaaacatagaaacacatggagcaaatcaaatgtagaccttgaactcgttagat

SEQ ID NO: 162573 - DNA, 80 bp, synthetic construct
  source 1..80: mol_type = other DNA
aaaacaattacaatgtaacctttcagcttaactacaaataaatgccagcttcactgttctaggccgtgggagtttcactt

SEQ ID NO: 162574 - DNA, 80 bp, synthetic construct
  source 1..80: mol_type = other DNA
acggttttgctgctgcactcaagagatcatattttgtggataaccaaggggaaattcaatggatgcgccccagtaaggac

SEQ ID NO: 162575 - DNA, 80 bp, synthetic construct
  source 1..80: mol_type = other DNA
cccccactaaagcaccatcgctggctagagggagtgagccttcatacaatttcaaagtggttgtgtcatcaaaagccatg

SEQ ID NO: 162576 - DNA, 80 bp, synthetic construct
  source 1..80: mol_type = other DNA
ggggcggggagcggccaatggagcgtgaagaagggccccagggctgacccctgaaaacgtgacggggggccccggggtga

SEQ ID NO: 162577 - DNA, 80 bp, synthetic construct
  source 1..80: mol_type = other DNA
aagcctttaaccgttacccgccaattgactgcgagacagctagtaacattatgttgtttgttggacgttcgatcaggcag

SEQ ID NO: 162578 - DNA, 80 bp, synthetic construct
  source 1..80: mol_type = other DNA
tgtatcttccaccatataacctgctagagcgtacttggattgataaattcatttaaatagtaacagtaatgtagaaatct

SEQ ID NO: 162579 - DNA, 80 bp, synthetic construct
  source 1..80: mol_type = other DNA
caccaaggggcaacttcctcggggtccggcgctacgcgcttcgcgctgcgccggacgcctcggacccccccccgacccga

SEQ ID NO: 162580 - DNA, 80 bp, synthetic construct
  source 1..80: mol_type = other DNA
acgctggaaagtgactcggggcggtgaaagagaccaccaccgccgctttcttcaccctctcccccgccggccccgccccc

SEQ ID NO: 162581 - DNA, 80 bp, synthetic construct
  source 1..80: mol_type = other DNA
gcactcttattgtggctatgataccagagcaccaactagcgagtgcaacaacaggaaatgccagagctgggtataaatta

SEQ ID NO: 162582 - DNA, 80 bp, synthetic construct
  source 1..80: mol_type = other DNA
ccgcagcgagaacgccacggagggagatccttatgtgcctacagtacctaaatactgtgtaaactttgacttaaatgcgc

SEQ ID NO: 162583 - DNA, 80 bp, synthetic construct
  source 1..80: mol_type = other DNA
actaccccatttaacctaaaggtgctgtacgaccagcaccagagaggactcaacaggtggtccttttcgaacgaccaact

SEQ ID NO: 162584 - DNA, 80 bp, synthetic construct
  source 1..80: mol_type = other DNA
tggtagtataagattcagctttcttttttgtggtacagcaaacacaacactcaagttgcttgtagcatacacaccccctg

SEQ ID NO: 162585 - DNA, 80 bp, synthetic construct
  source 1..80: mol_type = other DNA
acaaattgttgacccacgctccgtgggccctccctgggtattccacacctgggactacagacggggactctttggtgcag

SEQ ID NO: 162586 - DNA, 80 bp, synthetic construct
  source 1..80: mol_type = other DNA
cacacgcacaaccaggagatgatgtgttagtaaatggtcagaaggtcagagttaaggataagtataaattagtggatcca

SEQ ID NO: 162587 - DNA, 80 bp, synthetic construct
  source 1..80: mol_type = other DNA
ggtcctgggaccccgcgccgactggcaggaggtccccatggcacagggctaggggtccaggtggcagccgcggcccagcg

SEQ ID NO: 162588 - DNA, 80 bp, synthetic construct
  source 1..80: mol_type = other DNA
tgccgtactggcgaaacgcagaaagtggccgccgtcccgcgagcaaataccgcgggacggcacgcaccggcagcgcgcac

SEQ ID NO: 162589 - DNA, 80 bp, synthetic construct
  source 1..80: mol_type = other DNA
caccgcggccggccgcaggaagccgcccggcgcgtcgtctgtgtgcgggagccgaaacaccgtgcctctttatatcgtcc

SEQ ID NO: 162590 - DNA, 80 bp, synthetic construct
  source 1..80: mol_type = other DNA
agctgaagcaaactatgacccaaacagatctaaatgcatgctaaaagaccttccactatatatgctattctatggctact

SEQ ID NO: 162591 - DNA, 80 bp, synthetic construct
  source 1..80: mol_type = other DNA
taacaacatatggttttgggcatcaaaataaaggggtttatgtggcagggtacaagatcataaattaccatttggccacc

SEQ ID NO: 162592 - DNA, 80 bp, synthetic construct
  source 1..80: mol_type = other DNA
agtgtgtacgcgcgcgcgacttcaatccctacgtgcgttatagtcatcgactccacacttatgcggtttgtgaaaagttt

SEQ ID NO: 162593 - DNA, 80 bp, synthetic construct
  source 1..80: mol_type = other DNA
acaccaacaagattggtactgaaagtatgctaatttggatgacagaacaaggtattataactaaagaagtgcaaagggtc

SEQ ID NO: 162594 - DNA, 80 bp, synthetic construct
  source 1..80: mol_type = other DNA
attaactattttaaagatgcagcatccagtggagcctcaaaattagagttttcacaagatccaagcaagttcacagaccc

SEQ ID NO: 162595 - DNA, 80 bp, synthetic construct
  source 1..80: mol_type = other DNA
gggccatcacacctctctccccagtggcctcaatcaccaccttcggttttggacaccaaaacaaagcagtatacgtagcc

SEQ ID NO: 162596 - DNA, 80 bp, synthetic construct
  source 1..80: mol_type = other DNA
gggtagcttgttacaacttgatttccagaaccctaggccttacaataaacaagtcaatatttatgataatgggcccacaa

SEQ ID NO: 162597 - DNA, 80 bp, synthetic construct
  source 1..80: mol_type = other DNA
ttgagaccctaggcataatctgtgttaaatgtccctacacagatccccctctagttcacaaagacaaatctaaaaataac

SEQ ID NO: 162598 - DNA, 80 bp, synthetic construct
  source 1..80: mol_type = other DNA
caggtccaaaccgatcagggtcactttacaatgttgggagtgcgagaccacttggctgtgctccccaggcactcccaacc

SEQ ID NO: 162599 - DNA, 80 bp, synthetic construct
  source 1..80: mol_type = other DNA
tttgtaggatggctatgtaagaaggaccacactcatatacgtgaatggttccgccagtgcaccgggagaccctcaccatc

SEQ ID NO: 162600 - DNA, 80 bp, synthetic construct
  source 1..80: mol_type = other DNA
tatccaagtgtattcttccatgtgtttcctggagaaaaagaacctgccgccctcacccagaaagatcctagactagagac

SEQ ID NO: 162601 - DNA, 80 bp, synthetic construct
  source 1..80: mol_type = other DNA
tttacacactaactagtgtcaaatggcatggttcatctaagggatggtggtggaagattcctgattgcctcaaagatatg

SEQ ID NO: 162602 - DNA, 80 bp, synthetic construct
  source 1..80: mol_type = other DNA
ctacgggggtgggcacagcaccatgaggttctccctgtatgtactgtaccaggactttctaagacacatgaactttttta

SEQ ID NO: 162603 - DNA, 80 bp, synthetic construct
  source 1..80: mol_type = other DNA
tggcaagaaattatgaagactcaataacagtgttagcaactcttagcctgctggggtgcgattcttcaccgtggcactgg

SEQ ID NO: 162604 - DNA, 80 bp, synthetic construct
  source 1..80: mol_type = other DNA
aaaaattggggtttcagtgctccaacttaatacaacaaatatgcactacacaccacattttcagggaccaaatttatgta

SEQ ID NO: 162605 - DNA, 80 bp, synthetic construct
  source 1..80: mol_type = other DNA
aggcataaagaaaagagacatattgaataaagttactaaggacacaaacaaattacaactgatgatggacacctacggac

SEQ ID NO: 162606 - DNA, 80 bp, synthetic construct
  source 1..80: mol_type = other DNA
acaatatggaatacccacatcagaaggcctagagtaccacacaggactatttagtgctattttcctatccccagtaagac

SEQ ID NO: 162607 - DNA, 80 bp, synthetic construct
  source 1..80: mol_type = other DNA
cagactgggacttcgtatctaccccaccactggtcaggttagcatttaacctggtaaaagatcccataccaggcgcagaa

SEQ ID NO: 162608 - DNA, 80 bp, synthetic construct
  source 1..80: mol_type = other DNA
tatccctagaaccggtttttgagattttcttcaacaacactcctctttacactcccaaacgtttccaatttagattccgc

SEQ ID NO: 162609 - DNA, 80 bp, synthetic construct
  source 1..80: mol_type = other DNA
acattacatcaagacacgcacaagcatcaagacttttggaccaagtgatcagtttgtacacactcaacacgccaagtaca

SEQ ID NO: 162610 - DNA, 80 bp, synthetic construct
  source 1..80: mol_type = other DNA
tagcaggcctaaactgtacaatcccagagacccggaccaactgtttgtaatgtacagctacaactttgggcacggacgca

SEQ ID NO: 162611 - DNA, 80 bp, synthetic construct
  source 1..80: mol_type = other DNA
agctcgtcgaagaggacttccgggttgtgactcctccccagtcaggtgacttgtgacgtagttgctgacctttaacccgg

SEQ ID NO: 162612 - DNA, 80 bp, synthetic construct
  source 1..80: mol_type = other DNA
agaaggcagtactttgtttccaaacaaggacaaatagtggcaagacaaaaactaaaggatcttaatttaatgccagtcaa

SEQ ID NO: 162613 - DNA, 80 bp, synthetic construct
  source 1..80: mol_type = other DNA
gaaacgcgaccgggccctccagcgggcgcaatgagtgccagagctgctgaagggcctcggtggcgaagcaccggcgtgcg

SEQ ID NO: 162614 - DNA, 80 bp, synthetic construct
  source 1..80: mol_type = other DNA
cagtagtgtgaatgataccgtgttgtttaggacaacttttggaaatcttttttcaaaatttcacttgaaccctgggattg

SEQ ID NO: 162615 - DNA, 80 bp, synthetic construct
  source 1..80: mol_type = other DNA
ttcaggtaacccaacacataacaaattaaagccaccaacactacgaccagtagtggcacaaggtcccaacacagagtttg

SEQ ID NO: 162616 - DNA, 80 bp, synthetic construct
  source 1..80: mol_type = other DNA
taatagcattatcgtgtggcgcaactacgtggatgctctgcaagtcgcggaacacgtgcctcaccccttacagactgacc

SEQ ID NO: 162617 - DNA, 80 bp, synthetic construct
  source 1..80: mol_type = other DNA
gtgcgcttactaagggataccacacacattagtcagagtgctctaatagctaacacccaggggattgatgatattattga

SEQ ID NO: 162618 - DNA, 80 bp, synthetic construct
  source 1..80: mol_type = other DNA
taagaccccccactctattcacagacaaatggtactttcaaagagacttctgtgaagtgccattagccaacttaggcgtt

SEQ ID NO: 162619 - DNA, 80 bp, synthetic construct
  source 1..80: mol_type = other DNA
ggcccctgggcctacagagacgacgaaaaaaactcccaacttatagccaaatacaagtttggcttcaagtggggtggcaa

SEQ ID NO: 162620 - DNA, 80 bp, synthetic construct
  source 1..80: mol_type = other DNA
aatggtaccttgttaggcaatttattgattttccctcaccaatttattaatctcagaacaaataatacggctacaatagt

SEQ ID NO: 162621 - DNA, 80 bp, synthetic construct
  source 1..80: mol_type = other DNA
gtttgacttccgtgttaaaggtcaaacacccggcggcaccacaaaatggccgtcaattgcttccggggtcagaggttacc

SEQ ID NO: 162622 - DNA, 80 bp, synthetic construct
  source 1..80: mol_type = other DNA
actacgtcctccgcgtccctcagatcttctactcagaccctactcaacgaagatagcaaatgtattcaaaatgacagctg

SEQ ID NO: 162623 - DNA, 80 bp, synthetic construct
  source 1..80: mol_type = other DNA
agaatatataaaagccagaaacatacataaatgaattgctagatacagggttctttgtgtactagcccaatcatgtcaat

SEQ ID NO: 162624 - DNA, 80 bp, synthetic construct
  source 1..80: mol_type = other DNA
gtccaggaggcagccgcggcccagcgcgccccgttcacggtggaggaccgcggccgagccaccaggggcccggccggtgt

SEQ ID NO: 162625 - DNA, 80 bp, synthetic construct
  source 1..80: mol_type = other DNA
agatgtacagagtgcggctgagtgacaaaccacacacggatgatccaatcctttgtctctcattgtctccggcttctgac

SEQ ID NO: 162626 - DNA, 80 bp, synthetic construct
  source 1..80: mol_type = other DNA
acaaagtgtcgtaataatggatgatattatgcaaaatccagctggggatgatatgactctattctgtcaaatggtttcaa

SEQ ID NO: 162627 - DNA, 80 bp, synthetic construct
  source 1..80: mol_type = other DNA
cagtcttataaagaccatttgcaatacacatcacatattcagagatcaaatttatgaagttgagggtggcatgccatcag

SEQ ID NO: 162628 - DNA, 80 bp, synthetic construct
  source 1..80: mol_type = other DNA
tagcaggaaggtggcctatcactcatttgcacacagataatggtgccaacttcacttcacaggaagtaaagatggtagca

SEQ ID NO: 162629 - DNA, 80 bp, synthetic construct
  source 1..80: mol_type = other DNA
ttgcaccactagattacgcagcacaagcttcggagtatgtaccagtgacggtcaccattgcacccatgtgtgcggaatat

SEQ ID NO: 162630 - DNA, 80 bp, synthetic construct
  source 1..80: mol_type = other DNA
gacatatacacaaacctaagcatccttccagaaaaagtaaacaactttcaatcctccttttacaacatagtacatccaca

SEQ ID NO: 162631 - DNA, 80 bp, synthetic construct
  source 1..80: mol_type = other DNA
atgaacttcgtgctcccactaaggtgaaagcagggaaaacaagggctattgaagcagctagtatgaatgatacagcaaac

SEQ ID NO: 162632 - DNA, 80 bp, synthetic construct
  source 1..80: mol_type = other DNA
acaactacagttgggcaataaacagatgcttgctgtcatagacaccattagaggtgagataaatgagaatataataccga

SEQ ID NO: 162633 - DNA, 80 bp, synthetic construct
  source 1..80: mol_type = other DNA
gtacactgctaggggagatactgaactactatgctcattggtccgggagcttaaagtttacattcttgttttgtggcacg

SEQ ID NO: 162634 - DNA, 80 bp, synthetic construct
  source 1..80: mol_type = other DNA
aggtgagagaggtcacgagattcgtgatcagggtagggataacaaccggcctgatgaggatcccttctttaactgcaatg

SEQ ID NO: 162635 - DNA, 80 bp, synthetic construct
  source 1..80: mol_type = other DNA
agaaaagtcgctgtcactcatcgaagagacgaccccggcgatccaggagcagttcagaaagcagctcaagcgacagcagc

SEQ ID NO: 162636 - DNA, 80 bp, synthetic construct
  source 1..80: mol_type = other DNA
gattggtggatacacactctgctaaaaataaaagatatggttttgagtgttttcaaacccagtatggagagtaaagctat

SEQ ID NO: 162637 - DNA, 80 bp, synthetic construct
  source 1..80: mol_type = other DNA
acacatcaaagatccccctgtagtagcttgtacaaatacgagcaacgagacgtcaccatcgtgtaacaagtataatgtgc

SEQ ID NO: 162638 - DNA, 80 bp, synthetic construct
  source 1..80: mol_type = other DNA
gaaacaaatgttcaagcgagagaaggcaaattcaatgttgccgtaggagggatagaacagttacttactaatgatgatga

SEQ ID NO: 162639 - DNA, 80 bp, synthetic construct
  source 1..80: mol_type = other DNA
caagaagcgttccaggccttcgcgagggttacaagagagactcttacaaacgcctgcaggggcttgtggaggacattgga

SEQ ID NO: 162640 - DNA, 80 bp, synthetic construct
  source 1..80: mol_type = other DNA
ttataccaggaacagatcaagggtttcccttatgctactcaggagtctcaagaggaattaaccctaaatgtggacaagct

SEQ ID NO: 162641 - DNA, 80 bp, synthetic construct
  source 1..80: mol_type = other DNA
gttggcattaaaaaacagaataagcacacaatataacgccactagtggcacaactactccaacgcacggctggatgggca

SEQ ID NO: 162642 - DNA, 80 bp, synthetic construct
  source 1..80: mol_type = other DNA
ccccctcaagtttgcaggcactgcaacatacgttcctatcactgtgacagttgcaccgatgtgtgcggagtacaacggac

SEQ ID NO: 162643 - DNA, 80 bp, synthetic construct
  source 1..80: mol_type = other DNA
gtgttaaacacaccagggagtaaccagttcatgacatcggacgattttcaatccccttcggcaatgccacaattcgacgt

SEQ ID NO: 162644 - DNA, 80 bp, synthetic construct
  source 1..80: mol_type = other DNA
ttaaaagactacataaaccagcttgggaatgcttttggtgagggtttttccacaaatatcaaacatcatatctctgagac

SEQ ID NO: 162645 - DNA, 80 bp, synthetic construct
  source 1..80: mol_type = other DNA
cgaaattactaagagaagaaatacacaatttgagtgggaaactaaatttactgagaacgcaacacacatcaacgccacct

SEQ ID NO: 162646 - DNA, 80 bp, synthetic construct
  source 1..80: mol_type = other DNA
cactatcacaccactgacagcagtcaataatatcaacacttttggtgggttcggacaccagaacaaggcagtttacgtag

SEQ ID NO: 162647 - DNA, 80 bp, synthetic construct
  source 1..80: mol_type = other DNA
aatgttgccaaaccggttctttcccgttatagccatagcgttcccaggcaaaagcaaacgccgaacctaatgcagtaaaa

SEQ ID NO: 162648 - DNA, 80 bp, synthetic construct
  source 1..80: mol_type = other DNA
gcaaccgcatgtgacctgcaatatccgttcggctcaccacaaactgacaatgtatgtgtcaacttccagatattggggca

SEQ ID NO: 162649 - DNA, 80 bp, synthetic construct
  source 1..80: mol_type = other DNA
gtgcctcccccccgaaaactcgaaaagatgcaatgctaggtactcacatcatctgggatttgggacttcaatctagttgc

SEQ ID NO: 162650 - DNA, 80 bp, synthetic construct
  source 1..80: mol_type = other DNA
atatagccaataaagatagttgtggcaaagagccatgttatggattagtaatggaaagtatcgtcaccaataggggagtg

SEQ ID NO: 162651 - DNA, 80 bp, synthetic construct
  source 1..80: mol_type = other DNA
cagaggctcaattcagagtaccatcacattgtccagatggtactgcaaatgataaaaaagaaacctggacaaacgtgtgg

SEQ ID NO: 162652 - DNA, 80 bp, synthetic construct
  source 1..80: mol_type = other DNA
cttccccaaaactgacttccacatcttgggaatcatactacaaagattttttaaacaaagctatacctgcaaacaacgac

SEQ ID NO: 162653 - DNA, 80 bp, synthetic construct
  source 1..80: mol_type = other DNA
ccttcacgcatgaggccctaagtaagggggaaactgcaatggaattttccacaggcgatgcagcagaaggagtacagtct

SEQ ID NO: 162654 - DNA, 80 bp, synthetic construct
  source 1..80: mol_type = other DNA
ggtggtggtgctggacgagctgggcgccgtgttcgggtactgcccgctggacgggcacgtgtacccgctggcgtcggagc

SEQ ID NO: 162655 - DNA, 80 bp, synthetic construct
  source 1..80: mol_type = other DNA
gccatggcgtaatagcccaaaaaaagtttgtgccccaacggtacgggctgcaggtaaagtgcgatcaagaacgcgataac

SEQ ID NO: 162656 - DNA, 80 bp, synthetic construct
  source 1..80: mol_type = other DNA
cataaccttccaagttctctcttccatttacaacggcttcctctctataacccacacttcctcaacaagtgacaatatca

SEQ ID NO: 162657 - DNA, 80 bp, synthetic construct
  source 1..80: mol_type = other DNA
gaatactgcctggcaggtgactcaaattcaaaaacaaactacaccacatatattaatgccaatccaggcgaggtaggggg

SEQ ID NO: 162658 - DNA, 80 bp, synthetic construct
  source 1..80: mol_type = other DNA
ccgtcgtcatggtcttctttagcctgctcctccggctgctgggttggcggtggaggcggcggctgatccacggtgttcat

SEQ ID NO: 162659 - DNA, 80 bp, synthetic construct
  source 1..80: mol_type = other DNA
gggcggtggaggcgcgcgtacagacgttggaggcgacgcagacgcagacgcaggcacaaaaagaaacttgtactgactca

SEQ ID NO: 162660 - DNA, 80 bp, synthetic construct
  source 1..80: mol_type = other DNA
cagctagtggaagctccagtagacattatgtataccaaattatgtatatacccccgggggccccggtgccgagaaagtgg

SEQ ID NO: 162661 - DNA, 80 bp, synthetic construct
  source 1..80: mol_type = other DNA
ggtctgggaacaatggtggactgactattggcaggtcacctgggtcctagactgggattttgtatccacaccacccctgg

SEQ ID NO: 162662 - DNA, 80 bp, synthetic construct
  source 1..80: mol_type = other DNA
cggaaccaatatgcaccgttaccaacagttatcatcatactttccctcgtggtaccttatgtttcgattgtaacatgaca

SEQ ID NO: 162663 - DNA, 80 bp, synthetic construct
  source 1..80: mol_type = other DNA
agtatcaaatgatgactactttcaaacactagatggactctggggaaatcctatatatgctaactccagaaacaacggag

SEQ ID NO: 162664 - DNA, 80 bp, synthetic construct
  source 1..80: mol_type = other DNA
gtgtaccctttataccaccaatggctgacctcccagataaaggaaaaccattcacatcaaaatttgtacttgcaagcacc

SEQ ID NO: 162665 - DNA, 80 bp, synthetic construct
  source 1..80: mol_type = other DNA
tactacacagatggatcctgtaacagaaactctaaggaggggaaggcaggatatgtcacagacagaggaaaggataaggt

SEQ ID NO: 162666 - DNA, 80 bp, synthetic construct
  source 1..80: mol_type = other DNA
tggattcacacctttgaccaaatccacccctgacatcatctcagttgtgttactaattaggagacattatcacaatggga

SEQ ID NO: 162667 - DNA, 80 bp, synthetic construct
  source 1..80: mol_type = other DNA
gggcacgggactgctagaatgtctctaaaagtactgtatgacgaccacctaaaaggactgaacatatggacgtacagtaa

SEQ ID NO: 162668 - DNA, 80 bp, synthetic construct
  source 1..80: mol_type = other DNA
gcaggtccatcagatttgtatgtgcactctagtaattttatttataaaaacttgcacttgtgtgaaccagaaaacctaaa

SEQ ID NO: 162669 - DNA, 80 bp, synthetic construct
  source 1..80: mol_type = other DNA
caactgttatagcaagaggtctagctccagagtctagtgtatactcactgccacccgatccaaagcactttgatggatat

SEQ ID NO: 162670 - DNA, 80 bp, synthetic construct
  source 1..80: mol_type = other DNA
ggagccatcaaggggggccagtgggtgggcacctggtagagtccgtcatcatcttcctcacctgcccctgagtcactgcc

SEQ ID NO: 162671 - DNA, 80 bp, synthetic construct
  source 1..80: mol_type = other DNA
tgcgcggcgactgtgcgtgtcgtcccacggtatttgctcgcgggaccggactcaggatgtttcgcgcgggttgcgctgcg

SEQ ID NO: 162672 - DNA, 80 bp, synthetic construct
  source 1..80: mol_type = other DNA
aaggtaaacagagatgtccaagttgagagagacatcaatagggccatgaccatactgcaagcaataactacttttgccgc

SEQ ID NO: 162673 - DNA, 80 bp, synthetic construct
  source 1..80: mol_type = other DNA
cgccggccccgccagcgcaaacacccccgttcccgcaacacgccgtccccgccggcggtcagcacgcgcaaaaacccgcg

SEQ ID NO: 162674 - DNA, 80 bp, synthetic construct
  source 1..80: mol_type = other DNA
aaatgaccttgtttttgttctgttttctcttgttgggaatcgtcgactttgaattcttcgagttatcggaaagctgaggt

SEQ ID NO: 162675 - DNA, 80 bp, synthetic construct
  source 1..80: mol_type = other DNA
gggtcccggcggcaacaacccagcggcgtcagcccccgccgcagttgcggcagaagccgcgtctgtagatatactgacgg

SEQ ID NO: 162676 - DNA, 80 bp, synthetic construct
  source 1..80: mol_type = other DNA
cgtacgttaactcactgtccatagattgcatggccagacataataactggggtttggtcattattccagttgttccatta

SEQ ID NO: 162677 - DNA, 80 bp, synthetic construct
  source 1..80: mol_type = other DNA
ggagctgaagtaaccggtactcggaaggatgaacctccaacactaaaaccacgaatggaagtagaattcctaaagagaaa

SEQ ID NO: 162678 - DNA, 80 bp, synthetic construct
  source 1..80: mol_type = other DNA
cgacttcagtgtgcgattactacgtgacaccacccacatttcacaatctgcgcttccgcagggcattgaagacttgatta

SEQ ID NO: 162679 - DNA, 80 bp, synthetic construct
  source 1..80: mol_type = other DNA
gaattacgcagggccgtgacacaaggaccagaacatgaattcatgtatgccctactcaaaaggaattgtcacatcgcaga

SEQ ID NO: 162680 - DNA, 80 bp, synthetic construct
  source 1..80: mol_type = other DNA
cagatcatgccgtggtctccgccgagacataacattacaacgagacaggatctgtggattcaatcagttatttattcaca

SEQ ID NO: 162681 - DNA, 80 bp, synthetic construct
  source 1..80: mol_type = other DNA
actatgtaaaaactgattcatcggacctagggcgagtagcagtgtatgtttggacaccactgacaacatcaagtggttcc

SEQ ID NO: 162682 - DNA, 80 bp, synthetic construct
  source 1..80: mol_type = other DNA
gccgggcgggccggcctcctttcctggaaatccagccatggatcccacccgaggtctgtgtgccctctccacgcacgacc

SEQ ID NO: 162683 - DNA, 80 bp, synthetic construct
  source 1..80: mol_type = other DNA
ccgaaaaaatagccggttgatgtgacggcgcacggcttgcgcgttaggattgagacacttggtgcccttgtcctttaaaa

SEQ ID NO: 162684 - DNA, 80 bp, synthetic construct
  source 1..80: mol_type = other DNA
ggttcccggcctgaatttgttaagctcactatggaatatgatgataaggtgtccaagagccaccacacctgcgccctgat

SEQ ID NO: 162685 - DNA, 80 bp, synthetic construct
  source 1..80: mol_type = other DNA
cagtgcagcagcaacagcaactagagactttatcagaacagaagccagttacatcagctatgggtggcaatacttcctcg

SEQ ID NO: 162686 - DNA, 80 bp, synthetic construct
  source 1..80: mol_type = other DNA
agaccgggcacacttcgcaagtagtacctggagacaccatgcagaccaggcacgtgagaaattaccactcgagatcagag

SEQ ID NO: 162687 - DNA, 80 bp, synthetic construct
  source 1..80: mol_type = other DNA
tcctcctccttctttggcggtagccgcgggagtggcgggccaagcgtccagtctggccagagggccggtctcgatctccg

SEQ ID NO: 162688 - DNA, 80 bp, synthetic construct
  source 1..80: mol_type = other DNA
tcagctcagttaatgaccttagatattgaccacagtaacatgtccttagaagatagtgtttttggtatagagggtcttga

SEQ ID NO: 162689 - DNA, 80 bp, synthetic construct
  source 1..80: mol_type = other DNA
gtggagacgccgcgccttcaggcccagaaggagatggaggacgcggcgccgccgaaggagactacggccccgaagagcta

SEQ ID NO: 162690 - DNA, 80 bp, synthetic construct
  source 1..80: mol_type = other DNA
cactaaatgacaaaggaaagggcaacaaaatatggttccagtaccacagcaaagtaaacacagaccttagagacagaggc

SEQ ID NO: 162691 - DNA, 80 bp, synthetic construct
  source 1..80: mol_type = other DNA
gggatggcgccgccgatggtggtggaagccacggaggcgatggagacgcaggagggcgcgccgcccgagacgactaccgc

SEQ ID NO: 162692 - DNA, 80 bp, synthetic construct
  source 1..80: mol_type = other DNA
tgtagcttatcaacatacttacagtactaacttcgtaccaaaagagggtatcgaagcagttacaaccagtattagaacca

SEQ ID NO: 162693 - DNA, 80 bp, synthetic construct
  source 1..80: mol_type = other DNA
ctcaagtccagtaacgtcaattttgagcccacggacttaacagaagaaagggggtccatcacgtacgtacccaagacctt

SEQ ID NO: 162694 - DNA, 80 bp, synthetic construct
  source 1..80: mol_type = other DNA
ctacagacataacgtccagcgaaagttcaatcaacgtgtcgacagtttacaacaccacgtacattcctgtaacatcgctt

SEQ ID NO: 162695 - DNA, 80 bp, synthetic construct
  source 1..80: mol_type = other DNA
cttgccgtcgccgcaaaagccctcttgtccccgtcctcaacgcccaggccaccccgccgttccgcacaccccccgtcccg

SEQ ID NO: 162696 - DNA, 80 bp, synthetic construct
  source 1..80: mol_type = other DNA
aatacctaaatcataaaactggcctgtactctgccatattcctgagcagacaaagattatccccagactttccaggattc

SEQ ID NO: 162697 - DNA, 80 bp, synthetic construct
  source 1..80: mol_type = other DNA
aagaacaaaccactccagcacaagaagtgtttgccataccagtagatatagcctcacaacctttagccacaacactaata

SEQ ID NO: 162698 - DNA, 80 bp, synthetic construct
  source 1..80: mol_type = other DNA
aattttccccaaatgttgagggacctaagagatgccttcagtcgtgttaaaacctttttccagacaaaggacgaggtaga

SEQ ID NO: 162699 - DNA, 80 bp, synthetic construct
  source 1..80: mol_type = other DNA
tttatggaaattcactaaacaatgcacagactacaacagacggagtaatttcaataatacaaaagaacatgctgtcctat

SEQ ID NO: 162700 - DNA, 80 bp, synthetic construct
  source 1..80: mol_type = other DNA
acagtggttgtttattagtggtggttataccggagcaccaactggcatcacacacagaaggaaatgtttccgttaaatac

SEQ ID NO: 162701 - DNA, 80 bp, synthetic construct
  source 1..80: mol_type = other DNA
ccacaaaaggaaatgttactgctgggtacaattacacacatcctggtgaaatgggcagagatgtaggtaagattggtaga

SEQ ID NO: 162702 - DNA, 80 bp, synthetic construct
  source 1..80: mol_type = other DNA
agcgcctacagttacctccatactccagtctctatagacagtggattgatgaattcatttaatataatatgatgtttgcg

SEQ ID NO: 162703 - DNA, 80 bp, synthetic construct
  source 1..80: mol_type = other DNA
caggaacctggaggctagtctgggtgggtttaggctgcctcaagttgcatcagccagggcttcatgccctcctcagttcc

SEQ ID NO: 162704 - DNA, 80 bp, synthetic construct
  source 1..80: mol_type = other DNA
tttaggccttccggactaccaaaatggccgattccgtgacgtcacggccgccatcttaagtaaggcggaagcggcttcca

SEQ ID NO: 162705 - DNA, 80 bp, synthetic construct
  source 1..80: mol_type = other DNA
tgagtaaggtatgttatgtaccccatcacaaagtaggatgggcctggtggacttgcagcagggtaatatttcccttggaa

SEQ ID NO: 162706 - DNA, 80 bp, synthetic construct
  source 1..80: mol_type = other DNA
tgtagatgcctagtagaagacctacctttgtgggcagtagcaaatggctatgcagaattctgtgaatcagaacttacctc

SEQ ID NO: 162707 - DNA, 80 bp, synthetic construct
  source 1..80: mol_type = other DNA
gagcattccaaggaagtaccagcactcaccgctgtcgaaactggagcgacaaacccgttagagcccagtgacactgtgca

SEQ ID NO: 162708 - DNA, 80 bp, synthetic construct
  source 1..80: mol_type = other DNA
ggtgccgacgacgaagatcagccaaaacctctgaggtctgttctcaaaacggcgtatgatgaattgattaaacccggtaa

SEQ ID NO: 162709 - DNA, 80 bp, synthetic construct
  source 1..80: mol_type = other DNA
ttccactctgactctgcagtcaggacaccttaaatgcagagctaaattagacaaggtaaagattaagggaaccacatatg

SEQ ID NO: 162710 - DNA, 80 bp, synthetic construct
  source 1..80: mol_type = other DNA
ccacacggtctcggtcagggcctcgtccgagaaacggctgtcgggtacgtgacggagcaggtcgcgcggaaagaggctgc

SEQ ID NO: 162711 - DNA, 80 bp, synthetic construct
  source 1..80: mol_type = other DNA
ctggttgaaggcaacttgcaataagattagtgggaacaagacgcttaaagcatggtgcaaaataacttttctaactcaca

SEQ ID NO: 162712 - DNA, 80 bp, synthetic construct
  source 1..80: mol_type = other DNA
ttataccaggagcagatcaagggtttcccctacgccactcaggagtctcaagaggaattgactttgaatgttgacaggtt

SEQ ID NO: 162713 - DNA, 80 bp, synthetic construct
  source 1..80: mol_type = other DNA
ctcgatgttctattatcgggaccgtcaagaaaagagcgtcatcttcaacacgcacgccgagctcgtgcactgctcgctct

SEQ ID NO: 162714 - DNA, 80 bp, synthetic construct
  source 1..80: mol_type = other DNA
ggctgccgttggtgacaccactggttacggtggtatacggccaaatcagcgcgggcgtcgaagcgcttggcgcgtagtag

SEQ ID NO: 162715 - DNA, 80 bp, synthetic construct
  source 1..80: mol_type = other DNA
agaagtaccaacactatcaggtagccaatacctaaactttaagacaggattatacagctcaatatttttatctaatagca

SEQ ID NO: 162716 - DNA, 80 bp, synthetic construct
  source 1..80: mol_type = other DNA
acaaagttttcccaatgtacctgccatctgtgacgaatgttcaattgggtggtaaacctatggacctagccatccttaaa

SEQ ID NO: 162717 - DNA, 80 bp, synthetic construct
  source 1..80: mol_type = other DNA
atccatgttttgttcctagctgaaaagggattccttagagtggcccacacttatgacacatcagaaaacagggttaactt

SEQ ID NO: 162718 - DNA, 80 bp, synthetic construct
  source 1..80: mol_type = other DNA
tcacccaagtggtgtggtgctcttgtatttcggtacatttgcacgccagtttgccaccccttcccttttacgtaacttag

SEQ ID NO: 162719 - DNA, 80 bp, synthetic construct
  source 1..80: mol_type = other DNA
cttctacgtacacttcctgggctgggttttcgaggccatataactaagcgcacttccgaatggctgagttttccacgccc

SEQ ID NO: 162720 - DNA, 80 bp, synthetic construct
  source 1..80: mol_type = other DNA
cccacacccgtgacagagaagagggcaagtctaattaccacaggaccacacggacaacaatcaggagctatatatgtagg

SEQ ID NO: 162721 - DNA, 80 bp, synthetic construct
  source 1..80: mol_type = other DNA
gtcacgtgaacgggccatcaccgcttccaatgactagcatggtaagagtgtatttcaaaccgaaacacgtaaaagcatgg

SEQ ID NO: 162722 - DNA, 80 bp, synthetic construct
  source 1..80: mol_type = other DNA
gtgataactgagaggtattattcaggtgctggagccactactagaaactatgtatatcaaatcatgtacgtccccccagg

SEQ ID NO: 162723 - DNA, 80 bp, synthetic construct
  source 1..80: mol_type = other DNA
cacaatacctgaagccatcaagagacggtttttcatcgatgcggatcttgttgtgatgtctaaatacagaaataatattg

SEQ ID NO: 162724 - DNA, 80 bp, synthetic construct
  source 1..80: mol_type = other DNA
ggtacgccaactggcggatcaacacccgtcaaatggctcagctaaggagaaaatttgagttgtttacatacctaaggttt

SEQ ID NO: 162725 - DNA, 80 bp, synthetic construct
  source 1..80: mol_type = other DNA
catctacgcagtgaacacggccagcctttctgccagtcaggtcaccgtctccaacaccatccagctctccttcgatccgg

SEQ ID NO: 162726 - DNA, 80 bp, synthetic construct
  source 1..80: mol_type = other DNA
catggcatggggatggtggaagcggagacggcgcggctggtggaggagacgctggacccgtggcagacttcgcagacgat

SEQ ID NO: 162727 - DNA, 80 bp, synthetic construct
  source 1..80: mol_type = other DNA
ttgacaaatatgggatagacttacccttggtcacatatatcaaagatgagctgagaagtgctgacaaagttagattgggc

SEQ ID NO: 162728 - DNA, 80 bp, synthetic construct
  source 1..80: mol_type = other DNA
tctcttaagagctgggagcaactagcctcttttttgtctctgcccccgggacccacgtttacggactttagactattttt

SEQ ID NO: 162729 - DNA, 80 bp, synthetic construct
  source 1..80: mol_type = other DNA
tgaaatgttgcttatggttacaagttttggtattaaacttgtgaccatgggcgcccaggtgagcagacaaagtgttggat

SEQ ID NO: 162730 - DNA, 80 bp, synthetic construct
  source 1..80: mol_type = other DNA
aagggctacatacccctaagacacaggagcaagtggtatgtcatgctcatgtaccagacggacgtactccatgacctagt

SEQ ID NO: 162731 - DNA, 80 bp, synthetic construct
  source 1..80: mol_type = other DNA
aggtgagtgttgggaagtatcaaagaatggcagagattgggaaactttgaaacttaaggatctagtccagaagatcactg

SEQ ID NO: 162732 - DNA, 80 bp, synthetic construct
  source 1..80: mol_type = other DNA
ccacagacaaaagcaatccttcaaaccaagtacaaaccggccaatactttgtacagctagatggcctgtggggagaccct

SEQ ID NO: 162733 - DNA, 80 bp, synthetic construct
  source 1..80: mol_type = other DNA
cgacgagcttttaataaaaagtaccaaatgttacatgacaccgttagcgaatccgaattcatcgtacgatataatccaga

SEQ ID NO: 162734 - DNA, 80 bp, synthetic construct
  source 1..80: mol_type = other DNA
gtggtcgtgctgaaactgcccccgaaaggttgtatctgtgtagtgaagtcttcgctgtggatggcatagtttctaccccc

SEQ ID NO: 162735 - DNA, 80 bp, synthetic construct
  source 1..80: mol_type = other DNA
gtgtaactttccttaagaggggttttagacaggatacaaaatattcttttctaatacatcctactttccctgtttctgaa

SEQ ID NO: 162736 - DNA, 80 bp, synthetic construct
  source 1..80: mol_type = other DNA
aactacgcttggcactcagacgacctagtaaaacagccagagcccatggggggctcactaagcaccatgacctttaactt

SEQ ID NO: 162737 - DNA, 80 bp, synthetic construct
  source 1..80: mol_type = other DNA
acgcccggagctcgcgcgcggaaaaggggaagcgctcggcgcgactcgtccctaggggaccgcggaggaaacgacagacg

SEQ ID NO: 162738 - DNA, 80 bp, synthetic construct
  source 1..80: mol_type = other DNA
gagcaggtactgagactcttttacgacctgcgcgacctgaaactgtgtgacggcagctacgaagagggattcgtcgtcat

SEQ ID NO: 162739 - DNA, 80 bp, synthetic construct
  source 1..80: mol_type = other DNA
aacagggaacacctgagcaacggtgaggttgccaacatgtttacaggcaccaagtcaagcaacgccaatgatgtgcagcg

SEQ ID NO: 162740 - DNA, 80 bp, synthetic construct
  source 1..80: mol_type = other DNA
aggcctaacagaaaacacaaagtaagagttaaaatagggccccctcgcctctatgaggacaagtggtacccccagtcaga

SEQ ID NO: 162741 - DNA, 80 bp, synthetic construct
  source 1..80: mol_type = other DNA
tgcagtctgccctgggcactcagctctggatatgtgacaacatagagagcgtgggggctaaaaatatgagcaattcccct

SEQ ID NO: 162742 - DNA, 80 bp, synthetic construct
  source 1..80: mol_type = other DNA
gtctagagaactacagcgcatgatgtgctacaagaagacccacagaacagagcctgtctgtatattattgcatggacaac

SEQ ID NO: 162743 - DNA, 80 bp, synthetic construct
  source 1..80: mol_type = other DNA
tcacacagaagggggtttatggttataacactctcaacaacatgggcaaattgtacatgcgacacgtgaacaaaaatagc

SEQ ID NO: 162744 - DNA, 80 bp, synthetic construct
  source 1..80: mol_type = other DNA
agatgactatgtggttaacaaggggttcgggggctccttcgccacagagaccttctccctgaaggtcctatatgaccagt

SEQ ID NO: 162745 - DNA, 80 bp, synthetic construct
  source 1..80: mol_type = other DNA
gtcagacgctgcaatatcaggggcataataccccttatcatgtgcggggcaaacactgccagttttaactatggcatgca

SEQ ID NO: 162746 - DNA, 80 bp, synthetic construct
  source 1..80: mol_type = other DNA
gataaaccatcacatccagacacatcatcagatagattctatacactagatagcaagttatggtcttctacctccaaagg

SEQ ID NO: 162747 - DNA, 80 bp, synthetic construct
  source 1..80: mol_type = other DNA
tgggtgtagtactctggtattatgtacctttgtatgcctgtttattcccaaaccccctcccgttacatttccaacccctg

SEQ ID NO: 162748 - DNA, 80 bp, synthetic construct
  source 1..80: mol_type = other DNA
ggggaggattgggctccgccccgatatacctagtgggtggagcctagaggtaggtatccatagggttccattatcctgga

SEQ ID NO: 162749 - DNA, 80 bp, synthetic construct
  source 1..80: mol_type = other DNA
tgcggctaatctaaccccacagctaatacacacaagccagtgtggatttagtcgtaatgggcaactgtgggacggaaccg

SEQ ID NO: 162750 - DNA, 80 bp, synthetic construct
  source 1..80: mol_type = other DNA
gcttttcaattcacagtttatcgccctgatgcccacctcaggctgtgcccaggtgacgggctgttcggacgccttctacc

SEQ ID NO: 162751 - DNA, 80 bp, synthetic construct
  source 1..80: mol_type = other DNA
gtaaactcaatttacagtgtgctcttaaaccttgtaatgaggggaagattgggaatgctaagtgttgccccttaatttgt

SEQ ID NO: 162752 - DNA, 80 bp, synthetic construct
  source 1..80: mol_type = other DNA
gatctgatccttcaactcagcaaaagttcgatttattcaacaaagccgccgtcccgtcaagtcagcgtaatgctctgcca

SEQ ID NO: 162753 - DNA, 80 bp, synthetic construct
  source 1..80: mol_type = other DNA
cccggtggcattcacatccatggtcctgattccgcgcacggggccggttccccgggtgcgctggctttgcccccagtcgc

SEQ ID NO: 162754 - DNA, 80 bp, synthetic construct
  source 1..80: mol_type = other DNA
acaaactttggaaatggcaaaaacccagacggtaccggacagatacacacttactggatgatgaggtggagaccctacat

SEQ ID NO: 162755 - DNA, 80 bp, synthetic construct
  source 1..80: mol_type = other DNA
gctcaaatgcagttcaaagcaaagacacctggtacaaaggcaacacatacaacagcaatatcaaagagttagcagaaaaa

SEQ ID NO: 162756 - DNA, 80 bp, synthetic construct
  source 1..80: mol_type = other DNA
caaacatactcaaggaactgaaaaccatgagagacaacaactttgatttacacactggcaaaaatgacctgtatggagac

SEQ ID NO: 162757 - DNA, 80 bp, synthetic construct
  source 1..80: mol_type = other DNA
agagctatattccaagggttaggagacaccacgccacctggtttcatagtagatttgttatccagctcaaaagaccccaa

SEQ ID NO: 162758 - DNA, 80 bp, synthetic construct
  source 1..80: mol_type = other DNA
aagacaaagttagcaaaggaccctttgggggcggacacagcaccagcaggtggtctctaaaagtattgtacgaagaaaac

SEQ ID NO: 162759 - DNA, 80 bp, synthetic construct
  source 1..80: mol_type = other DNA
tactcgcattgctcctcgctttcctaacaccagaggacccccgccgcctccggggctagaccaagctctcgggcccccta

SEQ ID NO: 162760 - DNA, 80 bp, synthetic construct
  source 1..80: mol_type = other DNA
ctcaaaaggggttttaaaccagatgagaaacacagctttctgatacatccaatatatccagttagtgaagtgcaggaatc

SEQ ID NO: 162761 - DNA, 80 bp, synthetic construct
  source 1..80: mol_type = other DNA
atgagacgcaagctagagatcttcacttacgtccgttttgatgtggaggtgacttttgtgattaccagcaagcaggacca

SEQ ID NO: 162762 - DNA, 80 bp, synthetic construct
  source 1..80: mol_type = other DNA
aggggcggcgagcggtccagatgcgacttgacaatcaccacgtaaaaacgacagaaacggtcgaagatgatgaggaagga

SEQ ID NO: 162763 - DNA, 80 bp, synthetic construct
  source 1..80: mol_type = other DNA
aaaaccaaaacatacaacagcatggatcccacggcctccacgtgctgtgcaatacacacatacctacagcacaaattacc

SEQ ID NO: 162764 - DNA, 80 bp, synthetic construct
  source 1..80: mol_type = other DNA
gtgttttagcaggaaatgcgtttgtgtttccacaccagattattaacctaaggactaataacagtgccacactaatttta

SEQ ID NO: 162765 - DNA, 80 bp, synthetic construct
  source 1..80: mol_type = other DNA
ctaacaattccgtccagtgcaacaaatgatgtagatgtgacagtattaggtagtttactccaattggacttccagaaccc

SEQ ID NO: 162766 - DNA, 80 bp, synthetic construct
  source 1..80: mol_type = other DNA
tgacatatatgacaacaacaatgaagccaaagtgagacaaattaggaagaagaaatggttaactatgtcaacaaaataca

SEQ ID NO: 162767 - DNA, 80 bp, synthetic construct
  source 1..80: mol_type = other DNA
ccccggtcaagattgatacgctccaacagggcgaaaacaatcaagatcgttatccgcaaagtgcctacgcaaagcctagt

SEQ ID NO: 162768 - DNA, 80 bp, synthetic construct
  source 1..80: mol_type = other DNA
gtgtaacatttataccaccaatggctgacctgccagataaaggtaaagcatttgattctagatttgtgttatgtagtact

SEQ ID NO: 162769 - DNA, 80 bp, synthetic construct
  source 1..80: mol_type = other DNA
caccgcgggctgtaccatacagaggagagggagtggatctgaaagaaggaactatctcaccattgaccccagtgaacagc

SEQ ID NO: 162770 - DNA, 80 bp, synthetic construct
  source 1..80: mol_type = other DNA
gatggggggcgccgtcgttggtcaggcattcccttcaactgcagtggctgacggtgataaggcgtatgagtttactagca

SEQ ID NO: 162771 - DNA, 80 bp, synthetic construct
  source 1..80: mol_type = other DNA
ccaaacccgttaccagtacagtcagagtctacttcaagccgaagcacatcagggcatggataccacggccccctcgactg

SEQ ID NO: 162772 - DNA, 80 bp, synthetic construct
  source 1..80: mol_type = other DNA
cggacatctccgttcggatgttgcgtgacactcccatgatacaacaccctgagtcaaccctacagaatcctgtagaagac

SEQ ID NO: 162773 - DNA, 80 bp, synthetic construct
  source 1..80: mol_type = other DNA
ccacatcaaataaccagcactataagagtgtactttaaaccgaagcacattaaagcttgggtgccaaggcccccgcgctt

SEQ ID NO: 162774 - DNA, 80 bp, synthetic construct
  source 1..80: mol_type = other DNA
catattaatgtactggctgctcgctacggctttactggggggccgacgccgccaggtggtcctgggccgcgtccacaact

SEQ ID NO: 162775 - DNA, 80 bp, synthetic construct
  source 1..80: mol_type = other DNA
agttcggggacgcaacgcagccagatcacatccccttgcagtaccagacgcagggctagcgtctcgaagatcggcatcac

SEQ ID NO: 162776 - DNA, 80 bp, synthetic construct
  source 1..80: mol_type = other DNA
acactgcaaaatgggtgcacaagtgtccacacagaaaaccggggcacacgaaaccggtctgaatgctaatggtaattcaa

SEQ ID NO: 162777 - DNA, 80 bp, synthetic construct
  source 1..80: mol_type = other DNA
gctgcctctgctttacaaagaggaatacaaggagaccctgccttttgccacctaacaggcatattttcacctccctggct

SEQ ID NO: 162778 - DNA, 80 bp, synthetic construct
  source 1..80: mol_type = other DNA
ccgaatgggtttccattacagcatccttacatccttgacgctgggataccacttagtcagctactggtgtgtccgcacca

SEQ ID NO: 162779 - DNA, 80 bp, synthetic construct
  source 1..80: mol_type = other DNA
ccccaggctcccggcctcacccaggaagagcagcggcagggacagcataaaccaggagaaggcgcagatgagtccggtga

SEQ ID NO: 162780 - DNA, 80 bp, synthetic construct
  source 1..80: mol_type = other DNA
ctaacttgggacccagtgacatgtatgttcacacaaaagaggccatttataaatgtgcacatctaactgaacctaatgaa

SEQ ID NO: 162781 - DNA, 80 bp, synthetic construct
  source 1..80: mol_type = other DNA
acttaccttcaaacataccaactcaggaggaaattagaactgttcacatactccaggtttgatttggaaatgacctttgt

SEQ ID NO: 162782 - DNA, 80 bp, synthetic construct
  source 1..80: mol_type = other DNA
catgtaaaaattgctgttgcacactattcagctcaactgatgaccttagaaattgacccaagaaatatgagcttagaaga

SEQ ID NO: 162783 - DNA, 80 bp, synthetic construct
  source 1..80: mol_type = other DNA
gggaaagctatgctttcgcgctttggaagatactgagcagctagctataaaagtgtatatcaaacctaaacatatatcag

SEQ ID NO: 162784 - DNA, 80 bp, synthetic construct
  source 1..80: mol_type = other DNA
ttaatactaatgttactgactcatatgacttatataataagaatggtattaaattagaaattactgttgtcaagctagat

SEQ ID NO: 162785 - DNA, 80 bp, synthetic construct
  source 1..80: mol_type = other DNA
ctcgtggccggcggccatacgcgcggcaaccgcgtcttcccctcctcttctttcaacgttgggtaccacgttgttttctt

SEQ ID NO: 162786 - DNA, 80 bp, synthetic construct
  source 1..80: mol_type = other DNA
ttgatactaacgaaacatttagagcatccaccagattcataccagaaacaattagggctgctagtgatgcacctttaggt

SEQ ID NO: 162787 - DNA, 80 bp, synthetic construct
  source 1..80: mol_type = other DNA
agagcgtacagtggtggaagagtctctatcaaagagtgagagtccctgtgagttcacccctagtagtgtgacaggggaaa

SEQ ID NO: 162788 - DNA, 80 bp, synthetic construct
  source 1..80: mol_type = other DNA
gttaaattttgatggtacgcttttgggtaacataacaatattcccccaccaattcattaacctaaggagcaacaattctg

SEQ ID NO: 162789 - DNA, 80 bp, synthetic construct
  source 1..80: mol_type = other DNA
tgttttttgaagttttcaaaggaagcaaagagcctgctgtactgtcagacaaagacccacgactttgtgttgattttaag

SEQ ID NO: 162790 - DNA, 80 bp, synthetic construct
  source 1..80: mol_type = other DNA
agagaaactctggaacagtgtaaaaagatagggctatacgaacagcaggtgcaaggttttgcacattcagatgctgatgc

SEQ ID NO: 162791 - DNA, 80 bp, synthetic construct
  source 1..80: mol_type = other DNA
acggcagtgaccaggttctccccccgtaccacaaaagaagcatagctcgagggccccatgatctggttgtcggcctcctc

SEQ ID NO: 162792 - DNA, 80 bp, synthetic construct
  source 1..80: mol_type = other DNA
cacagatgagttagttggcaaaattaaaacctacagaaataaaagatttacctggctaaccaccccaagctcctcaaaca

SEQ ID NO: 162793 - DNA, 80 bp, synthetic construct
  source 1..80: mol_type = other DNA
tcagccaaacacattatcggtttgtgaaggaggattcttacaccgacgccggttttattacctgctggtaccaaactagc

SEQ ID NO: 162794 - DNA, 80 bp, synthetic construct
  source 1..80: mol_type = other DNA
agatacactgacccagatacatacacacatccaggttacatatcctgctggtatcaaacatctctcattttacctccaga

SEQ ID NO: 162795 - DNA, 80 bp, synthetic construct
  source 1..80: mol_type = other DNA
atgttcagggaccgcttcctcttttccccggggactcaaagagacgcaagacacacgcgcgtctgcttttcgccgtgcct

SEQ ID NO: 162796 - DNA, 80 bp, synthetic construct
  source 1..80: mol_type = other DNA
tccagtcccaataactatttctatcagccctatgtgttctgaattctctggtgctagaaatcaatcagtaaaagttcagg

SEQ ID NO: 162797 - DNA, 80 bp, synthetic construct
  source 1..80: mol_type = other DNA
taatgttttggtttttctttgttatggactatatcattaggacactaatctaattaggacactaatttggaatatgggaa

SEQ ID NO: 162798 - DNA, 80 bp, synthetic construct
  source 1..80: mol_type = other DNA
actacataccactcactggtgaggctacaactcagatcaaaactagacccgatgtttttaccattacgaacgtcggacca

SEQ ID NO: 162799 - DNA, 80 bp, synthetic construct
  source 1..80: mol_type = other DNA
gcatactgtacaaaattggccaaattattggaatccatgttggaggtaatggaagagatgggttctcagctatgttgtta

SEQ ID NO: 162800 - DNA, 80 bp, synthetic construct
  source 1..80: mol_type = other DNA
cataccacaaacaaggtacatatattccagaagagaaaaaaactttcactttgaagttaataacccagtaagtaaaaaga

SEQ ID NO: 162801 - DNA, 80 bp, synthetic construct
  source 1..80: mol_type = other DNA
caacaaaccaaaaagccctccaaccacaaaaaaacaaaagaaagttatcaactcctacaaaactcaccctaaccaacttg

SEQ ID NO: 162802 - DNA, 80 bp, synthetic construct
  source 1..80: mol_type = other DNA
tgagaaagacgcactgccctgctcgtgtcccattgatgttcattttaaaaatgcttcgattatagttatcaggtcgtaca

SEQ ID NO: 162803 - DNA, 80 bp, synthetic construct
  source 1..80: mol_type = other DNA
acaacgggcatgcaatggctactggtaaatttctactggcatactcaccccctggtgccggggcaccaacgaccagaaag

SEQ ID NO: 162804 - DNA, 80 bp, synthetic construct
  source 1..80: mol_type = other DNA
cagtttgaaaagcaaatacgcagtgttggcgctggtcgcgcactgtacattcctccttatgatttgctcctgcacgagtg

SEQ ID NO: 162805 - DNA, 80 bp, synthetic construct
  source 1..80: mol_type = other DNA
attgtgcccgtatataaacaaaagggacgtaaactttgtagtcacggagataacagactcaaggacttccatcactgata

SEQ ID NO: 162806 - DNA, 80 bp, synthetic construct
  source 1..80: mol_type = other DNA
ccggaggcaatgggattgttgcttttgctgacatcagggatctgtatgtggaggaagaagcaatggagcaaggtatcacc

SEQ ID NO: 162807 - DNA, 80 bp, synthetic construct
  source 1..80: mol_type = other DNA
ggtgttgtcgtggttggcgggtgtcgcagagggagaggccggagagatggaggcgcctggggccgaggccacaccggcca

SEQ ID NO: 162808 - DNA, 80 bp, synthetic construct
  source 1..80: mol_type = other DNA
gttaaaaactatcactcccgaaccgagtcatccgtggaaaacttcctctgtcgagcagcgtgtgtgtacattacaaagta

SEQ ID NO: 162809 - DNA, 80 bp, synthetic construct
  source 1..80: mol_type = other DNA
tggaggaggagatggcgccgctggagacgccgtcggagaccccgcagacgccgacctcgtcgccgctatcgacgccgcag

SEQ ID NO: 162810 - DNA, 80 bp, synthetic construct
  source 1..80: mol_type = other DNA
aaagatatatccaaattgagagctgcacttgataagtatggggtggacttaccaatggtcactttcctaaaagatgaact

SEQ ID NO: 162811 - DNA, 80 bp, synthetic construct
  source 1..80: mol_type = other DNA
gaaaaggcaacaaagtgtggctagacagtctaacaaaagcagacaatatatacaacccaaaacaaagcatactgctaatg

SEQ ID NO: 162812 - DNA, 80 bp, synthetic construct
  source 1..80: mol_type = other DNA
aacatatcaaggcatggtgtcccagacctccaagagcagtcacatataaccatacatataatccaaactatgttaggact

SEQ ID NO: 162813 - DNA, 80 bp, synthetic construct
  source 1..80: mol_type = other DNA
ttatgaggtggtaattgctaagttgatgcccatggtgtttgattaaattataatgttttggttttcttttgctatggact

SEQ ID NO: 162814 - DNA, 80 bp, synthetic construct
  source 1..80: mol_type = other DNA
tggaagccttaatccagtatggtttgagttacttgctaaggttcttgatgatctaggatttccaggtaacctagtcagga

SEQ ID NO: 162815 - DNA, 80 bp, synthetic construct
  source 1..80: mol_type = other DNA
agtgaagggacccttgcagtctgtccgtgcataacaagtaactgataaaatgtctggatttttggtattattcaacagga

SEQ ID NO: 162816 - DNA, 80 bp, synthetic construct
  source 1..80: mol_type = other DNA
catcatggacgatctcgggcaaaaccctgacggacaagacctcagcatgttttgccaaatggtctcaagtacaacctttg

SEQ ID NO: 162817 - DNA, 80 bp, synthetic construct
  source 1..80: mol_type = other DNA
gagtgagctaaactatctatttctctgagtgttggattcgtttcacccacattctgaacaatcagcctcattagtgttac

SEQ ID NO: 162818 - DNA, 80 bp, synthetic construct
  source 1..80: mol_type = other DNA
tgaggtgtcccaacctattcttcccagtcccagctccaaggcctgttgctagatcaagagcagttaattttactaacgag

SEQ ID NO: 162819 - DNA, 80 bp, synthetic construct
  source 1..80: mol_type = other DNA
agtatttttaacacaatgattaataatattattataaggaccctggtgttagatgcctacaaaaacatagatttagataa

SEQ ID NO: 162820 - DNA, 80 bp, synthetic construct
  source 1..80: mol_type = other DNA
ttaatgctaagaaaacaaaaaatactaattcctagctttttaacaagaccaaaaggaagaaaatatagaaaagtaagaat

SEQ ID NO: 162821 - DNA, 80 bp, synthetic construct
  source 1..80: mol_type = other DNA
ggtggtaggcggaccaggccaaaaagccagactaatggctgaagccctaaaagaggctttaacaccaccccctatcccat

SEQ ID NO: 162822 - DNA, 80 bp, synthetic construct
  source 1..80: mol_type = other DNA
accaggtgtttatgtttgagccaccaggccctaagcctatccgtggcagagaggcctgggcagacgaataccacaccgcc

SEQ ID NO: 162823 - DNA, 80 bp, synthetic construct
  source 1..80: mol_type = other DNA
taaacgacgtacctgagttagtgcatccaaacgtgacgaataccggtgcgtttggtcatcaagctggtgcagtgtatgtg

SEQ ID NO: 162824 - DNA, 80 bp, synthetic construct
  source 1..80: mol_type = other DNA
tagcggaagagttaggtttgacacatgaccaagtggctgaaattagagatatgatgcaagaagttataacacaaagacat

SEQ ID NO: 162825 - DNA, 80 bp, synthetic construct
  source 1..80: mol_type = other DNA
ttcaacagagagaagagctctgggtacagtcagttacttcttcacatgctactttttgcggctgtggtgaccctagtagc

SEQ ID NO: 162826 - DNA, 80 bp, synthetic construct
  source 1..80: mol_type = other DNA
ccagatttcaagttgaggcttatgaaagatacacaaacaatatcacaaacagaagctctcacagaaggtttgggggagga

SEQ ID NO: 162827 - DNA, 80 bp, synthetic construct
  source 1..80: mol_type = other DNA
tcatgctcaataatgtgtttcgtgtcagcctgcaacgacttttccgtccgattattgaaagacaccccattcattgaaca

SEQ ID NO: 162828 - DNA, 80 bp, synthetic construct
  source 1..80: mol_type = other DNA
cactgatgagtcctagtattgaagcttgtggtttctccgataggctaaagcaaattactatcgggagctccactataaca

SEQ ID NO: 162829 - DNA, 80 bp, synthetic construct
  source 1..80: mol_type = other DNA
gtactcttgaaattaggatttgaacactcaaatttgattcagaccatatgcaatacccatcacatattcaaagatgaaat

SEQ ID NO: 162830 - DNA, 80 bp, synthetic construct
  source 1..80: mol_type = other DNA
atgggtatgataaccaagacattcaccttattgatgatttggggcaaacaaggaaggagaaagacattgaaatgttgtgt

SEQ ID NO: 162831 - DNA, 80 bp, synthetic construct
  source 1..80: mol_type = other DNA
aaaagacaaagatcagagtgcactgtggagtccttcttggggagagctgcgctggtgacaattatgagtttgcacaatgc

SEQ ID NO: 162832 - DNA, 80 bp, synthetic construct
  source 1..80: mol_type = other DNA
atcaacgccacgctcaagggaggagagggcctacagcccactatgtttaacggggagctggaggccatcaagcaccaggc

SEQ ID NO: 162833 - DNA, 80 bp, synthetic construct
  source 1..80: mol_type = other DNA
ttcttatacagcttctcggccacaccacttcgaattatgggggtgtggctttgatgacatactgtcgtgattgttgttag

SEQ ID NO: 162834 - DNA, 80 bp, synthetic construct
  source 1..80: mol_type = other DNA
gaccatattccggcttggacaataaaaccaaacttaaggccccaactttgagagcagtggtaacacaaggaccaaacaca

SEQ ID NO: 162835 - DNA, 80 bp, synthetic construct
  source 1..80: mol_type = other DNA
tttagaagagtttttggcaacttgtatgccagtttccatgctaatccaggagttcttactggctctgctataggttgtga

SEQ ID NO: 162836 - DNA, 80 bp, synthetic construct
  source 1..80: mol_type = other DNA
tacttctcttcaagcaatgaacaggcgcttctttcttgatttggatatagtagtgcatgataattacaaagattcacaag

SEQ ID NO: 162837 - DNA, 80 bp, synthetic construct
  source 1..80: mol_type = other DNA
ctcattaggagtaagaaagaaggatcttatagacaagaaaacaaaagatatttctaaattaagagaagcaattgacaagt

SEQ ID NO: 162838 - DNA, 80 bp, synthetic construct
  source 1..80: mol_type = other DNA
agtactttgcaacagcccagggagagataacaacaagaaagtcggttagggatgttggcatatcaccaattaacacaccc

SEQ ID NO: 162839 - DNA, 80 bp, synthetic construct
  source 1..80: mol_type = other DNA
ccagcaaattcactgaaccagtgaaagatgtaatgatcaagacactgcccgccttaaactccccatctgctgaggagtgt

SEQ ID NO: 162840 - DNA, 80 bp, synthetic construct
  source 1..80: mol_type = other DNA
cttcaggcggcgcatgttctcctccacgtttaacttcatccagactatggtgtcccccgggtctgcggtaaacgtggcca

SEQ ID NO: 162841 - DNA, 80 bp, synthetic construct
  source 1..80: mol_type = other DNA
ttctgtgcggatgttgaaagatacacctttcataaaacaggacagtttttaccaaggaccacccggagaagctgtcgaac

SEQ ID NO: 162842 - DNA, 80 bp, synthetic construct
  source 1..80: mol_type = other DNA
taaacaacttagaacaaaatgtcaacaatactgatatgtattcagttgtattgaacaatgaaacagaattagcaaaggag

SEQ ID NO: 162843 - DNA, 80 bp, synthetic construct
  source 1..80: mol_type = other DNA
tccatatgtgagtctaggaataaagaaaagagatatattaaatagggacactcaagatgttactaaaatggaacattatt

SEQ ID NO: 162844 - DNA, 80 bp, synthetic construct
  source 1..80: mol_type = other DNA
acaacgagaaaattaaaaagatacctgaggaggcaagcaagctatactatgaagagactaaacaattaataggaataaca

SEQ ID NO: 162845 - DNA, 80 bp, synthetic construct
  source 1..80: mol_type = other DNA
ctaggtaggattcagctaggttcctactggggtaccccctaccctaccttaaggtgcgccacccttcctccttccgtttt

SEQ ID NO: 162846 - DNA, 80 bp, synthetic construct
  source 1..80: mol_type = other DNA
cctatgtgaaagatgagttgagacccaggagcaaagtggaggcaggcaaatcgcgcctaattgaagccagttctttaaat

SEQ ID NO: 162847 - DNA, 80 bp, synthetic construct
  source 1..80: mol_type = other DNA
ttttcaggtatcaggtcaaaagctgtaattaaacaaggtttgcctaccttgaccacccctgggtctgggcaatttctcac

SEQ ID NO: 162848 - DNA, 80 bp, synthetic construct
  source 1..80: mol_type = other DNA
atgtgtgtttgtgattccttttcaacaggcaagttcctcctagcttacacacccccgggtggtgcacacccagaaaaccg

SEQ ID NO: 162849 - DNA, 80 bp, synthetic construct
  source 1..80: mol_type = other DNA
ccatcatacttagctgatattgatgccacttctgttgataaacctacacacccagaaacatcagcagataggttttatac

SEQ ID NO: 162850 - DNA, 80 bp, synthetic construct
  source 1..80: mol_type = other DNA
ccaaggggatgatgtgaagagtgaccaaaccaccgtggccaacactcaacctagtgggccttccaactctactagcatac

SEQ ID NO: 162851 - DNA, 80 bp, synthetic construct
  source 1..80: mol_type = other DNA
tattaagccatgtgtaaagttgacccccttatgcgtagctatgagatgcaacaaaactgagacagaaaaatggggtttaa

SEQ ID NO: 162852 - DNA, 80 bp, synthetic construct
  source 1..80: mol_type = other DNA
tgtgagtctcaaacacactatttaaaacatcattatgatttatgttttacatgtgatcacaatttttctttgtctctgta

SEQ ID NO: 162853 - DNA, 80 bp, synthetic construct
  source 1..80: mol_type = other DNA
tacctagcatgcaaaatatttgacagaccagctagaagcaggcttacagacaaccccttttacccctactgcaaaaataa

SEQ ID NO: 162854 - DNA, 80 bp, synthetic construct
  source 1..80: mol_type = other DNA
ttgatagcgtcaactggaccagtacatccctgggttggtggtggaaattacctgactgccttagagaaatgggcctcttt

SEQ ID NO: 162855 - DNA, 80 bp, synthetic construct
  source 1..80: mol_type = other DNA
aatatactatgaagctgccacaaaggccacaaaccaagacatgaaaaacaaaccctacaactgggaaaactataaaaact

SEQ ID NO: 162856 - DNA, 80 bp, synthetic construct
  source 1..80: mol_type = other DNA
gaggtgattgaccacagtcttaaccaggccctggacttgttcaggctcccacttgtcccgctggtcctgtgtgtcttgtc

SEQ ID NO: 162857 - DNA, 80 bp, synthetic construct
  source 1..80: mol_type = other DNA
aatatgggatatcacgaacaaatgacatgggatcactatgcatacgtgcactggatgacaccacaaagaatgacgtgaaa

SEQ ID NO: 162858 - DNA, 80 bp, synthetic construct
  source 1..80: mol_type = other DNA
cccttgtccgagaagggcttgaccacttatggctttggacatcagaacaaggctgtgtacactactggatacaaaatctg

SEQ ID NO: 162859 - DNA, 80 bp, synthetic construct
  source 1..80: mol_type = other DNA
ggacggcgaatagttgcgtgtggtgcggaggacggcgacggcgaataaaagcgacgtgcgcggcgcacgtcgcaaagaag

SEQ ID NO: 162860 - DNA, 80 bp, synthetic construct
  source 1..80: mol_type = other DNA
gttccaaagagaagtaatgaatcaaattagcagaacgggacccttcagctacagagacgagatacccagcactacactga

SEQ ID NO: 162861 - DNA, 80 bp, synthetic construct
  source 1..80: mol_type = other DNA
aggccaaactattacagacaatactaaccaaccaaacatgtggtcaaaggtacaaaacacaacggcactgtcactaaatg

SEQ ID NO: 162862 - DNA, 80 bp, synthetic construct
  source 1..80: mol_type = other DNA
caccgagtacctgtgcgccaagatcttcgacaggccccccaggtccgtgctcacagacacccccttctatccctggctgc

SEQ ID NO: 162863 - DNA, 80 bp, synthetic construct
  source 1..80: mol_type = other DNA
ttaccaatgccacttttcttaaaagaaacttcaaaccagatgataaacacagttttctcatacatccggtgtatcctgag

SEQ ID NO: 162864 - DNA, 80 bp, synthetic construct
  source 1..80: mol_type = other DNA
aaaataactcttaaacagtggcaaccaaacactgttaaaagatgctatataataggatatatggcagcaataataagtgg

SEQ ID NO: 162865 - DNA, 80 bp, synthetic construct
  source 1..80: mol_type = other DNA
acttcgtcggtgtaattggatattggttacgtatctgtgtgtctgacacctccgtggtgttataagaaattgttcttata

SEQ ID NO: 162866 - DNA, 80 bp, synthetic construct
  source 1..80: mol_type = other DNA
acatggagatcaccatagtcattactagctcacaagatcaatcaacatcgcaaaaccaaaatgcccccgtgctgacacac

SEQ ID NO: 162867 - DNA, 80 bp, synthetic construct
  source 1..80: mol_type = other DNA
tcaaacataccctcggttttccttacctttcttgagtattgcatctgcctattacatgttttatgatggatatgatgggg

SEQ ID NO: 162868 - DNA, 80 bp, synthetic construct
  source 1..80: mol_type = other DNA
aatgggcgcgggtccccctagccccggcggggatccggatggggacgatggcggaaacaactcccaatatccatctgctt

SEQ ID NO: 162869 - DNA, 80 bp, synthetic construct
  source 1..80: mol_type = other DNA
agaagaagcccctcaaagagaaccatgggatgagtgggtaatagaagtactggaagatattaagcaagaagctttgaagc

SEQ ID NO: 162870 - DNA, 80 bp, synthetic construct
  source 1..80: mol_type = other DNA
cagaatctatgcacagtggtgtagtgaaaaatctagttcctatgacaaacaaaaaagcaaatgcatgctacaagacatgc

SEQ ID NO: 162871 - DNA, 80 bp, synthetic construct
  source 1..80: mol_type = other DNA
aatttactaatgaggggaggtggccattgaaattgacattcccaaaagaaggacatggttcattgtcacagttatttgct

SEQ ID NO: 162872 - DNA, 80 bp, synthetic construct
  source 1..80: mol_type = other DNA
caaggtatgtggtcaatgataacactaatgaagaggctgagattgagaacttcctgggtaggtcagcaatatggacacat

SEQ ID NO: 162873 - DNA, 80 bp, synthetic construct
  source 1..80: mol_type = other DNA
acatctaacattgatccagaagaagccatccaacctcgcacagtgataaatcaacacggtgtatccgaaactctagtgga

SEQ ID NO: 162874 - DNA, 80 bp, synthetic construct
  source 1..80: mol_type = other DNA
cacccctcgattggttgctaggctgtggtgtgatggcaggtaatatcaccgtgttccctcatcaaattatcaacctgaga

SEQ ID NO: 162875 - DNA, 80 bp, synthetic construct
  source 1..80: mol_type = other DNA
aaagatattcctcagtgacaccgaggaataaaagaggtgtacttgtgctagggtttttgggattccttgcgacggcaggt

SEQ ID NO: 162876 - DNA, 80 bp, synthetic construct
  source 1..80: mol_type = other DNA
tgcttaaaacacttgattttatagtaaaattgaacacaacaaaatgggagcccaagtatcaacacaaaagaccggggcac

SEQ ID NO: 162877 - DNA, 80 bp, synthetic construct
  source 1..80: mol_type = other DNA
actctatccagtcaatccaaagagacctagactattccctcccacagaagcaggagaaggagaggccccaaaagaaagct

SEQ ID NO: 162878 - DNA, 80 bp, synthetic construct
  source 1..80: mol_type = other DNA
cccatctctcctagtcgccgcctggtcattcggagattcaccttataaaccctggtactgttaggacccttcttgctttg

SEQ ID NO: 162879 - DNA, 80 bp, synthetic construct
  source 1..80: mol_type = other DNA
gatataaaattaaaagctttttttaacaaagctctacccacaacaagcacaaaaaacacagagattaatgtactaaacac

SEQ ID NO: 162880 - DNA, 80 bp, synthetic construct
  source 1..80: mol_type = other DNA
cagataccgcagatgcgggggcggccttctatggtgcagtgtccatcaatgactttgggttgcttgcagtgcgagtcgtc

SEQ ID NO: 162881 - DNA, 80 bp, synthetic construct
  source 1..80: mol_type = other DNA
tatacaccagcacagccacataccccccacagtgggacaatagaaactacctaagccatgactatggtatatacagccct

SEQ ID NO: 162882 - DNA, 80 bp, synthetic construct
  source 1..80: mol_type = other DNA
ggtacgcgccgaaggcaagaagaagctgctgctgaagcacttgcccgtgccgcccggcggctgctcgcgccgcaacagca

SEQ ID NO: 162883 - DNA, 80 bp, synthetic construct
  source 1..80: mol_type = other DNA
ttctttgagcaagagagttccgattacaccatgctggtggtagatgacctttgagtcagggtggctacttgctcaggttt

SEQ ID NO: 162884 - DNA, 80 bp, synthetic construct
  source 1..80: mol_type = other DNA
caggtgttacttgagagccagatcggcgctgacaccgtgtggatggatgatgacttcgagcctgaggacaaggcatacat

SEQ ID NO: 162885 - DNA, 80 bp, synthetic construct
  source 1..80: mol_type = other DNA
ggtctcgcgtatcgcttgtacctccaggaagatctgctgcccgttcatcaacaggttacctgagatgctcaggcccggga

SEQ ID NO: 162886 - DNA, 80 bp, synthetic construct
  source 1..80: mol_type = other DNA
attggctttccaggatcattaatgaagaggctttgcagtacaacacacatatacagagaccaagtttaccatgtagaggg

SEQ ID NO: 162887 - DNA, 80 bp, synthetic construct
  source 1..80: mol_type = other DNA
tgacagtaagatgtagaaggccaggaaataaaacagtattgccagtaaccattatgtcagggttagttttccactctcag

SEQ ID NO: 162888 - DNA, 80 bp, synthetic construct
  source 1..80: mol_type = other DNA
acgaaaatcgccgtcctcgcaagaagagagcgaagcagaagtccaagagacgacggacccggtacagcagcagctcgtcc

SEQ ID NO: 162889 - DNA, 80 bp, synthetic construct
  source 1..80: mol_type = other DNA
aaggtggagagtggcaagtccaggcttatcgaagcatctagtctgaatgattcagtggctatgaggatggcttttggtaa

SEQ ID NO: 162890 - DNA, 80 bp, synthetic construct
  source 1..80: mol_type = other DNA
cccctgtggtccccccgagacgagagccacccatcgtgtactctcgcaccacccacgaccacagagggagacgggacgaa

SEQ ID NO: 162891 - DNA, 80 bp, synthetic construct
  source 1..80: mol_type = other DNA
tgaacagggacacaggattggtagtaactcagaaagaaatgagaaccaaccagatgagaatccatttttcaactgcaatg

SEQ ID NO: 162892 - DNA, 80 bp, synthetic construct
  source 1..80: mol_type = other DNA
accggcgaagcactgactcatgaaggtgaccgtgatggcctgtgatgtgtagtagagtaccagaaacaccctcacattct

SEQ ID NO: 162893 - DNA, 80 bp, synthetic construct
  source 1..80: mol_type = other DNA
tagttgtacctagcttactcactaaacccaaaggaagacgatccataaaagttagaataaaacccccaaaactcatgcta

SEQ ID NO: 162894 - DNA, 80 bp, synthetic construct
  source 1..80: mol_type = other DNA
agcgagatatccccaaaatatgtaaagtaaacttcaaaataaatttcactgaatgaaatttcgaggccccgggagtttca

SEQ ID NO: 162895 - DNA, 80 bp, synthetic construct
  source 1..80: mol_type = other DNA
cagtagatcattatgctgcacagttaatcatgttagatgtagactcagcaccactaacattggaacaggcagtatatggt

SEQ ID NO: 162896 - DNA, 80 bp, synthetic construct
  source 1..80: mol_type = other DNA
agtgtattctggactgagggcaacgcacctgcacgtttatcaattccttttgtgagcgtggggaacgcttatagcagttt

SEQ ID NO: 162897 - DNA, 80 bp, synthetic construct
  source 1..80: mol_type = other DNA
ttgagatgttcacttacttaaggtttgacatggaggtaacctttgttattacgagctaccaacaccagagcacaatttca

SEQ ID NO: 162898 - DNA, 80 bp, synthetic construct
  source 1..80: mol_type = other DNA
tattcaggatcaaattacaggaaagattcttaaatggttcgtccgtatcatcagcgcgatgaccattatgattagaaaca

SEQ ID NO: 162899 - DNA, 80 bp, synthetic construct
  source 1..80: mol_type = other DNA
attttaacctctaaaaactaccaaaatggccgttccagtgacgtcacagccgccattttaagtagctgacgtcaaggatt

SEQ ID NO: 162900 - DNA, 80 bp, synthetic construct
  source 1..80: mol_type = other DNA
cccccgtgcctccagcgctgataagtgctgcgtccactttgtgttacaggtgggccaaacctccagaatatcaattggtg

SEQ ID NO: 162901 - DNA, 80 bp, synthetic construct
  source 1..80: mol_type = other DNA
tggcagatagaatatattcatttcctgctccgccagctagggaacctcttgacttggctatacagcaactgcagagcctt

SEQ ID NO: 162902 - DNA, 80 bp, synthetic construct
  source 1..80: mol_type = other DNA
agaacaacagacattggcaagtgtcttaatttacctgaatacagtgtcctgcgaaggcgctggctggatttatcttaaag

SEQ ID NO: 162903 - DNA, 80 bp, synthetic construct
  source 1..80: mol_type = other DNA
gcactaaatatggtctaaccataacccctgctgacaaatccaccacttttgtgaaattaaattacaacaatgtcaccttt

SEQ ID NO: 162904 - DNA, 80 bp, synthetic construct
  source 1..80: mol_type = other DNA
cacaaacgtagttactaacccaagtgttttaaatacattagcaacaccattccactttaaatacccacaatttccaaaag

SEQ ID NO: 162905 - DNA, 80 bp, synthetic construct
  source 1..80: mol_type = other DNA
tagagacagtggctcataatgccttacaactatcacaacccagacccactcagagacctgcaattaccaatactgcggct

SEQ ID NO: 162906 - DNA, 80 bp, synthetic construct
  source 1..80: mol_type = other DNA
ctaatttgttcttcccatcaccagctcccaaggagaaaagctctaggtcaattaatgctaacccatttgaggatgagagc

SEQ ID NO: 162907 - DNA, 80 bp, synthetic construct
  source 1..80: mol_type = other DNA
gcgggtctccacataaaccctatgttattaagccagcgataaatcaggtgtacatgtttccagacagggccccaaaaccc

SEQ ID NO: 162908 - DNA, 80 bp, synthetic construct
  source 1..80: mol_type = other DNA
acaaccagtggagtccgctgctgtcggcgtccactctctttccccttgttacaaatagagtgtaacaacatggttcacct

SEQ ID NO: 162909 - DNA, 80 bp, synthetic construct
  source 1..80: mol_type = other DNA
gatgtaaggatttctgccttcgtatggcgagagacactaacttgcataaacaaagtggacccatcgcacaaaaccctgta

SEQ ID NO: 162910 - DNA, 80 bp, synthetic construct
  source 1..80: mol_type = other DNA
ttgacaatatatttggtagagcctggtattataatgaacacacattcaacaatggtgacctttggcgtgctccaatccca

SEQ ID NO: 162911 - DNA, 80 bp, synthetic construct
  source 1..80: mol_type = other DNA
taaggctattttaaagacttaataaacacaacttcattcaactcaattacaccaactaacaactgtctcataatgggagc

SEQ ID NO: 162912 - DNA, 80 bp, synthetic construct
  source 1..80: mol_type = other DNA
catacaaccccaactgtgacaggggagttaacaacagggtgtgggttcagcctctaactaaacccaccacagagttcgac

SEQ ID NO: 162913 - DNA, 80 bp, synthetic construct
  source 1..80: mol_type = other DNA
gctctagaaacaggtcccaacgacaagtatggagactatacctcacaataccaaggaaacacacacttactagactacta

SEQ ID NO: 162914 - DNA, 80 bp, synthetic construct
  source 1..80: mol_type = other DNA
gccactgcaaatgtggggccagaggcaatgatagaaaccaggtatgtcatgaacagcaataccaatgcagaagcagcagt

SEQ ID NO: 162915 - DNA, 80 bp, synthetic construct
  source 1..80: mol_type = other DNA
agggggcaggagtctgcactccctgtattcactgagcgtcgtctaataaagatgtctattgatctcttttagtgtgaatc

SEQ ID NO: 162916 - DNA, 80 bp, synthetic construct
  source 1..80: mol_type = other DNA
atttgtggtaggcggagcctcaggagggtcccctccatagggttgaaccaggaggtggaggattgggctccgccccgata

SEQ ID NO: 162917 - DNA, 80 bp, synthetic construct
  source 1..80: mol_type = other DNA
aagcaaacaggcccaataacacaaaacccagtggaaagatatgtggatgaagtcttaaatgaggtattggtggtacccaa

SEQ ID NO: 162918 - DNA, 80 bp, synthetic construct
  source 1..80: mol_type = other DNA
gggaaaattgtacatcagacaggttaaccagccggcacagttaccagtaattagtacagcacgcatttatttcaagccga

SEQ ID NO: 162919 - DNA, 80 bp, synthetic construct
  source 1..80: mol_type = other DNA
aagctgtggacgctgtttccgaataccgggaggagatcgtgcttccctcttccaaggatcggaaagtagcgtccgtcgtt

SEQ ID NO: 162920 - DNA, 80 bp, synthetic construct
  source 1..80: mol_type = other DNA
ggtgaatacaatgattggacaaattgccagttacttcacacactggacaggaagcttgcgctttagcttcatgttctgtg

SEQ ID NO: 162921 - DNA, 80 bp, synthetic construct
  source 1..80: mol_type = other DNA
tggcggcggatgcttcgcgggtgtttgtgcggcgtctctccgcagcttttgcgcggcgcttcgcttttcggagcggcgac

SEQ ID NO: 162922 - DNA, 80 bp, synthetic construct
  source 1..80: mol_type = other DNA
caaacagcattattacaaggggacacagaagaagcagttaataacgccattgcgagggtagccgacacaattgccagtgg

SEQ ID NO: 162923 - DNA, 80 bp, synthetic construct
  source 1..80: mol_type = other DNA
taaatcaccagttaacgcatcgattcagtgggtccacaacaaatacacaaatcctcaggcagtcaacgtctgctttaccc

SEQ ID NO: 162924 - DNA, 80 bp, synthetic construct
  source 1..80: mol_type = other DNA
ctacttttactgggagacagtcactacaggaaaatgtgtaactgtaaatatgatagccccctcacaaaactggtgggaat

SEQ ID NO: 162925 - DNA, 80 bp, synthetic construct
  source 1..80: mol_type = other DNA
cggtccgtcgccgcgtggtagtcctggggagaggatctcgccaccactgaggaccctccgcgcgctcccggcagccccca

SEQ ID NO: 162926 - DNA, 80 bp, synthetic construct
  source 1..80: mol_type = other DNA
gtgcgcaccagcgcgtatttcaatcccttatgtgggtatagccaatgcatattcacatttttatgacggctttgcacgag

SEQ ID NO: 162927 - DNA, 80 bp, synthetic construct
  source 1..80: mol_type = other DNA
acaattagcagtggtccaacgaactcccaagcagtcccagcattgacggcggtcgagaccgggcacacttcgcaagtagt

SEQ ID NO: 162928 - DNA, 80 bp, synthetic construct
  source 1..80: mol_type = other DNA
caaagatttttaactctacatccacatcactaataaattggcttactggaaaaggcccaaacaaatttcaaactggaaac

SEQ ID NO: 162929 - DNA, 80 bp, synthetic construct
  source 1..80: mol_type = other DNA
aaaagcacacagacagcaactatggctactgctcctactgtcctactagtaaattaattgagaaaattaaaaagtacaga

SEQ ID NO: 162930 - DNA, 80 bp, synthetic construct
  source 1..80: mol_type = other DNA
cctccgcagcagacggggccctcgctgcaggaggaggcttattcttccgggatggaagacagcccacctcaccaggaggc

SEQ ID NO: 162931 - DNA, 80 bp, synthetic construct
  source 1..80: mol_type = other DNA
atattccaaggcctgggagatacaaaaacaccaggatttatagttgacttgttatcatcatcaaaagaccctaaagtcat

SEQ ID NO: 162932 - DNA, 80 bp, synthetic construct
  source 1..80: mol_type = other DNA
atgacagccaatccaacacgaggcaagttttaagagttaaaagcaactactgtttattttccaaaatgagctgggtatag

SEQ ID NO: 162933 - DNA, 80 bp, synthetic construct
  source 1..80: mol_type = other DNA
accagccacacagagtaaatgcttcattatgtgtatggtgtcagcatgcaatgacttttcagtgcgcttactaaaagata

SEQ ID NO: 162934 - DNA, 80 bp, synthetic construct
  source 1..80: mol_type = other DNA
tgatgctcagtaaaaaggttattaaggtacccagccttaaaaccaggcccagcacaaaacactatgtaaaaataagattt

SEQ ID NO: 162935 - DNA, 80 bp, synthetic construct
  source 1..80: mol_type = other DNA
agatccaacacctagtgataatccctttagtaaattgtataaggaaacaatcgaaacattcgataataacgaagaagaat

SEQ ID NO: 162936 - DNA, 80 bp, synthetic construct
  source 1..80: mol_type = other DNA
tacaaaatccagttgaacaatttattgatgacactcttaaagaagttcttgtagtaccagacactcaagcctcaggacca

SEQ ID NO: 162937 - DNA, 80 bp, synthetic construct
  source 1..80: mol_type = other DNA
gcataataacttgtcacttttagtgatcccaatagtgcctattacagcaagcacaggatcatctcatagtatacctatta

SEQ ID NO: 162938 - DNA, 80 bp, synthetic construct
  source 1..80: mol_type = other DNA
gaaaaatatgttgatagtgttttaaatgaggtgttagttgtccccaatattaatgagagccaccctagcacttcaaactc

SEQ ID NO: 162939 - DNA, 80 bp, synthetic construct
  source 1..80: mol_type = other DNA
atagtgcgtgtcgccgatacgctccacacaggaccaacaaacaatgaagcaatacccaatttgacggccgtagaaacagg

SEQ ID NO: 162940 - DNA, 80 bp, synthetic construct
  source 1..80: mol_type = other DNA
catttagaacagaaggctgctactcacaccctaaactacctaaaaaacaactaattgctgcaaatgacacaacatacttt

SEQ ID NO: 162941 - DNA, 80 bp, synthetic construct
  source 1..80: mol_type = other DNA
gaacatgggaatttttggggaaaatctattttaccatttcttgggtagagctggatatacggtgcatgtgcagtgcaatg

SEQ ID NO: 162942 - DNA, 80 bp, synthetic construct
  source 1..80: mol_type = other DNA
gctcaggagagcagtcaaacagggaccagaacatgagtttatgtatgctctcatcaaaagaaactgtcacatagcaacta

SEQ ID NO: 162943 - DNA, 80 bp, synthetic construct
  source 1..80: mol_type = other DNA
aactgcagagaaaatgccaaatacaagtagaccaacagcaccacctagtgggaaaggaggaaacttccccgtacaacagg

SEQ ID NO: 162944 - DNA, 80 bp, synthetic construct
  source 1..80: mol_type = other DNA
tctatgggtagatctggatttatagtacatgtacagtgtaatgccaccaagtttcatagtggtgccttgattgtggcggt

SEQ ID NO: 162945 - DNA, 80 bp, synthetic construct
  source 1..80: mol_type = other DNA
agcctagtcagagagaaccgaagcggggtcttttggactaccaactttccctcggtggtgtcctgccaggacggtctcaa

SEQ ID NO: 162946 - DNA, 80 bp, synthetic construct
  source 1..80: mol_type = other DNA
tcacctacatctatgctaatctgtctatcaacctaacaatttctgcccctgctgagtctgcctccttctatatcttctat

SEQ ID NO: 162947 - DNA, 80 bp, synthetic construct
  source 1..80: mol_type = other DNA
taaatacaaaggtaatgtggaatgtgaattaaatgaccatatgaaagtggccatagcacattattctgctcaactgatga

SEQ ID NO: 162948 - DNA, 80 bp, synthetic construct
  source 1..80: mol_type = other DNA
catgtctctaaactttccaataggaaaagaagcactagtcattgggggactaaaaccaggcaaggatggaccaaaattaa

SEQ ID NO: 162949 - DNA, 80 bp, synthetic construct
  source 1..80: mol_type = other DNA
accagatacctgttaggtcaaatgaggggactgggactcaggtttttggtttcccattgcagcctggctactcgagcgtg

SEQ ID NO: 162950 - DNA, 80 bp, synthetic construct
  source 1..80: mol_type = other DNA
tgtatttgtgtcaactttcacacctgacacatcaaaccaaccagagcgcaaattccaaccagttgattatttgtttggta

SEQ ID NO: 162951 - DNA, 80 bp, synthetic construct
  source 1..80: mol_type = other DNA
atcacgttaaagctaacggagtagacgtaactacacatagacaggatattaacggtaaggaaatgaaattcgaagtgtta

SEQ ID NO: 162952 - DNA, 80 bp, synthetic construct
  source 1..80: mol_type = other DNA
ccctgaaccacatgggccaattgtatgtgaggcatgtgaacggcccttcaccactaacagtaaccagcaccgtaagagtg

SEQ ID NO: 162953 - DNA, 80 bp, synthetic construct
  source 1..80: mol_type = other DNA
tgataggcataattactgctggaggcgaggggcacgtggcattcactgaccttcgcccctacgcctgtttgagtgcacac

SEQ ID NO: 162954 - DNA, 80 bp, synthetic construct
  source 1..80: mol_type = other DNA
gaaaagcagattgaaaatctgcgaggtgctgacacaaaaacgcaggacaaaataaagtttgagattgacacgctacatga

SEQ ID NO: 162955 - DNA, 80 bp, synthetic construct
  source 1..80: mol_type = other DNA
cgtttcggcttgtaacgacttctcagttcgaatgctgaaagacaccccttttgtagaacaagaagcggacctacaagggg

SEQ ID NO: 162956 - DNA, 80 bp, synthetic construct
  source 1..80: mol_type = other DNA
atttctctcccttcttcaccgtggagtttcccccgattcaagaggagggcgcaagttctccggtacccttagatgtggac

SEQ ID NO: 162957 - DNA, 80 bp, synthetic construct
  source 1..80: mol_type = other DNA
ggactttcaaaatcccagggtttatgggcaggaagttaacatatatgacaacgctcctgcacctggtaagttgaggaaat

SEQ ID NO: 162958 - DNA, 80 bp, synthetic construct
  source 1..80: mol_type = other DNA
cgtggcctttggcacgggcctggcccccaccgctttaattgtgggagtgggcagggcagctgcatcttggtgcctctgtg

SEQ ID NO: 162959 - DNA, 80 bp, synthetic construct
  source 1..80: mol_type = other DNA
ctaaccatgtttttgtcagagactcacaaacttaaacctagtagtggtaatagtacagcattaacaaaaaacaacgcaga

SEQ ID NO: 162960 - DNA, 80 bp, synthetic construct
  source 1..80: mol_type = other DNA
atatacaacatacaagtctctgcagcatctacaggaaagatactaacgctgcctcttgacatgagtcatacagtctttgc

SEQ ID NO: 162961 - DNA, 80 bp, synthetic construct
  source 1..80: mol_type = other DNA
agctaaactcgattgggtatacgctagtatagataataaagacgaatttatggaagagttgtcaatcggtacattagggt

SEQ ID NO: 162962 - DNA, 80 bp, synthetic construct
  source 1..80: mol_type = other DNA
acttctgtgtaaacatggagtaattggtatcctgactgctggtggtgaagggcacgccgctttcactgatctcagaccat

SEQ ID NO: 162963 - DNA, 80 bp, synthetic construct
  source 1..80: mol_type = other DNA
ccacgcccgtccgcggcgagatcgcgacggaggagcgatcgagcgtcccgagggcgggtgccgaaggtgagtttacacac

SEQ ID NO: 162964 - DNA, 80 bp, synthetic construct
  source 1..80: mol_type = other DNA
catgtgagagtgtggtgccctaggccaccaagagctgtggagtacaccgggccatcggttgactacaaacaaaacaacac

SEQ ID NO: 162965 - DNA, 80 bp, synthetic construct
  source 1..80: mol_type = other DNA
attgtggtaccggcagacgtgcagaacaagagcaccattctgtgctttgtatccgcatgcaatgacttttcagtgagatt

SEQ ID NO: 162966 - DNA, 80 bp, synthetic construct
  source 1..80: mol_type = other DNA
aggcgtatatgcaaaaaccaaaaagacctagactgttccctgttacagagggcgacgaccagtccccccccgcaaggcga

SEQ ID NO: 162967 - DNA, 80 bp, synthetic construct
  source 1..80: mol_type = other DNA
cctatccccagcatctgatcagcgattacaatatactatgcttggagaaatcttgaattattacactcactggactggat

SEQ ID NO: 162968 - DNA, 80 bp, synthetic construct
  source 1..80: mol_type = other DNA
cagagataacattaaaattgtaaactttggaccttcagatatgtttgtgcatatggatgatctaatatacagaaatttgc

SEQ ID NO: 162969 - DNA, 80 bp, synthetic construct
  source 1..80: mol_type = other DNA
ctaggtgcagcatttgggtgtgggttcacaaatcagataagcgaaaaggttgcagagatcacctctatggttagtagtgt

SEQ ID NO: 162970 - DNA, 80 bp, synthetic construct
  source 1..80: mol_type = other DNA
ggataatagaagctagtagtataaatgatacatcccacttcagaatggtgtttggcaacctcttttcaaccttccatgca

SEQ ID NO: 162971 - DNA, 80 bp, synthetic construct
  source 1..80: mol_type = other DNA
acaaaggcagcacatttcagaagattgattggacaaatgtcactttcctcaaaaggcatttcaaaccagacaccaaatac

SEQ ID NO: 162972 - DNA, 80 bp, synthetic construct
  source 1..80: mol_type = other DNA
tctcaggtacgggttgactataacacctgctgacaaatccagccaatttataaaagtggattgggacaatgccacatttt

SEQ ID NO: 162973 - DNA, 80 bp, synthetic construct
  source 1..80: mol_type = other DNA
gttttatatccctcccccctatgtaacttagaagctaagcacatggaccaataggcgatggctgtccaagtcatcaacgg

SEQ ID NO: 162974 - DNA, 80 bp, synthetic construct
  source 1..80: mol_type = other DNA
caaactggaaaacaaccacacctcacaacaacactctgtacgcaggcagcacatacgctacaaacacaggaactacaagt

SEQ ID NO: 162975 - DNA, 80 bp, synthetic construct
  source 1..80: mol_type = other DNA
acccctgccagaagcccacgcaccctctacccgatcccgatagacaccctcgcctcctacaagtctcagacccgacaaag

SEQ ID NO: 162976 - DNA, 80 bp, synthetic construct
  source 1..80: mol_type = other DNA
cggcaccagcattgcacaggacatgccaccgttaacgcaccagataatgtacataccccccggtggtccagtgcctaaca

SEQ ID NO: 162977 - DNA, 80 bp, synthetic construct
  source 1..80: mol_type = other DNA
agagagagccatgggatgaatgggtagtagaagttctggaagaaatcaaagaagaagccttaaaacattttgaccctcgc

SEQ ID NO: 162978 - DNA, 80 bp, synthetic construct
  source 1..80: mol_type = other DNA
ttgtcttctgcggatcagcaatgacaactggcaagtttctcctgtcatacgcaccaccaggggctggggcaccaacaaaa

SEQ ID NO: 162979 - DNA, 80 bp, synthetic construct
  source 1..80: mol_type = other DNA
tgcataggaagcttagtagtcatactgggcacaatctatgcattatacaaactaatgagcatgacacaaggagcatacac

SEQ ID NO: 162980 - DNA, 80 bp, synthetic construct
  source 1..80: mol_type = other DNA
tgccacttaaaggacttaccactctggtgcatgtttcatggatactctgactatatagagtcagaattaggcatacaaca

SEQ ID NO: 162981 - DNA, 80 bp, synthetic construct
  source 1..80: mol_type = other DNA
agtttttcaccaaagagaggtacttgaatgcttatcacagaccggaccgtttgcatacaagagtgacgagaataaggctg

SEQ ID NO: 162982 - DNA, 80 bp, synthetic construct
  source 1..80: mol_type = other DNA
aacccccccatgaaaaccaaccagtacacggcccccctgacgcacccaggcatgctcatgcgcgccaagtacagggtgct

SEQ ID NO: 162983 - DNA, 80 bp, synthetic construct
  source 1..80: mol_type = other DNA
ggatgattacgggtacaaacagtgcaaaaataaaactcacaaacttagggctcaagttggcagaaactggacccggctct

SEQ ID NO: 162984 - DNA, 80 bp, synthetic construct
  source 1..80: mol_type = other DNA
ttgcagacatgattgatcagactgtgaataaccaagtgaatcgctctctaactgcattgcaagtattgcccacagctgcc

SEQ ID NO: 162985 - DNA, 80 bp, synthetic construct
  source 1..80: mol_type = other DNA
atcaaaatacatcccgttatggcaccattgctagtaatcacatggggacactgtgttctagaatagttacagaagaacat

SEQ ID NO: 162986 - DNA, 80 bp, synthetic construct
  source 1..80: mol_type = other DNA
aaggagacggtgggcgccgcgccggcggtggcgcagacgccggtggcgccgtagaccactacgaagaaggagatttagaa

SEQ ID NO: 162987 - DNA, 80 bp, synthetic construct
  source 1..80: mol_type = other DNA
aggatgccatatattggttatataccaaattgaaggatttttatgacgtaaattatggcaagaaaaaggatgttcttaac

SEQ ID NO: 162988 - DNA, 80 bp, synthetic construct
  source 1..80: mol_type = other DNA
attcctgtacaataacatgaaaacataccaccagaaatcaatagatgaaaactttccaacaacctggagaggaaacatgg

SEQ ID NO: 162989 - DNA, 80 bp, synthetic construct
  source 1..80: mol_type = other DNA
gtaccaaaccagtttagtggtaccagcggagacgccacaacaatgcacgatactgtgcttcatttcagcatgcaatgact

SEQ ID NO: 162990 - DNA, 80 bp, synthetic construct
  source 1..80: mol_type = other DNA
atgacaacatcttaaccgttcttgagggcactgcagatgcatcaaaaagaaatagcacatatgattcactactaaaaata

SEQ ID NO: 162991 - DNA, 80 bp, synthetic construct
  source 1..80: mol_type = other DNA
ttgacatggaggtcacgtttgtcatcaccagctcgcaagatgacgggacgcagctagcgcaggatatgccggttttaaca

SEQ ID NO: 162992 - DNA, 80 bp, synthetic construct
  source 1..80: mol_type = other DNA
tttcagaccagggatacctggaagaagcaattgtgagagtagaacagtaccgccatatccgtagtactttgactgactta

SEQ ID NO: 162993 - DNA, 80 bp, synthetic construct
  source 1..80: mol_type = other DNA
catgatgatttggtaacagtcacagctaccttggcattactaggatgcgatggatcaccgtggcgctttctgaaaatgta

SEQ ID NO: 162994 - DNA, 80 bp, synthetic construct
  source 1..80: mol_type = other DNA
cagccccagacgtagcagagttgcagcatcacgaatttcgcggcggcgggttagagccccggcattacgtgccgaagtat

SEQ ID NO: 162995 - DNA, 80 bp, synthetic construct
  source 1..80: mol_type = other DNA
attctccgtacagccaagaggactgaacctgttggggtactctttcatggtgaaccaggtacaggcaaatcaatcgctac

SEQ ID NO: 162996 - DNA, 80 bp, synthetic construct
  source 1..80: mol_type = other DNA
gttcgactgggagacagaggcgcagctagctgcctgcttcgacaggcctatgcgtttcttcccctcagacctcccaacat

SEQ ID NO: 162997 - DNA, 80 bp, synthetic construct
  source 1..80: mol_type = other DNA
tcatacaagttgatacactgattccaatgaacaacacacacacaagtgataaagttgaaagttatctcataccactaaca

SEQ ID NO: 162998 - DNA, 80 bp, synthetic construct
  source 1..80: mol_type = other DNA
taccacacaggcatctacagctccatattcctgagcccactaaggagcaacttagaattccccacagcataccaagatgt

SEQ ID NO: 162999 - DNA, 80 bp, synthetic construct
  source 1..80: mol_type = other DNA
ctacataaatacaactaaatttacaactgcctcacagcccaccacaaactctggagcagctccatactacacctttgcag

SEQ ID NO: 163000 - DNA, 80 bp, synthetic construct
  source 1..80: mol_type = other DNA
caacaggtgggggttgttggtcccgcccatcatcccccgagcagctttggcagaccacctgtgctggaaagagaggctgg

SEQ ID NO: 163001 - DNA, 80 bp, synthetic construct
  source 1..80: mol_type = other DNA
ggctacaaagcatagtaaaaccagacacacaatttagcatcccatcttgtacatatgtattagaagacaagccattatgg

SEQ ID NO: 163002 - DNA, 80 bp, synthetic construct
  source 1..80: mol_type = other DNA
ggtgcatactgggaatcatgaagggcaggttcttgtattcaagagagcgattggtgttgcggaacatgcggctcacctcg

SEQ ID NO: 163003 - DNA, 80 bp, synthetic construct
  source 1..80: mol_type = other DNA
caatatgcccattacaggttgaaatgtcaggaacacaaactgtacctatcacagtatcaattagcccaatgttttcagaa

SEQ ID NO: 163004 - DNA, 80 bp, synthetic construct
  source 1..80: mol_type = other DNA
agtccgtcactaaccacgtgactctcctcagcgaatcactgtgctatgtcgtacacttcctgggccgggtctacgtccta

SEQ ID NO: 163005 - DNA, 80 bp, synthetic construct
  source 1..80: mol_type = other DNA
caggggacacataccaatatactggcagacccgctggcgccccgaaatgatgttccaacacgaagttatcagagacattg

SEQ ID NO: 163006 - DNA, 80 bp, synthetic construct
  source 1..80: mol_type = other DNA
accttgaatcacatgggacagttgtatgtaagacatgtaaacggtccttcaccactgccagtaaccagcactgttagagt

SEQ ID NO: 163007 - DNA, 80 bp, synthetic construct
  source 1..80: mol_type = other DNA
gactccttcatgcccataaacaatgtgaatcaatctcaggcaataggaatctactacattccaatatcaaacacacataa

SEQ ID NO: 163008 - DNA, 80 bp, synthetic construct
  source 1..80: mol_type = other DNA
tgatttgagagattttcatgttgctgatgaacagggtataacagattatatacacacacttggagaggcatttggtgcag

SEQ ID NO: 163009 - DNA, 80 bp, synthetic construct
  source 1..80: mol_type = other DNA
cgtacctcgcggccgttattttttttgcggtccccagggacgagtggcgccgcgcgcggccgtcctcctggggacttcct

SEQ ID NO: 163010 - DNA, 80 bp, synthetic construct
  source 1..80: mol_type = other DNA
gcacctctggcatccacacaaattcccatcacggtgacgattgcaccaatgttcactgaattcaacggtttgaggaacat

SEQ ID NO: 163011 - DNA, 80 bp, synthetic construct
  source 1..80: mol_type = other DNA
tcgcgcacccaccattcaaggtggagtccgagaccagcaatggttcgaggcctgtgttcgatcacacgccgctttctgtg

SEQ ID NO: 163012 - DNA, 80 bp, synthetic construct
  source 1..80: mol_type = other DNA
accttggtgttggcccgcaagaagcccttgcccgcatcatggggtcgcctgacctcgcagacgcccccagccctaatttt

SEQ ID NO: 163013 - DNA, 80 bp, synthetic construct
  source 1..80: mol_type = other DNA
gacaaggcacactcagccgaaattgtattgaaccagttgtgcacaaggtttttcggacttgatttagattcagggttgtt

SEQ ID NO: 163014 - DNA, 80 bp, synthetic construct
  source 1..80: mol_type = other DNA
ggggcaccagtacaaagaccaccttagtattagttccacatatgatgagtctaacaaacaacactatgaccaaaatttat

SEQ ID NO: 163015 - DNA, 80 bp, synthetic construct
  source 1..80: mol_type = other DNA
aacgtcattctaaatacacaaattcccacgtagccactcacgttagttggacagccgccatagtaacggttattataatt

SEQ ID NO: 163016 - DNA, 80 bp, synthetic construct
  source 1..80: mol_type = other DNA
tctccagtcatcatgtcacctcgttgtaccctggatcagctctcatttcttcaggaggaccaggaaagacaactatacag

SEQ ID NO: 163017 - DNA, 80 bp, synthetic construct
  source 1..80: mol_type = other DNA
ctccattccgggccgtgtgctgggtccccgaggtgcgggggggtgttttcatcggagtggtgaaatgttggaatttgaga

SEQ ID NO: 163018 - DNA, 80 bp, synthetic construct
  source 1..80: mol_type = other DNA
cattatccactggtaggacccaaagctttgctgttcccaaaaagcttaccacaagtgtggaccaagcaagactgggaaac

SEQ ID NO: 163019 - DNA, 80 bp, synthetic construct
  source 1..80: mol_type = other DNA
cacgcatagtggttcctgccaacactccaacaacgatgtcaatgctagcgtttgttagtgcttgcccagacttcagtgtg

SEQ ID NO: 163020 - DNA, 80 bp, synthetic construct
  source 1..80: mol_type = other DNA
gatgtcaactataaagacaccagttaatgctacttctatcaaagaatttttcaaccatgcagttgaaggtgatgagcagg

SEQ ID NO: 163021 - DNA, 80 bp, synthetic construct
  source 1..80: mol_type = other DNA
tgaggcctcagcgccccctcctgatcaaagagggcctcgctgaccccggagatgacattctcattcagaaagtagtgata

SEQ ID NO: 163022 - DNA, 80 bp, synthetic construct
  source 1..80: mol_type = other DNA
attatttattctaaacatttgctttataattgctgttatcatgtgtgtgggtcaatgccttctgggtctccttgtacagc

SEQ ID NO: 163023 - DNA, 80 bp, synthetic construct
  source 1..80: mol_type = other DNA
aaagacaataggactatcataagcttaaattcatattataatctgacaatgcactgtaaaaggccaggaaacaaaatggt

SEQ ID NO: 163024 - DNA, 80 bp, synthetic construct
  source 1..80: mol_type = other DNA
aacttaggaaaacccaacgaacatcctactcccacaaatgactactatgaataccacctaggcctatttagccccatatt

SEQ ID NO: 163025 - DNA, 80 bp, synthetic construct
  source 1..80: mol_type = other DNA
atatatggctcagttgttacaaatgacatgggaactttatgttatagaatagtcactgatacacataaccacaagataga

SEQ ID NO: 163026 - DNA, 80 bp, synthetic construct
  source 1..80: mol_type = other DNA
aaaagacggagagggcgacggaaacacaaaaagagacttgtactgactcagtggcagccctctatagttaaaaaatgtta

SEQ ID NO: 163027 - DNA, 80 bp, synthetic construct
  source 1..80: mol_type = other DNA
gcgtctcggagggctatgagtgcatttcctgggcatggtctacatcctgatataactaagtgcacttccgaatggctgag

SEQ ID NO: 163028 - DNA, 80 bp, synthetic construct
  source 1..80: mol_type = other DNA
gggacgggaggtggcgacggagacacggggtgacgtcgcggacgaggacggtgacggtggtgaggacggcgcgttgcgtg

SEQ ID NO: 163029 - DNA, 80 bp, synthetic construct
  source 1..80: mol_type = other DNA
gacggggcaggcgtgatcctgggcgcaatctttaccgatccccacaccttcactccttgttagtttgatagaatgtcggt

SEQ ID NO: 163030 - DNA, 80 bp, synthetic construct
  source 1..80: mol_type = other DNA
catcgccagatgcaattgtaggtgtggggtatactattgtgagtcaaagaggaaatattatccagtgaccgtcacacagc

SEQ ID NO: 163031 - DNA, 80 bp, synthetic construct
  source 1..80: mol_type = other DNA
aataggcataaatgcagtaacacagcacaccactatccaagataaattatatgaacaaggcaactactatcaaacatttc

SEQ ID NO: 163032 - DNA, 80 bp, synthetic construct
  source 1..80: mol_type = other DNA
tacagttgacgcacacaagaacctatggcagtacacatacacaagcctcatgtccaagtactactacaaaggcaacccta

SEQ ID NO: 163033 - DNA, 80 bp, synthetic construct
  source 1..80: mol_type = other DNA
agctggccatatcccccgcaccacagaagtgtaagcaaagtgaagggctcggaaggcaggcggggcctagcaatgtcaca

SEQ ID NO: 163034 - DNA, 80 bp, synthetic construct
  source 1..80: mol_type = other DNA
tcagaaggcaattatagtcacccttccattaaagtatttaatggcgacaacaaacccacaactgacgaatactttgccaa

SEQ ID NO: 163035 - DNA, 80 bp, synthetic construct
  source 1..80: mol_type = other DNA
agccatcaggggagagcagatattgtcctgctgcaactatccaacagctcataaaaggcaggtgcctagcttgcaatttc

SEQ ID NO: 163036 - DNA, 80 bp, synthetic construct
  source 1..80: mol_type = other DNA
cccaaggtgaaattgtaaacaaatgtaaggtacaagatgttggcctaaagcctatcaacacaccagagcactccaagttg

SEQ ID NO: 163037 - DNA, 80 bp, synthetic construct
  source 1..80: mol_type = other DNA
cgatatcacccccaggggagcctcctacgggggcaacttcacaaacatgactttctccctggaggccatatatgaacagt

SEQ ID NO: 163038 - DNA, 80 bp, synthetic construct
  source 1..80: mol_type = other DNA
tctactttacttggggtggcgaccaaatcttccaacagacaattaaaaatccgtgcaaagacgactctaccggaaccagt

SEQ ID NO: 163039 - DNA, 80 bp, synthetic construct
  source 1..80: mol_type = other DNA
attacaaacctaaagacagtgagaagcaagttagtacctttattaaacccagagctaatctgagagagatcaggacattt

SEQ ID NO: 163040 - DNA, 80 bp, synthetic construct
  source 1..80: mol_type = other DNA
tggaggattaatacaagagaagttgcacagctcagacgcaaactggaaatgtttacctatatgaggtttgacctagagtt

SEQ ID NO: 163041 - DNA, 80 bp, synthetic construct
  source 1..80: mol_type = other DNA
tgggtagatcagctttgtgggctaatcttacactggaaagaggcttcaaaaagtgggagatcaatttccaagagcatgct

SEQ ID NO: 163042 - DNA, 80 bp, synthetic construct
  source 1..80: mol_type = other DNA
ctagtggggtgagaatatacttcaagcctaaacacatcaaggcatgggtacctagaccaccaaggctgtgtcaatatgtc

SEQ ID NO: 163043 - DNA, 80 bp, synthetic construct
  source 1..80: mol_type = other DNA
ttgtggtgattttattaatcacattaacaatctggcgactagtcttggacgtcctcctcaacccagacctccaggagccc

SEQ ID NO: 163044 - DNA, 80 bp, synthetic construct
  source 1..80: mol_type = other DNA
tgggggtggacagcagtacaaaactcaactacacttgatataaatggcagcaatgcaactcaaagccgagacacttggta

SEQ ID NO: 163045 - DNA, 80 bp, synthetic construct
  source 1..80: mol_type = other DNA
tggacaaatatggcattgatttaccattggttacatatataaaagatgaactcaggagtagagacaaggttaggttaggg

SEQ ID NO: 163046 - DNA, 80 bp, synthetic construct
  source 1..80: mol_type = other DNA
atgtaatgatttttcagcacgactcttgaaagacacaccattcgtcatccaggccacacttacggctaccactcagggaa

SEQ ID NO: 163047 - DNA, 80 bp, synthetic construct
  source 1..80: mol_type = other DNA
atatcacatcgttcaccgatgccagcctgcatccatagcatcaaaacaagagtagaggagaggggagagaacccacgaaa

SEQ ID NO: 163048 - DNA, 80 bp, synthetic construct
  source 1..80: mol_type = other DNA
ggtatggcgcagctcttttgcgtaagtactttgtccaagcccagggagacataatagcaaaacataaagttggagtggaa

SEQ ID NO: 163049 - DNA, 80 bp, synthetic construct
  source 1..80: mol_type = other DNA
gggtctccaatcctcatgtcatcttgtcattccctggatcagctcccatttcttcagaagaactagaaaggatgattaca

SEQ ID NO: 163050 - DNA, 80 bp, synthetic construct
  source 1..80: mol_type = other DNA
tggggagaccatgtatataataaaaccattgtacaggcaatgaaagagaatgcacaaaacatgtataacaaccacaaaca

SEQ ID NO: 163051 - DNA, 80 bp, synthetic construct
  source 1..80: mol_type = other DNA
tggagcaattgctgaacaatcttggctttcctggggagctggcttataaactgtgcaacacaacccacatatacaaggat

SEQ ID NO: 163052 - DNA, 80 bp, synthetic construct
  source 1..80: mol_type = other DNA
ggggtactaattaaagctagaaagaaagtcctggtgcccagctatgacacgcaccccaagggtcgcgctaaaataaaaat

SEQ ID NO: 163053 - DNA, 80 bp, synthetic construct
  source 1..80: mol_type = other DNA
gcgccaagcaacaaaacaggggttgcctgtggaaatgaaaccaggtacaaaccagttcctgactaccgaccagggagttt

SEQ ID NO: 163054 - DNA, 80 bp, synthetic construct
  source 1..80: mol_type = other DNA
tcatggactggttgttgaggcggtatctggagatcgtgttccccgcaggcgaccacgtctatcctggacttaagacggaa

SEQ ID NO: 163055 - DNA, 80 bp, synthetic construct
  source 1..80: mol_type = other DNA
actatgttaaaactgattcgtcagatctagggcgtttgagagtctatgtgtggacaccactcactatcccttctagtgcc

SEQ ID NO: 163056 - DNA, 80 bp, synthetic construct
  source 1..80: mol_type = other DNA
gcaaaacacactatacaaagaccaccttaaaaacgtatggcgtaccctagtatcagatggctcctactggaatagcttcc

SEQ ID NO: 163057 - DNA, 80 bp, synthetic construct
  source 1..80: mol_type = other DNA
ggaatggcctgaatacctaaaagacattgatgctagtgctgtagataaacccactcatcctgagacatctacagaccggt

SEQ ID NO: 163058 - DNA, 80 bp, synthetic construct
  source 1..80: mol_type = other DNA
ctcttccgcttcatctgggcccactacgtgaggcccacggtggcggcagacccccaggcctccatcagctctcttttccc

SEQ ID NO: 163059 - DNA, 80 bp, synthetic construct
  source 1..80: mol_type = other DNA
gttttaggccttccggactacaaaaatggcgcattcagtgacgtcacggccgccattttaagtaaggcggaagtagctcc

SEQ ID NO: 163060 - DNA, 80 bp, synthetic construct
  source 1..80: mol_type = other DNA
accgcctgcccataatgtccccggccaggagcaacagtggttccgatcctgcctccacgcgcacggagctttttgtggct

SEQ ID NO: 163061 - DNA, 80 bp, synthetic construct
  source 1..80: mol_type = other DNA
acataaatcccacatacagaaacgcagactaccaagagtacgagtaccactgtggctacttctcatccatgtttctaagc

SEQ ID NO: 163062 - DNA, 80 bp, synthetic construct
  source 1..80: mol_type = other DNA
caagtatggtaaacaatacaaagtttaccactgcttctacacccactataacaaacaactcagccccatactacaccttt

SEQ ID NO: 163063 - DNA, 80 bp, synthetic construct
  source 1..80: mol_type = other DNA
gtcaagataacaactggattgttccagctgagtgttctattgaaagagatttagggttagcaaatttaactattagtata

SEQ ID NO: 163064 - DNA, 80 bp, synthetic construct
  source 1..80: mol_type = other DNA
cgatacagcttattgtgtattggtgcgagtattacgacatgagtagcacatcgttgtaattggatgtgcgttactgagtg

SEQ ID NO: 163065 - DNA, 80 bp, synthetic construct
  source 1..80: mol_type = other DNA
tgtgactgtgccaattttcttcgcacgtcctgcccccccgtgctgggcagtcagggcctggaagtcttggcggcgttggt

SEQ ID NO: 163066 - DNA, 80 bp, synthetic construct
  source 1..80: mol_type = other DNA
taatctgtggaacgggcaccaccggtaccacgtacagaaactatggcagccacatgcatgactatagaaaatatgaccca

SEQ ID NO: 163067 - DNA, 80 bp, synthetic construct
  source 1..80: mol_type = other DNA
tatgataaagacgaggctgggcgaggactccgtgagacacagacgggaatggtgaaaccacgtcgcgggcgccgcgtagc

SEQ ID NO: 163068 - DNA, 80 bp, synthetic construct
  source 1..80: mol_type = other DNA
gaggccagcagcgactataacccagtaaaaagcaagtgcatgttacaagacatgcccttgtggatgatgctgtatggcta

SEQ ID NO: 163069 - DNA, 80 bp, synthetic construct
  source 1..80: mol_type = other DNA
gagagtttcagaaaactgcagccctgactgcaggggatgggaaaaattcattttgtcccctcgattgggttttgggatgc

SEQ ID NO: 163070 - DNA, 80 bp, synthetic construct
  source 1..80: mol_type = other DNA
cagctagttaccctatactagcagttgttgaacaactgaggacagaaaatgacacaaggagcaaggtcaaaaccaatctt

SEQ ID NO: 163071 - DNA, 80 bp, synthetic construct
  source 1..80: mol_type = other DNA
tccggcgtggtccagaccgccaccgcggcgccgtcgtccgcgacccacaccttgccgatgtcgagcccgacgcgcgtgag

SEQ ID NO: 163072 - DNA, 80 bp, synthetic construct
  source 1..80: mol_type = other DNA
cttttgcaaacagtggctctaatacaactgtcagtgatcaaattaaaagctttgaaacttggctatatgaatccagcaca

SEQ ID NO: 163073 - DNA, 80 bp, synthetic construct
  source 1..80: mol_type = other DNA
agatctttatgtccatactggtgaattaatatacagaaatctacacctgtgtgagccagaaaacttaaatgattcagtat

SEQ ID NO: 163074 - DNA, 80 bp, synthetic construct
  source 1..80: mol_type = other DNA
aatgctggacatttctttggggccttatgttttgtttgcctctgaggtactcaggggcatttaggtttttcctcatcaat

SEQ ID NO: 163075 - DNA, 80 bp, synthetic construct
  source 1..80: mol_type = other DNA
tcaaagtctataagggcattgaccttgatcagtttaaaatgattgcctatggtgatgatgtaattgcaagttatccacat

SEQ ID NO: 163076 - DNA, 80 bp, synthetic construct
  source 1..80: mol_type = other DNA
gacatgggcaccctgtgcttcagagctctagataattcaaccagtagtcacatcaaagtgtatataaaaccaaaacacat

SEQ ID NO: 163077 - DNA, 80 bp, synthetic construct
  source 1..80: mol_type = other DNA
atacacggatgcagggtacataacgtgttggtaccaaaccagcattgtggtaccagcagatgtacagaacaagagtacaa

SEQ ID NO: 163078 - DNA, 80 bp, synthetic construct
  source 1..80: mol_type = other DNA
ccaatcagtttctgaccacagaagatgacaccgcagcacccattttaccggggtttactcccacccccacaattcatata

SEQ ID NO: 163079 - DNA, 80 bp, synthetic construct
  source 1..80: mol_type = other DNA
cgagtggtgaggagcgccggggagacgacgacagcagggacgagctgtacgacgtgccgggcatttatatgattcgcgtc

SEQ ID NO: 163080 - DNA, 80 bp, synthetic construct
  source 1..80: mol_type = other DNA
ggaggctctgcacgcctggctcccctcactgtcactggcctccctccacccagacataccccaaaccaccgcagatggag

SEQ ID NO: 163081 - DNA, 80 bp, synthetic construct
  source 1..80: mol_type = other DNA
caggtgccctatccctgtcactaccaaacaccgctcagtccacgcaagccactagcggagttaattcccaggaggtgccg

SEQ ID NO: 163082 - DNA, 80 bp, synthetic construct
  source 1..80: mol_type = other DNA
caacacttacaggctccacatatgactgggaaaactacagcacaccagataactactcaaaatgttacaactgctttacc

SEQ ID NO: 163083 - DNA, 80 bp, synthetic construct
  source 1..80: mol_type = other DNA
ctacctctcaaaagcctgcagtaaaaggcagttctgaaatccctaataccgatggattcttaaacacaacaccttctaac

SEQ ID NO: 163084 - DNA, 80 bp, synthetic construct
  source 1..80: mol_type = other DNA
cccacaggaagatgagtcaaaacttttaaaccatcctgagacccgagtagcggtttacaggccgcacgccagtcttagct

SEQ ID NO: 163085 - DNA, 80 bp, synthetic construct
  source 1..80: mol_type = other DNA
ccgggtggtactcatccatgttccttagcccccacagataccagctacaattccccacagcatactttgactgcacctac

SEQ ID NO: 163086 - DNA, 80 bp, synthetic construct
  source 1..80: mol_type = other DNA
agatactcaagaatataaaaataattttgttactaccttatctacaaaactaggcacaacatgggggtcaagacttaaca

SEQ ID NO: 163087 - DNA, 80 bp, synthetic construct
  source 1..80: mol_type = other DNA
agggaatttcccttaactttagtggaataaatttaattagtgcagtttattatgccagtttcatttggggtggaacctag

SEQ ID NO: 163088 - DNA, 80 bp, synthetic construct
  source 1..80: mol_type = other DNA
tttgcaataaaagttgatgtggcttcacaacctttgtccagcacacttcttggagaaatttgttcatactatacacactg

SEQ ID NO: 163089 - DNA, 80 bp, synthetic construct
  source 1..80: mol_type = other DNA
atggggctgatgtcacacctactagtgcatctagagccaatatcacaacagctggcgtgtttggtcaacagtcaggggca

SEQ ID NO: 163090 - DNA, 80 bp, synthetic construct
  source 1..80: mol_type = other DNA
gggtgtagcaataccatttaatttccttaaaaatgacatgtccgatcagggcattgtgacgcaagtcacacccatccagc

SEQ ID NO: 163091 - DNA, 80 bp, synthetic construct
  source 1..80: mol_type = other DNA
cctccaatcgtcatgtcaccttgttgtaccttggatcagctctcatttcttcagaaggaccagaaaggataattacacag

SEQ ID NO: 163092 - DNA, 80 bp, synthetic construct
  source 1..80: mol_type = other DNA
tacttcaaacctaagcacataagggtttgggtaccacgacccccacgcttgtgcccctacatcaagtccagtaatgttaa

SEQ ID NO: 163093 - DNA, 80 bp, synthetic construct
  source 1..80: mol_type = other DNA
ccagagacccggaccaactgtttgtaatgtacagctacaactttgggcacggacgcatgccggggggcgacaaatatgta

SEQ ID NO: 163094 - DNA, 80 bp, synthetic construct
  source 1..80: mol_type = other DNA
tttttaccgccggactctgggtcgcgcggcatcgtgtattgctacgtgattgagttcaaaaccacgtactcagacgccga

SEQ ID NO: 163095 - DNA, 80 bp, synthetic construct
  source 1..80: mol_type = other DNA
gcgagacaaggacaccctttgtgccgcatttcgcgtcgaccccggcagagatggaccatggcaatccaccttgttaggcc

SEQ ID NO: 163096 - DNA, 80 bp, synthetic construct
  source 1..80: mol_type = other DNA
aaaacctaagcacataacagcatggtgtcctcgtgcacccagggcagttgactacacacataagcattccccaaactatc

SEQ ID NO: 163097 - DNA, 80 bp, synthetic construct
  source 1..80: mol_type = other DNA
tttgatacaccttaacaataggaaatgggggcacagttttcaacgcagcgctccggctctcatgagacgagcaatgtagc

SEQ ID NO: 163098 - DNA, 80 bp, synthetic construct
  source 1..80: mol_type = other DNA
ctcaaggataccccgtttatagagcaggctgcggagctgcagaatgacgtgcggcaagcagtagagggggcgattggcag

SEQ ID NO: 163099 - DNA, 80 bp, synthetic construct
  source 1..80: mol_type = other DNA
tggtagtttgaatccagtgtggtttaaactacttgcccagattcttgaaaacttaggattcccagggaatttagtacaaa

SEQ ID NO: 163100 - DNA, 80 bp, synthetic construct
  source 1..80: mol_type = other DNA
taaaccaatagcaggcaaagacaaaggcacagaaaaatgttatactgaccaccttaaaacagtgtgggaaacattagttt

SEQ ID NO: 163101 - DNA, 80 bp, synthetic construct
  source 1..80: mol_type = other DNA
aaatattagatcattgtaagaaaatacctttataccaagagcagatcaaaggattcccctatgccacacaagaatctcaa

SEQ ID NO: 163102 - DNA, 80 bp, synthetic construct
  source 1..80: mol_type = other DNA
aggcaagaaaagaaaaacagaaagtgtgttgaacacaacctttcagctatatttcagggactgggagatgaaactacacc

SEQ ID NO: 163103 - DNA, 80 bp, synthetic construct
  source 1..80: mol_type = other DNA
gctgatttccatgtgccaatggcagccatagaggataagggcaagtcttttaccagcaagtatgttttggcatccaccaa

SEQ ID NO: 163104 - DNA, 80 bp, synthetic construct
  source 1..80: mol_type = other DNA
ttgaagatcatgcctggttataaaactcatgcaggccttctagatacagctaaagcattgcaggcatgcccggagtgtgc

SEQ ID NO: 163105 - DNA, 80 bp, synthetic construct
  source 1..80: mol_type = other DNA
ggatatctcaccacgagtcatagtagtaccaaggagtgtgtaacaccattttttcttttttctttgtaacgggataaggg

SEQ ID NO: 163106 - DNA, 80 bp, synthetic construct
  source 1..80: mol_type = other DNA
catctctacaaaaaaaaattaaaaaaattagctgagtgtggtggtgtacacctgtggttccagctactcaggaggctgaa

SEQ ID NO: 163107 - DNA, 80 bp, synthetic construct
  source 1..80: mol_type = other DNA
tcagacatgtgaatgataacactgtaggaccatatgttagcaaggcgcgcatatactttaagccaaaacacgtgcgtgca

SEQ ID NO: 163108 - DNA, 80 bp, synthetic construct
  source 1..80: mol_type = other DNA
atgaccccagattagaagtggacttcaatcaagctttattttctaaatataaaggtaataatgattgtgttatgaatgat

SEQ ID NO: 163109 - DNA, 80 bp, synthetic construct
  source 1..80: mol_type = other DNA
cttgcccccagatccaaagcattttgatggctacaaccaacaacctgtggttattatggatgaccttgggcaaaaccctg

SEQ ID NO: 163110 - DNA, 80 bp, synthetic construct
  source 1..80: mol_type = other DNA
ccataatgggtgcgcaagtttcatctcagaaggtgggagcacatgaaaacaccaatgtagctacaggtggttctactgta

SEQ ID NO: 163111 - DNA, 80 bp, synthetic construct
  source 1..80: mol_type = other DNA
caactagaacatattatttcccaaatggcatatataactggttccaccacggggcacctcacacattgtgcaggatatca

SEQ ID NO: 163112 - DNA, 80 bp, synthetic construct
  source 1..80: mol_type = other DNA
caagactgggaaacagagtaccagtgctgtaaagcctttaacaggccacctagaaccaacctaaaagacacccctttcta

SEQ ID NO: 163113 - DNA, 80 bp, synthetic construct
  source 1..80: mol_type = other DNA
acgcagacgcagacgcccccgacgcaagctagtactgactcagtggcagcctcagacccgcagaaagtgcaatataatag

SEQ ID NO: 163114 - DNA, 80 bp, synthetic construct
  source 1..80: mol_type = other DNA
aattgtcacagaaaaaagtgtcagagaaaatggatttcctactattcacaccccaagcaaaacaaagttacagcctagta

SEQ ID NO: 163115 - DNA, 80 bp, synthetic construct
  source 1..80: mol_type = other DNA
tgtgtagtcactactgataatggaaagttcaccgggttaggaatctatgataaactcatgatattacccacacatgctga

SEQ ID NO: 163116 - DNA, 80 bp, synthetic construct
  source 1..80: mol_type = other DNA
catggttccttatcactcttatttgcttattttactggtgagttaaacatacatgttttattcctaagtgagagagggtt

SEQ ID NO: 163117 - DNA, 80 bp, synthetic construct
  source 1..80: mol_type = other DNA
ctctgacactccgttttacccctggctaccacctgcaccccagcaattccgtgtaagctttaaacttggctttcaataaa

SEQ ID NO: 163118 - DNA, 80 bp, synthetic construct
  source 1..80: mol_type = other DNA
ttgtggctggtttagctctatgtttttaagccctcatagatactctttacagtttaatacagcatactttgactgcacat

SEQ ID NO: 163119 - DNA, 80 bp, synthetic construct
  source 1..80: mol_type = other DNA
cttgactatgaaacaattctaaaaaaatgcatcatagtccagtgtccagggacagtgcactcggaagtctcatcatctcc

SEQ ID NO: 163120 - DNA, 80 bp, synthetic construct
  source 1..80: mol_type = other DNA
aaatggaaagcagtaattaaagatgcctatgaattagtaagagaagaataccaacaattatacaccacaactcttacata

SEQ ID NO: 163121 - DNA, 80 bp, synthetic construct
  source 1..80: mol_type = other DNA
cgaggaatactttaccaaagaccaagataacgccaataggtacatgtcgtggaccataaatgcaaggaggatggtgcaac

SEQ ID NO: 163122 - DNA, 80 bp, synthetic construct
  source 1..80: mol_type = other DNA
ccgaaacccacgtttatatggacgttgagaacagcgcctgaccacatgattcatcataccatttctcggaatcgggccca

SEQ ID NO: 163123 - DNA, 80 bp, synthetic construct
  source 1..80: mol_type = other DNA
ccatacacctctattgggagaacaaatttcccaacacaacacggaaaagtcattgccaaaagagaatcacttcacacata

SEQ ID NO: 163124 - DNA, 80 bp, synthetic construct
  source 1..80: mol_type = other DNA
acaaatgtgggacctagtgacatgttcgtgcacactaaagaagctgtttataaatgtgctcacttaaccacaccctctga

SEQ ID NO: 163125 - DNA, 80 bp, synthetic construct
  source 1..80: mol_type = other DNA
ctggatcggcagtaggctgcgatccggaaaccttttggtcaaagataccagcaatgttagatgacaaatgtattatggct

SEQ ID NO: 163126 - DNA, 80 bp, synthetic construct
  source 1..80: mol_type = other DNA
ccctgtacaccaaaggacaaagcaaatgtgaaatatttgacttacctctgtgggccgccctaaatggctacacagaattc

SEQ ID NO: 163127 - DNA, 80 bp, synthetic construct
  source 1..80: mol_type = other DNA
cctatgtcctagatgccggagtcccgttgagccaactgttagtgtgcccacaccagtggataaacctgcgaacaaacaac

SEQ ID NO: 163128 - DNA, 80 bp, synthetic construct
  source 1..80: mol_type = other DNA
ggtacaattacacacaccccggggagaggggtagaaccattaatgtagtgaaccgtgatcaaaatgacaaacaacctagt

SEQ ID NO: 163129 - DNA, 80 bp, synthetic construct
  source 1..80: mol_type = other DNA
agcacttattaaaaggaactgtcacatcatcacaactcctagaggggagtttaacctgctggggatacatgataactgtt

SEQ ID NO: 163130 - DNA, 80 bp, synthetic construct
  source 1..80: mol_type = other DNA
gtaacatagtgggtatacatgtggggggtaatggtagggtaggttactgtgcatcactaacaaagagctactttgcctct

SEQ ID NO: 163131 - DNA, 80 bp, synthetic construct
  source 1..80: mol_type = other DNA
aacatgtagtagtgcccagcttaaaaacaaaacccagaggcagacgctccataaagctaaaaatactgccccctaaactc

SEQ ID NO: 163132 - DNA, 80 bp, synthetic construct
  source 1..80: mol_type = other DNA
gtccccctctcaacacccagagaaatggatattctcggttttgtgtctgcatgtaatgatttcagtgtgcgactgcttcg

SEQ ID NO: 163133 - DNA, 80 bp, synthetic construct
  source 1..80: mol_type = other DNA
tacaaagtgaactaggcatacaagaagaaatactaaacattgccataatagtagttatatgtccatacacaaaacccaaa

SEQ ID NO: 163134 - DNA, 80 bp, synthetic construct
  source 1..80: mol_type = other DNA
gggacacgcgcagacacacatttagcagagcaagtattaagagagtgtcagaacaacaagaagcttctgaccttgtattc

SEQ ID NO: 163135 - DNA, 80 bp, synthetic construct
  source 1..80: mol_type = other DNA
cccctccgcattccgggagaagtatgcaacctaatggagatcgctgaagtggattcagttgtcccagtcaacaacctgag

SEQ ID NO: 163136 - DNA, 80 bp, synthetic construct
  source 1..80: mol_type = other DNA
gccatgtttctcggtaaactttacagaaagaaaaggaaactgctactgcaagctgtgcgagctccacaggcgccatcttc

SEQ ID NO: 163137 - DNA, 80 bp, synthetic construct
  source 1..80: mol_type = other DNA
aagaaactagtactcagacaatggcagccagcctttgtaagacgctgttacatagtgggttatatgcctcttatattctg

SEQ ID NO: 163138 - DNA, 80 bp, synthetic construct
  source 1..80: mol_type = other DNA
ctggtttcagtacatgacaaaaccagacacaaccttttcagagttacagtgcaaatttgtactacaagacattccactat

SEQ ID NO: 163139 - DNA, 80 bp, synthetic construct
  source 1..80: mol_type = other DNA
ccaaagacgcgccgtccgaaagactaatccaacggggacccgagagcatgagcaacaacgtgagaaagatggccatgctg

SEQ ID NO: 163140 - DNA, 80 bp, synthetic construct
  source 1..80: mol_type = other DNA
gagccagcaactcctcctcctcttcatcagcgtctccctcgcttgcgcatccgcatcgtcccatacaggcctcacaacga

SEQ ID NO: 163141 - DNA, 80 bp, synthetic construct
  source 1..80: mol_type = other DNA
gcattgttgtgccagcgtcaacaccgagcaagatggatatattaggctttgtgtctgcgtgcaacgatttcactgtgaga

SEQ ID NO: 163142 - DNA, 80 bp, synthetic construct
  source 1..80: mol_type = other DNA
catgcaatacaaataaatttctcttacctgcgtctgtttgtgtagtgaggtgttgtgtcctgtatggtattctactttaa

SEQ ID NO: 163143 - DNA, 80 bp, synthetic construct
  source 1..80: mol_type = other DNA
gggggatgacacgacaccaggattcattatagacctcctcagtgcatccaaggatccaaaagttatagagttctgtgaga

SEQ ID NO: 163144 - DNA, 80 bp, synthetic construct
  source 1..80: mol_type = other DNA
ggctatagctcctttacgcccaaagaccaaaacggaattaaaaacataatacatatcagagatacaaacttccactacct

SEQ ID NO: 163145 - DNA, 80 bp, synthetic construct
  source 1..80: mol_type = other DNA
ttatggtgagatcactgagaaattgacttccaaagttatcaagtggttgatccgcataattagtgcccttaccatcatgg

SEQ ID NO: 163146 - DNA, 80 bp, synthetic construct
  source 1..80: mol_type = other DNA
catttagaacagaaggctgctactcacaccctaagctacctaaaaaaacagtaactgctgctaatgatactaaatacttt

SEQ ID NO: 163147 - DNA, 80 bp, synthetic construct
  source 1..80: mol_type = other DNA
tataaagattcacttaactccgttaacatgctatgtttttataacgaaaaatagttacacattacacgacaatgtcttag

SEQ ID NO: 163148 - DNA, 80 bp, synthetic construct
  source 1..80: mol_type = other DNA
aggagcagcatgcaggctcgggcgcgggccgtgctttggttgtggaccaggcccaagaactcggtgtgcggccagagggc

SEQ ID NO: 163149 - DNA, 80 bp, synthetic construct
  source 1..80: mol_type = other DNA
cgcggccgttgagaccgccgtcatcacagcatcacgccgtatcacccgaactgccgtcgcgaaacgggatacgttggcag

SEQ ID NO: 163150 - DNA, 80 bp, synthetic construct
  source 1..80: mol_type = other DNA
gcacgagacacccagtggggctataaaatacaccaaggttccagaatcctaaaggtaggcaagtttgcaaaagtcaaaaa

SEQ ID NO: 163151 - DNA, 80 bp, synthetic construct
  source 1..80: mol_type = other DNA
gaattgctcagaccaaagttgttcctcaggtggctttaggcctaatgtaggcaattgcgtgcctagaacattgctaatgt

SEQ ID NO: 163152 - DNA, 80 bp, synthetic construct
  source 1..80: mol_type = other DNA
gtactggtcttttggtggaggtggagctaatagattaatgtgtcgctatacaccaaggctagacgaaattcacaaaaaca

SEQ ID NO: 163153 - DNA, 80 bp, synthetic construct
  source 1..80: mol_type = other DNA
actgcctggcaggtgattcaaattcaaaaacgaattacacttcttatataaatgccaacccaggagaagcaggcggaaca

SEQ ID NO: 163154 - DNA, 80 bp, synthetic construct
  source 1..80: mol_type = other DNA
cgatgttagcaaagtcgtgacagataagttaacatcaaaggtattcaaatggttggttagaatcattagtgccctcacaa

SEQ ID NO: 163155 - DNA, 80 bp, synthetic construct
  source 1..80: mol_type = other DNA
acctagcaaaaaacactatgtaaaagtaaaagtaggacccccaaaactgtttgaagacaagtggtacccccagagccagt

SEQ ID NO: 163156 - DNA, 80 bp, synthetic construct
  source 1..80: mol_type = other DNA
ggtggtatcttcatggtggcgggtgcccactggcgcaacagcatggtagcaggacccgttggtgtaggctgatatggaat

SEQ ID NO: 163157 - DNA, 80 bp, synthetic construct
  source 1..80: mol_type = other DNA
gtacttagaaaaggaagagggaataattgcagactggcagaattatactcatggaccaggggtaaggtatccaaagttct

SEQ ID NO: 163158 - DNA, 80 bp, synthetic construct
  source 1..80: mol_type = other DNA
cactacggtcaggatcaacacaggcaccgcgaacactacctattacaatatctattgcaccagacaaatcagaattttct

SEQ ID NO: 163159 - DNA, 80 bp, synthetic construct
  source 1..80: mol_type = other DNA
ctgatgcaagtgatgtgaataaaaccacaaagcctgacacttcagcatgtagattttacacattagatagtaaaacttgg

SEQ ID NO: 163160 - DNA, 80 bp, synthetic construct
  source 1..80: mol_type = other DNA
tcatgcaacacgggtgtgtattactgtgaatccaaaagaaagtactacccagtctcttttgtggggcctactttccagta

SEQ ID NO: 163161 - DNA, 80 bp, synthetic construct
  source 1..80: mol_type = other DNA
gtagtcaccccaccacatcaaattctgctccagcattagatgctgcagagaccggacacactagtaatgttcaacctgaa

SEQ ID NO: 163162 - DNA, 80 bp, synthetic construct
  source 1..80: mol_type = other DNA
cgtatggtgatgatgttttagccagttatccccacaaaattgatgcaggcctcctagcccaaacaggaaaagagtacggc

SEQ ID NO: 163163 - DNA, 80 bp, synthetic construct
  source 1..80: mol_type = other DNA
aaaaccaccccagcccaccacatccaccgcctcgcacccacatgctacggctcggccagatcacacgctctttcctgtcc

SEQ ID NO: 163164 - DNA, 80 bp, synthetic construct
  source 1..80: mol_type = other DNA
acagaaatgtacaaaataccatatgacagcaactatggcttccccacatacaagcctataaagaactacatgctacaaag

SEQ ID NO: 163165 - DNA, 80 bp, synthetic construct
  source 1..80: mol_type = other DNA
gcagtcatcaacaaaccccagcattttctggacggagggctgtgccccagctcgaatgtcagtacccttcataagcattg

SEQ ID NO: 163166 - DNA, 80 bp, synthetic construct
  source 1..80: mol_type = other DNA
ggggcaaacccacagttaaaattagaataaagccccccaccacattcactgacaagtggtactttcaaaaggacatttgc

SEQ ID NO: 163167 - DNA, 80 bp, synthetic construct
  source 1..80: mol_type = other DNA
cagagcaaagagaatcgatctgctccaactgaaccaattgctgcaactacccctgactgggctttacattttaatctgcc

SEQ ID NO: 163168 - DNA, 80 bp, synthetic construct
  source 1..80: mol_type = other DNA
tggaagacaatgtgccgccgtggtttcctccacacgatatcacaccatatgtcgcaaggaatatcagggacgctgcctgc

SEQ ID NO: 163169 - DNA, 80 bp, synthetic construct
  source 1..80: mol_type = other DNA
gtagatgccgggacgtgtttcgggcccgtcatagtcatagacgatgattaaatacacgtattgcagccgtccccgggtct

SEQ ID NO: 163170 - DNA, 80 bp, synthetic construct
  source 1..80: mol_type = other DNA
gtacaaaccaggcatgttattcagaccagatctcgttctgagtccacagtagaatccttcttcgcacgtggagcgtgcgt

SEQ ID NO: 163171 - DNA, 80 bp, synthetic construct
  source 1..80: mol_type = other DNA
gccatcttactgtactggctggcctatatggtgctcctcctcgtcccccggcccccggggctcccagaccaccgctgaca

SEQ ID NO: 163172 - DNA, 80 bp, synthetic construct
  source 1..80: mol_type = other DNA
agactatatgccgcctcagtgaggtcgtttgactggacgattcgcgggctatttttacgtttcttgtgattgataaccgc

SEQ ID NO: 163173 - DNA, 80 bp, synthetic construct
  source 1..80: mol_type = other DNA
tcctaatattcaacccagtacatctgtctcaagccactctgtgccagctctggatgctgcagaaactggacatactagtt

SEQ ID NO: 163174 - DNA, 80 bp, synthetic construct
  source 1..80: mol_type = other DNA
caacagtggttagacaagtttatctaaataaatataatgaattgactgtgtaggtctagtacattataaaaaaaaaaaaa

SEQ ID NO: 163175 - DNA, 80 bp, synthetic construct
  source 1..80: mol_type = other DNA
actgggtcagctataggctgtgatcctgacatcttctggtcacaactatatgcttcgatggaaaaacacctgttagtgtt

SEQ ID NO: 163176 - DNA, 80 bp, synthetic construct
  source 1..80: mol_type = other DNA
aaagaagtgttggttgttccagacacacacccatcgggacctgtccacaccacacgaccgacagtgcttggagcaatgga

SEQ ID NO: 163177 - DNA, 80 bp, synthetic construct
  source 1..80: mol_type = other DNA
gtaaccttaacaccacagccaacaccaccacagccaacaacatcacagcctctaagaacataagtatgctcaatggaaat

SEQ ID NO: 163178 - DNA, 80 bp, synthetic construct
  source 1..80: mol_type = other DNA
cgtcgccgcagaacaagagtaaggaggagacggtggggcaggagacgtgggcgacgcacatacagacgcaggtttaaaaa

SEQ ID NO: 163179 - DNA, 80 bp, synthetic construct
  source 1..80: mol_type = other DNA
tcttttgtcacttgcggtttctgcggcttcctttagacatccgttctgcccaccacaaactgacaacatttgcataacct

SEQ ID NO: 163180 - DNA, 80 bp, synthetic construct
  source 1..80: mol_type = other DNA
cacaaaaacacgctcagcaaacatactaaacacagcagccacagagggcaacttctcacaccctaaaatagaaaaatgga

SEQ ID NO: 163181 - DNA, 80 bp, synthetic construct
  source 1..80: mol_type = other DNA
acgtcgcacaaacaccgtggaaacacccgccgccaaccccgagcggccgcaacaccaccgcgggacgacacgcaccggca

SEQ ID NO: 163182 - DNA, 80 bp, synthetic construct
  source 1..80: mol_type = other DNA
actttctacgtctcaaaaacctgcattacaaaactcacaaggaatacccaataaccagggatacctaaacacaacaccta

SEQ ID NO: 163183 - DNA, 80 bp, synthetic construct
  source 1..80: mol_type = other DNA
gcttggattgacaaattcatataaactttccttaacttacacatatatagaaatttacctgagtaggagtagatttttat

SEQ ID NO: 163184 - DNA, 80 bp, synthetic construct
  source 1..80: mol_type = other DNA
aggttcaaatggaagaatctacttaataggagactcttatggtatctaccttgcaccttcttcttggaataggtatttaa

SEQ ID NO: 163185 - DNA, 80 bp, synthetic construct
  source 1..80: mol_type = other DNA
ggtggtgtttttttactacttttacaacgccctgggcgacacgcgactttaccgcgaacgccgcgtgccctgcatcatct

SEQ ID NO: 163186 - DNA, 80 bp, synthetic construct
  source 1..80: mol_type = other DNA
acctctggcttactgacctaactggcatccctctccgcgcagttccccccctcaccctcttcctctccgcgggagctgcc

SEQ ID NO: 163187 - DNA, 80 bp, synthetic construct
  source 1..80: mol_type = other DNA
ggtggtgggtacgatcttgacgtggttgacgtcctgcccgtccggaggaatacgcaaaaaaacccgtcgcggcgctacca

SEQ ID NO: 163188 - DNA, 80 bp, synthetic construct
  source 1..80: mol_type = other DNA
agagttttgcagttaacgttgggtaattctaccatcaccactcaagaggcggctaactcagtggttgcttacgggcgatg

SEQ ID NO: 163189 - DNA, 80 bp, synthetic construct
  source 1..80: mol_type = other DNA
aaactaatgatgctatcaaggatatgtcatgtgttgacttggtcatggatagccataacatctcactatcagaattactt

SEQ ID NO: 163190 - DNA, 80 bp, synthetic construct
  source 1..80: mol_type = other DNA
acgtcattcgtcacgtggggaggcatactacgcaaacgcggaagtaggccccgtcacgtgacggtcacgtgggtgctgcg

SEQ ID NO: 163191 - DNA, 80 bp, synthetic construct
  source 1..80: mol_type = other DNA
atgcagccgaccaaaggttaatcagacaaggggaggaacttctttaccagttgcaccgacccctagaaacatgcaataac

SEQ ID NO: 163192 - DNA, 80 bp, synthetic construct
  source 1..80: mol_type = other DNA
aaatatttggtaccagattgtatataggagatggtgtcttcaagaccactttgtttggggaaatcgcccagtacttcact

SEQ ID NO: 163193 - DNA, 80 bp, synthetic construct
  source 1..80: mol_type = other DNA
aaggaagcagggtgccagctctttgagcttggtcaggatcaccttgctaagactcatggcgcaggccaggaggatgtctt

SEQ ID NO: 163194 - DNA, 80 bp, synthetic construct
  source 1..80: mol_type = other DNA
tttaccaacaagtactaacagcatcatacataggaataattaaccataatccagatggctctacaacagttcaaggagca

SEQ ID NO: 163195 - DNA, 80 bp, synthetic construct
  source 1..80: mol_type = other DNA
agagcaaatgtctcctagaagacgctccactctggtgtctcctgtttggatacacagactggattaaaaaagacctaaac

SEQ ID NO: 163196 - DNA, 80 bp, synthetic construct
  source 1..80: mol_type = other DNA
aaacaacaaaaaaactattaggcacaacatttacaggagggtctccctacttagaataccatggaggactttactcctca

SEQ ID NO: 163197 - DNA, 80 bp, synthetic construct
  source 1..80: mol_type = other DNA
ttgttaagatacttgttaggattttgtgttatatggttctttattgtcacaaaccaaacattcttactactgcttgtcta

SEQ ID NO: 163198 - DNA, 80 bp, synthetic construct
  source 1..80: mol_type = other DNA
ctcagatgggatcagcagtaccaaatcaagcctttttgaatgatgtccttagcaaaggcgaaaatgcttccatgtttaca

SEQ ID NO: 163199 - DNA, 80 bp, synthetic construct
  source 1..80: mol_type = other DNA
gtgctattgtaagaaatgttgctaccattgccagctttgttttcttaaaaagggccttgggatatgttatgaccgctcga

SEQ ID NO: 163200 - DNA, 80 bp, synthetic construct
  source 1..80: mol_type = other DNA
tccgaggagtgtactgcatgcacagagctttttgcggctgcggtgattttgtgcaccatcttgctcgtctatctgctgat

SEQ ID NO: 163201 - DNA, 80 bp, synthetic construct
  source 1..80: mol_type = other DNA
tcatcttttatatccgtaacttagaagcataacacacagtccaataggaagcagctaaaccaagactgctaaggacaaat

SEQ ID NO: 163202 - DNA, 80 bp, synthetic construct
  source 1..80: mol_type = other DNA
tggactttttacagacaccaagatgttgactttattgtatactttaacagaaagagtcccatgggaggcagcatatacac

SEQ ID NO: 163203 - DNA, 80 bp, synthetic construct
  source 1..80: mol_type = other DNA
tggaagggatattttacagtgaggaaagacacaaaatattagacctatacctggagaatgaagaaggcattgtgcctgac

SEQ ID NO: 163204 - DNA, 80 bp, synthetic construct
  source 1..80: mol_type = other DNA
catacgtaggaattgctaatgcttattcgcatttctacgacgggtttgctactgttccaattgaaggagagaccactgac

SEQ ID NO: 163205 - DNA, 80 bp, synthetic construct
  source 1..80: mol_type = other DNA
acgacagctttggaggggggctctgtaccgctcagtacacactaagaatccttttccaagaaaagctggcccagcacaac

SEQ ID NO: 163206 - DNA, 80 bp, synthetic construct
  source 1..80: mol_type = other DNA
gaatgtggttttatcgatcgagtccggtccattaccctgggcaattctccaatcaccacccaggagtgtgcgaacgtggt

SEQ ID NO: 163207 - DNA, 80 bp, synthetic construct
  source 1..80: mol_type = other DNA
cccccaccccaaatgtaacttagaagcatgtacacaatgatcaatagggtggtggctatccaagtcacctaagatcaagc

SEQ ID NO: 163208 - DNA, 80 bp, synthetic construct
  source 1..80: mol_type = other DNA
tcctttgcatcacttactcacttaatatatctgtacaaccataatgggagctcaagtgtccacacaaaaatctggatcac

SEQ ID NO: 163209 - DNA, 80 bp, synthetic construct
  source 1..80: mol_type = other DNA
gcttaatacaccgggctctaatcagtttctcaccacggataacttccaatcaccatgtatagtcccaaactatgatgtga

SEQ ID NO: 163210 - DNA, 80 bp, synthetic construct
  source 1..80: mol_type = other DNA
ccaattcaacgtggacaccaccacaacatccccaaaaagaaagttctgcccagtcgactacctcttgggatgtggggtaa

SEQ ID NO: 163211 - DNA, 80 bp, synthetic construct
  source 1..80: mol_type = other DNA
tccgagttgggacaataggactataagttacattagtactgacgttaaaaatagttgacgtgtaggaagaatatggtgtg

SEQ ID NO: 163212 - DNA, 80 bp, synthetic construct
  source 1..80: mol_type = other DNA
cactacagaaagaaaactgaaccagaacaaaatctaaggaatagacacttcatgaaatttagggatgagatcaaaacaac

SEQ ID NO: 163213 - DNA, 80 bp, synthetic construct
  source 1..80: mol_type = other DNA
tgctctagaaactggaaagaatgacctttatggtgattatcaggcccagtatactagaaacactcaccttctagactact

SEQ ID NO: 163214 - DNA, 80 bp, synthetic construct
  source 1..80: mol_type = other DNA
ctggatgataaagagaaaactgatatcaaggtctttgttaagcccaaacatataacagcatgggttcctagaccacctag

SEQ ID NO: 163215 - DNA, 80 bp, synthetic construct
  source 1..80: mol_type = other DNA
ttccctggcacgcggtccgaacttccgattcgatcacgagaaaatggcccagtacatcaatatctgcggctataagttca

SEQ ID NO: 163216 - DNA, 80 bp, synthetic construct
  source 1..80: mol_type = other DNA
aaattacaccccagtgtgttctatgatatatttcctggggagaaagagccggctgtactaacacagagagatcccaggtt

SEQ ID NO: 163217 - DNA, 80 bp, synthetic construct
  source 1..80: mol_type = other DNA
ggggaggtaaccctgtatcccaccaggtcgtcaggaatccctgcaagggaggctccaaaccccgtcgagagcctcgttca

SEQ ID NO: 163218 - DNA, 80 bp, synthetic construct
  source 1..80: mol_type = other DNA
gcacctgtgtcctgggcaaggagctgtttggctcggctgtggagcaggcttccctgcaattttacaagcggccacaaggg

SEQ ID NO: 163219 - DNA, 80 bp, synthetic construct
  source 1..80: mol_type = other DNA
tacagctcatcctcaaacagcagctcagggagcaaagagagctcaagcgacgaatccaattcctagtaaaacagctagta

SEQ ID NO: 163220 - DNA, 80 bp, synthetic construct
  source 1..80: mol_type = other DNA
tggattccaagggcacccagagctttgccatatgtgtcaataggacgcactaattataataaacaagcaatagttccagt

SEQ ID NO: 163221 - DNA, 80 bp, synthetic construct
  source 1..80: mol_type = other DNA
cgctggtcgggcactgtatataccagcttacgaagtccttgagtatgagtggtatgaaaaattttagatataaaactatt

SEQ ID NO: 163222 - DNA, 80 bp, synthetic construct
  source 1..80: mol_type = other DNA
caattaaccctgtaaatagcattagtaagaaggtaattaaatggttgttaagaattgtctctgctatggttataataatt

SEQ ID NO: 163223 - DNA, 80 bp, synthetic construct
  source 1..80: mol_type = other DNA
cttgccatttgtccgtggagagcggtggccataacgcggaccccgtttttaccccttccggactacaaaaatggccgatt

SEQ ID NO: 163224 - DNA, 80 bp, synthetic construct
  source 1..80: mol_type = other DNA
taccccgtggtatgggacgctcacttcatgacatggtgtgaagagtctactgtgctagtcaagattcctccggcccctga

SEQ ID NO: 163225 - DNA, 80 bp, synthetic construct
  source 1..80: mol_type = other DNA
cagggatggattgtacctgactcccccactaatgttgagcgccacttaagtagagctgttttgattatgcaatctgtagc

SEQ ID NO: 163226 - DNA, 80 bp, synthetic construct
  source 1..80: mol_type = other DNA
atgggatttgggccttcagtcatcatgccatctcgttgtaccttggatcagttctcacttctttagaagaacaaggaaag

SEQ ID NO: 163227 - DNA, 80 bp, synthetic construct
  source 1..80: mol_type = other DNA
tttcagcccaccttcaccccgtccagtgaggatggaaagaaaaacacctttgcgcctgttgattggttgcttgggtgtgg

SEQ ID NO: 163228 - DNA, 80 bp, synthetic construct
  source 1..80: mol_type = other DNA
tttttattaaaccaatacagctactacaatacaaaacaggtagtagcccagcttaaatatggctgggatcctaaacaaaa

SEQ ID NO: 163229 - DNA, 80 bp, synthetic construct
  source 1..80: mol_type = other DNA
ttggccttgtcaccatgggtggacctaacatcgtaggtttcgctgacatcagagatctcttttggttggatgatgaagtt

SEQ ID NO: 163230 - DNA, 80 bp, synthetic construct
  source 1..80: mol_type = other DNA
caggaacattcattagacgccatcagatccgtctcagggaaaagatcggtcgttgatctcctttctatgagacttcatga

SEQ ID NO: 163231 - DNA, 80 bp, synthetic construct
  source 1..80: mol_type = other DNA
ttgactggttaaaatctatgctacctcaagcacagaataaaatcaaatttctccattttatgaagcaactacagctaaaa

SEQ ID NO: 163232 - DNA, 80 bp, synthetic construct
  source 1..80: mol_type = other DNA
tgtcatatgtgggagcagctgatagtaaggtgcgctatgatcacacacatcctggagagaatggacacacttttacaaca

SEQ ID NO: 163233 - DNA, 80 bp, synthetic construct
  source 1..80: mol_type = other DNA
cgtgtagccgggatcgatgatgccaacatgagacgtgaccggacgggaggtgctgccccacagcatgagcccatgaccct

SEQ ID NO: 163234 - DNA, 80 bp, synthetic construct
  source 1..80: mol_type = other DNA
cgttcccatggaagccgtgcgtcacccgctgcttttctggcgacgcgtggcgttatcgtcgtccacttccaaggtggacc

SEQ ID NO: 163235 - DNA, 80 bp, synthetic construct
  source 1..80: mol_type = other DNA
aacactgaatttgcattatcattgcttaggaagaacattgtcacaataacaacagccaaaggagaattcacagctttagg

SEQ ID NO: 163236 - DNA, 80 bp, synthetic construct
  source 1..80: mol_type = other DNA
tcaacgactgcctgagtgtacttcctactaactttgtagaaacaacaggcaaaggcacacaattacataagaaaattata

SEQ ID NO: 163237 - DNA, 80 bp, synthetic construct
  source 1..80: mol_type = other DNA
ctttctacccctgggtacccagacccccagaccaaatccgtgtaagttttaaacttggctttcattaaaattttcaaggc

SEQ ID NO: 163238 - DNA, 80 bp, synthetic construct
  source 1..80: mol_type = other DNA
cagtgactgttgcaccactgtgtgcggagtttgggggcctgcgtcaagcagtttcccaaggtctgccagtagagataaag

SEQ ID NO: 163239 - DNA, 80 bp, synthetic construct
  source 1..80: mol_type = other DNA
gtggaagatgactgtgctgaggactgtaagcaaacaatttcaccagatgagttgggtctgacatctgcacaagatgatgg

SEQ ID NO: 163240 - DNA, 80 bp, synthetic construct
  source 1..80: mol_type = other DNA
tgctgatggtgggacgaaacagcagggcggaacagtttatgatagaaagtcacaggaaagtatgtgttgtttttttttta

SEQ ID NO: 163241 - DNA, 80 bp, synthetic construct
  source 1..80: mol_type = other DNA
taaaaagaacacagacagcaactatggctactgcacctactgcccctcaaatgaaaataatggtacagtagaaaaaatta

SEQ ID NO: 163242 - DNA, 80 bp, synthetic construct
  source 1..80: mol_type = other DNA
ccggtctccataagctgccgcagcttcttctcatactgtcgcttgagctctttgttgggggcagtgtccagaaaggcctc

SEQ ID NO: 163243 - DNA, 80 bp, synthetic construct
  source 1..80: mol_type = other DNA
tgttgacagtgtcaaggatcaaataaatgctatcaatcccattaataatattagtaaaaagataatcaaatggttactta

SEQ ID NO: 163244 - DNA, 80 bp, synthetic construct
  source 1..80: mol_type = other DNA
agtaatatacaatccagccctagacaaaggcataggaaacaaaatttggatggactggtgcacaaaaaatgacagtacat

SEQ ID NO: 163245 - DNA, 80 bp, synthetic construct
  source 1..80: mol_type = other DNA
ctgccgctgcccccggccccctcgcccggcggcaacacccctaggccaccatgtcctggtggtgatggcgccgccggtgg

SEQ ID NO: 163246 - DNA, 80 bp, synthetic construct
  source 1..80: mol_type = other DNA
gaggccacaggcaccaggaggagcacctcgggcgcccagacgacgtgacaaggaaagcctggacgcgacttaagagtcgc

SEQ ID NO: 163247 - DNA, 80 bp, synthetic construct
  source 1..80: mol_type = other DNA
ctatgggcaaggctcttaaaaaagctacccccttaactatgtttctcggcagagtttaccgccaccagaaaaggaaagtg

SEQ ID NO: 163248 - DNA, 80 bp, synthetic construct
  source 1..80: mol_type = other DNA
ctaaagtgtatggagtaccacacaggcatatacagctccatattcctaagtccgcaaaggtcactagaattcccagcagc

SEQ ID NO: 163249 - DNA, 80 bp, synthetic construct
  source 1..80: mol_type = other DNA
gttacatttggggtaacttagaagcatgtacacaacgatcaataggacgatggctatccaagtcatctaagatcaagcac

SEQ ID NO: 163250 - DNA, 80 bp, synthetic construct
  source 1..80: mol_type = other DNA
gacgtataagttcaaaggtcatcctcagccggaacttacacaaaatggtggtgtttttcttccgggtcaaaggacacacc

SEQ ID NO: 163251 - DNA, 80 bp, synthetic construct
  source 1..80: mol_type = other DNA
taaaaaactttatgggactgcatcttactggcagtcccatcacactgcagcacaactaaacacatcccaaaaaccaggca

SEQ ID NO: 163252 - DNA, 80 bp, synthetic construct
  source 1..80: mol_type = other DNA
tcttgtgcttggcctcagcttgcaatgacttttctgtgagaatgttacgagacactccttttatagaacagaagcagctg

SEQ ID NO: 163253 - DNA, 80 bp, synthetic construct
  source 1..80: mol_type = other DNA
ccagatcataagcattggtttaccacaaagtttttggaatgatcaaagaaaaccagcatatggccagtccaagtactttg

SEQ ID NO: 163254 - DNA, 80 bp, synthetic construct
  source 1..80: mol_type = other DNA
gaaggggtggattgttaagatggacaataatttggttgttgaacgcaacctgaacagggcgatgacaattttacaggccg

SEQ ID NO: 163255 - DNA, 80 bp, synthetic construct
  source 1..80: mol_type = other DNA
ggtgctacttctaatgccacagatgagaacatgattgaaacccgttgtgtggttaacagaaatggggtgttggaaaccac

SEQ ID NO: 163256 - DNA, 80 bp, synthetic construct
  source 1..80: mol_type = other DNA
tcggcaaatatgcctttaaatggctatggggtggcaatcgtatcttccaacaggtggtcagagacccgcgctcacaccag

SEQ ID NO: 163257 - DNA, 80 bp, synthetic construct
  source 1..80: mol_type = other DNA
gagtttcacttgtcggtgtctacctcttaaagtcactaagcccccccctccacccgaaacgcttgcgcgtttcggacctt

SEQ ID NO: 163258 - DNA, 80 bp, synthetic construct
  source 1..80: mol_type = other DNA
tttatcttgtaagtttctccccctctatgccagcgaagcaaaaagaattaagatcctacacaacaagtgtaacacaatta

SEQ ID NO: 163259 - DNA, 80 bp, synthetic construct
  source 1..80: mol_type = other DNA
ccagccattcgcgcaggaagcgttggtagagacggtcgcccagctcccgattcagaaagcgcttatccgtcacgaagaga

SEQ ID NO: 163260 - DNA, 80 bp, synthetic construct
  source 1..80: mol_type = other DNA
aatcaaactgtcaaaaactatatgaagctagaagtgcacatacactcacaggaagcaaatacttaaactggaaaacagga

SEQ ID NO: 163261 - DNA, 80 bp, synthetic construct
  source 1..80: mol_type = other DNA
aatacccaaaaagaagctgatggagaaggcgcacaacgtcaccactatcttctgcagccagtcggcgtcgcttagcagag

SEQ ID NO: 163262 - DNA, 80 bp, synthetic construct
  source 1..80: mol_type = other DNA
gtgtatcaattggactcagatgatattttcaaaacagccctgactgggaaagctaggtttactaaaacaaaattgacccc

SEQ ID NO: 163263 - DNA, 80 bp, synthetic construct
  source 1..80: mol_type = other DNA
ctgaggaacattacaataccagcaactcagggtttgccagtcctagttacaccggggtccagtcaatacttgacgtctga

SEQ ID NO: 163264 - DNA, 80 bp, synthetic construct
  source 1..80: mol_type = other DNA
atagcattgctactcgctttcctaacatcggtcccccgagaccacctccagggctagaccagcagaaccccgagggcccg

SEQ ID NO: 163265 - DNA, 80 bp, synthetic construct
  source 1..80: mol_type = other DNA
gacctgcggtttccgttctgctcaccacaaactgacaacatttgcgtaagcttccaggttcttagccaagtttacaacac

SEQ ID NO: 163266 - DNA, 80 bp, synthetic construct
  source 1..80: mol_type = other DNA
acccgtggctaccaaaaaagcccactacccaaactacctttagagtctcctttcaactaaaagccccccaataaaatttc

SEQ ID NO: 163267 - DNA, 80 bp, synthetic construct
  source 1..80: mol_type = other DNA
gaagcaaaagacaaattggagtatgttactaaattaaaacagttggaattaatagagaatcaaatgtctgttctacacca

SEQ ID NO: 163268 - DNA, 80 bp, synthetic construct
  source 1..80: mol_type = other DNA
gacggctactttaaacccggaagtagctgacccgcgtgactagtcacgcgggtcagctacttccgggtttaaagtagccg

SEQ ID NO: 163269 - DNA, 80 bp, synthetic construct
  source 1..80: mol_type = other DNA
ctaaaagtactgtacgaggagttccagaagcgccacaacttctggactcacagcaacaaagaactagagctagtaaggta

SEQ ID NO: 163270 - DNA, 80 bp, synthetic construct
  source 1..80: mol_type = other DNA
gagccaacaacatgtacttagaatatcacctaggtatatacagtgctatatttctaagtccactaaggagtaacttacaa

SEQ ID NO: 163271 - DNA, 80 bp, synthetic construct
  source 1..80: mol_type = other DNA
ctgtgaaaagctgtaaaaatgtcaaaaacgtagtgtgtttgtcacctagatctggcgtgtcttacgactctatattggca

SEQ ID NO: 163272 - DNA, 80 bp, synthetic construct
  source 1..80: mol_type = other DNA
taagctaacattcacattctgcggatcagcgatggctacagggaagctgctgctagcatactccccgcctggtgccgatg

SEQ ID NO: 163273 - DNA, 80 bp, synthetic construct
  source 1..80: mol_type = other DNA
agctgatgccaaaccagaggatatgatagaaaccagatatgtgtacaatgataataccaatgcagaagcggtggtagaga

SEQ ID NO: 163274 - DNA, 80 bp, synthetic construct
  source 1..80: mol_type = other DNA
gttcttgcaggcaatgcgtttgtgtacccacatcagatcatcaacctcaggactaacaacagtgcaacattggttctgcc

SEQ ID NO: 163275 - DNA, 80 bp, synthetic construct
  source 1..80: mol_type = other DNA
gacgggtgccttttgggcgtgctgcgcgccggcgcgttgtgcgggaccgggtgacacgggtgtgtggacggaggtttcgc

SEQ ID NO: 163276 - DNA, 80 bp, synthetic construct
  source 1..80: mol_type = other DNA
atcttgaaccactggacctcacaaccagcgccggttatccatatgctgctctaggtattaaaaagagggatattatcaat

SEQ ID NO: 163277 - DNA, 80 bp, synthetic construct
  source 1..80: mol_type = other DNA
cggactacaaaaatcgccattttagtgacgtcacaggcgccattttaagtaaggcggaagttctccacttttacaaaatg

SEQ ID NO: 163278 - DNA, 80 bp, synthetic construct
  source 1..80: mol_type = other DNA
aagatctattgagtttggcaatgaaagtccatacaacacagaaccttcaattaagacaatgaagctcgcttatctggata

SEQ ID NO: 163279 - DNA, 80 bp, synthetic construct
  source 1..80: mol_type = other DNA
cacaccaaggacaagacgtccagcctgcagtggcccatgtacctcctgactaatgagaagtcaaaggcctttgagaggct

SEQ ID NO: 163280 - DNA, 80 bp, synthetic construct
  source 1..80: mol_type = other DNA
ccgggtccccgcgctcccggcgccccgggagtaggaggaccccctccgcctctccgtagagcgctgcccgcacccccggc

SEQ ID NO: 163281 - DNA, 80 bp, synthetic construct
  source 1..80: mol_type = other DNA
agagggttccgagtagataagaggtacaacttccttattcacccggttttcccagagaaagaaatctttgaatcaatcag

SEQ ID NO: 163282 - DNA, 80 bp, synthetic construct
  source 1..80: mol_type = other DNA
tggtatatatgacaacgctcccaataataagaagaaaaattggaagaaaattatgactatgagtacaaaatacaagtgga

SEQ ID NO: 163283 - DNA, 80 bp, synthetic construct
  source 1..80: mol_type = other DNA
tacaagggcacagtgataaagctgtacagacaccaggactttgactacatagtgtggataagcaggacccctcccttcca

SEQ ID NO: 163284 - DNA, 80 bp, synthetic construct
  source 1..80: mol_type = other DNA
ggtccttaaccgttatccgccaaccaactacgagacggctagtaatatcatgtttgtctttgagcgttcgatcaggtgaa

SEQ ID NO: 163285 - DNA, 80 bp, synthetic construct
  source 1..80: mol_type = other DNA
cgcagagtaaggagactgaggaggcgaaggaggagagggtgggcgcgccggaggtacctaagagctagaaggagggttaa

SEQ ID NO: 163286 - DNA, 80 bp, synthetic construct
  source 1..80: mol_type = other DNA
caccacagcagtcacagtctccacaacaaaaccatacaccactttctcagacacctggtacagaggcactgcatacacaa

SEQ ID NO: 163287 - DNA, 80 bp, synthetic construct
  source 1..80: mol_type = other DNA
aggacaagggtagagcattcactagtgactacgtcattgctagtaccaatatgtctatcctcacaccacccactgtctca

SEQ ID NO: 163288 - DNA, 80 bp, synthetic construct
  source 1..80: mol_type = other DNA
agctacagtttatacctgggccttcggagatgatgatgagtcatggttagaagcctggtatctagcctcacagagggtta

SEQ ID NO: 163289 - DNA, 80 bp, synthetic construct
  source 1..80: mol_type = other DNA
ccctccgctaccgccgccgctgtcactctccatagcggacgccatgaaggtccaggggtccgtcgatcgccgccgtctgc

SEQ ID NO: 163290 - DNA, 80 bp, synthetic construct
  source 1..80: mol_type = other DNA
tccatttgtgctgaagatggggcagatggtgccacaaaagtgtccggtgaccaggtaagcgtagagaaggctgggttgtg

SEQ ID NO: 163291 - DNA, 80 bp, synthetic construct
  source 1..80: mol_type = other DNA
cttccaattctgccaatcgccaagatttttcccaggacccgagtaaatttacggaaccggtgaaggacataatggtaaag

SEQ ID NO: 163292 - DNA, 80 bp, synthetic construct
  source 1..80: mol_type = other DNA
ccaccaggaaccccaaattctagctctattatgtgctttgcatcagcgtgcaacgacttctcagtaagaatgttgaggga

SEQ ID NO: 163293 - DNA, 80 bp, synthetic construct
  source 1..80: mol_type = other DNA
ggtcattaacactccaaataaaaccaagttacaacctagtgtcttccatagtgtgttctcgggtgttaaggaacccgcgg

SEQ ID NO: 163294 - DNA, 80 bp, synthetic construct
  source 1..80: mol_type = other DNA
gaaaggagcagatggaggtgaatttcaggagccatatcttctagatgatggtaccagtttggcttgctctctgattttcc

SEQ ID NO: 163295 - DNA, 80 bp, synthetic construct
  source 1..80: mol_type = other DNA
aatgacttctcggtgcgcatgttgcgtgacacaccattcattggacagacagcgttgctacaaggtgacacggaagaggc

SEQ ID NO: 163296 - DNA, 80 bp, synthetic construct
  source 1..80: mol_type = other DNA
ttaaaaagcacacagacagcaactatggctactgcacctactgtcctaccagtaacttagttgagaagattaaaaaatac

SEQ ID NO: 163297 - DNA, 80 bp, synthetic construct
  source 1..80: mol_type = other DNA
cattgttttgcctatctgctttaaactaagagacactctcaggcagcatgaggatgcctacaaaagagagatgaaaatta

SEQ ID NO: 163298 - DNA, 80 bp, synthetic construct
  source 1..80: mol_type = other DNA
gcgtggctgtagctattgtttacgttgcttttgaaatgttaagcgtccctacggcgctaacatgtttctaggctactctg

SEQ ID NO: 163299 - DNA, 80 bp, synthetic construct
  source 1..80: mol_type = other DNA
ccaacataacagacacatacaacaacaaaatatttaatcagagaagcacaacattaatacaatggctatcaacaaaaggc

SEQ ID NO: 163300 - DNA, 80 bp, synthetic construct
  source 1..80: mol_type = other DNA
tgggggcaatcctatcgttacacagacgcttaaagaccccagcacacaaccagactaccccacacctggctccggtcagt

SEQ ID NO: 163301 - DNA, 80 bp, synthetic construct
  source 1..80: mol_type = other DNA
taccaccaccgcattaaccggggtctgcggggcacgcccccaccgcgcaacttgccgggatacgagcacgcctccgagtg

SEQ ID NO: 163302 - DNA, 80 bp, synthetic construct
  source 1..80: mol_type = other DNA
aaataatgccaaacttctgcacccctacaggaatgctcaatactgcaaaagccctctctaaatgtgatggttgcccaagc

SEQ ID NO: 163303 - DNA, 80 bp, synthetic construct
  source 1..80: mol_type = other DNA
aaacaaactctccttgaatgcagaaagatttcactgtatcaagaacaggtaaagggattccctactgcaacagaacaagc

SEQ ID NO: 163304 - DNA, 80 bp, synthetic construct
  source 1..80: mol_type = other DNA
ctctatacacatatggttgggtattacggacacctctatgttacaatgtcactgtatattccatatatcaaacacacatc

SEQ ID NO: 163305 - DNA, 80 bp, synthetic construct
  source 1..80: mol_type = other DNA
ctaaatgggatattaactttcaggagcaagcacagatcaggaaaaaactggagatgttcacctatgctcgctttgacatg

SEQ ID NO: 163306 - DNA, 80 bp, synthetic construct
  source 1..80: mol_type = other DNA
tttctagccctaagagttgtacaagaaggaaaagatggatcccagggagagagtaccaccaggaaacagcggcgaagaaa

SEQ ID NO: 163307 - DNA, 80 bp, synthetic construct
  source 1..80: mol_type = other DNA
aattccaggggcaactaggacaggaagggaaccgtgatggcactgcccaggagggcttctgccacgcgggtcccaacgtt

SEQ ID NO: 163308 - DNA, 80 bp, synthetic construct
  source 1..80: mol_type = other DNA
atcaactactacaaagactcggctagttcgggtttgtcccgacaagacttttctcaggatccttctaaattcacccaacc

SEQ ID NO: 163309 - DNA, 80 bp, synthetic construct
  source 1..80: mol_type = other DNA
ggctaagaccccctactgggccacaaccagacggtactacatatgacggtacatttttatcacagtggaaatcagcatgg

SEQ ID NO: 163310 - DNA, 80 bp, synthetic construct
  source 1..80: mol_type = other DNA
gcactccctactaccccggggtccctactccctggcaggttaaattcaaacagactccgagttgccattggacactggag

SEQ ID NO: 163311 - DNA, 80 bp, synthetic construct
  source 1..80: mol_type = other DNA
cacatacaatacccaccatacacacagtacaaacaagcagaccctacaaatgccaactactacacaaaagtatcaagttt

SEQ ID NO: 163312 - DNA, 80 bp, synthetic construct
  source 1..80: mol_type = other DNA
aaccagaaaactatagtaagcccaataaagataacttaaaagaattatataaagaactcttcactaaaaaaatatctggg

SEQ ID NO: 163313 - DNA, 80 bp, synthetic construct
  source 1..80: mol_type = other DNA
aagctatactcaacaggatcatactggaactcctttcacacagcagaatatttgaaccccaacataacagaccaatacaa

SEQ ID NO: 163314 - DNA, 80 bp, synthetic construct
  source 1..80: mol_type = other DNA
gtatacacgtgggtggaaatggaagggatgggttttcatctatgctcttaagatcctatttcactgagcaacagggtcaa

SEQ ID NO: 163315 - DNA, 80 bp, synthetic construct
  source 1..80: mol_type = other DNA
cttgttttgtggtagcatgatggcaacagggaagttgatacttacatactcccccccgggagcagcccctccaaagaatc

SEQ ID NO: 163316 - DNA, 80 bp, synthetic construct
  source 1..80: mol_type = other DNA
ttgtgaaaagagagggtggattgttaagcttaacaacgacctcatagtggagagaaacctcaatagagcaatgactatac

SEQ ID NO: 163317 - DNA, 80 bp, synthetic construct
  source 1..80: mol_type = other DNA
tgggtctcttttacgccctggcctgcaaccgcagcccacctgcacttcccgaggatgctacccttctaatcaaatggttg

SEQ ID NO: 163318 - DNA, 80 bp, synthetic construct
  source 1..80: mol_type = other DNA
tgtttcagagacaagttatgaatgatatctgtaaatgtggacctttcagctacagagacgacctaccctctactaccttg

SEQ ID NO: 163319 - DNA, 80 bp, synthetic construct
  source 1..80: mol_type = other DNA
aatttgagaacattgcagaaggtttaagacttctcctggctaggtgtcacgtagaaaggactaccgaggatggaaattgg

SEQ ID NO: 163320 - DNA, 80 bp, synthetic construct
  source 1..80: mol_type = other DNA
cacctacaccaccacaggacccttcgagacaaatgaactctcatacatgagcactcacccactactcatgctcaccagca

SEQ ID NO: 163321 - DNA, 80 bp, synthetic construct
  source 1..80: mol_type = other DNA
gactgtggtgtgccattgagtcaagcgcttgtcttcccccatcagtggatcaacctgcgcaccaacaactgcgccactag

SEQ ID NO: 163322 - DNA, 80 bp, synthetic construct
  source 1..80: mol_type = other DNA
ctaatgaattagatcccaaagaacttgcaaacacaggaaagaaatatggtctaactattacaccagctgacaaatcaact

SEQ ID NO: 163323 - DNA, 80 bp, synthetic construct
  source 1..80: mol_type = other DNA
gagagaagctatttaatgagtggagaataaatctgtctagtttagttcaacttagaaagaaattggaattattcacttat

SEQ ID NO: 163324 - DNA, 80 bp, synthetic construct
  source 1..80: mol_type = other DNA
ccagagagcaagcccagaactcctaccgcccaagactgggctcaggagtatgagatggcccgcatatttgacaggcctgc

SEQ ID NO: 163325 - DNA, 80 bp, synthetic construct
  source 1..80: mol_type = other DNA
ctccaattctaaacctttttgcaccgccccttggcgtggaattagttacaacactcgtaaacccattcttgatgacgacc

SEQ ID NO: 163326 - DNA, 80 bp, synthetic construct
  source 1..80: mol_type = other DNA
aagcttttccaactagtggaacaacagccagatctataaaccaattaaacacatttaaaacagaaggcaacatatcacac

SEQ ID NO: 163327 - DNA, 80 bp, synthetic construct
  source 1..80: mol_type = other DNA
tttggcagctgccatggtgacagtaattataatttgcgttttgatctactttaacgttccggcaacccggagacacagac

SEQ ID NO: 163328 - DNA, 80 bp, synthetic construct
  source 1..80: mol_type = other DNA
cctatggagaatggccgcagtacctctctgatattgatgccacatcagttgataagcccacacatccagaaacgtcagca

SEQ ID NO: 163329 - DNA, 80 bp, synthetic construct
  source 1..80: mol_type = other DNA
tggaggaggactgagtactgttacatttactttaaaagccctatatgaccaacacttaagaggtctaaacaggtggagcg

SEQ ID NO: 163330 - DNA, 80 bp, synthetic construct
  source 1..80: mol_type = other DNA
gggtgtgcgggatggcgggctgttgcgtggcggggacggaggcctcttgcagagaggacggggacgggagtggcgccggg

SEQ ID NO: 163331 - DNA, 80 bp, synthetic construct
  source 1..80: mol_type = other DNA
taatataaacccattaaataaaatcagtgccaaagtgattaaatggttaattagagtgatatcagcactagtgatagcag

SEQ ID NO: 163332 - DNA, 80 bp, synthetic construct
  source 1..80: mol_type = other DNA
ggcatttccatcatatccatgtcgaacgtgtgtcgcggcgacggcgaactaaccaggcagtacgggggtcgatagtgcgg

SEQ ID NO: 163333 - DNA, 80 bp, synthetic construct
  source 1..80: mol_type = other DNA
cccaaccaggaaaaaccatctgggttgaacacaagttagtaaagatcgtagatgccgtggagctagtagatgaacaaggg

SEQ ID NO: 163334 - DNA, 80 bp, synthetic construct
  source 1..80: mol_type = other DNA
acactattccagattgtgattgtaccagtgggtgttattactcaagatcattagataggtacataccagttgagtgtgaa

SEQ ID NO: 163335 - DNA, 80 bp, synthetic construct
  source 1..80: mol_type = other DNA
aggggagtttaatttactaggtatacatgataactgtgctgtggtccctacacacgctgagtgtggtgactttgtggaca

SEQ ID NO: 163336 - DNA, 80 bp, synthetic construct
  source 1..80: mol_type = other DNA
gcgctggccgcggcggagatggagacggtggcgcgcccgtcgcccgaggagactaccgagaagaagatatcgacgacctg

SEQ ID NO: 163337 - DNA, 80 bp, synthetic construct
  source 1..80: mol_type = other DNA
gttcccaaaaacactttgaagtaattacatggctatatagtaatgcctccttctggcagtccaatgtagccagatggttt

SEQ ID NO: 163338 - DNA, 80 bp, synthetic construct
  source 1..80: mol_type = other DNA
gccatacatcaactgtactcccatggatagtatgttgcggcacaataatgtgtcacttgttattatacccatttgtccct

SEQ ID NO: 163339 - DNA, 80 bp, synthetic construct
  source 1..80: mol_type = other DNA
gcgcgtgcacgtaggccgcgtcaaaatagacggtttgcgtgtgacccggaccgatcaccagcgtctgacgggtacgtaat

SEQ ID NO: 163340 - DNA, 80 bp, synthetic construct
  source 1..80: mol_type = other DNA
ccaaaaggcagtcactgtaacatttggcgagtttgcgtcctcagaagtgaccattggcactgaataggtagcattgtcac

SEQ ID NO: 163341 - DNA, 80 bp, synthetic construct
  source 1..80: mol_type = other DNA
gacacttcatgaaatttagggatgagatcaaaacaacatacccactcgtttcagcaggacctagtgatttgtgtgtgcac

SEQ ID NO: 163342 - DNA, 80 bp, synthetic construct
  source 1..80: mol_type = other DNA
ttgcaagctagtactcaagggtttggggccacaccccaccctagaggaaatgctgacggcctgccaaggaataggaggcc

SEQ ID NO: 163343 - DNA, 80 bp, synthetic construct
  source 1..80: mol_type = other DNA
taaactctacagaaagaagagggcactgttactgcctggcctgccagctccaaagaacaaacaacctggtgatatgagct

SEQ ID NO: 163344 - DNA, 80 bp, synthetic construct
  source 1..80: mol_type = other DNA
tgaagagatgagagcgtgggtgctcatcagggacagttgaggtctctccctaccgaagccttagcctctacggtgtttta

SEQ ID NO: 163345 - DNA, 80 bp, synthetic construct
  source 1..80: mol_type = other DNA
taggatgatgagggatacaccaatgatcaagcaacccacaaacgacatccaaaatccagttgaagaatttgtggaagaaa

SEQ ID NO: 163346 - DNA, 80 bp, synthetic construct
  source 1..80: mol_type = other DNA
tgtcaatagtactactgaaaatattggaaataatattggtgggaacctattaaccaaagttgcagatgatgcctctaacg

SEQ ID NO: 163347 - DNA, 80 bp, synthetic construct
  source 1..80: mol_type = other DNA
gtcactactggcaaacattcatcacaaattccatggtaaaagaacatatcgattccgaatcagccaatgacactgactac

SEQ ID NO: 163348 - DNA, 80 bp, synthetic construct
  source 1..80: mol_type = other DNA
gttgatgcatgtgacaccgaaggcccagacaatatccctacatgtgactgtacagtaggttgctattatgtgaaacactt

SEQ ID NO: 163349 - DNA, 80 bp, synthetic construct
  source 1..80: mol_type = other DNA
cagctgcagcagcagctccgagagcagcatcaactccgaaagggaatccagcacctcttccagcagctagtaaaaacaca

SEQ ID NO: 163350 - DNA, 80 bp, synthetic construct
  source 1..80: mol_type = other DNA
tcggcgcctcggaccccaccaggctgtggcgtgtgtgctggccgatgcggcggcgaggttgggtgtggccggaagcgctc

SEQ ID NO: 163351 - DNA, 80 bp, synthetic construct
  source 1..80: mol_type = other DNA
ataattctttacaacctgactggaacaacatgacgtggcaagagtgggaagtaaaagtaaaagacttggaggaaaatatt

SEQ ID NO: 163352 - DNA, 80 bp, synthetic construct
  source 1..80: mol_type = other DNA
accagtcaagttgtaccaggtgacttgattgagactagacacgttataaacatgagacagagatctgaagcatctgttga

SEQ ID NO: 163353 - DNA, 80 bp, synthetic construct
  source 1..80: mol_type = other DNA
aatccctgggtatgtgaagaaccaaagcacgaatgggacacttctcataaaccgaccaattatgaagacaatacagccac

SEQ ID NO: 163354 - DNA, 80 bp, synthetic construct
  source 1..80: mol_type = other DNA
tggaagagttgggtatggagcaactttgttgcgcaagtactttgctcaggtgcaaggggatatagttggaaaaggcgtgg

SEQ ID NO: 163355 - DNA, 80 bp, synthetic construct
  source 1..80: mol_type = other DNA
agatgtttataaaggaatagatttggacaaattaaaaataattgcttatggtgatgatgtaattatttcttatccttatg

SEQ ID NO: 163356 - DNA, 80 bp, synthetic construct
  source 1..80: mol_type = other DNA
aactccatatatgggctatgaactaatgaccccgtaattgattactattaataactagtcaataatcaatgtcaccatgg

SEQ ID NO: 163357 - DNA, 80 bp, synthetic construct
  source 1..80: mol_type = other DNA
atgttacgtccacaccccccccctccgccatttcagatctactcaaggccgtggataatgaggaagttagacaatactgc

SEQ ID NO: 163358 - DNA, 80 bp, synthetic construct
  source 1..80: mol_type = other DNA
tgagcccggtgacagagcgccatggcctacggatggtgaggccggcggcgccgctggagaagatggaggacgcggcgcag

SEQ ID NO: 163359 - DNA, 80 bp, synthetic construct
  source 1..80: mol_type = other DNA
cagcggagacaccttctatggccttgtaaccatcaatgactttggtaccttagctgtgaggattgtgaatgagtttaacc

SEQ ID NO: 163360 - DNA, 80 bp, synthetic construct
  source 1..80: mol_type = other DNA
ccaaaagagtcttttcagagctatgtagataggttctacaagagcttgagggcagagcagacagacccggcagtgaagaa

SEQ ID NO: 163361 - DNA, 80 bp, synthetic construct
  source 1..80: mol_type = other DNA
acatgggagaatactacaccacgaacacggatgagactaaaaggtttgccaattggacaattaatgcaagacgcatggtg

SEQ ID NO: 163362 - DNA, 80 bp, synthetic construct
  source 1..80: mol_type = other DNA
ccaggagcacccataccaacaactagagatgattacgcttggcaatctggaacaaatgcatctgtattttggcagcatgg

SEQ ID NO: 163363 - DNA, 80 bp, synthetic construct
  source 1..80: mol_type = other DNA
accaagctaaagtggctaagacagtactactttgactgggaaacttacaaactagcagacgttaagccagatggcctcac

SEQ ID NO: 163364 - DNA, 80 bp, synthetic construct
  source 1..80: mol_type = other DNA
ttcagaagctgccataatagtattagtaatacagtgtacaggcttttccaagagttagctaggatccccaaccgaatcag

SEQ ID NO: 163365 - DNA, 80 bp, synthetic construct
  source 1..80: mol_type = other DNA
ccccggtaatcttacatacgcttcacccgaggcgaaaagtgagattgtcgttatccgcaaagtgcctacgagaagcctag

SEQ ID NO: 163366 - DNA, 80 bp, synthetic construct
  source 1..80: mol_type = other DNA
ttgtaccatggatatcttcagggttttaccgtaataccaagtctgacaatcacacagaggcagggtttgtgtcactctgg

SEQ ID NO: 163367 - DNA, 80 bp, synthetic construct
  source 1..80: mol_type = other DNA
gctttatgaacggagacatgccctggcccagcaacttcataccgttgaagttgtggtttaagtggtttcctatgatcttt

SEQ ID NO: 163368 - DNA, 80 bp, synthetic construct
  source 1..80: mol_type = other DNA
agccccagctctagatgctgctgagacaggtcacactagcagtgtacaacctgaagatatgatcgagactcgttatgtac

SEQ ID NO: 163369 - DNA, 80 bp, synthetic construct
  source 1..80: mol_type = other DNA
aatgatgaagaacctgtgttctttggaagtgggcccaatggggtagtaggttttgggagggtgccgtgctagatatttca

SEQ ID NO: 163370 - DNA, 80 bp, synthetic construct
  source 1..80: mol_type = other DNA
tgaaaccttccgctcaacacacaggtttctctcctcaatggtcctcaatagttaacaacacacaattatcagcagacggc

SEQ ID NO: 163371 - DNA, 80 bp, synthetic construct
  source 1..80: mol_type = other DNA
gggtgaggtctttaacactgggtaattcgaccattaccacacaagaaagtgcaaatgtggtcgttggttatggcaggtgg

SEQ ID NO: 163372 - DNA, 80 bp, synthetic construct
  source 1..80: mol_type = other DNA
cacctggtggtagattgccacagagtagaaaggaagcaatgcttggcgtgcatgtaatctgggacctggggttgcaatca

SEQ ID NO: 163373 - DNA, 80 bp, synthetic construct
  source 1..80: mol_type = other DNA
ataccaaaattactgacaccactccagtctgttacagaacaaacaccaatagcgaaaacgacctatctaatacatacaaa

SEQ ID NO: 163374 - DNA, 80 bp, synthetic construct
  source 1..80: mol_type = other DNA
ttacctatataaaagatgaattgagaagcactgacaaggtgcgattgggcaagagtagacttattgaagcctcaagcttg

SEQ ID NO: 163375 - DNA, 80 bp, synthetic construct
  source 1..80: mol_type = other DNA
tccttaaagataattactacccagttataggcgttttaactgactataatcaaaaagcaggcaatgacaaagactacaaa

SEQ ID NO: 163376 - DNA, 80 bp, synthetic construct
  source 1..80: mol_type = other DNA
gagcacctcggtgagaccgcggcgtcgataacgcgtcacgttaagcgagcgcgtctcgataaagttggcttcggtcgagg

SEQ ID NO: 163377 - DNA, 80 bp, synthetic construct
  source 1..80: mol_type = other DNA
atacccacccaggtgatcaggggcatacactgaaagtctcatccaataggagagataatcaaccagatgaggatcccttt

SEQ ID NO: 163378 - DNA, 80 bp, synthetic construct
  source 1..80: mol_type = other DNA
aatgccagtaacatgtttacaaacagagaagtgccaacactctctggaagccaatacctaaactttaaaacaggactata

SEQ ID NO: 163379 - DNA, 80 bp, synthetic construct
  source 1..80: mol_type = other DNA
agtatgtatatgaaggataaagctctatctcccgttaaaaatgaatgggattctgtctatccttatgagtcaatgtgcta

SEQ ID NO: 163380 - DNA, 80 bp, synthetic construct
  source 1..80: mol_type = other DNA
accatataccagttgaaggaggaagtggaggtcttagagaaagacattactttactttcagagaagacattaaaacagca

SEQ ID NO: 163381 - DNA, 80 bp, synthetic construct
  source 1..80: mol_type = other DNA
acccgtggttgccccccaagcgagatatccccaaaatatgtaaggtaaacttccaaataaagcttgcagagtaacacatt

SEQ ID NO: 163382 - DNA, 80 bp, synthetic construct
  source 1..80: mol_type = other DNA
tctcccaacattgaagcgtgtggttacagtgacagagttgaacaaataaccattggcaattcaacaattacaacccaaga

SEQ ID NO: 163383 - DNA, 80 bp, synthetic construct
  source 1..80: mol_type = other DNA
ccatatttagtcacgtgacctgctacgtcacagccgccattttgtttaacaacatggccgacttccttcctcttttttaa

SEQ ID NO: 163384 - DNA, 80 bp, synthetic construct
  source 1..80: mol_type = other DNA
gcttcttcaactagttcctcacaaacatataatcccagtggcactttagaaaatataacctggggacaaacagactggca

SEQ ID NO: 163385 - DNA, 80 bp, synthetic construct
  source 1..80: mol_type = other DNA
acggactcgaaattatcgatcccagcgaggaggctgcgatcgccgccgcctcgatcgcggcgtttttcgacgattaaaaa

SEQ ID NO: 163386 - DNA, 80 bp, synthetic construct
  source 1..80: mol_type = other DNA
ggctccggtggctgcgggcggtggatggcggctggcgttcagaggaacggtgaggtcgggaggcgcagcggccgcgcagc

SEQ ID NO: 163387 - DNA, 80 bp, synthetic construct
  source 1..80: mol_type = other DNA
gaggtgatggggatatctccgttccagccctgtcagcggccgagggattgtttttttctggttcgagtgtcgtggctgat

SEQ ID NO: 163388 - DNA, 80 bp, synthetic construct
  source 1..80: mol_type = other DNA
tactctacaggttcctactggaactcctttcacacagcagaatacttaaaccccaatgtcacagacacttacaacaacaa

SEQ ID NO: 163389 - DNA, 80 bp, synthetic construct
  source 1..80: mol_type = other DNA
gaataatttcagcaatggttataatcataagaaattcatctgatccccagactataatagcaacattaactttaattggc

SEQ ID NO: 163390 - DNA, 80 bp, synthetic construct
  source 1..80: mol_type = other DNA
cgcaacatgtaacccatagtactgtgactttgcaaacgacatcactatcaaccaacactactatcatggtaaatgtaact

SEQ ID NO: 163391 - DNA, 80 bp, synthetic construct
  source 1..80: mol_type = other DNA
tgatgaaacaggaaataaatattcagcagaatccagtggagaatttcattgatgaaacactcaaggaggtgttagtggtt

SEQ ID NO: 163392 - DNA, 80 bp, synthetic construct
  source 1..80: mol_type = other DNA
taaattggatgctgatcctgtagagtcacaatcaactttagaaattgctggtttggtgagaaagaatcttgttcagttcg

SEQ ID NO: 163393 - DNA, 80 bp, synthetic construct
  source 1..80: mol_type = other DNA
ggtccgcactgtggacgaacctaacactgagtgcaggttttaagaaatgggagatcaatttccaagagcaggcgcacata

SEQ ID NO: 163394 - DNA, 80 bp, synthetic construct
  source 1..80: mol_type = other DNA
ggatagtctcagcaatgataataatggtaagaaacagttctgaccctcaaactataattgctacccttaccctcttaggc

SEQ ID NO: 163395 - DNA, 80 bp, synthetic construct
  source 1..80: mol_type = other DNA
catcataaaggtagggacagaaatcaaagtaatacccagaagaaaagcaaagattatcaagaattatggaggaggaaaag

SEQ ID NO: 163396 - DNA, 80 bp, synthetic construct
  source 1..80: mol_type = other DNA
agtggatgctggtaatgcccagcccctacaaatatcacacttgagctccatgtcgcccacgcagccgatatcgcatgaag

SEQ ID NO: 163397 - DNA, 80 bp, synthetic construct
  source 1..80: mol_type = other DNA
actgcggtgtgcaacgctgctatgggtgtaggcgtggggaacttgactatatacccacaccaatggattaatttgcgcac

SEQ ID NO: 163398 - DNA, 80 bp, synthetic construct
  source 1..80: mol_type = other DNA
ccagtggttagaaagaaacaaggagcatgtgtgtgccatcttggattatgcttcagatattattgttgagtctaaagacc

SEQ ID NO: 163399 - DNA, 80 bp, synthetic construct
  source 1..80: mol_type = other DNA
attgactacgtatgggtttgggcatcaaaacaaaggggtgtatgtagcaggatacaagattattaactatcatttggcta

SEQ ID NO: 163400 - DNA, 80 bp, synthetic construct
  source 1..80: mol_type = other DNA
agcaatttgggctaatatcacactcaatcaagggttctacaaatgggatattaattttcaggagcatgcacatgttagga

SEQ ID NO: 163401 - DNA, 80 bp, synthetic construct
  source 1..80: mol_type = other DNA
gcttgctctgatatgtcagtacgcatgctccgagacacacccatgatgaagcaggaaagagatatcacccaaaacccagt

SEQ ID NO: 163402 - DNA, 80 bp, synthetic construct
  source 1..80: mol_type = other DNA
catttgccacagaagcacaactaggtagaatacctgcatttaaccctgatggcaccactaacacatacaaagataactgg

SEQ ID NO: 163403 - DNA, 80 bp, synthetic construct
  source 1..80: mol_type = other DNA
aacgacgcgggtctcatcacgttgaatctatgacgtcggtcaacaaacagctcttaaaggacgtgatgcgcgtcgacctt

SEQ ID NO: 163404 - DNA, 80 bp, synthetic construct
  source 1..80: mol_type = other DNA
tgtgcctggccggggatagcaacactacacccacgtacaccagctaccagaacgcgaacccaggtgagagaggaggtacc

SEQ ID NO: 163405 - DNA, 80 bp, synthetic construct
  source 1..80: mol_type = other DNA
ctgccttcaccactccacaaactgttacaactcaacagccatacaccagcttctcagacagctggtacaggggcacagta

SEQ ID NO: 163406 - DNA, 80 bp, synthetic construct
  source 1..80: mol_type = other DNA
agccgcgtggtgagggcccggaccggcggcgtaggcggccgcttcttgcgcccgtgcgacggaggtggcttccaggatgg

SEQ ID NO: 163407 - DNA, 80 bp, synthetic construct
  source 1..80: mol_type = other DNA
gaacacgaccacaaccgcaaggtccccagtcacaaatggcacaaccaccaaagggaacataacaatcctaaatgacacct

SEQ ID NO: 163408 - DNA, 80 bp, synthetic construct
  source 1..80: mol_type = other DNA
agaaccctgttgaaaagtatgttgatgaggttcttaatgaggttcttgtagtcccaaatatcagagagagtcatccaacc

SEQ ID NO: 163409 - DNA, 80 bp, synthetic construct
  source 1..80: mol_type = other DNA
tggttttttgaagcacatgactttgcaaacgacggaacatggcggcgtgaattaaccttcccaaagaaaggtcatggtat

SEQ ID NO: 163410 - DNA, 80 bp, synthetic construct
  source 1..80: mol_type = other DNA
gttccacaactctggacagacatatagatagagtccaacaggctatcaactgtataggtagtttagttgttatactaggt

SEQ ID NO: 163411 - DNA, 80 bp, synthetic construct
  source 1..80: mol_type = other DNA
catgtacgtccacacaaaagaagcaatctacaaatgtgcccacctaactgagcccaatgagaacaccatacttctcgcca

SEQ ID NO: 163412 - DNA, 80 bp, synthetic construct
  source 1..80: mol_type = other DNA
atatgttatgagcaacccagaagaaggagtccaaagaaggttaaggcttattcatctgctccatcaaacaagtaagtatg

SEQ ID NO: 163413 - DNA, 80 bp, synthetic construct
  source 1..80: mol_type = other DNA
tggttaatcgaatgggtgcactatgtatgagacttgtaacaaataaacaagcccacaaagttgaaatcacaaccaacatt

SEQ ID NO: 163414 - DNA, 80 bp, synthetic construct
  source 1..80: mol_type = other DNA
aaccctagtactgaagcagctgaggggaggaaattcgctgcccttgattacttgctcggctgtgtggtattggcaggaaa

SEQ ID NO: 163415 - DNA, 80 bp, synthetic construct
  source 1..80: mol_type = other DNA
agcaagactggcaaacagaatatgaagctgccgcggcatgggacagaccaccgcgcacagacttatccagacctcccttc

SEQ ID NO: 163416 - DNA, 80 bp, synthetic construct
  source 1..80: mol_type = other DNA
tcctcgggccacactacacattccacagctgggactggagacgtgactactttaacagaaagactcttaaaagaatgtca

SEQ ID NO: 163417 - DNA, 80 bp, synthetic construct
  source 1..80: mol_type = other DNA
aaaatacaagggcaatacaacagtggagtggaatgactacatacaaactgctgtagaccactatgcagctcaactatata

SEQ ID NO: 163418 - DNA, 80 bp, synthetic construct
  source 1..80: mol_type = other DNA
aggaagtgtgttgaacacaacctctcagccatatttcaggggttaggagataacactacaccaggttttataatagacct

SEQ ID NO: 163419 - DNA, 80 bp, synthetic construct
  source 1..80: mol_type = other DNA
tcacaggcaaaggcaacagctcattccaaacaggaaacagcacccaatttggtcacaacagctacaaacccacagtagac

SEQ ID NO: 163420 - DNA, 80 bp, synthetic construct
  source 1..80: mol_type = other DNA
ctgaaggaccaggttctatgaacatggccaatgtactatcaactactggtgcacaatcagttgccttagttggtgagagg

SEQ ID NO: 163421 - DNA, 80 bp, synthetic construct
  source 1..80: mol_type = other DNA
tttgagacacgtgatgggggaacgcgtgaacccggaagcatccctggtcacgtgactctgacgtcacggcggccatcttg

SEQ ID NO: 163422 - DNA, 80 bp, synthetic construct
  source 1..80: mol_type = other DNA
ccgccaaccgttaccgtcattacgaattccagacgctcagcctcggcacctcgggggtagacgaactgctcaactgctgt

SEQ ID NO: 163423 - DNA, 80 bp, synthetic construct
  source 1..80: mol_type = other DNA
taacctaacaagtagtaacgctactgacgacactatagaagttaacaaacacagcacctcaggcacaaaaactaatacat

SEQ ID NO: 163424 - DNA, 80 bp, synthetic construct
  source 1..80: mol_type = other DNA
ctagtggtgcacaacagtttatgaccactgaagatgaacagtccccaaatatcctaccaggatatcactccagcaagaag

SEQ ID NO: 163425 - DNA, 80 bp, synthetic construct
  source 1..80: mol_type = other DNA
tacctgaaaccctttttctcttctcatggtgcgctgcgttctctggaaacggctgctctgtccgaaaaccagttccgaac

SEQ ID NO: 163426 - DNA, 80 bp, synthetic construct
  source 1..80: mol_type = other DNA
tcgcacgacggtatccctcgccaactagcagagcgcctgcggctgtgccgccacatggaccccgagcaggactatcgtct

SEQ ID NO: 163427 - DNA, 80 bp, synthetic construct
  source 1..80: mol_type = other DNA
gatggtgagcctgacatgcccccgggagcgatagagcagggccccgcagatgacccaggagaaggcccaagcactggacc

SEQ ID NO: 163428 - DNA, 80 bp, synthetic construct
  source 1..80: mol_type = other DNA
ccaccagacaaatctgaacagtttcaggaggtgacctgggccaatgtgacatttctaaagaggagttttcagcctgatca

SEQ ID NO: 163429 - DNA, 80 bp, synthetic construct
  source 1..80: mol_type = other DNA
attacacacttaaagaagaagatacagttgtggaatccagaccaagcttaatgacagctggaccaagtgacatgtatgtc

SEQ ID NO: 163430 - DNA, 80 bp, synthetic construct
  source 1..80: mol_type = other DNA
tgtactacagcagaaagagtcccctgggaggaaacctactgacagcacccagcctgcaccccggggcagccatgcttagc

SEQ ID NO: 163431 - DNA, 80 bp, synthetic construct
  source 1..80: mol_type = other DNA
actaccgccgctgccgttttttgtgtcgtgcgggtgcacggtggtagtggcgttagtctgagctggggtcatgacaagtc

SEQ ID NO: 163432 - DNA, 80 bp, synthetic construct
  source 1..80: mol_type = other DNA
ctctcttaacgggtgagcaatagatattgcagcaagccgtactagacaatccagattcacttttagaatagaactatcag

SEQ ID NO: 163433 - DNA, 80 bp, synthetic construct
  source 1..80: mol_type = other DNA
ctttataaaccggcaagcacaggtcaaagagtctcaagttcctgaaatcatggaccttattagagctgcagaagttgagt

SEQ ID NO: 163434 - DNA, 80 bp, synthetic construct
  source 1..80: mol_type = other DNA
ccccaccactggtcaaaatgaagtgcaagcggcggcacataacgcaggtatgggagtagccgttggtaatttgaccatat

SEQ ID NO: 163435 - DNA, 80 bp, synthetic construct
  source 1..80: mol_type = other DNA
gccaagatctggccatgttttgtcaaatggtttccaccacagatttcgtggttccaatggccgcacttgaagataagggt

SEQ ID NO: 163436 - DNA, 80 bp, synthetic construct
  source 1..80: mol_type = other DNA
ataatggttacttgctctgcatgctctgacatgtcagttcgcatgttacgagacacacctatgatgagacaggatgaaga

SEQ ID NO: 163437 - DNA, 80 bp, synthetic construct
  source 1..80: mol_type = other DNA
acaccgtctgtggtgtttttgtcaggactggaagtgtcacgcgttatacgccgagtgggacggcaaagaatccgacgacg

SEQ ID NO: 163438 - DNA, 80 bp, synthetic construct
  source 1..80: mol_type = other DNA
cggtacacttgcacgccagtttgcctccctttccctttcccttgccaaacccccttggaacttagaagcaatacattaga

SEQ ID NO: 163439 - DNA, 80 bp, synthetic construct
  source 1..80: mol_type = other DNA
ataacaagctatcaagagccaagtacaatgttgacacaagacatgccagttctcacacaccagataatgtacgttccccc

SEQ ID NO: 163440 - DNA, 80 bp, synthetic construct
  source 1..80: mol_type = other DNA
gttactgttagagtggggccccccaagctatttgaggacaagtggtacagccagcacgagctctgcaaggtgccccttgt

SEQ ID NO: 163441 - DNA, 80 bp, synthetic construct
  source 1..80: mol_type = other DNA
gaattaaaccccccaccatgttcaccgaccgttggtactttcaaaatgacttccgttcagttcctctagtaaccacagag

SEQ ID NO: 163442 - DNA, 80 bp, synthetic construct
  source 1..80: mol_type = other DNA
actggccgggctatgggcaaggctcttagggtattcattcttaaaatgcacttttccagaatctctcgctcgaaaaggaa

SEQ ID NO: 163443 - DNA, 80 bp, synthetic construct
  source 1..80: mol_type = other DNA
actgcccccccctaagctctttgaagacaagtggtacactcagcaggacttgtgcaaacaaccgttagtgactctaaccg

SEQ ID NO: 163444 - DNA, 80 bp, synthetic construct
  source 1..80: mol_type = other DNA
tacgcctgtttactcccaaaccccccctcccgttacatttccaacccctgtaacgttagaagtttggaatttaacagtac

SEQ ID NO: 163445 - DNA, 80 bp, synthetic construct
  source 1..80: mol_type = other DNA
caagcacttctgtttccccggtgtggttgtataaactgttcccacggttggaaaaaacccatccgttatccgccatggaa

SEQ ID NO: 163446 - DNA, 80 bp, synthetic construct
  source 1..80: mol_type = other DNA
atgatggaaatttatgacaaaatttaccaaaccccatgctattattcaggattggcagttggcatcaacccttacaaaga

SEQ ID NO: 163447 - DNA, 80 bp, synthetic construct
  source 1..80: mol_type = other DNA
cagctagacctggtgagatacaaacacaccagatttaggttctacaggagcagagacactgacttcatagttacttataa

SEQ ID NO: 163448 - DNA, 80 bp, synthetic construct
  source 1..80: mol_type = other DNA
tattgaccaaagttgcagatgatgcgtctaatatattgggaccaaattgttttgccactactgctgaaccagaaaacaaa

SEQ ID NO: 163449 - DNA, 80 bp, synthetic construct
  source 1..80: mol_type = other DNA
ctctataggcaatgccagagcaagtgcgcgttcctcaagggctatctctcggagggctgtttgcctcacacgcggccggc

SEQ ID NO: 163450 - DNA, 80 bp, synthetic construct
  source 1..80: mol_type = other DNA
acatattccaggagaggtgaccaatctgatacatcttgcacaggtagaatcattcatccctctaaacaacattaaacaac

SEQ ID NO: 163451 - DNA, 80 bp, synthetic construct
  source 1..80: mol_type = other DNA
gattaaactgtggtggaaattaatttcttatgtacctatttataaaaccataacagtaacttgatagtgtatataacaat

SEQ ID NO: 163452 - DNA, 80 bp, synthetic construct
  source 1..80: mol_type = other DNA
tagtaaccaggcctcatctaatgacacctggtacctaggcaatgcatataatgctaataatgcaaaactagcagctgaaa

SEQ ID NO: 163453 - DNA, 80 bp, synthetic construct
  source 1..80: mol_type = other DNA
gccataaacgtggcgtggaaaaaaacggcggcgcggtgcgtccggtacttgacgggcaacccgcggcacagggccgccgg

SEQ ID NO: 163454 - DNA, 80 bp, synthetic construct
  source 1..80: mol_type = other DNA
tttgcacggatacctattaaggacgaaagcacagacaatggtgatacatactacgggcagacctcgatcaatgactttgg

SEQ ID NO: 163455 - DNA, 80 bp, synthetic construct
  source 1..80: mol_type = other DNA
aaagttagaacaaagtgggtagaactagcaacagcaggatacaaactagtgaaagatgaatacaacacagtataccctgt

SEQ ID NO: 163456 - DNA, 80 bp, synthetic construct
  source 1..80: mol_type = other DNA
ccacaaagaacatctggtaagtttggccaacagtctggggctgtctatgtgggtaattttagagtggtaaaccgacatct

SEQ ID NO: 163457 - DNA, 80 bp, synthetic construct
  source 1..80: mol_type = other DNA
ttcagacacacaaggtccagatcacatacctacttgtgactgcacacaagcctgctactatgccaagcatgcagacaggt

SEQ ID NO: 163458 - DNA, 80 bp, synthetic construct
  source 1..80: mol_type = other DNA
ttaacaggaaaagctaggttcactaagacaaagttaactccagactggattattgaggaagaatgcgaattggattattt

SEQ ID NO: 163459 - DNA, 80 bp, synthetic construct
  source 1..80: mol_type = other DNA
ttagcacaagtatataacataatgcttgaagaagacaagcgcagaagacaagtggttgatgttatgtcagctattttcca

SEQ ID NO: 163460 - DNA, 80 bp, synthetic construct
  source 1..80: mol_type = other DNA
atgtagaaatgaacattactgaaaacatgcaagtggccatagaccactattcaggccagttgctgtcactggatatccca

SEQ ID NO: 163461 - DNA, 80 bp, synthetic construct
  source 1..80: mol_type = other DNA
agctgagggacctgggaccatgaacatggcaaatgtcctaagtacaacaggagcccagtctgtagcactagtgggagaaa

SEQ ID NO: 163462 - DNA, 80 bp, synthetic construct
  source 1..80: mol_type = other DNA
agcagtgcaatatacacacaagtacagtactaattaccattacaaggctgatgaaaatagcccccttaaggacagacact

SEQ ID NO: 163463 - DNA, 80 bp, synthetic construct
  source 1..80: mol_type = other DNA
ccaaaaaagtcaagacaatcaatggacatataaaatacaccaggaagagaaaatcctaaaagtaggaaaatatgcaaaaa

SEQ ID NO: 163464 - DNA, 80 bp, synthetic construct
  source 1..80: mol_type = other DNA
ccaaatagctaggtgctcctgcaaaacgggtgtttactactgtgaatctagacataaacactacccaatcaccattacct

SEQ ID NO: 163465 - DNA, 80 bp, synthetic construct
  source 1..80: mol_type = other DNA
agctgcaaatacaaccccacaaagagcaagtgccccatagtagacatgccactgttcatagctttctatggctacataga

SEQ ID NO: 163466 - DNA, 80 bp, synthetic construct
  source 1..80: mol_type = other DNA
tacccagatgttttccgtgatggctgattcaacagaaccatcctcaacatatggacatgatgccaaagggtatttcaaat

SEQ ID NO: 163467 - DNA, 80 bp, synthetic construct
  source 1..80: mol_type = other DNA
ggggctgttggagggggcaggagtctgcactccctgtattcactgagcgtcatctaataaagatgtctattgatctcttt

SEQ ID NO: 163468 - DNA, 80 bp, synthetic construct
  source 1..80: mol_type = other DNA
atcagcttattacattttttatgatggttacaccaccagacttgacccctcagacaacaaatatggtatatcgccaacta

SEQ ID NO: 163469 - DNA, 80 bp, synthetic construct
  source 1..80: mol_type = other DNA
gctttgtagataacattaaagatcagatacaggctataaatccaataaacagaataactagcaagatagttaaatggata

SEQ ID NO: 163470 - DNA, 80 bp, synthetic construct
  source 1..80: mol_type = other DNA
cagtaacacactatacaaacactgcacttactatcagagctttttaactccccaatttattggacaaatagttaaactac

SEQ ID NO: 163471 - DNA, 80 bp, synthetic construct
  source 1..80: mol_type = other DNA
tagctgacactgcagggactttccgagaggggcagtaacaagggaggaacatgggaggagctggtgtggaacgcccatta

SEQ ID NO: 163472 - DNA, 80 bp, synthetic construct
  source 1..80: mol_type = other DNA
acaggaaggcagctatgctggggacacacgtgatctgggatataggacttcaatcatcttgcacaatggtagtcccgtgg

SEQ ID NO: 163473 - DNA, 80 bp, synthetic construct
  source 1..80: mol_type = other DNA
cacaccaccagtagtgagaggcctgcgagcgctcccggctgcccccgccagtcctagaccccaaccatgtggtggtcctg

SEQ ID NO: 163474 - DNA, 80 bp, synthetic construct
  source 1..80: mol_type = other DNA
tcgtcccggtttaaaaaccatcatcgacggccgttataaagccacccggacacgtgccgcggcacttgcctacggcgctg

SEQ ID NO: 163475 - DNA, 80 bp, synthetic construct
  source 1..80: mol_type = other DNA
gctacaaagatgacctaaaatcatttagctttaatgctaaatacaagtttagcttcttatggggcggtaatatgattccc

SEQ ID NO: 163476 - DNA, 80 bp, synthetic construct
  source 1..80: mol_type = other DNA
ggggagatgctattcacattacagaccaacaaaacagaacagaagttatagacttaatattaaaaaatgcagaaaactac

SEQ ID NO: 163477 - DNA, 80 bp, synthetic construct
  source 1..80: mol_type = other DNA
actgaacaaaactactaaagataccaccaaactggcaaaactgatggaggagtatggtatcgatttaccatacgtcactt

SEQ ID NO: 163478 - DNA, 80 bp, synthetic construct
  source 1..80: mol_type = other DNA
caacccggccgagccatggcgtggtggggacgctggaggagacggcgccgctggtgctggtggagacgtagaggcagacg

SEQ ID NO: 163479 - DNA, 80 bp, synthetic construct
  source 1..80: mol_type = other DNA
agtgcttcttccgttctcatgcttgtttttgtggctgtggtgatgctattactcatattaatcatctggcgactcgtttt

SEQ ID NO: 163480 - DNA, 80 bp, synthetic construct
  source 1..80: mol_type = other DNA
acatattgggctttgttagtgcttgtcctgactttaaacttagattaatgaaagacacacaatcaatttatcaggacaca

SEQ ID NO: 163481 - DNA, 80 bp, synthetic construct
  source 1..80: mol_type = other DNA
agtatggagacctaaaactggaaggcaaagtactcatcagatgtccatacacagtaccgccactcatagacaaaaccgac

SEQ ID NO: 163482 - DNA, 80 bp, synthetic construct
  source 1..80: mol_type = other DNA
tttgttggacactgccaaagcactccagccttgcgcaaattgtaataaaccaccacattataaacaatgttgtcccctgt

SEQ ID NO: 163483 - DNA, 80 bp, synthetic construct
  source 1..80: mol_type = other DNA
cactggcattcgcaccagaggcctccaccgtgattccaatcacagtaaccatagcgccaatgttcactgaattcaatggg

SEQ ID NO: 163484 - DNA, 80 bp, synthetic construct
  source 1..80: mol_type = other DNA
tcctctaacacctatcaaggttatatttattcgtctcggttctggtgatttcgttatgttaacattataccacctattat

SEQ ID NO: 163485 - DNA, 80 bp, synthetic construct
  source 1..80: mol_type = other DNA
aagatcagatgacacggtgcccatgagaacctcctttgggggatcagtaagcacagtaacttttaccttaaaagtattat

SEQ ID NO: 163486 - DNA, 80 bp, synthetic construct
  source 1..80: mol_type = other DNA
agagaagggtgaatttactgggcttggtatctatgatcaaatttgtgttatccccactcatgcacaaccaagtgatgatg

SEQ ID NO: 163487 - DNA, 80 bp, synthetic construct
  source 1..80: mol_type = other DNA
ggccttcacggcctgactggtttcctcatcagggtcctccaacagatgacttgcctcggaggttactgcggtggccgggt

SEQ ID NO: 163488 - DNA, 80 bp, synthetic construct
  source 1..80: mol_type = other DNA
ttgtcagtacaccaaggggttatctcagactactttacccaattgggtaatgcatttggtgaaggtttcacaaccaacat

SEQ ID NO: 163489 - DNA, 80 bp, synthetic construct
  source 1..80: mol_type = other DNA
gagagtcccagcattaacggccgtcgagacgggtcacacatctcaagttgtccccagtgataccatgcaaaccaggcatg

SEQ ID NO: 163490 - DNA, 80 bp, synthetic construct
  source 1..80: mol_type = other DNA
gggcaaggctcttagggttatcgctctttaaaacatgtttctcggcaggccaaccagagtctacgtcgtgcacttcctgg

SEQ ID NO: 163491 - DNA, 80 bp, synthetic construct
  source 1..80: mol_type = other DNA
atccacgggacacccggaaccggtaagtccatagcaacgggacttataggcagagcaatcgctaggcaagcaaacactag

SEQ ID NO: 163492 - DNA, 80 bp, synthetic construct
  source 1..80: mol_type = other DNA
tcttggtgtcgttgataaagctgaaggacaccagggggcgcgagtagcacatggtctcggagccagggaccctcatgctc

SEQ ID NO: 163493 - DNA, 80 bp, synthetic construct
  source 1..80: mol_type = other DNA
tgctgagtcgctggctcatgtaccccaagtagcgcttatgtggcgccagcttcaccgactgctgactgtcgtgcacaaac

SEQ ID NO: 163494 - DNA, 80 bp, synthetic construct
  source 1..80: mol_type = other DNA
catccaccaccttctcggaggaggcccccctaaacagcatcaggcagcaagggaacacaaaggaaaccagggccgggatg

SEQ ID NO: 163495 - DNA, 80 bp, synthetic construct
  source 1..80: mol_type = other DNA
cagatcgaatacatccacttcctaattcgccagctgaggaacctcttgatttggctatacgacggctgcagaaccttact

SEQ ID NO: 163496 - DNA, 80 bp, synthetic construct
  source 1..80: mol_type = other DNA
attagagtgctggttcttgaaacatacaagaatatagatctggacaagttaaagattatagcatatggtgatgatgtggt

SEQ ID NO: 163497 - DNA, 80 bp, synthetic construct
  source 1..80: mol_type = other DNA
ggatgtactttatatgtatttagacacccagaagtagactttataattataattaacacatcacctccatttctagacac

SEQ ID NO: 163498 - DNA, 80 bp, synthetic construct
  source 1..80: mol_type = other DNA
tcaagttgatacaattataccaattaactacacatcagcaaatacaactagtgttaacatgtacactgtggtgctagaca

SEQ ID NO: 163499 - DNA, 80 bp, synthetic construct
  source 1..80: mol_type = other DNA
gacacggtacagaccagacacgtcatacaacacagatcgagatcggagtctagtattgagtctttctttgcgcgtggtgc

SEQ ID NO: 163500 - DNA, 80 bp, synthetic construct
  source 1..80: mol_type = other DNA
tacacaggcggcacctgccatgagctggtaccccccggtgcataatgccgccggcagagaaagaaatttctgggaatgct

SEQ ID NO: 163501 - DNA, 80 bp, synthetic construct
  source 1..80: mol_type = other DNA
gagaaacaaatagagtcaattaggcttgcacctgctaatgatcaggaaaaaatatttgctgaaataaatactctccatga

SEQ ID NO: 163502 - DNA, 80 bp, synthetic construct
  source 1..80: mol_type = other DNA
ggtgccacaatgcaactgcacatctggtgtctactattccaggtactacaataaatactacccagtagtatgtgaaaaac

SEQ ID NO: 163503 - DNA, 80 bp, synthetic construct
  source 1..80: mol_type = other DNA
taaagtccagacacaagggccccactaggttgacatcgatgagtttgctagtcagacgctcctgcgttttgatgcaacgg

SEQ ID NO: 163504 - DNA, 80 bp, synthetic construct
  source 1..80: mol_type = other DNA
cgccagcagtagcaacgcaggacctgccggcgcttcggccgcctgcgacctagatgcggaactggccggcctcgaaacct

SEQ ID NO: 163505 - DNA, 80 bp, synthetic construct
  source 1..80: mol_type = other DNA
attgaaaaggtggtaggagacgctctgaaagtctccatgccgcaggttgccaatacccagccatcgggtcctgtaaactc

SEQ ID NO: 163506 - DNA, 80 bp, synthetic construct
  source 1..80: mol_type = other DNA
cagcgacagttcaagcgacagctcaagcgacagctgcgcctcgggcagcagctcaaactcctccaacaacaactcctcaa

SEQ ID NO: 163507 - DNA, 80 bp, synthetic construct
  source 1..80: mol_type = other DNA
aatcgacaatcgaaaacttctttgggagagcagcgtgtgtgagagtgagagagtattccataggacatgacttggcagca

SEQ ID NO: 163508 - DNA, 80 bp, synthetic construct
  source 1..80: mol_type = other DNA
tgaagctggtggtaagtttactgacacatacaaccctagttcagagacagcaggggcgcgtaagtttgcagctgtggatt

SEQ ID NO: 163509 - DNA, 80 bp, synthetic construct
  source 1..80: mol_type = other DNA
cggggttcaccaatcagattggagagaaggttgttgagttaactaatatggtcactagctcaattactgagaaactattg

SEQ ID NO: 163510 - DNA, 80 bp, synthetic construct
  source 1..80: mol_type = other DNA
ttgtcccttggaggctaccggtactgatgtcactgtacctattacaatatctatcagccccatgttcgctgagttttctg

SEQ ID NO: 163511 - DNA, 80 bp, synthetic construct
  source 1..80: mol_type = other DNA
tacaccaaacactgcagatatgttatgttttgtgtcagcatgcaaagacttttgcctgcgcatggctagagacacgaaca

SEQ ID NO: 163512 - DNA, 80 bp, synthetic construct
  source 1..80: mol_type = other DNA
gatgagctgcgcagtttagagaagattaaatctggcaagactaggataatcgaagctgccagcttgaatgacactgtgca

SEQ ID NO: 163513 - DNA, 80 bp, synthetic construct
  source 1..80: mol_type = other DNA
ccttccggcactaaactcaccgtcagctgaggagtgcggatacagcgaccgcgttcgctcaatcacgcttggtaattcaa

SEQ ID NO: 163514 - DNA, 80 bp, synthetic construct
  source 1..80: mol_type = other DNA
cctcttttccgcgcgcggccgccgttccccctagggacttcctcttttccgcgtcgtgtccgcgtcgctggcccctggga

SEQ ID NO: 163515 - DNA, 80 bp, synthetic construct
  source 1..80: mol_type = other DNA
cccccgtgggaggactgcaagccgaggaaagaaaaggctacactttactccaagccctccaagacagccaggaagagacc

SEQ ID NO: 163516 - DNA, 80 bp, synthetic construct
  source 1..80: mol_type = other DNA
tggggaacgccctcataccttctgtataaatgtacccgcttctcgcactgtattcagtcgctctgcggagaggctggcag

SEQ ID NO: 163517 - DNA, 80 bp, synthetic construct
  source 1..80: mol_type = other DNA
ttgatacatccaactttcccaatagaagagatacaagagtccattagatggactaagaaaccatctcaaatgcaggagca

SEQ ID NO: 163518 - DNA, 80 bp, synthetic construct
  source 1..80: mol_type = other DNA
gtgcttaggatcactttcatattctgcaacaacagccatacccggaagaggagctgccggttgccatttttcaagctgct

SEQ ID NO: 163519 - DNA, 80 bp, synthetic construct
  source 1..80: mol_type = other DNA
caacagggcaactccactaccaacatctatggtaatggaaatcaggtgaccactgacgtgggcgccaatgggtggactcc

SEQ ID NO: 163520 - DNA, 80 bp, synthetic construct
  source 1..80: mol_type = other DNA
tagtaccagagcaccagttagcatacgtcggtggcacatatgctaatgttgggtacaaccatacccaccctggtgaaggg

SEQ ID NO: 163521 - DNA, 80 bp, synthetic construct
  source 1..80: mol_type = other DNA
cccaagggtcgtgcaaaagtaaagatacatatagaaccccccaaaatgttcgttgacaagtggtatgctcaacatgatct

SEQ ID NO: 163522 - DNA, 80 bp, synthetic construct
  source 1..80: mol_type = other DNA
aataagtccagaagtgctaggcctctacacagagataatatacaacccatacaaagataagggcacaggcaaccacatat

SEQ ID NO: 163523 - DNA, 80 bp, synthetic construct
  source 1..80: mol_type = other DNA
ccggacctgctcttccagcgcccggacctcggccgcctcggcctcggtcagcagctccgagaagaagtcccccgtggcct

SEQ ID NO: 163524 - DNA, 80 bp, synthetic construct
  source 1..80: mol_type = other DNA
atctaccgcgtcttcggtttcgtcagcaagcacgtgccgctggctgatagcgccgttagccacgagacgctggaacgcta

SEQ ID NO: 163525 - DNA, 80 bp, synthetic construct
  source 1..80: mol_type = other DNA
atacctacaatgccaaaacccataaagaaaaattaaaaacgctaagacaagcatactttaaacaattaacctctgaaggt

SEQ ID NO: 163526 - DNA, 80 bp, synthetic construct
  source 1..80: mol_type = other DNA
gtgtcacatttctaaaaagaggatttaaacaagactccaaatatcccttccttatacatcctactttcccagtgagtgaa

SEQ ID NO: 163527 - DNA, 80 bp, synthetic construct
  source 1..80: mol_type = other DNA
agtacgacttccatttctatggtcctctttacactggcattcttcctaatctatctggacgcattactactggtgctggt

SEQ ID NO: 163528 - DNA, 80 bp, synthetic construct
  source 1..80: mol_type = other DNA
tgttcacctcgacgtacaaccccagtactgatgcagcagaagggcggaagtttgcagccctggattacttactagggtgt

SEQ ID NO: 163529 - DNA, 80 bp, synthetic construct
  source 1..80: mol_type = other DNA
ggagcctcctacggaggcaactttgcaaactacaccttttccctagccggactgtatgaccagtacctcctacacagaaa

SEQ ID NO: 163530 - DNA, 80 bp, synthetic construct
  source 1..80: mol_type = other DNA
ttatacttataaacaccactcctccatttgtagacacagagatcacaggacccagcatacacccaggcatgctggcacta

SEQ ID NO: 163531 - DNA, 80 bp, synthetic construct
  source 1..80: mol_type = other DNA
ggttaacgggtactcagactttgcagagtctgaattaggatctgaagtacacgctgtatatgtttgctgtattatttgtc

SEQ ID NO: 163532 - DNA, 80 bp, synthetic construct
  source 1..80: mol_type = other DNA
caccaacaaaactggatgaatgacttggaccagtgcgggcctttttcacacagaggggaagaaaaaatggcaacactaac

SEQ ID NO: 163533 - DNA, 80 bp, synthetic construct
  source 1..80: mol_type = other DNA
attcctacccacaagcaacacagttcccttgtctgaaaaaaatgcaaaacactccattgacccatccaataaagacgaaa

SEQ ID NO: 163534 - DNA, 80 bp, synthetic construct
  source 1..80: mol_type = other DNA
gtttattatagaccttctcagtgcatccaaagatccaaaagttatagaattctgtgaaaaagaaggctggattaaacaat

SEQ ID NO: 163535 - DNA, 80 bp, synthetic construct
  source 1..80: mol_type = other DNA
gaaaagtcctccacgccctgctcctgcaacgcggcaaacttgtccatcagcgacgcggccagcgcctcgcagccatccac

SEQ ID NO: 163536 - DNA, 80 bp, synthetic construct
  source 1..80: mol_type = other DNA
aaaacagactatatagtaacctggagtagaaatccaccctttaaactgaacaaatacagctctcccatgctacacccagg

SEQ ID NO: 163537 - DNA, 80 bp, synthetic construct
  source 1..80: mol_type = other DNA
agaaaagggatttaattaacaaacaaaccaaagatgtgacaaaactcaagatagcattagataagtatggtgttgactta

SEQ ID NO: 163538 - DNA, 80 bp, synthetic construct
  source 1..80: mol_type = other DNA
ttccaggagagcctgctcacagtaatgacccaccagcccagcgtcatgctgcaggcaaaaaagtgcataatagtaaagag

SEQ ID NO: 163539 - DNA, 80 bp, synthetic construct
  source 1..80: mol_type = other DNA
tatcaggtggacaaagaaccccagaaacatgcaagaacatgttctctcactgtgtcatttattatggcatagtggaagag

SEQ ID NO: 163540 - DNA, 80 bp, synthetic construct
  source 1..80: mol_type = other DNA
gactgagaggaagaagaaggtggcggcgaagcgacgcggagcgacggcggtaaagccagacaccggctatatagctagtc

SEQ ID NO: 163541 - DNA, 80 bp, synthetic construct
  source 1..80: mol_type = other DNA
cctttgtgattacagagaggtattacactggatctggatatgctaaaaactcggtctaccaaataatgtacatcccaccg

SEQ ID NO: 163542 - DNA, 80 bp, synthetic construct
  source 1..80: mol_type = other DNA
tggtggttgtgtggatgataaccatgtgctttttcgtgcgctatgtgtcgtcccgtctgtaggctctcctcccctccggg

SEQ ID NO: 163543 - DNA, 80 bp, synthetic construct
  source 1..80: mol_type = other DNA
ccattccgggccgcgtggtgggtccccggggggcgggggggtgtttttagcgtgggggtgaaaagtgcacatggacgggg

SEQ ID NO: 163544 - DNA, 80 bp, synthetic construct
  source 1..80: mol_type = other DNA
tttcaccaaacagaagacgcagactataaactagaaataacgtcaagtacataacgtaattaaaaaattccgacgttagt

SEQ ID NO: 163545 - DNA, 80 bp, synthetic construct
  source 1..80: mol_type = other DNA
caacagagaagggagttcaaacagccgtgtgcaatgcaggcatgggagtgggggtcggtaacctgacggtgttcccacac

SEQ ID NO: 163546 - DNA, 80 bp, synthetic construct
  source 1..80: mol_type = other DNA
agcacacactatcagacatttgccacagaggccaacctcagacccagacaatactgtgcagatggcacccttaacagtaa

SEQ ID NO: 163547 - DNA, 80 bp, synthetic construct
  source 1..80: mol_type = other DNA
aaagcacaaagatttgccaaaattaaagcagaatatcaaacagtatatcctacactaacaacacagacaccccaatcaga

SEQ ID NO: 163548 - DNA, 80 bp, synthetic construct
  source 1..80: mol_type = other DNA
actgacaacccttgctacaccttccaggtgttgaaagagttctactatcaggcaataggcttcagtgcaactgacgaatc

SEQ ID NO: 163549 - DNA, 80 bp, synthetic construct
  source 1..80: mol_type = other DNA
atggccataatcataagcgtaagcaaaacggcacagataacgtgaaacaccgcggtcatccaagtcgggcggcgtcggtg

SEQ ID NO: 163550 - DNA, 80 bp, synthetic construct
  source 1..80: mol_type = other DNA
ttggagctaactatattagaccttaacaggaatgagaaatttagggatattagagcattcatatcagaagactttgaagg

SEQ ID NO: 163551 - DNA, 80 bp, synthetic construct
  source 1..80: mol_type = other DNA
ctgaatccagattgttcccatctggatttcccacgtggagttgtacactattattccggtaattttgtacgccagtttta

SEQ ID NO: 163552 - DNA, 80 bp, synthetic construct
  source 1..80: mol_type = other DNA
tcactgattcactagaagtgcttttccagggaccagtttacaaagatctagaaatagatgtgtgcaacactccagcccct

SEQ ID NO: 163553 - DNA, 80 bp, synthetic construct
  source 1..80: mol_type = other DNA
ggatcttgtacaaaattgggcaagtattagggatacatgtgggtggtaatggaagggatggatttgctgccatgctgtta

SEQ ID NO: 163554 - DNA, 80 bp, synthetic construct
  source 1..80: mol_type = other DNA
cggccccccccccgaagtacgtcactaaccacgtgccctttacaggccaatcagaaccttctacgtacacttcctgggct

SEQ ID NO: 163555 - DNA, 80 bp, synthetic construct
  source 1..80: mol_type = other DNA
ggagaccaccagcacacaatgccccgggccttgagagaaactggtatgagtcagttttccgctcccacgccgccagctgt

SEQ ID NO: 163556 - DNA, 80 bp, synthetic construct
  source 1..80: mol_type = other DNA
ccgggctatgggcaaggctcttagggtattcgctcttaaaatgcgcttttctcgcatatacaggacgctcaaacagaaag

SEQ ID NO: 163557 - DNA, 80 bp, synthetic construct
  source 1..80: mol_type = other DNA
tcacagaaaaattgggaggggatatttattccttgcccccagaccctaaatattttgatggatacaaacagcaaacggta

SEQ ID NO: 163558 - DNA, 80 bp, synthetic construct
  source 1..80: mol_type = other DNA
aagctatgcttggggtccataccatctgggacttagggttacaatcaacatgtaacatggttattccgtggatctcagca

SEQ ID NO: 163559 - DNA, 80 bp, synthetic construct
  source 1..80: mol_type = other DNA
gctaggttggccaccatggacatggagaggcaggcggtcttcatgtcgatcagcaggtgctggtcgatgaccggatcggg

SEQ ID NO: 163560 - DNA, 80 bp, synthetic construct
  source 1..80: mol_type = other DNA
tacgcagactacatagactcacaactaggacccactcaagaccacgaaacagtaggcctagtctgtgttatatgcccata

SEQ ID NO: 163561 - DNA, 80 bp, synthetic construct
  source 1..80: mol_type = other DNA
aaggaaatgcacaggagctaaaggacagacacttcatgcaatttaggaaacagattaagaatgtgggaccaagtgatcaa

SEQ ID NO: 163562 - DNA, 80 bp, synthetic construct
  source 1..80: mol_type = other DNA
atgttagagctatagtaaatgttggacctagtgatatgtatgttcatgtgggtaacctgatatatagaaatctgcattta

SEQ ID NO: 163563 - DNA, 80 bp, synthetic construct
  source 1..80: mol_type = other DNA
gcgggaggcgagttcggcttcttgctcgaactcctgctgctcactgtccgagagggtgcgataaaaggcggcaaagtcct

SEQ ID NO: 163564 - DNA, 80 bp, synthetic construct
  source 1..80: mol_type = other DNA
aggtcgatcctgggcgtgatggaccctggcagtcgactctgattggtcagctgtgtagatactacacccaatggtcaggc

SEQ ID NO: 163565 - DNA, 80 bp, synthetic construct
  source 1..80: mol_type = other DNA
aaaacttcacccttaagctatgtaaggatacagacgaaattcgacaaacagctgaataccagaacgaccccattgcaaat

SEQ ID NO: 163566 - DNA, 80 bp, synthetic construct
  source 1..80: mol_type = other DNA
accattgataaagtagtggacaatgcacttgcactgtcaatgcccagagtacaggacactcaacaatctggtccagtcaa

SEQ ID NO: 163567 - DNA, 80 bp, synthetic construct
  source 1..80: mol_type = other DNA
ggacggcgacgaatagttgcgtgtgctgcggtgcggttgagacggcgacggcgaataaaagcgacgtgcggcgaaaagaa

SEQ ID NO: 163568 - DNA, 80 bp, synthetic construct
  source 1..80: mol_type = other DNA
accaccaggcaaccaaaacaaacaatgaaaaactacccacaccttataactggaaaaactacagtgaaaactatacacaa

SEQ ID NO: 163569 - DNA, 80 bp, synthetic construct
  source 1..80: mol_type = other DNA
caatggctagagaaaaacaaggagcatgtctgtgctatcttggattatgcctctgatattattgtggaatcaaaggcata

SEQ ID NO: 163570 - DNA, 80 bp, synthetic construct
  source 1..80: mol_type = other DNA
agttccctgatatgttgaaggatatggggttatttggacagaacatgcattatcattacttgggacgctccggctatact

SEQ ID NO: 163571 - DNA, 80 bp, synthetic construct
  source 1..80: mol_type = other DNA
aacatcccgctggatatacagctagagggtccattgagaaacacactactcggaaatattagcaggtattacacacattg

SEQ ID NO: 163572 - DNA, 80 bp, synthetic construct
  source 1..80: mol_type = other DNA
ggacttgagaaggagtgagagtcctttgaacacggcagagtgaaggcagtaagggcggcaggatccaaccacgacggagt

SEQ ID NO: 163573 - DNA, 80 bp, synthetic construct
  source 1..80: mol_type = other DNA
ttagtttaaggtgccccaatttctttttccctgtaccggctcctaaaccaactggttcaggggctgctgtactttatgat

SEQ ID NO: 163574 - DNA, 80 bp, synthetic construct
  source 1..80: mol_type = other DNA
ccccatgtgctgtgaattcaacgggctgcgtgctatgaccgccccagtcactcagggcttgccagttttgaacacccctg

SEQ ID NO: 163575 - DNA, 80 bp, synthetic construct
  source 1..80: mol_type = other DNA
tgtgcacatcgacacatacaaggctaagggtgaaaaaggatcttctgagaggtacgcgtcatgggagataactaacaggg

SEQ ID NO: 163576 - DNA, 80 bp, synthetic construct
  source 1..80: mol_type = other DNA
atacaatcatcccaatcaatcataccacagcaacaacatctagtgtaaacatgtatactgtagtactagataagaagaca

SEQ ID NO: 163577 - DNA, 80 bp, synthetic construct
  source 1..80: mol_type = other DNA
caaccaggactagacagtgttttcaaacacacactgcttggtgaaatattgaattattatgcccattggtcaggtagtgt

SEQ ID NO: 163578 - DNA, 80 bp, synthetic construct
  source 1..80: mol_type = other DNA
caatgatatagacaggccacttaattccacattgtacatagatttggaagattctgtacctgtaaatggctgggaatcac

SEQ ID NO: 163579 - DNA, 80 bp, synthetic construct
  source 1..80: mol_type = other DNA
agcatattccttagtgcaggcaggtctaactgggaactaaaaggctgctacacagacatcagttacaatcccctaacaga

SEQ ID NO: 163580 - DNA, 80 bp, synthetic construct
  source 1..80: mol_type = other DNA
caaattatgatctgaattctacaaaccccattaaaaccagagactccataagtacttatggcttgggacctagatttggt

SEQ ID NO: 163581 - DNA, 80 bp, synthetic construct
  source 1..80: mol_type = other DNA
caacctacccagttcacaaagcataacgaagacaatcaagaatgtgactgcaagattggtcttgtcaaatgccaaaaatc

SEQ ID NO: 163582 - DNA, 80 bp, synthetic construct
  source 1..80: mol_type = other DNA
catgggcaagtaaatgcagaagtgggcacctggcaaatggactgcacacatctagagggaaaaatcatcatagtagcagt

SEQ ID NO: 163583 - DNA, 80 bp, synthetic construct
  source 1..80: mol_type = other DNA
tcatcagatgccaaaccagaggacatgattgaaacacggtatgtgattaactccagaacaaatggtgaggcaactgttga

SEQ ID NO: 163584 - DNA, 80 bp, synthetic construct
  source 1..80: mol_type = other DNA
tccacgtttaacttcatccagactatggtgtcccccgggtctgcggtaaacgtggccaaaacttgaataaagtcactata

SEQ ID NO: 163585 - DNA, 80 bp, synthetic construct
  source 1..80: mol_type = other DNA
tatgtgaacaaaacgaatgtgaattttaataccacacaagtgacaaaacccagaaatgacctcaatgatgtgcccaagtc

SEQ ID NO: 163586 - DNA, 80 bp, synthetic construct
  source 1..80: mol_type = other DNA
gggggaggtggactaagagatatagacgatggcgccgcaaaggcaaacgcaaaggcaaaaaaaaaattattataaaacaa

SEQ ID NO: 163587 - DNA, 80 bp, synthetic construct
  source 1..80: mol_type = other DNA
tggctagggaataaaatctccaagttcattgaatggtttaaatcaatgctaccacaggcaaagcttaaagttgattatat

SEQ ID NO: 163588 - DNA, 80 bp, synthetic construct
  source 1..80: mol_type = other DNA
ctgaagaaattcactgaatgttgcaatgctgccaaaggcctagaatgggttgctcaaaagattagcaaatttattgattg

SEQ ID NO: 163589 - DNA, 80 bp, synthetic construct
  source 1..80: mol_type = other DNA
attggcagaggcattaaccaaccccgcacttatgtcaccatctgttgaagcatgtggatattctgataggctcaagcaaa

SEQ ID NO: 163590 - DNA, 80 bp, synthetic construct
  source 1..80: mol_type = other DNA
ctttatcacaggtccctttataaaagaccaaatgcaacacaatacctatgatacctacctaaacaacttaaaacgcacat

SEQ ID NO: 163591 - DNA, 80 bp, synthetic construct
  source 1..80: mol_type = other DNA
gagggataccatttagctaaagacaggaacagctatacttggtcagggcaggaagtaactagcagaaacagctgagactg

SEQ ID NO: 163592 - DNA, 80 bp, synthetic construct
  source 1..80: mol_type = other DNA
cgtgggctccgccgatctacaacgttcaggggagagaagaagtctggttccagtcagtttctagctcgcatgctgttttt

SEQ ID NO: 163593 - DNA, 80 bp, synthetic construct
  source 1..80: mol_type = other DNA
ccaaaacacatacagtacaacatcctaataggagagggtccatgtaaaccgggtgactgcggtggaaaactcctgtgcaa

SEQ ID NO: 163594 - DNA, 80 bp, synthetic construct
  source 1..80: mol_type = other DNA
actcccacatgatgactttcctacagagcgctacaagaggcccaggaaagacaccaccgtccgcgaagaaggcctcacgc

SEQ ID NO: 163595 - DNA, 80 bp, synthetic construct
  source 1..80: mol_type = other DNA
gaattttatacaaaattggtcaggttctaggcattcatgttggtggtaatgggagagatggatttgcagctatgctactc

SEQ ID NO: 163596 - DNA, 80 bp, synthetic construct
  source 1..80: mol_type = other DNA
acgttgttgtccatttgtgtgtggcaaagcagtttctttcaaagaccgcaacacctgtaacaaatatactctggcacaaa

SEQ ID NO: 163597 - DNA, 80 bp, synthetic construct
  source 1..80: mol_type = other DNA
gattttgtagctggctctacaactggtcagggtgcaatactggtcacgtgctcagcatgtccggatatggctgtgaggat

SEQ ID NO: 163598 - DNA, 80 bp, synthetic construct
  source 1..80: mol_type = other DNA
tccaacagtgataatggcaggcaagtattcgggtttccattacaacccggggccaataatgtgttaaacagaacactact

SEQ ID NO: 163599 - DNA, 80 bp, synthetic construct
  source 1..80: mol_type = other DNA
ttctacaaaagcttgagagcagaacagacagatccagcagtaaagaattggatgacccaaacactgctagtacagaatgc

SEQ ID NO: 163600 - DNA, 80 bp, synthetic construct
  source 1..80: mol_type = other DNA
gtacattctgggcgaaagcatgagtagtatacgctccaagtgccctgttgaggagtcggaagcctctacgccgccgacga

SEQ ID NO: 163601 - DNA, 80 bp, synthetic construct
  source 1..80: mol_type = other DNA
agactttgggtgctttagaaattggggcaacagctgaaataggaccagagacattgattgaaacgagatatgtgatgaat

SEQ ID NO: 163602 - DNA, 80 bp, synthetic construct
  source 1..80: mol_type = other DNA
gtgacacctcttcgaagacgtacttatacttactggcaaagagtggcgcgtatcgacagtcggccggcaaaatgtaggtg

SEQ ID NO: 163603 - DNA, 80 bp, synthetic construct
  source 1..80: mol_type = other DNA
ggttgattcttttatgcccatcaacaacataaagtctgaagaaggcaaagtaagtatgtataacatcacagtcactcgga

SEQ ID NO: 163604 - DNA, 80 bp, synthetic construct
  source 1..80: mol_type = other DNA
taagacaggggcaccccaaaatcgcgccccttaccccgaagcaccttggcccccaccggcataaagctgggcaaaaagag

SEQ ID NO: 163605 - DNA, 80 bp, synthetic construct
  source 1..80: mol_type = other DNA
ccgcttaaagaatcaccgtcgaggaaactaaaagctatgtacgtttatttttcagctcactgtttgaataccgtaaacat

SEQ ID NO: 163606 - DNA, 80 bp, synthetic construct
  source 1..80: mol_type = other DNA
tagagatcgccgcagaccatggctaaagtgacaggactcgttttctctgtcgtattttccgtgagcttacagtcttgcgg

SEQ ID NO: 163607 - DNA, 80 bp, synthetic construct
  source 1..80: mol_type = other DNA
agaaattagctgtttggactcaaacgtctcccttgcgcggcgcagggactctaaggcaccccgagcagatgtaaactgtg

SEQ ID NO: 163608 - DNA, 80 bp, synthetic construct
  source 1..80: mol_type = other DNA
cccccattacacggcgatatcccgatagggcatgaggggacccgggtgtcgcgacatgtcgacgacaggtgcggattagt

SEQ ID NO: 163609 - DNA, 80 bp, synthetic construct
  source 1..80: mol_type = other DNA
atagcgaggactacacagaggagggtcgctaccctcacgggggggccctcagcaccactacgtggtctcttaaggtgctg

SEQ ID NO: 163610 - DNA, 80 bp, synthetic construct
  source 1..80: mol_type = other DNA
ataaaaaacttaatacaaacaaagttcaccaatgagtccagcagtgcagacgatcaaaatcagtttaaaacaggcagaag

SEQ ID NO: 163611 - DNA, 80 bp, synthetic construct
  source 1..80: mol_type = other DNA
ctaagaccaagcacttctgttaccccggtatgcggagaatagactccaaaagggttgaagctccaaatatcgttatccgc

SEQ ID NO: 163612 - DNA, 80 bp, synthetic construct
  source 1..80: mol_type = other DNA
ccacttgggtgaaaccccctcaacaataccagcctcagatggggcacattccatatcagccccgaccaacgggtcactct

SEQ ID NO: 163613 - DNA, 80 bp, synthetic construct
  source 1..80: mol_type = other DNA
gtgatccagacacgcagtcgtagcgaatccacagtggaatcattctttgcgcgcggcgcgtgtgttacgatcatgtcggt

SEQ ID NO: 163614 - DNA, 80 bp, synthetic construct
  source 1..80: mol_type = other DNA
atgtgccagtgaccgtcacgattgccccaatgtgtgctgaatacaacggcctaaggttggcataccagcaggggctaccg

SEQ ID NO: 163615 - DNA, 80 bp, synthetic construct
  source 1..80: mol_type = other DNA
atgcaggctagagaggtggcacagtctaattaaatacctgaaatataggacaaaagacttgcaacaggtctcttatgttc

SEQ ID NO: 163616 - DNA, 80 bp, synthetic construct
  source 1..80: mol_type = other DNA
actctgcaatggggtacggcacaccagaaaccacaatgaccacaatatggaacaccctctataaaactgcctcctactgg

SEQ ID NO: 163617 - DNA, 80 bp, synthetic construct
  source 1..80: mol_type = other DNA
tatgccaatacaaaaatgcatccacggtgaactttacacccacaaacgtcaccgacaagcgaaccagcatcaactacatt

SEQ ID NO: 163618 - DNA, 80 bp, synthetic construct
  source 1..80: mol_type = other DNA
aagcttcaaacttggctttcattaaaatttgctaggccttacactgttcacttgtcggtgtctacctctaaaggtcacta

SEQ ID NO: 163619 - DNA, 80 bp, synthetic construct
  source 1..80: mol_type = other DNA
agacggcagctggcccttcccgcgccccccgctgatccacagcaggccaacccaggatggcctggtggggacggtggaga

SEQ ID NO: 163620 - DNA, 80 bp, synthetic construct
  source 1..80: mol_type = other DNA
aagaaacgtactaccctgtaataggaacttctgctttagagggaggctcaaaccacaacgcatctgctataaaaagttta

SEQ ID NO: 163621 - DNA, 80 bp, synthetic construct
  source 1..80: mol_type = other DNA
ctcatgtcatctgggattttggcttgcaatcatcggtcacgctggtaataccttggatttccaattcccattttagggta

SEQ ID NO: 163622 - DNA, 80 bp, synthetic construct
  source 1..80: mol_type = other DNA
gatggactaaaaaccccaggaatatgcaagaacatgtcctatctttgtgtcaccttatgtggcacaatgggaaggacaaa

SEQ ID NO: 163623 - DNA, 80 bp, synthetic construct
  source 1..80: mol_type = other DNA
tgaaggacacatcatcaatttcacagactgaggcactaacagaagggttgggagaagaacttgaggaagtgatagtcgac

SEQ ID NO: 163624 - DNA, 80 bp, synthetic construct
  source 1..80: mol_type = other DNA
acccgaaaatcctcggaccgagctactcgttccgtagctgggacatcagacgtggaatgtttagcacagcgagtcttaaa

SEQ ID NO: 163625 - DNA, 80 bp, synthetic construct
  source 1..80: mol_type = other DNA
ttcaggggcccggatttgattttgcacaagctatcatgaaaaagaacacagttattggcaggacagagaaaggggaattc

SEQ ID NO: 163626 - DNA, 80 bp, synthetic construct
  source 1..80: mol_type = other DNA
agagtctcaacgtcctcccttttgatgggcacgatgcccacgacccaaatcgcccaccaccgccctgcggtctgggtgac

SEQ ID NO: 163627 - DNA, 80 bp, synthetic construct
  source 1..80: mol_type = other DNA
acatggagattacagtagtcattacgagctcacaagaccaatcaacatcacaaaatcaaaatgcccccgtgttaacacat

SEQ ID NO: 163628 - DNA, 80 bp, synthetic construct
  source 1..80: mol_type = other DNA
acctactaaaactaaattacaacccagcattttccatgatgtgttccctgggatcaaggaaccagcagtcttatcagaaa

SEQ ID NO: 163629 - DNA, 80 bp, synthetic construct
  source 1..80: mol_type = other DNA
ttaccgcaccagtaacacagggattacctactatggccactcctggctcaaatcagttcttaacatcagacaatttccaa

SEQ ID NO: 163630 - DNA, 80 bp, synthetic construct
  source 1..80: mol_type = other DNA
ggaagattctaaagatgagagagcctataacccaacattaccagtggcaaaatcaaaaggaactttcccagtctcccaaa

SEQ ID NO: 163631 - DNA, 80 bp, synthetic construct
  source 1..80: mol_type = other DNA
cactttaactttgctaggttgttctggttcaccatggaggtttttaaaagaaaaattttgctcatggcttcaactcaact

SEQ ID NO: 163632 - DNA, 80 bp, synthetic construct
  source 1..80: mol_type = other DNA
catgtcacatcaacatgacgtacagcaagggcaaatacgaagagtacgagtaccacctaggctggtactctaacatcttt

SEQ ID NO: 163633 - DNA, 80 bp, synthetic construct
  source 1..80: mol_type = other DNA
cacccgcttcgggtttaatacctacaaccccaaatgtaaacaaaacgacattgaaaaccttagagaaaatatttggaaaa

SEQ ID NO: 163634 - DNA, 80 bp, synthetic construct
  source 1..80: mol_type = other DNA
cctttcactggcttaggttccgcatactacatattctatgatggttatgatgaaaatagctctacatcaacagcttatgg

SEQ ID NO: 163635 - DNA, 80 bp, synthetic construct
  source 1..80: mol_type = other DNA
acaagtgctttgatgcaaccctcccttctgccgccttctccctcgtggccacccacttggaacgcctcaccggcgacccc

SEQ ID NO: 163636 - DNA, 80 bp, synthetic construct
  source 1..80: mol_type = other DNA
gccgtgcttatggggatgccacattacctgatgtacagccataccaacaacgagtgtgttggtgaattcgctaacgagac

SEQ ID NO: 163637 - DNA, 80 bp, synthetic construct
  source 1..80: mol_type = other DNA
ctgcgcgcggcacctcagacccccgctcgtgctgacacgctcgcgcgtgtcagaccacttcgggctcgcggtggtcggga

SEQ ID NO: 163638 - DNA, 80 bp, synthetic construct
  source 1..80: mol_type = other DNA
gccgcaaaaggcccccgtgcccggccccgccgccaacccccgagcgcccgcaacaccccgtccccggtgccggactggcg

SEQ ID NO: 163639 - DNA, 80 bp, synthetic construct
  source 1..80: mol_type = other DNA
gcggggaggcgtgacgtgagttcaaaggtcatcctcaccggaactggcacaaaatggccgacaaattcttccgggtcaaa

SEQ ID NO: 163640 - DNA, 80 bp, synthetic construct
  source 1..80: mol_type = other DNA
agaaaactcgaaatgtttacatacgtccgttttgacgtagaagtcacatttgtaatcactagtaagcaggaccatggaaa

SEQ ID NO: 163641 - DNA, 80 bp, synthetic construct
  source 1..80: mol_type = other DNA
ttttcattccaggtctgaatcgaccatcgaaaacttcctgagcaggtcagcttgtgtgcatattgccaattacaatgcaa

SEQ ID NO: 163642 - DNA, 80 bp, synthetic construct
  source 1..80: mol_type = other DNA
agcaactgcaagcaatacaacaatagcagttaacaaacacctagatacaggaacaaatacaaatacatttgcaaattgga

SEQ ID NO: 163643 - DNA, 80 bp, synthetic construct
  source 1..80: mol_type = other DNA
aatggccctctttcctaaacccacaagaggcaaacccggttgatgcaccaaccatgccggatgcctccagtaaccggttt

SEQ ID NO: 163644 - DNA, 80 bp, synthetic construct
  source 1..80: mol_type = other DNA
caggtcccttcgcaccaaaagaacaaaaaccaagtagccagctagtacttaaatacaaatttagatttaactggggcggt

SEQ ID NO: 163645 - DNA, 80 bp, synthetic construct
  source 1..80: mol_type = other DNA
gtccccctccggagtgtatcaacgatttgctccaggcagttgattcccaggaagtgagagattactgtgaaaagaaaggc

SEQ ID NO: 163646 - DNA, 80 bp, synthetic construct
  source 1..80: mol_type = other DNA
acaaatcgttgacccgattaccatgggtccccgatacgccttccatcagtgggactggagacgcgggtggcttagtgaca

SEQ ID NO: 163647 - DNA, 80 bp, synthetic construct
  source 1..80: mol_type = other DNA
catgattgcacaccaaaaggaaaccgttgaggccatagtttcctgtggaccgttcatgcccagagatcaggaagccaaaa

SEQ ID NO: 163648 - DNA, 80 bp, synthetic construct
  source 1..80: mol_type = other DNA
gcttaattttgatggcacattactaggaaatatcacaatatttcctcatcaattcatcaatttgagaagcaacaactccg

SEQ ID NO: 163649 - DNA, 80 bp, synthetic construct
  source 1..80: mol_type = other DNA
cctttgtgcgcctgttttgcttcccttttcccagaggtaacttagaagcaatactccacgaccaatagcaggcgtggcac

SEQ ID NO: 163650 - DNA, 80 bp, synthetic construct
  source 1..80: mol_type = other DNA
acaaaagaaattttcatcccagggcaagttcagaacttgtcagaattgtgtcaggttgacacaattattccaattaacaa

SEQ ID NO: 163651 - DNA, 80 bp, synthetic construct
  source 1..80: mol_type = other DNA
gccagggacaagttggatttttgtaaaagactcaaacagttagatattttagaaaggcagattgataccttacacatgaa

SEQ ID NO: 163652 - DNA, 80 bp, synthetic construct
  source 1..80: mol_type = other DNA
aactaccaacgtaaatccaccttttaaatataaaaatatcgactccctatggggagatgctgtatacgacacaaataaag

SEQ ID NO: 163653 - DNA, 80 bp, synthetic construct
  source 1..80: mol_type = other DNA
taggtgttactccaagctgctctctcttaagagctgggagcaactagcctcttttttgtctctgcccccgggacccacgt

SEQ ID NO: 163654 - DNA, 80 bp, synthetic construct
  source 1..80: mol_type = other DNA
atggcggacttccttccgcttttttaaaaataacggcccagcggcggcgcgcgcgctacgcgcgcgccgccgctgggcct

SEQ ID NO: 163655 - DNA, 80 bp, synthetic construct
  source 1..80: mol_type = other DNA
tttgttcgcgggacagggctgagagagtttcgctgggacgtggtgttgcgggcgctcggtggttggcggctggtgtttct

SEQ ID NO: 163656 - DNA, 80 bp, synthetic construct
  source 1..80: mol_type = other DNA
acagctggaggtagtggctatgtatgttttgcagacattagacaattagattgcattgctgaagaacaaggcctgggaga

SEQ ID NO: 163657 - DNA, 80 bp, synthetic construct
  source 1..80: mol_type = other DNA
aatagaccttcacacaccacctccaccagctataactgacctccttagatctgttagaaccccagaagttgttaagtatt

SEQ ID NO: 163658 - DNA, 80 bp, synthetic construct
  source 1..80: mol_type = other DNA
agaaccagcagctttgaatgactctgaccccaggttggaggttaatttgcatgattctttattctcaaagtacaaaggga

SEQ ID NO: 163659 - DNA, 80 bp, synthetic construct
  source 1..80: mol_type = other DNA
gacaacacccacaacagacagctatgaataccacctaggaatctttagtccaatatttataggcccaacaagagcacaga

SEQ ID NO: 163660 - DNA, 80 bp, synthetic construct
  source 1..80: mol_type = other DNA
cctcaaaatacctaaaccataaaacaggcctgttttcctccatattcctcagtacacaaagactgtccccagactttccc

SEQ ID NO: 163661 - DNA, 80 bp, synthetic construct
  source 1..80: mol_type = other DNA
ccttgatgacgtcgttttagacgaagccggttgaggttgcaacagcgtggcgggtaccgtcgacggcgtgcccgacacct

SEQ ID NO: 163662 - DNA, 80 bp, synthetic construct
  source 1..80: mol_type = other DNA
gtataacaaagatggagtaaagttagaaattactgtacttaaactaaaaagaaatgaaaagtttaaagatattaggaaat

SEQ ID NO: 163663 - DNA, 80 bp, synthetic construct
  source 1..80: mol_type = other DNA
tggcttatataggtgcagatgcacgggtgagctatgaacacacccatccaggtgaaaaaggccatgtgattggcagcaat

SEQ ID NO: 163664 - DNA, 80 bp, synthetic construct
  source 1..80: mol_type = other DNA
gaattatatcagcaatggttataataataagaaacagttctgacccacaaactgtgatagccactttaacattgattgga

SEQ ID NO: 163665 - DNA, 80 bp, synthetic construct
  source 1..80: mol_type = other DNA
tctggcgtccccccctcgggaatgtctcctacagggagagaaattggcttcaggccgtcgaaggatcccacagttctttt

SEQ ID NO: 163666 - DNA, 80 bp, synthetic construct
  source 1..80: mol_type = other DNA
gtggatacattagcatgttttaccagactaggattgtggttccagcctccactccaactaagatggatgtattgggtttc

SEQ ID NO: 163667 - DNA, 80 bp, synthetic construct
  source 1..80: mol_type = other DNA
caaaactaatgctaaacaagtggtactttgcacatgacttctgtaaaataggcctctttcagatgtgggccacagcctta

SEQ ID NO: 163668 - DNA, 80 bp, synthetic construct
  source 1..80: mol_type = other DNA
tgtgcgtgactcagggtgcctactcaggcaacaccaaaccagtaccgcgcaaacctgaattaagaagggcagtggtacag

SEQ ID NO: 163669 - DNA, 80 bp, synthetic construct
  source 1..80: mol_type = other DNA
ctgtttaaccagcgcgcagccccgacacagcggggcgccgtcttcgctttccaaacagctgtcgcggtactcgcccgtct

SEQ ID NO: 163670 - DNA, 80 bp, synthetic construct
  source 1..80: mol_type = other DNA
catccgttcggctcaccactaactgaaactccttgtgtaaccttccaagtcctgggggacctctacaacgagtgccttaa

SEQ ID NO: 163671 - DNA, 80 bp, synthetic construct
  source 1..80: mol_type = other DNA
gcgacgcaaaaagaaactcatactgactcagtggaacccggcaatagttaagaggtgcaacattaagggcggacttccaa

SEQ ID NO: 163672 - DNA, 80 bp, synthetic construct
  source 1..80: mol_type = other DNA
cagcaggacctgtgcgacgttaacctgttgcaacttgtggttactgcggctgactttcaacatccgttctgctcaccaca

SEQ ID NO: 163673 - DNA, 80 bp, synthetic construct
  source 1..80: mol_type = other DNA
tgggagcagattcaccgccgcggccgtctcctttaaggtgctgtgagtagcaaaattctgcaaggccactaggcgcgctg

SEQ ID NO: 163674 - DNA, 80 bp, synthetic construct
  source 1..80: mol_type = other DNA
atcatctcaggctctatcggtaccatcgttgtcatctgaaaaaaaaaaactgcctcacccacctgcgtaaaaacaccatc

SEQ ID NO: 163675 - DNA, 80 bp, synthetic construct
  source 1..80: mol_type = other DNA
atgaacagtttcgtgtttttaacaatttgatgagaaacaaaaacatgagtccttatataaaacccacaatttgctctgtg

SEQ ID NO: 163676 - DNA, 80 bp, synthetic construct
  source 1..80: mol_type = other DNA
tgcctacgagaagcctagtaatgctcaagatgtaatttggctggtcgctccgctgtttcccacagtagacctggcagatg

SEQ ID NO: 163677 - DNA, 80 bp, synthetic construct
  source 1..80: mol_type = other DNA
aaccattttcccacaccaacttataaacctcagaaccaacaactcaagcactatagttgtgccttacatcaactgcacac

SEQ ID NO: 163678 - DNA, 80 bp, synthetic construct
  source 1..80: mol_type = other DNA
tctgacattgatgcaacatccgttgataaacccactcacccagaaacatcagctgacagattctacactctggacagtgt

SEQ ID NO: 163679 - DNA, 80 bp, synthetic construct
  source 1..80: mol_type = other DNA
aaacattacagaaagaagagacatacagtttaactgggaaactaaattcagtaacagcgcaacacacattaacccaacat

SEQ ID NO: 163680 - DNA, 80 bp, synthetic construct
  source 1..80: mol_type = other DNA
gtgcagttgcgccgtaagttggagtttttcacatactctagatttgaaagggaattcaccttcgtgttaaccgccaactt

SEQ ID NO: 163681 - DNA, 80 bp, synthetic construct
  source 1..80: mol_type = other DNA
aacccctacgaccaccctttctacccctggctacccaaagagcctccctcctactaccaaggctacaaagtgtcttttaa

SEQ ID NO: 163682 - DNA, 80 bp, synthetic construct
  source 1..80: mol_type = other DNA
ttctacacattggccagtgttcaatggaatcaagcctctaaaggatggtggtggaaattacctgatgctcttagagagat

SEQ ID NO: 163683 - DNA, 80 bp, synthetic construct
  source 1..80: mol_type = other DNA
tcggcctaggcccggggaagtggagcgggatcgcccgggtctctgttggcagagtccgggcgatcctctgagaccctccg

SEQ ID NO: 163684 - DNA, 80 bp, synthetic construct
  source 1..80: mol_type = other DNA
tccgagttgccattggacactggagtctgtgagttagtaacgaaagtgagtggggccagacttcgccgtagggcctttat

SEQ ID NO: 163685 - DNA, 80 bp, synthetic construct
  source 1..80: mol_type = other DNA
atattcccaattaagacaacagtggcttgataatttcatttagataaatatactacacaaatttactgtagaattagtat

SEQ ID NO: 163686 - DNA, 80 bp, synthetic construct
  source 1..80: mol_type = other DNA
aagtttctaatccacccagtgtatgccatggatgatgtttatgaatccatcagatggactaaggaccctaaaaacactca

SEQ ID NO: 163687 - DNA, 80 bp, synthetic construct
  source 1..80: mol_type = other DNA
aacccgaccaatgagtccgtaataattagaactctcctgggagaaattctcaattattacactcattggtcggggagtat

SEQ ID NO: 163688 - DNA, 80 bp, synthetic construct
  source 1..80: mol_type = other DNA
ttctgcgggtgtttgcacggagcttttgcgcggcgccgcgtttgcggcggccacggtggtttttgtgcgccgttggggac

SEQ ID NO: 163689 - DNA, 80 bp, synthetic construct
  source 1..80: mol_type = other DNA
cagtgctcccaacaatgttaatgctatagttggaaacaggacaaatatcacaaccatgcccaatgacatcgttacaacag

SEQ ID NO: 163690 - DNA, 80 bp, synthetic construct
  source 1..80: mol_type = other DNA
cctcaggagtactctgttggcaaacattgctaggtactacacccattggtcaggatctatggagatgacttttatgtttt

SEQ ID NO: 163691 - DNA, 80 bp, synthetic construct
  source 1..80: mol_type = other DNA
tgtctctctcctcatccaaaatcttaaagattttctgggcataagctataatctcatcaggggagcactgaggcaagttc

SEQ ID NO: 163692 - DNA, 80 bp, synthetic construct
  source 1..80: mol_type = other DNA
tggatttataccttcaacttacaacacttattgtattatttgcattgtgttattgattagacaacaatactacaatggga

SEQ ID NO: 163693 - DNA, 80 bp, synthetic construct
  source 1..80: mol_type = other DNA
aatggttaggcaataaaatatcaaaatttattgactgggttaaatcaatgcttccacaggcaaagcttaaagtggagtat

SEQ ID NO: 163694 - DNA, 80 bp, synthetic construct
  source 1..80: mol_type = other DNA
gattgtgcagatctaagcacatctttaaaaatgtgtattatgaggtagaaggtggggtcccatcgggctgttctggaact

SEQ ID NO: 163695 - DNA, 80 bp, synthetic construct
  source 1..80: mol_type = other DNA
tagattggattaagagtatgttaccacaagctcaacttaaggttgattacttgactaaactcaaacaactaaatctccta

SEQ ID NO: 163696 - DNA, 80 bp, synthetic construct
  source 1..80: mol_type = other DNA
taagtaaatatggaatagatttgcccttaataacatatattaaagatgagttaagaggcaaagtcaagattaggttaggt

SEQ ID NO: 163697 - DNA, 80 bp, synthetic construct
  source 1..80: mol_type = other DNA
attacagagaaggaagagatcagctctggaaaggcccagcagatctcttatggaaaggagaaggagcagtcataattaag

SEQ ID NO: 163698 - DNA, 80 bp, synthetic construct
  source 1..80: mol_type = other DNA
tgggcccaactacacattcaaaagctgggacatcaggcgtgggacgtttagcaaatcgagtattaaaagaatgtcagaac

SEQ ID NO: 163699 - DNA, 80 bp, synthetic construct
  source 1..80: mol_type = other DNA
cacttgccgtggttacgattattataatctgcgttctgatttactttaacgttccaacaaccctaagacacaaactacaa

SEQ ID NO: 163700 - DNA, 80 bp, synthetic construct
  source 1..80: mol_type = other DNA
cgccgcggaccacgcgcgcctgccaaatggtaaacgcgtcccaaccgtcccagttattgagcatttcggcgcgaaaacgg

SEQ ID NO: 163701 - DNA, 80 bp, synthetic construct
  source 1..80: mol_type = other DNA
gagtcaccaccaccagagataagataacactagataaggtcactcacgtgtcgtctgcttgtatgaagggggtttttggg

SEQ ID NO: 163702 - DNA, 80 bp, synthetic construct
  source 1..80: mol_type = other DNA
atgtcttgtcattgtgtcatttaatgtggcataatggtagggatgcatataaacaatttgagcagaaaatacgcagtgtc

SEQ ID NO: 163703 - DNA, 80 bp, synthetic construct
  source 1..80: mol_type = other DNA
gtggaccgtgtgaatcgccgccaatgacgacaaatacgctgaccgtggcctgtccgccccgcgaacccccgcatcgtgcc

SEQ ID NO: 163704 - DNA, 80 bp, synthetic construct
  source 1..80: mol_type = other DNA
cgacagcagagacagagtcggagtagtgtttaacacatttaaaacacaagaacacatacagaatccaaactttcagactg

SEQ ID NO: 163705 - DNA, 80 bp, synthetic construct
  source 1..80: mol_type = other DNA
acaagtagcatccaacctgaagacacaattgaaacaagatatgtgcaaacctcgcatacaagagatgaaatgagtgttga

SEQ ID NO: 163706 - DNA, 80 bp, synthetic construct
  source 1..80: mol_type = other DNA
gttctgtcattgtgtcacttaatgtggcataatggaccggaggtttataaggattttgagaataaaattcgcagtgtcag

SEQ ID NO: 163707 - DNA, 80 bp, synthetic construct
  source 1..80: mol_type = other DNA
aactactcaagacttaaattctttaattgacaaaatactatgcaatgcagaaaatgtattaaccaaagtaaaccaggaac

SEQ ID NO: 163708 - DNA, 80 bp, synthetic construct
  source 1..80: mol_type = other DNA
agggaagatgctattagctatgggatctcatccaccaatgacatgggagtactttgcttcagagccttggaggataagac

SEQ ID NO: 163709 - DNA, 80 bp, synthetic construct
  source 1..80: mol_type = other DNA
atatgcacaagaagtctttgctatacctgttgatgttgcttcacaaccattagcgaccacttatcttggggagatcagca

SEQ ID NO: 163710 - DNA, 80 bp, synthetic construct
  source 1..80: mol_type = other DNA
aggagcgggagtgagaggtctccggttgcaggtaagtgcaacaaaaaatagaaccaaagggttgtctgcctctgagaaag

SEQ ID NO: 163711 - DNA, 80 bp, synthetic construct
  source 1..80: mol_type = other DNA
atgatcctaggttagaggtcaattttaaagaagctttattctcaaagtacaaaggaaataatcaatgtgaattaaatgat

SEQ ID NO: 163712 - DNA, 80 bp, synthetic construct
  source 1..80: mol_type = other DNA
atttctcacaggacccgtccaaattcactgaaccggtcaaggatttaatgttaaaatccgcaccggctttgaattcgcca

SEQ ID NO: 163713 - DNA, 80 bp, synthetic construct
  source 1..80: mol_type = other DNA
tcaataaagctaggccgtgggactttcacttgcgctacgccttcggctgcgcgcggcacctcagacccccgctcgtgctg

SEQ ID NO: 163714 - DNA, 80 bp, synthetic construct
  source 1..80: mol_type = other DNA
tgttcaggttcaccatggaggtttctaaaagaaaaattttgtaagtggacacagttaaattatatacataaagagtcaga

SEQ ID NO: 163715 - DNA, 80 bp, synthetic construct
  source 1..80: mol_type = other DNA
cgccccgaacccgaaataaaagtaagcggtgcaacgccctcggcggccgcgcgctacgccttcggctgcgcgcggcacct

SEQ ID NO: 163716 - DNA, 80 bp, synthetic construct
  source 1..80: mol_type = other DNA
tgtcagctacaccacattgctatatattgtccaactgaacgcaagaagatgggagcacaagtatcgactcaaaagactgg

SEQ ID NO: 163717 - DNA, 80 bp, synthetic construct
  source 1..80: mol_type = other DNA
ggggcgtccgaaggcgaggatggcatggtctcgccggagcgcccggcttttatggaacgctcgcgtccggtcgggcagcg

SEQ ID NO: 163718 - DNA, 80 bp, synthetic construct
  source 1..80: mol_type = other DNA
gccctaataatatgatgggcactttcgcagtgcgtgtcgttagcaaagtagcaagtcagctcaaattacagaccagggtg

SEQ ID NO: 163719 - DNA, 80 bp, synthetic construct
  source 1..80: mol_type = other DNA
gtaaccaccacacgcacgtctatcactgaagttcccagtctaagaccatcattacagaacacaggggctttcggccacca

SEQ ID NO: 163720 - DNA, 80 bp, synthetic construct
  source 1..80: mol_type = other DNA
tggatatgtatagggtgccagtaactaccagtgcaaatctggaaaatcctattctatgtctgtccttatcaccagcatct

SEQ ID NO: 163721 - DNA, 80 bp, synthetic construct
  source 1..80: mol_type = other DNA
aagcggaaagacgtgtgtgacgaaaaggggtcccatggtatttcacgtgacgatgaggagatgcggtttggagcacatac

SEQ ID NO: 163722 - DNA, 80 bp, synthetic construct
  source 1..80: mol_type = other DNA
acacacttcaggacacaagccaccggtaattattatgattattactcgaccggtgttgtcacgttgtggtatcagacaaa

SEQ ID NO: 163723 - DNA, 80 bp, synthetic construct
  source 1..80: mol_type = other DNA
atacaacccttgtcaagataagggtttttcatagagctaaacacattagagcttggttgccaagaccacccagagcattg

SEQ ID NO: 163724 - DNA, 80 bp, synthetic construct
  source 1..80: mol_type = other DNA
ccagagctcaggagagcggtagcgcaaggcccagatcatgagtttggcatagcgctattgaaaagaaattgtcatgtggc

SEQ ID NO: 163725 - DNA, 80 bp, synthetic construct
  source 1..80: mol_type = other DNA
aaccgccatattagtgacgtcacggcggccattttaagtaagcaggaagcggctccacgtatacaaaatggccgcggagc

SEQ ID NO: 163726 - DNA, 80 bp, synthetic construct
  source 1..80: mol_type = other DNA
ttggaatcaaaagaaggttgtcaaaaaattctttcagttttagctccattagtgccgacagggtcagaaaatttaaagag

SEQ ID NO: 163727 - DNA, 80 bp, synthetic construct
  source 1..80: mol_type = other DNA
acgcatcacgcgcccgtagctcacggcagtgaccaggttctccccccgtaccacaaaagaagcatagctcgagggcccca

SEQ ID NO: 163728 - DNA, 80 bp, synthetic construct
  source 1..80: mol_type = other DNA
attttcccacatcagtttataaatttgagaacaaacaatgctgcgaccctaatattaccatatgtaaatgcaactcccat

SEQ ID NO: 163729 - DNA, 80 bp, synthetic construct
  source 1..80: mol_type = other DNA
tgcccaccaagaatcctgataatactaacaacagtcaggctgctgagtttaatcaatgggttgaaaacacatttaaaaca

SEQ ID NO: 163730 - DNA, 80 bp, synthetic construct
  source 1..80: mol_type = other DNA
ttgaattagatccaggggtgttggcatcacatgggaaaaactatggattgactatcacccctccagataaatctgaaaaa

SEQ ID NO: 163731 - DNA, 80 bp, synthetic construct
  source 1..80: mol_type = other DNA
atgagtacttttcaaaaaacgacagtctgtgggctgatgccatctttgttaatacagctcaaaccttacaggcccttaaa

SEQ ID NO: 163732 - DNA, 80 bp, synthetic construct
  source 1..80: mol_type = other DNA
gatttgtgtaccgttaatcttgtgacatttgtggttagcctagcttccttttcacatccgttctgcccaccactaacgaa

SEQ ID NO: 163733 - DNA, 80 bp, synthetic construct
  source 1..80: mol_type = other DNA
gtgggactgccatgacaacaggcaaacttctgttggcttattcacctcctggagcggatgtgccaaagaaacgcaaggat

SEQ ID NO: 163734 - DNA, 80 bp, synthetic construct
  source 1..80: mol_type = other DNA
ctagtaccagtagatacctcacaagagggagaggacactgagactgacactgagactcactgcttattacacccagcaca

SEQ ID NO: 163735 - DNA, 80 bp, synthetic construct
  source 1..80: mol_type = other DNA
gacaaaacgctgagttgtgcggcacattgtcaccaggttgtaacgtgacccagtggggacgttacgaaaatgggagcacg

SEQ ID NO: 163736 - DNA, 80 bp, synthetic construct
  source 1..80: mol_type = other DNA
tgtgtatgaggtgtgggttcaacgcaggggcgttggtggcggagtctggcaatgcccggggcctcgcgacctgtgtggtg

SEQ ID NO: 163737 - DNA, 80 bp, synthetic construct
  source 1..80: mol_type = other DNA
ccaacttccgctcctagatccgcagccattgcttctcaattcgactcctggcacggcatcacttccatccaagtcgagtc

SEQ ID NO: 163738 - DNA, 80 bp, synthetic construct
  source 1..80: mol_type = other DNA
tcgtgctcaattatgtgtttcgtgtcagcgtgtaacgacttctcagtgcgcctactaaaagatacaccatttatagaaca

SEQ ID NO: 163739 - DNA, 80 bp, synthetic construct
  source 1..80: mol_type = other DNA
aattggtatacatacaaagcctcatcagttaaacaaaagcttcacaacatgagaaaagcctactttcaagaattaaccat

SEQ ID NO: 163740 - DNA, 80 bp, synthetic construct
  source 1..80: mol_type = other DNA
cgacgtcctgcagggtctccttccgcctgggattcaagccttaaataaaatgtttgctgcttcactgtgcgttggccgtg

SEQ ID NO: 163741 - DNA, 80 bp, synthetic construct
  source 1..80: mol_type = other DNA
attgtgcacttaaagcttgtgatcaagaacaaaaaatcggaaatgcacgctgctgccctttgatatgcggcaaggctgtt

SEQ ID NO: 163742 - DNA, 80 bp, synthetic construct
  source 1..80: mol_type = other DNA
ggcacggcgctggggacggggtttcaccgcgctgagggatctttctgcgggtgtgagggacggagcttttttcgcacgct

SEQ ID NO: 163743 - DNA, 80 bp, synthetic construct
  source 1..80: mol_type = other DNA
tctgtccttgaaatttttaccactgtacgcatctgaagcgcgcagaatcaagagtctatatatcaaatgtagtaacatca

SEQ ID NO: 163744 - DNA, 80 bp, synthetic construct
  source 1..80: mol_type = other DNA
tagaatggatgaaatcaatgttgccacaggcacaactcaaggttaaatatttgagtgaactaaagaaattgagtttactc

SEQ ID NO: 163745 - DNA, 80 bp, synthetic construct
  source 1..80: mol_type = other DNA
agtgctagctggtaatgccttcgtgtacccccaccagataattaacctacgcactaacaattgtgcaactctagtcctgc

SEQ ID NO: 163746 - DNA, 80 bp, synthetic construct
  source 1..80: mol_type = other DNA
ccagcagtaaaaaattggatgacacaaacactgctgattcagaatgctaacccagattgcaaattagtgcttaagggctt

SEQ ID NO: 163747 - DNA, 80 bp, synthetic construct
  source 1..80: mol_type = other DNA
atagtgactactggtccaggcttcggaggagtttttgtaggatccttcaaaataatcaactatcacttagccaccacaga

SEQ ID NO: 163748 - DNA, 80 bp, synthetic construct
  source 1..80: mol_type = other DNA
aataacattgaagccaggaaaagacggaccaaggctgaaacaatggcccctaacaaaagaaaaagtagaagcattaaagg

SEQ ID NO: 163749 - DNA, 80 bp, synthetic construct
  source 1..80: mol_type = other DNA
tctttttccctttgccagccccgaagcctacagctagccgtgctctgcggggagacatggcgggcttctcagatcagagc

SEQ ID NO: 163750 - DNA, 80 bp, synthetic construct
  source 1..80: mol_type = other DNA
actagggtatacatgaaattaaagcatattagagcctgggtccctaggcctttacgctctcagccatacatcctaaagaa

SEQ ID NO: 163751 - DNA, 80 bp, synthetic construct
  source 1..80: mol_type = other DNA
cggcgaatgtagcgacggcagcggcgggtccatgaggcgggtgatgcacccgagtgaacgggtgagcgtctcggtggagt

SEQ ID NO: 163752 - DNA, 80 bp, synthetic construct
  source 1..80: mol_type = other DNA
aaacacctcctctgggaagagaccacagaagaagagacagaagcccaatcagaagcggagcaggaggaggaggagcagca

SEQ ID NO: 163753 - DNA, 80 bp, synthetic construct
  source 1..80: mol_type = other DNA
tccatttctaacatcaggcagaataagcccagagatatttggactgtacaaagaaataatttacaatccctacacagaca

SEQ ID NO: 163754 - DNA, 80 bp, synthetic construct
  source 1..80: mol_type = other DNA
ccgacaagaagaagacttcgctttacaggaaaaaagacggcgcacatccacagaagaagtccaggacccggagagccccc

SEQ ID NO: 163755 - DNA, 80 bp, synthetic construct
  source 1..80: mol_type = other DNA
gtgagctctcatgtaattccactgtgactagcctcatagccaacatcgattcagacaatgaaactaccaatatttccgtg

SEQ ID NO: 163756 - DNA, 80 bp, synthetic construct
  source 1..80: mol_type = other DNA
gtcctgggaaccccagacccccgggcgctcctcagccgccgccagtgaggcccctgccagccctgccggctccggagccc

SEQ ID NO: 163757 - DNA, 80 bp, synthetic construct
  source 1..80: mol_type = other DNA
agcgtggatgatcatgttgcggtaatcggaagaacggtggcataattggtgggtgtgcaattctttgaggctccacgcgg

SEQ ID NO: 163758 - DNA, 80 bp, synthetic construct
  source 1..80: mol_type = other DNA
ttcagagttaattcaacaaatatgcaccacccaccatatctttagagaccaaatttatgtggtagaaggtggtatgccct

SEQ ID NO: 163759 - DNA, 80 bp, synthetic construct
  source 1..80: mol_type = other DNA
aagggacggtggttgcgctgggtccggggctgttcgcgccgcgtagtggaggttacgttgggtacgaggacagtttgcgg

SEQ ID NO: 163760 - DNA, 80 bp, synthetic construct
  source 1..80: mol_type = other DNA
ctccgtagtcgcgcatcagtgacgtcacggcagccatcttggtccatacgtcacagtcacgtggggagggaacacgtgat

SEQ ID NO: 163761 - DNA, 80 bp, synthetic construct
  source 1..80: mol_type = other DNA
ggacggcgacggcgaagagttgcgtgtggtgcggtgtggtgcggtggacggcgacggcgaataaaagcgacgtgcgtcgc

SEQ ID NO: 163762 - DNA, 80 bp, synthetic construct
  source 1..80: mol_type = other DNA
gagacgggcgccacgtccaatgccacagatgagaacatgatcgaaactcgctgtgtggtcaatagaaacggggtgttaga

SEQ ID NO: 163763 - DNA, 80 bp, synthetic construct
  source 1..80: mol_type = other DNA
gctttttatgatcctaggactgcaggaagtagatctaggtttggagatttgataaagattgcacagctattctctgtcat

SEQ ID NO: 163764 - DNA, 80 bp, synthetic construct
  source 1..80: mol_type = other DNA
agtttgtgacaaatataaggatgcacaaggaaaacttaatgtatctgcagcatttaaaccatgtgatgttgatgcaaaaa

SEQ ID NO: 163765 - DNA, 80 bp, synthetic construct
  source 1..80: mol_type = other DNA
gggttacatgcccgctctcatatgtggctggggggcttatgccagcaactacaccagccacttagaggacaagataataa

SEQ ID NO: 163766 - DNA, 80 bp, synthetic construct
  source 1..80: mol_type = other DNA
acaaacacccaactaggcttagtacacggctggacaaatgccacagtaaaagaatatgaataccacttaggcatgttcag

SEQ ID NO: 163767 - DNA, 80 bp, synthetic construct
  source 1..80: mol_type = other DNA
tggacgatacactgttctctaccactcttcttggtgaagtactaagttacttctcaaactggtcaggtagtataacactc

SEQ ID NO: 163768 - DNA, 80 bp, synthetic construct
  source 1..80: mol_type = other DNA
gaaagtggattcataccaataggctacaactttagtcaaggtttcatgccagacggctctaaatacacaccaatacagat

SEQ ID NO: 163769 - DNA, 80 bp, synthetic construct
  source 1..80: mol_type = other DNA
atttgcagctgtcgattacttgcttgggtgtggtgtcctcgcgggcaatgccttcgtgtttcctcatcaaattatcaatt

SEQ ID NO: 163770 - DNA, 80 bp, synthetic construct
  source 1..80: mol_type = other DNA
aggtgcggatttacatgaagcccaagcacatgagagtatggtgtccgcgccccccacgagcagtgccatattacgggccg

SEQ ID NO: 163771 - DNA, 80 bp, synthetic construct
  source 1..80: mol_type = other DNA
cttcagcaacaagcaacgtcacgtcaaatgtcaccataactccaaccgtagtaacaagtacaactatcagtaacatatca

SEQ ID NO: 163772 - DNA, 80 bp, synthetic construct
  source 1..80: mol_type = other DNA
gaatcaggaattgatctgaacacgaccgatgaggatggccccatgaaggatccactttatatgatgaatggaacattgat

SEQ ID NO: 163773 - DNA, 80 bp, synthetic construct
  source 1..80: mol_type = other DNA
gcgggcgtgggtcgggtgtgtcggtggtgtgccttcggcgtgtgtcctcgacgcgggttgtgcgcctgccgctcccggca

SEQ ID NO: 163774 - DNA, 80 bp, synthetic construct
  source 1..80: mol_type = other DNA
aatgtatcctggggaaaaaaatacacaacagctgttgggttctgatttcagttgcgaacgtcaccggagaccgtccacgc

SEQ ID NO: 163775 - DNA, 80 bp, synthetic construct
  source 1..80: mol_type = other DNA
aacattgttgccatccacgtgggtggtaatggtagagtggggtatggagcaacactactgcgtaagtattttgcccaggc

SEQ ID NO: 163776 - DNA, 80 bp, synthetic construct
  source 1..80: mol_type = other DNA
tgtaggaaaatctgccagattcagtgttccctatttaggaattgcttcagcatacaattgtttttatgatggttattctc

SEQ ID NO: 163777 - DNA, 80 bp, synthetic construct
  source 1..80: mol_type = other DNA
agctttaaaacaaaacccaaaggaaaaggcacagtaaaggtgcgcattcgcccccccacactctttgacgaccgttggta

SEQ ID NO: 163778 - DNA, 80 bp, synthetic construct
  source 1..80: mol_type = other DNA
aaaatgggggctcaagtgtcaacacagaaaacaggcgcccacgagaccctgctcgaggctgcccagggtgccactataaa

SEQ ID NO: 163779 - DNA, 80 bp, synthetic construct
  source 1..80: mol_type = other DNA
gtaatgctaagtgctgcccattcatttgtggaaaagctgtggaatttaaagacagaaactcatgcactactttatccttg

SEQ ID NO: 163780 - DNA, 80 bp, synthetic construct
  source 1..80: mol_type = other DNA
gaccaacaaccccaaaatcaaatgatgaaattggcttacctagatagaggtttctataagcactatggcatcatagttgg

SEQ ID NO: 163781 - DNA, 80 bp, synthetic construct
  source 1..80: mol_type = other DNA
tccctgtaggtcgaactttgtacttaccaccatatgagtacttagaaagaagatggatagataaattcatataattagat

SEQ ID NO: 163782 - DNA, 80 bp, synthetic construct
  source 1..80: mol_type = other DNA
gcggacacattctcgccttctttgaccagctttgcctccatctgggcacttctgacgcttgtcttagtcattatagcctc

SEQ ID NO: 163783 - DNA, 80 bp, synthetic construct
  source 1..80: mol_type = other DNA
ctctttctggacggggcctttagcaccgagctgatgggtgacacctcctcgctgagccagggtagcctgagccgcactgt

SEQ ID NO: 163784 - DNA, 80 bp, synthetic construct
  source 1..80: mol_type = other DNA
actgaattactagtaagcatgagtttaatatctcggacgatgtgcctggctcttcttccacaaagtcttggtagcagtac

SEQ ID NO: 163785 - DNA, 80 bp, synthetic construct
  source 1..80: mol_type = other DNA
gcaccataggagagtaccaggacacagaactcaatggctttgtgtgtgtcatctgtccctacacagtaccccccatgtac

SEQ ID NO: 163786 - DNA, 80 bp, synthetic construct
  source 1..80: mol_type = other DNA
tcatgtcacctagcgtggaggcctgtgggttctctgataggctaaagcagatcactatcggagactcaacaatcaccacc

SEQ ID NO: 163787 - DNA, 80 bp, synthetic construct
  source 1..80: mol_type = other DNA
caaaacaagtggtctaaaccaaactcaccatacaacggtgaagcctaccctcaaacatctataacacaaggagacaatgg

SEQ ID NO: 163788 - DNA, 80 bp, synthetic construct
  source 1..80: mol_type = other DNA
gcgattctccgggggtggccgctctcgtcctcgtcgctgctatcgccgcccggtaattcgacgccgcattcgttgtacgg

SEQ ID NO: 163789 - DNA, 80 bp, synthetic construct
  source 1..80: mol_type = other DNA
caaagtgatcaacaatgcactacaactttcacaaccctcccgaccgaacacggcatcagacacccctagcacgagcgggg

SEQ ID NO: 163790 - DNA, 80 bp, synthetic construct
  source 1..80: mol_type = other DNA
ggcgtttctacgcagcttttgcgcgacggtgttttcgggcggacgggggtgtgcggtgacgggtggtgtgcgtggacgtg

SEQ ID NO: 163791 - DNA, 80 bp, synthetic construct
  source 1..80: mol_type = other DNA
tgggtgaagaacaagataattcctgaagccagagacaaagtggaatttctgcaaaaattgaaacagttagaaatgcttga

SEQ ID NO: 163792 - DNA, 80 bp, synthetic construct
  source 1..80: mol_type = other DNA
caattgcatctcatcagttcctttcatcgtgccaatggcacatcttgaagagaagggcaagttttacaccagcaaactag

SEQ ID NO: 163793 - DNA, 80 bp, synthetic construct
  source 1..80: mol_type = other DNA
ttcccaggttatttaatgagtagattaaacaaaaccactcatattttcagggatgaggtttacaaagttgaaggaggtat

SEQ ID NO: 163794 - DNA, 80 bp, synthetic construct
  source 1..80: mol_type = other DNA
tatatggagtagatggactagaacctatagatattacaaccagtgcaggatttccctatgtgagtcttgggatcaaaaag

SEQ ID NO: 163795 - DNA, 80 bp, synthetic construct
  source 1..80: mol_type = other DNA
agaaaaaaactaataattaaacagtggcaacctaactttattagacactgctacataataggatacatgccactgataat

SEQ ID NO: 163796 - DNA, 80 bp, synthetic construct
  source 1..80: mol_type = other DNA
taaatgtactcaatcatatgggcagcatagcattcagggttgtcaatgagaatgatgcacatctcaccaaagtaaaaatc

SEQ ID NO: 163797 - DNA, 80 bp, synthetic construct
  source 1..80: mol_type = other DNA
gaacctatacattgtttgtattatatgtccctacaccaggcctcaactatactcaaaaaccaatccaaaacaaggatggg

SEQ ID NO: 163798 - DNA, 80 bp, synthetic construct
  source 1..80: mol_type = other DNA
cacactggtctggtagcattaagctcacttttctgttctgcgggactgcactagcgacaggtaaactgctgttggcttac

SEQ ID NO: 163799 - DNA, 80 bp, synthetic construct
  source 1..80: mol_type = other DNA
gaacgcacgaacccctacgtagccactcacgttgattgggcaatcgccgtggcaacggtgataattatctgcatcctaac

SEQ ID NO: 163800 - DNA, 80 bp, synthetic construct
  source 1..80: mol_type = other DNA
gtcattaaaagtgctgtacgaccaacaccagagaggtctcaacaggtggtccgccagcaacgagaccctagacctcgcca

SEQ ID NO: 163801 - DNA, 80 bp, synthetic construct
  source 1..80: mol_type = other DNA
gtcaaaacaacaagacgatgctccagactatcctaacccatacaaaaagcctagatattttcccccaacagacagggcag

SEQ ID NO: 163802 - DNA, 80 bp, synthetic construct
  source 1..80: mol_type = other DNA
cagcggtggtaccggtaacggtggtcgcgttggtttccaccgcttcacacagtaagcaaaagcacagagccaggaaaagc

SEQ ID NO: 163803 - DNA, 80 bp, synthetic construct
  source 1..80: mol_type = other DNA
gatacggagtctggccacattatttaacaccacaagatgccactgccatagacaaaccaacgcaacctgacacatcatca

SEQ ID NO: 163804 - DNA, 80 bp, synthetic construct
  source 1..80: mol_type = other DNA
caaacagaggatggctaaccgtcgttgcatgttccaggccatgagccaggctaggcccgtacaccagacgcagagcatgg

SEQ ID NO: 163805 - DNA, 80 bp, synthetic construct
  source 1..80: mol_type = other DNA
agaataaaattttatgcatcgtcttctaatctgtgccgcttggagggaaacatgaccacctgaagtctgttaaccaggtc

SEQ ID NO: 163806 - DNA, 80 bp, synthetic construct
  source 1..80: mol_type = other DNA
tgacctccttttgcatgagtggtatgaaaaattttaaacatatatatagaagtagaaaatgtttagttttttagttttac

SEQ ID NO: 163807 - DNA, 80 bp, synthetic construct
  source 1..80: mol_type = other DNA
tcacagaaaagttaggaggagacgtttattctttacccccagacccaaaatattttgatgggtacaaacagcaaacagta

SEQ ID NO: 163808 - DNA, 80 bp, synthetic construct
  source 1..80: mol_type = other DNA
gggtgttgcaattcccttcaacttcttaaagaatgacatgtctgatcaaggcatagtcacagaaattacgcccatccaac

SEQ ID NO: 163809 - DNA, 80 bp, synthetic construct
  source 1..80: mol_type = other DNA
cagttcagaatcaggcagcaactgcagcacctattcgtacaagtcctcaaaacccaagccggtctccacataaatccatt

SEQ ID NO: 163810 - DNA, 80 bp, synthetic construct
  source 1..80: mol_type = other DNA
tttctcggtgcgtctattgcgtgattcgccctttgtgagtcaaacagcattctaccagaatgatgtgcaaaatgcaattg

SEQ ID NO: 163811 - DNA, 80 bp, synthetic construct
  source 1..80: mol_type = other DNA
cagcacctacaactggcaaaactatcaaactaactatgcaaacacatatacaaaatttaaagaaaaaagaacagcaaact

SEQ ID NO: 163812 - DNA, 80 bp, synthetic construct
  source 1..80: mol_type = other DNA
catatttatgagtggaccgtttacttacaagggcgacgaaaaatcagcaacactatcagcaaaatatgcttttaaatggc

SEQ ID NO: 163813 - DNA, 80 bp, synthetic construct
  source 1..80: mol_type = other DNA
agcagcgaatcggagagcaactccgatacctacttcaacagatgttcaaaactcaggccaatctccacctaaacccatat

SEQ ID NO: 163814 - DNA, 80 bp, synthetic construct
  source 1..80: mol_type = other DNA
gactgcgacctcccacctagccacccactcctgacagcccagagggggctgttcctggcaagagtcttgcaggctgtaca

SEQ ID NO: 163815 - DNA, 80 bp, synthetic construct
  source 1..80: mol_type = other DNA
aaagaggaagtatgacgtagcggcgggggtgcggcgcgcttcgcgcgccacccaccaggaggcgcacagcgccccctcgt

SEQ ID NO: 163816 - DNA, 80 bp, synthetic construct
  source 1..80: mol_type = other DNA
agggataagcttgagtttgtaaccaaattgaaacagctggaaatgctagagaaccagatatccactatccatcaatcatg

SEQ ID NO: 163817 - DNA, 80 bp, synthetic construct
  source 1..80: mol_type = other DNA
tcaggagatctttataccaggtgaagttaaaaatttagtggagctttgtcaggttgacaccatggtccctttaaacaata

SEQ ID NO: 163818 - DNA, 80 bp, synthetic construct
  source 1..80: mol_type = other DNA
caggagaggtcaaaaatctgatggagattgctgaggtcgactctgtaatgccaataaacaacattggggatgcagtcaat

SEQ ID NO: 163819 - DNA, 80 bp, synthetic construct
  source 1..80: mol_type = other DNA
gagcaggagaactcattaagattctccagcgagcgctcttcctccattacagaggagggtgccaacactcaaggattgga

SEQ ID NO: 163820 - DNA, 80 bp, synthetic construct
  source 1..80: mol_type = other DNA
gtgggacccctcaaataacaatcatattaatgccacctatgctaatggcaaatatgatatatatgaataccactgtggct

SEQ ID NO: 163821 - DNA, 80 bp, synthetic construct
  source 1..80: mol_type = other DNA
tgtgcccaatatcagagagagtcacccaagcacatccaactctgccccaattttggatgctgctgaaactggacacacta

SEQ ID NO: 163822 - DNA, 80 bp, synthetic construct
  source 1..80: mol_type = other DNA
aacccagctaataccatgggcaacttgtgtcttagagtggttaatgcataccaacctgttcaatttactttaacagtcag

SEQ ID NO: 163823 - DNA, 80 bp, synthetic construct
  source 1..80: mol_type = other DNA
aagttatcccagaggcaaaggataaagtggagtatctgagtaagttgaaacagttgggtatgttggaaaaccaaattaat

SEQ ID NO: 163824 - DNA, 80 bp, synthetic construct
  source 1..80: mol_type = other DNA
ttgtagtagccgaggttggcatttctaatcatgtcagaagaggacacagggaggaagcaccggcaaatgtaaaagtgaag

SEQ ID NO: 163825 - DNA, 80 bp, synthetic construct
  source 1..80: mol_type = other DNA
cagtagagaattatgtgaatgatgttcttaacgaagtgttagttgttccaaatatacaagaaagccatccaaccacatca

SEQ ID NO: 163826 - DNA, 80 bp, synthetic construct
  source 1..80: mol_type = other DNA
aaaagatagtcataaaacagtggcaaccaaactttatcagacgctgctacataatagggtacttacccctgatattctgt

SEQ ID NO: 163827 - DNA, 80 bp, synthetic construct
  source 1..80: mol_type = other DNA
atctcgtgcaacagaagtgacacgcccgttcgttgaagcaaaatagctctcatcattaaaatgataaccaactaaggcaa

SEQ ID NO: 163828 - DNA, 80 bp, synthetic construct
  source 1..80: mol_type = other DNA
cgtttccgggtccttccgggttcctcggcgccgttccagtgacgtcacgggcgccatcttaagtggctgtcgccgaggat

SEQ ID NO: 163829 - DNA, 80 bp, synthetic construct
  source 1..80: mol_type = other DNA
aattgcaagatcttgtgcttcgtttcggcttgtagtgacttcaccgtgcgcctgctgagagacacaccattcatagaaca

SEQ ID NO: 163830 - DNA, 80 bp, synthetic construct
  source 1..80: mol_type = other DNA
gggcagccggggttcctggcgctccggtggcagccgggcggccgccggtgggtccgctgggccgctgccccgctccggtt

SEQ ID NO: 163831 - DNA, 80 bp, synthetic construct
  source 1..80: mol_type = other DNA
caccttatctaccaatcatagaaacggatatacaatgacccctccctagactccaccccttgtacggaaatttcagatag

SEQ ID NO: 163832 - DNA, 80 bp, synthetic construct
  source 1..80: mol_type = other DNA
tcttttgctcctggttttgctcatgcagcgctaacatgatggcttgtaattctgtcttactaatgggattaatgcctgga

SEQ ID NO: 163833 - DNA, 80 bp, synthetic construct
  source 1..80: mol_type = other DNA
gggcgagagagccagtggttcgcggcttgttttcacggccacgcttcgttttgcggctgcggtgactttattgggcatat

SEQ ID NO: 163834 - DNA, 80 bp, synthetic construct
  source 1..80: mol_type = other DNA
aataaatgttaatgattttgttcttaactattgacccgcctgtcattctattaattaaacaagggaagctatgtttagct

SEQ ID NO: 163835 - DNA, 80 bp, synthetic construct
  source 1..80: mol_type = other DNA
ttgattatgtactatctggcaggtacatcgatgatcctgaatttaacatatcatatagtcttaaggaaaaggaaacaaaa

SEQ ID NO: 163836 - DNA, 80 bp, synthetic construct
  source 1..80: mol_type = other DNA
cactagttattcactcaaatcactatactaatactatcatagatgtaggaccaattactatggcaggtctcattaacctg

SEQ ID NO: 163837 - DNA, 80 bp, synthetic construct
  source 1..80: mol_type = other DNA
accactacaaaaagggggatgcccccttggaggacagacacttcatacaacacagagaaggcatcaaaattctgcagaat

SEQ ID NO: 163838 - DNA, 80 bp, synthetic construct
  source 1..80: mol_type = other DNA
cttctagaccacgaccaccatctgtaccacgtcgccctccccggtcgtgtacatcacatccttcaccacgaccggtggca

SEQ ID NO: 163839 - DNA, 80 bp, synthetic construct
  source 1..80: mol_type = other DNA
gattcacaagttctattagagaaacactagtatctgcatgtgatgtatcagacaaactcactggaaaaatcatcaagtgg

SEQ ID NO: 163840 - DNA, 80 bp, synthetic construct
  source 1..80: mol_type = other DNA
tagaccccgcccgactgcccagggacacaggccccgaactcatgtgggccccaagccttcgcaactcactgcgcgtgtcc

SEQ ID NO: 163841 - DNA, 80 bp, synthetic construct
  source 1..80: mol_type = other DNA
aggatggccaactaatcctgacagcaatgatggagatgctatatacaaaacagcaactttaatacaaaactggacagcaa

SEQ ID NO: 163842 - DNA, 80 bp, synthetic construct
  source 1..80: mol_type = other DNA
acagcggaggttggagcggtgcaaaaagcagtgtataatgctggtatgggagttggtgttggtaacttgactattttccc

SEQ ID NO: 163843 - DNA, 80 bp, synthetic construct
  source 1..80: mol_type = other DNA
agatactgaaaattacaaaaccacttttgttactacactgacaacaaaattaggtacaacatggggttcaagactaaata

SEQ ID NO: 163844 - DNA, 80 bp, synthetic construct
  source 1..80: mol_type = other DNA
attaagcaagcgttacaacacatcactaagtatagcaccagactacccaagagttaactggaatgctttaactaattatt

SEQ ID NO: 163845 - DNA, 80 bp, synthetic construct
  source 1..80: mol_type = other DNA
tgggggggcgacatgtattacccgcaggtcattaaaaacccctgcgcagacagcggactcgttcccggtaccagtagatt

SEQ ID NO: 163846 - DNA, 80 bp, synthetic construct
  source 1..80: mol_type = other DNA
aagtaggcggcaactatgttcatctgccattaagtcctcgaactttaaatgcatgggtaaaattggtagaagaaaagaag

SEQ ID NO: 163847 - DNA, 80 bp, synthetic construct
  source 1..80: mol_type = other DNA
actgcatggccaaacacaacaactggggtattgtaatattgccactatccaagttggactacaacccagatgccagcaca

SEQ ID NO: 163848 - DNA, 80 bp, synthetic construct
  source 1..80: mol_type = other DNA
aaacccgcgtgtgggtctcacgtcgtcttgaaacaccgtcttatatacatgaagatgccggacatgacgcgcccaagaca

SEQ ID NO: 163849 - DNA, 80 bp, synthetic construct
  source 1..80: mol_type = other DNA
gggtgacaacaaatgggattcagcttccaatccaagtgttttctatcaacctaaaagtggattcccccgcttcacaatac

SEQ ID NO: 163850 - DNA, 80 bp, synthetic construct
  source 1..80: mol_type = other DNA
agccttttttaaatggggtggcaatcctctgcctccacagcccatcgacgacccctgccaaaaagacacccacgaaatac

SEQ ID NO: 163851 - DNA, 80 bp, synthetic construct
  source 1..80: mol_type = other DNA
cgtacgtaggtatagccaatgcttattcacatttttacgacggctttgccagagttccactggagggtgaaaataccgat

SEQ ID NO: 163852 - DNA, 80 bp, synthetic construct
  source 1..80: mol_type = other DNA
cccccatcagactcagagtggcctggtaccccagtctcagacaccagcagcaggtcatagaggcaataacccagagcggg

SEQ ID NO: 163853 - DNA, 80 bp, synthetic construct
  source 1..80: mol_type = other DNA
aggtttgattcagaatacactattattgccacatcatcacaacctgatgaagcacaatactccaacaccctcacagtaca

SEQ ID NO: 163854 - DNA, 80 bp, synthetic construct
  source 1..80: mol_type = other DNA
gtttccgtgcgcatgcgcagtcggggcgaatttttggttgtcagggcgttgccacgcggattatgggatggtggctcgag

SEQ ID NO: 163855 - DNA, 80 bp, synthetic construct
  source 1..80: mol_type = other DNA
tgccccctccggcccggcgtctaaatatttcccgggggtccgaattcacgcgggacgttcgtgggctggttgaggaacac

SEQ ID NO: 163856 - DNA, 80 bp, synthetic construct
  source 1..80: mol_type = other DNA
cgattcactccaaagagaatcgaggccgtgggagaccagcgaagaagagagcgaagcagaagtccagcaagaagagacgg

SEQ ID NO: 163857 - DNA, 80 bp, synthetic construct
  source 1..80: mol_type = other DNA
gtccagcgagagcagcagcagctgctcagacagggaatcaaacacctcctgggagacgtgctccgactccggaaaggagt

SEQ ID NO: 163858 - DNA, 80 bp, synthetic construct
  source 1..80: mol_type = other DNA
gatgaactaggactcacctcagcccaagacgatggcccgttgggagtagaaaaaccaaattatttccttaactttagggc

SEQ ID NO: 163859 - DNA, 80 bp, synthetic construct
  source 1..80: mol_type = other DNA
tttaaacatcccacggtagactttatagtacaaataaacactcagcctcctttcttagacacaaacctcaccgcggccag

SEQ ID NO: 163860 - DNA, 80 bp, synthetic construct
  source 1..80: mol_type = other DNA
tatactaacacaatggcagccagcaaaaataagaaaatgtctagtaataggttatcttgctctagtactatgtgggaacg

SEQ ID NO: 163861 - DNA, 80 bp, synthetic construct
  source 1..80: mol_type = other DNA
gctggtggaggttacgttggggacggggacagtttgcggcgcggacagaggtgtgcgtggacggtggagagtttgcggcg

SEQ ID NO: 163862 - DNA, 80 bp, synthetic construct
  source 1..80: mol_type = other DNA
tccccggcatgagaggaatagactctttcagggttgaagccacgagtgtcgttacccgcactggtactacgcaaagccta

SEQ ID NO: 163863 - DNA, 80 bp, synthetic construct
  source 1..80: mol_type = other DNA
gaaaactatactactagcaatttcctcagacctccaggtagatagcgcagacgaacctggtcctgataccatacctacat

SEQ ID NO: 163864 - DNA, 80 bp, synthetic construct
  source 1..80: mol_type = other DNA
caaccttctgaatgttgccaaggctttgttaccatgtactgattgcccaaaaccagagttctataagcagtgttgtcctc

SEQ ID NO: 163865 - DNA, 80 bp, synthetic construct
  source 1..80: mol_type = other DNA
cacgaaacccgagctagaggagacaaccccatgatcagaccacgacgagctaggttcttagattgacacgacctgattcg

SEQ ID NO: 163866 - DNA, 80 bp, synthetic construct
  source 1..80: mol_type = other DNA
cagggccaaacagatggtgggcaccatcaaactcaagggcggcataaagccggtgcaacagagaaagacggtgcctttaa

SEQ ID NO: 163867 - DNA, 80 bp, synthetic construct
  source 1..80: mol_type = other DNA
ctgtgtttagaaaagtatggattggatttaccttacataacatttctgaaagatgaattaagagccccagagaagataaa

SEQ ID NO: 163868 - DNA, 80 bp, synthetic construct
  source 1..80: mol_type = other DNA
ctatgcaaaacatgctgacaggtactatccagtaacactagtagctcatgattggtatgaaattcaagaatctgaatatt

SEQ ID NO: 163869 - DNA, 80 bp, synthetic construct
  source 1..80: mol_type = other DNA
acggctgcaggaacttactgttgaagacctcccaaatcctccaactagcactccaaccgctcaggcttccacttgcatac

SEQ ID NO: 163870 - DNA, 80 bp, synthetic construct
  source 1..80: mol_type = other DNA
ctctattaatgggggactacgagaccaacaatggttcgaggcctgccttagatcccataacgcgtactgtgggtgtaata

SEQ ID NO: 163871 - DNA, 80 bp, synthetic construct
  source 1..80: mol_type = other DNA
ctacctatccctggatgcccaataccttcagagtgtcctttaagctaggctttcaataaaatgtgctcagtttcaacttg

SEQ ID NO: 163872 - DNA, 80 bp, synthetic construct
  source 1..80: mol_type = other DNA
tccccattacaatcaccatcgcaccgatggatgctgagtataatgggcttcgtctgggtggctaccagggcctcccgact

SEQ ID NO: 163873 - DNA, 80 bp, synthetic construct
  source 1..80: mol_type = other DNA
attcgcccagcagtaaacactgcatatatgtttcctccagagggtcccaggcctatcaccacttctcaggcgtgggcaga

SEQ ID NO: 163874 - DNA, 80 bp, synthetic construct
  source 1..80: mol_type = other DNA
cagccacccacaaataaaaaaacatacagaaaatataacaggttcaggagacaaatactttagaaaaaaagatggactgt

SEQ ID NO: 163875 - DNA, 80 bp, synthetic construct
  source 1..80: mol_type = other DNA
cacaccacctgggttaccggcttcgttttgctaggactcttgacgcttttcgccagcctgtttcgtgtgccgcaatccat

SEQ ID NO: 163876 - DNA, 80 bp, synthetic construct
  source 1..80: mol_type = other DNA
aagacctgggatactctcaatcatctaattgtaatatcctcttgtttatacagattaaatttaaaatctatagcacaaat

SEQ ID NO: 163877 - DNA, 80 bp, synthetic construct
  source 1..80: mol_type = other DNA
tttacactttggaatcggtacagtggagtcgaagtagtaaaggatggtggtggaagttgccagactgccttaaggatatg

SEQ ID NO: 163878 - DNA, 80 bp, synthetic construct
  source 1..80: mol_type = other DNA
acatttgttatcaccagtgaagggaaaagcacgagtggaaagacttcaactcccgcgattactcaccagataatgtacat

SEQ ID NO: 163879 - DNA, 80 bp, synthetic construct
  source 1..80: mol_type = other DNA
ggattacctgtgatgctaacaccaggttcagcgcagtttctgactactgatgatgcacaatccccatctgccttgcctta

SEQ ID NO: 163880 - DNA, 80 bp, synthetic construct
  source 1..80: mol_type = other DNA
gcaacaggtcctcagggggggtgcctgtgcctcgtctacctctgttccttctgctccagtgcctccgcctgagccgctta

SEQ ID NO: 163881 - DNA, 80 bp, synthetic construct
  source 1..80: mol_type = other DNA
gtccacgtgccattaagcccccgaaccctaaatgcctgggtaaaattagtggaggaaaagaaattcggggcagaagtagt

SEQ ID NO: 163882 - DNA, 80 bp, synthetic construct
  source 1..80: mol_type = other DNA
gggtcagggtggagtccagattcaaatcctctgtcatggactctagtgttgtggtcagttcgtccaaatggccacgaggg

SEQ ID NO: 163883 - DNA, 80 bp, synthetic construct
  source 1..80: mol_type = other DNA
aatggcagaggcggttccgaagaatctttgatttgatagaactgtgtggctctctgcaccacgtctggcaaaacatgctg

SEQ ID NO: 163884 - DNA, 80 bp, synthetic construct
  source 1..80: mol_type = other DNA
gattcacaaaaacaaacttaactaaagattggatagtggaagaggagtgtgaacttgattattttaggataaaatacctg

SEQ ID NO: 163885 - DNA, 80 bp, synthetic construct
  source 1..80: mol_type = other DNA
taataactagttttcaagagcaaggcacagccctagcacaagatatgccagtgttaacacaccaaatcatgtatgtgccg

SEQ ID NO: 163886 - DNA, 80 bp, synthetic construct
  source 1..80: mol_type = other DNA
tgaaggacaccggtggtgacggggatgtggattgcggcaccggagaacttttgcgggaccgggctgagggacggtgctgt

SEQ ID NO: 163887 - DNA, 80 bp, synthetic construct
  source 1..80: mol_type = other DNA
gaggagagcgcgccgcccgagacgagtaccgcgacgacgatatcgacgacctgctcgccgctatcgagcaagacgagtaa

SEQ ID NO: 163888 - DNA, 80 bp, synthetic construct
  source 1..80: mol_type = other DNA
caggacgggacttacggttacacaactttaaatgctatgggcaagttgtttgtcagacatgtgaacaagagtagtcccca

SEQ ID NO: 163889 - DNA, 80 bp, synthetic construct
  source 1..80: mol_type = other DNA
tggagacgccgcagacgcctaccgagaagaagacctagacgccctgttcgccgccgtcgacagagacgagtaaggaggcg

SEQ ID NO: 163890 - DNA, 80 bp, synthetic construct
  source 1..80: mol_type = other DNA
gcccccagggattgatgtaccaaagcaaaaggaagggagagagtggaacgctgcctcaaaccctagtgtgttctttcaac

SEQ ID NO: 163891 - DNA, 80 bp, synthetic construct
  source 1..80: mol_type = other DNA
aagtgctctaaggtagtagtctctacatgtacaaggatgatggaaacacaaacctctacttggtttgggtttaatggaac

SEQ ID NO: 163892 - DNA, 80 bp, synthetic construct
  source 1..80: mol_type = other DNA
caactagtgccggctacccttacgttaccatggggaaaaggaagagagaaattctgaacaaagaaacacgtgataccaag

SEQ ID NO: 163893 - DNA, 80 bp, synthetic construct
  source 1..80: mol_type = other DNA
tactattggaaactccactatcaccacacaggatgctcttcacacagtactggcttatggtgaatggcccagttatttgt

SEQ ID NO: 163894 - DNA, 80 bp, synthetic construct
  source 1..80: mol_type = other DNA
ggttttacacactggacacagtcatgtggggcaaagagtccaagggatggtggtggaaactaccagatgctctcagagac

SEQ ID NO: 163895 - DNA, 80 bp, synthetic construct
  source 1..80: mol_type = other DNA
ttttattacgggttctgtaagagcagcgagctactcaagctctccaccaaccagccgcccatcttccaaatttattacct

SEQ ID NO: 163896 - DNA, 80 bp, synthetic construct
  source 1..80: mol_type = other DNA
cactataggttcgtcaaggaagattcatacacagatgcaggatttataacttgctggtaccaaactagtattgtcactcc

SEQ ID NO: 163897 - DNA, 80 bp, synthetic construct
  source 1..80: mol_type = other DNA
tttcaaaaaaaaagaggaagtgtgacgtagcggcgggggggcggcgcgcttcgcgcgccgcccaccagggtgcgctgcgc

SEQ ID NO: 163898 - DNA, 80 bp, synthetic construct
  source 1..80: mol_type = other DNA
gcagtatctaccttttctcctcctacctcttttcctggcacaaatgtgactaaaacttcaatagagtcatttaacacctg

SEQ ID NO: 163899 - DNA, 80 bp, synthetic construct
  source 1..80: mol_type = other DNA
tttagaactagtaaggtatctggggggcagctttaccctatacagacatccaaaatgtgactttatattcagatacaaca

SEQ ID NO: 163900 - DNA, 80 bp, synthetic construct
  source 1..80: mol_type = other DNA
gccaaggtcggtccggctccctgaaggcacccgagacggccgcggcggccgttagggtcgagggcttggccacgggagct

SEQ ID NO: 163901 - DNA, 80 bp, synthetic construct
  source 1..80: mol_type = other DNA
agcgccgccggacctgctcgtcagcagcgagctacgcagacggaatatctggaggagagttacgtgtgtcacaggggagc

SEQ ID NO: 163902 - DNA, 80 bp, synthetic construct
  source 1..80: mol_type = other DNA
attctagcaacttgctcagggtgtcctgatttatctgtgcgtatgctcagagacacacccctaattagtcaggcaccgaa

SEQ ID NO: 163903 - DNA, 80 bp, synthetic construct
  source 1..80: mol_type = other DNA
aaatactagcatatggtgatgatgtaatcttttcatacccttatgaccttgatatgaaagaacttgctagtgagggcact

SEQ ID NO: 163904 - DNA, 80 bp, synthetic construct
  source 1..80: mol_type = other DNA
gtgtgactttcatacccccaatggctgatctaccagataagggaaagccctttgactctagatttgtattgtgtagtact

SEQ ID NO: 163905 - DNA, 80 bp, synthetic construct
  source 1..80: mol_type = other DNA
gtgacactacgcacattgaacagaaggcattagctcagggtctggggcaaatgttagagaacatgattgacaacacagtt

SEQ ID NO: 163906 - DNA, 80 bp, synthetic construct
  source 1..80: mol_type = other DNA
gtcaagtggagactattcttgaggttaacaacgtacccaccaatgataccagtttgatggaaaggctacgatttccagtg

SEQ ID NO: 163907 - DNA, 80 bp, synthetic construct
  source 1..80: mol_type = other DNA
ttagatagagtgggtgtgtgctcttgtttaattacaccaagatcaccaccctctatccatatcccacaattgataaacct

SEQ ID NO: 163908 - DNA, 80 bp, synthetic construct
  source 1..80: mol_type = other DNA
attcaacagatttgcactacacatcatatctttaaagatcagatttatgttgtagaaggtggcatgccctctggctgctc

SEQ ID NO: 163909 - DNA, 80 bp, synthetic construct
  source 1..80: mol_type = other DNA
aggagtcaggcccgcgccgcttggaactggtcgcgtccgtgttcgagcacctgacggtggagtgcgtcaacgacatcctg

SEQ ID NO: 163910 - DNA, 80 bp, synthetic construct
  source 1..80: mol_type = other DNA
gtacagacaccccacaactgactttatactgacttatgacaacaatccccccatgaaaaacactatatacagctctccta

SEQ ID NO: 163911 - DNA, 80 bp, synthetic construct
  source 1..80: mol_type = other DNA
tcaggaacatgtagtagaccccaaatgtgacacattcaaacaaagaaatccagattcggcaactactaataaatacctac

SEQ ID NO: 163912 - DNA, 80 bp, synthetic construct
  source 1..80: mol_type = other DNA
caaagcaaggtcacgggatgttgtcacaattctttgcatactttactggagaactaaacattcatgtgctgtacttgtgt

SEQ ID NO: 163913 - DNA, 80 bp, synthetic construct
  source 1..80: mol_type = other DNA
atatgaaacctaaacatgtcagagtttggtgcccgagacctccccgagtggtgaagtattacgggccaggagtcgactac

SEQ ID NO: 163914 - DNA, 80 bp, synthetic construct
  source 1..80: mol_type = other DNA
aaataacaaattaaagcaattttttgataaagctttacccacaacaggcacaaaaaacacagagataaatgtactaaaca

SEQ ID NO: 163915 - DNA, 80 bp, synthetic construct
  source 1..80: mol_type = other DNA
agtgactacgcaaagcctagtaacatcttgaagaaattatggttggtcgttccgctaaaccccatagtagacctggcaga

SEQ ID NO: 163916 - DNA, 80 bp, synthetic construct
  source 1..80: mol_type = other DNA
tcaaggggcaattcgggctcgggactggccgggctatgggcaaggctcttaaaatatgcgcttttccagactgtaccgtt

SEQ ID NO: 163917 - DNA, 80 bp, synthetic construct
  source 1..80: mol_type = other DNA
tcactgtgaaacgccaactccgtgccaactggcacggcggacaggcctttgacgtatttgaagccaggcgcgctcttgat

SEQ ID NO: 163918 - DNA, 80 bp, synthetic construct
  source 1..80: mol_type = other DNA
cgcactatttatccctacagcggctgccgagtcacgtccgccggcgcccatcggccgcggcgatctcctagtaacactcg

SEQ ID NO: 163919 - DNA, 80 bp, synthetic construct
  source 1..80: mol_type = other DNA
gggcaacatactgacaggcccatcactacacccagcagaagccatgctgagcaaaaacaaaatactaatacccagtctgc

SEQ ID NO: 163920 - DNA, 80 bp, synthetic construct
  source 1..80: mol_type = other DNA
gactcccaggttcaggtccagtagcaggagaccctcgctgtgtggcgcccggtgccagaaggccggcctcgcccgtccca

SEQ ID NO: 163921 - DNA, 80 bp, synthetic construct
  source 1..80: mol_type = other DNA
cagtaaatgagaaagttgggaatgttggaaatgagattggtggcaatttgctaaccagggttgctgatgatgcatctagt

SEQ ID NO: 163922 - DNA, 80 bp, synthetic construct
  source 1..80: mol_type = other DNA
aaagcctacctcccaagactgggagacagagtacataacctgtaagatatttaacaggccccccagaacacacctcacag

SEQ ID NO: 163923 - DNA, 80 bp, synthetic construct
  source 1..80: mol_type = other DNA
gtttaataacaaattatccattgtggtgtatggtatatggctatattgactactgtgaaaaagtactatcacacacaaca

SEQ ID NO: 163924 - DNA, 80 bp, synthetic construct
  source 1..80: mol_type = other DNA
gtgaagtattaaactacttcactaattggtcaggtagcattactttgaccttcatgtgtgtgtgtgattcattttctaca

SEQ ID NO: 163925 - DNA, 80 bp, synthetic construct
  source 1..80: mol_type = other DNA
aggctccaacactacgcccagtgatagtacaaggaccaaatacagaatttgctttgtccttgctcagaaagaacatagtt

SEQ ID NO: 163926 - DNA, 80 bp, synthetic construct
  source 1..80: mol_type = other DNA
ccattaaagaccagcccctctgggcagcctttaatggatacagtgaattctgtgcaaaaagcacaggagacggagcagtt

SEQ ID NO: 163927 - DNA, 80 bp, synthetic construct
  source 1..80: mol_type = other DNA
aaattagaaagaaatacttaactgctaccagaaaagcactgcctgcgctactaacactaggagacgaacttctagaatac

SEQ ID NO: 163928 - DNA, 80 bp, synthetic construct
  source 1..80: mol_type = other DNA
aggagacctcggcgccgcagggggtgggctcgtagatatagacttagaaggaggcgaaggaggagaagaaggagaaagct

SEQ ID NO: 163929 - DNA, 80 bp, synthetic construct
  source 1..80: mol_type = other DNA
tagtgtaaatgatacagtagcctttagaatggtttatggtaacctattttcagcttttcacaaaaatcctggaatcataa

SEQ ID NO: 163930 - DNA, 80 bp, synthetic construct
  source 1..80: mol_type = other DNA
agaccccttcagaaaagccaatgatgatgtcaccatagtccagtacatggatgacatccttgtggcaagtgacagaagcg

SEQ ID NO: 163931 - DNA, 80 bp, synthetic construct
  source 1..80: mol_type = other DNA
ctccaggctgccctgatcctctcggtggcctacctgctactccagggaggctcctcacaccagcagcgccccctccctgc

SEQ ID NO: 163932 - DNA, 80 bp, synthetic construct
  source 1..80: mol_type = other DNA
caggcaagggcttgagctcactctcttgtgaagggcaacaatacacgcagggtcaatttatgaataccccatggagaaac

SEQ ID NO: 163933 - DNA, 80 bp, synthetic construct
  source 1..80: mol_type = other DNA
agtacaacacaaaggcagatacacaactaatagttgcaggagggtcctgcaaagcacacatagaaaacatacccctgtgg

SEQ ID NO: 163934 - DNA, 80 bp, synthetic construct
  source 1..80: mol_type = other DNA
tactcgaaatggcggtatattccttccgggtcaaaggtcgccgctacgtcataagtcacgtgggggtggtcccactgtaa

SEQ ID NO: 163935 - DNA, 80 bp, synthetic construct
  source 1..80: mol_type = other DNA
gctgcaaagaaaaaaccacctatgagtatttggaggcctccactgcacaatgtcccgggactcgaacacctctggtacga

SEQ ID NO: 163936 - DNA, 80 bp, synthetic construct
  source 1..80: mol_type = other DNA
ggacagcaactcaagtacgccgaccgacccaattttctgcctctcactctccccagctagtgaccaaagactacaataca

SEQ ID NO: 163937 - DNA, 80 bp, synthetic construct
  source 1..80: mol_type = other DNA
ctagatcaaagcactaccctgtcactgtgacctctcctacatttcagtggatggagaaaaatgacttttatccagctagg

SEQ ID NO: 163938 - DNA, 80 bp, synthetic construct
  source 1..80: mol_type = other DNA
gcaattgagagcgcagttgctagggtagcggacacaattggcagtggtccgacgaactcccaagcagttccagcactgac

SEQ ID NO: 163939 - DNA, 80 bp, synthetic construct
  source 1..80: mol_type = other DNA
gggtggtcgtcagggtgggcgccccaagactttttcaggacaagtggtacccccagtcagacctatgtgacacagttctg

SEQ ID NO: 163940 - DNA, 80 bp, synthetic construct
  source 1..80: mol_type = other DNA
ctcactacatagtcttcctgattaaaaaaattgtgcaaaaaacacggctctgaaaaattgtctttgatgaaccgcgccgt

SEQ ID NO: 163941 - DNA, 80 bp, synthetic construct
  source 1..80: mol_type = other DNA
cttgttgcaaaccaagaagtaccccagattctagaggttggtgatgtagtatcatatggaaatatactactaagtggaaa

SEQ ID NO: 163942 - DNA, 80 bp, synthetic construct
  source 1..80: mol_type = other DNA
ggtggacccgtggcagaattcgcagaagatggcctagacggacttatcgccgccctcgacgacgaacagtaaggaggcgc

SEQ ID NO: 163943 - DNA, 80 bp, synthetic construct
  source 1..80: mol_type = other DNA
ggagcgcagggctcagaaacaattcctcactgtaactgtacttcaggggtctactactctcagtactacaacaaatacta

SEQ ID NO: 163944 - DNA, 80 bp, synthetic construct
  source 1..80: mol_type = other DNA
tcttatcccgcgtcctacggcgcccccgtcgtgggttacgaccagttggcggcacgtcactttgcggactacgtggatcc

SEQ ID NO: 163945 - DNA, 80 bp, synthetic construct
  source 1..80: mol_type = other DNA
atttgtcggtatcggctcagcatactcacacttctatgatggattttccatagttccacatgataacatcagtgccggcg

SEQ ID NO: 163946 - DNA, 80 bp, synthetic construct
  source 1..80: mol_type = other DNA
taagggtagcgtgacatccagcccctgtgcccttactactgccgttatattggtagaattacagttatcccactttatgt

SEQ ID NO: 163947 - DNA, 80 bp, synthetic construct
  source 1..80: mol_type = other DNA
cggcctgagactggcaggccaccaaggtttgcctgtaatgaacacacctgggagcaaccagttcttgacatccgatgact

SEQ ID NO: 163948 - DNA, 80 bp, synthetic construct
  source 1..80: mol_type = other DNA
ttgatacatataagggcattgatttagacaaattgagaataatagcatatggagatgatatcatagcttcatatcctttt

SEQ ID NO: 163949 - DNA, 80 bp, synthetic construct
  source 1..80: mol_type = other DNA
atttagatcatactgggtataatgaccctgggaaaaatcattcagagtggaaaattacactcaaagagatggcccagatc

SEQ ID NO: 163950 - DNA, 80 bp, synthetic construct
  source 1..80: mol_type = other DNA
agtgggctatggagccgctttgctaaagaaatattttgcaacagcccaaggagagataacaactagaagatccgtcaagg

SEQ ID NO: 163951 - DNA, 80 bp, synthetic construct
  source 1..80: mol_type = other DNA
aaagtaactgtgaaaaactatatgaagctagacaggctcacacacttactggaagcaaatacttaaactggaaaactgga

SEQ ID NO: 163952 - DNA, 80 bp, synthetic construct
  source 1..80: mol_type = other DNA
ggaatagaattaggtagcaattacaccccaaaaatagtaggaggaataggaggattcataaatactaaagagtacaaaaa

SEQ ID NO: 163953 - DNA, 80 bp, synthetic construct
  source 1..80: mol_type = other DNA
atattcgaggagtcgcgggcagctcaacagcacccagaacagccacggcagagttcggagcgactcccggcggcacatga

SEQ ID NO: 163954 - DNA, 80 bp, synthetic construct
  source 1..80: mol_type = other DNA
gaggactacccagaacagggcagataccctttcggagggtccatgagcaccacaacgtggtccctcagggtgctgtttga

SEQ ID NO: 163955 - DNA, 80 bp, synthetic construct
  source 1..80: mol_type = other DNA
gagggcctgtttgatttctccaagagaagcatcgcccactccaaaaaccgacacgagtgcgcgcttctgggtcacagaca

SEQ ID NO: 163956 - DNA, 80 bp, synthetic construct
  source 1..80: mol_type = other DNA
attcatctaggaaatttctaccattatatgcttctgaaaataagcgtattaatgatcttcttaaaaggagtgagatggta

SEQ ID NO: 163957 - DNA, 80 bp, synthetic construct
  source 1..80: mol_type = other DNA
aaagaagtattaccctgtatctttcacaggaccgaccttcaggtacatggaggcgaatgaatacttccctgctcgttatc

SEQ ID NO: 163958 - DNA, 80 bp, synthetic construct
  source 1..80: mol_type = other DNA
ttgtatctagttatctcacacagcttggtaatgcatttggtgagggcttcacacaaaacatcaaggacagttttgctagc

SEQ ID NO: 163959 - DNA, 80 bp, synthetic construct
  source 1..80: mol_type = other DNA
ccatgggttacaaaatggactggttatggggtggctctcccctgccttcacaggcaatcgacgacccctgccagaagccc

SEQ ID NO: 163960 - DNA, 80 bp, synthetic construct
  source 1..80: mol_type = other DNA
gcaagctgtccttctttgaccacgtgtctatctgtgccctgggtcgtcggcgcggcaccacggcagtctacggtacagac

SEQ ID NO: 163961 - DNA, 80 bp, synthetic construct
  source 1..80: mol_type = other DNA
acaagacgcagaaaagaggaaagaacagacacacgcagaagctcgcggtcgcaagggaggggggggggagtcgcaggccc

SEQ ID NO: 163962 - DNA, 80 bp, synthetic construct
  source 1..80: mol_type = other DNA
gttttgtccttgtgtcatttaatgtggcataacggacgtgatgcatataaaggatttgtggagaaaatacgcagtgttag

SEQ ID NO: 163963 - DNA, 80 bp, synthetic construct
  source 1..80: mol_type = other DNA
cagtacggttaattccaaccaggagcgcggtagccagaccgtaacgggcattttgagtccctgacggttgtgtggtacaa

SEQ ID NO: 163964 - DNA, 80 bp, synthetic construct
  source 1..80: mol_type = other DNA
tgggtgacagcgaagccaccgcagaagatcagccgacgcaaccggatgttgccacatgccgtttttacaccttagactca

SEQ ID NO: 163965 - DNA, 80 bp, synthetic construct
  source 1..80: mol_type = other DNA
ccctgcccattacagtaaccattgcccctgataagtcagagttttcaggtgcgatgaaatcacaacaacagggcctccct

SEQ ID NO: 163966 - DNA, 80 bp, synthetic construct
  source 1..80: mol_type = other DNA
gtccactgatatgtggtaaagccttggtgctacaaaacaagaggacaaaagctagttactccatcaacactgttgttcaa

SEQ ID NO: 163967 - DNA, 80 bp, synthetic construct
  source 1..80: mol_type = other DNA
acaattatggcaaatatcataagtattgctggtataatttatgtaatatacaaattgttttgcactttgcaaggaccata

SEQ ID NO: 163968 - DNA, 80 bp, synthetic construct
  source 1..80: mol_type = other DNA
gcggcggcgccgacggtgatggtgggtccgacggcgatggcgggtccggcggcgtcgtggaccgtgccgcgcgccatgct

SEQ ID NO: 163969 - DNA, 80 bp, synthetic construct
  source 1..80: mol_type = other DNA
acatggtgttattggcatcatcacagccgggggtgacaatttagttgctttcactgaccttagaccttactcctgcttat

SEQ ID NO: 163970 - DNA, 80 bp, synthetic construct
  source 1..80: mol_type = other DNA
atgaagagtattacaatgtactaggaacttccgtattagaccaacggacaagttacacacagcaaatacaaaaatttgaa

SEQ ID NO: 163971 - DNA, 80 bp, synthetic construct
  source 1..80: mol_type = other DNA
tccttacaaaacaaacagatccagcagaagaaatctttgcaatcccagtagatgtggcctcccaaccattagccacaaca

SEQ ID NO: 163972 - DNA, 80 bp, synthetic construct
  source 1..80: mol_type = other DNA
tgcaaccagtaaacgacggggggacttggccaccttatcagaccagagtccatatggccaccaaacccagaagcaaatta

SEQ ID NO: 163973 - DNA, 80 bp, synthetic construct
  source 1..80: mol_type = other DNA
gacggtggcctttcgcggcggacacggagagttgcgggatggcgggctgttgcgtggcgaggacaggagactcttgcggc

SEQ ID NO: 163974 - DNA, 80 bp, synthetic construct
  source 1..80: mol_type = other DNA
ctgctctagggctataagttccccatagatttttctatacatggaataggcctccttggagatggcgttatttcccaggt

SEQ ID NO: 163975 - DNA, 80 bp, synthetic construct
  source 1..80: mol_type = other DNA
ttactcgatacccagaagaatttgggcacaagtcaggcctaccagaagatgagtggaaggcgaaactgaaagcaagaggg

SEQ ID NO: 163976 - DNA, 80 bp, synthetic construct
  source 1..80: mol_type = other DNA
acctaagcagaccccctcactacccctactttcccacctcctgcaaggtctccttccgcctgggattcaaaccttaaata

SEQ ID NO: 163977 - DNA, 80 bp, synthetic construct
  source 1..80: mol_type = other DNA
ctatgtacattaatacaaaatcacaaatacataagagtcctgtgtatggtgctgttgagggttggatgggaccagctgtg

SEQ ID NO: 163978 - DNA, 80 bp, synthetic construct
  source 1..80: mol_type = other DNA
gggagcagcaagagacccaagaaagacaccaacccaagcccccaaggagaagagcaaaaagaaggctcgcgtttcagagt

SEQ ID NO: 163979 - DNA, 80 bp, synthetic construct
  source 1..80: mol_type = other DNA
acaaacagatggcacaaaatggtacaattggcaatatacatacaataaacttatgaagccaatttactatgcagcttcaa

SEQ ID NO: 163980 - DNA, 80 bp, synthetic construct
  source 1..80: mol_type = other DNA
gtgtattgcttctatgtgggagggatattaaacaggcgcacaaaggtaccgtgataccagtgtgcggctgttttatatcc

SEQ ID NO: 163981 - DNA, 80 bp, synthetic construct
  source 1..80: mol_type = other DNA
atgcagagatgggcgcagctaaaataaaccaaaagataaacagggagcacccaagcaacggtgaggttggcaataccttc

SEQ ID NO: 163982 - DNA, 80 bp, synthetic construct
  source 1..80: mol_type = other DNA
ctaaagatatgggtttccacaccattaatactcctagcaagacaaaacttcaacccagtgtgttccatgatattttcccc

SEQ ID NO: 163983 - DNA, 80 bp, synthetic construct
  source 1..80: mol_type = other DNA
atacggaattgtcattggaagaatgtgtgtatggtgcagaaggcttggaagcccttgacttaaataccagtgcaggatat

SEQ ID NO: 163984 - DNA, 80 bp, synthetic construct
  source 1..80: mol_type = other DNA
tttgagtgggaaactaaatttactaacaatgcaacgcacataaaccctacatggcaaccaggtcactttaaacagtacga

SEQ ID NO: 163985 - DNA, 80 bp, synthetic construct
  source 1..80: mol_type = other DNA
gaaaggctttgatattgcaaaacaaaagaacaaaggctagctattctattaatactgtagtccagcagctgcgtcaggaa

SEQ ID NO: 163986 - DNA, 80 bp, synthetic construct
  source 1..80: mol_type = other DNA
cagctagcttctgccctgctaagcttaggagcttcccgaagaagcattcctatctggatcccactatacgatcagcagta

SEQ ID NO: 163987 - DNA, 80 bp, synthetic construct
  source 1..80: mol_type = other DNA
aacaaatcgttttcgtaagcataattagacctgtgtgtatgttgcgtaaagtgtgttaaaacaatgtaacatgaaacgtt

SEQ ID NO: 163988 - DNA, 80 bp, synthetic construct
  source 1..80: mol_type = other DNA
tgaccttgtaaaaaactttaataaaggccagcattaattcacttgaggtgtctgtttattatatattaaacttatataaa

SEQ ID NO: 163989 - DNA, 80 bp, synthetic construct
  source 1..80: mol_type = other DNA
actctctgtttctgtacaatggggccaggacgctgctgtccaccctggtcaagtaccacgacctggaggagtgggctgcc

SEQ ID NO: 163990 - DNA, 80 bp, synthetic construct
  source 1..80: mol_type = other DNA
ctaatgcgtacagccactttcatgacgggtttgccagagtgcccataaaagatgaagataccgatgctggtgatacttat

SEQ ID NO: 163991 - DNA, 80 bp, synthetic construct
  source 1..80: mol_type = other DNA
tcgtgtcaaaggtcaccgcttgacctgcttgcacataatggcgcacttccgcttccgggtcaggcgccatatttggtcac

SEQ ID NO: 163992 - DNA, 80 bp, synthetic construct
  source 1..80: mol_type = other DNA
acaccaagtgataccatgcagactaggcatgtgcacaattaccataccaggtcagaatcatcaatagagaactttcttag

SEQ ID NO: 163993 - DNA, 80 bp, synthetic construct
  source 1..80: mol_type = other DNA
atgatgcttagaacgtggagattattacagatggtactgcttgccacgtactgttattatgtttttgcgaattgttcaat

SEQ ID NO: 163994 - DNA, 80 bp, synthetic construct
  source 1..80: mol_type = other DNA
ttagagcaaatgtcacaaaaatttgctccattgtacgctgtagagtccaagagaattagaacactcaaaaacaagatgac

SEQ ID NO: 163995 - DNA, 80 bp, synthetic construct
  source 1..80: mol_type = other DNA
cctgggaagaaaggaaaagccttcaggcacccttatgttcttgattgtggtgtgccattgagtcaagccctcgtgtttcc

SEQ ID NO: 163996 - DNA, 80 bp, synthetic construct
  source 1..80: mol_type = other DNA
taaaagaattatacaaagaattgttcacaaaagccacatcaggacactactggcagacattcataaccaacagcatggtc

SEQ ID NO: 163997 - DNA, 80 bp, synthetic construct
  source 1..80: mol_type = other DNA
gcgtcttcaacttcaccattcctaattcactttccgacctcatcaaggtaccaaatttccgccacattgcttcgagtggc

SEQ ID NO: 163998 - DNA, 80 bp, synthetic construct
  source 1..80: mol_type = other DNA
cgcgaacaggccgtggaagacccctgtaaaaagggcacattcgcagtacccggaaccagtggcatcgctcgcatactaca

SEQ ID NO: 163999 - DNA, 80 bp, synthetic construct
  source 1..80: mol_type = other DNA
ccccgtgggaccttagaggtggagcaacgtctaaagtggtaataacaccaggcgaggctgggcaaaggggtcctacgggc

SEQ ID NO: 164000 - DNA, 80 bp, synthetic construct
  source 1..80: mol_type = other DNA
acacggctttgttctctaaatataaaggtaatgtcaaatgtgaaatgtctgaacacatgaaggttgccatatcccattac

SEQ ID NO: 164001 - DNA, 80 bp, synthetic construct
  source 1..80: mol_type = other DNA
taagagacgcagacgcaggcgaccgtactttaaacccaaaaaaaaactagttctgacccagtggaacccccaaaccgtca

SEQ ID NO: 164002 - DNA, 80 bp, synthetic construct
  source 1..80: mol_type = other DNA
ttgttgcctttgcagatatcagagacctttatgtggaagaagaggctatggaacagggcatcacccagtacatggaatcc

SEQ ID NO: 164003 - DNA, 80 bp, synthetic construct
  source 1..80: mol_type = other DNA
ggcctggagatggtggtggagaaggcgctggaagccgagaaggcggccagcgtggaccaagtaccgcagacgccggtgga

SEQ ID NO: 164004 - DNA, 80 bp, synthetic construct
  source 1..80: mol_type = other DNA
aacaattggagtatagtgattatacccatatctaaattagagactgagggtgggacaacaattgtgcccataactttatc

SEQ ID NO: 164005 - DNA, 80 bp, synthetic construct
  source 1..80: mol_type = other DNA
tactgcatacaaatattataacttaacattcttaggacaaactatgacaaatgacccaggcataccactaagtaacaaca

SEQ ID NO: 164006 - DNA, 80 bp, synthetic construct
  source 1..80: mol_type = other DNA
ccaaaaggcaaaaaaagatacagggttacaataaggccccccaacatgtttgctgacaagtggtacactcaacaggacct

SEQ ID NO: 164007 - DNA, 80 bp, synthetic construct
  source 1..80: mol_type = other DNA
gcagcaccagtgttggtaaagcccttatcattccaccatactccgttctcaggcgtagatggctggatttgttctgaatc

SEQ ID NO: 164008 - DNA, 80 bp, synthetic construct
  source 1..80: mol_type = other DNA
gacaaatccacatgcataaacgcaaacaactgctcaggaataggggaggaaaacatgctcacgtgtcagttcaatatgac

SEQ ID NO: 164009 - DNA, 80 bp, synthetic construct
  source 1..80: mol_type = other DNA
tctggcctcagttctacacgcctgcgcatgtgtgactcgcttctccccggtctgggtggtcaaggcccaggacaactcta

SEQ ID NO: 164010 - DNA, 80 bp, synthetic construct
  source 1..80: mol_type = other DNA
gctcatgcagcgtctcacgggcggtcgcttcgccacgttgccgctcgttacctacaatcgccgtaacgtggtgttcaagg

SEQ ID NO: 164011 - DNA, 80 bp, synthetic construct
  source 1..80: mol_type = other DNA
ccacacaagaccacgaaacagtaggcctggtttgtgtaatatgcccttacaccagacccagactatacaacaatgaaaag

SEQ ID NO: 164012 - DNA, 80 bp, synthetic construct
  source 1..80: mol_type = other DNA
aataaatttatcaagtttagtgcaactaagaaggaaaatagagctgtttacatatgtaagatttgattcagaatacacta

SEQ ID NO: 164013 - DNA, 80 bp, synthetic construct
  source 1..80: mol_type = other DNA
aaaactcattataataacaacctatttaacaaaactgaactatacaacacctttcaaaccatagctcagcttaaagagac

SEQ ID NO: 164014 - DNA, 80 bp, synthetic construct
  source 1..80: mol_type = other DNA
aaaaatcactatgataacaatttatttaatcaagtacaatactacaacacattccagaccatagctcaacttaaagatac

SEQ ID NO: 164015 - DNA, 80 bp, synthetic construct
  source 1..80: mol_type = other DNA
ggtgtttctttttccttgtgttctgcagatagttccacggacagcgacggcaagtccataagcaccggtgtgcaagtggt

SEQ ID NO: 164016 - DNA, 80 bp, synthetic construct
  source 1..80: mol_type = other DNA
tgcaggtgtgccaccggcgtggtgaacagcagcttgtcgcgctcataagccagcggttcggccgccacgtacaagcggat

SEQ ID NO: 164017 - DNA, 80 bp, synthetic construct
  source 1..80: mol_type = other DNA
aagatcctagattagaagtagactttaacacagcccttttttcaaagtacaaaggcaatgcagattgtagtctgaatgag

SEQ ID NO: 164018 - DNA, 80 bp, synthetic construct
  source 1..80: mol_type = other DNA
tcaccctggtgaacagggtatagacctctctaaaactgacccaaaaggtcctgtgagggatcccctttacatgatgaatg

SEQ ID NO: 164019 - DNA, 80 bp, synthetic construct
  source 1..80: mol_type = other DNA
tactgggataggccacccagaacatactacacagacaggcctacctacccttggatgcccaaggcaccccctcaatgcaa

SEQ ID NO: 164020 - DNA, 80 bp, synthetic construct
  source 1..80: mol_type = other DNA
ggtacgtggtgctgatgtcgcgttcctccttggtcacgatagggttgttgatgataactgacgtgcacgatttgccgctg

SEQ ID NO: 164021 - DNA, 80 bp, synthetic construct
  source 1..80: mol_type = other DNA
catccacattccaggagaagtacgctcattactagaactgtgtagggtggaaaccatactggaagtgaacaacacgaccg

SEQ ID NO: 164022 - DNA, 80 bp, synthetic construct
  source 1..80: mol_type = other DNA
ctttcgactgtcatttacaataaaatgaaaccttttattcttgattgcctcttgtgttcttgccgcccaggtaccttcct

SEQ ID NO: 164023 - DNA, 80 bp, synthetic construct
  source 1..80: mol_type = other DNA
atcacgtggtagcagctcttgaccaggtccttgtaggtgatgttgttcttggccatgctgttcataaactggaccacttc

SEQ ID NO: 164024 - DNA, 80 bp, synthetic construct
  source 1..80: mol_type = other DNA
ctgagggttgagatttcagtacaaacagacatggatgcacttctctttaacatcccgctagacattcaactagatggacc

SEQ ID NO: 164025 - DNA, 80 bp, synthetic construct
  source 1..80: mol_type = other DNA
ttttgcaccaaccaacctgactgacaaaagagaaagcataacatacgtgcccgataccatccgcccagatgttcgtacaa

SEQ ID NO: 164026 - DNA, 80 bp, synthetic construct
  source 1..80: mol_type = other DNA
ccgggcgctgcgtactatggggcaacatccattaatgattttggtatcttagcagtaagggttgtgaacgagtacaatcc

SEQ ID NO: 164027 - DNA, 80 bp, synthetic construct
  source 1..80: mol_type = other DNA
ttgaagcaaagatacgcagtgttagcgctggacgtgcactgtatatccctccttatgaactcctaagacatgagtggtat

SEQ ID NO: 164028 - DNA, 80 bp, synthetic construct
  source 1..80: mol_type = other DNA
aaaatgggatataaaggtataaatcttagtctgtctcccaataatgtactatcatctaaagactataccttttcatggta

SEQ ID NO: 164029 - DNA, 80 bp, synthetic construct
  source 1..80: mol_type = other DNA
aaggctcttaaaaatgcacttttctcgaataagcagaaagaaaaggaaagtgctactgctttgcgtgccagcagctaaga

SEQ ID NO: 164030 - DNA, 80 bp, synthetic construct
  source 1..80: mol_type = other DNA
gggcgcgcggcgtgtgtgtatttcacctcgtataaaacgttggacactaaaccagagaacaggtatgctagctggaccat

SEQ ID NO: 164031 - DNA, 80 bp, synthetic construct
  source 1..80: mol_type = other DNA
aggagacacggccgtgcagtacaacaccagagtagtagtaaggtgtccctacacagaacctatgcttatagaccactcag

SEQ ID NO: 164032 - DNA, 80 bp, synthetic construct
  source 1..80: mol_type = other DNA
ctaaacctaccaccttattcatacttgcatcacaggtggatagacaattttatttgattgaacaatatagtatactattt

SEQ ID NO: 164033 - DNA, 80 bp, synthetic construct
  source 1..80: mol_type = other DNA
tcaacttttttctgtaatgagtgactccacaaccccttcagccaatcacggtatagatgcaaaaggttatttcaagtggt

SEQ ID NO: 164034 - DNA, 80 bp, synthetic construct
  source 1..80: mol_type = other DNA
gtgcatggactggaggaccaggcggtgatccgctcggagcgcagcaaggtgtactggaccaccaactttccgtgcatgat

SEQ ID NO: 164035 - DNA, 80 bp, synthetic construct
  source 1..80: mol_type = other DNA
cggcgtcgctccgtgcggtcggtcatcattctgcttcacatatatgggttgtttgtgttttttttataatgaatacgcac

SEQ ID NO: 164036 - DNA, 80 bp, synthetic construct
  source 1..80: mol_type = other DNA
caatcaccaaatattctcccagagtacagccccactaagttaatgcacatcccaggagaaataactaatgtactacatat

SEQ ID NO: 164037 - DNA, 80 bp, synthetic construct
  source 1..80: mol_type = other DNA
tacctgttcccagacaggttacctcaacctcacacaaaagaagattggaaagcagagtacgaggcagccgcattctggaa

SEQ ID NO: 164038 - DNA, 80 bp, synthetic construct
  source 1..80: mol_type = other DNA
attttgtgcagcccgccaatttctcttttaaacagaccaatcacgcactacttcgtacacttcctggggtgtgtctaccc

SEQ ID NO: 164039 - DNA, 80 bp, synthetic construct
  source 1..80: mol_type = other DNA
atgggtgcacaagtgtttaagcagaatactggatctcatgagagtgcaataaatgctagcaatgggggtgtaattaagta

SEQ ID NO: 164040 - DNA, 80 bp, synthetic construct
  source 1..80: mol_type = other DNA
cgaatggttgtgggacaatctcatggttgaaaatgatttacattccacatatggcaaggcaacccttaaatgcatggagt

SEQ ID NO: 164041 - DNA, 80 bp, synthetic construct
  source 1..80: mol_type = other DNA
tttggagcgcgagcgggcaatcaatgcgtctgcaacggcatcatgttcctacacgccttgcacctgggtggaacgagcgc

SEQ ID NO: 164042 - DNA, 80 bp, synthetic construct
  source 1..80: mol_type = other DNA
tcgcctcgacagagccagcgaaactgccgcgcgtagtcgcggtctacgccgctgtcgaacatggtaaagtgcagacgcgc

SEQ ID NO: 164043 - DNA, 80 bp, synthetic construct
  source 1..80: mol_type = other DNA
gcagtgcgtaaagtcgaagaaggggtgcagctcggtgtagagcgtgatgttgcccaccttgtagaagtcggtgaccacaa

SEQ ID NO: 164044 - DNA, 80 bp, synthetic construct
  source 1..80: mol_type = other DNA
tctcactggtaaggctaagttcaccaaaaccaggctaactaatgactgggtggtggaagaagaatgtgaattagattatt

SEQ ID NO: 164045 - DNA, 80 bp, synthetic construct
  source 1..80: mol_type = other DNA
ggacttttccaaatcgaagttttaaacaggcttacatataatagttctagtccatcagaagtgtactgtatagttcaggg

SEQ ID NO: 164046 - DNA, 80 bp, synthetic construct
  source 1..80: mol_type = other DNA
aaacatccaaccgaccttatggtcagtgtcctaacaatatgttgggaacctttgctgtccgcatagtgagcaagactcct

SEQ ID NO: 164047 - DNA, 80 bp, synthetic construct
  source 1..80: mol_type = other DNA
gttgctccttagctattcacccccaggggcgaagccacccaaaaaccggaaagacgccatgctgggtacgcacataatat

SEQ ID NO: 164048 - DNA, 80 bp, synthetic construct
  source 1..80: mol_type = other DNA
gtttacatgatttacaaactctttgcacagacccaagggccatactcaggtcttgatagtaagtcaaaattgaaaccacc

SEQ ID NO: 164049 - DNA, 80 bp, synthetic construct
  source 1..80: mol_type = other DNA
gaattcagcctccaaccccagtgtcttctatcaacccaaatcagggtttcctagattcactattccattcacaggaattg

SEQ ID NO: 164050 - DNA, 80 bp, synthetic construct
  source 1..80: mol_type = other DNA
tcatccacgccgcggcccacgcccaagtacgacgacgccttgatcctcaacctctcgtcggctgccaagatcgaacggat

SEQ ID NO: 164051 - DNA, 80 bp, synthetic construct
  source 1..80: mol_type = other DNA
atccttttgaattagatcctagtgaaatttctaaaagagcacaatactatggtttaaccataacccccccagacaagggg

SEQ ID NO: 164052 - DNA, 80 bp, synthetic construct
  source 1..80: mol_type = other DNA
caagaaaacaaagacaaccacatacatggaacatatggcaaaccaacaaataatgccttagactaccacctaggaaaata

SEQ ID NO: 164053 - DNA, 80 bp, synthetic construct
  source 1..80: mol_type = other DNA
ctgaaaaaggagagtttacaggtctaggcatctatgaccgcgtgtgtgtcatacccacacatgcacaaccaggcaacagt

SEQ ID NO: 164054 - DNA, 80 bp, synthetic construct
  source 1..80: mol_type = other DNA
ggtgacaacatcgcctattgggtgatcagcacacggcatgtcgcccagctgcgccgaaagctcgaaatgttcacatatgc

SEQ ID NO: 164055 - DNA, 80 bp, synthetic construct
  source 1..80: mol_type = other DNA
ttttgttatctggtgagcaccgcctggcaccagcgcatcgacacgcagcaggagctgacggccgccgatcgcgtaggaag

SEQ ID NO: 164056 - DNA, 80 bp, synthetic construct
  source 1..80: mol_type = other DNA
ccagttcacgcgccagtaacgcacccggtaccagaccgccacggcttacggcaataatgcctttccattgttcagaaggc

SEQ ID NO: 164057 - DNA, 80 bp, synthetic construct
  source 1..80: mol_type = other DNA
ttcactttgatgattattccttttgctaagttggagtatgccagcgggtcctcgaccgtggtccccatcaccgtgacagt

SEQ ID NO: 164058 - DNA, 80 bp, synthetic construct
  source 1..80: mol_type = other DNA
agccacatataaaagctactatgactctaacctatataacaatgttcaactttatcaaacatttcaaacaatagctcaga

SEQ ID NO: 164059 - DNA, 80 bp, synthetic construct
  source 1..80: mol_type = other DNA
ccaaaatccagtagaggaatttgtggagcacaccttgaaagaggtcctggttgtccctgacacccaagcatctggcccca

SEQ ID NO: 164060 - DNA, 80 bp, synthetic construct
  source 1..80: mol_type = other DNA
acacaggtttgatgcagatcatgttcattccacccgggatcaaaccacccaaagcagccgatagcaaagaatgggataca

SEQ ID NO: 164061 - DNA, 80 bp, synthetic construct
  source 1..80: mol_type = other DNA
gcaagcaacccacaaacttcaaattcagcaccagcactagatgctgcagaaacgggccatacaaatcaggtgcaacctga

SEQ ID NO: 164062 - DNA, 80 bp, synthetic construct
  source 1..80: mol_type = other DNA
ggacctcccatgtaaattcaatggatttaggtacctcagctgggtatagttttgttaaacttgggtacaagaagaaagat

SEQ ID NO: 164063 - DNA, 80 bp, synthetic construct
  source 1..80: mol_type = other DNA
tccaagccctccaagactcagcccaatcggaggaaagcgaagaagaagtcccagccagccaagaagaacaagtacaccaa

SEQ ID NO: 164064 - DNA, 80 bp, synthetic construct
  source 1..80: mol_type = other DNA
atatttacccagctgtaaagcaggcgtttatgtttgaccccccgggccctgaggctatctcgggcgccaaggcctgggag

SEQ ID NO: 164065 - DNA, 80 bp, synthetic construct
  source 1..80: mol_type = other DNA
agttaggtcagatggaagtggcgcaggaggtctttgcaataaaagtggatatcacatcacaacctttggctacaacttta

SEQ ID NO: 164066 - DNA, 80 bp, synthetic construct
  source 1..80: mol_type = other DNA
gttgtgtcagtattttacacattgggcaggttcattgcgcctatcctttatgtatactggcccagcactatctagtgcta

SEQ ID NO: 164067 - DNA, 80 bp, synthetic construct
  source 1..80: mol_type = other DNA
ttaaaactgggcattggttgtccccaccaatgcacaccaagtgtgttagtgctctggaatcttcgttcctttgcacgcca

SEQ ID NO: 164068 - DNA, 80 bp, synthetic construct
  source 1..80: mol_type = other DNA
aaggctagtctgatccaccatctctgctaccagtatatggtctacatcctgatataaagcgctgcacttccgaatggctg

SEQ ID NO: 164069 - DNA, 80 bp, synthetic construct
  source 1..80: mol_type = other DNA
ccttgacgccttcgttacaagcatcggccgtgcgctgcgccacttcgggtgggtgtgtcacaggcatggtgtgctccatg

SEQ ID NO: 164070 - DNA, 80 bp, synthetic construct
  source 1..80: mol_type = other DNA
tcatacaactttggagacggaaaaatgccaaacggagccacatatataccctttttatatagaaataaatggtaccccat

SEQ ID NO: 164071 - DNA, 80 bp, synthetic construct
  source 1..80: mol_type = other DNA
aacacatacaatgactacatacaacagttagcagagaaaacaagagaaaggtttaaaaaagcaacaatgtcagcactacc

SEQ ID NO: 164072 - DNA, 80 bp, synthetic construct
  source 1..80: mol_type = other DNA
ttatttccactctctggggagaactgggtatattatccacactcaatgtaatgccaccaaattccacagtggggctttaa

SEQ ID NO: 164073 - DNA, 80 bp, synthetic construct
  source 1..80: mol_type = other DNA
agaataaagtggtaccccatgctatttcaccaactagaaataatagaagaattagtgcagtccggaccgtttgcatacaa

SEQ ID NO: 164074 - DNA, 80 bp, synthetic construct
  source 1..80: mol_type = other DNA
gaaccaaggcacccctaccaaagaccaatccatattctcgctgagcttgagtccagcctccgatgagagattgtctcgca

SEQ ID NO: 164075 - DNA, 80 bp, synthetic construct
  source 1..80: mol_type = other DNA
tagcggcggtgacttgcgggcttttgcggcgtggacagtggtgtggacggagacacggggtgacgtcgcggacgaaggcg

SEQ ID NO: 164076 - DNA, 80 bp, synthetic construct
  source 1..80: mol_type = other DNA
atggcaaaccccacatttctgacactcctgttttttgtgtccttctggattcgttcacgtaccgctgctcctccttccag

SEQ ID NO: 164077 - DNA, 80 bp, synthetic construct
  source 1..80: mol_type = other DNA
aaaataacattcatgtgtgtttgtgactcttttagcacagggaaattcttgatggcttatacaccaccaggaggaggcat

SEQ ID NO: 164078 - DNA, 80 bp, synthetic construct
  source 1..80: mol_type = other DNA
gatgctgtgagaattctctgttatggagatgatgttctcattgtcttctccagacaggtccaaattgacaatctggattc

SEQ ID NO: 164079 - DNA, 80 bp, synthetic construct
  source 1..80: mol_type = other DNA
gacgtcacggccgccattttaagtaggtgccgtccaggactgcagttccgggtcagagtgcatcctcggcggaacctgca

SEQ ID NO: 164080 - DNA, 80 bp, synthetic construct
  source 1..80: mol_type = other DNA
ttaaaacagcggatgggttccctaccatccgacccactgggtgtagtactctggtactctgtacctttgtacgcctgttt

SEQ ID NO: 164081 - DNA, 80 bp, synthetic construct
  source 1..80: mol_type = other DNA
tccgaaaagcatgagcatgctagcgtttgtgagtgcctgcaatgacttttccgccaggttgctgcgcgatacgccttttg

SEQ ID NO: 164082 - DNA, 80 bp, synthetic construct
  source 1..80: mol_type = other DNA
agttccaacgagagggagaaggtgcagaaagcgacttatcttccccggccaaaagaccacgactctggcaagaagaggac

SEQ ID NO: 164083 - DNA, 80 bp, synthetic construct
  source 1..80: mol_type = other DNA
taacaattcattgtacggaaacgatatttttcaatggtatacagacagaccgacagtcaccaacacgttatgtctttatc

SEQ ID NO: 164084 - DNA, 80 bp, synthetic construct
  source 1..80: mol_type = other DNA
tgtgccctctccacgcacgacctggcaaaatttcacagtctccccccggctagaaaggcggcaggtaagcgagcgcacct

SEQ ID NO: 164085 - DNA, 80 bp, synthetic construct
  source 1..80: mol_type = other DNA
cacaaaagatcgacaagttcattgattggctgaaggtcaaaatattaccagaagctaaagagaagtatgaatttgttcag

SEQ ID NO: 164086 - DNA, 80 bp, synthetic construct
  source 1..80: mol_type = other DNA
atagtggatttactatcagcttccaaagaccccaaggtcgtggagtactgtgtggaacagggctggattggcaaagctaa

SEQ ID NO: 164087 - DNA, 80 bp, synthetic construct
  source 1..80: mol_type = other DNA
cctgccctgaactcgccaaacgttgaagcttgtggatatagtgacagagtgaggcaaatcactttgggtaattcaactat

SEQ ID NO: 164088 - DNA, 80 bp, synthetic construct
  source 1..80: mol_type = other DNA
tgagcccaagggtcccaaacccatagaggggtacaaccagtggctagacgagttccagacctgcaaggcctgggacagac

SEQ ID NO: 164089 - DNA, 80 bp, synthetic construct
  source 1..80: mol_type = other DNA
actgagagatttagagaatatcaggccaatttgggaaggcaaggtaaacctcttgcatcaacagcaaccctaacgacaaa

SEQ ID NO: 164090 - DNA, 80 bp, synthetic construct
  source 1..80: mol_type = other DNA
atgccaaccactttcagagtgtcttttaaacgcgcggcacctcggacccccgctcgtgctgacgcgctcgcgcgcgtcag

SEQ ID NO: 164091 - DNA, 80 bp, synthetic construct
  source 1..80: mol_type = other DNA
gagaatgtcagccagggacaacagcagactctggagtgcggaggaactgataaacaggaaaggaacatgttggggatggg

SEQ ID NO: 164092 - DNA, 80 bp, synthetic construct
  source 1..80: mol_type = other DNA
aacaaataaagtagttaagtggttaatcagaattattagtgccatgacaatcatgatcagaaacagttcagataccccca

SEQ ID NO: 164093 - DNA, 80 bp, synthetic construct
  source 1..80: mol_type = other DNA
ccattttcaacaccattataaacaatatcataattagaacattggtgttggatacatacaagggaattgaattggacaaa

SEQ ID NO: 164094 - DNA, 80 bp, synthetic construct
  source 1..80: mol_type = other DNA
gccgggggttgcgctgaggacgggggtttctgagcacgctcaacgcccgcggcggccacgtgggttgcgctggggactgg

SEQ ID NO: 164095 - DNA, 80 bp, synthetic construct
  source 1..80: mol_type = other DNA
tggattcactccagtcactttcctttcttttaaactcatcaccacagtcttgttgttcagagactcatatcacaatggga

SEQ ID NO: 164096 - DNA, 80 bp, synthetic construct
  source 1..80: mol_type = other DNA
agattgatctcccgcttgagggcactacgaacccaaatggtttcgctaactgggacatagatataactggctacgcgcag

SEQ ID NO: 164097 - DNA, 80 bp, synthetic construct
  source 1..80: mol_type = other DNA
actcccccaaggatgaacagcgtgacatcgccgaggttcttgaccacctcaagacgaatcgggacctggggctggacgac

SEQ ID NO: 164098 - DNA, 80 bp, synthetic construct
  source 1..80: mol_type = other DNA
aatatgtcatgggaatagtagctgcacaaccaacagaaacagaatcaccgatagtaagagaaataattgaagaaatgatc

SEQ ID NO: 164099 - DNA, 80 bp, synthetic construct
  source 1..80: mol_type = other DNA
gttttactagacacaggggctgacgactcaatagtagcaggaatagaattagggagcaattatagtccaaaaatagtagg

SEQ ID NO: 164100 - DNA, 80 bp, synthetic construct
  source 1..80: mol_type = other DNA
tgtcgcccatgctgccgcttacgaccgctgtcggtctaaggtaggcgtcgatgaaacagtccgtcttatcagcacccggt

SEQ ID NO: 164101 - DNA, 80 bp, synthetic construct
  source 1..80: mol_type = other DNA
acactgcaaaacagttttgttgcatgggacattaactttcaagagcatgctcaagtcagaaagaaatttgaaatgttcac

SEQ ID NO: 164102 - DNA, 80 bp, synthetic construct
  source 1..80: mol_type = other DNA
tgtaaataaaattactgaagtgccaccaaaggcagcaaagctatactatgaccagactaaagctctcattggcattacct

SEQ ID NO: 164103 - DNA, 80 bp, synthetic construct
  source 1..80: mol_type = other DNA
gtgttacgtttataccacctatggctgacttacctgataagggcaaaccatttgattcaaggtttatcttatgtagtact

SEQ ID NO: 164104 - DNA, 80 bp, synthetic construct
  source 1..80: mol_type = other DNA
cgagcaccagaaacacagaaacaggtggagctaccccaacacccagctagacctagccaggtacaaaggctgcaggttca

SEQ ID NO: 164105 - DNA, 80 bp, synthetic construct
  source 1..80: mol_type = other DNA
taggcggtggttatccaaaccatcaatgatcaagcacttctgtttccccggtaggtgtgaatatgctttaaccaaggcag

SEQ ID NO: 164106 - DNA, 80 bp, synthetic construct
  source 1..80: mol_type = other DNA
gcgtggcagacgtccacaaacccaagtatcttctggacggaagggaatgcaccagcacgcatgtctataccctttatcag

SEQ ID NO: 164107 - DNA, 80 bp, synthetic construct
  source 1..80: mol_type = other DNA
gcttgggtgccacgaccaccaagggctacagaatacacatacacatatagcaccaactataacaggaaagtgaatgagac

SEQ ID NO: 164108 - DNA, 80 bp, synthetic construct
  source 1..80: mol_type = other DNA
gttacttaaggtcaagcacttctgtttccccggttgatgttgatatgctccaacagggcaaaaacaacagaaatcgttac

SEQ ID NO: 164109 - DNA, 80 bp, synthetic construct
  source 1..80: mol_type = other DNA
tgatttatcacgtggtgtgtgcgtcacggcggccattttgtttaacaaaatggcggacaacttcctcttttttaaaaaaa

SEQ ID NO: 164110 - DNA, 80 bp, synthetic construct
  source 1..80: mol_type = other DNA
tttgcctggctggagattccgatgtcaagaattcatacacctcgtacgtgaacgccaacccaggtgaaaatggaggtaca

SEQ ID NO: 164111 - DNA, 80 bp, synthetic construct
  source 1..80: mol_type = other DNA
tacacatagagccccccaagatgttcgttgacaagtggtatgcgcaacatgacctatgtgacgttgagcttgtgtcattt

SEQ ID NO: 164112 - DNA, 80 bp, synthetic construct
  source 1..80: mol_type = other DNA
gaaaacattccactgtggtcagctctatttggctacagtgaatatgtagaaagccaactaggcccctttcaagaccatga

SEQ ID NO: 164113 - DNA, 80 bp, synthetic construct
  source 1..80: mol_type = other DNA
gtccacttacgtccccataaaatggagaggcaagtggtacccgcacatgtaccaccagcagagagtactagaagacatct

SEQ ID NO: 164114 - DNA, 80 bp, synthetic construct
  source 1..80: mol_type = other DNA
aagccaacaaagagaatgtagttacaggctcatactcaatgcctactaacaaagcagtaggctatcacctaggaaaatat

SEQ ID NO: 164115 - DNA, 80 bp, synthetic construct
  source 1..80: mol_type = other DNA
ttggattcactcctttatcaactaggactaatcatctaatacgtgtgatcttactcattagaggtttataccacaatggg

SEQ ID NO: 164116 - DNA, 80 bp, synthetic construct
  source 1..80: mol_type = other DNA
cgtacgttggtatatcaaatgcctactcacacttctatgacgggttttccaaaataccgttgaaagatcagtcagttgaa

SEQ ID NO: 164117 - DNA, 80 bp, synthetic construct
  source 1..80: mol_type = other DNA
aaataccaggcctttacaacacaataacatataacccactaacagacaaaggagaaggcaacaaaatatgggcagaccct

SEQ ID NO: 164118 - DNA, 80 bp, synthetic construct
  source 1..80: mol_type = other DNA
cccctttcacagactctgtgttaacagggcccatgctgcatcctggaatactaatgaacaccagaaaaaagataataatt

SEQ ID NO: 164119 - DNA, 80 bp, synthetic construct
  source 1..80: mol_type = other DNA
gcagataaatcagacaaatttgaaaagttaacttatgaaaatgcaacctttctgaaacggggtttcaaacaagatgacag

SEQ ID NO: 164120 - DNA, 80 bp, synthetic construct
  source 1..80: mol_type = other DNA
agcggcgagaggagaggaaaaagatggcgtccgcgaggacgacggaggatccacccgaaaaccacgttgtcgcggacgtg

SEQ ID NO: 164121 - DNA, 80 bp, synthetic construct
  source 1..80: mol_type = other DNA
agcctagtaatgccttgaaacttctacggttggtcgttccgctagatgcacccctctagtagacctggcagatgaggcag

SEQ ID NO: 164122 - DNA, 80 bp, synthetic construct
  source 1..80: mol_type = other DNA
acctagtaagccaaggaattaggcaggttctattcctagaaaaaatagaaccagcacaagaagaacatgaaaagtaccat

SEQ ID NO: 164123 - DNA, 80 bp, synthetic construct
  source 1..80: mol_type = other DNA
acaacaggagcatatacagacataaagtacaatccattcacagacagaggagaaggcaacatgttatggatagactggct

SEQ ID NO: 164124 - DNA, 80 bp, synthetic construct
  source 1..80: mol_type = other DNA
tttggccttgaagctctgcaagatgttgcttcgctggatgcggttcagcgcctgtcgcgccagcgtggcgttctctacca

SEQ ID NO: 164125 - DNA, 80 bp, synthetic construct
  source 1..80: mol_type = other DNA
catacacagttccaaaactagtacatgtagaacaagacaaaaaaggatggggttttgtgttttatgatggactttttggc

SEQ ID NO: 164126 - DNA, 80 bp, synthetic construct
  source 1..80: mol_type = other DNA
agttacaaagacgagcttaaaaacagcaccctggtagccaagtacaaattctatttcacctggggaggtaacatgatgtt

SEQ ID NO: 164127 - DNA, 80 bp, synthetic construct
  source 1..80: mol_type = other DNA
aaacagggggatacttagattattatgctacgggtgtggttaccatatggtaccagacaaacttcgtagtgccaccagac

SEQ ID NO: 164128 - DNA, 80 bp, synthetic construct
  source 1..80: mol_type = other DNA
gggggttcttgcccctgtttttctgcgggcagggagcctaccacagaaactttgtagaacacatggacgacgtgtttcct

SEQ ID NO: 164129 - DNA, 80 bp, synthetic construct
  source 1..80: mol_type = other DNA
aattctatattttcaaaatataagggtaacgaggcaatcaaagtctcagaaaacatgctcgttgctgctgcgcactatac

SEQ ID NO: 164130 - DNA, 80 bp, synthetic construct
  source 1..80: mol_type = other DNA
ctgtctactcattgccaccagaccctaaacattttgatggatatcagcaacaagcagtcgtcatacttgatgacctaaat

SEQ ID NO: 164131 - DNA, 80 bp, synthetic construct
  source 1..80: mol_type = other DNA
aacaccaggcaggatatctcctgaaaccccaggactttacacagacgtgacttataacccatacgcagacaaaggagtgg

SEQ ID NO: 164132 - DNA, 80 bp, synthetic construct
  source 1..80: mol_type = other DNA
tgacttcccacgtcacggccgccattttagttcacaaaatggccgacttccttcctgtttttcaaaaaaaaagcggaagt

SEQ ID NO: 164133 - DNA, 80 bp, synthetic construct
  source 1..80: mol_type = other DNA
caggacagcaaggaccatatactggacttcccaacaagaaacccagcatcccaactatccgcactgcaaaggttcaaggt

SEQ ID NO: 164134 - DNA, 80 bp, synthetic construct
  source 1..80: mol_type = other DNA
agcccagacactgactttatagtgacttacagtagaaaaagtcccctgggaggcaacatatacacagccccttcactaca

SEQ ID NO: 164135 - DNA, 80 bp, synthetic construct
  source 1..80: mol_type = other DNA
actgttagtagcactttggatagcatgtggggttccgctccacagaaaccccatctgtaggtcagggcaatggggctaca

SEQ ID NO: 164136 - DNA, 80 bp, synthetic construct
  source 1..80: mol_type = other DNA
tatagaaacacgatatgtcataaacaaccacaccaataatgaagctcttatagaaaactttcttggtagagcatctcttt

SEQ ID NO: 164137 - DNA, 80 bp, synthetic construct
  source 1..80: mol_type = other DNA
tctctcgtgagtcccgccgcagcttctcgtgtgcaaagtgggcaaaagcctcggtctgctccgcccatgccgaggagcca

SEQ ID NO: 164138 - DNA, 80 bp, synthetic construct
  source 1..80: mol_type = other DNA
tttcgttgggtgcagtaggcggactcagccttcatgtcaggttcaccgggaaactgagcaaacgtttaatagcatcaatg

SEQ ID NO: 164139 - DNA, 80 bp, synthetic construct
  source 1..80: mol_type = other DNA
acacaagagccatcacctcttgatagggatccgctaggatatgacgtcgggcatggacctctagcatctgctatgcgaat

SEQ ID NO: 164140 - DNA, 80 bp, synthetic construct
  source 1..80: mol_type = other DNA
cttagtatcctaaccacagaaaccgcaaagaacaaagcacactatgatgaagcactttataaaaaaataccatactacaa

SEQ ID NO: 164141 - DNA, 80 bp, synthetic construct
  source 1..80: mol_type = other DNA
gccagctggaacgaatgtgttcgtggagtgcaaatgcagcagtgggcaaatatcagaaaccaccagccaggccaaaacgt

SEQ ID NO: 164142 - DNA, 80 bp, synthetic construct
  source 1..80: mol_type = other DNA
tgggatggtgcttgacaatttatcctttaaccctaccttgattaacagactctgtaattcaaagcatatttttaaatcta

SEQ ID NO: 164143 - DNA, 80 bp, synthetic construct
  source 1..80: mol_type = other DNA
atattaaggtgtggtgccccagacctccacgggcagtagcatacaatgggccaacagtgaattttaatgaaaacccccat

SEQ ID NO: 164144 - DNA, 80 bp, synthetic construct
  source 1..80: mol_type = other DNA
aaatttgctgccaggagtggaaatccttctgtgggtttaaattcaagtgttttttacctctggagctagataacgatttg

SEQ ID NO: 164145 - DNA, 80 bp, synthetic construct
  source 1..80: mol_type = other DNA
caataatcctgacgaggatccctttttcaattgcaatggcacattactagggaatctcaccatcttcccccaccagataa

SEQ ID NO: 164146 - DNA, 80 bp, synthetic construct
  source 1..80: mol_type = other DNA
tagtgtcaatgatactgttttgtttagaacaacatttggaaatttattctcaaaatttcatttaaatccaggaattgtaa

SEQ ID NO: 164147 - DNA, 80 bp, synthetic construct
  source 1..80: mol_type = other DNA
caaaataaacagggagaacaagtgtttgggttcagactttacttgggtgatggtgtcctaaaaacaacactaataggtga

SEQ ID NO: 164148 - DNA, 80 bp, synthetic construct
  source 1..80: mol_type = other DNA
agggtagcctgagccgcactgtgcgtgacgatgccatcaaccagctggagctctgccgggttgacaccctcaacccccga

SEQ ID NO: 164149 - DNA, 80 bp, synthetic construct
  source 1..80: mol_type = other DNA
cgtccccaccaccgtccccgtcgcgcgaaaaaaaataaaaacaccgcgggacgccacgcaccggcagtgcgcacaaagcg

SEQ ID NO: 164150 - DNA, 80 bp, synthetic construct
  source 1..80: mol_type = other DNA
tttccacacgatgcccatccatgacgctattctatcccaaccttttccatcaaacatccaaaaacgtctgaagcgaagta

SEQ ID NO: 164151 - DNA, 80 bp, synthetic construct
  source 1..80: mol_type = other DNA
ccagctagacctggccagatacaggaaggctacattcaccttctacagacacaacaagactgacttcatagtatacttta

SEQ ID NO: 164152 - DNA, 80 bp, synthetic construct
  source 1..80: mol_type = other DNA
ttcataaatacagtccaaattaccatctaccaaaggagggttccaatgatttgactgagaaacactacttaagctccaga

SEQ ID NO: 164153 - DNA, 80 bp, synthetic construct
  source 1..80: mol_type = other DNA
tggccgttgcgcccggcgtggtcaactccatgattagcatggagctgtaggagtctaaattggggacacagatgtttggg

SEQ ID NO: 164154 - DNA, 80 bp, synthetic construct
  source 1..80: mol_type = other DNA
gttgttgtcccagacacacatgcttctggaccacaacacaccacacgacccagtgctttgggagccatggaaataggggc

SEQ ID NO: 164155 - DNA, 80 bp, synthetic construct
  source 1..80: mol_type = other DNA
accacggttgtgccaatatgttaacgcagcaacggtgaacttcactcctgaaggggtcactaaggcacgtactgatctca

SEQ ID NO: 164156 - DNA, 80 bp, synthetic construct
  source 1..80: mol_type = other DNA
tctggtacatgccctgtgaaatacaacgccgaacccaagaacactgaaagtaccatcggaagtaatattatagaaaccat

SEQ ID NO: 164157 - DNA, 80 bp, synthetic construct
  source 1..80: mol_type = other DNA
cactcgtagacaagaacgaccccactgccgggttcgttgtctacaacactaacttcggcatgggcaagtggctagacgga

SEQ ID NO: 164158 - DNA, 80 bp, synthetic construct
  source 1..80: mol_type = other DNA
ggcataggcaacagaatctgcgtgcagtggtgtagtgaaaagagcagtgactatgacccagtaaagagcaagtgcatgct

SEQ ID NO: 164159 - DNA, 80 bp, synthetic construct
  source 1..80: mol_type = other DNA
ttgtggttatacctgagcatcaacttgcttccattaaaggagccaatgtatcagttttgtatgataaaactcaccctggg

SEQ ID NO: 164160 - DNA, 80 bp, synthetic construct
  source 1..80: mol_type = other DNA
tggttttatgatggttaccccacattcggagaacacgccggtgaggacagcttacggtatggacagtgtccgaataacgc

SEQ ID NO: 164161 - DNA, 80 bp, synthetic construct
  source 1..80: mol_type = other DNA
tccccttatgtaacataagaagcttaaacacaatgaccaacaggtggtaacaagccatgttacttacggtcaagcactcc

SEQ ID NO: 164162 - DNA, 80 bp, synthetic construct
  source 1..80: mol_type = other DNA
actgccacagaccccattttgtcccacctgttaccacattctaggtcctgcatccagtgggccaggtgtctcaccatggc

SEQ ID NO: 164163 - DNA, 80 bp, synthetic construct
  source 1..80: mol_type = other DNA
acagctggtgagcagaatcaaagaatatttggtacagatttgttcataggagatggagtttttaaaaccacattactagg

SEQ ID NO: 164164 - DNA, 80 bp, synthetic construct
  source 1..80: mol_type = other DNA
ccttgcgtaagcttccaggtcctaggagacctctacaacgagtgtctcaatatagatcttcctgaaacagaaaaagattc

SEQ ID NO: 164165 - DNA, 80 bp, synthetic construct
  source 1..80: mol_type = other DNA
ctttaaaaatcatcttagcactacctacaatgctgccgctggctcaacaacacccaaaggtggtccaacaggcacagtat

SEQ ID NO: 164166 - DNA, 80 bp, synthetic construct
  source 1..80: mol_type = other DNA
gaatttgttgaaaatacaggccttgaagagaaaatgaaggctagaatagcattaaatgaagtggaaaagggtcaaagaga

SEQ ID NO: 164167 - DNA, 80 bp, synthetic construct
  source 1..80: mol_type = other DNA
tcactttcgtaatcactagtaggcaggatgaggccgggactcagtacggtcaggatgcaccaccactgacccaccaagtc

SEQ ID NO: 164168 - DNA, 80 bp, synthetic construct
  source 1..80: mol_type = other DNA
gaattgagaagcactgataaggtgcgcttgggcaagagtagactcattgaggcttcaagtttgaatgattcagtaaatat

SEQ ID NO: 164169 - DNA, 80 bp, synthetic construct
  source 1..80: mol_type = other DNA
ggacatgtgcatggcctgggcccgcttttgcgacccctctgatattaaggtggttattttgggccaggacccctatcacg

SEQ ID NO: 164170 - DNA, 80 bp, synthetic construct
  source 1..80: mol_type = other DNA
cctactgacttcactagtaccatcatgatatacttcaaacccaaacacgtgcgagcgtgggtaccacgcccacccaggct

SEQ ID NO: 164171 - DNA, 80 bp, synthetic construct
  source 1..80: mol_type = other DNA
catggcagacgtctacaaaccctagcgtgttttggaccgaagggaatgcccctgctagaatgtccataccctttattagc

SEQ ID NO: 164172 - DNA, 80 bp, synthetic construct
  source 1..80: mol_type = other DNA
gagagagactcttgcaagcgcgtggagagacttatgggagactctgggacgggttggaagagggatactcgcaatcccga

SEQ ID NO: 164173 - DNA, 80 bp, synthetic construct
  source 1..80: mol_type = other DNA
ttattgtgtggtaaggctgtagtagtgcaagatagaaagactaaagctaacttctctgttaatacagtagtggaacagct

SEQ ID NO: 164174 - DNA, 80 bp, synthetic construct
  source 1..80: mol_type = other DNA
tcataccctttcgaacttgatccatcagttctagcatcaatggggaagaaatatggattgactatcactcctccagacaa

SEQ ID NO: 164175 - DNA, 80 bp, synthetic construct
  source 1..80: mol_type = other DNA
atgtccatacaaatataaggcaaatgttgactttgaagtgactccaatcacagacaagcgagactccataaccagcatac

SEQ ID NO: 164176 - DNA, 80 bp, synthetic construct
  source 1..80: mol_type = other DNA
gacgcagacgaaaacgaaagagactgattatgactcagtggaacccctccactgtaaccaggtgctttatagtaggatac

SEQ ID NO: 164177 - DNA, 80 bp, synthetic construct
  source 1..80: mol_type = other DNA
ggtcattaataatgccttacaactctcccaaccaacacgacctgttaccgcctcagacacacctagcacaagtggagtga

SEQ ID NO: 164178 - DNA, 80 bp, synthetic construct
  source 1..80: mol_type = other DNA
accatttacagactctatagtctcaggaccacaccaacacccaggaatacaaatgctaatgaaaaagaaaatactaatac

SEQ ID NO: 164179 - DNA, 80 bp, synthetic construct
  source 1..80: mol_type = other DNA
cgtgacacacctatgatgaagcaaactcacaagttgcaaaacaatgatccagtggatggctttgtccatgaagttcttaa

SEQ ID NO: 164180 - DNA, 80 bp, synthetic construct
  source 1..80: mol_type = other DNA
ataaagtatacatgtttccccccctgacctctactccctccagcgcagactggaaagaggagtacgaggcctgcaagtac

SEQ ID NO: 164181 - DNA, 80 bp, synthetic construct
  source 1..80: mol_type = other DNA
gccagtcctcaagagaccagagctacggaaggctgtgctgcagggaccagaacatgaatttatccaggcacttgtcagga

SEQ ID NO: 164182 - DNA, 80 bp, synthetic construct
  source 1..80: mol_type = other DNA
atacccaggataaccttaggaagatggatatctaccgcgtacaggtgtcttctcagacaagccaagggacgcaagtgttt

SEQ ID NO: 164183 - DNA, 80 bp, synthetic construct
  source 1..80: mol_type = other DNA
caccgtggatctccaatgttaattacaggaggtgtgtcaaagatgactttacagaagggggctatatctgtgccttctac

SEQ ID NO: 164184 - DNA, 80 bp, synthetic construct
  source 1..80: mol_type = other DNA
tttatacaactcccagggagtgaaattagaaataactgtagttaaattaaacaggaatgagaaatttagagatatcagga

SEQ ID NO: 164185 - DNA, 80 bp, synthetic construct
  source 1..80: mol_type = other DNA
cccggaaaaactcaaccctaaggaactggccctgacgggtgcacgatatggtctcactataacgcccgcagataagtcag

SEQ ID NO: 164186 - DNA, 80 bp, synthetic construct
  source 1..80: mol_type = other DNA
gttgcaacgatcctgttcgtcatttggcttctctgtctgcttcgtttggcttccaaccagggccgtcgagtgatagttct

SEQ ID NO: 164187 - DNA, 80 bp, synthetic construct
  source 1..80: mol_type = other DNA
atggtattgacttgcctatggtgactttcttgaaagatgaactccgaagaaaagagaagattaaggaaggaaaaactaga

SEQ ID NO: 164188 - DNA, 80 bp, synthetic construct
  source 1..80: mol_type = other DNA
cccctacctagaataccacgggggtctatactcctccatctggctgtctgcaggcagatcatactttgaaacaaaaggca

SEQ ID NO: 164189 - DNA, 80 bp, synthetic construct
  source 1..80: mol_type = other DNA
ctcttatcgccagcagatccatatccgacgggaccaggaactgccagacggagaagacagagaagaagacggtggagaaa

SEQ ID NO: 164190 - DNA, 80 bp, synthetic construct
  source 1..80: mol_type = other DNA
gccgacaacccaccactgtccccgccgcaaaaggcccccgtccccgtcctcaccaccgtccccactcccgtccccgtctc

SEQ ID NO: 164191 - DNA, 80 bp, synthetic construct
  source 1..80: mol_type = other DNA
ggcgaccaaagctgccgctggcggcttcggcctcgctgatcgcggccgcttccgacgagggtccctcaccgggcgaggac

SEQ ID NO: 164192 - DNA, 80 bp, synthetic construct
  source 1..80: mol_type = other DNA
cactcatggcacctactggaaattcacaaactttacccattacagtaacaatagcccctatggccactgaatttacagga

SEQ ID NO: 164193 - DNA, 80 bp, synthetic construct
  source 1..80: mol_type = other DNA
cgcgaatgtcgattcccttcataagcataggcaatgcatatagcagtttttatgatgggtggtcacatttttcgcaaaag

SEQ ID NO: 164194 - DNA, 80 bp, synthetic construct
  source 1..80: mol_type = other DNA
ggggagtccgcgcgtcccgtgtgcgggtgccgaaggtgagtttacacaccgaagtcaagaggcaattcgggcacgggact

SEQ ID NO: 164195 - DNA, 80 bp, synthetic construct
  source 1..80: mol_type = other DNA
aacattacagtgcctgcaacccagggattgccagtgttagtaacaccaggctccagtcaatatttgacatctgatgactt

SEQ ID NO: 164196 - DNA, 80 bp, synthetic construct
  source 1..80: mol_type = other DNA
atgacagaacacacaggttttctgcgtgttttataaaagagcgtctcgaagcagcttgagccacactacggtccagataa

SEQ ID NO: 164197 - DNA, 80 bp, synthetic construct
  source 1..80: mol_type = other DNA
agcatcatcttaatattgggtacagtttatgctttatacaagttgatgtgtattgcacagggaccttatactgggttacc

SEQ ID NO: 164198 - DNA, 80 bp, synthetic construct
  source 1..80: mol_type = other DNA
ggtctgatgtgtgtaggaggtgtgggttcaacgcaggggcgttggtggcggagtctggcaacgcccgggtcctcttgcta

SEQ ID NO: 164199 - DNA, 80 bp, synthetic construct
  source 1..80: mol_type = other DNA
tctcgagtggcttggggtcctcgtcaaagatgaccccaggaccaagctcaactcgcagcatgaaaagatcttggaactct

SEQ ID NO: 164200 - DNA, 80 bp, synthetic construct
  source 1..80: mol_type = other DNA
cagagtccagaggtcaggggcacctcagggtgcctccccgggtcccaggccagccggagggaccccggcagcccggtcgg

SEQ ID NO: 164201 - DNA, 80 bp, synthetic construct
  source 1..80: mol_type = other DNA
tgctatagacaaaccaaccaggcctgacacttcttccaatagattttacacactggaaagccaactgtggactaacactt

SEQ ID NO: 164202 - DNA, 80 bp, synthetic construct
  source 1..80: mol_type = other DNA
aaattaatattacttttatccattacggtaataaggcgcccgatgatagcgagcctcaatgcaatccgctacttcccacc

SEQ ID NO: 164203 - DNA, 80 bp, synthetic construct
  source 1..80: mol_type = other DNA
gttcaataacgttagatggttggcaatccaatcacggcgtttcgcgccgttgtacgccgtggaggctaagcgcatctcta

SEQ ID NO: 164204 - DNA, 80 bp, synthetic construct
  source 1..80: mol_type = other DNA
agcggatgtgtggaatctatttgagacttcaataaaaccatgtgttaaattaaccccactatgtgtaacaatgaattgta

SEQ ID NO: 164205 - DNA, 80 bp, synthetic construct
  source 1..80: mol_type = other DNA
cctacaagtataaattagacatggaagccatagctaaggaaggacaaaagtatggacttaccataacacctgcagacaaa

SEQ ID NO: 164206 - DNA, 80 bp, synthetic construct
  source 1..80: mol_type = other DNA
aagtagacaggttacttttagagtgtagtgtacagggccgggcgcaacagtgccaccaacccggggtctgagcattccat

SEQ ID NO: 164207 - DNA, 80 bp, synthetic construct
  source 1..80: mol_type = other DNA
cctctcaacctttagctaccacattgataggagagattgccagttactatacacactggacaggaagccttagattcagt

SEQ ID NO: 164208 - DNA, 80 bp, synthetic construct
  source 1..80: mol_type = other DNA
tagtgatggtcaccatacaattcagattacaggtctcacgatagagccaggtgctgccgcggctgtgccattgatccttg

SEQ ID NO: 164209 - DNA, 80 bp, synthetic construct
  source 1..80: mol_type = other DNA
ggcggatggtggtgcttctttttgcacggtgtatgtttggggacccgcatgccggtactgggataggcgcacctcgggcc

SEQ ID NO: 164210 - DNA, 80 bp, synthetic construct
  source 1..80: mol_type = other DNA
gaacctcacgaagggagaaacagcacatgtgtttgcatcgaccaagactacgggtgagcatacggtacaatcgatagtat

SEQ ID NO: 164211 - DNA, 80 bp, synthetic construct
  source 1..80: mol_type = other DNA
agagggacaggaaccgaaggcgcaggcggtacacaagcagctcctcaaacacctccgaaagcagcgggtcctcggacagc

SEQ ID NO: 164212 - DNA, 80 bp, synthetic construct
  source 1..80: mol_type = other DNA
cgggttatgagctggtctcgtccaatacacgatgccccagccattgagcgtaactggtgggaatccacagctcgatccca

SEQ ID NO: 164213 - DNA, 80 bp, synthetic construct
  source 1..80: mol_type = other DNA
aatggcagccaaactataccagaaagtgcaacattgtcggttacatgccagtaataatgtgtggagaaaatactgttatc

SEQ ID NO: 164214 - DNA, 80 bp, synthetic construct
  source 1..80: mol_type = other DNA
tttttgggatgatgagaggaaaccagcgtttggccagtctaagtattttgctgctgtgaggtgtggttttcattttcaag

SEQ ID NO: 164215 - DNA, 80 bp, synthetic construct
  source 1..80: mol_type = other DNA
gtggtggaaaattactctgtagtcatggagtcatagggattgtcactgctggtggtgagggccacgttgccttcattgac

SEQ ID NO: 164216 - DNA, 80 bp, synthetic construct
  source 1..80: mol_type = other DNA
ttctctcttctgtgtacaacaagttcctctctataactgaaattaactccactaatgaagaccaaaaaattactgaattt

SEQ ID NO: 164217 - DNA, 80 bp, synthetic construct
  source 1..80: mol_type = other DNA
gtagaccacgccaaacttgtcgagcagcaccaggccgctgggcacaaaaggcccgtaggccaggtaatagcccacgaggc

SEQ ID NO: 164218 - DNA, 80 bp, synthetic construct
  source 1..80: mol_type = other DNA
cgttccttaccaacacacacattccactaattatataccatccaaaggtgagattacaacccaaattaagaccagaccta

SEQ ID NO: 164219 - DNA, 80 bp, synthetic construct
  source 1..80: mol_type = other DNA
ctaaaccaaactactgatttgttcagtgattcaaatgcgacaggtggtgatatcattactagagtagcagatgatgcttc

SEQ ID NO: 164220 - DNA, 80 bp, synthetic construct
  source 1..80: mol_type = other DNA
ctgcttagagctagtgcttagaaaattgggttttgagtcggctgatctagtaaagaaaatatcaactacccatcatatat

SEQ ID NO: 164221 - DNA, 80 bp, synthetic construct
  source 1..80: mol_type = other DNA
gcaaacgcgagcaacgggccacggggatgaagcagctgcgccactccctgaagctcctgcagaagcttcgaattcgagct

SEQ ID NO: 164222 - DNA, 80 bp, synthetic construct
  source 1..80: mol_type = other DNA
aggacagtatttacttcacctttaataaggttttccgttctatgcataacgtcaaccgtatttcggtgcccgtcatcagc

SEQ ID NO: 164223 - DNA, 80 bp, synthetic construct
  source 1..80: mol_type = other DNA
ggcaacctggacattttaaacaatatgagtaccacctggggtggttcagccctatattcataggccccaacagatacaac

SEQ ID NO: 164224 - DNA, 80 bp, synthetic construct
  source 1..80: mol_type = other DNA
tgaagttttaaatagactcacatacaatagttctagtccatcagatgtgtactgcattgtccaaggaaaaatgggacaag

SEQ ID NO: 164225 - DNA, 80 bp, synthetic construct
  source 1..80: mol_type = other DNA
tcgaacaagaacagtaaggaggaggcgaagggggaggcggaggggctaccggcgccgttacagactgagacgctatgcca

SEQ ID NO: 164226 - DNA, 80 bp, synthetic construct
  source 1..80: mol_type = other DNA
ttggggtatacctctgaggaatcaactccatcgtcaatgaatataagcttcgaagaatattttgatggattagtaacaca

SEQ ID NO: 164227 - DNA, 80 bp, synthetic construct
  source 1..80: mol_type = other DNA
cacacatccagccgtttgtgtttcttaacgctctccaggtactgatccaggcccacgatccgggttatcttgtcgtattc

SEQ ID NO: 164228 - DNA, 80 bp, synthetic construct
  source 1..80: mol_type = other DNA
cagatgtgttttggtcccagattagatctacaatgggagagaatgttttagcatttgactatacaaattatgatggaagt

SEQ ID NO: 164229 - DNA, 80 bp, synthetic construct
  source 1..80: mol_type = other DNA
cagagcactatcaacatacactggcagtcaatacctcaattttaaaacaggaatgtacagtgctatatttttatctgatc

SEQ ID NO: 164230 - DNA, 80 bp, synthetic construct
  source 1..80: mol_type = other DNA
cgctgcacttccgaatggctgagttttccacgcccgtccgcagcggtaaagccacggagggacattaccgcgtcccgagg

SEQ ID NO: 164231 - DNA, 80 bp, synthetic construct
  source 1..80: mol_type = other DNA
aacttagataccttaacccctccgactgttacactcccagaagccatcaagcgtcgctttttcatggacgctgacttaat

SEQ ID NO: 164232 - DNA, 80 bp, synthetic construct
  source 1..80: mol_type = other DNA
gggactttaactggatcagccattggctgtgatccagatatattctggtcacagttatatgcttccatggaaaacaacct

SEQ ID NO: 164233 - DNA, 80 bp, synthetic construct
  source 1..80: mol_type = other DNA
tcacgttgctttcattgatcttagaaagtttcaatgtgctgaagagcagggaatttcagattatgtggaacatcttggtc

SEQ ID NO: 164234 - DNA, 80 bp, synthetic construct
  source 1..80: mol_type = other DNA
ggtgctacatagtggggtacctacccctaatatggtgtggagaaaacaccaccagcagaaactatgccactcactcggac

SEQ ID NO: 164235 - DNA, 80 bp, synthetic construct
  source 1..80: mol_type = other DNA
ctgatgtcaccaccgtactgaaccaagattctctatcgaacggtgatataccaatgacattctccaaccagaaagagacc

SEQ ID NO: 164236 - DNA, 80 bp, synthetic construct
  source 1..80: mol_type = other DNA
agacgcacccagtgaagcgcacaattgttaagacctcctatagatctgatgaggcagaagaagcacagagcacccctgaa

SEQ ID NO: 164237 - DNA, 80 bp, synthetic construct
  source 1..80: mol_type = other DNA
caaataaacaaggccgtgggagtttcacttgtcggtgtctacctctataagtcactaagcactccgagcgtcagcgagga

SEQ ID NO: 164238 - DNA, 80 bp, synthetic construct
  source 1..80: mol_type = other DNA
ctgtttcatttctacagttatgttatacaacttttgctgactaggaaatgtgaaaaacttgtaataatcacctgtttttg

SEQ ID NO: 164239 - DNA, 80 bp, synthetic construct
  source 1..80: mol_type = other DNA
acctacgaaattcccggaggcggtacgctccctcgcagaatacaagtcattaacccggaatacatcggcccacactactc

SEQ ID NO: 164240 - DNA, 80 bp, synthetic construct
  source 1..80: mol_type = other DNA
atggggtgcgccaaaacagatggagccttattagcaactagtttgacgaatggggagacagcacacgaattcactgagtc

SEQ ID NO: 164241 - DNA, 80 bp, synthetic construct
  source 1..80: mol_type = other DNA
aactcaaccaattaagaagatactactttgagtgggaaactaaaatacatggagtggcggtgccacctacgtggaccatc

SEQ ID NO: 164242 - DNA, 80 bp, synthetic construct
  source 1..80: mol_type = other DNA
aagtatggtctgtctatcacaccagctgataagtcagatacatttaagaaattagattacagcaatgctacctttttaaa

SEQ ID NO: 164243 - DNA, 80 bp, synthetic construct
  source 1..80: mol_type = other DNA
tgactacaatagaaagacactaccaagacatacacaagaaaggaacactaggaaactacacagacaaaggcagaatggga

SEQ ID NO: 164244 - DNA, 80 bp, synthetic construct
  source 1..80: mol_type = other DNA
gttggcctactcacccccaggtgcgaacccgccttccactcgtaaggaagcaatgctcggcacccatgtcgtatgggatg

SEQ ID NO: 164245 - DNA, 80 bp, synthetic construct
  source 1..80: mol_type = other DNA
ggttcacatgagaatgcaatcactgcaaataatggaggcttaataaagtatttcaacatcaattactataaggactctgc

SEQ ID NO: 164246 - DNA, 80 bp, synthetic construct
  source 1..80: mol_type = other DNA
aacgcaacagaggggtaaaagaggtgtaccggtgctagggttcttgggatttcttgcaacggcaggttctgcaatgggtg

SEQ ID NO: 164247 - DNA, 80 bp, synthetic construct
  source 1..80: mol_type = other DNA
cgctggtcgtgcgctctatataccaccatttgaactcttgcgccacgaatggtatgaaaaattttaaacagatatagaat

SEQ ID NO: 164248 - DNA, 80 bp, synthetic construct
  source 1..80: mol_type = other DNA
cagacaacctagtgatgaaaattggcttaattgtgatggcacactcttgggaaatataacagtgtatccacaccaatata

SEQ ID NO: 164249 - DNA, 80 bp, synthetic construct
  source 1..80: mol_type = other DNA
gattatatcttaaatcttgggaaggcattcgggacaggttttacagaccatatcagtgagaaagttagtgaactccaaag

SEQ ID NO: 164250 - DNA, 80 bp, synthetic construct
  source 1..80: mol_type = other DNA
gagtactcctaccactatcccaacactgtcaccacagaccttatagctaagaacaccctaacacacgactggggcatata

SEQ ID NO: 164251 - DNA, 80 bp, synthetic construct
  source 1..80: mol_type = other DNA
gcagagggcactttagtgataaattcaaataattttagagatacaatactagaagtaggtcaattgacttttgcaggcct

SEQ ID NO: 164252 - DNA, 80 bp, synthetic construct
  source 1..80: mol_type = other DNA
atagtacaccgcaacttagtgtacctagatttgtttccaaaattaaaagtctttgaaaatagctactcatatttcagggg

SEQ ID NO: 164253 - DNA, 80 bp, synthetic construct
  source 1..80: mol_type = other DNA
aggaattgcaaaacctacaagtagaagagatgcaatgttaggtactcatgtagtatgggatgttggtttgcagtcaacta

SEQ ID NO: 164254 - DNA, 80 bp, synthetic construct
  source 1..80: mol_type = other DNA
tccagcagcggtgccagcgcgggctcgggtagcaggtagcgacgttgcgagtaacgcgttagcgtgccggtggtgtaggt

SEQ ID NO: 164255 - DNA, 80 bp, synthetic construct
  source 1..80: mol_type = other DNA
actgttacgttgctttgtgtcgcctgtatactcctatttttttttcgacgtctttttaataaaaaataccgtatgttgga

SEQ ID NO: 164256 - DNA, 80 bp, synthetic construct
  source 1..80: mol_type = other DNA
atcttactattcctatcacaatctctattagtcctatgtgtgctgaattctctggagcgagagctagcagtcagggattg

SEQ ID NO: 164257 - DNA, 80 bp, synthetic construct
  source 1..80: mol_type = other DNA
cggggaccctgtacgccatctttctagactggctgagaggtacggatatcccggaccctcgcgggcctcggagacaccgc

SEQ ID NO: 164258 - DNA, 80 bp, synthetic construct
  source 1..80: mol_type = other DNA
tgcaccctataagtctgaattctctggcgccatggaaacccaaaaacaccagggattaccaacgcgcatgcccagtggtg

SEQ ID NO: 164259 - DNA, 80 bp, synthetic construct
  source 1..80: mol_type = other DNA
ttctggacagattggagaagctgattccaagctggggattctgggtgaggtatgttggggttgtgttcttgatctggttt

SEQ ID NO: 164260 - DNA, 80 bp, synthetic construct
  source 1..80: mol_type = other DNA
catcccttggattagtcagactcattacagactagtgcaccaagatgaatataccagtgctggcaatgtgacgtgctggt

SEQ ID NO: 164261 - DNA, 80 bp, synthetic construct
  source 1..80: mol_type = other DNA
gagtagccgtccaggtcctgcagaaaattcagcgagatggtctccaccagggaccggaagggctcggagtgcccgtcgca

SEQ ID NO: 164262 - DNA, 80 bp, synthetic construct
  source 1..80: mol_type = other DNA
atgctaagtatagcacacccccacacagaaaataactggcagtatattacagaaactttactaaaaacacactggcactc

SEQ ID NO: 164263 - DNA, 80 bp, synthetic construct
  source 1..80: mol_type = other DNA
gctcagggtttgcgatgcccggtgactgtgggggtatattaagatgcacccacggtgtgatgggacttattacagcaggt

SEQ ID NO: 164264 - DNA, 80 bp, synthetic construct
  source 1..80: mol_type = other DNA
ccttttctttttgggggccccttttatcccccccccccagtgaaacttagaagcagcaaaccacgatcaatagcaggcat

SEQ ID NO: 164265 - DNA, 80 bp, synthetic construct
  source 1..80: mol_type = other DNA
acttcagcaaatgattgacacctatgggcttgacctaccatatgtgacctacttaaaggatgagcttcgtgctcccaaca

SEQ ID NO: 164266 - DNA, 80 bp, synthetic construct
  source 1..80: mol_type = other DNA
acatgctcataggagccgggtttgcgatgccaggtgactgtggaggaattctgcggtgcactcacggggtgatgggtcta

SEQ ID NO: 164267 - DNA, 80 bp, synthetic construct
  source 1..80: mol_type = other DNA
ataatatgcggacagaacctgaccagcagaaactttagcagccacatagatgagtttactttcaacaaccaggcctacgg

SEQ ID NO: 164268 - DNA, 80 bp, synthetic construct
  source 1..80: mol_type = other DNA
gccaaccccaccccggccaaccgtagtcgttaccagtcacgcaaagttgaaaatatgaaagctgttactacccagcgtgt

SEQ ID NO: 164269 - DNA, 80 bp, synthetic construct
  source 1..80: mol_type = other DNA
gggcaaaaacgcgtgtctatgctgggacaagagtgcctatacaatgcgtccaacgacaagcgtaaagataacgtctgtgc

SEQ ID NO: 164270 - DNA, 80 bp, synthetic construct
  source 1..80: mol_type = other DNA
actgtcaaatcaaccctatgcctggtctccactattcgaaggcaactagcaataagaagagtggatcaatagacgcttaa

SEQ ID NO: 164271 - DNA, 80 bp, synthetic construct
  source 1..80: mol_type = other DNA
catcaaagcaaggagacagttggatcaagaaatttactgaatggtgcaatgctgctaaaggcttggaatggattggctat

SEQ ID NO: 164272 - DNA, 80 bp, synthetic construct
  source 1..80: mol_type = other DNA
ttcactggcctcccttatcaagagacagggtaatcgagagattgaggctgagccccgggaaatccccgaggcctacgctg

SEQ ID NO: 164273 - DNA, 80 bp, synthetic construct
  source 1..80: mol_type = other DNA
gcggcaaccgccaccatggagatgccaccgagagcgcccactcccatgtcaccacctgaggtgccgcccgttccccggca

SEQ ID NO: 164274 - DNA, 80 bp, synthetic construct
  source 1..80: mol_type = other DNA
atttggaggataagggtcgagcattcaccagtgactatgttatcgctagcactaacatgactgttctcactccacccact

SEQ ID NO: 164275 - DNA, 80 bp, synthetic construct
  source 1..80: mol_type = other DNA
gttacttaatgtgtcaaccaatgttacaaggcacagatagggctaaagcagaggtttacttaagtctaagatgtcccaat

SEQ ID NO: 164276 - DNA, 80 bp, synthetic construct
  source 1..80: mol_type = other DNA
aaaaagccaaatgtaaatgtacattttaactactgcacatacgcaccagaccccactcacctagaatcactaagaaaata

SEQ ID NO: 164277 - DNA, 80 bp, synthetic construct
  source 1..80: mol_type = other DNA
gtacacaagcagatgacacaaagcaacccagtgatgataactggttaaattttgatgggacacttttaggcaatctattg

SEQ ID NO: 164278 - DNA, 80 bp, synthetic construct
  source 1..80: mol_type = other DNA
ttgtatggcaaagcacaataactggggtttggtcatattgccactgtccaaacttgactatgccccagagtcatcaacca

SEQ ID NO: 164279 - DNA, 80 bp, synthetic construct
  source 1..80: mol_type = other DNA
ctgaaacaagcatagagagctttcttggtagggcagcatgtgtgcatgttactgacatagaaaataaattaccaaacaca

SEQ ID NO: 164280 - DNA, 80 bp, synthetic construct
  source 1..80: mol_type = other DNA
tgggcaaggctcttaaaaaagctatgtttattggcaggcactaccgaaagaaaagggcgctgctactgctatctgtgcat

SEQ ID NO: 164281 - DNA, 80 bp, synthetic construct
  source 1..80: mol_type = other DNA
atgcatggaataccacacaggcatatacagcagtatatttctcagtccacaaagatcactacaatttccagcagcatacc

SEQ ID NO: 164282 - DNA, 80 bp, synthetic construct
  source 1..80: mol_type = other DNA
aattatgtacataccacctgggggtccaatacctaaatcagcaagagactattcatggcaatcatccaccaaccctagcg

SEQ ID NO: 164283 - DNA, 80 bp, synthetic construct
  source 1..80: mol_type = other DNA
attggcatgtttggtcaaaatgtacaatatcactatctttataggagtggtttcttaattcatgtccagtgtaatgcaac

SEQ ID NO: 164284 - DNA, 80 bp, synthetic construct
  source 1..80: mol_type = other DNA
gtgcgattgctgcgggacacaacccacatctcacaaggcgctctgtttgcaagaacgcaaggcattgaagagacaataga

SEQ ID NO: 164285 - DNA, 80 bp, synthetic construct
  source 1..80: mol_type = other DNA
gtaacccctgcaacagttcccacaactaaaatggtgacagctgaactagtgaatagcactagccagtgcttaatgtacga

SEQ ID NO: 164286 - DNA, 80 bp, synthetic construct
  source 1..80: mol_type = other DNA
ttcatacgaaaatccgacgaactgttacacaacgttaacgcaggtaagagtacaactaacataatgataacaacaattat

SEQ ID NO: 164287 - DNA, 80 bp, synthetic construct
  source 1..80: mol_type = other DNA
ggtgaagggtgaaattaagccaaaagtgtcactcataaatacagcagtgagcgtcagcatacccggtcagatctcaaacc

SEQ ID NO: 164288 - DNA, 80 bp, synthetic construct
  source 1..80: mol_type = other DNA
caaaattgatgccggcgcctccaacaaatatggttattcatcaataaatgattttggcaccttggctgttaggatagtta

SEQ ID NO: 164289 - DNA, 80 bp, synthetic construct
  source 1..80: mol_type = other DNA
gccagtttgccttcttatacatggagtgcctggttgcggtaagtcattgacaacgactgttatagcaaggggcttagcca

SEQ ID NO: 164290 - DNA, 80 bp, synthetic construct
  source 1..80: mol_type = other DNA
tacttggactaacgatcacactaggtttctcatccagttggttgacattggttttcaagaaccctggatacgctactgat

SEQ ID NO: 164291 - DNA, 80 bp, synthetic construct
  source 1..80: mol_type = other DNA
aaaagtcaacagaatatgctgaaaataatccaagatgacgtgaatgccaaattagaaatgttcgtgaatcttgatcaatt

SEQ ID NO: 164292 - DNA, 80 bp, synthetic construct
  source 1..80: mol_type = other DNA
agacaaatgaatactttaaacaaaaggatggacagtggggagatgcaatccacatactaaatactaatgaaatagttaca

SEQ ID NO: 164293 - DNA, 80 bp, synthetic construct
  source 1..80: mol_type = other DNA
tgtgccagtatgaaaagcaaggtagtgtcgattttaaagtccaaggcgtgactgacgcgcgtgcgtcgctcaccacaaca

SEQ ID NO: 164294 - DNA, 80 bp, synthetic construct
  source 1..80: mol_type = other DNA
gaggagtaagcctgtactttttcagagacccagatgtagactttattatacttataaacaccactcctccatttgtagac

SEQ ID NO: 164295 - DNA, 80 bp, synthetic construct
  source 1..80: mol_type = other DNA
aattccagtgataccaatcacagcaactagtggagctgcacacagtgttccaattactgtcacaattgccccaatgtttc

SEQ ID NO: 164296 - DNA, 80 bp, synthetic construct
  source 1..80: mol_type = other DNA
taccggtgtccccctttccaataccggtctttccatctctgctggcatcatcactcttgctgcagcttccatggtggccg

SEQ ID NO: 164297 - DNA, 80 bp, synthetic construct
  source 1..80: mol_type = other DNA
ggcccgtactgaggcgagcccttcccgcgccgccgccctccactccatctaacaccagcacaccatggcctactggagat

SEQ ID NO: 164298 - DNA, 80 bp, synthetic construct
  source 1..80: mol_type = other DNA
taagcccagaaataccaggattgtacacagaaataatatacaacccatacacagacaaaggcaaaggcaacagaatatgg

SEQ ID NO: 164299 - DNA, 80 bp, synthetic construct
  source 1..80: mol_type = other DNA
aatcgttacccaatctggataatgcagccatctgctcatcatccagctcgccaaccagaacacgataatcactttcggta

SEQ ID NO: 164300 - DNA, 80 bp, synthetic construct
  source 1..80: mol_type = other DNA
acatacaatcccctaacagataagggggtgggcaacatgatgtggtaccagtacaacacaaaggcagacactcaattcca

SEQ ID NO: 164301 - DNA, 80 bp, synthetic construct
  source 1..80: mol_type = other DNA
ttcgatatggaaataacatttgtgattactagcacacaagacccaggaacgcagctagcacaagacatgcccgtactaac

SEQ ID NO: 164302 - DNA, 80 bp, synthetic construct
  source 1..80: mol_type = other DNA
aagctcctcttaacatacttgctgacgccagtaacatcgatgttaaagctttggatatccagccaaaacctaaagatctc

SEQ ID NO: 164303 - DNA, 80 bp, synthetic construct
  source 1..80: mol_type = other DNA
gggaaagatgatgtttcagaaaaagaaaatactaattcctagctatgacactaatcccaagggtcctcagaaaattaaga

SEQ ID NO: 164304 - DNA, 80 bp, synthetic construct
  source 1..80: mol_type = other DNA
tctaggctcagatgagactccaggatttattatagacctcctgtcatcttcaaaagatccaagagtcgtacaatactgtg

SEQ ID NO: 164305 - DNA, 80 bp, synthetic construct
  source 1..80: mol_type = other DNA
tcaactactacaaagactcggcaagttcaggattaagtaaacaggatttctcccaagacccatcgaaatttacacagcca

SEQ ID NO: 164306 - DNA, 80 bp, synthetic construct
  source 1..80: mol_type = other DNA
tccaggtagagacagacggcatgacggatgcactggttaggtgggcagaaaaagatgaccatgagactgtcgtaggccag

SEQ ID NO: 164307 - DNA, 80 bp, synthetic construct
  source 1..80: mol_type = other DNA
gaatgaaaatgacatccacaccactaaagtaaagatcagagtttaccaccgtgctaagcatgtcatggcatgggttccac

SEQ ID NO: 164308 - DNA, 80 bp, synthetic construct
  source 1..80: mol_type = other DNA
aagggggccttataaacactcttgctaacgccctcttgagggtccgcttatcggtagctacacaggcccctctgattgac

SEQ ID NO: 164309 - DNA, 80 bp, synthetic construct
  source 1..80: mol_type = other DNA
tggatttactccattgagtgtttttactccagacgtgattcgagcagtcttattgattagaagcatctgccacaatggga

SEQ ID NO: 164310 - DNA, 80 bp, synthetic construct
  source 1..80: mol_type = other DNA
acatctttggtacacatacccttagtcaacatcaagctattggcttggttgggactattttactgactgctgggctaatg

SEQ ID NO: 164311 - DNA, 80 bp, synthetic construct
  source 1..80: mol_type = other DNA
catttgccctttagaggttagtaccactgggaccaatggcatacccataactgtgtcaatcagtcccatgtttgctgaga

SEQ ID NO: 164312 - DNA, 80 bp, synthetic construct
  source 1..80: mol_type = other DNA
cccacctgcgccagaaactcatcacccgcgacatatgcgtggcgcggttgcaagcgcagccctcgagtcgacacattccg

SEQ ID NO: 164313 - DNA, 80 bp, synthetic construct
  source 1..80: mol_type = other DNA
tctactccttactatgttgtggacctgtcagttcgtgggatgttagaagccagcgaaggcctggatggttggattcatca

SEQ ID NO: 164314 - DNA, 80 bp, synthetic construct
  source 1..80: mol_type = other DNA
ctcattgccagttacatcaatagtcatactctttttgaccacttgaattactgatccagctgttataagatctggttcac

SEQ ID NO: 164315 - DNA, 80 bp, synthetic construct
  source 1..80: mol_type = other DNA
agtaattgtctcaaaatttgcaaaagaatgtgggttacccagtattcacacaccaagcaaaactaaactccaacccagtg

SEQ ID NO: 164316 - DNA, 80 bp, synthetic construct
  source 1..80: mol_type = other DNA
tgtcttctatggcatacccgcatggaagaatgcaacagttcccctcctttgtgcaacaacaaacagagacacctggggaa

SEQ ID NO: 164317 - DNA, 80 bp, synthetic construct
  source 1..80: mol_type = other DNA
tttgttggccatcttaatcatctggcaactactttgggtcgccctccacgttctgggtccccgggcggaccccgcacgcc

SEQ ID NO: 164318 - DNA, 80 bp, synthetic construct
  source 1..80: mol_type = other DNA
gcacatatgctagacaacatttgattgtagatgtagaactcccacatgctttttgggataacactaataaacctgcctac

SEQ ID NO: 164319 - DNA, 80 bp, synthetic construct
  source 1..80: mol_type = other DNA
actcttcatacaaaatgtgcgaattaggcaactatcatcagactgcaccgcgcagcgacatatgttttgagtgtaacgac

SEQ ID NO: 164320 - DNA, 80 bp, synthetic construct
  source 1..80: mol_type = other DNA
cccctcagctctcttgcgttctgcccatcactcaccccaggactccatcctcccacacccctcaacttccagcttagact

SEQ ID NO: 164321 - DNA, 80 bp, synthetic construct
  source 1..80: mol_type = other DNA
ctgagagacaccacccacatctcccaatctgctttgccacagggaattgaggacctgattgaaaaagtcgcgagtaatgc

SEQ ID NO: 164322 - DNA, 80 bp, synthetic construct
  source 1..80: mol_type = other DNA
tccacgaaggcaagatcaccaccgagacgtatcacctccagcgcatctatagcatgatgatcgagggcgcctctcggcag

SEQ ID NO: 164323 - DNA, 80 bp, synthetic construct
  source 1..80: mol_type = other DNA
gtcaaccataaaaacaccagtaaataagacaacaattaaagaattctttaaccatgcaattgaaggggatgagcaagggc

SEQ ID NO: 164324 - DNA, 80 bp, synthetic construct
  source 1..80: mol_type = other DNA
ctcaaatggctcgagggcctgtcgcagctcgtctctggcctcaagctcctgctcacggagctcctccacccgctctagct

SEQ ID NO: 164325 - DNA, 80 bp, synthetic construct
  source 1..80: mol_type = other DNA
acacgcgcgaagtgatccaccagacgttgtttcgattgtgctcggcggccgcagccacatcgggcctgtgttcatcccct

SEQ ID NO: 164326 - DNA, 80 bp, synthetic construct
  source 1..80: mol_type = other DNA
tctactcgtccactctcggtggcgcaccggactccacgatggcacccctagcttccgagccctccacatcgggttccacc

SEQ ID NO: 164327 - DNA, 80 bp, synthetic construct
  source 1..80: mol_type = other DNA
gagaacttgtaatacatcagtgatccaagagtcatgtgataaacatttctgggatagcttaagatttaggtactgtgccc

SEQ ID NO: 164328 - DNA, 80 bp, synthetic construct
  source 1..80: mol_type = other DNA
tctcggaaggtgcaaccgatgttcaaactgcagtatgcaatgctggtatgggagtgggagtcgggaatctaacaatctac

SEQ ID NO: 164329 - DNA, 80 bp, synthetic construct
  source 1..80: mol_type = other DNA
tcgtcctcctcaactcgctccaggggccaggggataccgctcatatcactaagggcggtgcccaggtagaggagctcgcg

SEQ ID NO: 164330 - DNA, 80 bp, synthetic construct
  source 1..80: mol_type = other DNA
ttcgcgaaacacgttgttgagggagggcggcggcggtcggcccgccagcgtgccgaaggccaggccgctggcgctgccgt

SEQ ID NO: 164331 - DNA, 80 bp, synthetic construct
  source 1..80: mol_type = other DNA
cacgtggtgtgtgcgtcacggccgccattttgtatcacaaaatggccgacttccttcctctttttcaaaaaaaacggtcc

SEQ ID NO: 164332 - DNA, 80 bp, synthetic construct
  source 1..80: mol_type = other DNA
tccatctatttcacagaatgaggcactcacagaaggtctgggtgatcaactggatgaagtaatagttgataaagcaaaac

SEQ ID NO: 164333 - DNA, 80 bp, synthetic construct
  source 1..80: mol_type = other DNA
accagcatcgacattcacgacctagacgccagcgatctgaaccgacgcgaaattctgaaagcgctgcagccgttggacga

SEQ ID NO: 164334 - DNA, 80 bp, synthetic construct
  source 1..80: mol_type = other DNA
agcctcctacacggatacacagagtacctagaaactcagatcaaatggggagacataaatctagaaggcaaagtactcat

SEQ ID NO: 164335 - DNA, 80 bp, synthetic construct
  source 1..80: mol_type = other DNA
actagcacagtggatgtaactgtattagggagtctattacaattagattttcaaaaccctagagtttataacacccaggt

SEQ ID NO: 164336 - DNA, 80 bp, synthetic construct
  source 1..80: mol_type = other DNA
ttttaagccaaagcatgtgaaggtgtgggtcccgcggccccccaggttgtgtcagtacaagaacgcgtcgacagtgaact

SEQ ID NO: 164337 - DNA, 80 bp, synthetic construct
  source 1..80: mol_type = other DNA
ggaaggcaatccaactgatggacaggcacaccagagtaagatattcagtggatcagcttactacaatgatgatcaatgag

SEQ ID NO: 164338 - DNA, 80 bp, synthetic construct
  source 1..80: mol_type = other DNA
tttaaaaacggaacaaaccaggagggaaccaatactactactgccgctcccaatattaattccactgtaattaacgaaac

SEQ ID NO: 164339 - DNA, 80 bp, synthetic construct
  source 1..80: mol_type = other DNA
ctgatcatgcccacggtggggcggaggtcggagatctccagcagatccctgagcgtcccattctccaaattgtcgagtat

SEQ ID NO: 164340 - DNA, 80 bp, synthetic construct
  source 1..80: mol_type = other DNA
ttcaaacgtcaactatagaaggtgtgctaaggatgacttctcggagggtggttacatcaccgcattttaccaaaccgcta

SEQ ID NO: 164341 - DNA, 80 bp, synthetic construct
  source 1..80: mol_type = other DNA
gaaccactactgggaagattgaagtttatcttagtttgaggtgcccgaatttctttttcccccttcctgctcctaaggtc

SEQ ID NO: 164342 - DNA, 80 bp, synthetic construct
  source 1..80: mol_type = other DNA
tgtggtttcaaagcctccaccatcagctatctcagacttgctcaaagctgtagataatgatgaagtaagggaatattgta

SEQ ID NO: 164343 - DNA, 80 bp, synthetic construct
  source 1..80: mol_type = other DNA
aagctgttcaactccccgtccgccagcctgggtgccagggtgtctggtcacaatgaaagcatcctaaacagtttcgtttc

SEQ ID NO: 164344 - DNA, 80 bp, synthetic construct
  source 1..80: mol_type = other DNA
aagtaataagacccaaggcataccagttagaatgcccagtggtgctcaacagttcatgaccacagaagacgaacagtcag

SEQ ID NO: 164345 - DNA, 80 bp, synthetic construct
  source 1..80: mol_type = other DNA
gccaagctgaagaaaggtctagatgagttagcacctttatatgctaatgagaataagagagcaacaggaatccagaaaga

SEQ ID NO: 164346 - DNA, 80 bp, synthetic construct
  source 1..80: mol_type = other DNA
tgttttcggtcgtgctgtgttacgctggagacggtgacggtggtttttggtcgtactggggccggggggtgtgcggggcc

SEQ ID NO: 164347 - DNA, 80 bp, synthetic construct
  source 1..80: mol_type = other DNA
ttccctccccaaaagtaactttagaagcaaataaactcacagctcgatagccgtcgcaccgccagtgcgactatgagcaa

SEQ ID NO: 164348 - DNA, 80 bp, synthetic construct
  source 1..80: mol_type = other DNA
gtaatgtcaaagtacaagggtaacaaaaatgtggaaatgaatgaatatgtggtaactgcctccaaacattatgcagcaca

SEQ ID NO: 164349 - DNA, 80 bp, synthetic construct
  source 1..80: mol_type = other DNA
attagtgaaaaggtgacagaattgcaaaatatttcaatgggttacttaaacacaaaagtcctgtccaagatagtaaaaat

SEQ ID NO: 164350 - DNA, 80 bp, synthetic construct
  source 1..80: mol_type = other DNA
ccgccggagatgtttgtctacatcacactggtctttatcgcggactgcgtggctttcatctactacgcctgcggcgaggt

SEQ ID NO: 164351 - DNA, 80 bp, synthetic construct
  source 1..80: mol_type = other DNA
ggtgctgacatcccagagacacgccgtgacgcaatgctcggcacgcacgttgtgtgggacctgggcctccaatcgtcatg

SEQ ID NO: 164352 - DNA, 80 bp, synthetic construct
  source 1..80: mol_type = other DNA
cctcttcaaatagattttatacattagagagtaaagtttggacacaaacttcaaaagggtggtactggggaagtttccca

SEQ ID NO: 164353 - DNA, 80 bp, synthetic construct
  source 1..80: mol_type = other DNA
gtgcagttcttccaacacatgcagagtgtggtgacactattttgattgacaatatccaaactagagttatcaaacagcaa

SEQ ID NO: 164354 - DNA, 80 bp, synthetic construct
  source 1..80: mol_type = other DNA
gcctctccctctccccagccagtgaccagagactgaaatacaccttactaggcgaagtgctgaactattacacccactgg

SEQ ID NO: 164355 - DNA, 80 bp, synthetic construct
  source 1..80: mol_type = other DNA
gattggatccatcgggaagcgtcaaaagaaggactatgaggtacaacatgcatggtaaaatagaggaggtgccgctccat

SEQ ID NO: 164356 - DNA, 80 bp, synthetic construct
  source 1..80: mol_type = other DNA
agctgcacactacactgcccagctttcaacactagatataaacccagaaccactatccatggaagaaagtgtgtatggaa

SEQ ID NO: 164357 - DNA, 80 bp, synthetic construct
  source 1..80: mol_type = other DNA
atctgggatttgggcttgcaatcctcctgtacactagtggtaccctggatatcatcaggattctatcgcagaacgacatc

SEQ ID NO: 164358 - DNA, 80 bp, synthetic construct
  source 1..80: mol_type = other DNA
gcagctaccttatatgaaagtcaaactaaaaaattactgtccacaacatttacaggaagcaccccatacttagaatatca

SEQ ID NO: 164359 - DNA, 80 bp, synthetic construct
  source 1..80: mol_type = other DNA
cgacaaactcccaagcaatcccagcattgacagcggttgagaccgggcacacctcgcaagtagtgcctggagacacaatg

SEQ ID NO: 164360 - DNA, 80 bp, synthetic construct
  source 1..80: mol_type = other DNA
actatgttagaaccaattcgtcagacttagggcaattgagggtttatgtgtggaccccagtcaccatgccaagcagctcc

SEQ ID NO: 164361 - DNA, 80 bp, synthetic construct
  source 1..80: mol_type = other DNA
ctactatatgtagttgttaaattaataagaataagtgtatgattctgtacacattgccacttaatgttcggagcgttctc

SEQ ID NO: 164362 - DNA, 80 bp, synthetic construct
  source 1..80: mol_type = other DNA
tcaggaacatgtagtggaccctaaatgggaaactttcaaacaaccaaatcctagcggtgctggaaacaataaatacctac

SEQ ID NO: 164363 - DNA, 80 bp, synthetic construct
  source 1..80: mol_type = other DNA
gttacagaaacgggttcacaggtgttcggttttactttacaacctggtgcagacagcgtgatggagaggactttactagg

SEQ ID NO: 164364 - DNA, 80 bp, synthetic construct
  source 1..80: mol_type = other DNA
cgaagacctgctagacgccgtcgatttcgcagagtaaggagacgaaggggagggtggtcgcgcgcgtacagacgatggag

SEQ ID NO: 164365 - DNA, 80 bp, synthetic construct
  source 1..80: mol_type = other DNA
gtccccaggctccccagcaggcagaagtatgcaaagcatgcatctcaattagtcagcaaccaggtgtggaaagtccccag

SEQ ID NO: 164366 - DNA, 80 bp, synthetic construct
  source 1..80: mol_type = other DNA
aagggccggactcccaacgtggcccaacctctgctcccctctattctcctcttgcgttatctccaatagaatttgcttga

SEQ ID NO: 164367 - DNA, 80 bp, synthetic construct
  source 1..80: mol_type = other DNA
cgtcccctggggactcaaacagacacagacgcgcgtctgcttttcgccgtgcgcgccgcacgtcgcttttattcgccgtc

SEQ ID NO: 164368 - DNA, 80 bp, synthetic construct
  source 1..80: mol_type = other DNA
tggacttaccacacttaatacatttattctaggtgtcacttgtatagcaattagaatcaaacagttgcatcataatgggt

SEQ ID NO: 164369 - DNA, 80 bp, synthetic construct
  source 1..80: mol_type = other DNA
gacttttcagtacgcttgttgagggacaccacacatatcagccaggacaaaccaatcttaacacagggcatagaggatat

SEQ ID NO: 164370 - DNA, 80 bp, synthetic construct
  source 1..80: mol_type = other DNA
actcctccaggaaatgaggacccacagagagaaccatgggaagagtgggtagtggacgtcctggaggaaataaagcaaga

SEQ ID NO: 164371 - DNA, 80 bp, synthetic construct
  source 1..80: mol_type = other DNA
tttaaatgatacagtgcaatttaggatggcttttggcagactcttttctacatttcaccaaaacccaggaatcattactg

SEQ ID NO: 164372 - DNA, 80 bp, synthetic construct
  source 1..80: mol_type = other DNA
gataattgtgtataacccctccaacaaaggccctgccttaagatgggaaattacaaaatttgctatgaggttaatctggt

SEQ ID NO: 164373 - DNA, 80 bp, synthetic construct
  source 1..80: mol_type = other DNA
tcaaccgccgcaaactgataacactggtgcctcagtacaaaacacacaaaggagcggaccagcaaatacggagcgtgtgc

SEQ ID NO: 164374 - DNA, 80 bp, synthetic construct
  source 1..80: mol_type = other DNA
ccagggaaggcgcaggtggcggggcaggggcagaagcaagggcaggtgcagaatgcacaaacttcctgaaccacggagac

SEQ ID NO: 164375 - DNA, 80 bp, synthetic construct
  source 1..80: mol_type = other DNA
actggacttatagcaataagaatctagagctaggaaggtacagggggtgcacaatcaagttttacagaaaccccacaact

SEQ ID NO: 164376 - DNA, 80 bp, synthetic construct
  source 1..80: mol_type = other DNA
acagtgccgtttgactctgccttgaaccattgtaactttggccttcttgtggtccctgtgtctcccttagattacatgac

SEQ ID NO: 164377 - DNA, 80 bp, synthetic construct
  source 1..80: mol_type = other DNA
gaagtggataagttaaagaagggactggatgaattggccccgctctatgcagtagaaaataaaagggttacaaagatcca

SEQ ID NO: 164378 - DNA, 80 bp, synthetic construct
  source 1..80: mol_type = other DNA
aataaatcctataaataacatcagtaaaaaagtcattaaatggttattgagaattgtatctgctatggtaataattatta

SEQ ID NO: 164379 - DNA, 80 bp, synthetic construct
  source 1..80: mol_type = other DNA
agtgcacacttgaaagaaacattgaccatctgcagtacatcctcaattgcctaggaagcctaattctcattttgggtacc

SEQ ID NO: 164380 - DNA, 80 bp, synthetic construct
  source 1..80: mol_type = other DNA
gtctgtattggtacatttgcaaaccgtcgggtgtggcggtatagtttagcgatgattatattatgtatgtgccgtataga

SEQ ID NO: 164381 - DNA, 80 bp, synthetic construct
  source 1..80: mol_type = other DNA
ggtgctcatggtgcagaaaccataccacattgcaactgtacctccggagtttactactccacctattacagaaaatttta

SEQ ID NO: 164382 - DNA, 80 bp, synthetic construct
  source 1..80: mol_type = other DNA
gtgaatacgactaacttaacccaacacccgtccgccccaaccatgcccttttcaccagatttttctaatgttgacaattt

SEQ ID NO: 164383 - DNA, 80 bp, synthetic construct
  source 1..80: mol_type = other DNA
tgacagaaaacacaaagattcacaactgctgccgcagactccatgcatcatatctacaaacaacaacatttacgagtgtg

SEQ ID NO: 164384 - DNA, 80 bp, synthetic construct
  source 1..80: mol_type = other DNA
tctagtaacctaactgtccaggcaatgtatgtacctcctggtgcacctaaccctaaggaatgggatgattacacatggca

SEQ ID NO: 164385 - DNA, 80 bp, synthetic construct
  source 1..80: mol_type = other DNA
ttggcgcgcctcccactaggggcccctgcgcgccctcccccgcgaatccgcaggtgagggcgcgcagcgccccatagttg

SEQ ID NO: 164386 - DNA, 80 bp, synthetic construct
  source 1..80: mol_type = other DNA
tcatcactgctggtggtaatggaatagtcgcctttgccgatatcagagacctgtatgtggaggatgaggcaatggaacag

SEQ ID NO: 164387 - DNA, 80 bp, synthetic construct
  source 1..80: mol_type = other DNA
tggttgtggtggtgaaagaagagcaccagcaatcccaggaggagcaacaagccctcacatgtccaggaggtcggggagag

SEQ ID NO: 164388 - DNA, 80 bp, synthetic construct
  source 1..80: mol_type = other DNA
tactgctcttttaccccaaaagacaaaaaaggcagagacaacattataaagataagagacacaaactttaaatacttaac

SEQ ID NO: 164389 - DNA, 80 bp, synthetic construct
  source 1..80: mol_type = other DNA
ccccgtcatcatataaataccaccaaaagatgccctcaggacgtgactcttctcccaataatccgtgctgcctaccctgg

SEQ ID NO: 164390 - DNA, 80 bp, synthetic construct
  source 1..80: mol_type = other DNA
tatcaaaaccagaccccttatcagctcagcgggaccgagcgacatgtttgtgcacaccagggacgcaatctacaaatgtg

SEQ ID NO: 164391 - DNA, 80 bp, synthetic construct
  source 1..80: mol_type = other DNA
aagctctcggcgcaactcgtccctaggtgaccgcccaggggaggggggggggcgcggaccccgggccacactgctttcat

SEQ ID NO: 164392 - DNA, 80 bp, synthetic construct
  source 1..80: mol_type = other DNA
gcttctatatgaaaccaaaacacgtgaaggcttggatcccaaggccaccacgcttgtgtgaatatgagaagtcgggcaat

SEQ ID NO: 164393 - DNA, 80 bp, synthetic construct
  source 1..80: mol_type = other DNA
cctagctcacctcccaatacccctagacagtagttacttaaaaacatattatcacaaaaggccttgaccaacttaaacag

SEQ ID NO: 164394 - DNA, 80 bp, synthetic construct
  source 1..80: mol_type = other DNA
aaagaactcactgagaggcactacctaacaccaagaaatgacatcaccactgtcgggcctagtgaccttcatgtgcatgc

SEQ ID NO: 164395 - DNA, 80 bp, synthetic construct
  source 1..80: mol_type = other DNA
tctcaaactggtcaggttcaatcaaattgacattcctgtgtgtgtgtgacagttttagtactggaaaattcctaatagca

SEQ ID NO: 164396 - DNA, 80 bp, synthetic construct
  source 1..80: mol_type = other DNA
actcaaggtcttcaggaacaccatcaataccccatctgaatgttggtcagagatgccagtggtttaatacaaaaagcagc

SEQ ID NO: 164397 - DNA, 80 bp, synthetic construct
  source 1..80: mol_type = other DNA
aatagagaacttccttagcaggtcagcgtgtgtttattacgctacgtataagacaactgccagtaaacctgaggaccaat

SEQ ID NO: 164398 - DNA, 80 bp, synthetic construct
  source 1..80: mol_type = other DNA
gcctcgggtctcgccgctagttggtccagggtccaggagaaggcttcgtgccaaaccaaaaagggccccgagtgctccct

SEQ ID NO: 164399 - DNA, 80 bp, synthetic construct
  source 1..80: mol_type = other DNA
ttttaagtttcagaaaattttaaaattaaaattgaaatttctctcaaaataattccaatgaaaacttcaaagaatcttat

SEQ ID NO: 164400 - DNA, 80 bp, synthetic construct
  source 1..80: mol_type = other DNA
caaaaatgaaatgcaaggaaaaacatacaattgggaaaactacaaaactttctttaacaaagtacaaacaaagtggcaaa

SEQ ID NO: 164401 - DNA, 80 bp, synthetic construct
  source 1..80: mol_type = other DNA
tgtatccctattagttatcccagttgtaccgctgataaatccggtaggtatgtctacaataataccagttacagtgacca

SEQ ID NO: 164402 - DNA, 80 bp, synthetic construct
  source 1..80: mol_type = other DNA
gcttacgcctagcaacatctctgcagggtctaccagtgatgaacgtgccgggtagtaaccaattcctcacctctgacgac

SEQ ID NO: 164403 - DNA, 80 bp, synthetic construct
  source 1..80: mol_type = other DNA
tttaacttctctgtcccttttctcataaactgtcaggtcctacagtcagcatgtcttgagcatgcggtagagcagataga

SEQ ID NO: 164404 - DNA, 80 bp, synthetic construct
  source 1..80: mol_type = other DNA
gacaaacttcttccgcatggaagagcccccggcctgcttgcgcagcccagccccgggggcctgcagcaggttcctgtcca

SEQ ID NO: 164405 - DNA, 80 bp, synthetic construct
  source 1..80: mol_type = other DNA
ggtaccccaacatgctgcaccaacagtctgttatggaagacgtgtgtaggacaggcccctttgcccctaaacaacaagta

SEQ ID NO: 164406 - DNA, 80 bp, synthetic construct
  source 1..80: mol_type = other DNA
tgccaatattcccttgtggatgggtttacacggctacgtagactgggtaaaaaaagaaacagacaactggaacatagtaa

SEQ ID NO: 164407 - DNA, 80 bp, synthetic construct
  source 1..80: mol_type = other DNA
ctgtttcttatatcaaacataattttcctgacgcaatcccttacattgatgaataccttaatattgaaatgtccacctta

SEQ ID NO: 164408 - DNA, 80 bp, synthetic construct
  source 1..80: mol_type = other DNA
tgtgaccttcctaaagagaggattcagagctgatgagcgccactctttccttatacatcctacctttcctgtggcagaga

SEQ ID NO: 164409 - DNA, 80 bp, synthetic construct
  source 1..80: mol_type = other DNA
gcaaggctcttaaaaaagcatgtttctcggtaaactttacagaaagaaaaggaaagtgccactgtctggcctgcactctc

SEQ ID NO: 164410 - DNA, 80 bp, synthetic construct
  source 1..80: mol_type = other DNA
caaaaccctaatggtgaagatattagcacattctgtcaaatggtttcatcagttgacttcatcccacccatggcaaactt

SEQ ID NO: 164411 - DNA, 80 bp, synthetic construct
  source 1..80: mol_type = other DNA
tcctaaaacatttaaaatgtcacttccttcaactgcaatgcaatttcaaagttttcctcttatatctttttttttttttt

SEQ ID NO: 164412 - DNA, 80 bp, synthetic construct
  source 1..80: mol_type = other DNA
tgtgcaaatgttgtagtgggatacggtgtgtggcctacgtaccttgcagacaacgaagccactgctgaagaccaacccac

SEQ ID NO: 164413 - DNA, 80 bp, synthetic construct
  source 1..80: mol_type = other DNA
cacaagtgtcaagacaaaatgttggtactcactctacacaaaatgctgttacaggaggatccagtttgaactattttaat

SEQ ID NO: 164414 - DNA, 80 bp, synthetic construct
  source 1..80: mol_type = other DNA
cctatgggtgggatagaaggctatagtcagaagctctggactattattaccattccttttctctttttgagtggtgtcga

SEQ ID NO: 164415 - DNA, 80 bp, synthetic construct
  source 1..80: mol_type = other DNA
tttcaagacaacaaactggcacgcatgagaatgccaacattgccacgggtggctccaacataacatacaaccagataaac

SEQ ID NO: 164416 - DNA, 80 bp, synthetic construct
  source 1..80: mol_type = other DNA
accacatgactggtaccctatagaggagacacaatactatcccaaacacatacagtacaacctgcttttgggcaaaggac

SEQ ID NO: 164417 - DNA, 80 bp, synthetic construct
  source 1..80: mol_type = other DNA
tggatttactccgattaatttctttacatacaaacttattactgcaaccatattaattagaaacatatatcacaatgggt

SEQ ID NO: 164418 - DNA, 80 bp, synthetic construct
  source 1..80: mol_type = other DNA
cctgtataagaaaagaatctgacaaaaaggactggggctttgttttttatgacaccaactttggcaacggaaagactccc

SEQ ID NO: 164419 - DNA, 80 bp, synthetic construct
  source 1..80: mol_type = other DNA
tgagtagtgaagggtttttacgtgtagcacacacgtatgacactgaagccaagaggtctgattttctatcatctaatggg

SEQ ID NO: 164420 - DNA, 80 bp, synthetic construct
  source 1..80: mol_type = other DNA
ccccactcacaccacccaatgggtgttgtactctgttattccggtaactttgtacgccagtttttcccctccctccccat

SEQ ID NO: 164421 - DNA, 80 bp, synthetic construct
  source 1..80: mol_type = other DNA
cagatcctggtcatgaagtacaaatagatggcattacaactaaggtagaggattcatttgatttatttaacaaggatgga

SEQ ID NO: 164422 - DNA, 80 bp, synthetic construct
  source 1..80: mol_type = other DNA
aggaaaacccatggacctggcaatccttaaatgtaaattaccttttagattcaagaaaaattcaaagtactatactaaca

SEQ ID NO: 164423 - DNA, 80 bp, synthetic construct
  source 1..80: mol_type = other DNA
cattgaacaacatgggcaaattgtatgcacgacacgtgaacaaggacacaccacaccagatgtccagcacgatccgcgtg

SEQ ID NO: 164424 - DNA, 80 bp, synthetic construct
  source 1..80: mol_type = other DNA
cagtaaatacaaagtcctcattcccagcttccagaccagacccaagggtcgcaaaacagtaaccgttaaaataagacccc

SEQ ID NO: 164425 - DNA, 80 bp, synthetic construct
  source 1..80: mol_type = other DNA
aggcacccaatttaatcaagacgcacccattatgtgccaccaagtgatgtatgtaccgccggggggcccagtacccaaga

SEQ ID NO: 164426 - DNA, 80 bp, synthetic construct
  source 1..80: mol_type = other DNA
cctgtagcaacttcctcggggtccggcgctacgccttcggctgcgccggacgcctcggaccccccctcgacccgaatcgc

SEQ ID NO: 164427 - DNA, 80 bp, synthetic construct
  source 1..80: mol_type = other DNA
tttcacccccaccccctaggtaactcttagaagcacttgcacacagacgaataggcagccaacactccacgttggtcaac

SEQ ID NO: 164428 - DNA, 80 bp, synthetic construct
  source 1..80: mol_type = other DNA
agaaaccggagttgaggagagcaatacatcagggtcccgaacatgagtttttgtatgcagttattaaaagaaactgtcat

SEQ ID NO: 164429 - DNA, 80 bp, synthetic construct
  source 1..80: mol_type = other DNA
gtgaacgtggacacgaaataggccgcaacacaaatagagatgataaccagccagatgaaaaccctttttttaactgtaat

SEQ ID NO: 164430 - DNA, 80 bp, synthetic construct
  source 1..80: mol_type = other DNA
gcctatcgacgacccctaccaaaaacccacccacgaaatacccgaccccgataagcaccctccaagactacaaattgcag

SEQ ID NO: 164431 - DNA, 80 bp, synthetic construct
  source 1..80: mol_type = other DNA
ggattgttgcagttcagaaccatgaagtaagaattggtcagataaatgatttgggggtttattctaaaggatgcgggagt

SEQ ID NO: 164432 - DNA, 80 bp, synthetic construct
  source 1..80: mol_type = other DNA
cggggacggggggtgtgcgtggacgggtggtgtgcgaggacttgcggccttctgcggatacggagaggttagcgtcggtg

SEQ ID NO: 164433 - DNA, 80 bp, synthetic construct
  source 1..80: mol_type = other DNA
tcaaggagcagaccaaaccgcacagaacattagaactacaattaaaaataacatgaatagttactttaaaaaaatacaag

SEQ ID NO: 164434 - DNA, 80 bp, synthetic construct
  source 1..80: mol_type = other DNA
gcgcgcgcaaggcattgaggagaccattgacaccgttattaccaatgcattacagctttcacagcctaaaccgcaaaagc

SEQ ID NO: 164435 - DNA, 80 bp, synthetic construct
  source 1..80: mol_type = other DNA
gcgtgcggctgctaagagacaccacccacattagtcagacagctctgatagctcaaacccagggcattgatgatgtcata

SEQ ID NO: 164436 - DNA, 80 bp, synthetic construct
  source 1..80: mol_type = other DNA
ctcaggcaaccccgcacacgccaagttaaaaccacccactttacgacaagtggtagttcaaggtccaaacactgaatttg

SEQ ID NO: 164437 - DNA, 80 bp, synthetic construct
  source 1..80: mol_type = other DNA
aaagcattattttccaaatacaaggggaatctaaactgtgaaataaatgaccatgttaagattgcagttgcacactattc

SEQ ID NO: 164438 - DNA, 80 bp, synthetic construct
  source 1..80: mol_type = other DNA
aacaacagggctggattgttgaagcaccgtcaagctctatcactatagaaagacacatttcaaaagctgccactatcttg

SEQ ID NO: 164439 - DNA, 80 bp, synthetic construct
  source 1..80: mol_type = other DNA
caggtatgatcactaatattctccatatggctagagtggattctttcatgcctatcaacaatataagaaatcatgaggga

SEQ ID NO: 164440 - DNA, 80 bp, synthetic construct
  source 1..80: mol_type = other DNA
atcactcatcttgaggctttcaatctatgccagcacgttcaacagaggtcgattgagaatgggattcttcccaaattgta

SEQ ID NO: 164441 - DNA, 80 bp, synthetic construct
  source 1..80: mol_type = other DNA
gcaacttccccatggcccaagtcccgcagggactgaccccaacagcccctccagcagaaccagcagtggatctgctgacc

SEQ ID NO: 164442 - DNA, 80 bp, synthetic construct
  source 1..80: mol_type = other DNA
gagggcataggccaagtgcacccttactggatgcagaggtggagagtaatggcccagtttcaaaaagagactcagaacag

SEQ ID NO: 164443 - DNA, 80 bp, synthetic construct
  source 1..80: mol_type = other DNA
ttaccagaaacaaatactagcagacttccaaacaaatgcccaaaactactttagcgcaagagcaggctcaaccattacag

SEQ ID NO: 164444 - DNA, 80 bp, synthetic construct
  source 1..80: mol_type = other DNA
tatattgaggaatattttaccaaagaccaagataatgccaatagatacatgtcgtggaccataaatgccaggaggatggt

SEQ ID NO: 164445 - DNA, 80 bp, synthetic construct
  source 1..80: mol_type = other DNA
tttatggagatgatgtgatcttatcattggacaaagaaattgaaccagaggaattgcaacgtatcatggcagattcattt

SEQ ID NO: 164446 - DNA, 80 bp, synthetic construct
  source 1..80: mol_type = other DNA
agacaacagatacacactaggcaactgtcactggatgatagaaaacctgcccctgtggagtctgctccacggctaccgag

SEQ ID NO: 164447 - DNA, 80 bp, synthetic construct
  source 1..80: mol_type = other DNA
cggagtacctcaagcagcagctcaagcagcagctcagggaacagaagcgcatcaagcaaaagctcagcacagtcgtcaag

SEQ ID NO: 164448 - DNA, 80 bp, synthetic construct
  source 1..80: mol_type = other DNA
gctactgcacttactgtcccacaacggacatagtgcagaaaataaaacaatacagaaaaaaaagatttggctggctaaca

SEQ ID NO: 164449 - DNA, 80 bp, synthetic construct
  source 1..80: mol_type = other DNA
ttaagagtattgctgacatggctactggcgccatggagtctctgagtttatcaaatgtttctgataagatcacaagcggg

SEQ ID NO: 164450 - DNA, 80 bp, synthetic construct
  source 1..80: mol_type = other DNA
gaagctatgtggtcaggacaatgccaaagagttcacacgggagggacccaccatctcaaaaggcgcaactgatgtccaaa

SEQ ID NO: 164451 - DNA, 80 bp, synthetic construct
  source 1..80: mol_type = other DNA
acggccgtagagactggacacacctcacaggtggtgccaggcgacacaatacaaaccagacacgtagttaatttccactc

SEQ ID NO: 164452 - DNA, 80 bp, synthetic construct
  source 1..80: mol_type = other DNA
cgcacccacgctgcttgctgtggttgtggtaatgcttgtactcatctggctgctctggcccagaggtatgggtacccttc

SEQ ID NO: 164453 - DNA, 80 bp, synthetic construct
  source 1..80: mol_type = other DNA
aatggattgtctcggattggcatgattgtagacctaaaaaagtctcaggtgggcacatcaatgtaatagaagtcggtgat

SEQ ID NO: 164454 - DNA, 80 bp, synthetic construct
  source 1..80: mol_type = other DNA
agggtgccggtgtctcgcgtctccgcgaggtctgggatgtgcagcatcgcgtgcgcctccgtgtgctgtggtacgtcaat

SEQ ID NO: 164455 - DNA, 80 bp, synthetic construct
  source 1..80: mol_type = other DNA
tcgccatgcctcctatacatgtacccacaaaaacaaaattacaacccagtgttttccatgatgtctttccaggtgtgaag

SEQ ID NO: 164456 - DNA, 80 bp, synthetic construct
  source 1..80: mol_type = other DNA
aaggccatgggtcactctccttgttgtttgcatattttacgggtgagttgaatatacatgtcctatttctggcagagaaa

SEQ ID NO: 164457 - DNA, 80 bp, synthetic construct
  source 1..80: mol_type = other DNA
agcaatgttagggacgcatgttatatgggacttaggccttcaatctagttgcactatggttgccccttggattagcagta

SEQ ID NO: 164458 - DNA, 80 bp, synthetic construct
  source 1..80: mol_type = other DNA
aataatcctgcacagtatccagttttctcggtgactaacccagggaagaacgggagggagttcgtagacccatatgttct

SEQ ID NO: 164459 - DNA, 80 bp, synthetic construct
  source 1..80: mol_type = other DNA
tttggaagctagaaccagtagatgcaaatgataaagcacaggaggatgagaggctgtatctggtgggttcagcacagacc

SEQ ID NO: 164460 - DNA, 80 bp, synthetic construct
  source 1..80: mol_type = other DNA
agaggggctttaacaggtggtcccacactaacaaagacttagacctggctctctactacgggtgcaggttcaggttctac

SEQ ID NO: 164461 - DNA, 80 bp, synthetic construct
  source 1..80: mol_type = other DNA
tgaggccaggtaccagtggtattaacacaataccaattacagtgtctattgccccctacaagtcagagttttctggggct

SEQ ID NO: 164462 - DNA, 80 bp, synthetic construct
  source 1..80: mol_type = other DNA
gacatgagaaacccaccaccacccgccattactgatttactccaagctgttaggactcctgaagtcattaaatactgtga

SEQ ID NO: 164463 - DNA, 80 bp, synthetic construct
  source 1..80: mol_type = other DNA
cgaggtagcgcgcttttcactgccggcttttgtcaatccgcgtcaccagtattactttcagatgctcattcagcagtacg

SEQ ID NO: 164464 - DNA, 80 bp, synthetic construct
  source 1..80: mol_type = other DNA
tcaaacgacgagctagaactgacaaggtacctgggggccaccataacagtgtacagacacccagaccaggactttttaat

SEQ ID NO: 164465 - DNA, 80 bp, synthetic construct
  source 1..80: mol_type = other DNA
gtcgggggccttactttctgtgccgttgtcccgtggagatggacttggtgtcaccggtgatgcgcctgacgttgtgccgg

SEQ ID NO: 164466 - DNA, 80 bp, synthetic construct
  source 1..80: mol_type = other DNA
tatctaaaagcaacacaacaagcatttccagcttatgccactttacagtcacccctctatgaataccacgggggctgcta

SEQ ID NO: 164467 - DNA, 80 bp, synthetic construct
  source 1..80: mol_type = other DNA
gtaccaatactcatgatgtgggccacagcctgtgaactcagaaacccatggctcagagaaggcactctctcgccatgcat

SEQ ID NO: 164468 - DNA, 80 bp, synthetic construct
  source 1..80: mol_type = other DNA
gtccttctcggcggcatcggcgagcatagcaatgagccccccgctgcgcctgagctcccgctcccatcgcaaaaagttga

SEQ ID NO: 164469 - DNA, 80 bp, synthetic construct
  source 1..80: mol_type = other DNA
agaccagcctacctatccctggatgcccactaactttaaagtgtctttcagacttggcttccaataaaatttactgaact

SEQ ID NO: 164470 - DNA, 80 bp, synthetic construct
  source 1..80: mol_type = other DNA
gataggactaccaatatcaggtatagtgtagatcaactagttacagctattataagtgattttaaaggcaaaatgcaaat

SEQ ID NO: 164471 - DNA, 80 bp, synthetic construct
  source 1..80: mol_type = other DNA
tccgggcaccccgcagataagaagagccagacctagtcccgccgcaccccaagagcccgctgctctaccatggcatggtg

SEQ ID NO: 164472 - DNA, 80 bp, synthetic construct
  source 1..80: mol_type = other DNA
tttttcaacttggatgaggaaaacggatggccacccaattggattgtttcaaattgaagtacttaacaggttaacttata

SEQ ID NO: 164473 - DNA, 80 bp, synthetic construct
  source 1..80: mol_type = other DNA
tggcaatggcaaatggctagacggaaccgggttcgtcccagtagaataccagtgccgctggcggccctgcatagctttcc

SEQ ID NO: 164474 - DNA, 80 bp, synthetic construct
  source 1..80: mol_type = other DNA
ccagctaacttcaggaaatgttgtcctctggtttgcgggaaggctcttcaattaatggacagaagcactagacaacgctt

SEQ ID NO: 164475 - DNA, 80 bp, synthetic construct
  source 1..80: mol_type = other DNA
ccctacgagtaccttgaaaggagatggattgacaaatttatttaatatggtattcaaattgactcagattacaatatcat

SEQ ID NO: 164476 - DNA, 80 bp, synthetic construct
  source 1..80: mol_type = other DNA
attgggcaccttctcagtcagattcgttagtgaagagatcactaacgagcgtattaccattagaatatacatgaggctca

SEQ ID NO: 164477 - DNA, 80 bp, synthetic construct
  source 1..80: mol_type = other DNA
tggattttaccctaagaccactcatttacctgacttaattagaataattatactacttggaaattactatcacaatgggt

SEQ ID NO: 164478 - DNA, 80 bp, synthetic construct
  source 1..80: mol_type = other DNA
caaaccaaatagctgacgcagccaaaaagattagaaaaaaatatttaaatgctacaagaacagcactaccactactacaa

SEQ ID NO: 164479 - DNA, 80 bp, synthetic construct
  source 1..80: mol_type = other DNA
agctagaatttttcacttatgtcaggtttgatttggaaattacaatcataactagtaatcccaatttgatgcaggtcatg

SEQ ID NO: 164480 - DNA, 80 bp, synthetic construct
  source 1..80: mol_type = other DNA
cagaaaccagtccagagcgctctctagctgcgagcgtgtgatggtgcccagtgcgccgtgccagcgcagcacgtctcttt

SEQ ID NO: 164481 - DNA, 80 bp, synthetic construct
  source 1..80: mol_type = other DNA
ttgtccatacaaaaacaaaacaaacgtgaactttgaagtcactagtgttactactgcaaggaccagtctcaatgacgtac

SEQ ID NO: 164482 - DNA, 80 bp, synthetic construct
  source 1..80: mol_type = other DNA
ccaatcccctagtgcgttaccatggtatcatcctactaaagaaatatccatccctggacaagttagaaatctgattgaat

SEQ ID NO: 164483 - DNA, 80 bp, synthetic construct
  source 1..80: mol_type = other DNA
ggcagacggatgtcaggtcgggcccggacccggcccggaggctggtggccctcctgcgaagggaagatggggcacctaag

SEQ ID NO: 164484 - DNA, 80 bp, synthetic construct
  source 1..80: mol_type = other DNA
ctggtacatccaactttcccagttgatgaaatacaagaatcaataagatggacaaagaaaccatctcaaatgcaggaaca

SEQ ID NO: 164485 - DNA, 80 bp, synthetic construct
  source 1..80: mol_type = other DNA
cccagaaggcgccgctggaggtggaggagacgacgtagacgacctgctcgccgctatcgaaggagacgtcggaggagacg

SEQ ID NO: 164486 - DNA, 80 bp, synthetic construct
  source 1..80: mol_type = other DNA
catggacaaccataccctagatttacaatcccttttgtaagcatagcctcagcatactacatgttttatgatgggtatga

SEQ ID NO: 164487 - DNA, 80 bp, synthetic construct
  source 1..80: mol_type = other DNA
tactactttggagaaggaaaaatgccaaacggagacctgtacgtaccctttaaaattagaatgaagtggtacccgtccat

SEQ ID NO: 164488 - DNA, 80 bp, synthetic construct
  source 1..80: mol_type = other DNA
gtagagtcaaataaccaatgtcacattaacatgacatacagcaagggcaagtacgaagaatacgagtaccacctaggctg

SEQ ID NO: 164489 - DNA, 80 bp, synthetic construct
  source 1..80: mol_type = other DNA
atcaccactggggagaaaaatcctagcaagttggttagattggagacacatgagtggacaccaacctgggctagaggaca

SEQ ID NO: 164490 - DNA, 80 bp, synthetic construct
  source 1..80: mol_type = other DNA
agtttctaaacagagtgttggagctcacgaaacaactgttcacgctggaagtggtgctgtggtaaaatattttaatatca

SEQ ID NO: 164491 - DNA, 80 bp, synthetic construct
  source 1..80: mol_type = other DNA
aggccgggcccttccaaacaaccatcagagcccgtggagcccgcccacacaaccccagcggggaggtcaacggtgattct

SEQ ID NO: 164492 - DNA, 80 bp, synthetic construct
  source 1..80: mol_type = other DNA
tttgtatctgcgtgcaatgatttctcggtacgactgctgcgcgacaccaaatttattgagcagaataacttctaccaagg

SEQ ID NO: 164493 - DNA, 80 bp, synthetic construct
  source 1..80: mol_type = other DNA
ggatacacagagttctgtgcaaagtacactggagactctgccattatctacaacgccagagtactaataagatgccgggg

SEQ ID NO: 164494 - DNA, 80 bp, synthetic construct
  source 1..80: mol_type = other DNA
aatatgaggatggagcttccacagcaatccccataacggtcacagttgctcccatgtgctgtgaattcaatgggctcaga

SEQ ID NO: 164495 - DNA, 80 bp, synthetic construct
  source 1..80: mol_type = other DNA
gagtttatgatggcaagcaattcggccgactccactggaggaattacatacgaaaaggccaatccaggtgagacaggtgg

SEQ ID NO: 164496 - DNA, 80 bp, synthetic construct
  source 1..80: mol_type = other DNA
cattgcttccgtttcatgcctccagctgcccctgaccagttaggacccttgacggatgtctttaacggcgcggtgcagtt

SEQ ID NO: 164497 - DNA, 80 bp, synthetic construct
  source 1..80: mol_type = other DNA
accaggagaaggggtctggcgtcttgctggggccacactcccggctacgtggcttcgtggtaggtgcagtaggcttttgg

SEQ ID NO: 164498 - DNA, 80 bp, synthetic construct
  source 1..80: mol_type = other DNA
cccagcatattttggacagagggtagtgcgcccccaagaatgtcaatcccattcataagtgtgggtaacgcatacagtag

SEQ ID NO: 164499 - DNA, 80 bp, synthetic construct
  source 1..80: mol_type = other DNA
ccaaaaagaaataatatctcaacttatggacttggtccaagatttggtggtgtatgcacagggaatataaaaataatgaa

SEQ ID NO: 164500 - DNA, 80 bp, synthetic construct
  source 1..80: mol_type = other DNA
tttagagatattagaatgtttattgctgatgaatcagaatgtcccgatgcaagcctggtgatccactccaataattataa

SEQ ID NO: 164501 - DNA, 80 bp, synthetic construct
  source 1..80: mol_type = other DNA
caaccaaaaaactactaggcacaacatttacaggagggtccccctacctagaataccacggaggcctttactcctccatt

SEQ ID NO: 164502 - DNA, 80 bp, synthetic construct
  source 1..80: mol_type = other DNA
aaccaataatagtgcaacattggtactcccatatgtgaattccttatctatagactgcatggctagacacaacaattggg

SEQ ID NO: 164503 - DNA, 80 bp, synthetic construct
  source 1..80: mol_type = other DNA
cgaaacaaaaaacaccgcgggacggcacgcaccggcagtgcgcaaaaagcgccggccgcggcacgccgtaaacaaaactc

SEQ ID NO: 164504 - DNA, 80 bp, synthetic construct
  source 1..80: mol_type = other DNA
gaggacgcgagcgcagcgagcggccgagcgacccgtgggcgggagccgaaggtgagtttacacaccgcagtctagtggca

SEQ ID NO: 164505 - DNA, 80 bp, synthetic construct
  source 1..80: mol_type = other DNA
ccccccccgggagggctccgcccccccggcccccccccgtgctaaacccaccgcgcatccgcgaccacgccctcgccgcc

SEQ ID NO: 164506 - DNA, 80 bp, synthetic construct
  source 1..80: mol_type = other DNA
aaaaaagcctcaataccaccagaccacctcacaccctcagtaaactggtacgagtaccacataggccttttcagtcccat

SEQ ID NO: 164507 - DNA, 80 bp, synthetic construct
  source 1..80: mol_type = other DNA
ttggcatgggaaaatggatagacggagggggatacgtgcccctgctagaaagaggacggtggtatgtaatgctaagatac

SEQ ID NO: 164508 - DNA, 80 bp, synthetic construct
  source 1..80: mol_type = other DNA
tagtgaggctaatccagttgaccaaccgaccgagccggatgttgcagcgtgcagattctacacgcttgaaacagtctctt

SEQ ID NO: 164509 - DNA, 80 bp, synthetic construct
  source 1..80: mol_type = other DNA
cctttcgggtcggtggccagatttgttgtaggagcagcgagccgcgtcgttgccctgaccgcgcgtcgaggcccaggagg

SEQ ID NO: 164510 - DNA, 80 bp, synthetic construct
  source 1..80: mol_type = other DNA
tctacgctctgtacttcataataatacgtatacacgataacaagactaactaacaggccgaaaataaatcgcattttaat

SEQ ID NO: 164511 - DNA, 80 bp, synthetic construct
  source 1..80: mol_type = other DNA
ccacttctgttgataaacctacccatccagaaacatcatcagacaggttctacaccttggatagtgttacctggcagtct

SEQ ID NO: 164512 - DNA, 80 bp, synthetic construct
  source 1..80: mol_type = other DNA
ttattagcttcagtttctacattagacaaggagagagtatccatagcaccagtagcaacattaactaaatccttgataga

SEQ ID NO: 164513 - DNA, 80 bp, synthetic construct
  source 1..80: mol_type = other DNA
agcatattatgtattctatgatgggtatgatcaagttggtgatgatgtgaccaaatatggaatatcctccacaaatgata

SEQ ID NO: 164514 - DNA, 80 bp, synthetic construct
  source 1..80: mol_type = other DNA
gcttaattttgatggtacattattgggaaatataaccatcttccctcaccaatttatcaatttgaggagtaacaattcag

SEQ ID NO: 164515 - DNA, 80 bp, synthetic construct
  source 1..80: mol_type = other DNA
cgctcacgcacatatgtagcactcaacatgttagcttttgcccgcacgccccggggcgtgccgagctgcctttttaataa

SEQ ID NO: 164516 - DNA, 80 bp, synthetic construct
  source 1..80: mol_type = other DNA
cctccggttatgagccactgggtaccaccaacacagcatgtccatgcccgtgaagaggattggttccgatcaatcttcac

SEQ ID NO: 164517 - DNA, 80 bp, synthetic construct
  source 1..80: mol_type = other DNA
acggggggggtatgacaaccaccaaatttactttaagaataatgtatgacgaacatttaaggcaccttaactactggact

SEQ ID NO: 164518 - DNA, 80 bp, synthetic construct
  source 1..80: mol_type = other DNA
gggaagagaggtaaagccttcaggcatccgtacgtacttgattgtggcgtaccgttgagtcaggcacttgttttccctca

SEQ ID NO: 164519 - DNA, 80 bp, synthetic construct
  source 1..80: mol_type = other DNA
ctaccaaacaaccaacaaacctgaaaatgccacaataaaaaatgatacctacaactgggtaaactacaaaaaaaactaca

SEQ ID NO: 164520 - DNA, 80 bp, synthetic construct
  source 1..80: mol_type = other DNA
cgaccatacctcactcgaattggtctgagagatagtgagttatgggtaaattttcttttaattcgggggaaaaaaaaaaa

SEQ ID NO: 164521 - DNA, 80 bp, synthetic construct
  source 1..80: mol_type = other DNA
ttgccccctcgaggtagcacaaggatcagagcaatatgtaccaataaccatatcaattagcccaatgtgctcagagttct

SEQ ID NO: 164522 - DNA, 80 bp, synthetic construct
  source 1..80: mol_type = other DNA
atggcctaaaacattgtaacacgaaacgttacaatgatgggaaagatgccgataaaaaacacataaaaggcatatacacg

SEQ ID NO: 164523 - DNA, 80 bp, synthetic construct
  source 1..80: mol_type = other DNA
tggccttggaggagctgggggtgcaagttttggctggcctgggcgccgtggtgtcaacagataatccacccgcccctggc

SEQ ID NO: 164524 - DNA, 80 bp, synthetic construct
  source 1..80: mol_type = other DNA
catacattgacattacctacaacccgattacagtcaaaggagaaggtaacatagggaggttccaatatgccaccaaacgt

SEQ ID NO: 164525 - DNA, 80 bp, synthetic construct
  source 1..80: mol_type = other DNA
caggatgccaaattacagggtgatgaccaacacaagaccaatacagtgacagacacagagcagagtggcccgtcaaattc

SEQ ID NO: 164526 - DNA, 80 bp, synthetic construct
  source 1..80: mol_type = other DNA
caaaaagcccactacgactacgagaacgacaactaccacaacacaaaaaacaaccaccacgagaacaaccaccaccgcca

SEQ ID NO: 164527 - DNA, 80 bp, synthetic construct
  source 1..80: mol_type = other DNA
tacaagaatcaatctactacccgaagcacatacagtatgacattctgattggcgaaggaccctgctccccaggagattgt

SEQ ID NO: 164528 - DNA, 80 bp, synthetic construct
  source 1..80: mol_type = other DNA
cgtgactcctctcgtccaatcaggtgctatgtcgtgcacttcctgggccaggtctacctcctgatataaagcggtgcact

SEQ ID NO: 164529 - DNA, 80 bp, synthetic construct
  source 1..80: mol_type = other DNA
tacatgatacactaaatgaagttgtagtggtacccaacacacatgcttctggacctcaacacaccacacgacccagtgca

SEQ ID NO: 164530 - DNA, 80 bp, synthetic construct
  source 1..80: mol_type = other DNA
gaaggatgctcaggagcggctgctgaacgtggtaagttatgtgtgtcaggagcatcggcaagattttgacatgcaggaca

SEQ ID NO: 164531 - DNA, 80 bp, synthetic construct
  source 1..80: mol_type = other DNA
gaaaaagagacgcagaaaaaagttagtgcttaaacagtggaaccctagcactatcagacgctgtactattaagggcatta

SEQ ID NO: 164532 - DNA, 80 bp, synthetic construct
  source 1..80: mol_type = other DNA
ccaccctaaatgcatcagactactttcacactcctgacggactatggggagaccccatatacatctataaagcatacgga

SEQ ID NO: 164533 - DNA, 80 bp, synthetic construct
  source 1..80: mol_type = other DNA
agaagtctttgcaatcccagttgatgtagcctcacaacccttggctacaactcttataggtgaaatagcaagctactaca

SEQ ID NO: 164534 - DNA, 80 bp, synthetic construct
  source 1..80: mol_type = other DNA
gtcaagataatgggcatgttgttttacagtacatgtatgtaccaccaggggcacccataccaaagactagggacgattat

SEQ ID NO: 164535 - DNA, 80 bp, synthetic construct
  source 1..80: mol_type = other DNA
ctatcacaaggccaaacatgttaaagcttggtgcccaagaccacctcgggctgtgccgtacacacatagtcactctacaa

SEQ ID NO: 164536 - DNA, 80 bp, synthetic construct
  source 1..80: mol_type = other DNA
ttgtgacctttcataatttgtttaatcaaattttcttaaaatctctgaggtttgtctatttctgttattagtaaataaaa

SEQ ID NO: 164537 - DNA, 80 bp, synthetic construct
  source 1..80: mol_type = other DNA
caagaccctggtctgttaggaccctttctgctttggagaaccagagcgggaaaatccctagcagattggcgcccgaacag

SEQ ID NO: 164538 - DNA, 80 bp, synthetic construct
  source 1..80: mol_type = other DNA
atctgcgaactccatcggcggtccggcctgacatgagccagtggctaccgcctctccagaatgtcccacaaagggaaaga

SEQ ID NO: 164539 - DNA, 80 bp, synthetic construct
  source 1..80: mol_type = other DNA
gaaatgcaagcgcaggggacgatacaggagcaactcgtgccagcagctgggagaacagcgagcactccgaaagcagctcg

SEQ ID NO: 164540 - DNA, 80 bp, synthetic construct
  source 1..80: mol_type = other DNA
ttttatttatgaaaaagccagtgtgccgtgcggcctagggccccggcgtagtttggataccagatgggggccgtcaggtg

SEQ ID NO: 164541 - DNA, 80 bp, synthetic construct
  source 1..80: mol_type = other DNA
cactccaaagagaatcgaagccgtggcagaccagcgaggaagaaagcgaagcagaagtccaagagcaagagacgcaggag

SEQ ID NO: 164542 - DNA, 80 bp, synthetic construct
  source 1..80: mol_type = other DNA
cccggaggttgcgctgggcacgagggacgagggggatggcagttgcgggggtgacgttggggaggagggttacgtagagg

SEQ ID NO: 164543 - DNA, 80 bp, synthetic construct
  source 1..80: mol_type = other DNA
agggtgtgtcagtacatttacaaggcaaatgtagactacgcagtgtcaaatatcactgaaaagcgagatagtataagatg

SEQ ID NO: 164544 - DNA, 80 bp, synthetic construct
  source 1..80: mol_type = other DNA
tgactcagaaataacaattgtagcaacaatagctggtcaaggtgatgacataggccatatagtcctgcaatatatgtatg

SEQ ID NO: 164545 - DNA, 80 bp, synthetic construct
  source 1..80: mol_type = other DNA
cacttcagagcgggatgcggtccctcaagaattggtcagccaaagggacgaaatcctttatcagctataccgacccctag

SEQ ID NO: 164546 - DNA, 80 bp, synthetic construct
  source 1..80: mol_type = other DNA
aactagaactcatggaagaactagtgcagtgcggaccgtttgcatacaagggcgacgaaaaactgtgtgtattagccata

SEQ ID NO: 164547 - DNA, 80 bp, synthetic construct
  source 1..80: mol_type = other DNA
catgtgcacaactatcactctagatctgagtcctcaattgagaatttctttggacgctccgcatgtgtggtagttaagac

SEQ ID NO: 164548 - DNA, 80 bp, synthetic construct
  source 1..80: mol_type = other DNA
ccaggaaacactaatgtacactacaacttttgcacgtacaaaccacaagctatgaacctaacaaaccttagaaaatacta

SEQ ID NO: 164549 - DNA, 80 bp, synthetic construct
  source 1..80: mol_type = other DNA
taaggtcaactagcattggcaaatgcttactaatcccagagtacagcgttttgcgtcgacgctggcttgacctgttttaa

SEQ ID NO: 164550 - DNA, 80 bp, synthetic construct
  source 1..80: mol_type = other DNA
atgaattaggactcacttcagcccaagacgatggcccattaggacaggaaaagccaaactatttccttaatttcaggtct

SEQ ID NO: 164551 - DNA, 80 bp, synthetic construct
  source 1..80: mol_type = other DNA
cgtataatagcctatggtgatgatgtgattgtctcctacccttaccaattggagccagaggaagtgtcaaatactggtaa

SEQ ID NO: 164552 - DNA, 80 bp, synthetic construct
  source 1..80: mol_type = other DNA
cgtgaccagtcacgtgactgatacgtcatcgccgccattttagttcacaaaatggtcgacttccttcctcttttttaaaa

SEQ ID NO: 164553 - DNA, 80 bp, synthetic construct
  source 1..80: mol_type = other DNA
actttaggattaaataccttgagtcttctgttgatactgagcatatattttctgttgacaccaactgtgaaacaatagca

SEQ ID NO: 164554 - DNA, 80 bp, synthetic construct
  source 1..80: mol_type = other DNA
aaccaaggcctttgagaagctggtggagcaagccaaaaacaccgtagagaacatagtcttttgcctcaacagcatctgtt

SEQ ID NO: 164555 - DNA, 80 bp, synthetic construct
  source 1..80: mol_type = other DNA
gagtactaataagaagcccctacacagtgccaaaactttacaacgaagcagacccctcctacggatgggttcctatctcc

SEQ ID NO: 164556 - DNA, 80 bp, synthetic construct
  source 1..80: mol_type = other DNA
tttgtacttacaaggactacactgttatcaaatattgatacgagtagatgtacaatcacagatagtagtgtcatatgtga

SEQ ID NO: 164557 - DNA, 80 bp, synthetic construct
  source 1..80: mol_type = other DNA
ctggaacatacaggcgaacaggatgccaacaatccatgttggttcacgccaagcacttctgtttccccggcattagagtg

SEQ ID NO: 164558 - DNA, 80 bp, synthetic construct
  source 1..80: mol_type = other DNA
atggatagaccccttaaacaaatcagacaacctgtacaaaccaccacaaagcaaatgcccactaaaagacatgccactat

SEQ ID NO: 164559 - DNA, 80 bp, synthetic construct
  source 1..80: mol_type = other DNA
tgccacagatcaggagaaacatgatgcagtgtatgttgactggcaatcagatatcctggtgaccacagtagctgctcatg

SEQ ID NO: 164560 - DNA, 80 bp, synthetic construct
  source 1..80: mol_type = other DNA
tatctgaaatactaggtatgttacacacactagtagtcgcatctgccggacctacaagtgctagagatgggataagggat

SEQ ID NO: 164561 - DNA, 80 bp, synthetic construct
  source 1..80: mol_type = other DNA
cttcgactttctgcggtacgcgcacgccaaaccgcggcccacctacgtactcgtcaccgtcaactcgttggcgcgcgccg

SEQ ID NO: 164562 - DNA, 80 bp, synthetic construct
  source 1..80: mol_type = other DNA
tggatttacacctttaacattacacactttgaaactcattgaaattgtactgttgatacggtattactatcacaatggga

SEQ ID NO: 164563 - DNA, 80 bp, synthetic construct
  source 1..80: mol_type = other DNA
cccagactaccctaaaaataattggacagcactaacaaacaagttaaaagagaacataagcaataactatgagaacaaaa

SEQ ID NO: 164564 - DNA, 80 bp, synthetic construct
  source 1..80: mol_type = other DNA
atctgtcaccgaacaaggcatgctcaaccttgcaggtagggcgacaaacagaacattaatgtacaacttccctaccaaag

SEQ ID NO: 164565 - DNA, 80 bp, synthetic construct
  source 1..80: mol_type = other DNA
gtgcatgtaagcgtaaaaagaggaagtagaaagcgtgtgttagtgttagaaaagcgggtccccggggggcaagctgtggg

SEQ ID NO: 164566 - DNA, 80 bp, synthetic construct
  source 1..80: mol_type = other DNA
atattactgcaactagtggaacttctccttcaataccagtaacagtaaccattgcccctatgttcttagaattgtctggc

SEQ ID NO: 164567 - DNA, 80 bp, synthetic construct
  source 1..80: mol_type = other DNA
ggagcctacacccagtgtggtttcaagcacttgaacagcttctgaacaatctcgggttccccggtgaactagcatacaaa

SEQ ID NO: 164568 - DNA, 80 bp, synthetic construct
  source 1..80: mol_type = other DNA
cggagaccgagaaatcagaaaacgaaaacgagacaccgcagacgacaccgcagctccagcagcagctcatcagacaactc

SEQ ID NO: 164569 - DNA, 80 bp, synthetic construct
  source 1..80: mol_type = other DNA
atccctcaccagatcctatttcgcatcagctcagggggagattatcaacaggtgcagtgtgaaagatgtgggcctttgtc

SEQ ID NO: 164570 - DNA, 80 bp, synthetic construct
  source 1..80: mol_type = other DNA
tcagttctgctagctcagaagcacaacaacaacttattgtagaagtggacaaattaaaaagaggcttggatgatctagca

SEQ ID NO: 164571 - DNA, 80 bp, synthetic construct
  source 1..80: mol_type = other DNA
gtacctttgtacgcctgttttatatccctccccaatgtaatttagaagctttcaaatcaaagctcaataggtggagcgca

SEQ ID NO: 164572 - DNA, 80 bp, synthetic construct
  source 1..80: mol_type = other DNA
cgaccacaacccaaccatagtcacttctaaggttagagtatatttaaaacccaaacacatcagagtgtggtgtccgcgcc

SEQ ID NO: 164573 - DNA, 80 bp, synthetic construct
  source 1..80: mol_type = other DNA
ggccagtcccgagcccgaattgccccttgactcccgcaggccaaccgagtgctatgtcgtccacttcctgggcggagtct

SEQ ID NO: 164574 - DNA, 80 bp, synthetic construct
  source 1..80: mol_type = other DNA
ctccgagagcagcgagagctccgagtccacctcaagcacctcttccagcagctcctcaagacacaagcggggctccacct

SEQ ID NO: 164575 - DNA, 80 bp, synthetic construct
  source 1..80: mol_type = other DNA
gatatgccagtgttgacacaccagatcatgtatgtgcctccgggtggccctgtgcctaccagcaccgaaagttttgcttg

SEQ ID NO: 164576 - DNA, 80 bp, synthetic construct
  source 1..80: mol_type = other DNA
acatatcgattccgaatcagccaatgacactgactacagtaacaataaacatacaaaattcaacagcaagacacagaaaa

SEQ ID NO: 164577 - DNA, 80 bp, synthetic construct
  source 1..80: mol_type = other DNA
aagtttttgcaataaaagtagacatcacatcacaacctctagctacaaccctacttggagaaattgcaagttattacact

SEQ ID NO: 164578 - DNA, 80 bp, synthetic construct
  source 1..80: mol_type = other DNA
ccaccagctttctttataagctgaaggatgctcaggagcggctgctgaacgtggtaagttatgtgtgtcaggagcatcgg

SEQ ID NO: 164579 - DNA, 80 bp, synthetic construct
  source 1..80: mol_type = other DNA
gctgtatctcaataaggccgagtgttcggaagtgattgtgtttgacgccaagcacctgaatgacgacaacagcgacgggg

SEQ ID NO: 164580 - DNA, 80 bp, synthetic construct
  source 1..80: mol_type = other DNA
gtccacctctactgccactttgcttgacctcagcctctgtgagtacttcagtgtctctgtaacatagggatgctaattac

SEQ ID NO: 164581 - DNA, 80 bp, synthetic construct
  source 1..80: mol_type = other DNA
catgtatggaacagaacctattggcatttgattacaccaattatgatggaagcctggacccagtatggtttaaagcccta

SEQ ID NO: 164582 - DNA, 80 bp, synthetic construct
  source 1..80: mol_type = other DNA
cgttcggggtttataatacatgtgcagtgtaatgctactaaatttcacagtggattgttaatagtagcagtggtaccaga

SEQ ID NO: 164583 - DNA, 80 bp, synthetic construct
  source 1..80: mol_type = other DNA
ccccggggaaaagaggaagttcccaggtggtgtctgtctgattccccggggaaaagaggaagttcccaggaggtgtctgt

SEQ ID NO: 164584 - DNA, 80 bp, synthetic construct
  source 1..80: mol_type = other DNA
gcctccaggtgctctatgaccagcaccagaggttcctaaaccagtggtcgtaccccaacgaccagctagacctagcccgc

SEQ ID NO: 164585 - DNA, 80 bp, synthetic construct
  source 1..80: mol_type = other DNA
aggaaaaaccatctgggttgaacacaagttagtgaagatcgtagatgctgtagaactagtagatgaacaaggggttaact

SEQ ID NO: 164586 - DNA, 80 bp, synthetic construct
  source 1..80: mol_type = other DNA
ttctgcaagagccttacaacagatacataggtttccccatgactgccaattttgacacagatgcaaagacaaaatttgaa

SEQ ID NO: 164587 - DNA, 80 bp, synthetic construct
  source 1..80: mol_type = other DNA
ccctacctttctgccaaggggggcgggcgtaacatctttatttcaaacagcgtagttgacatgttcggagaccccattcc

SEQ ID NO: 164588 - DNA, 80 bp, synthetic construct
  source 1..80: mol_type = other DNA
aacagattctttggagatccttttccagggtcctacttacaaagatttagaaatagagatccacaacacaccacctccag

SEQ ID NO: 164589 - DNA, 80 bp, synthetic construct
  source 1..80: mol_type = other DNA
gggggaacctacggcggcggttcccgtcgagcggcgtgattgcaaagccgcgctcgcccccggtttcaggatggagtgag

SEQ ID NO: 164590 - DNA, 80 bp, synthetic construct
  source 1..80: mol_type = other DNA
ctgcggaggtcggtcgatgacgatgtcgatctccatcggcagatccggcaacatctcttcatctccctcaccgaccagca

SEQ ID NO: 164591 - DNA, 80 bp, synthetic construct
  source 1..80: mol_type = other DNA
aggccaccctactataaacccaaaaagaaactagttctcacccagtggcacccccagactgtcaggcgatgcgccataag

SEQ ID NO: 164592 - DNA, 80 bp, synthetic construct
  source 1..80: mol_type = other DNA
tggtgaagagcagtataacaagtttctagaacaaatcagaacaactagtgttggaaggaatctggttttgccaccctaca

SEQ ID NO: 164593 - DNA, 80 bp, synthetic construct
  source 1..80: mol_type = other DNA
ctaaatcacatgggacagatctacgtcagacatgtgaatggaccatcaccattgcccatgaccagcacggtaaggatgta

SEQ ID NO: 164594 - DNA, 80 bp, synthetic construct
  source 1..80: mol_type = other DNA
cacctattcattgcatttcagcagtcaaaatgggcgctcaggtctccagacaacaaactggaactcatgaaaatgccaac

SEQ ID NO: 164595 - DNA, 80 bp, synthetic construct
  source 1..80: mol_type = other DNA
aaacaaatgcagacaatgtacatgcggacagtatgaggatgctactgggctaatgacacacagaaagacatacaactgcc

SEQ ID NO: 164596 - DNA, 80 bp, synthetic construct
  source 1..80: mol_type = other DNA
ttagagagtggaacatcactgtggatgattatgatgttgtaattgctaagttgatgcccatggtgtttgattaagactgt

SEQ ID NO: 164597 - DNA, 80 bp, synthetic construct
  source 1..80: mol_type = other DNA
ttcaactggcttaattatcaaacaaactatcaacaagttaaaacccaatttcaaaaagacaaagaggcaaaattagagac

SEQ ID NO: 164598 - DNA, 80 bp, synthetic construct
  source 1..80: mol_type = other DNA
acaggtattttcagttctatattcttatctgcaggcagaacatactttgagaccacaggggcatatacagacataattta

SEQ ID NO: 164599 - DNA, 80 bp, synthetic construct
  source 1..80: mol_type = other DNA
gcacaacattggaactatatgacaataccatgcgttcttaaaattggacgcggcggtcaaaatatgagtttgcctcccct

SEQ ID NO: 164600 - DNA, 80 bp, synthetic construct
  source 1..80: mol_type = other DNA
gattatgtaattctaaacatatctttaaaaactcctactatgaggttgaaggtggtatcccctccgggtgttccggaaca

SEQ ID NO: 164601 - DNA, 80 bp, synthetic construct
  source 1..80: mol_type = other DNA
agctcaccatggtctttcctgaaggacaaaatctgcaactggcttcaaatccagcgccccgcaagtaaacagaatgattc

SEQ ID NO: 164602 - DNA, 80 bp, synthetic construct
  source 1..80: mol_type = other DNA
aactcttaaataaaacagggttctctacccctgatgaaaagttccaaaaagaccctccatatcaatggatgggatatgaa

SEQ ID NO: 164603 - DNA, 80 bp, synthetic construct
  source 1..80: mol_type = other DNA
tgagtagcacccccactaacagaatgattcgttatgattatgcaacaaaaactgggcagtgtggaggtgtgctgtgtgct

SEQ ID NO: 164604 - DNA, 80 bp, synthetic construct
  source 1..80: mol_type = other DNA
gtaggagaacccgggtgacggcggtgtagaggcccccgagtgcccgtcgcgtgtctgaggtgccatagcggtgaagggcc

SEQ ID NO: 164605 - DNA, 80 bp, synthetic construct
  source 1..80: mol_type = other DNA
tacacagcaggcaatcccaacagtacctatgactggcaaaactatagtaaccctacaaactaccaaaaaacatactcaaa

SEQ ID NO: 164606 - DNA, 80 bp, synthetic construct
  source 1..80: mol_type = other DNA
caaggtacagaccaaattgctagatgttcatgtgtgactggtgtgtatttttgtcaatcacgcaacaagcactaccctat

SEQ ID NO: 164607 - DNA, 80 bp, synthetic construct
  source 1..80: mol_type = other DNA
agaccagaattgttgttcctgccagtacaccaactaacatggcgatgcttgcatttgtcagtgcttgcccggacttcagt

SEQ ID NO: 164608 - DNA, 80 bp, synthetic construct
  source 1..80: mol_type = other DNA
aaaaaggaaaaaatatatgtaggatgggtaccagctcacaagggactgggtggtaatcaggaagtagaccacctagtgag

SEQ ID NO: 164609 - DNA, 80 bp, synthetic construct
  source 1..80: mol_type = other DNA
tacagctcctttacaccaaaagaccaaacaggtattaacaatattaaaaaaattagagataacaactttaaggcactaac

SEQ ID NO: 164610 - DNA, 80 bp, synthetic construct
  source 1..80: mol_type = other DNA
atgttcagcatcttgagcggcagcgcgtacacatagatcgacatgggctcctggctggggcagatgcttcggcccgtggg

SEQ ID NO: 164611 - DNA, 80 bp, synthetic construct
  source 1..80: mol_type = other DNA
caaagcatatataaatgcagccaaaaaaaacctaccaaactggggaataagcacacagtacacacaaggtacaaaaccat

SEQ ID NO: 164612 - DNA, 80 bp, synthetic construct
  source 1..80: mol_type = other DNA
ctactacacaaacctgagcaacctgccagaacatgcgacagctagaacagccatgcaacactcatttcaccccagcacat

SEQ ID NO: 164613 - DNA, 80 bp, synthetic construct
  source 1..80: mol_type = other DNA
gatgattacacttggcagtcatctactaacccctctgtcttctacataaccggtaacgctagcccacgcatgtccatacc

SEQ ID NO: 164614 - DNA, 80 bp, synthetic construct
  source 1..80: mol_type = other DNA
tcgaatcaatcagatggactagagatccaaagaatccccaagcccatgtgtattctctatttcttttgatgtggcacaac

SEQ ID NO: 164615 - DNA, 80 bp, synthetic construct
  source 1..80: mol_type = other DNA
acccacaccactactcacggtactacaaaggcctaccgaacttcaacccacaccatcaccaccacgcatgcatctccctg

SEQ ID NO: 164616 - DNA, 80 bp, synthetic construct
  source 1..80: mol_type = other DNA
ccagtggatgtttagacaacaaaatcctgtaccggtaggaaacatctatagaagatggatccagatagggctacagaagt

SEQ ID NO: 164617 - DNA, 80 bp, synthetic construct
  source 1..80: mol_type = other DNA
gtcccacccggcgtgtcgacccgtccgagacccgggaagggaacaggccccacccttttttttcccttctccgatttgcc

SEQ ID NO: 164618 - DNA, 80 bp, synthetic construct
  source 1..80: mol_type = other DNA
cctacatacttactaccaggatccggccaatttcttactactgatgatcactcttcagcaccagctttcccagattttag

SEQ ID NO: 164619 - DNA, 80 bp, synthetic construct
  source 1..80: mol_type = other DNA
atttctcttgctttacagccaatgaagtaaggagagccatcaggggagaaaagatattgtcctactgcaactacccatca

SEQ ID NO: 164620 - DNA, 80 bp, synthetic construct
  source 1..80: mol_type = other DNA
gaaccagccgttaataaacaaaaagctatagattttgcagaaaaatttttacaaacagctatacctgacacaccagtaag

SEQ ID NO: 164621 - DNA, 80 bp, synthetic construct
  source 1..80: mol_type = other DNA
acatgggccaagccgcgggttttccctggaacacccaaggccgctctagacgatccctctttgatgaacctgaacctggc

SEQ ID NO: 164622 - DNA, 80 bp, synthetic construct
  source 1..80: mol_type = other DNA
tcctagagcaagaacaggagggatcttattacagagaaggagtgcctctagaagcaacagtgcagaaaaatttagcaaac

SEQ ID NO: 164623 - DNA, 80 bp, synthetic construct
  source 1..80: mol_type = other DNA
atacttatgatactgctgacaatagactaattaacttggcctctaatggcgtgatcaccataccagctggagaacaaatg

SEQ ID NO: 164624 - DNA, 80 bp, synthetic construct
  source 1..80: mol_type = other DNA
ttacccgcacacgtactacgcgaaaactagtaacaccttgattggtggtgtggtgtttcactcagcgctaccccagcgta

SEQ ID NO: 164625 - DNA, 80 bp, synthetic construct
  source 1..80: mol_type = other DNA
cctcccctgtttgacccaaaagacccctccaagggctgggtaccatacaatgacaccttcggtagaggcaaatggataga

SEQ ID NO: 164626 - DNA, 80 bp, synthetic construct
  source 1..80: mol_type = other DNA
tagaaaaagtcttgaataatttgggtttcccaggtcatctagtacaaaacttgtgtagttcaaaacacatattcagatcc

SEQ ID NO: 164627 - DNA, 80 bp, synthetic construct
  source 1..80: mol_type = other DNA
aggtccaataacgcttgaaggtcccccaccagcagctattagtgatttattacaatcagttagaacccctgaagtgatta

SEQ ID NO: 164628 - DNA, 80 bp, synthetic construct
  source 1..80: mol_type = other DNA
agacaaacccacccacccagaaacatccacagatcgcttctacacactaactagtgttgaatggcacggctcgtcaaagg

SEQ ID NO: 164629 - DNA, 80 bp, synthetic construct
  source 1..80: mol_type = other DNA
gacatactctctttctctctcttagctgcggtgaaaaagagggaaggcgtgtgctgctatacaactgtacaacggacgcg

SEQ ID NO: 164630 - DNA, 80 bp, synthetic construct
  source 1..80: mol_type = other DNA
actttgctagtgaatcatccccagagatccctatcacgctaaccatagcaccgatgtgttgtgaatttaatgggttgaga

SEQ ID NO: 164631 - DNA, 80 bp, synthetic construct
  source 1..80: mol_type = other DNA
ctcagatctttgacagtccctgtgacacagggattacccacaatgctcacacccgggtcaaatcagtttttaacttcaga

SEQ ID NO: 164632 - DNA, 80 bp, synthetic construct
  source 1..80: mol_type = other DNA
accctaaccccggagcccagcagcataatccaatgttgtttgggtcgtaatgagcaattctgggatgggaccgactactt

SEQ ID NO: 164633 - DNA, 80 bp, synthetic construct
  source 1..80: mol_type = other DNA
cttggagaaattgcaagttattacacacattggactggaagcttacggtttagttttatgttttgtggaactgcaaacac

SEQ ID NO: 164634 - DNA, 80 bp, synthetic construct
  source 1..80: mol_type = other DNA
cattggacactgagggggcatacagcaacgaaagtgagtggggccagacttcgccataaggcctttatcttcttgccatt

SEQ ID NO: 164635 - DNA, 80 bp, synthetic construct
  source 1..80: mol_type = other DNA
aattacaaggacaacctagggaagctggatgtaccaaaatcttttaaaccatgtgatgtagataataaaattggcaatgc

SEQ ID NO: 164636 - DNA, 80 bp, synthetic construct
  source 1..80: mol_type = other DNA
acacagctgccaatattacaacactggaggcatacagggttccagttagtactgggagtcactctgggaacggagtgatc

SEQ ID NO: 164637 - DNA, 80 bp, synthetic construct
  source 1..80: mol_type = other DNA
gcgtgttgatgcgttcgagctggcgcgccagctgcgtggaggtgccaaagaagcccgccaggtgcgtgccgtcgatgcgg

SEQ ID NO: 164638 - DNA, 80 bp, synthetic construct
  source 1..80: mol_type = other DNA
gaggcgacggaggaaactgccgcgggagaagcctctgcggtagcggcggcggccgtctctgaggaagagcagcagcggga

SEQ ID NO: 164639 - DNA, 80 bp, synthetic construct
  source 1..80: mol_type = other DNA
ttaaccacctatggatttggacaccaaaataaagctgtatatgtagcagggtataaaataatcaactaccacttggccac

SEQ ID NO: 164640 - DNA, 80 bp, synthetic construct
  source 1..80: mol_type = other DNA
gggtgtgactgattatattcactcactaggtgaagcatttggtgctggttttattgacaacattaaagaccagatccaat

SEQ ID NO: 164641 - DNA, 80 bp, synthetic construct
  source 1..80: mol_type = other DNA
tcccatattcctcagcagacacagaagcacactaaactttgccagggcctaccaggacgttacatacaacccaaactgtg

SEQ ID NO: 164642 - DNA, 80 bp, synthetic construct
  source 1..80: mol_type = other DNA
agacaataaaggaatgctattcacaagcagttttgttctggcttccacaaactcccagacgttaaaccctccaactattc

SEQ ID NO: 164643 - DNA, 80 bp, synthetic construct
  source 1..80: mol_type = other DNA
aaaagagacccaaaaacactagccaaaacactgaaacaagaaaccaccaccaacccaacaacaaaaaaaccaacccccaa

SEQ ID NO: 164644 - DNA, 80 bp, synthetic construct
  source 1..80: mol_type = other DNA
gttgcaccgggggcggggggtgacgttgaggacagggagtgaagttgaggacggggagctttggcgctggggacggggag

SEQ ID NO: 164645 - DNA, 80 bp, synthetic construct
  source 1..80: mol_type = other DNA
aaaattaatgttttggtttttctttgttatggactgtatcattagaacactaattcaattagaacactaatttggaatat

SEQ ID NO: 164646 - DNA, 80 bp, synthetic construct
  source 1..80: mol_type = other DNA
tagacatgttggaaagacaaatcaccaccatgcacgtttccaaccccacccaggaaaagagggaacagctgttcaataat

SEQ ID NO: 164647 - DNA, 80 bp, synthetic construct
  source 1..80: mol_type = other DNA
tattgtgtgggcagcgaacgaattggacagattcagattagcagaaaacctgttggagtcaaaagaaggttgccaaaaga

SEQ ID NO: 164648 - DNA, 80 bp, synthetic construct
  source 1..80: mol_type = other DNA
aactcatagagtggatcaagaataaagttttaccccaagctaaggaaaaattagaattttgcagtaagttgaaacaacta

SEQ ID NO: 164649 - DNA, 80 bp, synthetic construct
  source 1..80: mol_type = other DNA
tttgagaccttatgcatgcctatcaggacatcagggagtagtatcagagtatttcactcaattggggagtgcatttggtg

SEQ ID NO: 164650 - DNA, 80 bp, synthetic construct
  source 1..80: mol_type = other DNA
ccaggtgcagcatactacggggcaacttctatcaatgattttgggattctagcagtcagggtggtgaacgagcataaccc

SEQ ID NO: 164651 - DNA, 80 bp, synthetic construct
  source 1..80: mol_type = other DNA
acaatccctcctcgagtacaagtcacggacccgaaactcctcggcccgcactacacattccacagctgggacaaaagacg

SEQ ID NO: 164652 - DNA, 80 bp, synthetic construct
  source 1..80: mol_type = other DNA
cacagcatcacctccacgtacccattatccattagtaggcccaaaagcctcactgtttccagagaggctgccaaagccgt

SEQ ID NO: 164653 - DNA, 80 bp, synthetic construct
  source 1..80: mol_type = other DNA
ccctagtagtgcattccaacaatttcaccaataccatacttgaggttgggccaataactatggcaggtcttattaactta

SEQ ID NO: 164654 - DNA, 80 bp, synthetic construct
  source 1..80: mol_type = other DNA
cacattaaagtagcaacttctcactatgcagctcaattggcaacactggatattgattcaaaccctattacgctagaaga

SEQ ID NO: 164655 - DNA, 80 bp, synthetic construct
  source 1..80: mol_type = other DNA
tgactatatcccaacttgtgactgcactgatgcaacatactattgcaaacataaaaatagatattacccaataaaagtta

SEQ ID NO: 164656 - DNA, 80 bp, synthetic construct
  source 1..80: mol_type = other DNA
tgcattatgaaaattataatgcaaaaaccaaaaacttcatgaaatggcaaattaatttacaggaaatggcacaaattaga

SEQ ID NO: 164657 - DNA, 80 bp, synthetic construct
  source 1..80: mol_type = other DNA
ccagaaaatgaagatgattatccagattgtaatttggctttatccgccaaccaaccagaaactacaattattaatgttgg

SEQ ID NO: 164658 - DNA, 80 bp, synthetic construct
  source 1..80: mol_type = other DNA
aaaagggcaagtaagaaacaggatgaggcatggtaggtttgggcgtggagcggccctccagcacggcggcccgggccgcc

SEQ ID NO: 164659 - DNA, 80 bp, synthetic construct
  source 1..80: mol_type = other DNA
tgtgctttttttgtttttacggtggggaaaaggagggggccgtcattaacgaaaaccgtgtatgggttccggacacgaac

SEQ ID NO: 164660 - DNA, 80 bp, synthetic construct
  source 1..80: mol_type = other DNA
ctgttaaagatgttttagagaaaggcattccaacccttcaatctccctctgttgaagcatgtggatattcagataggtta

SEQ ID NO: 164661 - DNA, 80 bp, synthetic construct
  source 1..80: mol_type = other DNA
gcaaggaggccatgttaggagtgcacatcatctgggatctgggtctacagtcaacatgcaacatggttgttccttggatt

SEQ ID NO: 164662 - DNA, 80 bp, synthetic construct
  source 1..80: mol_type = other DNA
cttacaccacatataaaaacgccaacccaggcgaggccggaggggtgtttgtggactcattcaccgcgacaactcaggcc

SEQ ID NO: 164663 - DNA, 80 bp, synthetic construct
  source 1..80: mol_type = other DNA
aaccctctggtccacaacacactactaaacccacagccttaggggcaatggagattggtgcgtccagtgacgccacacca

SEQ ID NO: 164664 - DNA, 80 bp, synthetic construct
  source 1..80: mol_type = other DNA
cacggctttgctgcggccctgaaacggtcctacttcaatgaggaacaaggagaaatacaatggatgaggcctagtaggga

SEQ ID NO: 164665 - DNA, 80 bp, synthetic construct
  source 1..80: mol_type = other DNA
cgtcgcaggagacgacgagcaacaagagtaaggaggcgccgcggtggtcggtggggacgcaaacggaggcgacgcacttt

SEQ ID NO: 164666 - DNA, 80 bp, synthetic construct
  source 1..80: mol_type = other DNA
accccaggttcaggtcaattcatgactacagatgactttcaatctccaagtgctttaccatggttccatcccaccaagga

SEQ ID NO: 164667 - DNA, 80 bp, synthetic construct
  source 1..80: mol_type = other DNA
tagtatgaccaagcataacaactggggtatcgcgatcatccccttgtccaagttggattttgcccccgatgcatcagtgg

SEQ ID NO: 164668 - DNA, 80 bp, synthetic construct
  source 1..80: mol_type = other DNA
agtttagctccactctatgcaaaggaaaacaaacttgtatcagatatgcacaagcaactcaaacaactaacggcctacca

SEQ ID NO: 164669 - DNA, 80 bp, synthetic construct
  source 1..80: mol_type = other DNA
atttacagctctatattcctatctgcaggcagatcttactttgaaaccctaggggcctacacagatgtagtctacaaccc

SEQ ID NO: 164670 - DNA, 80 bp, synthetic construct
  source 1..80: mol_type = other DNA
ctgtgtgcgcctgttttatccaccctaccctgtcgtaacttagaagttaatcaactatggtcactaggcggctcagtgtg

SEQ ID NO: 164671 - DNA, 80 bp, synthetic construct
  source 1..80: mol_type = other DNA
tcctctccaaccttcgctccaccctagaccccagcttctggcctccccgggtccaccaggccagccggagggaccccggc

SEQ ID NO: 164672 - DNA, 80 bp, synthetic construct
  source 1..80: mol_type = other DNA
ctgccagagcacgatggctcaagacagtccatcagaaacagactacacccagactccctgacaggatcatctccaaacca

SEQ ID NO: 164673 - DNA, 80 bp, synthetic construct
  source 1..80: mol_type = other DNA
cgatcagttagaccttgccagatacaggggggccaaattcaccttttacaggactaaaaacactgactggatagcacagt

SEQ ID NO: 164674 - DNA, 80 bp, synthetic construct
  source 1..80: mol_type = other DNA
agatgattagtaaaaagaaaatcttaacaatgagcacaaaatataaatggacgcggaacaaatttgatattgcagaggga

SEQ ID NO: 164675 - DNA, 80 bp, synthetic construct
  source 1..80: mol_type = other DNA
caatggctatatgaaaaatgcacccactatcaaacatttgccacagacactagactagccccagaaaaatcaacttgtcc

SEQ ID NO: 164676 - DNA, 80 bp, synthetic construct
  source 1..80: mol_type = other DNA
tgccacagcataccaggatgtcacttacaacccaaactgtgacagaggcaaaggcaacagaatatggttccagtacggaa

SEQ ID NO: 164677 - DNA, 80 bp, synthetic construct
  source 1..80: mol_type = other DNA
atgggtgcacaagtgtccaagcaaaacactggatctcatgagaatgcaattaatgctaacaacggaggtgtgattaagta

SEQ ID NO: 164678 - DNA, 80 bp, synthetic construct
  source 1..80: mol_type = other DNA
catagccccttcacacttagataataactacgcagcatttaaaaatgagttaaaaaccagattcgatgtaactaaaaaat

SEQ ID NO: 164679 - DNA, 80 bp, synthetic construct
  source 1..80: mol_type = other DNA
acggcacttttgcaaggtgacacagaggtggctgtcaacaacgccgtggccagagtggctgacacaatagctagtggacc

SEQ ID NO: 164680 - DNA, 80 bp, synthetic construct
  source 1..80: mol_type = other DNA
gcatttaaccctgatggcaccaaaaactcacaaaaagagatctggcaacaaagctggagcaaaaaaaatgaccaatggtc

SEQ ID NO: 164681 - DNA, 80 bp, synthetic construct
  source 1..80: mol_type = other DNA
atattttaagtactttgggcatgactctaaatttcccagtggcaaagatagaaccagtaaaagtcaaactaaagcctggg

SEQ ID NO: 164682 - DNA, 80 bp, synthetic construct
  source 1..80: mol_type = other DNA
agtgtggccacctccctaagagggtaggtggccagggggtaaaagtagatgtagccgcacggacccggctggctctggct

SEQ ID NO: 164683 - DNA, 80 bp, synthetic construct
  source 1..80: mol_type = other DNA
gtccagcttctgaccccagattgtcgcgcacactgttgggcgagatcttgaattactacacacattgggccggttcagta

SEQ ID NO: 164684 - DNA, 80 bp, synthetic construct
  source 1..80: mol_type = other DNA
acagatggattgaaggagaaacactttatcaaaccaagagaacacataaagaatgttgggcccagtgatcagtgtgttca

SEQ ID NO: 164685 - DNA, 80 bp, synthetic construct
  source 1..80: mol_type = other DNA
tactaaatatattatcactgtgctctccccacatcattctaaacacaccaattcccacgtatccactcacgttggttgga

SEQ ID NO: 164686 - DNA, 80 bp, synthetic construct
  source 1..80: mol_type = other DNA
taccaaagatgccatctacacttgtgctcacttaactgagcctaatcctaacaccattctcttagccatcacagcagatc

SEQ ID NO: 164687 - DNA, 80 bp, synthetic construct
  source 1..80: mol_type = other DNA
caggttggagacgattcagggggtttttcaacaacagtttccacagagcagaatgttcctgatccccaagttggcataac

SEQ ID NO: 164688 - DNA, 80 bp, synthetic construct
  source 1..80: mol_type = other DNA
aaggggggcggggcgcgggcagcggagcgtgaagaagggccccagagctgacccctacaaacgtgccccggggctccggg

SEQ ID NO: 164689 - DNA, 80 bp, synthetic construct
  source 1..80: mol_type = other DNA
ttcaaaggcttcaatgaggtgtccacagctttcagacacatcgattggtgggtacacacactactcaaaattaaggacat

SEQ ID NO: 164690 - DNA, 80 bp, synthetic construct
  source 1..80: mol_type = other DNA
cagtagtagacaatttcattaataatgccaaaaactattttgagtctagaaaaggaaacatagtaatgagcaatgaatat

SEQ ID NO: 164691 - DNA, 80 bp, synthetic construct
  source 1..80: mol_type = other DNA
acagatggcaatgcatggaaacaacactataaatcatttttaaaaaaagtatttactacagatagatctgccaacaaact

SEQ ID NO: 164692 - DNA, 80 bp, synthetic construct
  source 1..80: mol_type = other DNA
catacccttctatccttaccttccaccaccccccgaaaaattctatgtaacctttaagcttggctttaaataaacaaggc

SEQ ID NO: 164693 - DNA, 80 bp, synthetic construct
  source 1..80: mol_type = other DNA
tctccaagccgggcacggccttcatcccctactccaatgccatgtataaataaagtatacatgtttcctgatatgttccc

SEQ ID NO: 164694 - DNA, 80 bp, synthetic construct
  source 1..80: mol_type = other DNA
attttaagtaaggcggaaaggcttccactgtgtacaaaatgccggcggagcacttccggcttgcccaaaatggcggccat

SEQ ID NO: 164695 - DNA, 80 bp, synthetic construct
  source 1..80: mol_type = other DNA
aactaaccctactaagacaatactactttcgatgggagacacagcatacaggggtcgcagtcccacctacgtggactacc

SEQ ID NO: 164696 - DNA, 80 bp, synthetic construct
  source 1..80: mol_type = other DNA
caggggaagtgcactccctactggagctgtgtagggtagaaaccattctagaagtgaacaacactacagaggctacaggg

SEQ ID NO: 164697 - DNA, 80 bp, synthetic construct
  source 1..80: mol_type = other DNA
gatagagctactaatgttaggtacagtatagaccaattagttacagctgttgttaatgattacaagaataaaatgcaaat

SEQ ID NO: 164698 - DNA, 80 bp, synthetic construct
  source 1..80: mol_type = other DNA
gtatactgtataaaataggacaagttctgggaatccatgttggtgggaatggaagggatggattttctgcaatgctacta

SEQ ID NO: 164699 - DNA, 80 bp, synthetic construct
  source 1..80: mol_type = other DNA
ctcacgggaagagctgctggagctgggcccggagagcctagagaaaatcatcgccgacctcaaggccaagtcacccggcg

SEQ ID NO: 164700 - DNA, 80 bp, synthetic construct
  source 1..80: mol_type = other DNA
ccaactcctcattaggactagtacatggctggacaaatgccacagtaaaagaatatgaataccacttaggaatgtttagt

SEQ ID NO: 164701 - DNA, 80 bp, synthetic construct
  source 1..80: mol_type = other DNA
catttgagggtgatttgtcacactgaaagggcaatttgtcacaacaccttctctagaaccagcatggataaaggcctaca

SEQ ID NO: 164702 - DNA, 80 bp, synthetic construct
  source 1..80: mol_type = other DNA
aacttcaggagtaagcccaacttggagtaacgtacaaaactcagcaccacgtgactcccacaggccaaccagagtctacg

SEQ ID NO: 164703 - DNA, 80 bp, synthetic construct
  source 1..80: mol_type = other DNA
gctgctcgctcaggctgttctgtgaatagtacactggggtgtaggagagggccctggtgagacacgtgtctgggagacgg

SEQ ID NO: 164704 - DNA, 80 bp, synthetic construct
  source 1..80: mol_type = other DNA
taataccttggatatcctctggtttttatcgtaataccaaatctgatgaccacactgaagcagggtacgtttcactttgg

SEQ ID NO: 164705 - DNA, 80 bp, synthetic construct
  source 1..80: mol_type = other DNA
acaaatggagcacatccaatgacattctagacctggccagatacctaggctgtgacttttacttctacagagacaaacac

SEQ ID NO: 164706 - DNA, 80 bp, synthetic construct
  source 1..80: mol_type = other DNA
atggcactgtttctggtattaggtatactgggttttgcatttctgcatggtggcaccacatggtgccaaacacatcttga

SEQ ID NO: 164707 - DNA, 80 bp, synthetic construct
  source 1..80: mol_type = other DNA
gtctgcgggccacggtggcctctccacccatcacatcccggtcgagccggctggcatcctccgagtctttcacgccttgc

SEQ ID NO: 164708 - DNA, 80 bp, synthetic construct
  source 1..80: mol_type = other DNA
aacgacctcactttgttacagagggagagttccaagggcaagaaggcaacttatattcaggggaaggaaaatcggacatc

SEQ ID NO: 164709 - DNA, 80 bp, synthetic construct
  source 1..80: mol_type = other DNA
tcacacctctttgttggtgaagaatctttggatatggctttcataatatctgttcagtatgggacgaatgctaacagtgt

SEQ ID NO: 164710 - DNA, 80 bp, synthetic construct
  source 1..80: mol_type = other DNA
gtaaagatagggccccccaaactgtttgaagacaagtggtacccacaggcagacttttgcaaggttccccttgtcagttt

SEQ ID NO: 164711 - DNA, 80 bp, synthetic construct
  source 1..80: mol_type = other DNA
tgcttcaataagaatgtaagacctgacgtttcagtacttggcaattgtagagcatagcccggctgtaaaggtcagaaaat

SEQ ID NO: 164712 - DNA, 80 bp, synthetic construct
  source 1..80: mol_type = other DNA
tatatgtcaattggtcgaaccaattaccaaagggatgcaaaaccaatcattgccaagagagaaaatatcatgaagtatgg

SEQ ID NO: 164713 - DNA, 80 bp, synthetic construct
  source 1..80: mol_type = other DNA
aattaaaaacacataagagcacatacatatgtggaatagcaaacacaaatgagtttctatgctggcgcgacaatactcat

SEQ ID NO: 164714 - DNA, 80 bp, synthetic construct
  source 1..80: mol_type = other DNA
aaattggaaatgaatctggtggtgagatcctcaccaaggtggctgatgacgcttctaacctccttggacccaattgtatt

SEQ ID NO: 164715 - DNA, 80 bp, synthetic construct
  source 1..80: mol_type = other DNA
catggctcgcgtagactcctttatgcctataaataatgtgaatcaatctcatacactgggggtttactacatcacaatat

SEQ ID NO: 164716 - DNA, 80 bp, synthetic construct
  source 1..80: mol_type = other DNA
tgcaggtactagcatttttaacacaatgataaataatgttattattagaactttagtacttgatgcttacaaaaatatag

SEQ ID NO: 164717 - DNA, 80 bp, synthetic construct
  source 1..80: mol_type = other DNA
ggacccttcgcctaccagggagaccaacgcagctgcgttctcatgtgcaaatacaaattcaactttctcttcgggggcaa

SEQ ID NO: 164718 - DNA, 80 bp, synthetic construct
  source 1..80: mol_type = other DNA
gtcatcaataaaagtaaaaatacagccaccaaaacttatgatagataagtggtacccacaaactgaattttgtgaagtaa

SEQ ID NO: 164719 - DNA, 80 bp, synthetic construct
  source 1..80: mol_type = other DNA
ttacacaaattatgatggaagcttgcatcctatctggtttgaagctctgggcaaagtactcaaccaaattggtttccctg

SEQ ID NO: 164720 - DNA, 80 bp, synthetic construct
  source 1..80: mol_type = other DNA
atctccgcccatattcttgcttagcacaacaacaaggtgtagtctcagattacttcacacaactaggtggtgcttttggc

SEQ ID NO: 164721 - DNA, 80 bp, synthetic construct
  source 1..80: mol_type = other DNA
cgcgactgaggtggtgcggagaggcgggacccgggtaccctttctaccaggggcgagcagcgcggcagaggcctctctcg

SEQ ID NO: 164722 - DNA, 80 bp, synthetic construct
  source 1..80: mol_type = other DNA
tgattcaaaaacccaagaaaggattaagattgaaatagatacattacatgatttatcctgcaagttcctcccactttatg

SEQ ID NO: 164723 - DNA, 80 bp, synthetic construct
  source 1..80: mol_type = other DNA
tcggtggtcccaacctggttggttttgcagacatcagagatctactatggttagatgatgaggtcatggaacaaggagtc

SEQ ID NO: 164724 - DNA, 80 bp, synthetic construct
  source 1..80: mol_type = other DNA
ggcgatgaagctagaatctgataagacatttccgattcgactagacggcaaaataaatgggtatgcctgtgtggtgggcg

SEQ ID NO: 164725 - DNA, 80 bp, synthetic construct
  source 1..80: mol_type = other DNA
tccgtgcgcatgttgcgtgacacgccattcatcgggcaaacagcactactacagggcgatacagaaacggctgtcaatga

SEQ ID NO: 164726 - DNA, 80 bp, synthetic construct
  source 1..80: mol_type = other DNA
gacagtggtggggttgtcggcggggacggtggtggcgacggagacacagggtgacgtcagagacaggggccttttgcggg

SEQ ID NO: 164727 - DNA, 80 bp, synthetic construct
  source 1..80: mol_type = other DNA
ctgccgtgcggtgtggtttccacttccaagtccaagttaatgttaaccaaggaactgctgggagcgcactagtggtgtat

SEQ ID NO: 164728 - DNA, 80 bp, synthetic construct
  source 1..80: mol_type = other DNA
aggaggagatggaggacaatacgcaccagaagatctagaagacctcttcgccgccgtcgccggagacgtagagtaaggag

SEQ ID NO: 164729 - DNA, 80 bp, synthetic construct
  source 1..80: mol_type = other DNA
tgtaatggccacaaacacagagagtaaaacatcatacgtcacgtatgtgaatgcaaatcctggggaggcaggtggtacat

SEQ ID NO: 164730 - DNA, 80 bp, synthetic construct
  source 1..80: mol_type = other DNA
cagtgtttaacacctttaaaactgaggagcaccttaagtgccctgcagccaaagaacttaaacaaccagatccacaaacc

SEQ ID NO: 164731 - DNA, 80 bp, synthetic construct
  source 1..80: mol_type = other DNA
aaagggtaaccaatatacagaaagatttgcagcgtctgacagcataccagaaaacccacaggcatgaacccgtatgctgt

SEQ ID NO: 164732 - DNA, 80 bp, synthetic construct
  source 1..80: mol_type = other DNA
tcaattttggcaaacctaatcagtgtaataggaatcatttacattatatacaaattatttgtgtcattacaagggcctta

SEQ ID NO: 164733 - DNA, 80 bp, synthetic construct
  source 1..80: mol_type = other DNA
agaagtatatggcatctacttagtagtagtaatatgtccttacactgaaccaaaaatgtttaatgacaaaaaacccaaaa

SEQ ID NO: 164734 - DNA, 80 bp, synthetic construct
  source 1..80: mol_type = other DNA
ccccagacgccgctggaggtggaggcgcagacggaggagactaccagcaagaagagctcgacgaactgttcgccgccctc

SEQ ID NO: 164735 - DNA, 80 bp, synthetic construct
  source 1..80: mol_type = other DNA
ttcgggcacggcgacggtgtctcctccgtcttgttcttcttcgtcggcgacttggctcgaggagcgcgacgagtgggtgc

SEQ ID NO: 164736 - DNA, 80 bp, synthetic construct
  source 1..80: mol_type = other DNA
cagtgtttttggtatagaaggtttagaagcacttgatctcaacaccagtgcaggatttccatatgtaactatgggaataa

SEQ ID NO: 164737 - DNA, 80 bp, synthetic construct
  source 1..80: mol_type = other DNA
agggatggataaaacaatccaaacactcaaaactagagcgtgaatttaattatgtacagtattgtctaaattgtgtaggc

SEQ ID NO: 164738 - DNA, 80 bp, synthetic construct
  source 1..80: mol_type = other DNA
acagagaaaactggaaccgcatatgggatttctgcaacaaatgatatggggacactctgctttagggcattggaagatac

SEQ ID NO: 164739 - DNA, 80 bp, synthetic construct
  source 1..80: mol_type = other DNA
aggaagaaggataagatagtagcaggtaagactagggtcatagaagctagtagtataaatgatactatcttatttaggac

SEQ ID NO: 164740 - DNA, 80 bp, synthetic construct
  source 1..80: mol_type = other DNA
atgggtattccacacctttgactacagacgggggctatttggaaaggacgctattaagcgagtgtcagaaaaaccgacag

SEQ ID NO: 164741 - DNA, 80 bp, synthetic construct
  source 1..80: mol_type = other DNA
cacccttccactacatcagatacaaccccatggcagacagaggcctaggaaatatgatctgggtagactggtgcagcaga

SEQ ID NO: 164742 - DNA, 80 bp, synthetic construct
  source 1..80: mol_type = other DNA
taagacagtggcagccaaactacagaagaagatgtaatatagtgggctacctccctatacttatctgtggtggaaatact

SEQ ID NO: 164743 - DNA, 80 bp, synthetic construct
  source 1..80: mol_type = other DNA
tatataagttctgatacaaccacgattacatcaacaaccatccatatatccacaaaatcacagtcaaaaacaacgtcagc

SEQ ID NO: 164744 - DNA, 80 bp, synthetic construct
  source 1..80: mol_type = other DNA
tgcgtgaggaagatgccgcgcgggccagcacgctagccaacctactggtgcgcagctacgagctgggcctgaagactatc

SEQ ID NO: 164745 - DNA, 80 bp, synthetic construct
  source 1..80: mol_type = other DNA
cgtaccgaggagatggagtggatttgaaacaagaagccattacaccgttgactccagtgaacagcatcacaacctatgga

SEQ ID NO: 164746 - DNA, 80 bp, synthetic construct
  source 1..80: mol_type = other DNA
ataaacttccaggagaatgcacaggttaggaaaaagctagaaatgttcacatatgttaggtttgatttagaaatcactgt

SEQ ID NO: 164747 - DNA, 80 bp, synthetic construct
  source 1..80: mol_type = other DNA
gacactacaacaggtccacacatggacatcatctaggataccgtcgaaatcagtacaagtcaaccatcctaacctcacat

SEQ ID NO: 164748 - DNA, 80 bp, synthetic construct
  source 1..80: mol_type = other DNA
gggtctaatcagttcttaacttctgatgacttccaatccccttgtgcactacccaacttcgacgtaactcccccaattca

SEQ ID NO: 164749 - DNA, 80 bp, synthetic construct
  source 1..80: mol_type = other DNA
ctgcaaatggttggaaatccaacgaccggctagtaaacagagtgactcttggttacggaagttcactgagtgttgtaatg

SEQ ID NO: 164750 - DNA, 80 bp, synthetic construct
  source 1..80: mol_type = other DNA
caaacatgaaaagctaccataaaaaatttatagacgaatcgtttcccaccaactggtatggaaacatggcaaactgtcac

SEQ ID NO: 164751 - DNA, 80 bp, synthetic construct
  source 1..80: mol_type = other DNA
attttgaatctaaatacacgaaaatgggagctcaagtgtcaactcaaaaatctgggtcccacgaaaccggtaacgtggcc

SEQ ID NO: 164752 - DNA, 80 bp, synthetic construct
  source 1..80: mol_type = other DNA
ttgtggccaaaaaagtggaaactacaaaagattaacctgcccgaaaaagagacttggacagtaaatgatattcaaaaact

SEQ ID NO: 164753 - DNA, 80 bp, synthetic construct
  source 1..80: mol_type = other DNA
gtggattggggtgcagactcaaaaggctggtggtggaagttacctgatgcactgaaagacatgggcatgtttggccaaaa

SEQ ID NO: 164754 - DNA, 80 bp, synthetic construct
  source 1..80: mol_type = other DNA
tcattagaggtgctgtttcaaggcccggtttacaaagacctatctattgatattacaaccactccacctccagaatgtat

SEQ ID NO: 164755 - DNA, 80 bp, synthetic construct
  source 1..80: mol_type = other DNA
gcttttcttttacattctgtgctacgacctgtttacctcatgcggcaatcggtgcgatatcccttccatgacgcggctca

SEQ ID NO: 164756 - DNA, 80 bp, synthetic construct
  source 1..80: mol_type = other DNA
ttaaggaccttgttatgccaaagcccgctcctacctgcaatatcaaggcgactgtgtgcagctttgacgatggagtagat

SEQ ID NO: 164757 - DNA, 80 bp, synthetic construct
  source 1..80: mol_type = other DNA
gagcttcgggggaattgcatatacttatattttaagatttcctaaatttcctacggatgactatcataatatgctacagc

SEQ ID NO: 164758 - DNA, 80 bp, synthetic construct
  source 1..80: mol_type = other DNA
ctgcataggcttcaatgtcctcaaaaacagcatctacactaacctcagcaacctgccactacacaaagaagccagattag

SEQ ID NO: 164759 - DNA, 80 bp, synthetic construct
  source 1..80: mol_type = other DNA
agggctgtgccttacttaaatacatcagttgactttgcccatgatgctagagcaatggatcaagtggcaaccattagaac

SEQ ID NO: 164760 - DNA, 80 bp, synthetic construct
  source 1..80: mol_type = other DNA
gcgatcagtttggagcaggtcagatgccagacggcagcccatacgtacccataaaatggagaggaaagtggtaccctaac

SEQ ID NO: 164761 - DNA, 80 bp, synthetic construct
  source 1..80: mol_type = other DNA
gtaggtaaagctcttgttatcccatcatactcagttctcagacgtaggtggctggatttgttttgaatgatttatatata

SEQ ID NO: 164762 - DNA, 80 bp, synthetic construct
  source 1..80: mol_type = other DNA
ccctattagggtactctgactattgtacaaaatatttcaatgacccaggactcataaaagaagccagactaaccattatc

SEQ ID NO: 164763 - DNA, 80 bp, synthetic construct
  source 1..80: mol_type = other DNA
atacaccgaaaagatagttgaaggtttctttaagaatgcagagaacatgtacgatgccagaaaaaatgtaagttaccaag

SEQ ID NO: 164764 - DNA, 80 bp, synthetic construct
  source 1..80: mol_type = other DNA
tgactacaaatcagttgtccttcccaacacccctctctcctgcttcgacgaactggtcgatttcatcttgggttctctcc

SEQ ID NO: 164765 - DNA, 80 bp, synthetic construct
  source 1..80: mol_type = other DNA
tgaaggacacaccattcatatctcaagacagcttttaccaaggggacgtacacgatgcagtggttggggccatgactcgt

SEQ ID NO: 164766 - DNA, 80 bp, synthetic construct
  source 1..80: mol_type = other DNA
atgggcacactttgtttcagggcactggatgacaaacagagaaatgatgttaagatttttgctaaacccaaacatacacg

SEQ ID NO: 164767 - DNA, 80 bp, synthetic construct
  source 1..80: mol_type = other DNA
cagaagtacaaaatcagagcgtcatcttgtgctttgtgtctgcatgcaatgatttttcagtcaggctattgcgagattca

SEQ ID NO: 164768 - DNA, 80 bp, synthetic construct
  source 1..80: mol_type = other DNA
ggagaagttttgaactactatgcacattggtctggtagcatcaagctcacttttctcttttgtggctcagccatggctac

SEQ ID NO: 164769 - DNA, 80 bp, synthetic construct
  source 1..80: mol_type = other DNA
atgatcccagactagaagttgactttaaagaagctctcttctcaaagtacaagggaaataataaatgtgaattaaatgac

SEQ ID NO: 164770 - DNA, 80 bp, synthetic construct
  source 1..80: mol_type = other DNA
ataaatattcaacaggaaaaccacataattagaattgccgaccacaaaccgtcacttacttcccctttttgtacttactt

SEQ ID NO: 164771 - DNA, 80 bp, synthetic construct
  source 1..80: mol_type = other DNA
cagctcaggcaagaaaagaaaaacaggaagtgtgttgaacacaacctctcagccatatttcaggggttgggagacaacac

SEQ ID NO: 164772 - DNA, 80 bp, synthetic construct
  source 1..80: mol_type = other DNA
ctctcaactgatagccaagtatagatttactttctactggggaggtaacatggtacattctcaggtcatcaggaacccgt

SEQ ID NO: 164773 - DNA, 80 bp, synthetic construct
  source 1..80: mol_type = other DNA
tcactacccctggatgcctactacattcaaagtgtctttcaaactcggttttcaataaatgttggccgtgggagttacgc

SEQ ID NO: 164774 - DNA, 80 bp, synthetic construct
  source 1..80: mol_type = other DNA
gcaggtattccccggggtgccattagtggttttgtgggcaagtggtttgaccgcagtggttagcggggttacaatcagcc

SEQ ID NO: 164775 - DNA, 80 bp, synthetic construct
  source 1..80: mol_type = other DNA
tgcccaggcctccacgcttgtgcccgtacatcaatagtaccaatgttaactttgagcctaagccagtgacagaagtaaga

SEQ ID NO: 164776 - DNA, 80 bp, synthetic construct
  source 1..80: mol_type = other DNA
aagtgagcctgttctagcacgccgatcacaaaattgttggcctcgtcggcctcggccacattccacgagccgaaagtgaa

SEQ ID NO: 164777 - DNA, 80 bp, synthetic construct
  source 1..80: mol_type = other DNA
atagtagtattaagaatagcaatatacattatacagatgctagcaaggcttaggaagggctataggccagtattctcctc

SEQ ID NO: 164778 - DNA, 80 bp, synthetic construct
  source 1..80: mol_type = other DNA
agccctaaccgcaaccgcagcttcctttctccacccattcggctcaccacaaactgccaacatatgcgcaaccttccaag

SEQ ID NO: 164779 - DNA, 80 bp, synthetic construct
  source 1..80: mol_type = other DNA
gggaccgggttcgtcccggtgtactggctgaccaggtggagagtagaactgctatttcagaaaaaagtactgtcagacat

SEQ ID NO: 164780 - DNA, 80 bp, synthetic construct
  source 1..80: mol_type = other DNA
agacccaacaggtattgaaaaccagaaacaagaaaaactgtttaatgattggaagatcaatttatccagtttggttcagc

SEQ ID NO: 164781 - DNA, 80 bp, synthetic construct
  source 1..80: mol_type = other DNA
ctggatgtcaatggcaagaatcctggagggcatgaagagggaatccaaccccccggccatggggaagtattttatcagga

SEQ ID NO: 164782 - DNA, 80 bp, synthetic construct
  source 1..80: mol_type = other DNA
ccacaaacagtgatccaccggaatgtggtaaaattgaaccaatttccaaacttgaacatgtttgtaaattcatactcata

SEQ ID NO: 164783 - DNA, 80 bp, synthetic construct
  source 1..80: mol_type = other DNA
ttggcagggccatagctgaaagggaaagcacatctgtctattcgctaccaccagatcccactcactttgatgggtataaa

SEQ ID NO: 164784 - DNA, 80 bp, synthetic construct
  source 1..80: mol_type = other DNA
ggctttcaccccacaccaaccatacatattcccggtgaagtccatagtttgttagagttgtgccagattgagactatgct

SEQ ID NO: 164785 - DNA, 80 bp, synthetic construct
  source 1..80: mol_type = other DNA
tccactcaaccaccctcgtgggcacactgaactccacaggtgcgcccctagcctccgagccctccacatcatgttccacc

SEQ ID NO: 164786 - DNA, 80 bp, synthetic construct
  source 1..80: mol_type = other DNA
ccaacaccgccggtacctttcaaccgcgtgccagtcaatattcagtttctgcgtgaaaacccgccacccatcgcgcgagt

SEQ ID NO: 164787 - DNA, 80 bp, synthetic construct
  source 1..80: mol_type = other DNA
tgaacttcaagcctactgccgtgacaactgagcggaaagacattaatgatgtggggacactccgtcccgtgggttatacc

SEQ ID NO: 164788 - DNA, 80 bp, synthetic construct
  source 1..80: mol_type = other DNA
atacacttccataggaaaaaccaacttcccgaacacgcacagcaaggttattgctactagggatagtatcaccacttatg

SEQ ID NO: 164789 - DNA, 80 bp, synthetic construct
  source 1..80: mol_type = other DNA
cttcctgtgcagagcagcttgcgttcacatggccaagtatgaggccagggatacgcaagaacccacagaccggtttgata

SEQ ID NO: 164790 - DNA, 80 bp, synthetic construct
  source 1..80: mol_type = other DNA
ctgcgaaggtttggaccgtcttccagtaggtgttgggggtcccaaatcacgaggttaggcaggtgcacttggctctttag

SEQ ID NO: 164791 - DNA, 80 bp, synthetic construct
  source 1..80: mol_type = other DNA
gaacaactacaagacactgtgcagaatgttattaccgagaagcttcttaagaacctggtgaagatagtgtcagccctggt

SEQ ID NO: 164792 - DNA, 80 bp, synthetic construct
  source 1..80: mol_type = other DNA
tacatctaagattggagtactagtagtcgtttgtggtttctatttttttttatatttatctatgacagtttttctgtttt

SEQ ID NO: 164793 - DNA, 80 bp, synthetic construct
  source 1..80: mol_type = other DNA
ctataacgacaaaattagcatagttgagacatcactagcagacaactaccctaaactagttgaagcaattaaaaatggtc

SEQ ID NO: 164794 - DNA, 80 bp, synthetic construct
  source 1..80: mol_type = other DNA
cttcgtgtgtccccagggacccgcgctgccgtcgttccccggggaatcaaacgcggccgtccccctggggacttcctctt

SEQ ID NO: 164795 - DNA, 80 bp, synthetic construct
  source 1..80: mol_type = other DNA
tggtatcaacaacagagtttgtagtgcctatggctagcctggaagataaaggcaaaactttcactagcgattatgtttta

SEQ ID NO: 164796 - DNA, 80 bp, synthetic construct
  source 1..80: mol_type = other DNA
agatttcaggttaataatgatctatggcaaggtgtaaaagcctgtgtcaagtcaaaatttagagagatctttggaattaa

SEQ ID NO: 164797 - DNA, 80 bp, synthetic construct
  source 1..80: mol_type = other DNA
caagacgaaggatatccacaacagtggttaggcagtccagcactaacacacctcacaggcatattcagtccccccttttt

SEQ ID NO: 164798 - DNA, 80 bp, synthetic construct
  source 1..80: mol_type = other DNA
cggtgccgtgggttagtgcaagccattttagatttaccactccagatacatactcagcagctggttacatcacatgctgg

SEQ ID NO: 164799 - DNA, 80 bp, synthetic construct
  source 1..80: mol_type = other DNA
gcctggtggatgggaaggccggacggcgcttctcccgggtcgaacgctggagtagcggaggctgctgcgccggcggccac

SEQ ID NO: 164800 - DNA, 80 bp, synthetic construct
  source 1..80: mol_type = other DNA
attaaatcctatttcatcatggatacctccaaatatatcgaattcttcaatacccttgccagtcgagacatcacctcgac

SEQ ID NO: 164801 - DNA, 80 bp, synthetic construct
  source 1..80: mol_type = other DNA
gacaccaaaataaagcagtttatactgccggatacaaaatttgtaattaccatttggcaacccccgaggatatggaaaaa

SEQ ID NO: 164802 - DNA, 80 bp, synthetic construct
  source 1..80: mol_type = other DNA
aaaaccaggacaatgtggaggagtactgggaaacacaggacacataattggtatacatgttgggggaaatggtcgtgttg

SEQ ID NO: 164803 - DNA, 80 bp, synthetic construct
  source 1..80: mol_type = other DNA
acccatctactggcaacagagatggtacccccgttttgcttttcagcaacaggtcatgcacgacataacactaaccggcc

SEQ ID NO: 164804 - DNA, 80 bp, synthetic construct
  source 1..80: mol_type = other DNA
aatagttccagtcctagtgaagtcttctgtattctacaaggtagaatgggagaggatgccaaatttttctgccccactgg

SEQ ID NO: 164805 - DNA, 80 bp, synthetic construct
  source 1..80: mol_type = other DNA
actggccacttgacacattgtgcaggttaccaacatgatgaaattatccttcatggtcactccattaaatacttggagca

SEQ ID NO: 164806 - DNA, 80 bp, synthetic construct
  source 1..80: mol_type = other DNA
gtaaacagaacaaacagagataccacaaaactacagcagatgatggatttgtatggtattgatttaccatacataactta

SEQ ID NO: 164807 - DNA, 80 bp, synthetic construct
  source 1..80: mol_type = other DNA
ccagattagaagtaaaattgactgaatcactgttttcaaaatataagggtaatgtggaaatggaacccacagaaaacatg

SEQ ID NO: 164808 - DNA, 80 bp, synthetic construct
  source 1..80: mol_type = other DNA
atccgggtgcagcctattacggagcaacctccatcaatgatttcgggattcttgcagtgagggtggtgaatgaacacaac

SEQ ID NO: 164809 - DNA, 80 bp, synthetic construct
  source 1..80: mol_type = other DNA
tggactactgccaatgaaaagtacataaaaggcaggaatatacctacatgggttactagatacaagtttgtttctgtgct

SEQ ID NO: 164810 - DNA, 80 bp, synthetic construct
  source 1..80: mol_type = other DNA
ttcaatcaccgtgtgcactaccaaactttgatgttactccagaaatccatatccccggtgaagtgaagaacatcatggag

SEQ ID NO: 164811 - DNA, 80 bp, synthetic construct
  source 1..80: mol_type = other DNA
tatccacactgactcccccaactgtgcagttacctgaagcacttggcagaaggttctaccttgatatggagctaaaaatt

SEQ ID NO: 164812 - DNA, 80 bp, synthetic construct
  source 1..80: mol_type = other DNA
gtacttaagagatgtggtatgtgaaaatgaaacaacagcaaatagctcaggggatgtgcgctgttacatgaaccattgca

SEQ ID NO: 164813 - DNA, 80 bp, synthetic construct
  source 1..80: mol_type = other DNA
gcccttaactacaaataaacggtggccgtgggagtttcacttgtcggtgtctacctcttaaggtcactaagcactccgag

SEQ ID NO: 164814 - DNA, 80 bp, synthetic construct
  source 1..80: mol_type = other DNA
atgccgggcgccaacggtggaatctttgagaatccttacatcatggacatgggagtccccttgagtcaagccttagtgtt

SEQ ID NO: 164815 - DNA, 80 bp, synthetic construct
  source 1..80: mol_type = other DNA
gcagagatcaactctggaagggacccggtgagctattgtggaaaggggaaggagcagtcatcataaaggtagggacagag

SEQ ID NO: 164816 - DNA, 80 bp, synthetic construct
  source 1..80: mol_type = other DNA
agcgcttgcagccagaaccagcttatgtaccagccacgataacatccggtcactgtttccacaggaaaccctaccagggt

SEQ ID NO: 164817 - DNA, 80 bp, synthetic construct
  source 1..80: mol_type = other DNA
atacaaagtaacatccacatttccctatgaatggacatccagaaactacctcagccatgactgtggcatattctctccat

SEQ ID NO: 164818 - DNA, 80 bp, synthetic construct
  source 1..80: mol_type = other DNA
aaagcaaaacctgggactcatcatcaaaaggttggtggtggaaactaccagatgcattgaaagacatgggcatatttgga

SEQ ID NO: 164819 - DNA, 80 bp, synthetic construct
  source 1..80: mol_type = other DNA
tatgtaccaccaggagctaacacaccaagaagtaataatgcaacagagtggaacacagcctctaatccaagtatattctt

SEQ ID NO: 164820 - DNA, 80 bp, synthetic construct
  source 1..80: mol_type = other DNA
cgtaacctccttcatttacatatgccaccgaccgatcccaacgtaaaattgtttacgcctgtcacggtacaaaccgtggt

SEQ ID NO: 164821 - DNA, 80 bp, synthetic construct
  source 1..80: mol_type = other DNA
ttatcccaactacaacggctccaacatcaaatgcaccaccgtgagccgcacatctataaccacattaggtaagtttggcc

SEQ ID NO: 164822 - DNA, 80 bp, synthetic construct
  source 1..80: mol_type = other DNA
agcaggcacttaaaaactttttaactactaatgttacagaaacatcaaacgtaggtaacacactagccactccatacatg

SEQ ID NO: 164823 - DNA, 80 bp, synthetic construct
  source 1..80: mol_type = other DNA
gggtttgtagtgtacagcgagaactttggacgcggacgcatgccggggggcgaccctgtacctagcaccagaaacagagt

SEQ ID NO: 164824 - DNA, 80 bp, synthetic construct
  source 1..80: mol_type = other DNA
tcaagccttattttccaaatacaaaggaaatgttgaatgcaacatgtctgaacacatgaaggttgccatatcacattatt

SEQ ID NO: 164825 - DNA, 80 bp, synthetic construct
  source 1..80: mol_type = other DNA
tgccatgcattgcagctaaagggaatgacataggccatgtagtaatgcaatatatgtatgtaccaccaggagcaccaata

SEQ ID NO: 164826 - DNA, 80 bp, synthetic construct
  source 1..80: mol_type = other DNA
ggacgcggccacgcgtcgcttgaaagaggaggacgccctatgtccgccacggaagcccgcggtgcccatgatgatgtgtc

SEQ ID NO: 164827 - DNA, 80 bp, synthetic construct
  source 1..80: mol_type = other DNA
atatggactcaccatcaccccacctgataaatcaacagagtttaaaccaatgtcatgggacaatgtcaccttcctgaagc

SEQ ID NO: 164828 - DNA, 80 bp, synthetic construct
  source 1..80: mol_type = other DNA
tctcatagataagagaacaaaagacatcacaaaactcaagaaggcaattgataaatatggcattgatttacccatggtca

SEQ ID NO: 164829 - DNA, 80 bp, synthetic construct
  source 1..80: mol_type = other DNA
taagtagatccgcgtgcgtgcacatagccaattacaatgcaaagggtgataaaacagacgtcaacaggtttgacagatgg

SEQ ID NO: 164830 - DNA, 80 bp, synthetic construct
  source 1..80: mol_type = other DNA
gtctaggacctagatttggaggcattttcaccagtaatgtcaaaataatgaactaccatctcatgactccagaggatcac

SEQ ID NO: 164831 - DNA, 80 bp, synthetic construct
  source 1..80: mol_type = other DNA
agaaattcttcagatccccagactgttgtcgccactcttacattgattgggtgctctgggtcaccatggaggtttttaaa

SEQ ID NO: 164832 - DNA, 80 bp, synthetic construct
  source 1..80: mol_type = other DNA
gccttaggtgcccaaatttcttttttcctgtaccagctttaaagccagtgaattcaagatcagtaggtttcacaaatgaa

SEQ ID NO: 164833 - DNA, 80 bp, synthetic construct
  source 1..80: mol_type = other DNA
cggacggacaagctcccgctccccatagacaacctagagacgtacaagtcactgacccgattaccatgggaccgagatac

SEQ ID NO: 164834 - DNA, 80 bp, synthetic construct
  source 1..80: mol_type = other DNA
ccctctcggcggctccggttgggctcccctcccccctctcgagggtccggccgccagtcgtgaccggaggtccctcggcc

SEQ ID NO: 164835 - DNA, 80 bp, synthetic construct
  source 1..80: mol_type = other DNA
cttctcctaccgagacgagctagttagcacccaactgactgccaagtacacctttgactttatgtggggcggaaatatga

SEQ ID NO: 164836 - DNA, 80 bp, synthetic construct
  source 1..80: mol_type = other DNA
caatcaccaagtgcattaccatggtttcacccaacaaaagaaatctccataccaggggaagtgaagaacctagttgagat

SEQ ID NO: 164837 - DNA, 80 bp, synthetic construct
  source 1..80: mol_type = other DNA
gtggaggcgccagcgccccccccccgcgcatgcgcgggtcccccccccgcggtgggctccgccccccggcccgcccgccg

SEQ ID NO: 164838 - DNA, 80 bp, synthetic construct
  source 1..80: mol_type = other DNA
tttcggaaccttggccgtaagggtggtcaatgattacaatcccgcaagagtggagaccagggttcgtgtctacatgaaac

SEQ ID NO: 164839 - DNA, 80 bp, synthetic construct
  source 1..80: mol_type = other DNA
ccaactggaccataagtgtcaaagatatggtgcagcttaggagaaagtgcgaaatgtttacatacttgagatttgatgtg

SEQ ID NO: 164840 - DNA, 80 bp, synthetic construct
  source 1..80: mol_type = other DNA
aaggtcacagctacgtcacaagtcacgtggggagggttggcgtataacccggaagtcaatcctctcacgtggcctgtcac

SEQ ID NO: 164841 - DNA, 80 bp, synthetic construct
  source 1..80: mol_type = other DNA
ctagccgtcacgactagaaatgtgtaggattcggactttccgttcgagaagaaagagaccgcgtctctggacgctctttt

SEQ ID NO: 164842 - DNA, 80 bp, synthetic construct
  source 1..80: mol_type = other DNA
tttggaacagacttgtatattggagatggcgttttcaagactacacttttaggagagattgctcagtactacacacactg

SEQ ID NO: 164843 - DNA, 80 bp, synthetic construct
  source 1..80: mol_type = other DNA
ccacgttccatgacccctacattttagactctggggtgcctctaagccaggctctaatatacccccatcaatggataaat

SEQ ID NO: 164844 - DNA, 80 bp, synthetic construct
  source 1..80: mol_type = other DNA
gcccaatccggcaacaatcaccagcgtagctcgcatttacttcaagcccaaacacgtgagagcctgggtgcctagaccac

SEQ ID NO: 164845 - DNA, 80 bp, synthetic construct
  source 1..80: mol_type = other DNA
tccctaacactcaaaaaaaacccaaattttccaaattcgggtgggaaacagaggcccagcttgcagcggccttcgacagg

SEQ ID NO: 164846 - DNA, 80 bp, synthetic construct
  source 1..80: mol_type = other DNA
ctaactgtatgggagaattcttctattgtaagatggattggtttttaaactgggtagaaggcagaaatggaaccagaaaa

SEQ ID NO: 164847 - DNA, 80 bp, synthetic construct
  source 1..80: mol_type = other DNA
acctgggtcgaccacctgctccacaaccgccgcgagaccaacacccaccgcacataagagggctcccggcactcccggca

SEQ ID NO: 164848 - DNA, 80 bp, synthetic construct
  source 1..80: mol_type = other DNA
gcactttaattgttgctatgataccagaacatcaactagctagtgcaacaacaggaaatgctacagctggatacaatctt

SEQ ID NO: 164849 - DNA, 80 bp, synthetic construct
  source 1..80: mol_type = other DNA
tgttttcctacccctatgacttagacatgaaagaattagcagatgagggattgaaatatggattgactatcacccctgcc

SEQ ID NO: 164850 - DNA, 80 bp, synthetic construct
  source 1..80: mol_type = other DNA
cacaagatccaaacaagttcactagtcctgttttagatgcattaaaagaggtagcgcctcccttgaaatccccttcagca

SEQ ID NO: 164851 - DNA, 80 bp, synthetic construct
  source 1..80: mol_type = other DNA
caacatcttcacaatcatttaataaaaacacatttatcactaaatatctaataggtaacatgaagtcctattggcaaaaa

SEQ ID NO: 164852 - DNA, 80 bp, synthetic construct
  source 1..80: mol_type = other DNA
tggacaaaaaacccccctatgaaaactaaccaatacacggcccctctcacgcaccctggcatgctcatgcgcacaaagta

SEQ ID NO: 164853 - DNA, 80 bp, synthetic construct
  source 1..80: mol_type = other DNA
cgagataacaggccctagcatacacccgggtatgatggccctcaacaaacgagtcagatggatacctagcataaagaaca

SEQ ID NO: 164854 - DNA, 80 bp, synthetic construct
  source 1..80: mol_type = other DNA
tcagtatgttctatcaaactagaattgtggttcctctatcaaccccaacggcgatggacatgttggggtttgtttcagcg

SEQ ID NO: 164855 - DNA, 80 bp, synthetic construct
  source 1..80: mol_type = other DNA
gtgaaaatgctatcaaaagagtgtcagagcaaccaagccatgatgcagactattatgctccaccaaaaaaacctagactg

SEQ ID NO: 164856 - DNA, 80 bp, synthetic construct
  source 1..80: mol_type = other DNA
ccttgattaagaggaactgccatattgtaactactcctagaggtgaattcaacttgctggggatccatgacaactgttgt

SEQ ID NO: 164857 - DNA, 80 bp, synthetic construct
  source 1..80: mol_type = other DNA
actcacggggatgcagccgacgcaaagtacgccagttggacgataaccacccgaaaagctgcacagctgcggagaaaact

SEQ ID NO: 164858 - DNA, 80 bp, synthetic construct
  source 1..80: mol_type = other DNA
gatagcataacctacatacctgagacagttagaccagatgtgtcaaaccacggagcctttgggcaacagtcaggtgcagt

SEQ ID NO: 164859 - DNA, 80 bp, synthetic construct
  source 1..80: mol_type = other DNA
gctaggcatccacgataattgtgcagtggttccaacacatgctgaatgtggagacatcgtgaacattgatgggagggagg

SEQ ID NO: 164860 - DNA, 80 bp, synthetic construct
  source 1..80: mol_type = other DNA
gcttgatctcctcgatgtccttgagcgtgacgatgagcgactcgttcaccttaagcacattgaactcacctacgtggcgc

SEQ ID NO: 164861 - DNA, 80 bp, synthetic construct
  source 1..80: mol_type = other DNA
tgtgatcaccgcgggcggtgatggagtggttgcgttcgccgacattagagatctgtgggtgtacgaagaagaggccatgg

SEQ ID NO: 164862 - DNA, 80 bp, synthetic construct
  source 1..80: mol_type = other DNA
ctcacgtgctggctcgcgtttgggaacttcaaggcctgggtgccccgtgctccccctcctctcccccccctccccacccc

SEQ ID NO: 164863 - DNA, 80 bp, synthetic construct
  source 1..80: mol_type = other DNA
tctggccaacctgcctctcttatgcctgtggccccggctggccatcgagattgtttacatctgcccggctatacaccaaa

SEQ ID NO: 164864 - DNA, 80 bp, synthetic construct
  source 1..80: mol_type = other DNA
ccttctatattttggcaacatggtcaagcttatccaagattctctttgcctttcctaagtattgcatctgcttactacat

SEQ ID NO: 164865 - DNA, 80 bp, synthetic construct
  source 1..80: mol_type = other DNA
ctcaggagaaccaaaaccagtaacaaagaaaccagagaggagggtagtcacacaagggcctcaagaagaatttggacgta

SEQ ID NO: 164866 - DNA, 80 bp, synthetic construct
  source 1..80: mol_type = other DNA
tacatagataatgtgttaaatgaggtgcttgtagtaccaaatatccagcctagttcatctgtatcaagccattcagcccc

SEQ ID NO: 164867 - DNA, 80 bp, synthetic construct
  source 1..80: mol_type = other DNA
agtatgtccctacacatacccaaggctatatgtagagacagacccctaccacggatatgtaatgtactcagagtcttttg

SEQ ID NO: 164868 - DNA, 80 bp, synthetic construct
  source 1..80: mol_type = other DNA
atctgaagcaggttaccaggatccccccctgtccgcccttcagcgggcgggaggccagactcaagttccacttcttctcc

SEQ ID NO: 164869 - DNA, 80 bp, synthetic construct
  source 1..80: mol_type = other DNA
gcggttttgatgaggaagtcttctttgattacaatgtggaaacactcccagaggtcgaaccaaccgcgaaggaaattctt

SEQ ID NO: 164870 - DNA, 80 bp, synthetic construct
  source 1..80: mol_type = other DNA
atctgggattgcagtcaagttgcaccatggtagcaccatggatatccagtacctttttccgcaggacaaaagctgacaag

SEQ ID NO: 164871 - DNA, 80 bp, synthetic construct
  source 1..80: mol_type = other DNA
acttctatgctaacaaagcagacagccactatggctactgctcttttactcccaaagaccaaaaaggacagaaaaacatc

SEQ ID NO: 164872 - DNA, 80 bp, synthetic construct
  source 1..80: mol_type = other DNA
tgggacttcctttatgacaaaatccacggctggttcaaccttgacttcctacactttcaccgcaaggacagagtcgcagc

SEQ ID NO: 164873 - DNA, 80 bp, synthetic construct
  source 1..80: mol_type = other DNA
gtcaagaagacagggccaggtttccgggccctcacattgccaaaagacggcaatatggtggaaaataacatatagacaaa

SEQ ID NO: 164874 - DNA, 80 bp, synthetic construct
  source 1..80: mol_type = other DNA
aaaaatgaggtggaaataacaacaagaatataccacaaggcaaaacatgtcaaagcatggtgcccaagaccaccaagagc

SEQ ID NO: 164875 - DNA, 80 bp, synthetic construct
  source 1..80: mol_type = other DNA
gtcaacatatgtaccaatcactgtgaccattgcaccaatgtgtgcggagtacaatggtttaagactctcagcacaacacc

SEQ ID NO: 164876 - DNA, 80 bp, synthetic construct
  source 1..80: mol_type = other DNA
gtacttataatatgtccttacacttatccaaaactatatgacagtgaacatcctaatagaggatttgtagtaataggtta

SEQ ID NO: 164877 - DNA, 80 bp, synthetic construct
  source 1..80: mol_type = other DNA
gggaagtcactgaccacatcgattattggcagggccatagcagaaagatacaaatccacagtatattcacttcctccaga

SEQ ID NO: 164878 - DNA, 80 bp, synthetic construct
  source 1..80: mol_type = other DNA
accaacaaacaataatacaagccatggaagaaaaccaaagcaacatgtacacaaaaagagcacttcacacattcttaggc

SEQ ID NO: 164879 - DNA, 80 bp, synthetic construct
  source 1..80: mol_type = other DNA
atgtgtggcggtttactcatttccaaggttgaaggaaatttcaagatccttggaatgcatatagctgggaatggggagat

SEQ ID NO: 164880 - DNA, 80 bp, synthetic construct
  source 1..80: mol_type = other DNA
agttacggttacttggacgatactaatgtcaacgttgtcagaaagctgcaaccaaacctgtccttgtctatgttcctgta

SEQ ID NO: 164881 - DNA, 80 bp, synthetic construct
  source 1..80: mol_type = other DNA
cagcagacctcgtacaaacgcgacatgtgatcaatgtgaaatcgcgctcggagtccaccattgaatcctttttcgcccga

SEQ ID NO: 164882 - DNA, 80 bp, synthetic construct
  source 1..80: mol_type = other DNA
attaccatctaatgaccccagaggatcatttaaacttagtgacaccttacccaagtagagatctagcaattgtgtccaca

SEQ ID NO: 164883 - DNA, 80 bp, synthetic construct
  source 1..80: mol_type = other DNA
tttgagctaaccgacagcagagacgctgaacggctggaccgatttgcgcaaacggcagacgagatacgcattgctgaccg

SEQ ID NO: 164884 - DNA, 80 bp, synthetic construct
  source 1..80: mol_type = other DNA
tggtgcctagaggccatctaccaagagtttttaatgcacagaaacagatggaccagaagcaaccatgacctagacctcat

SEQ ID NO: 164885 - DNA, 80 bp, synthetic construct
  source 1..80: mol_type = other DNA
agactgtccataagttcccccaggccgtccacaaattgatttctgccgtttgacactgcattgtccaaatccttccgcag

SEQ ID NO: 164886 - DNA, 80 bp, synthetic construct
  source 1..80: mol_type = other DNA
ggggtgctggacacatctcccgttatgaccgttgggacatcaacatcaaggacctggtgcagctccaaaaaaaatgggaa

SEQ ID NO: 164887 - DNA, 80 bp, synthetic construct
  source 1..80: mol_type = other DNA
acgtccccatcaccaccacaaaacccaccaaagactggtgggagtacagattaggcctgttcagtcccatcttcctatct

SEQ ID NO: 164888 - DNA, 80 bp, synthetic construct
  source 1..80: mol_type = other DNA
ttcttcgcgcagcggcgcgtagttgcgcaggccctcctgcacgaagccgcggaaaccggaccgcgacaccaggtacagcg

SEQ ID NO: 164889 - DNA, 80 bp, synthetic construct
  source 1..80: mol_type = other DNA
ctatgttatcctgacccccttggctgtgcttacatgcggactgcaggaagcttatatactcgacaaaggtcgtagataca

SEQ ID NO: 164890 - DNA, 80 bp, synthetic construct
  source 1..80: mol_type = other DNA
aggttttctgagaatagcccatacttatgacacaagtgagaacagggtcaactttctttcatccaatggtgtgattacag

SEQ ID NO: 164891 - DNA, 80 bp, synthetic construct
  source 1..80: mol_type = other DNA
cgttcgtcagcagcgacgccgacaagacctcagcatggctcggaggctatggatcttgagcttactagccgtgaccttga

SEQ ID NO: 164892 - DNA, 80 bp, synthetic construct
  source 1..80: mol_type = other DNA
ctctctttggaaacgaccagtagtcacagcatatattgagggccagccagtagaagttttgttagacacaggggctgatg

SEQ ID NO: 164893 - DNA, 80 bp, synthetic construct
  source 1..80: mol_type = other DNA
cattttagttcacaaaatggccgacttccttccgcttttttaaaaataacgtaccagcggcggcgcgcgcgctgcgcgcg

SEQ ID NO: 164894 - DNA, 80 bp, synthetic construct
  source 1..80: mol_type = other DNA
ttgccaacgcctactcacacttctacgacggatttgctagagtccctctgaaggatgagacaacagatgcaggagacacc

SEQ ID NO: 164895 - DNA, 80 bp, synthetic construct
  source 1..80: mol_type = other DNA
tattcatcaggtggtatcataacactatggcaccaaactgcttttgttagcggagacactaccaacgtgggtactatact

SEQ ID NO: 164896 - DNA, 80 bp, synthetic construct
  source 1..80: mol_type = other DNA
acgtagaactattcaccgcttacaaagacatagtatacaaccccctattagacagaggcaccggtaacatggtgtggttc

SEQ ID NO: 164897 - DNA, 80 bp, synthetic construct
  source 1..80: mol_type = other DNA
ctggcaaaactaccaaacacactgcgcaacaacagctatcaaatttaaagaaaaacaaaccagtactctaactcttatta

SEQ ID NO: 164898 - DNA, 80 bp, synthetic construct
  source 1..80: mol_type = other DNA
atggaatgccctcccaacatctggtagacaatcctccagggacgatttaatcccagccgccgtgcaggccttaaccacgg

SEQ ID NO: 164899 - DNA, 80 bp, synthetic construct
  source 1..80: mol_type = other DNA
gcaagctgacttgactgcaggatactcctttagatttaactggggtggcgacttaatctaccaccaggttgtcaaaaacc

SEQ ID NO: 164900 - DNA, 80 bp, synthetic construct
  source 1..80: mol_type = other DNA
ttgagcaaggatgatcatcttccagagatgcacaccagcggagcctttggacaacagtctggtgcagtatatgtgggcaa

SEQ ID NO: 164901 - DNA, 80 bp, synthetic construct
  source 1..80: mol_type = other DNA
gcagcagctgcagcaacagcgaatcctgggagtcaaactcagactcctgttctaccaaatccaaagaatccaacaaaatc

SEQ ID NO: 164902 - DNA, 80 bp, synthetic construct
  source 1..80: mol_type = other DNA
tcccagtcatgaacactcccgggagcaaccagttcctgacatctgatgactatcaatcacctacagccatgccccaattc

SEQ ID NO: 164903 - DNA, 80 bp, synthetic construct
  source 1..80: mol_type = other DNA
cccgaggctccgccggctgtgaggcccggtctgcccgctctgccgccccccgagggtcttaaccctagaccatggcgtgg

SEQ ID NO: 164904 - DNA, 80 bp, synthetic construct
  source 1..80: mol_type = other DNA
cagcgtacggttactgagagacaccacacacgtatcacagactaccttgcaggcaagaactcaaggtattgaagatacta

SEQ ID NO: 164905 - DNA, 80 bp, synthetic construct
  source 1..80: mol_type = other DNA
tcatgactatggcatatttagcccttactttttaacacctcaaaactatacaccagactggcacacagtatacaccaaaa

SEQ ID NO: 164906 - DNA, 80 bp, synthetic construct
  source 1..80: mol_type = other DNA
gaataatatcagcaatggtcataattataagaaattcatcagatccccaaaccataatagcaacactcactcttatagga

SEQ ID NO: 164907 - DNA, 80 bp, synthetic construct
  source 1..80: mol_type = other DNA
gcgcttacgtcccgcaaacctccctcagcccgggctcgcgaacaaatgccgagggaggaaacgcaccggcagtgcgaaca

SEQ ID NO: 164908 - DNA, 80 bp, synthetic construct
  source 1..80: mol_type = other DNA
acagcttacgaagcacaatcacaaagaaaatacacatgcagcacctagatatccagtttgaccccgtatatcacaagtct

SEQ ID NO: 164909 - DNA, 80 bp, synthetic construct
  source 1..80: mol_type = other DNA
tatggcgcggcgtcgctaaacgactttggcattttggctgtgagggttgttaatgatcacaacccaactaaggtgacctc

SEQ ID NO: 164910 - DNA, 80 bp, synthetic construct
  source 1..80: mol_type = other DNA
ggacggtggtggggacggggggctgcttgcagcggggacttgcgtagacaggggcttgcggggacagtggtgggaacgag

SEQ ID NO: 164911 - DNA, 80 bp, synthetic construct
  source 1..80: mol_type = other DNA
tgtagacttccgttgaactgatggacttatgtcccatcaggctttgcagaactttcagcggtataccggcatacagcatg

SEQ ID NO: 164912 - DNA, 80 bp, synthetic construct
  source 1..80: mol_type = other DNA
cgccctaacatgcttgggtttgaagtaaattctgacgtagctcgtcactgctcccgggcttccttcatttacatgtctaa

SEQ ID NO: 164913 - DNA, 80 bp, synthetic construct
  source 1..80: mol_type = other DNA
tcattattcagttcacccacagtcaggcagaccagacggaggaccagtgggcacagtatttaacacctttaaaacacagg

SEQ ID NO: 164914 - DNA, 80 bp, synthetic construct
  source 1..80: mol_type = other DNA
tgctgcgcatacacggaagtaggccccgacacgtgaccgaccacgtgggtgctgcgtcacagccgccattttgaatcaca

SEQ ID NO: 164915 - DNA, 80 bp, synthetic construct
  source 1..80: mol_type = other DNA
ctggaattataaatctaagtagcacacccactgcacgaatgatacgctatgatttcccaactaaaacgggtcaatgtggt

SEQ ID NO: 164916 - DNA, 80 bp, synthetic construct
  source 1..80: mol_type = other DNA
tcttcaatgagaggtggctgattcatggtggaatgccgtctggttccccttgtaccacagttctcaactcattgtgtaat

SEQ ID NO: 164917 - DNA, 80 bp, synthetic construct
  source 1..80: mol_type = other DNA
gggacgagcaccggcgcctgctgctcgaaatgttgacccagggctgctccaactttgtggggctgctcaacttcggcgtg

SEQ ID NO: 164918 - DNA, 80 bp, synthetic construct
  source 1..80: mol_type = other DNA
gcacaggggatcgatcaaatcgctcgttgtgagtgtcgaacaggtgtgtatttttgtgagtcaagaggaaaacattaccc

SEQ ID NO: 164919 - DNA, 80 bp, synthetic construct
  source 1..80: mol_type = other DNA
ttaatacaattttaatgtttgttagtacactaggcatagtttatgttatatacaaactgtttgctcaaacacaagggccc

SEQ ID NO: 164920 - DNA, 80 bp, synthetic construct
  source 1..80: mol_type = other DNA
ccaccttcaccaccaccctaaccacctcagcgccagggatgcctggacacaagagccatcacctcttgatagggatccgc

SEQ ID NO: 164921 - DNA, 80 bp, synthetic construct
  source 1..80: mol_type = other DNA
caggaggaacagatgtgggagcagaaggagcaaatgtgggagcagaaggagcagatgtggaagcaggaggagcaaatggg

SEQ ID NO: 164922 - DNA, 80 bp, synthetic construct
  source 1..80: mol_type = other DNA
gcggtgtctacctctaaaggtcactaagcactccgagcgaagcgaggagtgcgaccctggggcaacttcctcggggtccg

SEQ ID NO: 164923 - DNA, 80 bp, synthetic construct
  source 1..80: mol_type = other DNA
agaacagggcagatttccctttgggggatccgtgagcaccactacttggtccctgagggtgctcttcgacgagcatcaaa

SEQ ID NO: 164924 - DNA, 80 bp, synthetic construct
  source 1..80: mol_type = other DNA
cgtcccgggcagactcacaatagcagacgtgcccctgtacgcagccctactgggctacgaggactactgcataaaatatt

SEQ ID NO: 164925 - DNA, 80 bp, synthetic construct
  source 1..80: mol_type = other DNA
cagattcactgttctcaaaatataaaggcaatgtgagtatgaaaccaacagaaaacatgctcgtggccgtagatcactat

SEQ ID NO: 164926 - DNA, 80 bp, synthetic construct
  source 1..80: mol_type = other DNA
gtaggcagacaatcacgactgtaccacaagtggagcataacctaaggacagcaggggcgttcggccaccaatccggcgca

SEQ ID NO: 164927 - DNA, 80 bp, synthetic construct
  source 1..80: mol_type = other DNA
tgcaacaaattagcgctccaactcatggtaccacttcagcaaacaccactgtgagcaaccataaaataggtactggggat

SEQ ID NO: 164928 - DNA, 80 bp, synthetic construct
  source 1..80: mol_type = other DNA
agaaaaaaccacctcctgcgatgagctactggtgtccccctgctcacgatgtacgcgggcgcgaacatcagtggtatgag

SEQ ID NO: 164929 - DNA, 80 bp, synthetic construct
  source 1..80: mol_type = other DNA
taatgcatgggttgagaaagatttcaaaacaggcaagttagtcaagtacaactttccacagtaccaacctaatatagata

SEQ ID NO: 164930 - DNA, 80 bp, synthetic construct
  source 1..80: mol_type = other DNA
ccctctccccttctccttcgtgcgtgcgtacccagattccccctgggctgccatgtacgacacccactccatgtggaatt

SEQ ID NO: 164931 - DNA, 80 bp, synthetic construct
  source 1..80: mol_type = other DNA
cttggtttgtttgtgttcctgtttgctggcaacttactggcagctgagcaaattctaatgggcgcccgccttctttctct

SEQ ID NO: 164932 - DNA, 80 bp, synthetic construct
  source 1..80: mol_type = other DNA
caagtacgtcacaagtcacgtggggagggtttgcgtgtaacccggaagccaatcctcccacgtggcctgtcacgtgacta

SEQ ID NO: 164933 - DNA, 80 bp, synthetic construct
  source 1..80: mol_type = other DNA
cccaacccccgtaacttagaagaaaagcacacagaccaataggaggtggtcacccagaccacttacggtcaagcacttct

SEQ ID NO: 164934 - DNA, 80 bp, synthetic construct
  source 1..80: mol_type = other DNA
ctagacacatatctagaaaatgaggaaggcattgtatctggatggcaaaactatacacatgggccaggagtaaggtatcc

SEQ ID NO: 164935 - DNA, 80 bp, synthetic construct
  source 1..80: mol_type = other DNA
gacacgtccccagaaagccgtgcagcaaccgcaggaagctcatcgtctggcccgtggggaaaatgtcgatgacggcctcg

SEQ ID NO: 164936 - DNA, 80 bp, synthetic construct
  source 1..80: mol_type = other DNA
accactctggtggcataaagaccagagaaggtactgaaagtaccaagaccataagttacactgtcaaatcctgcaaagga

SEQ ID NO: 164937 - DNA, 80 bp, synthetic construct
  source 1..80: mol_type = other DNA
gactaagaccccctactgggccacagccagatggcactccatatgattctactactctatcacattggaaatcagcatgg

SEQ ID NO: 164938 - DNA, 80 bp, synthetic construct
  source 1..80: mol_type = other DNA
gaacttctatcgccaggtcgcccaaagcgtccaaagctcgacacgagaccagagggactaccagaagagcaaagaggagc

SEQ ID NO: 164939 - DNA, 80 bp, synthetic construct
  source 1..80: mol_type = other DNA
cttaaactatgtaaggacacagacgaagttactcagcaagcagtgttgcaaggagatcctatcgaagacataataaccag

SEQ ID NO: 164940 - DNA, 80 bp, synthetic construct
  source 1..80: mol_type = other DNA
gggctatgggcaaggctcttaaaaaagcatggtattcttgggtcgcccctacagaaagaaaagggcactgctactgcctt

SEQ ID NO: 164941 - DNA, 80 bp, synthetic construct
  source 1..80: mol_type = other DNA
aaacatcacagaactcttggagcaggcacagattcaacaagaaaagaatatgtatgaactacaaaaattgaacagctggg

SEQ ID NO: 164942 - DNA, 80 bp, synthetic construct
  source 1..80: mol_type = other DNA
ggtcaattttgaggaatccctattctcaaaatacaaaggcaatatcaaaatggaaatcacagagaacatgaaggtggcca

SEQ ID NO: 164943 - DNA, 80 bp, synthetic construct
  source 1..80: mol_type = other DNA
cgaggccgcacatgtgggcattggtgcaggtcgggaggaaaacgtagtaaaagatcttttccagcacatccgcatgcccc

SEQ ID NO: 164944 - DNA, 80 bp, synthetic construct
  source 1..80: mol_type = other DNA
tttttcaacttggatgaggaaaacacatggccaccaattgggtctatttcaagttgaagttttgaaccgtttaacctaca

SEQ ID NO: 164945 - DNA, 80 bp, synthetic construct
  source 1..80: mol_type = other DNA
aacatggcacaattatgtgccatgccatataaagcaagtgattaatacctggcacaaggtagggagaaatgtatatttgc

SEQ ID NO: 164946 - DNA, 80 bp, synthetic construct
  source 1..80: mol_type = other DNA
tcaagggaatggctctggaaaagtcaatgggaagaagaacaatcaaccacaaggaaagaagcagaagaaaaagaatcctg

SEQ ID NO: 164947 - DNA, 80 bp, synthetic construct
  source 1..80: mol_type = other DNA
acatttaccggatcccagtacagagcggtaatcaacagagcactcaggtctttggattccagatacagccagggcttgac

SEQ ID NO: 164948 - DNA, 80 bp, synthetic construct
  source 1..80: mol_type = other DNA
ctacaattgagaacttccttgccagatcagcgtgtgttttctacctagagtacaagacagggaccaaagaggattccaat

SEQ ID NO: 164949 - DNA, 80 bp, synthetic construct
  source 1..80: mol_type = other DNA
ccctctgagccccgttaaacccaaagaatgtctgaggggagccaccctcggggcccaggccccagagtccagaggtcagg

SEQ ID NO: 164950 - DNA, 80 bp, synthetic construct
  source 1..80: mol_type = other DNA
ttgtttgatgccagttttatctccccccccaattgcaacttagaagatgtacacaaagaccaataggcagtggtcaccca

SEQ ID NO: 164951 - DNA, 80 bp, synthetic construct
  source 1..80: mol_type = other DNA
taatcagaaattatgaggacaccacgactgtgcttgcaactcttgctctcctggggtgcgatgtgtcaccatggtcttgg

SEQ ID NO: 164952 - DNA, 80 bp, synthetic construct
  source 1..80: mol_type = other DNA
ttccaaagacaccacaacttttggacaagaagcaacaaagacctagagttagttagattctttggaagtagttggagatt

SEQ ID NO: 164953 - DNA, 80 bp, synthetic construct
  source 1..80: mol_type = other DNA
accgtcctggctgtcattctcttggactaacgaggagacaaagtcacagaagccagtttcaccagagaactcttgtattt

SEQ ID NO: 164954 - DNA, 80 bp, synthetic construct
  source 1..80: mol_type = other DNA
gagaaggtggccgcggcgccggtggaggagatggcgccgccgccgtagaaggagaataccagcaagaagacctcgacgag

SEQ ID NO: 164955 - DNA, 80 bp, synthetic construct
  source 1..80: mol_type = other DNA
cttaaagaacccagacaatcccatgcagggatacatattctatgacagcctctttggcaatggcaagtggatagatggca

SEQ ID NO: 164956 - DNA, 80 bp, synthetic construct
  source 1..80: mol_type = other DNA
agtaaggaggcggaggaggtggaggagaggacgaccgagacgcagactatacagacgctacagacggtacagacgaaaac

SEQ ID NO: 164957 - DNA, 80 bp, synthetic construct
  source 1..80: mol_type = other DNA
agtcctatgggttaaccataacaccagcagacaaaggggagagatttgtgcccactacttgggacaatttaacatttctc

SEQ ID NO: 164958 - DNA, 80 bp, synthetic construct
  source 1..80: mol_type = other DNA
agaacactctaagaaggtgccagctcttacagcagtcgagacgggagctacgaatcctctggagcccagcgacactgtgc

SEQ ID NO: 164959 - DNA, 80 bp, synthetic construct
  source 1..80: mol_type = other DNA
catataaaaattgcctcatcacattatgctgcacaattaattacccttgacatcaatccaaatcctattacacttgaaga

SEQ ID NO: 164960 - DNA, 80 bp, synthetic construct
  source 1..80: mol_type = other DNA
cgtcgtcaccgtcctctggaggaggcacggcggcgctgtttgttgtttggatgcttgattatatcctgttctatggggta

SEQ ID NO: 164961 - DNA, 80 bp, synthetic construct
  source 1..80: mol_type = other DNA
caaatgcttctatattttggcaagagggccaaccataccccagattcacaattccttttatgagcattgcatcagcttat

SEQ ID NO: 164962 - DNA, 80 bp, synthetic construct
  source 1..80: mol_type = other DNA
accagtacaccaggggcatgaacaggtggtcctacagcaaccaagacttagatctggccctttaccacgggtgtagtttc

SEQ ID NO: 164963 - DNA, 80 bp, synthetic construct
  source 1..80: mol_type = other DNA
tcctgatgtcttctggtcgcagctatatgcctcaatggagaaacacctcctggtatttgattacacgaattatgatggga

SEQ ID NO: 164964 - DNA, 80 bp, synthetic construct
  source 1..80: mol_type = other DNA
tcagtgaggctattaaaggacaccccattcatagaacaaaaagcaattctgcaaaatgacccggccacagctacagaaaa

SEQ ID NO: 164965 - DNA, 80 bp, synthetic construct
  source 1..80: mol_type = other DNA
taacagaaaagaggccatgcttggtgtgcatgttatatgggatttggggttacaatcaacatgtacaatggtggtcccgt

SEQ ID NO: 164966 - DNA, 80 bp, synthetic construct
  source 1..80: mol_type = other DNA
cacgacattacccgggtcagggcagtttctaaccactgatgataggcagtcacccagtgctttaccaaattatgaaccca

SEQ ID NO: 164967 - DNA, 80 bp, synthetic construct
  source 1..80: mol_type = other DNA
tatgatggaaatttatgacaaaatttaccaaactccttgttattattctggactagctgttggaattaacccgtataaag

SEQ ID NO: 164968 - DNA, 80 bp, synthetic construct
  source 1..80: mol_type = other DNA
cctactacaacttcaggccaggggccgccgccgccgcctacgcctccgcggacgccggggccgcgccctgggtctgctcc

SEQ ID NO: 164969 - DNA, 80 bp, synthetic construct
  source 1..80: mol_type = other DNA
ttacgcgacacgccatttattgggcagacagcactactacaaggtgacactgacgtagccattaacaatgcggtagccag

SEQ ID NO: 164970 - DNA, 80 bp, synthetic construct
  source 1..80: mol_type = other DNA
ccccctttatatctcaagagagcttcttccaaggcgatgtacagaatgcagtggagggagtaatcaccagagtggcggac

SEQ ID NO: 164971 - DNA, 80 bp, synthetic construct
  source 1..80: mol_type = other DNA
ccttctctaagaggaggctctgtgggctgggagggccagaggcctcagattcagcagtagtgctcccctcttccccctgg

SEQ ID NO: 164972 - DNA, 80 bp, synthetic construct
  source 1..80: mol_type = other DNA
aaaacgccgtacccgaagacgacctcgatggacttatcgccgccctagacgacgaagagtaaggaggcgcagactgtgga

SEQ ID NO: 164973 - DNA, 80 bp, synthetic construct
  source 1..80: mol_type = other DNA
agcgtgtaaaagagcagaacgccgatattgctgggatgcgatgtttcgtaacagtgaatgaagatcaccgacgtgacggg

SEQ ID NO: 164974 - DNA, 80 bp, synthetic construct
  source 1..80: mol_type = other DNA
aggactaacttaccacatgtactaatgaacctagcagaaactactcaagcagacttatgtatcccctatgtgtcagacac

SEQ ID NO: 164975 - DNA, 80 bp, synthetic construct
  source 1..80: mol_type = other DNA
acggtataagtgacggtgaaacggcaaaggtgtttagtgcgaccgcatccaatggaacctgcacggtccaaagcatagtg

SEQ ID NO: 164976 - DNA, 80 bp, synthetic construct
  source 1..80: mol_type = other DNA
tttagatgaatctatattctcaaaatataaaggcaatgaaccagttgaaattacacaaaacatgctaacagcggctgctc

SEQ ID NO: 164977 - DNA, 80 bp, synthetic construct
  source 1..80: mol_type = other DNA
accagaaggaagcgctcatggagcagctccagctccagaaacaccaccagcgagtcctcaagcgaggcctcaaactcctc

SEQ ID NO: 164978 - DNA, 80 bp, synthetic construct
  source 1..80: mol_type = other DNA
cccatgccaaaagcccacccacgaaattcccgaccccgataagtaccctccaagaatacaaatctcagacccgcagaccc

SEQ ID NO: 164979 - DNA, 80 bp, synthetic construct
  source 1..80: mol_type = other DNA
gtgcccctacaaaaacaaggctaacgtaaactttgaggtcactagtgtgaccacagctagaaccagcttgaatgatgtcc

SEQ ID NO: 164980 - DNA, 80 bp, synthetic construct
  source 1..80: mol_type = other DNA
tgcaaatactacactcaaactattactagcatacacaccaccaggtataaagaaaccaacaaacaggaaacaagcgatgc

SEQ ID NO: 164981 - DNA, 80 bp, synthetic construct
  source 1..80: mol_type = other DNA
taggtgttaccaacatcacatttaaaccacaatagtcagtgcaaatgggggctcaagtttcaacccaaaagaccggtgca

SEQ ID NO: 164982 - DNA, 80 bp, synthetic construct
  source 1..80: mol_type = other DNA
accccccaacccctccggtagcagagcgacatggcctactggtggtggaaacggagaagacgaggcccgtggagaaggag

SEQ ID NO: 164983 - DNA, 80 bp, synthetic construct
  source 1..80: mol_type = other DNA
acaattagttcattcttaactacagatttgcagaagttttgtctgaattggagatatgagtcgacagcattatttgcgga

SEQ ID NO: 164984 - DNA, 80 bp, synthetic construct
  source 1..80: mol_type = other DNA
ctgaacgtaaccaccgtccccgcacgcctctcgccacctccgtccccaacgtaatccccgtccccgcaacaccccgggcc

SEQ ID NO: 164985 - DNA, 80 bp, synthetic construct
  source 1..80: mol_type = other DNA
atcaggtggaccagagacccgaagaacactcaagaccatgtatactctttatgtcttctgatgtggcacaatggtgaaga

SEQ ID NO: 164986 - DNA, 80 bp, synthetic construct
  source 1..80: mol_type = other DNA
gatcgcgccttacgcgagttcttggaggcgccctgggaatcggcgccccaaccgccgcgactccgcatgacgcccgacac

SEQ ID NO: 164987 - DNA, 80 bp, synthetic construct
  source 1..80: mol_type = other DNA
tacaaacaatgctgtccattgacatgtgggaaagccctaatactacaaaacaaaagaactaaggctagttactccattaa

SEQ ID NO: 164988 - DNA, 80 bp, synthetic construct
  source 1..80: mol_type = other DNA
ctactgcaggctgtgcgtgctccacagacgccatcttccatgagccgctgctggtgtcctcctcggggtgatgtctccac

SEQ ID NO: 164989 - DNA, 80 bp, synthetic construct
  source 1..80: mol_type = other DNA
gtcacagcagccattttaagtaaggcggaagagctctagctatacaaaatggcggcggagcacttccgctttgcccaaaa

SEQ ID NO: 164990 - DNA, 80 bp, synthetic construct
  source 1..80: mol_type = other DNA
tgcccttacacacaaccgccgctcacagacccagaaaatgtagacatgggcttcataccctatgactttaactttggaaa

SEQ ID NO: 164991 - DNA, 80 bp, synthetic construct
  source 1..80: mol_type = other DNA
gctatatatgtggcaggatacaagatttgtaactaccatctagccactcaagaggatatggaacatgcagtagccgtgat

SEQ ID NO: 164992 - DNA, 80 bp, synthetic construct
  source 1..80: mol_type = other DNA
gactatagcaccaatgtttacagaattcaatggcctaagaaacatcacaataccagcaactcagggtttaccagtgttag

SEQ ID NO: 164993 - DNA, 80 bp, synthetic construct
  source 1..80: mol_type = other DNA
cgtctggtctattgattactcttgttttgacgccactattccctctgtccttctctctgccattgcctcccgcatcgctg

SEQ ID NO: 164994 - DNA, 80 bp, synthetic construct
  source 1..80: mol_type = other DNA
gaagagaaaatctagaaaggcaacctagtgatgatacctggctcaactttgatggtacattgttgggaaatataaccatc

SEQ ID NO: 164995 - DNA, 80 bp, synthetic construct
  source 1..80: mol_type = other DNA
actaaaccccccatgactgaccctaaagatccacagagaggatacgtagtatacaacagaaactttggcatgggaaaatg

SEQ ID NO: 164996 - DNA, 80 bp, synthetic construct
  source 1..80: mol_type = other DNA
gggaaaaattacggattaactattacaccaccagataaatctgaaacctttacaaaaatgacatggaaaaatttaacatt

SEQ ID NO: 164997 - DNA, 80 bp, synthetic construct
  source 1..80: mol_type = other DNA
agcaaaggttcctattaccatttcaattagccctatgtgtgctgagttttctggagcacgagctaaaccagtggctgtgg

SEQ ID NO: 164998 - DNA, 80 bp, synthetic construct
  source 1..80: mol_type = other DNA
aacccattattcttaaaccaacaataaacactgtatacatgttcccaccagacacacctagacccataaacacagcacaa

SEQ ID NO: 164999 - DNA, 80 bp, synthetic construct
  source 1..80: mol_type = other DNA
tcgcctcttgaccggactatacagcatctgcagggacttactatccaggatcccccagaccctccaaccaatcctccagg

SEQ ID NO: 165000 - DNA, 80 bp, synthetic construct
  source 1..80: mol_type = other DNA
ttccgggttcgcgtgggggccgccatcttagcttcggccgccattttaggccctcgcgggcctccgtaggcgcatattag

SEQ ID NO: 165001 - DNA, 80 bp, synthetic construct
  source 1..80: mol_type = other DNA
tacgactgcgtactctccgatttggaagccgccgcctgtctgctggccgcctacggacacgcgctttgggagggccgcga

SEQ ID NO: 165002 - DNA, 80 bp, synthetic construct
  source 1..80: mol_type = other DNA
cgatagtttcacagaaggtggctacattagcatgttctatcaaactagggttgttgtcccgttgtccacacccagaaaga

SEQ ID NO: 165003 - DNA, 80 bp, synthetic construct
  source 1..80: mol_type = other DNA
caacaccagtcacttctgcagagagcggcctctataagatcccccgacagcatccgtagagcccgggccctgcctgcggc

SEQ ID NO: 165004 - DNA, 80 bp, synthetic construct
  source 1..80: mol_type = other DNA
ggtagtcactgctgaggtgggacttgtttttcccaaggtggggatggtggcatttggggttggcgtagtcactgctggtg

SEQ ID NO: 165005 - DNA, 80 bp, synthetic construct
  source 1..80: mol_type = other DNA
actacacgcataccccaacgccaacccacaggaaagcgctcattttttcacagagaatcaacatcaagtcacgcatctac

SEQ ID NO: 165006 - DNA, 80 bp, synthetic construct
  source 1..80: mol_type = other DNA
gggataactgaggtatagcaactatgaaaaaatactacaaaaaaaaaagctgaacatggtcatctagcagcaaagttctc

SEQ ID NO: 165007 - DNA, 80 bp, synthetic construct
  source 1..80: mol_type = other DNA
tcaaaaatgtgtcaggatgtacaatccaacaaacatcctagatgtaaaacaagggccaaaagaaccctttcagtcttatg

SEQ ID NO: 165008 - DNA, 80 bp, synthetic construct
  source 1..80: mol_type = other DNA
agattggaccagggtttcaggaaatgggagataaacttccaagaacatgcccaagttaggaaaaagtttgagatgtttac

SEQ ID NO: 165009 - DNA, 80 bp, synthetic construct
  source 1..80: mol_type = other DNA
gcttagtgacaaagctctcaaaagaatgttacaaaaaccgcttgattttgaagcgtatacaaaacctgcaaagagaccta

SEQ ID NO: 165010 - DNA, 80 bp, synthetic construct
  source 1..80: mol_type = other DNA
tactagtctggctgcacgtcttaattttcaaggagagccgccgccaccgggcgcgccccggcccgaggctccgccggctg

SEQ ID NO: 165011 - DNA, 80 bp, synthetic construct
  source 1..80: mol_type = other DNA
tagctccactaggtctctcagccatttgcctaggaagaaagtggattataagtgcatcattattgtgtccttattattca

SEQ ID NO: 165012 - DNA, 80 bp, synthetic construct
  source 1..80: mol_type = other DNA
tcaaattgccaggtgctcatgtgtaaatggtgtgtattactgctcctctcgccgcaagcactacccgattaccataacta

SEQ ID NO: 165013 - DNA, 80 bp, synthetic construct
  source 1..80: mol_type = other DNA
tcatccttgaccattagcctgggcatgcgtgaactgccagcgtcctgaggctgctgctttcctcggatgccaaagaagac

SEQ ID NO: 165014 - DNA, 80 bp, synthetic construct
  source 1..80: mol_type = other DNA
agacaggaaaaactaaacaaaatcaaaaaagagtggcagatgctatatccacaacaacctactttactgccagactccta

SEQ ID NO: 165015 - DNA, 80 bp, synthetic construct
  source 1..80: mol_type = other DNA
cgcaattatacagagaagagatacacaatttcagtgggaaactaaatttactaacaatgcaacacacattaacccaacat

SEQ ID NO: 165016 - DNA, 80 bp, synthetic construct
  source 1..80: mol_type = other DNA
acagagtgtagttatcatggatgatataatgcaaaacccaaatggggaagatatgtctctgttttgccaaatggtttctt

SEQ ID NO: 165017 - DNA, 80 bp, synthetic construct
  source 1..80: mol_type = other DNA
gtcgcaccaccagtaacagtagcagaagcaccagtcccgtggcgccaggtgagccgtccgctgccgagggcgatgagttt

SEQ ID NO: 165018 - DNA, 80 bp, synthetic construct
  source 1..80: mol_type = other DNA
aagtgtatatggcatagaaggtcttgaagctttagacttacacactagtgcaggatacccatatacagcatgtggtatta

SEQ ID NO: 165019 - DNA, 80 bp, synthetic construct
  source 1..80: mol_type = other DNA
acagagacaaaaaaactgactacattgtgcagtatgatatcagtgctccctacaaactagacaaagacagcagtcccagc

SEQ ID NO: 165020 - DNA, 80 bp, synthetic construct
  source 1..80: mol_type = other DNA
gaccacgtgtattccctatgtcttttgatgtggcacaacggtgaggaaccgtacaaagagttcataagcaaaatcagaaa

SEQ ID NO: 165021 - DNA, 80 bp, synthetic construct
  source 1..80: mol_type = other DNA
cctacactaaatcagggaagctcaacgcagcaatggcttgtgaattatgcaaagattgtcacacaccaactaactttaaa

SEQ ID NO: 165022 - DNA, 80 bp, synthetic construct
  source 1..80: mol_type = other DNA
tttggaggtggaattagtactctaaactttaatctaaaatggctgtttgaagaatataccaaacacagaaatacttggag

SEQ ID NO: 165023 - DNA, 80 bp, synthetic construct
  source 1..80: mol_type = other DNA
aagcactatagtagaggcattctttaaaaatgcagaaaacatgtggacagccagaaaagatcaaacattctcagaggcaa

SEQ ID NO: 165024 - DNA, 80 bp, synthetic construct
  source 1..80: mol_type = other DNA
caaaccaaaaagggtgggagatcagctacacaaaacttatggccccaatatactatcaagccaacagaaacagcacatat

SEQ ID NO: 165025 - DNA, 80 bp, synthetic construct
  source 1..80: mol_type = other DNA
atgtttacctacctaaggtttgacatggaagtcacttttgtgataaccagtattcaggaacagggtacggccttggcaca

SEQ ID NO: 165026 - DNA, 80 bp, synthetic construct
  source 1..80: mol_type = other DNA
aataatccaggttgacaccatgatacctatgaacaaaaccaaggtaaatgatgaagtgggaaattaccttataccactta

SEQ ID NO: 165027 - DNA, 80 bp, synthetic construct
  source 1..80: mol_type = other DNA
gatccggcagcggatctactggagaagtacctgcagcaagggaaaaagcagagagagcagagagagagaccctacaaaga

SEQ ID NO: 165028 - DNA, 80 bp, synthetic construct
  source 1..80: mol_type = other DNA
aatagctcagacagtgaaacaacaggtaatagctcaaggaacaacatgcgctgttacatgaaccattgcaacacatcagt

SEQ ID NO: 165029 - DNA, 80 bp, synthetic construct
  source 1..80: mol_type = other DNA
tgggatataggcttacaatcgacagttgttttaaatataccttggacatcaggtgtgcagttcagatatacagatccaga

SEQ ID NO: 165030 - DNA, 80 bp, synthetic construct
  source 1..80: mol_type = other DNA
ctgccgcatatgctgccaagagacagaggggctgcttcacatatgagctgctcagggtctccaccaccttgttttgacgg

SEQ ID NO: 165031 - DNA, 80 bp, synthetic construct
  source 1..80: mol_type = other DNA
aaataatgaaattttcttggagaggagtgactgctgatactagagctttgagaagatttggattctctatggctgctggt

SEQ ID NO: 165032 - DNA, 80 bp, synthetic construct
  source 1..80: mol_type = other DNA
tgtgttatatgcccttatacaaaaccaaaactatacaatgacaaaaaccctcaaatgggctatatattttatgactctca

SEQ ID NO: 165033 - DNA, 80 bp, synthetic construct
  source 1..80: mol_type = other DNA
attaaagatactagcatatggagatgatgtactattctcatacccttttgaactagacatggcagaattagctagtgagg

SEQ ID NO: 165034 - DNA, 80 bp, synthetic construct
  source 1..80: mol_type = other DNA
aaggcccacaaacagcccctcaggccatgttggtacagccacatgtcccccctctacgcccgacagcacccaccattttg

SEQ ID NO: 165035 - DNA, 80 bp, synthetic construct
  source 1..80: mol_type = other DNA
tacccccccctcggtggggctccgcccccccggccccccccccgggctaaatacaccgcgcatgctcggccacgccctcg

SEQ ID NO: 165036 - DNA, 80 bp, synthetic construct
  source 1..80: mol_type = other DNA
tagggaacaggcaggtttgattactggtacatgatttgtcaggtgggtcacaattggaacccgcgtgctctccttcctct

SEQ ID NO: 165037 - DNA, 80 bp, synthetic construct
  source 1..80: mol_type = other DNA
ggatgaactacgtagtccagaaaaaatcaaattgggtaaaacaagagcaattgaagcggccagtctgaatgatacagtcc

SEQ ID NO: 165038 - DNA, 80 bp, synthetic construct
  source 1..80: mol_type = other DNA
aaacgcaggcagaataagtccagaaataccaggactttacacagaaatactatacaacccatacacagacaaaggcaaag

SEQ ID NO: 165039 - DNA, 80 bp, synthetic construct
  source 1..80: mol_type = other DNA
agcagaagattttaggcattgtgttaaaagcatgtgggagcgagacatcatggtggtggaatctaaagcacagggaactg

SEQ ID NO: 165040 - DNA, 80 bp, synthetic construct
  source 1..80: mol_type = other DNA
ctcgcagagtaaggagacgcaggagagggtgggcgcgcgcgtatagacggtggaaaacacgcaggtggcgacgcggacgc

SEQ ID NO: 165041 - DNA, 80 bp, synthetic construct
  source 1..80: mol_type = other DNA
atagtggaacaaatgcgtgaggaatgccaatctaggaagaacattggggcaaacctacatgctatctttcaaggattgaa

SEQ ID NO: 165042 - DNA, 80 bp, synthetic construct
  source 1..80: mol_type = other DNA
tatgaatacagactgggctggttcagtaacatatttataggtcccaacagatacaacttacagtttcaaacagcatatgt

SEQ ID NO: 165043 - DNA, 80 bp, synthetic construct
  source 1..80: mol_type = other DNA
atttatggacactttacaagaaaaattatactctacaggttcctactggaactcctttcacacagcagaatacttaaacc

SEQ ID NO: 165044 - DNA, 80 bp, synthetic construct
  source 1..80: mol_type = other DNA
aacattttcaagtaccatacattgagagacaggccaatgatgggtggtttagaaaatttaatgatgcttgcaatgcggca

SEQ ID NO: 165045 - DNA, 80 bp, synthetic construct
  source 1..80: mol_type = other DNA
ggaggatcagacaaggactcgaactcgccctcttgtgagggacgcagtgctccaggagcacaagggtgagggcaacaggg

SEQ ID NO: 165046 - DNA, 80 bp, synthetic construct
  source 1..80: mol_type = other DNA
taaccctcggaaattccacaataaccacacaggagtgcgcaaatgtggtggtggggtacggtagatggccttcgtacctt

SEQ ID NO: 165047 - DNA, 80 bp, synthetic construct
  source 1..80: mol_type = other DNA
aagagcagaagacacaacattggatcctgtcttgaggcactgtttcaaggacctttagaattcaaagatttaaagattga

SEQ ID NO: 165048 - DNA, 80 bp, synthetic construct
  source 1..80: mol_type = other DNA
gcaactgtatttcatcagttccgttcatcgtaccaatggcacatcttgaagagaagggtaaattttataccagtaaatta

SEQ ID NO: 165049 - DNA, 80 bp, synthetic construct
  source 1..80: mol_type = other DNA
gaaaagatattcctcagtgacaccgaggaataaaaggggagtatttgtgcttgggttcttgggttttctcgccacggcag

SEQ ID NO: 165050 - DNA, 80 bp, synthetic construct
  source 1..80: mol_type = other DNA
ctgctgtcaccaccgagcgaaaagacattaatgatgtgggcgcaatacgccctgcgggatacaccacacatggcgcattt

SEQ ID NO: 165051 - DNA, 80 bp, synthetic construct
  source 1..80: mol_type = other DNA
gaaacccctgcaagacctccggttccagtcgagagcctcgttcaatacaagcagttgacccgaaaagagtcgcgccaccg

SEQ ID NO: 165052 - DNA, 80 bp, synthetic construct
  source 1..80: mol_type = other DNA
ggaatcaaacacctcttcgagcagctcctaaaaacccagcagggagtccacgtaaacccctgcctcttgtaggcccagag

SEQ ID NO: 165053 - DNA, 80 bp, synthetic construct
  source 1..80: mol_type = other DNA
tctatgaataatccaccaccccctgcaatagtagatttattacaatcagttagaacaccagaggttgttaaatactgtga

SEQ ID NO: 165054 - DNA, 80 bp, synthetic construct
  source 1..80: mol_type = other DNA
agagcaagcacaggatccttatccccagctttgacactaagcccagaggcaaactcaaagttagggtcaccatcaggccc

SEQ ID NO: 165055 - DNA, 80 bp, synthetic construct
  source 1..80: mol_type = other DNA
agcttgaaaacgtgcaggcacagcagctcgcgcttgatgcgcagcgacacgctgcggtagtcgggaatccgctgcaccag

SEQ ID NO: 165056 - DNA, 80 bp, synthetic construct
  source 1..80: mol_type = other DNA
aggaagtagacaaactagttagccaagggataagacaggtactgtttctagaaagcatagaaccagctcaggaagaacat

SEQ ID NO: 165057 - DNA, 80 bp, synthetic construct
  source 1..80: mol_type = other DNA
ggggaagtcttacaacaacagggacacgtggacagcagtccggtgctgtgtacgtgggtaattacaaaatactaaacaga

SEQ ID NO: 165058 - DNA, 80 bp, synthetic construct
  source 1..80: mol_type = other DNA
ctgaacaaatacagctctcccatgctacacccaggcatgatgatgcaaagaaaaaagaaactcattgtacctagctttca

SEQ ID NO: 165059 - DNA, 80 bp, synthetic construct
  source 1..80: mol_type = other DNA
gatagactataatccagatggaagccccacatcacaaaatggaaacacagcacatcccactaatcaatttcccagcctag

SEQ ID NO: 165060 - DNA, 80 bp, synthetic construct
  source 1..80: mol_type = other DNA
catggccttaatggcattttcatacacatgagtccagtaccgcatcggttcagggactacaatggtcaggtccccaaaga

SEQ ID NO: 165061 - DNA, 80 bp, synthetic construct
  source 1..80: mol_type = other DNA
aagaaaccagcaggcaacaatggtttgttgcttactataccactagatattagtaacaccttgttttctaccacattact

SEQ ID NO: 165062 - DNA, 80 bp, synthetic construct
  source 1..80: mol_type = other DNA
actggccccggcaggtggcctggccggccaagcatagaaacccttgaagcgtgaggtggtatgtgggaccctcatccgcg

SEQ ID NO: 165063 - DNA, 80 bp, synthetic construct
  source 1..80: mol_type = other DNA
tgtgaaaaaatggagagagagggccagctagaggaggcacctccaactaatccttataatacccccacatttgcaatcaa

SEQ ID NO: 165064 - DNA, 80 bp, synthetic construct
  source 1..80: mol_type = other DNA
gacacaacccacattgaacaaaaagcgctatcgcagggcttgggacagatgttagagagcatgattgatggtacagtgag

SEQ ID NO: 165065 - DNA, 80 bp, synthetic construct
  source 1..80: mol_type = other DNA
aagtgctctttgatgagcaccaaaaattcctgaacaaatggagctacccaaacacacaactagacctcgccagatacaag

SEQ ID NO: 165066 - DNA, 80 bp, synthetic construct
  source 1..80: mol_type = other DNA
actgcaccatcactacatccaggaaatgccatgctaagcaaatacaaaatactaatacctagcctacaaactagacctaa

SEQ ID NO: 165067 - DNA, 80 bp, synthetic construct
  source 1..80: mol_type = other DNA
ttgcgtaagttcactgagtgctgcaatgcagctaaaggtttagagtggattagtattaaaataggcaagttcattgattg

SEQ ID NO: 165068 - DNA, 80 bp, synthetic construct
  source 1..80: mol_type = other DNA
gggcagtccgaggcggaggcggagacgacgagggagctcctcgagcgaaagctccgagagcagcaactcctccagctcca

SEQ ID NO: 165069 - DNA, 80 bp, synthetic construct
  source 1..80: mol_type = other DNA
ttgcaatggtgacaccgccatgaccttcacaaagaacagagcaaacaccgcccacggcatccaaacagcggtgtataacg

SEQ ID NO: 165070 - DNA, 80 bp, synthetic construct
  source 1..80: mol_type = other DNA
tcacaagcggtgcctagtgataccattcagacaaggtgtgtgctgaatcgacacaagcgttcagagtcatctatagaaaa

SEQ ID NO: 165071 - DNA, 80 bp, synthetic construct
  source 1..80: mol_type = other DNA
cagtgcggtggggtcatcctaaacacaggcaacatcgtgggcatacacgttggtggtaatgggagagtgggatattgtgc

SEQ ID NO: 165072 - DNA, 80 bp, synthetic construct
  source 1..80: mol_type = other DNA
actctttatttccaattatagcaccgaaactgtgccttttggtaatggtttcgttgttagaattggctcttttgctaacc

SEQ ID NO: 165073 - DNA, 80 bp, synthetic construct
  source 1..80: mol_type = other DNA
tagtgctggtgccacaaacaaatatggatatacatctattaatgattttggaacacttgcagtacgcattgtcaacgagt

SEQ ID NO: 165074 - DNA, 80 bp, synthetic construct
  source 1..80: mol_type = other DNA
gaccattcatagcagaagacccagaggggatggagggtactttggtgataaattctaacaactttaaagacaccatacta

SEQ ID NO: 165075 - DNA, 80 bp, synthetic construct
  source 1..80: mol_type = other DNA
gaactcagaggtaaagataaaatcagattaggtaaaagtaggttgatagaagcatcaagtttaaatgattcagtaaatat

SEQ ID NO: 165076 - DNA, 80 bp, synthetic construct
  source 1..80: mol_type = other DNA
ttgctgctcttgctgaaagatatggctttccggggtggccgcgagctcctggggcaccgggagtaggaggcaactccaac

SEQ ID NO: 165077 - DNA, 80 bp, synthetic construct
  source 1..80: mol_type = other DNA
cgtgtcatggcgcctccttccaccgggcctcgtgacatggcgcctccttccaccgggcctcgtgacatggcgcctccttc

SEQ ID NO: 165078 - DNA, 80 bp, synthetic construct
  source 1..80: mol_type = other DNA
gacgtgtgcctgcgctccaagctgctgagacgggagctacttctaatgcctctgatgagaacttgatagaaacaagatgc

SEQ ID NO: 165079 - DNA, 80 bp, synthetic construct
  source 1..80: mol_type = other DNA
agccacaagtcctaaatgctttggagattggtgcgacctcagatacaggcccagaagcaatgattgaaactaggtatgtg

SEQ ID NO: 165080 - DNA, 80 bp, synthetic construct
  source 1..80: mol_type = other DNA
ttctaacagcgctaagaaaagaggagtacaaggggaccccgcattctgccacctaacaggcatatactcacctccctggt

SEQ ID NO: 165081 - DNA, 80 bp, synthetic construct
  source 1..80: mol_type = other DNA
gtagtcggtgtgcatgagctcgtcgtgtgacagcaggatgcgaccgcgcggctgatgatcttgcgggaaggcggtgtgga

SEQ ID NO: 165082 - DNA, 80 bp, synthetic construct
  source 1..80: mol_type = other DNA
tcctttttcgcacgcggggcctgtgtgacaataatgtcgctggacaactacaatgagtcgtcaaccgcctcacccagtac

SEQ ID NO: 165083 - DNA, 80 bp, synthetic construct
  source 1..80: mol_type = other DNA
gagaaacattatttaacaatgttttgtggctagaacagatgtcacaaaagtttgccccattgtatgcagttgaagcaaag

SEQ ID NO: 165084 - DNA, 80 bp, synthetic construct
  source 1..80: mol_type = other DNA
aaattcagcatactggcaagcactcacaaaaacaaacgaccaggcaacacaaataggacaagcccgtgcccagcaatttg

SEQ ID NO: 165085 - DNA, 80 bp, synthetic construct
  source 1..80: mol_type = other DNA
aagccctcaggagaacggcaagagcgatcatcgcgatccccaggaggatcagacaaggacttgaactcaccctcttgtga

SEQ ID NO: 165086 - DNA, 80 bp, synthetic construct
  source 1..80: mol_type = other DNA
aaatgcagagggtccaacaaaatcaacacataaaccctatgttattgccaaagggtctggcattaacgtctatttctcac

SEQ ID NO: 165087 - DNA, 80 bp, synthetic construct
  source 1..80: mol_type = other DNA
ggagagccccagcagcagaggggaagaaaaatgcatacaggcagcaaaatatggatgatatagattcagatgatgatgac

SEQ ID NO: 165088 - DNA, 80 bp, synthetic construct
  source 1..80: mol_type = other DNA
aagggttataataattggccaatttcaaaagaggggttataacagtaacagtataaatttgtagataggagcacactact

SEQ ID NO: 165089 - DNA, 80 bp, synthetic construct
  source 1..80: mol_type = other DNA
tgctcaggatctccgtggaggttccttaaagaaaaattctgcaaatggacacaacttagttatatacacaaagaatcaga

SEQ ID NO: 165090 - DNA, 80 bp, synthetic construct
  source 1..80: mol_type = other DNA
cgcaataaacaaagtgttcctgtttcccccagagaaacccattcccatacaggggtaccacggatggaacgcggtggtcg

SEQ ID NO: 165091 - DNA, 80 bp, synthetic construct
  source 1..80: mol_type = other DNA
atgggcaaggctcttagggttttcgctctttaaaatgcccttcctcggcagggtctggagaaagaaaaggctactgctac

SEQ ID NO: 165092 - DNA, 80 bp, synthetic construct
  source 1..80: mol_type = other DNA
gtctgtgttggtgtctgagaccgcttcgagttccagaatgtggctctctgcagaggggagacaaaaggtggagactgcct

SEQ ID NO: 165093 - DNA, 80 bp, synthetic construct
  source 1..80: mol_type = other DNA
gtcagcgtcgggtgcgcgacactgctaccatgcgcaacaggtccagtttaaaggcgcacttgtcgttaaacaggctggac

SEQ ID NO: 165094 - DNA, 80 bp, synthetic construct
  source 1..80: mol_type = other DNA
gaaccagattgctacactacaccaatcctgtccaagtcaagaacagcaagagacactctttaacaatgtccgctggttgg

SEQ ID NO: 165095 - DNA, 80 bp, synthetic construct
  source 1..80: mol_type = other DNA
ctcactggtgatgacagttgaaattagaaaacaaaatatgtcagaatttatggaactttggtcacagggattatcagatg

SEQ ID NO: 165096 - DNA, 80 bp, synthetic construct
  source 1..80: mol_type = other DNA
gcttttgcgctggggacgggggttgccggcgcggacggagggtgacgttgaggacaggggttgccggcgcggacaggcgc

SEQ ID NO: 165097 - DNA, 80 bp, synthetic construct
  source 1..80: mol_type = other DNA
ccggtctacgtgggcggctttctcgcccgctacgaccagtctccggacgaggccgaattgctgttgccgcgggacgtagt

SEQ ID NO: 165098 - DNA, 80 bp, synthetic construct
  source 1..80: mol_type = other DNA
acaatggcttacgcctagcaacatctctacagggtctaccagtgatgaacgtgccaggtagcaatcaattcctcacctct

SEQ ID NO: 165099 - DNA, 80 bp, synthetic construct
  source 1..80: mol_type = other DNA
atggactagggatccaaagaacacacaagaccacgtgtattcactgtgtctcctgatgtggcacaatggtgaaggaccat

SEQ ID NO: 165100 - DNA, 80 bp, synthetic construct
  source 1..80: mol_type = other DNA
ttagatgatcttgcaccactttatgcatctgagaacaagagagtaaccaatatccaaaaaagtcttaaacaacaaactgc

SEQ ID NO: 165101 - DNA, 80 bp, synthetic construct
  source 1..80: mol_type = other DNA
aacacaaagacttcaaaaaattcaaaaagaatttcggactgtgtacccacagctacctacacagagtcccacagacagca

SEQ ID NO: 165102 - DNA, 80 bp, synthetic construct
  source 1..80: mol_type = other DNA
gagagcgggtgacataaactttgaggtgacagatataacggaaaagcgcaccagtatcaaccacgtgccgaccccaccgc

SEQ ID NO: 165103 - DNA, 80 bp, synthetic construct
  source 1..80: mol_type = other DNA
tgatttcacccaagatcctggaaagttcgcacaacctgtactggacgctttacgcgaagcagtgccaccgttacagtcac

SEQ ID NO: 165104 - DNA, 80 bp, synthetic construct
  source 1..80: mol_type = other DNA
caactagcttatatagataaagggagtgttacagttggatacaatcacactcatccaggagagacaggcagagtgattgg

SEQ ID NO: 165105 - DNA, 80 bp, synthetic construct
  source 1..80: mol_type = other DNA
cgggggctcgcgcgcggaaaaggggaagcgctcggcgcgactcgtcactagaggaccgcccaggagagggggggggggtc

SEQ ID NO: 165106 - DNA, 80 bp, synthetic construct
  source 1..80: mol_type = other DNA
cccgggggtgagggacgacggccagagacaagacgcggaaaagaggaagtccccaggtggacggccgcacgcgaacaaga

SEQ ID NO: 165107 - DNA, 80 bp, synthetic construct
  source 1..80: mol_type = other DNA
atagcccaaaaatagtggggggaataggaggattcataaataccaaagaatataaaaatgtggaaatagaagttctaggt

SEQ ID NO: 165108 - DNA, 80 bp, synthetic construct
  source 1..80: mol_type = other DNA
cagtaacaccgcagaaatgctaacacctactataacagacacacagtttagacgcaaagtgaataccaactataactggt

SEQ ID NO: 165109 - DNA, 80 bp, synthetic construct
  source 1..80: mol_type = other DNA
agatcatgtacataccaccaggtgcacctataccacaggcttgggacgactttacatggcaaacctcaaccaatccctca

SEQ ID NO: 165110 - DNA, 80 bp, synthetic construct
  source 1..80: mol_type = other DNA
cagcccataaaggcataggaggaaatcaggaagtagatcacctagtaagtcaaggcatcagacaaatattattcctagaa

SEQ ID NO: 165111 - DNA, 80 bp, synthetic construct
  source 1..80: mol_type = other DNA
taatgaattatcacctaatgacacatgaagacaccttgaacctacaaaccccactcccagaaagagatttggcagtggtc

SEQ ID NO: 165112 - DNA, 80 bp, synthetic construct
  source 1..80: mol_type = other DNA
tggctgtggaaagtcactagcctccaaaatagtcgccagagggttgacaaatgaaagcaacgtctactcactaccaccag

SEQ ID NO: 165113 - DNA, 80 bp, synthetic construct
  source 1..80: mol_type = other DNA
aatttacccagggataaagaccaaacacttatgcaggttaatcagaggaaaaatgacactcacagaagaagtacagtgga

SEQ ID NO: 165114 - DNA, 80 bp, synthetic construct
  source 1..80: mol_type = other DNA
gtgccagaccgtctccatcttgaaaatatgtttgcgctcactggagttcccggcggggctaaaacaggtagcgtcataaa

SEQ ID NO: 165115 - DNA, 80 bp, synthetic construct
  source 1..80: mol_type = other DNA
aggagaaaaaaaataatactactcagttttaaaactagacccaaagggcacagcacaaaaaccattagaataccaccccc

SEQ ID NO: 165116 - DNA, 80 bp, synthetic construct
  source 1..80: mol_type = other DNA
tgctataagtgagggtgagatcgctaagaagtttagtgcaactgcaaccaatggagcccacacggttcaaagcatagtga

SEQ ID NO: 165117 - DNA, 80 bp, synthetic construct
  source 1..80: mol_type = other DNA
tctttgacagcagagactcactatttctatttgccacctaccaccccaaaaacatagcagaaaccataaaaaaaatgaga

SEQ ID NO: 165118 - DNA, 80 bp, synthetic construct
  source 1..80: mol_type = other DNA
tcgccatagggcctttatcttcttgccattggtccgtgtagggggtcgccgtaggcttcgggctcgggtttaggccttcc

SEQ ID NO: 165119 - DNA, 80 bp, synthetic construct
  source 1..80: mol_type = other DNA
ttcttgttttgcggtagcatgatggcaaccgggaagttgatcttaacatactcaccaccaggggcatcacctccaaagag

SEQ ID NO: 165120 - DNA, 80 bp, synthetic construct
  source 1..80: mol_type = other DNA
tgttgtggtcgcttatggtagatggcctgaatacctgaaagacaaggaggccacagcagaggaccagccaactcaaccgg

SEQ ID NO: 165121 - DNA, 80 bp, synthetic construct
  source 1..80: mol_type = other DNA
aggtggcctgcctatttgagagatgatgaagcaactgcagaggatcagccgacacaaccagacgtggcaacgtgtagatt

SEQ ID NO: 165122 - DNA, 80 bp, synthetic construct
  source 1..80: mol_type = other DNA
tttataatacaaattcacaccagtccccccttcctagacactcccctgacgggtcccagcatacacccaggcatgctgat

SEQ ID NO: 165123 - DNA, 80 bp, synthetic construct
  source 1..80: mol_type = other DNA
atggctttcggtgctggatttagcgcagagattgctaacaaagtctcagagatatctgccagtgtgcaaaacattatcac

SEQ ID NO: 165124 - DNA, 80 bp, synthetic construct
  source 1..80: mol_type = other DNA
aagaagcccatacacacatccaatgatgaccaaacacacggatcctttatggggatttgtaccatacagtgacaattttg

SEQ ID NO: 165125 - DNA, 80 bp, synthetic construct
  source 1..80: mol_type = other DNA
aagcagtaataaatgacatagtacagtcagggccttttgctccaaaagtacaaaagccaaacatgcaactaaacatgaaa

SEQ ID NO: 165126 - DNA, 80 bp, synthetic construct
  source 1..80: mol_type = other DNA
ggggagatcatggcatccggcaagcaccatcagcccggagggacgcggagcctgaccatgcaaaaagtaagcctgcgcgt

SEQ ID NO: 165127 - DNA, 80 bp, synthetic construct
  source 1..80: mol_type = other DNA
ggaagggacggtccatggcaatcaacaatgctgggccagctgtgtggatactacacccagtggtcagggtcactggaggt

SEQ ID NO: 165128 - DNA, 80 bp, synthetic construct
  source 1..80: mol_type = other DNA
attcaatctttagatgttggttttcaggatgtagttttaatgaaagtgcccacaattccaaaatttagagatataacaga

SEQ ID NO: 165129 - DNA, 80 bp, synthetic construct
  source 1..80: mol_type = other DNA
tttataacatggtcattgaagaagacaagcgacgaaggaatgtggttgatgtcatgtcagcaattttccagggtcctatt

SEQ ID NO: 165130 - DNA, 80 bp, synthetic construct
  source 1..80: mol_type = other DNA
gtggtcgtcagggtaggcgcctgtggtttcaaagtagctcctgccagctgatagatatatgctggagtatattcctgagt

SEQ ID NO: 165131 - DNA, 80 bp, synthetic construct
  source 1..80: mol_type = other DNA
gagtatacgggtttaacacattaaacaatatgggacaactatacttcagacatgtcaacagcagcaaacaaggtactgac

SEQ ID NO: 165132 - DNA, 80 bp, synthetic construct
  source 1..80: mol_type = other DNA
tgtgtcgctcagcatgtgtgtactatacaacgtacgacacacatggggatgcagcggacgccaaatacgccagttggact

SEQ ID NO: 165133 - DNA, 80 bp, synthetic construct
  source 1..80: mol_type = other DNA
atggctcctgcacccactatcaggcatttgccacagaagcccaccttagaccacgcacacacactcccacaggacaaccc

SEQ ID NO: 165134 - DNA, 80 bp, synthetic construct
  source 1..80: mol_type = other DNA
acgtgggtccccagaccaccaaggctatgtcaatatcagaaagcaggtaacgtcaactttgagccaacaggagtgacgga

SEQ ID NO: 165135 - DNA, 80 bp, synthetic construct
  source 1..80: mol_type = other DNA
gacttcgccataaggcctttatcttcttgccattggtccgtcttgggggtcgccataggcttcgggctcggttctaggcc

SEQ ID NO: 165136 - DNA, 80 bp, synthetic construct
  source 1..80: mol_type = other DNA
ccaccccagcctccccccctccccgtcccccttcgctccttatcctccctcggtccccagtagggccgcctgcccgcctg

SEQ ID NO: 165137 - DNA, 80 bp, synthetic construct
  source 1..80: mol_type = other DNA
acaactccacaactcacgcagaggattacactacaggcaaccaggcctttggggggggactgtgcaccactaaatacact

SEQ ID NO: 165138 - DNA, 80 bp, synthetic construct
  source 1..80: mol_type = other DNA
ggggcagggtctcgcgggtcctctggattagatagtcacgcccatcatccgcgatgtggtagcagaaggttgtggaggcc

SEQ ID NO: 165139 - DNA, 80 bp, synthetic construct
  source 1..80: mol_type = other DNA
ctgttttatctcccttcccaatgtaatttagaagcttttaaatcaaggctcaataggtggggcgcaaaccagcgctctca

SEQ ID NO: 165140 - DNA, 80 bp, synthetic construct
  source 1..80: mol_type = other DNA
ggtgaatgttgggaagtttcaaagaatgggagagattgggaaactttaaaactaaaagagttaatcagtaaaattactga

SEQ ID NO: 165141 - DNA, 80 bp, synthetic construct
  source 1..80: mol_type = other DNA
tcttgtggacaccaatgatgtgaatttagaagtaaccattgttgagcttgacaggaatgaaaaatttagagacattagag

SEQ ID NO: 165142 - DNA, 80 bp, synthetic construct
  source 1..80: mol_type = other DNA
ttgaggctcaggatgcaaatcttgaggatgttcagcgagagttttccgggctgcgagtaattggtgatgaggacgaggat

SEQ ID NO: 165143 - DNA, 80 bp, synthetic construct
  source 1..80: mol_type = other DNA
gtttacatacttgcgctttgatattgagttaacctttgttataactagcgcgcaagatcagtccactatctctcaagacg

SEQ ID NO: 165144 - DNA, 80 bp, synthetic construct
  source 1..80: mol_type = other DNA
ttattacaggacctccaaaaaggtccagattcgaggtacccgccattgcaagcggagactcacctttacaggagcgaaag

SEQ ID NO: 165145 - DNA, 80 bp, synthetic construct
  source 1..80: mol_type = other DNA
catcattggcatacatgttggaggtaatgggcgcgttggatactgcgctgccttactccgaaaatacttctgtgatacac

SEQ ID NO: 165146 - DNA, 80 bp, synthetic construct
  source 1..80: mol_type = other DNA
aaattatacaggtagatacactcattcctatgaacaacacgcatacaaaagatgaggttaacagttacctcataccacta

SEQ ID NO: 165147 - DNA, 80 bp, synthetic construct
  source 1..80: mol_type = other DNA
tcacctggatcccctcaccgtcaagagccagctccctctgaagaagcccttgccactcacggtggaacacctgccggatg

SEQ ID NO: 165148 - DNA, 80 bp, synthetic construct
  source 1..80: mol_type = other DNA
agacacgccatgttatacaaacaaggtcgcgttctgaaagtaccatagagtccttctttgcgagaggagcgtgcgtcacc

SEQ ID NO: 165149 - DNA, 80 bp, synthetic construct
  source 1..80: mol_type = other DNA
atgaagaggaaggctgtgaggctgtcgcccatgtacgaaatgtcgcgtgtcgactggtttaggctcatgcctttgtcctt

SEQ ID NO: 165150 - DNA, 80 bp, synthetic construct
  source 1..80: mol_type = other DNA
cacatcaaagttgccatttctcattattcggcacaactgatgacactggacattgaccccaaacctatatctttggagga

SEQ ID NO: 165151 - DNA, 80 bp, synthetic construct
  source 1..80: mol_type = other DNA
tgcggctaatccaaccccacatctgccgcacacaatccagtgtgtaggcagtcgtaatgggcaactgtgggacggaaccg

SEQ ID NO: 165152 - DNA, 80 bp, synthetic construct
  source 1..80: mol_type = other DNA
gaagctagactatacagaggcaacatcatatgtaccaatcacagttacggtggccccaatgtgtgcagagtacaatgggc

SEQ ID NO: 165153 - DNA, 80 bp, synthetic construct
  source 1..80: mol_type = other DNA
attcccagtcttaaaacaagaccgtccagaaaacacgtagtaaggattagagtaggggcccctaaactatttgaagacaa

SEQ ID NO: 165154 - DNA, 80 bp, synthetic construct
  source 1..80: mol_type = other DNA
tttacatccagacgttgctgctcaaccagccccccaggctccataccagggataccaggagccgccggccccccaggctc

SEQ ID NO: 165155 - DNA, 80 bp, synthetic construct
  source 1..80: mol_type = other DNA
atactggcccagcactatctagtgctaaattactaattgcttacacacccccaggagcccaaggtccaaccaaacgtaaa

SEQ ID NO: 165156 - DNA, 80 bp, synthetic construct
  source 1..80: mol_type = other DNA
gtgcttgctcgaatgttgactgtggaaactgacatttattcccttcccccagacccaaaatattttgatggttatgacca

SEQ ID NO: 165157 - DNA, 80 bp, synthetic construct
  source 1..80: mol_type = other DNA
ttgtcgcgttcgccgacgtacgcgatttgtatgtcgaggatgaggcaatggagcagggaataactaattacatcgagtcc

SEQ ID NO: 165158 - DNA, 80 bp, synthetic construct
  source 1..80: mol_type = other DNA
aggtgacgattctctggcacgcggcccgaacttccgattcgatcacgagaaaatggcccaatacattaacatctgcggtt

SEQ ID NO: 165159 - DNA, 80 bp, synthetic construct
  source 1..80: mol_type = other DNA
gcgtgtacatgggagaatactacaccacaaacacagatgagaccaaaagattcgccagttggacaattagcgcaaggcgt

SEQ ID NO: 165160 - DNA, 80 bp, synthetic construct
  source 1..80: mol_type = other DNA
taaaggacacccccttcatctcacaggacaatttttatcaaggggacgtgcatgacgccgtggttggagccatgacacgt

SEQ ID NO: 165161 - DNA, 80 bp, synthetic construct
  source 1..80: mol_type = other DNA
tgccttaaaccgtagactattcctggatttaacaatcaaagtgaactcaaagtacttagagtcaggtaaactcaatttgg

SEQ ID NO: 165162 - DNA, 80 bp, synthetic construct
  source 1..80: mol_type = other DNA
ctcggtgaggtacccgacgaggcggcgccgcgctgcagacgcgctcttttcttcttttcgatcaaacggctgagttgctg

SEQ ID NO: 165163 - DNA, 80 bp, synthetic construct
  source 1..80: mol_type = other DNA
agacgtcaggcacctgccagacctccaggctgccctgatcctctcggtggcctacctgctactccagggaggctcctcac

SEQ ID NO: 165164 - DNA, 80 bp, synthetic construct
  source 1..80: mol_type = other DNA
gcataaacgcaagcaactgcgcaggattgggggaggaggagatggtcaagtgtcaattcaatatgacaggattagaaata

SEQ ID NO: 165165 - DNA, 80 bp, synthetic construct
  source 1..80: mol_type = other DNA
atatatcttcaaacacaactagtgtgaacatgtactctctcgtgttgacgaaggagagaccagggcacgaggtttttgca

SEQ ID NO: 165166 - DNA, 80 bp, synthetic construct
  source 1..80: mol_type = other DNA
gggcctccaaccctagtgtgttttaccaacctaaaagtggctttccccgctttactattccttttactggcttgggttct

SEQ ID NO: 165167 - DNA, 80 bp, synthetic construct
  source 1..80: mol_type = other DNA
ttggccgtgaggacccccttgtcgatggccaggctcctaaagttggtgcacagcgtctggtagtgaccctttagccactc

SEQ ID NO: 165168 - DNA, 80 bp, synthetic construct
  source 1..80: mol_type = other DNA
gcacgcacaaccagggaaaacaatatgggttgaacacaaactggtcaacattctggacgctgtcgagctagtcgacgagc

SEQ ID NO: 165169 - DNA, 80 bp, synthetic construct
  source 1..80: mol_type = other DNA
acccattatccattagtaggcccaaaagcttatctgttcccaacacgcttaccacaagtgtggaccaagcaagactggga

SEQ ID NO: 165170 - DNA, 80 bp, synthetic construct
  source 1..80: mol_type = other DNA
cagggagtaaccaattcttgacctctgatgattatcagtcaccgtgtgccatgcccgagttcgatgtcactccacccctc

SEQ ID NO: 165171 - DNA, 80 bp, synthetic construct
  source 1..80: mol_type = other DNA
cccctcgcacaaacctgcactctcccccctactatccaggggttcctcctccctggcaagtaaaatttagcctaaaattt

SEQ ID NO: 165172 - DNA, 80 bp, synthetic construct
  source 1..80: mol_type = other DNA
cgctcggacgactacacccagtcttccttcggaggctcctttggcacagagaccttcagtctaagggtactttttgacca

SEQ ID NO: 165173 - DNA, 80 bp, synthetic construct
  source 1..80: mol_type = other DNA
cttgagggcctggaaagcgttgccgcacgaggcgctgatctgcagctgcacggccgtggagtcgtgcagccgcatgagac

SEQ ID NO: 165174 - DNA, 80 bp, synthetic construct
  source 1..80: mol_type = other DNA
gggctcggagatggccgggctatgggcaaggctcttagggttatcgctcttaaaatgccctttatcggcaggtggtggag

SEQ ID NO: 165175 - DNA, 80 bp, synthetic construct
  source 1..80: mol_type = other DNA
aagagacttactcaaagaatgtaaaaagatacctttatatcaggaacagattaaggcttttgctcatgccaaagaagatg

SEQ ID NO: 165176 - DNA, 80 bp, synthetic construct
  source 1..80: mol_type = other DNA
taatatgtccttatactgagccgccactgtttgaaaaggataacccagagatgggctttgttgtatacgactctaacttt

SEQ ID NO: 165177 - DNA, 80 bp, synthetic construct
  source 1..80: mol_type = other DNA
cggatgcctccaacaacctggtggaccgcaaccgtctatttggccagcccggggagacggctgcgcagggcctaaagaaa

SEQ ID NO: 165178 - DNA, 80 bp, synthetic construct
  source 1..80: mol_type = other DNA
tgcatactacactggggaactcaatatacatatactattcttgtgtgagaaggggtttttgagagttgcccacacatatg

SEQ ID NO: 165179 - DNA, 80 bp, synthetic construct
  source 1..80: mol_type = other DNA
ctctggtccatacaggtcttcatccaggtcctttcctacaagcacgtctttctctcggcctttgtgtactttttgcactt

SEQ ID NO: 165180 - DNA, 80 bp, synthetic construct
  source 1..80: mol_type = other DNA
gctgtccacaatgctggtatggcagtggccgtgggcaaccttacaatcttccctcaccagtggatcaatctgaggactaa

SEQ ID NO: 165181 - DNA, 80 bp, synthetic construct
  source 1..80: mol_type = other DNA
tactcaagtgccgaatcgaacaacctaaaacgctacgcggaatgggtcatcaatacaaggcaggtggctcagttgcggcg

SEQ ID NO: 165182 - DNA, 80 bp, synthetic construct
  source 1..80: mol_type = other DNA
ggtacaacacagtatgatgactttctccaaaagatacgaactacatcggtgggaaaaacactctacctaccaccgtatga

SEQ ID NO: 165183 - DNA, 80 bp, synthetic construct
  source 1..80: mol_type = other DNA
tgttcaggatcaccatggagattcttaaaagagaaattctgtaaatggacacaactcacatatatacacaaggagtctga

SEQ ID NO: 165184 - DNA, 80 bp, synthetic construct
  source 1..80: mol_type = other DNA
aatgcactcactatcaaacatttgccacagacactagattagccccagaaaagaacacctcaccctcaggagaaactaat

SEQ ID NO: 165185 - DNA, 80 bp, synthetic construct
  source 1..80: mol_type = other DNA
tcaagctggtggagtcacacaccggactctctttgagcatacccaacaccttgcttccggtatcccgaccgaaacattct

SEQ ID NO: 165186 - DNA, 80 bp, synthetic construct
  source 1..80: mol_type = other DNA
tgttgcgagacccttactataaagcaataggctttagttcctcaaaacacaatgaagtacaaacctggctttttaatgaa

SEQ ID NO: 165187 - DNA, 80 bp, synthetic construct
  source 1..80: mol_type = other DNA
tcaaggcatcacagattacgtgacacagctgggaagtgcttttggagatggtttcacaaattcaatcagggacacactgg

SEQ ID NO: 165188 - DNA, 80 bp, synthetic construct
  source 1..80: mol_type = other DNA
tagatgtctacaaaggaattgatcttgataagttgaaagtaattgcttatggtgatgatctcattgtgtcataccctttt

SEQ ID NO: 165189 - DNA, 80 bp, synthetic construct
  source 1..80: mol_type = other DNA
cgcttgttacgcgacaccaaatttatctcccaaaacaatttctatcaaggagacgtgcaagatgcagtgacaggtgctat

SEQ ID NO: 165190 - DNA, 80 bp, synthetic construct
  source 1..80: mol_type = other DNA
atcactgattcacttgaaacactattccagggccctgtctacaaagacctagaaatagatgtgaatagtacaccaccccc

SEQ ID NO: 165191 - DNA, 80 bp, synthetic construct
  source 1..80: mol_type = other DNA
ttgtcggtgtctaccccgcctccacccgaaacgcttgcgcgtttcggaccttcggcgtcggggggtgcggtggctttact

SEQ ID NO: 165192 - DNA, 80 bp, synthetic construct
  source 1..80: mol_type = other DNA
tggatacactccactaaacgcattcacccctagcattatttctatagtgatcaaaatcagacaattacattacaatgggc

SEQ ID NO: 165193 - DNA, 80 bp, synthetic construct
  source 1..80: mol_type = other DNA
gacccaacaaggggtccatgtaaacccatgcctacagtaggtcccaggcagtggctgtttccagagagaaagccagcccc

SEQ ID NO: 165194 - DNA, 80 bp, synthetic construct
  source 1..80: mol_type = other DNA
tcctgcagttccctcgcagccccccgagtattcgtctgtgtttccgcctgtataaaaataaagagacgggaggctgatcg

SEQ ID NO: 165195 - DNA, 80 bp, synthetic construct
  source 1..80: mol_type = other DNA
agacaaagacagctccccttcctatcacccaggcatactcatgagatccaaacacaaggtgctggtgcccagctaccaga

SEQ ID NO: 165196 - DNA, 80 bp, synthetic construct
  source 1..80: mol_type = other DNA
ttttatagacctgaggaactacagctcacttagtgaacatcaaggggtctcagattacattacacagctaggcagtgcat

SEQ ID NO: 165197 - DNA, 80 bp, synthetic construct
  source 1..80: mol_type = other DNA
ttaatactaaagttctagatgcttatgatctacataataagcaaggtacaaaacttgaaataacagtcatcaaactagac

SEQ ID NO: 165198 - DNA, 80 bp, synthetic construct
  source 1..80: mol_type = other DNA
gtcatttctcaaagacaaaatatgtgattggcttggtatacaaaggcctccaaagaaacaaggtgactcatggcttcgga

SEQ ID NO: 165199 - DNA, 80 bp, synthetic construct
  source 1..80: mol_type = other DNA
atcatgtaaggcactcatgcagtgtttgatggatggtgacgtcaagaaattggctgaagttgtggcagaatctatgtcaa

SEQ ID NO: 165200 - DNA, 80 bp, synthetic construct
  source 1..80: mol_type = other DNA
aattggagattactgttatcaagctggatagaaatgaaaagtttagagatatacgaaagtatatcccagagagagaggat

SEQ ID NO: 165201 - DNA, 80 bp, synthetic construct
  source 1..80: mol_type = other DNA
cacaaatccagcaagaaaagaacatgtatgaattacaaaaattaaatagctgggatgtttttggcaactggtttgattta

SEQ ID NO: 165202 - DNA, 80 bp, synthetic construct
  source 1..80: mol_type = other DNA
cgtccccgtccctaccaccgtccccggccctgcaacgtgccgtcgtcgccgcaaaaggccgcaagtccccgccgcaaaag

SEQ ID NO: 165203 - DNA, 80 bp, synthetic construct
  source 1..80: mol_type = other DNA
ctaggccgtccccccggggggacttcctctttttcgcgtcttgactgcttgcagcttcctcttttgtctgcccgccgtcc

SEQ ID NO: 165204 - DNA, 80 bp, synthetic construct
  source 1..80: mol_type = other DNA
gctttttgttgggattcgtgtcggcatgcaatgacttttccgtgcgcttactcagggatacaccatttatcactcaggac

SEQ ID NO: 165205 - DNA, 80 bp, synthetic construct
  source 1..80: mol_type = other DNA
caggaagtgccagctctaacggcagtggagacgggcgccacaagtagtgtggtacccgcggacttggtccaaactcgtca

SEQ ID NO: 165206 - DNA, 80 bp, synthetic construct
  source 1..80: mol_type = other DNA
cacacccaggagaaaatggtattgatttggaatcacccccagaaaaggatggtccagtcaaaaaccccgtttatggtatg

SEQ ID NO: 165207 - DNA, 80 bp, synthetic construct
  source 1..80: mol_type = other DNA
ctttgtgctttatcttgaatttaaactcaaaaagatgggggctcaagtgtcaactcaaaaatctggatctcacgaaacta

SEQ ID NO: 165208 - DNA, 80 bp, synthetic construct
  source 1..80: mol_type = other DNA
aaattcttattgaccctactctgaacgagataattgatattaagctgaagtcaaataaaccaggcctaatcaggcggaga

SEQ ID NO: 165209 - DNA, 80 bp, synthetic construct
  source 1..80: mol_type = other DNA
tggtcgcttaaggtgctgtacgacgaattcttaaagcatcacaacttctggggctatcccaacaaccagctagacctggc

SEQ ID NO: 165210 - DNA, 80 bp, synthetic construct
  source 1..80: mol_type = other DNA
tcactaaccacgtgactcccgcaggccaatccgccgcttctacgtacacttcctgggctggaccttcgagtccatataac

SEQ ID NO: 165211 - DNA, 80 bp, synthetic construct
  source 1..80: mol_type = other DNA
gggcagaggcccccaagagtcgcaaagaggcaatgcttgggacacacataatatgggacattgggttgcagtcttcatgc

SEQ ID NO: 165212 - DNA, 80 bp, synthetic construct
  source 1..80: mol_type = other DNA
gtacaaatgttaggttcagcatagaccagttagtcactgcaattataactgaacatgcaaataaaaccaaaatttccagt

SEQ ID NO: 165213 - DNA, 80 bp, synthetic construct
  source 1..80: mol_type = other DNA
gtcaaaaactgttaaattacgatgttggtagtccggtatctacaatattagaatcttcattcttgttgttaaatgaggct

SEQ ID NO: 165214 - DNA, 80 bp, synthetic construct
  source 1..80: mol_type = other DNA
ggtagtttcatgactacgggaaaattaatcatatgctacacccctcctggcggctcatgtccaactgacagaatgagtgc

SEQ ID NO: 165215 - DNA, 80 bp, synthetic construct
  source 1..80: mol_type = other DNA
ttgccaaagcccgctcctacctgcaatatcaaggtgactgtgtgcagctttgacgatggagtagatttgcctccctggtt

SEQ ID NO: 165216 - DNA, 80 bp, synthetic construct
  source 1..80: mol_type = other DNA
tggatatactccaataacgcactacactcttgagcttaacagagttgttctgctggcgagaagttgctatcgcaatggga

SEQ ID NO: 165217 - DNA, 80 bp, synthetic construct
  source 1..80: mol_type = other DNA
ccagtagggtcagttaccgagcaggggatgcttaacctagccggcaaagctacaaacagaaccctaatgtacaactttcc

SEQ ID NO: 165218 - DNA, 80 bp, synthetic construct
  source 1..80: mol_type = other DNA
tgcgttccagattaaggtctctgctgggaacgtgcaggacaagagtgcaatattttcttttcagctgaatccaggcaata

SEQ ID NO: 165219 - DNA, 80 bp, synthetic construct
  source 1..80: mol_type = other DNA
ccccccttattctgtactatatagacagtggattgatttgtttgtttagataatcaaatataatacagtgtttgcttaat

SEQ ID NO: 165220 - DNA, 80 bp, synthetic construct
  source 1..80: mol_type = other DNA
acacaacaacatctctcttgtgataattccacttgtcagactcaagacgggtgcaactggtagcacgactctccccataa

SEQ ID NO: 165221 - DNA, 80 bp, synthetic construct
  source 1..80: mol_type = other DNA
cagcttgattatgcacccagcgcgtctactcacgtcccaataactgtgacagttgcccccatgtgtgccgaatacaatgg

SEQ ID NO: 165222 - DNA, 80 bp, synthetic construct
  source 1..80: mol_type = other DNA
aatcactcacttttagcaccacctacaataacatcactacctgcaatgaatagaaggttctttttagatttagatatatt

SEQ ID NO: 165223 - DNA, 80 bp, synthetic construct
  source 1..80: mol_type = other DNA
aacacatggtaagcagtccagtgacgtctctatattttcgattagtctcagccctggttcggacactcgcctttcccgaa

SEQ ID NO: 165224 - DNA, 80 bp, synthetic construct
  source 1..80: mol_type = other DNA
ctccaattctgccaggttttcaccccactccacaaatccacatcccaggggaggtgcgtaacttgttggaattgtgtcag

SEQ ID NO: 165225 - DNA, 80 bp, synthetic construct
  source 1..80: mol_type = other DNA
cggaccgcgtccttcgtggccagggacggcaggcaggcctccagctttgcggccaggtgctcatggaactctcccgctct

SEQ ID NO: 165226 - DNA, 80 bp, synthetic construct
  source 1..80: mol_type = other DNA
taaattgatgttttggttttattttgctatggactttataaatagaatactaaatcaattaggacactaatttggaatat

SEQ ID NO: 165227 - DNA, 80 bp, synthetic construct
  source 1..80: mol_type = other DNA
ataaaaacttcattgagaagatcagatcaaccagcattggtaaatgcttgttaattccagaatacagtgtcttgcgccga

SEQ ID NO: 165228 - DNA, 80 bp, synthetic construct
  source 1..80: mol_type = other DNA
ggtgtcctattccatggagagccaggaactggcaaatctattgcaacctcagtactgggtagaatgttgacaaatgaagc

SEQ ID NO: 165229 - DNA, 80 bp, synthetic construct
  source 1..80: mol_type = other DNA
tgtcaaactcaccttcacattctgtggttcggcaatggcgacaggaaagttcctcttggcatactcaccgcccggggcca

SEQ ID NO: 165230 - DNA, 80 bp, synthetic construct
  source 1..80: mol_type = other DNA
tgcttcgctgagaagcagcgtgtggactgaacggtgtttttgaatatatagcgtttcttggtgacgttgtttcccctacg

SEQ ID NO: 165231 - DNA, 80 bp, synthetic construct
  source 1..80: mol_type = other DNA
ctgaaatagtaccacaatgtagctgcacttctggtgtttattactcaagatattacagaaaattctacccagtaatttgt

SEQ ID NO: 165232 - DNA, 80 bp, synthetic construct
  source 1..80: mol_type = other DNA
actagcagcgtcttgaggttgagtcccaggccgcaggcccggttgttggtcatggcgggcatgaggcagagataaaagac

SEQ ID NO: 165233 - DNA, 80 bp, synthetic construct
  source 1..80: mol_type = other DNA
cacttattgtaccctatataaattcagtgcctatggattcaatgacacgtcataataacgtgtcactactagttattcca

SEQ ID NO: 165234 - DNA, 80 bp, synthetic construct
  source 1..80: mol_type = other DNA
acagtaactggacaaacaaaaacccacacagtaacactctatatggaggctctgcctggagaacacaaacacaatcaaca

SEQ ID NO: 165235 - DNA, 80 bp, synthetic construct
  source 1..80: mol_type = other DNA
acgcaggagactgagacgcaggaggagacgcagacggggactcaggttcagaaagagactcatactgacccagtggcacc

SEQ ID NO: 165236 - DNA, 80 bp, synthetic construct
  source 1..80: mol_type = other DNA
catattagagtgtcagttgcacattactcagctcaattagccactctggatattgatccaaatcctgtctctatggagga

SEQ ID NO: 165237 - DNA, 80 bp, synthetic construct
  source 1..80: mol_type = other DNA
gacacacagtcagagccagaaaaagacttcggttttacaccggagagccaagagctattccaggaggagccacaagcacc

SEQ ID NO: 165238 - DNA, 80 bp, synthetic construct
  source 1..80: mol_type = other DNA
agcatggaagcgtaccgcatacccgtgcaaccacagcaaagcggcaactcacaggtatttggatttaaactggaacccgg

SEQ ID NO: 165239 - DNA, 80 bp, synthetic construct
  source 1..80: mol_type = other DNA
caccctgaccgttcaccagccacaccatatcacgatctgtgccgctcatgcaataaaacagaattgcacctttacgacct

SEQ ID NO: 165240 - DNA, 80 bp, synthetic construct
  source 1..80: mol_type = other DNA
ctgggacgacttgtactgcaaacttaggaactggttcaatctcgatttgattcactaccatcgcgaagacaagaaagcag

SEQ ID NO: 165241 - DNA, 80 bp, synthetic construct
  source 1..80: mol_type = other DNA
agcactagacttgaataccagtgcaggattcccatacattagcttaggaattaggaaaagagatctaataaataataata

SEQ ID NO: 165242 - DNA, 80 bp, synthetic construct
  source 1..80: mol_type = other DNA
gcgtggacgcgtaccgagtcagggtgaccacaggtagccacacgaccagtagccccatattcagcttccagctaaatcca

SEQ ID NO: 165243 - DNA, 80 bp, synthetic construct
  source 1..80: mol_type = other DNA
taccctggatgagttccactttctaccgccataccaagtcagacaattacacctcaggaggttacataacattgtggtac

SEQ ID NO: 165244 - DNA, 80 bp, synthetic construct
  source 1..80: mol_type = other DNA
ccatgcctggaaagatgaatatgaaacagccgcggcatgggacaggcctgtcagaaaatttcactctgacagccccttct

SEQ ID NO: 165245 - DNA, 80 bp, synthetic construct
  source 1..80: mol_type = other DNA
ctcacccggccttcatgcttcaggccaaaaagaaaattaagatatatagctggaaaaccagaccctggggcaaaaaaaaa

SEQ ID NO: 165246 - DNA, 80 bp, synthetic construct
  source 1..80: mol_type = other DNA
atgtttaacagggagcagagggtggcagaatttgcggccgagggagccagtactcgggcatagaagacagcggcgtggct

SEQ ID NO: 165247 - DNA, 80 bp, synthetic construct
  source 1..80: mol_type = other DNA
taaggtgagcaatctatcagaaatttgccaagtagattcaatgataccagtgaacaataccactccagtaaataattcaa

SEQ ID NO: 165248 - DNA, 80 bp, synthetic construct
  source 1..80: mol_type = other DNA
ctttgtcggtattggcgctgcgtattctcacttttatgatggattcagtgtggtcccattcaacacaattgacgcaggag

SEQ ID NO: 165249 - DNA, 80 bp, synthetic construct
  source 1..80: mol_type = other DNA
cagttgtgtagtagatattaagcttgtgggtgtaatcgacgtggaagtattggcgatagtggtgttgttacacttgcttt

SEQ ID NO: 165250 - DNA, 80 bp, synthetic construct
  source 1..80: mol_type = other DNA
ccgagcagcccttgcgacggccggacatgccggcagtccgcgacgatccacaggagacaaaaaagcagaagcagcagtag

SEQ ID NO: 165251 - DNA, 80 bp, synthetic construct
  source 1..80: mol_type = other DNA
agagggacatactaaatcgcaacactaaagatttatccaagttacagcacatgatggacctctatggaattgacctaccc

SEQ ID NO: 165252 - DNA, 80 bp, synthetic construct
  source 1..80: mol_type = other DNA
ggtggcaatcgcatcttccaacaggtcgtcagagacccgtgcacacaccagcaagaccaagcagttggtcccagtagaaa

SEQ ID NO: 165253 - DNA, 80 bp, synthetic construct
  source 1..80: mol_type = other DNA
taacgagtgggaatatcacctaggctggtactcaaatatatttataggcatcctcagacacaacctagcattcggaacag

SEQ ID NO: 165254 - DNA, 80 bp, synthetic construct
  source 1..80: mol_type = other DNA
ctttactgtacaaggaacacaatcaaaccaactaattaacaactttactacatggctatatggctccagtgtgcactatc

SEQ ID NO: 165255 - DNA, 80 bp, synthetic construct
  source 1..80: mol_type = other DNA
ggcagataatatctaaacagaaattgaaggatcttaacttgtcaccagttaacactccaactaaaacaaagctacaccca

SEQ ID NO: 165256 - DNA, 80 bp, synthetic construct
  source 1..80: mol_type = other DNA
ctgttttatctcccctcccccccgtgtaatttagaagcataagcacaatgatcaatagacaacccagtgcaccaactggg

SEQ ID NO: 165257 - DNA, 80 bp, synthetic construct
  source 1..80: mol_type = other DNA
agtcaaagatgttcttacgaaaggtataccaactctacaatcacctagtgttgaggcatgtggttattcagataggatca

SEQ ID NO: 165258 - DNA, 80 bp, synthetic construct
  source 1..80: mol_type = other DNA
ccaaaatgaattacgggtcaacatagataaacttaagaaaggtttggatcaattggccccactgtatgctaaggaaaata

SEQ ID NO: 165259 - DNA, 80 bp, synthetic construct
  source 1..80: mol_type = other DNA
tctgaggcggcaacggccgggccctcgatggcaggttcttcttcctgcccggctagtgtcgtgttagccgccgctgctgc

SEQ ID NO: 165260 - DNA, 80 bp, synthetic construct
  source 1..80: mol_type = other DNA
tgcacccacccacactgtctacggacgttgtactcttgtattccggtacacttgtacgccagtttgccaccctatacacc

SEQ ID NO: 165261 - DNA, 80 bp, synthetic construct
  source 1..80: mol_type = other DNA
agttctctagcaggtgcaccagctccagggacagggcgctgcatgcacggtcattctgccgtctcaaacggtgaaggagg

SEQ ID NO: 165262 - DNA, 80 bp, synthetic construct
  source 1..80: mol_type = other DNA
ggaacagaagcattttcttaaaccaaggcaggatatcagaaatgtaggacccagtgacatgtatgtgcacacgaaagaag

SEQ ID NO: 165263 - DNA, 80 bp, synthetic construct
  source 1..80: mol_type = other DNA
gttggcacgtcgccactctcatccggtctggacagatgcctgtagaggaggagatatagatctttggacttataaagact

SEQ ID NO: 165264 - DNA, 80 bp, synthetic construct
  source 1..80: mol_type = other DNA
gaggaggtggtgcgtaggcttcggactcggttttaggccttccggactacaaaaatggcggatttcgtgacgtcatggcc

SEQ ID NO: 165265 - DNA, 80 bp, synthetic construct
  source 1..80: mol_type = other DNA
cattctgtccagagggctggctggggaggcagatatatactcattacctccaaatccaaaacactttgatggttacacac

SEQ ID NO: 165266 - DNA, 80 bp, synthetic construct
  source 1..80: mol_type = other DNA
ttaggacataaaaagtaccgtgaggtccagacgtggtttttgtgattgacacttacaccaggtaagccaagggacggtga

SEQ ID NO: 165267 - DNA, 80 bp, synthetic construct
  source 1..80: mol_type = other DNA
taccaccaaaccacaagctttaggtgctgtagaaataggagcaactgctgatgtgggcccagaaacactaattgaaacaa

SEQ ID NO: 165268 - DNA, 80 bp, synthetic construct
  source 1..80: mol_type = other DNA
cgactataaacactgtgcccgtgtcgaaccacggcagcaatcgccgtggtgacttggctgcactgaacacacatggcgtg

SEQ ID NO: 165269 - DNA, 80 bp, synthetic construct
  source 1..80: mol_type = other DNA
gcgcaagaaatcaatctgtcaaacagggtttaccagtcatgcttactccaggctcagcccagtttcttactactgatgac

SEQ ID NO: 165270 - DNA, 80 bp, synthetic construct
  source 1..80: mol_type = other DNA
acgatatcaatcaaatgctaaactgtgtaggagaacatcaggcagccatgcaaatcattagagaaataattaatgaggaa

SEQ ID NO: 165271 - DNA, 80 bp, synthetic construct
  source 1..80: mol_type = other DNA
atggcatgacccctaacaacatgatgggtgacttttgtgcacgtgtagtggggagtggaacgccaccgacatcgctaacc

SEQ ID NO: 165272 - DNA, 80 bp, synthetic construct
  source 1..80: mol_type = other DNA
tagctgaaagcttcatgaacggagacatgccctggccccaaaactacattccgttaaagctgtggtttaagtggtttcct

SEQ ID NO: 165273 - DNA, 80 bp, synthetic construct
  source 1..80: mol_type = other DNA
ggcaattcgggctcgggactggccgggccccgggcaaggctcttaaaaaatgcgctttcgcagggttgctgagaaaagga

SEQ ID NO: 165274 - DNA, 80 bp, synthetic construct
  source 1..80: mol_type = other DNA
aaatgatatggggacactgtgtttcagagcattggatgatgttagtaacaatgatgtcaaggtgtttgcaaaaccaaaac

SEQ ID NO: 165275 - DNA, 80 bp, synthetic construct
  source 1..80: mol_type = other DNA
gacaaggtagtgaacaccatggaggcttactcaataccaatccaggctgggcaacaggataataacaagtcaatattctc

SEQ ID NO: 165276 - DNA, 80 bp, synthetic construct
  source 1..80: mol_type = other DNA
agtatggatagactggtgctctaaagacgacaccacctttcgagatctaccacagagatatgctgtaaaagacattcctt

SEQ ID NO: 165277 - DNA, 80 bp, synthetic construct
  source 1..80: mol_type = other DNA
cttctgtctccccggactgagtatcaacaggctgcttgcgcggctgaaggagaaaacgttcgttaaccggccaattactt

SEQ ID NO: 165278 - DNA, 80 bp, synthetic construct
  source 1..80: mol_type = other DNA
caggtgctgatgtgccggccagcagaaaacaagcaatgcttgggacccacatcatctgggacattggcctgcaatccagt

SEQ ID NO: 165279 - DNA, 80 bp, synthetic construct
  source 1..80: mol_type = other DNA
tttacttcaagcccaagcatatccgagcttgggtgccacgcccacctaggttatgcccgtacaaaaacaaggcaaatgta

SEQ ID NO: 165280 - DNA, 80 bp, synthetic construct
  source 1..80: mol_type = other DNA
acaaggacaacgtatacttcgaacccaaaggtgtcaccccatcacgcactcagctaactatcagcaattctacacatatg

SEQ ID NO: 165281 - DNA, 80 bp, synthetic construct
  source 1..80: mol_type = other DNA
taggtgggcttcttcttgggcttcagcacaatgagggtaacattcatgtaggttttaggaggtccggctatctgaggcac

SEQ ID NO: 165282 - DNA, 80 bp, synthetic construct
  source 1..80: mol_type = other DNA
agaaaagggacttaattaataagcaaaccaaagatgttactaaactcaaagcagcaatggacaaatatggtgtagattta

SEQ ID NO: 165283 - DNA, 80 bp, synthetic construct
  source 1..80: mol_type = other DNA
agaaatgataaagtgccccgcagcaggaaaagccccagaaactggagacatatccacaaactgctacaaaaaactagaca

SEQ ID NO: 165284 - DNA, 80 bp, synthetic construct
  source 1..80: mol_type = other DNA
ccagcacagccacctccaggggtcatcaacgaccaacaattacataatctaccctcggggccaccatggtggccacccat

SEQ ID NO: 165285 - DNA, 80 bp, synthetic construct
  source 1..80: mol_type = other DNA
gaactccaaagaaaaaaccaccttctgcgatgagctattggtgtccccctgttcacgatgtacgcggccgcgagcatcag

SEQ ID NO: 165286 - DNA, 80 bp, synthetic construct
  source 1..80: mol_type = other DNA
cggcggatgatggcgcgcgcctccattcgcggccgattttcttcgccgccgcgccgctggctctgaaagaggtgcagtcc

SEQ ID NO: 165287 - DNA, 80 bp, synthetic construct
  source 1..80: mol_type = other DNA
cgcctcccaccctccccgttaatgtctacctcaatgaacaatttgacaacctgtgcttgggtgccctccggtatccaggc

SEQ ID NO: 165288 - DNA, 80 bp, synthetic construct
  source 1..80: mol_type = other DNA
ggttaagaaagattatctcttagatggtaagttagatatagcaaaaagttttagaccatgtgatgttaacaccaaaatag

SEQ ID NO: 165289 - DNA, 80 bp, synthetic construct
  source 1..80: mol_type = other DNA
ataactacgcaaagcttagtagcattttgaaagtttattggttggtcgctccactggaaaacccccccagtagacctggc

SEQ ID NO: 165290 - DNA, 80 bp, synthetic construct
  source 1..80: mol_type = other DNA
ccagggcaaaaggcaaggctaatggccgaggctttaaaggaagccttgacacctccacctttaccatttgctgcagttca

SEQ ID NO: 165291 - DNA, 80 bp, synthetic construct
  source 1..80: mol_type = other DNA
tcagtgggtagggccctaaatctaccaccctacacatacctacgccatcagtggctggaaaattttatataatcaatata

SEQ ID NO: 165292 - DNA, 80 bp, synthetic construct
  source 1..80: mol_type = other DNA
aggtggactctttagtccctgtcaacaacctggccgcacacatcaacagtgtggaggcctacgctatccctgtgcaatca

SEQ ID NO: 165293 - DNA, 80 bp, synthetic construct
  source 1..80: mol_type = other DNA
ttcatgaggcacgttatacaagccactggtatcatgaaggatgacctctgatgcgatgtgaggattaaattgtccctcaa

SEQ ID NO: 165294 - DNA, 80 bp, synthetic construct
  source 1..80: mol_type = other DNA
ctgacagcagagacacttggtacaagggaaacacatacaatacgaacatacaaaacttagcagagaaaacaagacaaagg

SEQ ID NO: 165295 - DNA, 80 bp, synthetic construct
  source 1..80: mol_type = other DNA
aactgggaaaattacaaagacaactaccaagcagtaaacagcaagtggaataacttagcacaatcaaactataccatgat

SEQ ID NO: 165296 - DNA, 80 bp, synthetic construct
  source 1..80: mol_type = other DNA
ctcccagcccaaggccaacctcttttgaatattgctgagtcctattctcggagaggggagtcagtgaaactgcaactcga

SEQ ID NO: 165297 - DNA, 80 bp, synthetic construct
  source 1..80: mol_type = other DNA
atcgcattcccaaaaagccacattacaccaaacttcccaaatatgatccagatgaattttggactaaggcttaacatgca

SEQ ID NO: 165298 - DNA, 80 bp, synthetic construct
  source 1..80: mol_type = other DNA
ccagactccagggtttatcatagatttgcttagttcatctaaagacccccgtgtgattgaatactgtgaaaaggaaggat

SEQ ID NO: 165299 - DNA, 80 bp, synthetic construct
  source 1..80: mol_type = other DNA
agcagagacggggcacacttcacaggtggtgccgagtgataccatgcaaacacgccatgtaaaaaattaccactcgaggt

SEQ ID NO: 165300 - DNA, 80 bp, synthetic construct
  source 1..80: mol_type = other DNA
tcagatgtttcatagttggttacctacctctagtaataactggacagggtacaagtgctaaaaactttgcatctcatata

SEQ ID NO: 165301 - DNA, 80 bp, synthetic construct
  source 1..80: mol_type = other DNA
attggtatgagattcaagagagtgagtattatccaaaacacatacaatacaatttactaataggtgaaggcccatgtgaa

SEQ ID NO: 165302 - DNA, 80 bp, synthetic construct
  source 1..80: mol_type = other DNA
gtttctctagccttccctgaaccggtgtcgacgtcaccgtctgcgctcgggcggacgcgtgcggcgtcgcgactcgcttg

SEQ ID NO: 165303 - DNA, 80 bp, synthetic construct
  source 1..80: mol_type = other DNA
ctgctgaaaccgggcacaccagaaacaaccatagagaccagatacgttgataataaccacgtgaataatgaggcactagt

SEQ ID NO: 165304 - DNA, 80 bp, synthetic construct
  source 1..80: mol_type = other DNA
gaaggaggcgatggagacgacgcagacctcggaccagaagatttagacgagctgctcgacgtcctagacgccccagagta

SEQ ID NO: 165305 - DNA, 80 bp, synthetic construct
  source 1..80: mol_type = other DNA
tagaagacaaaataagcaaaggaccctttgggggagggcatagtactagcagatggtccttaaaagtactgtacgaagag

SEQ ID NO: 165306 - DNA, 80 bp, synthetic construct
  source 1..80: mol_type = other DNA
gtgtcacatttctgaaaagaggattcaaacaagattctaaatatcctttccttatacatcccacctttccgattaatgaa

SEQ ID NO: 165307 - DNA, 80 bp, synthetic construct
  source 1..80: mol_type = other DNA
cgccggagggctctgcccccccccgcgcatgcgcgcgggtcccctccccgcggtgggctccgcccaccggtccgcccgcc

SEQ ID NO: 165308 - DNA, 80 bp, synthetic construct
  source 1..80: mol_type = other DNA
ggagaatggccggcgctgcgccgcgccgcctcggctgtgacgctctaatagtcgtcggcggctccgctacgccgcgccgg

SEQ ID NO: 165309 - DNA, 80 bp, synthetic construct
  source 1..80: mol_type = other DNA
aattggggcaacaccaaacgtcctaccagaagatgtaattgagaccagatatgtgatcaataaccatgtaaacaatgaag

SEQ ID NO: 165310 - DNA, 80 bp, synthetic construct
  source 1..80: mol_type = other DNA
caggccgtttcgcgttacagcggctggagcaccgagtacacccagtggcactcggacttgacaactgagctgctatggca

SEQ ID NO: 165311 - DNA, 80 bp, synthetic construct
  source 1..80: mol_type = other DNA
tgatcaacgtctccagtacactatgctaggggaaatcttaaattactacacccactggaccggatcacttaggttcacat

SEQ ID NO: 165312 - DNA, 80 bp, synthetic construct
  source 1..80: mol_type = other DNA
agctgtccccaaccatgacagcgccggtgcaagctatccacagcgtgaggaccagtgtgtagtcgatgaggatggcgggc

SEQ ID NO: 165313 - DNA, 80 bp, synthetic construct
  source 1..80: mol_type = other DNA
agtacagctttacccatccaggagagcaaggtatagatctcagttctccggaacaaacaggtggaccagtaaaagatcct

SEQ ID NO: 165314 - DNA, 80 bp, synthetic construct
  source 1..80: mol_type = other DNA
gaagactgggccacagagttcgcagcagcagcagcttttgacagaccccccagacccatcctcacatccacccccttcta

SEQ ID NO: 165315 - DNA, 80 bp, synthetic construct
  source 1..80: mol_type = other DNA
aacagtcaggtgcagtttacaccggaaactacaaaatactcaacaggcatttggcaactgatgaagactggaagaacctg

SEQ ID NO: 165316 - DNA, 80 bp, synthetic construct
  source 1..80: mol_type = other DNA
ctatcaggcaataggcattagctctaacaagcactcagatgtaatagacattttataccaaaaaaatacatactggcaat

SEQ ID NO: 165317 - DNA, 80 bp, synthetic construct
  source 1..80: mol_type = other DNA
tggatgaatgacttggaccagtgtgggcccttctcttacagaggagaacaaaagttagcgactctaacaagcaaatacaa

SEQ ID NO: 165318 - DNA, 80 bp, synthetic construct
  source 1..80: mol_type = other DNA
acattaccacaaggatatatcacaaagctaaacatgtaaaggcatggtgcccacgaccccctagagctgtgggctacaca

SEQ ID NO: 165319 - DNA, 80 bp, synthetic construct
  source 1..80: mol_type = other DNA
atttgtccaaattgaaacacttagatacacttgaaaatcaggtaaccaccatacaccagtcgtgtcccagtcaagaagac

SEQ ID NO: 165320 - DNA, 80 bp, synthetic construct
  source 1..80: mol_type = other DNA
gatatatctgtcagaatgctccgagatactccaatggcaaagcaaccccagaatgttatacaaaatccagttgaacaatt

SEQ ID NO: 165321 - DNA, 80 bp, synthetic construct
  source 1..80: mol_type = other DNA
gggatgtccaaaacgcagtggaaggggtcataaccagggtggctgatacaattgccagtggaccgtccaactcaactgaa

SEQ ID NO: 165322 - DNA, 80 bp, synthetic construct
  source 1..80: mol_type = other DNA
ccaaggcagatgaatccggtaatctaaaagaggagcattatttccgttttagacgggatattaaaggtattgaaaccatg

SEQ ID NO: 165323 - DNA, 80 bp, synthetic construct
  source 1..80: mol_type = other DNA
aagttatctcataccactaacaacagctggtgagcagaatcaaagaatatttggtacagatttgttcttaggagatggag

SEQ ID NO: 165324 - DNA, 80 bp, synthetic construct
  source 1..80: mol_type = other DNA
caaacaataaaaacatggattcaaacaaatttccctacaggaaataacagcacatttggctttaactcctatgcaccaga

SEQ ID NO: 165325 - DNA, 80 bp, synthetic construct
  source 1..80: mol_type = other DNA
cgagaagaagatatagacgacctgttcgccgctatcgaaagagatacacagtaaggaggcggaggaggaggagagagtgg

SEQ ID NO: 165326 - DNA, 80 bp, synthetic construct
  source 1..80: mol_type = other DNA
ccgcaagattaggagcgtacctgttgggcgctgtctaactctccctgcgttttcaactttacgcagaaagtggttggact

SEQ ID NO: 165327 - DNA, 80 bp, synthetic construct
  source 1..80: mol_type = other DNA
tagtaacctgcggtcccttcgcctaccgagacgatgagaaaaactcccaactggtggcgggatacacattcagattcaag

SEQ ID NO: 165328 - DNA, 80 bp, synthetic construct
  source 1..80: mol_type = other DNA
ccaacataacagacaaataccaaaacaaaatatttaatgacagaggcacaacattagtgtcatggctatcaggaaaaggc

SEQ ID NO: 165329 - DNA, 80 bp, synthetic construct
  source 1..80: mol_type = other DNA
cgcccatcaggtacaggcacacatttctgtgggaggttctcttgggcgttcggctgaacaatgctagggtcttctccaac

SEQ ID NO: 165330 - DNA, 80 bp, synthetic construct
  source 1..80: mol_type = other DNA
tctaaatcagcctggacagacatgagagtctgtatcagaagcccatacacagaaccacagcttacaggcaacacagatga

SEQ ID NO: 165331 - DNA, 80 bp, synthetic construct
  source 1..80: mol_type = other DNA
caacttcttcggagccgcgcgctacgccttcggctgcgcgcggcacctcagacccccgctcgtgctgacacgcttgcgcg

SEQ ID NO: 165332 - DNA, 80 bp, synthetic construct
  source 1..80: mol_type = other DNA
ccaaaggtgacaccatctactctgaaaacaaaagcaagtgtctgctcagagacctgcccatgtgggccctgtgctatggc

SEQ ID NO: 165333 - DNA, 80 bp, synthetic construct
  source 1..80: mol_type = other DNA
catttcaatggttcagaaacagatgttgaaaacttcctaggtagagcagcatgtgtacatatggtagaaatagttaataa

SEQ ID NO: 165334 - DNA, 80 bp, synthetic construct
  source 1..80: mol_type = other DNA
ggactttagtcaagatcagagtctaccatcgggcaaaacacattgaagcgtggattccacgtgctcccagggccttacca

SEQ ID NO: 165335 - DNA, 80 bp, synthetic construct
  source 1..80: mol_type = other DNA
agctatgcttgggacgcacatagtatgggatgttgggttgcaatcaactgtctctttagttgtaccatgggtaagtgcta

SEQ ID NO: 165336 - DNA, 80 bp, synthetic construct
  source 1..80: mol_type = other DNA
tagcaggcgccggcgctagccagccacagacagagatggacttggaagagggcgaagggctggcaagactggaggcgccg

SEQ ID NO: 165337 - DNA, 80 bp, synthetic construct
  source 1..80: mol_type = other DNA
tcagagcgccaggagtccacacaaatgggagaccgaagtgaaggccctggaccaacccggcccgggccccccggtatcgg

SEQ ID NO: 165338 - DNA, 80 bp, synthetic construct
  source 1..80: mol_type = other DNA
tctcccacataggaggcgccacgtattccgtgttgctgcccagcagataagtggtgtggatgtaagcgtagctacgacga

SEQ ID NO: 165339 - DNA, 80 bp, synthetic construct
  source 1..80: mol_type = other DNA
caagaaagcgactcagatttacaggaaacaagatcggcgctctcgctcgaagaagcccaccaagaagtccaagaagaggg

SEQ ID NO: 165340 - DNA, 80 bp, synthetic construct
  source 1..80: mol_type = other DNA
taactaataaagttataaaatggttgattagagtaatcagtgcactaacaataatgatcaggaacagcactgacacacca

SEQ ID NO: 165341 - DNA, 80 bp, synthetic construct
  source 1..80: mol_type = other DNA
atactaaggaggctgtttacaaaaatgcacatctaactagtgcaaatgaaaataccatactcattgcactgactgcagac

SEQ ID NO: 165342 - DNA, 80 bp, synthetic construct
  source 1..80: mol_type = other DNA
catcaaaaccgactgatgctgactggattacagtaccttacaaaaagccaaggtattttccccccacagaaaaaggagac

SEQ ID NO: 165343 - DNA, 80 bp, synthetic construct
  source 1..80: mol_type = other DNA
acaaaaagcaaggccaccatagtagacatgccactgttcatagccctgtatggctacatagactgggccataaaggccac

SEQ ID NO: 165344 - DNA, 80 bp, synthetic construct
  source 1..80: mol_type = other DNA
cagaatatgggtagatgccttaacaaaaacagacaacatatataaaccaggacaaagcaaatgcctactagaaaacatgc

SEQ ID NO: 165345 - DNA, 80 bp, synthetic construct
  source 1..80: mol_type = other DNA
gcctctgccgcattccggccgttagcgtgccaatcttgaggttttacaggtctggcatcatagctgtggtggccggcctg

SEQ ID NO: 165346 - DNA, 80 bp, synthetic construct
  source 1..80: mol_type = other DNA
acagacagcaactatggctactgcacatacaaacctaacaattccttaattactaaaataaaatcatacagagacacaag

SEQ ID NO: 165347 - DNA, 80 bp, synthetic construct
  source 1..80: mol_type = other DNA
ccccgcgtcactgtgggggctgtagaaggaggtgaggtggtgcttgtgaaggtaaacaagctgacagaagcgccggtact

SEQ ID NO: 165348 - DNA, 80 bp, synthetic construct
  source 1..80: mol_type = other DNA
cccccgaatggcctgttcaaggggagggtggccaggatgccaccgaggttcttgatttgtcaatccatggcaggccccgc

SEQ ID NO: 165349 - DNA, 80 bp, synthetic construct
  source 1..80: mol_type = other DNA
cttacacacaaggggtggcggtcccacctacatggaccaccccgacctcagacaggtacgagtaccacgtaggcatgttc

SEQ ID NO: 165350 - DNA, 80 bp, synthetic construct
  source 1..80: mol_type = other DNA
tcacaagtagtgcccagtgacaccatgcaaactcgccacgtgtgtaattatcattcgagatccgaatccaccgtggagaa

SEQ ID NO: 165351 - DNA, 80 bp, synthetic construct
  source 1..80: mol_type = other DNA
gtagtacacagaagggatttgaggtgtgggatgtggatgtgatggggtttgtacagctcagaaggaagttggaaatgttt

SEQ ID NO: 165352 - DNA, 80 bp, synthetic construct
  source 1..80: mol_type = other DNA
cccactagtgtttaaagagcccaagattgacataaagaacacgccgccgccacctgccattgcagatctactacggtctg

SEQ ID NO: 165353 - DNA, 80 bp, synthetic construct
  source 1..80: mol_type = other DNA
atgcaacgacttctcagtgagactgttgcgtgacacaccgtttataacacagcaggctttgtaccaaaatgaccctgaaa

SEQ ID NO: 165354 - DNA, 80 bp, synthetic construct
  source 1..80: mol_type = other DNA
ctagatacagccaaagcactacaaccatgtacaaattgcccaaaaccagcatgcttcaaacagtgttgccctctgctctg

SEQ ID NO: 165355 - DNA, 80 bp, synthetic construct
  source 1..80: mol_type = other DNA
actgtactcatgatactcagttggagttggacaatgctatatacacaatctgtgacattggttcagacaatagttttgaa

SEQ ID NO: 165356 - DNA, 80 bp, synthetic construct
  source 1..80: mol_type = other DNA
gtcaacttcagtgtgacgggagtaacagaatccagggagaatataacaactatgaaaaccactggggcttttggtcaaca

SEQ ID NO: 165357 - DNA, 80 bp, synthetic construct
  source 1..80: mol_type = other DNA
gggggaagtcggcagcgttgttaatcatgtgtcttgtggtacgggtgttatgtacatgtatatgtttctgacacatccgt

SEQ ID NO: 165358 - DNA, 80 bp, synthetic construct
  source 1..80: mol_type = other DNA
ccatacgccccattccaacaagattcccccctccccctatgccgttacaagatagcatggccgtggggtgcgactcatca

SEQ ID NO: 165359 - DNA, 80 bp, synthetic construct
  source 1..80: mol_type = other DNA
cgatttacataatataaattgtaaatgctgcagtagtagggatctggacgcgcgacctgctactcttcggaaacgccaac

SEQ ID NO: 165360 - DNA, 80 bp, synthetic construct
  source 1..80: mol_type = other DNA
tttcagcgttcaccggtggtgggtgtggagccgtggccttttgcaacgcctttttcctagcttattttttggttgtgcgg

SEQ ID NO: 165361 - DNA, 80 bp, synthetic construct
  source 1..80: mol_type = other DNA
ggcgccattgctctcagagttgtgaatgaacacaatccagccagaataacatcacgcatgagagtgtacatgaaaccaaa

SEQ ID NO: 165362 - DNA, 80 bp, synthetic construct
  source 1..80: mol_type = other DNA
actgaaccagtatgtgttttaatacatggaagtcctggatcaggaaaatcactaacaacatctttgattggcagatccat

SEQ ID NO: 165363 - DNA, 80 bp, synthetic construct
  source 1..80: mol_type = other DNA
acaatgtttttaagtctctattatacgctaaagcctccttctggcagagccatctcaccccctcctatgtcaaaaaaatt

SEQ ID NO: 165364 - DNA, 80 bp, synthetic construct
  source 1..80: mol_type = other DNA
cagtgtaatgcaacaaaattccacagtggttgtttattagttgtggtgataccagagcatcaattggcatctatacaggg

SEQ ID NO: 165365 - DNA, 80 bp, synthetic construct
  source 1..80: mol_type = other DNA
aggcaagcgtgaccaaggggcccctggtgacccaggcaaacctgacaaataaggcccccaggaaagacccccgggtggca

SEQ ID NO: 165366 - DNA, 80 bp, synthetic construct
  source 1..80: mol_type = other DNA
ttcagaaataccacaggactgctagacacagccaaggcactccagcgctgtgagggatgtcctacgccacagcactacaa

SEQ ID NO: 165367 - DNA, 80 bp, synthetic construct
  source 1..80: mol_type = other DNA
ctgccaattagaagcaagtcaagtgtgtgttcccatctctcctagtcgccgcctggtcactcggtgttcagctgaataaa

SEQ ID NO: 165368 - DNA, 80 bp, synthetic construct
  source 1..80: mol_type = other DNA
tggtgctggttcaaaggccagtggaaagaagctatgctagaggtgaaggaaacccttgcaaaacatcccaggtataaagg

SEQ ID NO: 165369 - DNA, 80 bp, synthetic construct
  source 1..80: mol_type = other DNA
ttatcacccgtggtgttggggcgggtgttcctcgtcctaggtttttggccctgcctccggccccatcccgtgagccccag

SEQ ID NO: 165370 - DNA, 80 bp, synthetic construct
  source 1..80: mol_type = other DNA
gagtcaaggagtagtggaagccatgaatcaccatctgaaaaaccaaatagatagaatcagagatcaggcaaactcaatgg

SEQ ID NO: 165371 - DNA, 80 bp, synthetic construct
  source 1..80: mol_type = other DNA
acggcagactgagtccagactacccgggcatttacacagaagtagtttacaacccccttctagacaaaggagaaggcaac

SEQ ID NO: 165372 - DNA, 80 bp, synthetic construct
  source 1..80: mol_type = other DNA
caaatcatgtacataccgcctggaggaccagtaccaagcagcgtgacagactttgcttggcagacgtctactaacccaag

SEQ ID NO: 165373 - DNA, 80 bp, synthetic construct
  source 1..80: mol_type = other DNA
gaacggcagtctcagctcgggattggcctcgtacagcgagctgcggtccacggggccgatgctctcgtagcgaaagtcgt

SEQ ID NO: 165374 - DNA, 80 bp, synthetic construct
  source 1..80: mol_type = other DNA
tgccatatgacagtaactatggcttccccacttacataccacaaacaaggtacatatattccagaagagaaaaaaacttt

SEQ ID NO: 165375 - DNA, 80 bp, synthetic construct
  source 1..80: mol_type = other DNA
gggccgacccaccaaagaaacgcaaggaagctatgttagggacccatgtgatttgggatattggattacaatcttcatgc

SEQ ID NO: 165376 - DNA, 80 bp, synthetic construct
  source 1..80: mol_type = other DNA
tacttcactggagaattgaatgtacacattttgttcttatcagagagagggttcctacgagtagcacacacctatgatca

SEQ ID NO: 165377 - DNA, 80 bp, synthetic construct
  source 1..80: mol_type = other DNA
gcactacatgggcgactttttatgcaagatcaacatatagaaacactcattacagtaactcagggagacacggtttacct

SEQ ID NO: 165378 - DNA, 80 bp, synthetic construct
  source 1..80: mol_type = other DNA
gtagcaggagcatgcaaatgtgttctagaaggaattccactatatgcagccctacacggctactctgactttatacaaat

SEQ ID NO: 165379 - DNA, 80 bp, synthetic construct
  source 1..80: mol_type = other DNA
aatagagaacttcatggggagagcagcgtgcgtatatattgcacagtacgccacaaaggtcaacgacgagttggacagat

SEQ ID NO: 165380 - DNA, 80 bp, synthetic construct
  source 1..80: mol_type = other DNA
aaagacttgaccaaactaaaaatagcaatggataaatatggagttgatttacccatggtcactttcctcaaggatgagct

SEQ ID NO: 165381 - DNA, 80 bp, synthetic construct
  source 1..80: mol_type = other DNA
atgcccgctacaaaaccccgctcagcaaacatactaaacacagcagccacagaaggcaatttttctcatccccaaattaa

SEQ ID NO: 165382 - DNA, 80 bp, synthetic construct
  source 1..80: mol_type = other DNA
agctcacagaccaccctttctacccctactgcagaaaccaatacaatgtaacctttcagcttaactacaaataaaacagc

SEQ ID NO: 165383 - DNA, 80 bp, synthetic construct
  source 1..80: mol_type = other DNA
cctcccggcccagcgccgcgaggccgcccggcgctccgccgcctcccggcgctcccttcagcccccgcgaccccttctag

SEQ ID NO: 165384 - DNA, 80 bp, synthetic construct
  source 1..80: mol_type = other DNA
tttgaatcaattagatggactagggatccaaagaacacacaagaccatgtatattcattgtgtctcctgatgtggcacaa

SEQ ID NO: 165385 - DNA, 80 bp, synthetic construct
  source 1..80: mol_type = other DNA
agggacaccaaaggcacgttcatgacaaacttttcctcaaacccgtggatcatagcctcgactacgtagaagaaggctgg

SEQ ID NO: 165386 - DNA, 80 bp, synthetic construct
  source 1..80: mol_type = other DNA
tgatgattatcaagaaatagccctgaatgtgacagaggctttcgatgcatggaataatacagtaacagaacaggcagtag

SEQ ID NO: 165387 - DNA, 80 bp, synthetic construct
  source 1..80: mol_type = other DNA
cctggctgagagacaccacaaagagcccagtaataggtttcagagtacttaaaaacagcatatatacagacctaagcaat

SEQ ID NO: 165388 - DNA, 80 bp, synthetic construct
  source 1..80: mol_type = other DNA
cagacagcgttactgcaaggtgacacagatgtggccatcaataatgcggtagccagggtggctgacacaatcgccagtgg

SEQ ID NO: 165389 - DNA, 80 bp, synthetic construct
  source 1..80: mol_type = other DNA
aaaacaggcaatgcttggtgtgcatgtcatatgggatctgggcttacaatcttcatgcacaatggttattccttggatgt

SEQ ID NO: 165390 - DNA, 80 bp, synthetic construct
  source 1..80: mol_type = other DNA
atttgtgtagtgcccacacactcacagcctgatgatgaagtgttggttaacggacaaccagtaaagttgaaagataaata

SEQ ID NO: 165391 - DNA, 80 bp, synthetic construct
  source 1..80: mol_type = other DNA
atctgccagagatcattcagagactccacggcttgagcgccttctcgctacacacctacactccaatggaagtatccagg

SEQ ID NO: 165392 - DNA, 80 bp, synthetic construct
  source 1..80: mol_type = other DNA
aactaactatgtagtcccgccagagacacctggggaggcatacatcatagcaatgggagctgcacaggataacttcaccc

SEQ ID NO: 165393 - DNA, 80 bp, synthetic construct
  source 1..80: mol_type = other DNA
gaggataatatcagcaatggttgtgattatcaggaactcatctgatcctcagacaataatagctacattaacactaattg

SEQ ID NO: 165394 - DNA, 80 bp, synthetic construct
  source 1..80: mol_type = other DNA
aaaccaaccagtacacggcccctctcaccactcctggcatgctcatgaaagatggcgcctgtggagtacgcacagcttgc

SEQ ID NO: 165395 - DNA, 80 bp, synthetic construct
  source 1..80: mol_type = other DNA
tcagataatgtacatccccccgggagggcctattcccaaatcagtgactgattacacatggcagacctccaccaacccta

SEQ ID NO: 165396 - DNA, 80 bp, synthetic construct
  source 1..80: mol_type = other DNA
cctaaatctggtttccctcgtttcacaatccctttcactggattaggatctgcatactatgtcttctatgatggctatga

SEQ ID NO: 165397 - DNA, 80 bp, synthetic construct
  source 1..80: mol_type = other DNA
aaaaaaaaggtgctagtaaaaagctttgacactaaaccaaagggcaaggggcacgtaacagttaaagtgcctccccccac

SEQ ID NO: 165398 - DNA, 80 bp, synthetic construct
  source 1..80: mol_type = other DNA
ggacacacatcgcaagtggatcccagtgacaccatacaaactagacacgtggttaatttccattcaagatccgagtctac

SEQ ID NO: 165399 - DNA, 80 bp, synthetic construct
  source 1..80: mol_type = other DNA
ggcgtcgagcttatgatcacgcactttcaacgcaccattcgcgtgctgcgctgctatctccagcaccagctgcagagcat

SEQ ID NO: 165400 - DNA, 80 bp, synthetic construct
  source 1..80: mol_type = other DNA
atgcataccacattgaggtaaatacaggcaatcaccaaggcgacaaaatattcgccttccaaatacagcctggtctggaa

SEQ ID NO: 165401 - DNA, 80 bp, synthetic construct
  source 1..80: mol_type = other DNA
actggaattttacctcaatgaacacctcctcagaatcagagttacagggcctaaactactttgactactacacaggcatg

SEQ ID NO: 165402 - DNA, 80 bp, synthetic construct
  source 1..80: mol_type = other DNA
accacccccgacgccaaggcgctgatggaaaagccgctggagacacttcgcgagctgttgggcaaagccacgcaacaact

SEQ ID NO: 165403 - DNA, 80 bp, synthetic construct
  source 1..80: mol_type = other DNA
gttagaataaagccccccactctgttagaggacaagtggtacactcagcaggacctgtgcgacgttaacctgttgcaact

SEQ ID NO: 165404 - DNA, 80 bp, synthetic construct
  source 1..80: mol_type = other DNA
gaatacatgtaccactacccaaacaatgtaacaacagacatactaggcaaaaacacacttacacatgactggggcatata

SEQ ID NO: 165405 - DNA, 80 bp, synthetic construct
  source 1..80: mol_type = other DNA
ttacgcagcgagcagtagatccgtggatgggttgccgaacagaaatgcatctctgtgcttacctaatgacatttggaaaa

SEQ ID NO: 165406 - DNA, 80 bp, synthetic construct
  source 1..80: mol_type = other DNA
gaggttcctaaaccagtggtcgtaccccaacgaccagctagacctagcccgctacaggggctgctccttcagcttttaca

SEQ ID NO: 165407 - DNA, 80 bp, synthetic construct
  source 1..80: mol_type = other DNA
ataccagactgacgtgttccatgacatagtgacctgcgggccctggcagtacagagacgataacaaaaacagccagcgaa

SEQ ID NO: 165408 - DNA, 80 bp, synthetic construct
  source 1..80: mol_type = other DNA
agccccttctacccctggatgcctaagcaaaacacctctttcagagtgtctttcaagctgggtttcaccccctaaataaa

SEQ ID NO: 165409 - DNA, 80 bp, synthetic construct
  source 1..80: mol_type = other DNA
atatgtgctctgtaaagtgcattaaaatgacgtaaaaggcacccgtgcaagtataaaagccaaaagtatacatacaaagg

SEQ ID NO: 165410 - DNA, 80 bp, synthetic construct
  source 1..80: mol_type = other DNA
atgtggtggaaacgcgtcacgtggtcaattacaaaacacgatctgaatcgtgtctggagtctttcttcggcagggctgca

SEQ ID NO: 165411 - DNA, 80 bp, synthetic construct
  source 1..80: mol_type = other DNA
gtacctcaagcacgtagtgctaaagagtctgaatctggagaatatagtgcaggactttgaggccatcttcacctccccgt

SEQ ID NO: 165412 - DNA, 80 bp, synthetic construct
  source 1..80: mol_type = other DNA
tgagaacatgttttaccactatttgggtaggagtggttatacagtgcatgtacagtgtaatgcaaccaaattccatcaag

SEQ ID NO: 165413 - DNA, 80 bp, synthetic construct
  source 1..80: mol_type = other DNA
tatggtgaatggcccagctttctggatgataaagatgccagtgatgttaacaaacctaccagacctgacacctcggcatg

SEQ ID NO: 165414 - DNA, 80 bp, synthetic construct
  source 1..80: mol_type = other DNA
gacgcgagagaagggaatgatgggagccgagcaagtggaaacgacgagagaaggaataatgcgggaagatatgatgatca

SEQ ID NO: 165415 - DNA, 80 bp, synthetic construct
  source 1..80: mol_type = other DNA
gatagcaggacagtcaaccgaaaaatttataccaggtaacacaagtgtacactacaacttctgcacctacaaaccaaata

SEQ ID NO: 165416 - DNA, 80 bp, synthetic construct
  source 1..80: mol_type = other DNA
caattatgattagaaatagctcagacactccaacagtgttggctaccctggcattactaggatgccacgaatcaccatgg

SEQ ID NO: 165417 - DNA, 80 bp, synthetic construct
  source 1..80: mol_type = other DNA
tggcagagtgggttacggagcagcattgttacgtaaatactttgcccaggcacaaggtgacatttgcaagagaacatcaa

SEQ ID NO: 165418 - DNA, 80 bp, synthetic construct
  source 1..80: mol_type = other DNA
tatcatgcacattagagccgccaaagcctacagcaaagctggggagcttcccagcagccaggctatggctactatgtcaa

SEQ ID NO: 165419 - DNA, 80 bp, synthetic construct
  source 1..80: mol_type = other DNA
acaaagtgtggttataatggatgatgtcatgcaaaacccgagtggggacgacatgactttgttttgtcagatggtgtcta

SEQ ID NO: 165420 - DNA, 80 bp, synthetic construct
  source 1..80: mol_type = other DNA
gcaaaagcgccgtggaaacaaaataccgcgggacgacacgcaccggcgtcgcgcagtaagcgccgtggacagaacgccac

SEQ ID NO: 165421 - DNA, 80 bp, synthetic construct
  source 1..80: mol_type = other DNA
aatgagcctggaaacgccgttgagagagcaatagtgcgagtagcggacaccatggccagggggccaggtaactcggagca

SEQ ID NO: 165422 - DNA, 80 bp, synthetic construct
  source 1..80: mol_type = other DNA
tactcagggacaccacacacataaaacaggacgccatgccccagggaattgaggatatcattcaacaggttgctaataac

SEQ ID NO: 165423 - DNA, 80 bp, synthetic construct
  source 1..80: mol_type = other DNA
aacagagaggtaatattacacaaaacccagtggagaattacatagatgaagtgttaaatgaggttctagtagttccaaac

SEQ ID NO: 165424 - DNA, 80 bp, synthetic construct
  source 1..80: mol_type = other DNA
acccgaggcaaaaacctcaacgatcgttacccgctaagtgcctgcgggaagcctagtaacaacttgaaagttacctggtt

SEQ ID NO: 165425 - DNA, 80 bp, synthetic construct
  source 1..80: mol_type = other DNA
ataaacagcacaactgcaaataatgataacacaagtatatacactgtgactttggaaaaacagactaatttagcacaaga

SEQ ID NO: 165426 - DNA, 80 bp, synthetic construct
  source 1..80: mol_type = other DNA
aacagaggcagagaccatacaaagaagtgacagaggacttgataaacctcaggcaggaagagacatcatgcaaagagaca

SEQ ID NO: 165427 - DNA, 80 bp, synthetic construct
  source 1..80: mol_type = other DNA
gtactaggccgtgggagtttcactcgtcggtgtctacctcttaaggtcaccaagcactccgagcgtcagcgaggagtgcg

SEQ ID NO: 165428 - DNA, 80 bp, synthetic construct
  source 1..80: mol_type = other DNA
tgccgtggccagagtggctgacacaatagctagtggacccagcaactcgaccagtattcctgcgttgactgctgttgaaa

SEQ ID NO: 165429 - DNA, 80 bp, synthetic construct
  source 1..80: mol_type = other DNA
aaactcttgtcaagatcagagtttatcacagggcaaagcacgttgaagcatggattccaagagcacccagagcactaccc

SEQ ID NO: 165430 - DNA, 80 bp, synthetic construct
  source 1..80: mol_type = other DNA
cacattcctggtgaggtgaagaacatgatggagatagcagaggtggattcactaatcccaatgaacgcagtgccaggcaa

SEQ ID NO: 165431 - DNA, 80 bp, synthetic construct
  source 1..80: mol_type = other DNA
atggtgagccagacacggcgggtggggggaaggagctgacacgagtgcgtagaaagggccaaaaatacaccagctataag

SEQ ID NO: 165432 - DNA, 80 bp, synthetic construct
  source 1..80: mol_type = other DNA
gtacaaggacataaccatagatgtccatgataaacctccaccagattgtatagtggacttgctcaaatcagtggatagtg

SEQ ID NO: 165433 - DNA, 80 bp, synthetic construct
  source 1..80: mol_type = other DNA
gccatgaatctgactctaactccaacgagggcagacaccacctgctcgtgagtggggccggcgacggacccccactctgc

SEQ ID NO: 165434 - DNA, 80 bp, synthetic construct
  source 1..80: mol_type = other DNA
tatggctacgctggcaggtagtgtgcagtcattccgccatctgcgaggggaccctatatgcctctacggctgacctgaat

SEQ ID NO: 165435 - DNA, 80 bp, synthetic construct
  source 1..80: mol_type = other DNA
cccctaggttgtgtcaatatgtaaatgcaccaactgtgaacttctcatccacaaacatcactgacaagagggatagcatc

SEQ ID NO: 165436 - DNA, 80 bp, synthetic construct
  source 1..80: mol_type = other DNA
aaataactcacaaataagagagaaaattaagaaaaatatggacagttactaccaaaaaatagtagatgagtccacaatta

SEQ ID NO: 165437 - DNA, 80 bp, synthetic construct
  source 1..80: mol_type = other DNA
gcatcccttttcccttcacctaacatcctcccccaaagtatattttgcggtaacgttagaagaagtgaactcagtgcaac

SEQ ID NO: 165438 - DNA, 80 bp, synthetic construct
  source 1..80: mol_type = other DNA
ttaccatttacccacaccagtatattaacttgaggagtaataattcagcaacacttatactaccatatgttaatgctgtg

SEQ ID NO: 165439 - DNA, 80 bp, synthetic construct
  source 1..80: mol_type = other DNA
cgatcaacgactccaatacaccatgctgggagaaatcctaaattactacactcactggaccgggtctctcagatttacat

SEQ ID NO: 165440 - DNA, 80 bp, synthetic construct
  source 1..80: mol_type = other DNA
atcacttcgacccgccggcacctcctcccggaggtcccccgccggcacagcggccagcactgagggccctgcctcctcct

SEQ ID NO: 165441 - DNA, 80 bp, synthetic construct
  source 1..80: mol_type = other DNA
acaccacgcggcaacatatgttttgagtgcaacgacacttctctgaccatctacaatctaactgcagaaaacgccgggaa

SEQ ID NO: 165442 - DNA, 80 bp, synthetic construct
  source 1..80: mol_type = other DNA
cggcctccgacgacgccgaggacgccgtgggcggcgatcgcgcttttgatcgcgagcggcggacttggcagcgggcctgt

SEQ ID NO: 165443 - DNA, 80 bp, synthetic construct
  source 1..80: mol_type = other DNA
tggagattttggaggccgcaccggcactgggcgtggaaaccgcagcgctatcgaacgcgcttagtcttttccacgtagcc

SEQ ID NO: 165444 - DNA, 80 bp, synthetic construct
  source 1..80: mol_type = other DNA
atgccgctgaggaaggcgctgtaggatttagtgcacgcatcttccgttgcattgacggaagtcatgttggccaccagggt

SEQ ID NO: 165445 - DNA, 80 bp, synthetic construct
  source 1..80: mol_type = other DNA
gagcacctccattgtccgtattgcccggcccactcccaaaccccgcatggttcgccgccaaggtggcaccctagcagacc

SEQ ID NO: 165446 - DNA, 80 bp, synthetic construct
  source 1..80: mol_type = other DNA
gtgggccgcagactttatctcccaccctactgtctgttggagcgtgcatggatagacaagttcatataggctgagacctc

SEQ ID NO: 165447 - DNA, 80 bp, synthetic construct
  source 1..80: mol_type = other DNA
agagagccaggtggatacccagccttaagagcagaccgggcagaaaacacgtagttaaaattagagtgggggcccccaga

SEQ ID NO: 165448 - DNA, 80 bp, synthetic construct
  source 1..80: mol_type = other DNA
caccagagggaggtggacttctcaaagaagaacactacttcaaatttaggggaaatatcaaaacagctggacctagcgac

SEQ ID NO: 165449 - DNA, 80 bp, synthetic construct
  source 1..80: mol_type = other DNA
acaagcttgtggctttacgtggtcatgtgcagcttgcatacgacgcccgtgtcctgacgcctgactttcacgaaatccct

SEQ ID NO: 165450 - DNA, 80 bp, synthetic construct
  source 1..80: mol_type = other DNA
ggatgtagtccaagcaactactactgtcaacactacaaacttaacgcaacacccttctgctcctacaatgcctttcactc

SEQ ID NO: 165451 - DNA, 80 bp, synthetic construct
  source 1..80: mol_type = other DNA
ccacagccgctttgatgttctgctttcttttcttctgcgttttggtcgtaaagaaattaattttaacgaattgacccaac

SEQ ID NO: 165452 - DNA, 80 bp, synthetic construct
  source 1..80: mol_type = other DNA
cagaacaacccaacttccgcccctagatcttcagccattgcatcccaattcgattcatggcatggcatcacttccatcca

SEQ ID NO: 165453 - DNA, 80 bp, synthetic construct
  source 1..80: mol_type = other DNA
caaaggagaatacacaccacccgttccgtcacgtaacagccccagagatattgtcacagtaggacctagtgatatgtatg

SEQ ID NO: 165454 - DNA, 80 bp, synthetic construct
  source 1..80: mol_type = other DNA
gaacagcaaataccactctcaagttactcatagcatatacaccacctggtattgggaaaccagaaacaaggaaacaggct

SEQ ID NO: 165455 - DNA, 80 bp, synthetic construct
  source 1..80: mol_type = other DNA
agtgcgtgtagcgtcagcttagtgttgtaagatttttttttgtgaggataattaaactatatgtgctctgtaaagtgcat

SEQ ID NO: 165456 - DNA, 80 bp, synthetic construct
  source 1..80: mol_type = other DNA
gcccgtccgcagcggtggagcagcacagcagcgacccccgcgtcccgagggcgggtgccggaggtgagtttacacaccgg

SEQ ID NO: 165457 - DNA, 80 bp, synthetic construct
  source 1..80: mol_type = other DNA
ctcaggacttcacaaccctgtcacatcgtggacgggcacggttattttcttttagccaggtgcccggcgggtcactcaat

SEQ ID NO: 165458 - DNA, 80 bp, synthetic construct
  source 1..80: mol_type = other DNA
cacattaaaatataacccattcaaagacaaaggcaagggaaaccaagcatactgggtttcaaatatagaagcaaccagac

SEQ ID NO: 165459 - DNA, 80 bp, synthetic construct
  source 1..80: mol_type = other DNA
tcaagtatttgggtttcaaatgcaacccggattgaacagtgtctttaagaggactctgttaggcgagattctaaattact

SEQ ID NO: 165460 - DNA, 80 bp, synthetic construct
  source 1..80: mol_type = other DNA
gtcaaaagacaacaggaactgttgcggctgaccgtctgggggacgaaaaacctccagacaagagtcactgccatcgagaa

SEQ ID NO: 165461 - DNA, 80 bp, synthetic construct
  source 1..80: mol_type = other DNA
ctgagacgctatgccagacgcaggttccgacgcaaaaagatagtcctgactcagtggaacccccagactgtcagaaaatg

SEQ ID NO: 165462 - DNA, 80 bp, synthetic construct
  source 1..80: mol_type = other DNA
cacatctgtgtgtagattttacacgctggaaagtaaaacatggcaaaacaattcaaagggatggtgttggaaactaccag

SEQ ID NO: 165463 - DNA, 80 bp, synthetic construct
  source 1..80: mol_type = other DNA
tctacaacataatgcttgaggaagaccagcgcagaaggcaaatggttgacgttatgtcagctatatttcaagggccaata

SEQ ID NO: 165464 - DNA, 80 bp, synthetic construct
  source 1..80: mol_type = other DNA
aaaacaccagttttactaacaaagaccacttagataaactactaaaacaactattcttaaatggccaatactggcagacc

SEQ ID NO: 165465 - DNA, 80 bp, synthetic construct
  source 1..80: mol_type = other DNA
actacagctgaggtttacatcagtcttagatgcccgaatttcttttttccagtacctgccccaaaaccagttaacactaa

SEQ ID NO: 165466 - DNA, 80 bp, synthetic construct
  source 1..80: mol_type = other DNA
ctttctgagtagatcagcatgtgtctacatcgacacgtatggtacaaaagagaatggtaacatcaaacgcttcactagtt

SEQ ID NO: 165467 - DNA, 80 bp, synthetic construct
  source 1..80: mol_type = other DNA
aggacaacttacaagcggcactataagttggaatagcgtacaaaactcaacagcactaaattcctcaggtagtaatgcaa

SEQ ID NO: 165468 - DNA, 80 bp, synthetic construct
  source 1..80: mol_type = other DNA
gatgtttccacgggtgtgcgggtcctgacttttcttctgcgcactgccggtgcgtgtcgtcccgcggtgtttgtcagcgg

SEQ ID NO: 165469 - DNA, 80 bp, synthetic construct
  source 1..80: mol_type = other DNA
atatagaaataaacatcagtgacaaacccccaccagagtgcatagtggatctcctcaaatctgtggacaatgaagaggtc

SEQ ID NO: 165470 - DNA, 80 bp, synthetic construct
  source 1..80: mol_type = other DNA
ggacttagggttacaatccagctgttcaatggttgccccctggatttcaaacacagtttacagaagatgcatccgcgatg

SEQ ID NO: 165471 - DNA, 80 bp, synthetic construct
  source 1..80: mol_type = other DNA
atccttgatgcacaagcactggtggaccaagcaggtaccaacctggaaataactatcattaaactggccaggaatgaaaa

SEQ ID NO: 165472 - DNA, 80 bp, synthetic construct
  source 1..80: mol_type = other DNA
cagggcccactgggcgctagcactccgattctgcggaatccttgtgcgcctgttttataacctccccgaacttgcaactt

SEQ ID NO: 165473 - DNA, 80 bp, synthetic construct
  source 1..80: mol_type = other DNA
caatggtgtcatcaccatacctgcaggagagcaaatgaccctgtcagtaccattctactccaacagaccattgagaacag

SEQ ID NO: 165474 - DNA, 80 bp, synthetic construct
  source 1..80: mol_type = other DNA
acaatgcgtccaacgaaaagcgtaaagataccgtccgtgcgtgtgtggggggggagcatctttgctattcacgcgtattg

SEQ ID NO: 165475 - DNA, 80 bp, synthetic construct
  source 1..80: mol_type = other DNA
cccaaaagcacctcccacctcgggagactgggagatggagtaccttatgtgcaaaatatttaacaggccccccagaagca

SEQ ID NO: 165476 - DNA, 80 bp, synthetic construct
  source 1..80: mol_type = other DNA
taactactgcaaggaccagtctaaatgacgtcccgacccccaaccacagcagtagcgtgcacttgcgcttgggaacgaca

SEQ ID NO: 165477 - DNA, 80 bp, synthetic construct
  source 1..80: mol_type = other DNA
gtgcacacatggtgtcatgggcctgattacagccggtggcgatggtgttgtagcctttgcagacattagagacttgttcg

SEQ ID NO: 165478 - DNA, 80 bp, synthetic construct
  source 1..80: mol_type = other DNA
ttaaaactggatcatggttgttcccaccatgattacctacgggtgtagtatacttgtatcccggtacatttatacgccag

SEQ ID NO: 165479 - DNA, 80 bp, synthetic construct
  source 1..80: mol_type = other DNA
ttagcacaggacatgccagtactaacacatcaagcaatgtacataccaccagggggtccagttcccaatagtgtcaccga

SEQ ID NO: 165480 - DNA, 80 bp, synthetic construct
  source 1..80: mol_type = other DNA
aggtccaattactcttgaaggaccaccaccagcagcaatcagtgatttgttacagtcagtaagaactcctgaagtgatta

SEQ ID NO: 165481 - DNA, 80 bp, synthetic construct
  source 1..80: mol_type = other DNA
cttattaacctaaccgcaacatatagtaggaactattactttcaatctcttaaaactcttgggcaaggaataccgagacc

SEQ ID NO: 165482 - DNA, 80 bp, synthetic construct
  source 1..80: mol_type = other DNA
acaataccattggcatagttgacacacaggaacaatacacttcagttaatgataaaactaaaacaaaaacatatgaaaac

SEQ ID NO: 165483 - DNA, 80 bp, synthetic construct
  source 1..80: mol_type = other DNA
ttttaaatgacattaacaataccggaccgtgggcctacagagacgagagactcagtaccaccctatgcatggggtacact

SEQ ID NO: 165484 - DNA, 80 bp, synthetic construct
  source 1..80: mol_type = other DNA
agataaaacagattcaacttttgggcttgtctccattcaaattgcaaactataatcactcagatgaatatttgtctttta

SEQ ID NO: 165485 - DNA, 80 bp, synthetic construct
  source 1..80: mol_type = other DNA
acaaccgtatattctacagaattgattacaacatataccaacacaactatctcatcttttaccaacgtaacgccaaatgc

SEQ ID NO: 165486 - DNA, 80 bp, synthetic construct
  source 1..80: mol_type = other DNA
caccctgaggatttcccccaaaaatgggctgttagtagggtcctcctaccccctctttaggccaggtgtgttattttgtt

SEQ ID NO: 165487 - DNA, 80 bp, synthetic construct
  source 1..80: mol_type = other DNA
ccaacgcttactcacatttctatgatggcttctccaaagtccccttaaaagatcagacagcagcactgggcgactcacta

SEQ ID NO: 165488 - DNA, 80 bp, synthetic construct
  source 1..80: mol_type = other DNA
caatggtagagtcacttataccgttaaacaatgtagatggccaggttggtagagtggaaatgtataatgttaccataaca

SEQ ID NO: 165489 - DNA, 80 bp, synthetic construct
  source 1..80: mol_type = other DNA
gcgtttgtcccccgctggcctccgcgtacacgcccaggatctctaccgcccgccgccgggccaggggcagcgaggccacc

SEQ ID NO: 165490 - DNA, 80 bp, synthetic construct
  source 1..80: mol_type = other DNA
acattttgctgtaaggcattcattagccagcggataaaacacctggtaacaggtgcctctggggccaaaagccaaggttt

SEQ ID NO: 165491 - DNA, 80 bp, synthetic construct
  source 1..80: mol_type = other DNA
tagtgtttttggaatggatggcttggaggctttggatctaaacaccagtgcaggctacccctatgtaacactaggaatca

SEQ ID NO: 165492 - DNA, 80 bp, synthetic construct
  source 1..80: mol_type = other DNA
aagagccagctccctctgaagaagcccttgccactcacggtggaacacctgccggatgctccggtcggctcagtctttgg

SEQ ID NO: 165493 - DNA, 80 bp, synthetic construct
  source 1..80: mol_type = other DNA
gattaagatagctcaattattctcagttatgtcagataataccacaccctcaagtagtagtggcatagataaatatgggt

SEQ ID NO: 165494 - DNA, 80 bp, synthetic construct
  source 1..80: mol_type = other DNA
aaatgaatccaaccatgcctacagttagcaatgctaatctatctaaaccacctgaagagctaacaaaatccaaagtacaa

SEQ ID NO: 165495 - DNA, 80 bp, synthetic construct
  source 1..80: mol_type = other DNA
ggtattggaaattcccggatgtactaactgagaccggggtctttggccagaatgcacagtttcactatctatacagatcg

SEQ ID NO: 165496 - DNA, 80 bp, synthetic construct
  source 1..80: mol_type = other DNA
gggctgaattacaaatgtctgatgggttcaagaaatgggatattaacttccaagaacaggctcacattaggaagaagatt

SEQ ID NO: 165497 - DNA, 80 bp, synthetic construct
  source 1..80: mol_type = other DNA
tacggtgtttgcaaccacactgttaggtgaagtcttaaattacttttccaactggtccggtagcatcacacttagtttca

SEQ ID NO: 165498 - DNA, 80 bp, synthetic construct
  source 1..80: mol_type = other DNA
gttcggtggctccttcgccacggagaccttctccctgaaggttctctatgaccagtttcaaaggggcttcaacaggtggt

SEQ ID NO: 165499 - DNA, 80 bp, synthetic construct
  source 1..80: mol_type = other DNA
cctcgtaggaaggcggagcctgtaacgacgtgtctttggtgttgcccgacgtcacggtggtcccgttggcggacaccaga

SEQ ID NO: 165500 - DNA, 80 bp, synthetic construct
  source 1..80: mol_type = other DNA
ctcgacgcagttgctggagcaacacaacaggtcccaataacagtaacaatagcaccaatgtgttgtgagttcaatggcct

SEQ ID NO: 165501 - DNA, 80 bp, synthetic construct
  source 1..80: mol_type = other DNA
agaacttcttagggagggcagcactagtaatgatgaaagattttgaatacaagaaccatgtgactggcacacaaaaagta

SEQ ID NO: 165502 - DNA, 80 bp, synthetic construct
  source 1..80: mol_type = other DNA
aatcccgtgccgagattacagcaatgcaaaccaccggtgtttttggccaacaatctagagccatctatataggcagctat

SEQ ID NO: 165503 - DNA, 80 bp, synthetic construct
  source 1..80: mol_type = other DNA
ccgcagaaaaatggagatgttcacgtacctgcggtatgatgtggaagtaacttttgttataaccagctcacaggaccaat

SEQ ID NO: 165504 - DNA, 80 bp, synthetic construct
  source 1..80: mol_type = other DNA
aaagctatacagacacgagtctgtagactacatagtcacctacaacagaacaggcccctttgaaataagcccactcagct

SEQ ID NO: 165505 - DNA, 80 bp, synthetic construct
  source 1..80: mol_type = other DNA
acatatgatcatgggttgtggtttcgctgaaccaggtgattgcggtggtatccttagatgtcaacatggagcaatgggaa

SEQ ID NO: 165506 - DNA, 80 bp, synthetic construct
  source 1..80: mol_type = other DNA
tctactcacccaccccccggcacctatccggccccctaccagcatacatagcctccgagccctccacatcaaattccacc

SEQ ID NO: 165507 - DNA, 80 bp, synthetic construct
  source 1..80: mol_type = other DNA
tgatgtgattccaaattgtgattgcacagattgtacatactattgccatcataaagacaggtattatccaattaaagtca

SEQ ID NO: 165508 - DNA, 80 bp, synthetic construct
  source 1..80: mol_type = other DNA
gctgaggttagcactgtcccaccgggacaaacatcacgcatcgcgaaccgcggcgctccagtgtcaacgcgacatgttac

SEQ ID NO: 165509 - DNA, 80 bp, synthetic construct
  source 1..80: mol_type = other DNA
ccgtgcggcgctcagcacgctcatcatcatgtccgagtttacgcatctgctgcagcagcacttttccgacctgcgcatcg

SEQ ID NO: 165510 - DNA, 80 bp, synthetic construct
  source 1..80: mol_type = other DNA
ctatggttcactctttcatccctatgaataatcagcaaaaacacaaagggaaaacggctatttatggtgttcaggtgacc

SEQ ID NO: 165511 - DNA, 80 bp, synthetic construct
  source 1..80: mol_type = other DNA
cccttttccccaagtaacttagaagcttacacacaggccactaggaggtggtaatccataccactgatggtcaagcactt

SEQ ID NO: 165512 - DNA, 80 bp, synthetic construct
  source 1..80: mol_type = other DNA
cagaatagtatttatatgcccatacagctttccaaaactatataacgcagcagatgccaactatggctacatacctatta

SEQ ID NO: 165513 - DNA, 80 bp, synthetic construct
  source 1..80: mol_type = other DNA
gtacaggggtcaaagtcctatcccagtagggaacatttatagaagatggattcagctaggattgcagaagtgtgtccgga

SEQ ID NO: 165514 - DNA, 80 bp, synthetic construct
  source 1..80: mol_type = other DNA
ggcgagaagagccgcgccgagaaaggcctgcggcgacggctggcacatcagcaaggtcagaaaggctagcgcgtgcggca

SEQ ID NO: 165515 - DNA, 80 bp, synthetic construct
  source 1..80: mol_type = other DNA
aagaagctgaactacaaggagatagggtggcaaccgtggtagacacaaaagctagtggaccaagcaactctgaacaggtg

SEQ ID NO: 165516 - DNA, 80 bp, synthetic construct
  source 1..80: mol_type = other DNA
cagaaatcactatggtaccaagtgtagcaggcaaagaaggccacattggtcacatagtcatgcaatatatgtatgtaccc

SEQ ID NO: 165517 - DNA, 80 bp, synthetic construct
  source 1..80: mol_type = other DNA
ccgtgtctccgcacaaccccccgtctccgttcccaccaccagttcagcgcaaaagccccccgtccccgcaagtccctagc

SEQ ID NO: 165518 - DNA, 80 bp, synthetic construct
  source 1..80: mol_type = other DNA
ctgaagttgcacagggcgccttggcattgtcactcccgaagcaacagaacagcttacctgatactaaggccagtggcccg

SEQ ID NO: 165519 - DNA, 80 bp, synthetic construct
  source 1..80: mol_type = other DNA
acagtcaccattgccccgatgtgctgcgagtttaatgggctacgctcaatgacaaaccctgttgctcaaggcctaccaac

SEQ ID NO: 165520 - DNA, 80 bp, synthetic construct
  source 1..80: mol_type = other DNA
gggccaactacctctatcctggtgagttggttaaggcatccttcgtgggccaaacccaggggggatccctggtttccttt

SEQ ID NO: 165521 - DNA, 80 bp, synthetic construct
  source 1..80: mol_type = other DNA
aaagatcccaagacgcagcccgactttccagtgcccggtaccggtcaattcccttctcgagtacaagtcgttaacccgag

SEQ ID NO: 165522 - DNA, 80 bp, synthetic construct
  source 1..80: mol_type = other DNA
tgaggatgattccgccgtagtggtgacatcatccgttgcagagtcaccacaatcggctgatagtataagctttgatgatt

SEQ ID NO: 165523 - DNA, 80 bp, synthetic construct
  source 1..80: mol_type = other DNA
gattgttcatggtgaaacagcgtgtggactgtacgctctttcccaatttatatcccagagtagtgacgtgagcccagcca

SEQ ID NO: 165524 - DNA, 80 bp, synthetic construct
  source 1..80: mol_type = other DNA
gaactggtttcacagatcatataagtgaaaaagtcagtgagttacaaaatataacaatgggatacttgaatacaaaagtc

SEQ ID NO: 165525 - DNA, 80 bp, synthetic construct
  source 1..80: mol_type = other DNA
taaccagatccgtagagcccgggccttgcccgcggctccggaacagcctccggcactaccatggcatggtggtggtggag

SEQ ID NO: 165526 - DNA, 80 bp, synthetic construct
  source 1..80: mol_type = other DNA
cttaactatcaataaatataccagcttcactgttctaggccgtgggagtttcactggtcggtgtctatctctaaaggtca

SEQ ID NO: 165527 - DNA, 80 bp, synthetic construct
  source 1..80: mol_type = other DNA
ccgggcaccccgcaggtgagagcctcccgtaactctcccgcggcacctcagcaaccccctgccctgccatggcatgggga

SEQ ID NO: 165528 - DNA, 80 bp, synthetic construct
  source 1..80: mol_type = other DNA
taaatgacaatccacaaaaaaacctgtggcagtacacatacacaggcctcatgtccaagtactactacaaaggtaacgca

SEQ ID NO: 165529 - DNA, 80 bp, synthetic construct
  source 1..80: mol_type = other DNA
ctaccacgggtgtactttcactttctatcgccacaccgttactgactttatagtatacttctccaacaatcctcccctaa

SEQ ID NO: 165530 - DNA, 80 bp, synthetic construct
  source 1..80: mol_type = other DNA
gagcaacaggtttttggtttttcactgtttctggggggcaaagtactcaagacaacattgttaggtgaaatagcacagta

SEQ ID NO: 165531 - DNA, 80 bp, synthetic construct
  source 1..80: mol_type = other DNA
gtgtagaggtcaacaaggagaccagcaccatcacgtttaggcacagtgggaaaatctccagcaccgtaatgtgtgccacc

SEQ ID NO: 165532 - DNA, 80 bp, synthetic construct
  source 1..80: mol_type = other DNA
caaggtgttggagcaaacaacaaaccagcaagcagagcttgaggcatttctgatggccttgcaggactcaggttcacaag

SEQ ID NO: 165533 - DNA, 80 bp, synthetic construct
  source 1..80: mol_type = other DNA
acactttccccccttgctttaacaaacagaaaccaaacaaagggtacgtgttctatgacactacctttggtaatggaaaa

SEQ ID NO: 165534 - DNA, 80 bp, synthetic construct
  source 1..80: mol_type = other DNA
ttcgcaggtcgtcaaagacccctgctcaaacaccggactggtaccctcgaccggtagacagcgcaggagcgtacaagttg

SEQ ID NO: 165535 - DNA, 80 bp, synthetic construct
  source 1..80: mol_type = other DNA
gtatacatgttggaggtaatggtaaggatggattctcagctacattactcagatcttactttagtgagactcaaggacag

SEQ ID NO: 165536 - DNA, 80 bp, synthetic construct
  source 1..80: mol_type = other DNA
ctgggcatacatctcaagtcacacccagcgacacgatgcaaactaggcatgtgcacaactttcataccaggtcagagtcc

SEQ ID NO: 165537 - DNA, 80 bp, synthetic construct
  source 1..80: mol_type = other DNA
aggcacgtggtctgtgcggctctcccagtagctgagcagatactcgacacaatagaccgtgtctgtcttgagcatggcgt

SEQ ID NO: 165538 - DNA, 80 bp, synthetic construct
  source 1..80: mol_type = other DNA
gagattaccttagtcccatgtatagctggaaggggtgaagatattggacacatagtaatgcaatacatgtatgtcccacc

SEQ ID NO: 165539 - DNA, 80 bp, synthetic construct
  source 1..80: mol_type = other DNA
ggatcagctgattagcaggcgtatttgttgcgaggtcttatctcttgtagtaaatgacaaaaaagattctggcgctcccc

SEQ ID NO: 165540 - DNA, 80 bp, synthetic construct
  source 1..80: mol_type = other DNA
gttaataccaccaacctaacgcaacatccatcagctcctaccataccattcacaccagatttttcaaatgttgacagttt

SEQ ID NO: 165541 - DNA, 80 bp, synthetic construct
  source 1..80: mol_type = other DNA
cgtgtctcctttaagcttggctttcaataaaattactaggcctttaactgttcacttgtcggtgtctacctctaaaggtc

SEQ ID NO: 165542 - DNA, 80 bp, synthetic construct
  source 1..80: mol_type = other DNA
aggtagatttcaactcagcactcttttctaaatacaaaggtaatgccgattgtccattaacttcgcacatgaaggtggct

SEQ ID NO: 165543 - DNA, 80 bp, synthetic construct
  source 1..80: mol_type = other DNA
agagtttgggtgccacgaccaccacgcctgtgcccctacattaaatctagtaatgtcaactttgaaccaactaacctaac

SEQ ID NO: 165544 - DNA, 80 bp, synthetic construct
  source 1..80: mol_type = other DNA
gacacttcattcagaagaggaacaacataaagaatgtaggtcccagtgacttacatgtccacacgagggatgccatctac

SEQ ID NO: 165545 - DNA, 80 bp, synthetic construct
  source 1..80: mol_type = other DNA
caaggcactaggcattaacacatttggtactgcacaaacttcagaaacaacacaaaaagaagatataaaaaactggctaa

SEQ ID NO: 165546 - DNA, 80 bp, synthetic construct
  source 1..80: mol_type = other DNA
ggggatggcgacgcaggacttatgtgaggaaggggcgacacagaaaaaagaaaaagagactcatactgagacagtggcag

SEQ ID NO: 165547 - DNA, 80 bp, synthetic construct
  source 1..80: mol_type = other DNA
aaccaggcaatggtgacaagatgtgagccagtcgtctgctacctttatggaaagaggggtggcggaaaaagtctgacttc

SEQ ID NO: 165548 - DNA, 80 bp, synthetic construct
  source 1..80: mol_type = other DNA
cagacacctcagtgtgcaggttttacacactagatagtaaagattggagtccatcctcaaagggatggtgttggaaatta

SEQ ID NO: 165549 - DNA, 80 bp, synthetic construct
  source 1..80: mol_type = other DNA
agcggtgtttgagccgcagatccgagagcctcacctgcgtgacgacgtcttcggtctcgagcaaaaacacggcggagtag

SEQ ID NO: 165550 - DNA, 80 bp, synthetic construct
  source 1..80: mol_type = other DNA
tccactcactttggaacaggcagcttatgggattccaaacctggaagctctagaccttaccaccagtgctgggtttccct

SEQ ID NO: 165551 - DNA, 80 bp, synthetic construct
  source 1..80: mol_type = other DNA
aaatgcaccctgaccaataggaggcaacacaccacgttgtctacggtcaagcacttctgttaccccggcatgaagggtgt

SEQ ID NO: 165552 - DNA, 80 bp, synthetic construct
  source 1..80: mol_type = other DNA
gtgaaatcatgaattattatacacactggtcagggagtatcaaattaacctttgtcttttgtgggtcagccatgacgact

SEQ ID NO: 165553 - DNA, 80 bp, synthetic construct
  source 1..80: mol_type = other DNA
ttggaaaaggctttgatatcactggccacctcgtagagcccgtcggtctcccagtcgtagacgtagacggtgccgtaatg

SEQ ID NO: 165554 - DNA, 80 bp, synthetic construct
  source 1..80: mol_type = other DNA
agtctttgctatgagagttgatgtagcatcacaacccttggcgaccacgctaataggggagatctccagttactatacaa

SEQ ID NO: 165555 - DNA, 80 bp, synthetic construct
  source 1..80: mol_type = other DNA
aggctacttgcaataagattagtgggaacaagacgcttaaagcatggtgcaaaataacttttctaactcacattctatgt

SEQ ID NO: 165556 - DNA, 80 bp, synthetic construct
  source 1..80: mol_type = other DNA
ctttagtactagatacatataagtatgtgaatttagataaattgaaaatattggcatatggtgatgacatattattttct

SEQ ID NO: 165557 - DNA, 80 bp, synthetic construct
  source 1..80: mol_type = other DNA
ggggccatctacgtgggcaacttcagagtggttaatcgtcacctcgctactcataatgactgggcgaatctcgtctggga

SEQ ID NO: 165558 - DNA, 80 bp, synthetic construct
  source 1..80: mol_type = other DNA
ccaattagctagtgcaaccaagggcaatgtaacagcaggttataattatacacatccaggagaactaggtagaattgttg

SEQ ID NO: 165559 - DNA, 80 bp, synthetic construct
  source 1..80: mol_type = other DNA
gacaccgcctcgtacaaatcaaactttgtaaacaatttaaacacaaagctaggtacaacatggggaaacagactaaacac

SEQ ID NO: 165560 - DNA, 80 bp, synthetic construct
  source 1..80: mol_type = other DNA
atgattaccttccttaaagatgagctcagaaaacctgaaaaaatcctagcaggaaaaactaggatcatagaagctagtag

SEQ ID NO: 165561 - DNA, 80 bp, synthetic construct
  source 1..80: mol_type = other DNA
atgtcacgctgctaaacttgaacgttgcgctatgtaacttgcggtttccgttctgctcaccacaaactgccaacgttaat

SEQ ID NO: 165562 - DNA, 80 bp, synthetic construct
  source 1..80: mol_type = other DNA
atggagggttgtgcgcagcctttaggacagatcccgggttggatggtccatggcaagccaccatactaggccaactgtgt

SEQ ID NO: 165563 - DNA, 80 bp, synthetic construct
  source 1..80: mol_type = other DNA
acagcttcaccgagggcgggtacatcagcatgttctaccaaacaagaattgtggtgccattgtccacccctaagagtatg

SEQ ID NO: 165564 - DNA, 80 bp, synthetic construct
  source 1..80: mol_type = other DNA
gcagctgatttcacacatccgttcggcttaccactaactgactctccttgcgtaaggttccaagtcctcggagacttgta

SEQ ID NO: 165565 - DNA, 80 bp, synthetic construct
  source 1..80: mol_type = other DNA
acgagggaagatctctaataagtttagctatcttaggatcagtataaaagctacccaaacaaataatctcatttctaaga

SEQ ID NO: 165566 - DNA, 80 bp, synthetic construct
  source 1..80: mol_type = other DNA
ggtttccgaacaggtcattaaaaacccagacagaggggacggacgagactccacctatcccgatagacagcgccgcgacc

SEQ ID NO: 165567 - DNA, 80 bp, synthetic construct
  source 1..80: mol_type = other DNA
gttagactatgtaacaaaattgaagcagttagatctcttggaaaaccagattagtgcaatacaccagtcgtgtcccagcc

SEQ ID NO: 165568 - DNA, 80 bp, synthetic construct
  source 1..80: mol_type = other DNA
agaacattcaaccaatcaacaccccaaataagaccaaattacaacccagtgtcttccatgatgttttccctggaaacaaa

SEQ ID NO: 165569 - DNA, 80 bp, synthetic construct
  source 1..80: mol_type = other DNA
tgttcatagacaagtggtattcacaagaggacctctgttccgttaatcttgtgtcacttgtggtcagcccagcttccttt

SEQ ID NO: 165570 - DNA, 80 bp, synthetic construct
  source 1..80: mol_type = other DNA
gtaggccaccgggaggagcaggttagggtccaggagtgcacagacatactgacccacgctctcatcccccacaacatctg

SEQ ID NO: 165571 - DNA, 80 bp, synthetic construct
  source 1..80: mol_type = other DNA
agtacttatatactccgaccttaaagcgccagtggtaccacttgagcatcctggccagaagcacgtcgggcgtcatcccc

SEQ ID NO: 165572 - DNA, 80 bp, synthetic construct
  source 1..80: mol_type = other DNA
cggaacaggctgtgaccccgtgttaaaggtcagggttcagccttccgcctcacacgaaatggaggtcaagtccttccggg

SEQ ID NO: 165573 - DNA, 80 bp, synthetic construct
  source 1..80: mol_type = other DNA
gtggggacggtggcgccgccgctggcgccgcaggcgaccgtggagaccgagactacgacgaagaagagctagacgagctt

SEQ ID NO: 165574 - DNA, 80 bp, synthetic construct
  source 1..80: mol_type = other DNA
agctagccgggttatgagctggtctaggcccgtacataatgccccaggcattgaaagaaactggtgggaatcctgtctta

SEQ ID NO: 165575 - DNA, 80 bp, synthetic construct
  source 1..80: mol_type = other DNA
acatctttggtacacataccctgagtcaacatcaagcaattggattgattgggacaattcttttaactgctgggctgatg

SEQ ID NO: 165576 - DNA, 80 bp, synthetic construct
  source 1..80: mol_type = other DNA
gtttgcagctgtcgattacttgcttggatgtggtgtccttgcaggcaatgcctttgtgttccctcatcagattattaact

SEQ ID NO: 165577 - DNA, 80 bp, synthetic construct
  source 1..80: mol_type = other DNA
ggcgcgtcgtggtctcttgcgtgttgcgcggaccctccgggaaacgcccgcggtcgaggaggagtggtacggacttggca

SEQ ID NO: 165578 - DNA, 80 bp, synthetic construct
  source 1..80: mol_type = other DNA
gaaaacgccaagcctggcaagactcgacctcggaagaaaccgagagcgaagcagaagcccaagaagagaagacgctacag

SEQ ID NO: 165579 - DNA, 80 bp, synthetic construct
  source 1..80: mol_type = other DNA
ctcacattcaaaagctgggacatcagacgttaccaatttagcgacaaaagtattaagagagtgtcagaacaatcagaaac

SEQ ID NO: 165580 - DNA, 80 bp, synthetic construct
  source 1..80: mol_type = other DNA
ccggtccccgtagagtgcctcgctcaatacaagtcgatgacccgaagtaccagacaccagagtacatctggcacgcgtgg

SEQ ID NO: 165581 - DNA, 80 bp, synthetic construct
  source 1..80: mol_type = other DNA
atttaaaaaccagcgatccctgagaacgctccaggtagagtttccagccctgggccaaaagaccctccccacctccacca

SEQ ID NO: 165582 - DNA, 80 bp, synthetic construct
  source 1..80: mol_type = other DNA
aactttcaaactaaacaatccagcttgtttggctttaacacatacaaccctaagaaagacaacttaatatcagctagaaa

SEQ ID NO: 165583 - DNA, 80 bp, synthetic construct
  source 1..80: mol_type = other DNA
ggactcatgacgcgcggttttcaaaattccctgcgcgcgcgacgggctcaaacgatgagattgggatgggtgcagaaggt

SEQ ID NO: 165584 - DNA, 80 bp, synthetic construct
  source 1..80: mol_type = other DNA
cgatgccgagtggccccagtaactcggagagcatcccggcactcactgctgctgaaacaggccacacatcacaagtggtt

SEQ ID NO: 165585 - DNA, 80 bp, synthetic construct
  source 1..80: mol_type = other DNA
acgtttgtaataaccagttatcagcatcaaggaacgatcaaccaggatatgcccccaatgactcatcagataatgtacat

SEQ ID NO: 165586 - DNA, 80 bp, synthetic construct
  source 1..80: mol_type = other DNA
cgcgagcgaagcgagcgatcgagcgtcccgtgggcgtgtgccggaggtgagtttacacaccgcagtcaaggggcaattcg

SEQ ID NO: 165587 - DNA, 80 bp, synthetic construct
  source 1..80: mol_type = other DNA
ggttctcctcaatgttcataagcccccacagatatcagctacaatttcgcacagcatactttgactgcacatacaatccc

SEQ ID NO: 165588 - DNA, 80 bp, synthetic construct
  source 1..80: mol_type = other DNA
cattatgggccacattctatggatactcagactacattcaaacagaaataggaatccaacaagaaatacaaaacatagga

SEQ ID NO: 165589 - DNA, 80 bp, synthetic construct
  source 1..80: mol_type = other DNA
aacagtaccaattatattatcaccgtattgtctccacgtcattctaaacacaccgatttgcacgtatccgctcacgccgg

SEQ ID NO: 165590 - DNA, 80 bp, synthetic construct
  source 1..80: mol_type = other DNA
aggagtatggtattgatttgccatatgtcacttaccttaaagatgaactcagagccccagaaaagattaaagctggaaaa

SEQ ID NO: 165591 - DNA, 80 bp, synthetic construct
  source 1..80: mol_type = other DNA
ccccaaaactgtcagcgacgctcagacgtcatgtgcgacgcctcgggcgcctgtgacatgaggcacgtccagaacgcgtt

SEQ ID NO: 165592 - DNA, 80 bp, synthetic construct
  source 1..80: mol_type = other DNA
atgtgttagagagacaaatagcatccatacacgattctaaccctacccaagagaaaagggagcagttattcaacaatgtt

SEQ ID NO: 165593 - DNA, 80 bp, synthetic construct
  source 1..80: mol_type = other DNA
taaccttaacacctgcagcctacaaaagtacactagctgtttgctctattcgccactagagaccgccaagatgcgaaact

SEQ ID NO: 165594 - DNA, 80 bp, synthetic construct
  source 1..80: mol_type = other DNA
acagtaggtcaagcaaccttagttgggatgattaatctaagtaatacacccaccactagaatgattaggtatgattatcc

SEQ ID NO: 165595 - DNA, 80 bp, synthetic construct
  source 1..80: mol_type = other DNA
gctaacaattagtaatctacacaccggaattctatatggtgcttttggccaacaatctggggcggtttatgtgggtaatt

SEQ ID NO: 165596 - DNA, 80 bp, synthetic construct
  source 1..80: mol_type = other DNA
acttctatgacgggtttgcgcgtgtaccgctgaaagatgaaacaacagactcaggagacacattttacggattggtgtcc

SEQ ID NO: 165597 - DNA, 80 bp, synthetic construct
  source 1..80: mol_type = other DNA
cgcggcttcacacgttcgtggtgcgcggtgaccgtctgccgccggctgaggtgcgtgctgtgcatcgtgccagctacgcc

SEQ ID NO: 165598 - DNA, 80 bp, synthetic construct
  source 1..80: mol_type = other DNA
taacccgtttgtcagcacgggaggagcaaacaataaggtcatggttgaagttgaacctccttttggcgactcttatatag

SEQ ID NO: 165599 - DNA, 80 bp, synthetic construct
  source 1..80: mol_type = other DNA
atttaagaaggtttattcaagcaattggagccgcagctacggtgagcttccctatggcccaggtgtgtgatgtgtgtttt

SEQ ID NO: 165600 - DNA, 80 bp, synthetic construct
  source 1..80: mol_type = other DNA
aacaaagcctcaaaagaagggaaagcaggatatgtcacagacaggggaaaggataaagttaaaccattagaacaaacaac

SEQ ID NO: 165601 - DNA, 80 bp, synthetic construct
  source 1..80: mol_type = other DNA
cttagtgtattcgctcttaaaatgcgcttctctcgcatatacaggacgcccaaaccgaaaggtgccctgtcactgccccc

SEQ ID NO: 165602 - DNA, 80 bp, synthetic construct
  source 1..80: mol_type = other DNA
ggtggagaaggcgccgctggcgaccccgtcgccgctggagaacaagaaggaggagacgagtacggcccagaagacgtaga

SEQ ID NO: 165603 - DNA, 80 bp, synthetic construct
  source 1..80: mol_type = other DNA
gaatacctacagagtagacaggaaataacagcacaaagaggaactagctaacactgcatagagaaggaaactagctgata

SEQ ID NO: 165604 - DNA, 80 bp, synthetic construct
  source 1..80: mol_type = other DNA
ctggccaacgtgagggtcctagtgttatagggcgtggcagttttcttgagggctaataacccgggtgaggcggttgtcac

SEQ ID NO: 165605 - DNA, 80 bp, synthetic construct
  source 1..80: mol_type = other DNA
aacgtcaaaaccttctggtagactcgtaccttaaaggtgtgcgcgacgatgttgcgtttgtagaccaccatgatgccctc

SEQ ID NO: 165606 - DNA, 80 bp, synthetic construct
  source 1..80: mol_type = other DNA
tactgggtaacttgacaattttcccccatcagctcataaacctgaggacaaacaactccagcactatagttgtgccttac

SEQ ID NO: 165607 - DNA, 80 bp, synthetic construct
  source 1..80: mol_type = other DNA
aagcactggtgcccatactccgcaccgcgggcatctctatgactcaagagcagtggaatacaattccgtatttcaaagaa

SEQ ID NO: 165608 - DNA, 80 bp, synthetic construct
  source 1..80: mol_type = other DNA
gctgaaggagaagcttattcctactgttcaaaagaaaaaggaaatcctcaataagtgcaaaaagatacccttgttagagg

SEQ ID NO: 165609 - DNA, 80 bp, synthetic construct
  source 1..80: mol_type = other DNA
atccatacctgcgagaatggaatattgtagtggatgattatgatgttgtcattgctaagttgatgcccatggtgtttgac

SEQ ID NO: 165610 - DNA, 80 bp, synthetic construct
  source 1..80: mol_type = other DNA
ccgtggcctcgtggaaaaattaaccactggcccaaaattaactgactcataccccaaataccaagacaaagtagttgagt

SEQ ID NO: 165611 - DNA, 80 bp, synthetic construct
  source 1..80: mol_type = other DNA
cattcctagacacaatagtatcaggtccagccatgcacccaggcatgctaatgacaacaaaacacaaaatactagtaaaa

SEQ ID NO: 165612 - DNA, 80 bp, synthetic construct
  source 1..80: mol_type = other DNA
gcctaggcttggctagtcgtggttttgatccctttaataccatctattccgatgctacgactggtctcacagctcgtggg

SEQ ID NO: 165613 - DNA, 80 bp, synthetic construct
  source 1..80: mol_type = other DNA
ggcagttgaatatatacacacacatgtcacaaattacaagccaagtgtaggtgaatattctacagttataccagttagag

SEQ ID NO: 165614 - DNA, 80 bp, synthetic construct
  source 1..80: mol_type = other DNA
cagaaatgataaagtgtcctgcagcagtaaagaaaactgaaccttcagatgcaggcacaaactgctacaaaaaactagac

SEQ ID NO: 165615 - DNA, 80 bp, synthetic construct
  source 1..80: mol_type = other DNA
actggcatggtaaaagcaataggaccgtcataagcttaaataaaaaatataatctgacaatacactgtagaaggccagga

SEQ ID NO: 165616 - DNA, 80 bp, synthetic construct
  source 1..80: mol_type = other DNA
acattctttcactgtgtcatttaatgtggcataatggcaaggatgtgtataagcagtttgagcataagatccgcagtgtg

SEQ ID NO: 165617 - DNA, 80 bp, synthetic construct
  source 1..80: mol_type = other DNA
cacctaacttccccaaaaattaattattaatcagcgtcacaataggaggagactgttacctatataactaactacacttc

SEQ ID NO: 165618 - DNA, 80 bp, synthetic construct
  source 1..80: mol_type = other DNA
acagcacaagacccaaaaacagacacaaacataggaggcccctactgtgcctactcagactcatggtacaaaggcacagt

SEQ ID NO: 165619 - DNA, 80 bp, synthetic construct
  source 1..80: mol_type = other DNA
gaatggtcccacatgaagattgcaacaaatgtaaccaaatttcccatgttttgcgcagatgtgggcaccgctataccata

SEQ ID NO: 165620 - DNA, 80 bp, synthetic construct
  source 1..80: mol_type = other DNA
gtcggaagtgcacctctttatataagcacataggtcacgcccaggaagtgaaccactgtgctacgtgattcacttcctgg

SEQ ID NO: 165621 - DNA, 80 bp, synthetic construct
  source 1..80: mol_type = other DNA
ggcgggtggttcaggtccatctgtccacatatggctgcttcctccttctggggaataacagtgtcagccatctcccttag

SEQ ID NO: 165622 - DNA, 80 bp, synthetic construct
  source 1..80: mol_type = other DNA
ttcctacacatgctcaacccagcgagagtgttcttttgaacggacagaaagtgcatcttaaagacaaatacaaattggtt

SEQ ID NO: 165623 - DNA, 80 bp, synthetic construct
  source 1..80: mol_type = other DNA
aaaccctctgccacctcttcaactgcatcagcaatcacttcaaggatttcaaaatcaccaagtgttacgcggacaacatt

SEQ ID NO: 165624 - DNA, 80 bp, synthetic construct
  source 1..80: mol_type = other DNA
acacacggggcaaggtaaaaaccaatcttagggcaatattccagggtctgggagatcccacaccacctggttttatagtg

SEQ ID NO: 165625 - DNA, 80 bp, synthetic construct
  source 1..80: mol_type = other DNA
aatgcacatctgaccaacagcaactcagatacaatcctactggcacttacagcagacctgcaagttgactatactgaaga

SEQ ID NO: 165626 - DNA, 80 bp, synthetic construct
  source 1..80: mol_type = other DNA
ggcagttctatgaaagttgcctgcgctctcacgatgctttttgtggctgtggcgattttattactcatcttaataacctg

SEQ ID NO: 165627 - DNA, 80 bp, synthetic construct
  source 1..80: mol_type = other DNA
aatagggacatgatcaccagcgcagtctaaagtagtggtaattaagtttcttggcgtatttccagagaaaggctttgtag

SEQ ID NO: 165628 - DNA, 80 bp, synthetic construct
  source 1..80: mol_type = other DNA
cacaagaacacctaagagagccttctgcagagtcagtaaaaaatactacaaaccttaaccctccttttaagtataggaac

SEQ ID NO: 165629 - DNA, 80 bp, synthetic construct
  source 1..80: mol_type = other DNA
atcccacccgggggaccaattccaactaaggtagatgggtatgagtggcaaacatcaacaaatccaagcgtcttttggac

SEQ ID NO: 165630 - DNA, 80 bp, synthetic construct
  source 1..80: mol_type = other DNA
ttcactgtgagttaacagtacacacaacaattgaagccagctgcccaatagtgagtacatgcacggtgttccatgatagg

SEQ ID NO: 165631 - DNA, 80 bp, synthetic construct
  source 1..80: mol_type = other DNA
cccagaggctcccattctcttccccgatgattggtatcctccatctatagaccccgcagacttagacgaaagttgggatt

SEQ ID NO: 165632 - DNA, 80 bp, synthetic construct
  source 1..80: mol_type = other DNA
tgtaaatagtgttaaggaacaaattagtgcaataaatccagttaataacattagcaagaagataatcaaatggatgttaa

SEQ ID NO: 165633 - DNA, 80 bp, synthetic construct
  source 1..80: mol_type = other DNA
accagccagttcagtacacaatcacgattagaatctacctgaagcccaaacacattaaagcctgggttcctagaccacct

SEQ ID NO: 165634 - DNA, 80 bp, synthetic construct
  source 1..80: mol_type = other DNA
gcggtatcgtctttaacaaatccgtctcctcggtggtgggctccagcggacccaatgagagcgcgctgctcactatgatt

SEQ ID NO: 165635 - DNA, 80 bp, synthetic construct
  source 1..80: mol_type = other DNA
gtcctatcgttgtgtcacttaatgtggcataatggtaggaatgtctacaaacagtttgaggaacggatacgcagtgttag

SEQ ID NO: 165636 - DNA, 80 bp, synthetic construct
  source 1..80: mol_type = other DNA
tcccaacacccagctagacctggccagatacaggaaagctagattcaccttctacagacacaaaaagactgacttcatag

SEQ ID NO: 165637 - DNA, 80 bp, synthetic construct
  source 1..80: mol_type = other DNA
gttgatccagacaacctaaatttggagataactgtcattgagctggacagaaatgaaaaatttagagatatcaggatgtt

SEQ ID NO: 165638 - DNA, 80 bp, synthetic construct
  source 1..80: mol_type = other DNA
ataccccagtgagacgcctgctgcctctccccaaacagtaaggaggaggcgaagggtgaggcggagtggctaccggcgcc

SEQ ID NO: 165639 - DNA, 80 bp, synthetic construct
  source 1..80: mol_type = other DNA
agacaccatttacagacagtcaactgacaggccccatgctacacccaagcaacctaatgctcagaaaacacagagtaatt

SEQ ID NO: 165640 - DNA, 80 bp, synthetic construct
  source 1..80: mol_type = other DNA
cagttgtcatacatggtgaacctggtactggaaagtctatgactacaaattttctagctagaatgataacaagtgatagt

SEQ ID NO: 165641 - DNA, 80 bp, synthetic construct
  source 1..80: mol_type = other DNA
ggcggatgtacgtggggttctttgcggccccgactatcgaccctgcatttgcgatgtacttttctatgacggtgatggtg

SEQ ID NO: 165642 - DNA, 80 bp, synthetic construct
  source 1..80: mol_type = other DNA
tagcagataccaatcctagcgggccagcaaactcggagagagttccagcacttacagcggtagagactggacacacatca

SEQ ID NO: 165643 - DNA, 80 bp, synthetic construct
  source 1..80: mol_type = other DNA
aacgtgacgcggggctccggggtgaccagggctgaccccggcaaacgtgacccgaggccccgtggttacccaggcaagcg

SEQ ID NO: 165644 - DNA, 80 bp, synthetic construct
  source 1..80: mol_type = other DNA
tggctctgctagtgctactttaaaactactaattgcttacacacctcctggtgtggcaaaacccaagtctaggaaggaag

SEQ ID NO: 165645 - DNA, 80 bp, synthetic construct
  source 1..80: mol_type = other DNA
ctggtgctggtttggaggaaactggacacaggctataaaggaggtgaaggagaccattgcaaagcatcccagatatacag

SEQ ID NO: 165646 - DNA, 80 bp, synthetic construct
  source 1..80: mol_type = other DNA
ttgttgtaacttttattttggaccctgggtgtgaaccatgattccaatgtttgtatagtaaggtgtcctactaataaaga

SEQ ID NO: 165647 - DNA, 80 bp, synthetic construct
  source 1..80: mol_type = other DNA
tccaagcaaaacgaaattgcaacccagtattttctatgatgtgtttccaggtagtaaggagccagctgttctttctgagc

SEQ ID NO: 165648 - DNA, 80 bp, synthetic construct
  source 1..80: mol_type = other DNA
aggacccgtcgccgacgccgagtacggaccagaagacctagacgacctgttcgccgctatcgaagcagatacacagtaag

SEQ ID NO: 165649 - DNA, 80 bp, synthetic construct
  source 1..80: mol_type = other DNA
tgttaaagaagaatacaaattaaatcaaggtaaattaaatctacagtgtgcactcaaaccatgcaaagaagggaaaattg

SEQ ID NO: 165650 - DNA, 80 bp, synthetic construct
  source 1..80: mol_type = other DNA
caccattcttttagccttgacagcagacttgcaggtggatgctaccgcagaaccaggaagtgatgtcataccggattgtg

SEQ ID NO: 165651 - DNA, 80 bp, synthetic construct
  source 1..80: mol_type = other DNA
cttaacctgaccaattacaacctggcccaccacctgacccccacgctctatctggagccgccggagatgtttgtctacat

SEQ ID NO: 165652 - DNA, 80 bp, synthetic construct
  source 1..80: mol_type = other DNA
cagccccccattgtaaaaaggtgctttattattgggtacgaccctataattatctgtggcattaacaggaccacctttaa

SEQ ID NO: 165653 - DNA, 80 bp, synthetic construct
  source 1..80: mol_type = other DNA
taatcccggtttcacccctcgggtttctgcagggagccacccccacaattcccataactatcactgtagcacccatgaac

SEQ ID NO: 165654 - DNA, 80 bp, synthetic construct
  source 1..80: mol_type = other DNA
atgaagaaacatttttagacaacttttttaaaaatgcattcccaggcacaacagaaagagtatttaacgtattaaacaca

SEQ ID NO: 165655 - DNA, 80 bp, synthetic construct
  source 1..80: mol_type = other DNA
gccctcaggaatatctggcacatctattttcaacactatgatcaacaatatcattcttaggacactggtgttagagacct

SEQ ID NO: 165656 - DNA, 80 bp, synthetic construct
  source 1..80: mol_type = other DNA
acacgccgcaaaagcggcggcgcgcttacgtttctcaacactctctgagctctgtcccgcgaacaaacactgtggggcgc

SEQ ID NO: 165657 - DNA, 80 bp, synthetic construct
  source 1..80: mol_type = other DNA
aaagcaacaaaaacaagtccgacatgtctgtcagagaccgtcttttgatgaacctgagggaagaggaggcaagaaaatct

SEQ ID NO: 165658 - DNA, 80 bp, synthetic construct
  source 1..80: mol_type = other DNA
gaacgctgttggtttgacagcttcttcctatctcaccgagctttttgtgggtgcgatgatcctatccgtcattttagctc

SEQ ID NO: 165659 - DNA, 80 bp, synthetic construct
  source 1..80: mol_type = other DNA
catattcagtcccccctttttaaattcaggccgcatatctccagagatatttggcctgtacaaagaaatactttacaacc

SEQ ID NO: 165660 - DNA, 80 bp, synthetic construct
  source 1..80: mol_type = other DNA
tcccaacaaaataccattcaggaaggctgttgttttgttttgtacctgggaatgaattgattgatgtttctcacattaca

SEQ ID NO: 165661 - DNA, 80 bp, synthetic construct
  source 1..80: mol_type = other DNA
gagttttgtatatggatgtataatcgaatgatgtactagtttcataacttataagatcttgacgtaggttatttttacac

SEQ ID NO: 165662 - DNA, 80 bp, synthetic construct
  source 1..80: mol_type = other DNA
aatagcatatggagatgatgtaattatctcatatccattcactttggatgctgaaaaaatatcagaacagggactcaaat

SEQ ID NO: 165663 - DNA, 80 bp, synthetic construct
  source 1..80: mol_type = other DNA
taccacaggcctaaaaattccatttccaaacagtaaagaccctacagtacctgcaagtagtacagttcaaacacttacta

SEQ ID NO: 165664 - DNA, 80 bp, synthetic construct
  source 1..80: mol_type = other DNA
accaaggcctacccgtcctaccactctgccacccacaccactactcacggtactacaaaggcctaccgaacttcaaccca

SEQ ID NO: 165665 - DNA, 80 bp, synthetic construct
  source 1..80: mol_type = other DNA
acgttccggtctgatgctgctgctgttgttgtagagccgcggccacggccgtctgcacggcagcttgtaccgcctcggcc

SEQ ID NO: 165666 - DNA, 80 bp, synthetic construct
  source 1..80: mol_type = other DNA
cctccagagaacactaggccccttccaagatgtagagaccgtaggcataatttgcttcatatgcccttacacagaaccgc

SEQ ID NO: 165667 - DNA, 80 bp, synthetic construct
  source 1..80: mol_type = other DNA
gcctctattcagggagacagggtggcagatgtgatcgagagctctataggagacagtgtgagtagggcactcactcgggc

SEQ ID NO: 165668 - DNA, 80 bp, synthetic construct
  source 1..80: mol_type = other DNA
aactagacaaggagactcttggttaaggaaatttactgagtgttgtaatgcagcaaaagggctggagtgggttgcccaaa

SEQ ID NO: 165669 - DNA, 80 bp, synthetic construct
  source 1..80: mol_type = other DNA
acccctatcctagaggtcctaccggagctccttgtcttgataatccctgtaaacacacaccacctaagaacaaggcatcg

SEQ ID NO: 165670 - DNA, 80 bp, synthetic construct
  source 1..80: mol_type = other DNA
gatcgcccgggtctctgttggcagagtccgggcgatcctctgagaccctccgggcccggacggccgccctcggcccccca

SEQ ID NO: 165671 - DNA, 80 bp, synthetic construct
  source 1..80: mol_type = other DNA
agattgactatgttgaagacataggtccagatactgtacctacatgtgattgcatggagggttgttattattgccatagt

SEQ ID NO: 165672 - DNA, 80 bp, synthetic construct
  source 1..80: mol_type = other DNA
taaagtatactaagagcattctatcaaaccagggaccttttaaaggtttcaatgaagtgtcaacagcattcaggcacatt

SEQ ID NO: 165673 - DNA, 80 bp, synthetic construct
  source 1..80: mol_type = other DNA
aattgcttaggtagtcttatcattatcttagggacaattcttgccatatacaagttactctgcatgactcagggagcgta

SEQ ID NO: 165674 - DNA, 80 bp, synthetic construct
  source 1..80: mol_type = other DNA
cctataggtatatagaacctagaggaagggaaccctatagtgtaatccctcccccccctacccccccctcccttacggtt

SEQ ID NO: 165675 - DNA, 80 bp, synthetic construct
  source 1..80: mol_type = other DNA
ggactaatgcagatcatgtatgtgccaccaggtatcccaattccaacagatgcttctgacaagaaatgggacggtgcatc

SEQ ID NO: 165676 - DNA, 80 bp, synthetic construct
  source 1..80: mol_type = other DNA
ggcagtggttcgaatccacctttagatcccacgctagttgctgtggctgcggcaattttgttaatcatattaatgtactg

SEQ ID NO: 165677 - DNA, 80 bp, synthetic construct
  source 1..80: mol_type = other DNA
accacaaacagagtggctatccggacaaggaccccaaaaatttacaactggaaacaacagtgtctttggattctgcaact

SEQ ID NO: 165678 - DNA, 80 bp, synthetic construct
  source 1..80: mol_type = other DNA
tcacaagtcgttcctggtgatacgatgcagactagacatgtgatcaacaagcatgtgcgctccgagtccacaatcgagaa

SEQ ID NO: 165679 - DNA, 80 bp, synthetic construct
  source 1..80: mol_type = other DNA
cgccatcttcctcccggctgattgtgtggctgacggtgccgtgttccaccgccacttgttcatcgaccatggtaccccct

SEQ ID NO: 165680 - DNA, 80 bp, synthetic construct
  source 1..80: mol_type = other DNA
cggcgggtgagcacccggcgttgcgccgtatctatcttgtgtttcttctgtgtctttttcctatcttgttccgcgacggc

SEQ ID NO: 165681 - DNA, 80 bp, synthetic construct
  source 1..80: mol_type = other DNA
ctgttcctaactactataaacagtgttgtcctcttctatgcggaaaggcagtggtcctacaaaataagagaacacaaggc

SEQ ID NO: 165682 - DNA, 80 bp, synthetic construct
  source 1..80: mol_type = other DNA
gggccacacaggcaaatcccgagcccgatccccgaaaacaccgtacggtgtttgtggcctccaaaatcacatcagataac

SEQ ID NO: 165683 - DNA, 80 bp, synthetic construct
  source 1..80: mol_type = other DNA
tagtgttaatctgcccctatacaaaacctatgctatacaacaaagacaaaccaacctggggatacgtaccctatgactat

SEQ ID NO: 165684 - DNA, 80 bp, synthetic construct
  source 1..80: mol_type = other DNA
ataagttcaaacccgatcaacatacttccggttctttcgtttctttcttggtgaaccagcaaggtgttgcctttgatctc

SEQ ID NO: 165685 - DNA, 80 bp, synthetic construct
  source 1..80: mol_type = other DNA
gattatcctagtatacatacccctactaagacaaaactccaaccaagtgttttccatgatgttttccctggagttaagga

SEQ ID NO: 165686 - DNA, 80 bp, synthetic construct
  source 1..80: mol_type = other DNA
actctgttctgagacgcagatggcttgatctgttctaaacttaaatatatagagtattaatttagtgtagtgaatttttc

SEQ ID NO: 165687 - DNA, 80 bp, synthetic construct
  source 1..80: mol_type = other DNA
tgcagacctgtcactgttaaacctcagtattacgcattgcgacctgcggtttccgttctgctcaccacaaactgacaaca

SEQ ID NO: 165688 - DNA, 80 bp, synthetic construct
  source 1..80: mol_type = other DNA
ctgtcccaaatatacaatcaagtggtaaatgaacacaaccgcagattaaatgtatcaaaacacatggaggcaatttttca

SEQ ID NO: 165689 - DNA, 80 bp, synthetic construct
  source 1..80: mol_type = other DNA
aaaacatgccactgtggacaatgctttttggctatgtagattggtgtaaaaaagaactaaacaactggagtatgcccact

SEQ ID NO: 165690 - DNA, 80 bp, synthetic construct
  source 1..80: mol_type = other DNA
agtttaaacaaagagtattcaaacctacactctaaatggacctccactatatattccaaaaagacagacagcaattttgg

SEQ ID NO: 165691 - DNA, 80 bp, synthetic construct
  source 1..80: mol_type = other DNA
ccccctcccctgcgccttcgtgcacaccaaggacaagacgtccagcctgcagtggcccatgtacctcctgactaatgaga

SEQ ID NO: 165692 - DNA, 80 bp, synthetic construct
  source 1..80: mol_type = other DNA
agacttatacaactcaatgctaaaaggcaatgaattttatacaaagtcaggcaaacaactaataaaaacattcacaccta

SEQ ID NO: 165693 - DNA, 80 bp, synthetic construct
  source 1..80: mol_type = other DNA
ccacacaggttgtcagagacccgtgcacgcagtccacctttgaaatccccggtggcggtgtcctccctcgcagaatacaa

SEQ ID NO: 165694 - DNA, 80 bp, synthetic construct
  source 1..80: mol_type = other DNA
ttggcagctgcccagaagaatttcactctaagactaccaaaggacaccggggacatctcacaaacagccatcctgcaagg

SEQ ID NO: 165695 - DNA, 80 bp, synthetic construct
  source 1..80: mol_type = other DNA
ccccccagtccggcacgggacagggctaagggagtgttgcgggacataagtaagtcccgcagtgttttttttcgcggacc

SEQ ID NO: 165696 - DNA, 80 bp, synthetic construct
  source 1..80: mol_type = other DNA
ggtcagccttccgctttacacaaaatggaggtcaattacttccgggtcaaaggtcactgctacgtcataggtgacgtggg

SEQ ID NO: 165697 - DNA, 80 bp, synthetic construct
  source 1..80: mol_type = other DNA
aagaccccagattacatgtggatctagaagaagcaattttctcaaaatacaaaggaaataaaacaatagaaattacacaa

SEQ ID NO: 165698 - DNA, 80 bp, synthetic construct
  source 1..80: mol_type = other DNA
gtaatgccaaatgttgtccatttatatgtggcaaggctgttgaatttaaagacagaaacacttgtaccacattatccttg

SEQ ID NO: 165699 - DNA, 80 bp, synthetic construct
  source 1..80: mol_type = other DNA
catgctctccgcgatttacatgttttaacgacacaaaaggtctcagacttaataacgttacatctagcgattcaggaaca

SEQ ID NO: 165700 - DNA, 80 bp, synthetic construct
  source 1..80: mol_type = other DNA
agatcttattttaatgagcaacaagggaaaattgtgtcaaaagctgatgtaaaagagtataacatgtatagtatacacac

SEQ ID NO: 165701 - DNA, 80 bp, synthetic construct
  source 1..80: mol_type = other DNA
tctatcctgtaaatttctccctctgtatgctagtgaggctaaaaggattaaagtactatacaacaaatgtaacacaatca

SEQ ID NO: 165702 - DNA, 80 bp, synthetic construct
  source 1..80: mol_type = other DNA
cggttacattacataaccatcctttatcccaatggctccatctagtagtcatcggatcttttttgtgttcaatggttaca

SEQ ID NO: 165703 - DNA, 80 bp, synthetic construct
  source 1..80: mol_type = other DNA
agagagtttgtcaccagcctggccagcttcctgagtggtcagtacaagcacaagcccgcccgcctagaagcattccagaa

SEQ ID NO: 165704 - DNA, 80 bp, synthetic construct
  source 1..80: mol_type = other DNA
gatcttccagaggagccatttgtcaccatgatgtgaaaaaacaacagaaaagagcatttacatttactagagcttctatg

SEQ ID NO: 165705 - DNA, 80 bp, synthetic construct
  source 1..80: mol_type = other DNA
ctgaattgtctggaggggatgttgctagaatgttcaccgacaccaaggtgggagattcgaacgcaaagaaggttcaaaca

SEQ ID NO: 165706 - DNA, 80 bp, synthetic construct
  source 1..80: mol_type = other DNA
tatcgagagagtgtcacaaaaaccgggagatgctctccgctttacaaaccctttcaagagacccagatatcttcccccga

SEQ ID NO: 165707 - DNA, 80 bp, synthetic construct
  source 1..80: mol_type = other DNA
catcagaaattaaaaaatttaggttctatcaaccaagccatggtgacaagatgtgaaccagttgtttgctatctttatgg

SEQ ID NO: 165708 - DNA, 80 bp, synthetic construct
  source 1..80: mol_type = other DNA
gtaggacacacaaatgtacatttcaatttctgcacctaccaaccaaacatagaacaacttactcaactaagaaaatacta

SEQ ID NO: 165709 - DNA, 80 bp, synthetic construct
  source 1..80: mol_type = other DNA
gaaatgcacaaataaggaagaaactagaatttttcacttatgtcagatttgacttggaagttacaatcataactagtaat

SEQ ID NO: 165710 - DNA, 80 bp, synthetic construct
  source 1..80: mol_type = other DNA
aaattatgatggtagtattcacccaatttggtttaaagctcttgggatggtgcttgacaatttatcctttaaccccactc

SEQ ID NO: 165711 - DNA, 80 bp, synthetic construct
  source 1..80: mol_type = other DNA
cttacataaacaaaggtgacgtaaactttgtggtcacagaaatcaccgatgcccgtaaatccatcactgacacaccgcac

SEQ ID NO: 165712 - DNA, 80 bp, synthetic construct
  source 1..80: mol_type = other DNA
tggacatgttagcttttgtgagcgcttgtcctgacttctcagtgcgtctcctgcgagacactacccatattagccaaagc

SEQ ID NO: 165713 - DNA, 80 bp, synthetic construct
  source 1..80: mol_type = other DNA
caagaatcttaaacaattaccattactagaaaaagaaatagatggtttgagattggcttcccaaaaacagcaacaagatt

SEQ ID NO: 165714 - DNA, 80 bp, synthetic construct
  source 1..80: mol_type = other DNA
agggctatgacaattttacaagcaatcactacttttgcagcagttgctggcgttgtgtatgtaatgtatcggctttttgc

SEQ ID NO: 165715 - DNA, 80 bp, synthetic construct
  source 1..80: mol_type = other DNA
gcgactggcgtcgtgtaatccacgactcgcacggcctgtggtgcgactgcggcgactggcgagagcacctctattgtgtg

SEQ ID NO: 165716 - DNA, 80 bp, synthetic construct
  source 1..80: mol_type = other DNA
gcacctccgtatccttgaggtgcacaaaggcgatgggttccgtctggccgatggctgtgaccagcgtctcgcgcaccgac

SEQ ID NO: 165717 - DNA, 80 bp, synthetic construct
  source 1..80: mol_type = other DNA
aatggcccaaattcattagcgacaacgaagcaaatcctgttgatgcaccaaccgaaccagatgcctcagcgaacagattt

SEQ ID NO: 165718 - DNA, 80 bp, synthetic construct
  source 1..80: mol_type = other DNA
cagaatgcatcaacgacttactacagtctatagacagccaggaagttagagattactgtgagaagaaagggtggatagtt

SEQ ID NO: 165719 - DNA, 80 bp, synthetic construct
  source 1..80: mol_type = other DNA
cataaaaacaacacctccaccacccgctatagcggacttgttacgatccgttgatagcgatcaggtacgagagtactgca

SEQ ID NO: 165720 - DNA, 80 bp, synthetic construct
  source 1..80: mol_type = other DNA
ttctcaggtggcaaacgcccccggatcgatctgcccaagtacgtcccgccagaagaaagctccaatacgcaacagagaca

SEQ ID NO: 165721 - DNA, 80 bp, synthetic construct
  source 1..80: mol_type = other DNA
tcgggcgtcgacgcggtattcactcctctctccctgtttatcctaatgaatcacggccggggtgtagccgcccgggtcga

SEQ ID NO: 165722 - DNA, 80 bp, synthetic construct
  source 1..80: mol_type = other DNA
agggaggagctatatcctcacccttccagtcacgcacgtccaagtacagggcatacacacacctggtgaggtgtgccagg

SEQ ID NO: 165723 - DNA, 80 bp, synthetic construct
  source 1..80: mol_type = other DNA
agctttgacagtaacaacacaaggtattgatgatatcatagataatgttgtaaccaatgctttgaaggtgtccatgccac

SEQ ID NO: 165724 - DNA, 80 bp, synthetic construct
  source 1..80: mol_type = other DNA
accactctggaggtatcaagacacgggaaggaaccgaaagcacaaaaacaatcagttacaccgtgaaatcttgcaaaggt

SEQ ID NO: 165725 - DNA, 80 bp, synthetic construct
  source 1..80: mol_type = other DNA
atgaaggaacttgggtcgccggtgtgttcgtatatggaggtagtaagacctccctttacaacctcaggcgaggaattgcc

SEQ ID NO: 165726 - DNA, 80 bp, synthetic construct
  source 1..80: mol_type = other DNA
acacaaggcaatgaacaaacggagaaggacgcaaaccgggagatcaacaccagacagggggcgcaattacgaagaaaact

SEQ ID NO: 165727 - DNA, 80 bp, synthetic construct
  source 1..80: mol_type = other DNA
cggctccaatccacatacctggtgaagtacataatatgatggagctggctgaaattgatagtgttatacccatgaatgct

SEQ ID NO: 165728 - DNA, 80 bp, synthetic construct
  source 1..80: mol_type = other DNA
gagacgcagacgtaaaaagatatacctgactcagtggaaccccgcctttgtcagaaggtgtaacataactggcataattc

SEQ ID NO: 165729 - DNA, 80 bp, synthetic construct
  source 1..80: mol_type = other DNA
cacagactatatagtccaatatgatacagcagctcctttcactatagataaagacagctcccccaactatcatccaggag

SEQ ID NO: 165730 - DNA, 80 bp, synthetic construct
  source 1..80: mol_type = other DNA
tcgcccgagtcacattcttgtgcatggccttaatggcattttcatacacatgagtccagtaccgcatcggttcagggact

SEQ ID NO: 165731 - DNA, 80 bp, synthetic construct
  source 1..80: mol_type = other DNA
gcgaacctccacataaatccattattcttaaaccaacaataaatacagtgtacatgtttcccccagacacacctagaccc

SEQ ID NO: 165732 - DNA, 80 bp, synthetic construct
  source 1..80: mol_type = other DNA
caattggaaaattgattgtttattgttataatagattgacttccccatccaatgtggcttcacatgttagagttaatgtt

SEQ ID NO: 165733 - DNA, 80 bp, synthetic construct
  source 1..80: mol_type = other DNA
ggtaattttagatgatttgaatcaaaatccaaatggtgaggacataagtacattttgccagatggtgtcttcagttgatt

SEQ ID NO: 165734 - DNA, 80 bp, synthetic construct
  source 1..80: mol_type = other DNA
tgacgcgacgaaccagcttctgcaggtccttgcgggcgtcggcggtgacagagcagcggaaggtctcgttgaccagctcg

SEQ ID NO: 165735 - DNA, 80 bp, synthetic construct
  source 1..80: mol_type = other DNA
gagtgttggtggggaacgcattcgtttacccacaccaaataataaacttgcgcactaacaattgtgctacgctcgtacta

SEQ ID NO: 165736 - DNA, 80 bp, synthetic construct
  source 1..80: mol_type = other DNA
taccacaaccgaaaccaaggaaaccagaactgaggaaagctgttatccagggccctgagcatgagtttggtatggcacta

SEQ ID NO: 165737 - DNA, 80 bp, synthetic construct
  source 1..80: mol_type = other DNA
aattagtgttaaaatacctcctccaaagttatttactgacaagtggtatgctcagtcagacctgtgcgacgttaatcttg

SEQ ID NO: 165738 - DNA, 80 bp, synthetic construct
  source 1..80: mol_type = other DNA
ccgaattgccagatgttcctgcacgactggagtttactattgctcatcacgcaacaaatactacccaatcacagtctcca

SEQ ID NO: 165739 - DNA, 80 bp, synthetic construct
  source 1..80: mol_type = other DNA
ttttactcaagcaactccaggaggagcaagagacgacgagctcagaagaagaacaagcaccccaagaagaaagccaacaa

SEQ ID NO: 165740 - DNA, 80 bp, synthetic construct
  source 1..80: mol_type = other DNA
cgccattggatcgtggggagggtcgccataggcttcgggctcggttctaggccttccggactacaaaaatggcggattcc

SEQ ID NO: 165741 - DNA, 80 bp, synthetic construct
  source 1..80: mol_type = other DNA
ccaaaaaaaaccaaacagtacaatgaaaggcagtgctacaacctaatacaacacgttccactatgggcagccatacatgg

SEQ ID NO: 165742 - DNA, 80 bp, synthetic construct
  source 1..80: mol_type = other DNA
cacttattaaacataattcatgtgttgtatcaactcagaatggcaaattcacaggcctagggatctacgatagaacatta

SEQ ID NO: 165743 - DNA, 80 bp, synthetic construct
  source 1..80: mol_type = other DNA
gacactttcaaacaaccaagtccagaagcagcaaccaacaataaatacctaaatgtttccagcctgtggggagaccacgt

SEQ ID NO: 165744 - DNA, 80 bp, synthetic construct
  source 1..80: mol_type = other DNA
aatggtaccctccttggaaacattacagcttatccacaccaactcataaacctgcgcaccaacaactcatgcacgattgt

SEQ ID NO: 165745 - DNA, 80 bp, synthetic construct
  source 1..80: mol_type = other DNA
agacccacggtgttcagactgccgtgcacaacgcggctatgggcattgctgctggtaacctgaccatcttccctcatcag

SEQ ID NO: 165746 - DNA, 80 bp, synthetic construct
  source 1..80: mol_type = other DNA
cagttaccaaccacaagtgggttgcagttggggctgctgtgggagtgcttggtgttttggttggaggttggtatgtctat

SEQ ID NO: 165747 - DNA, 80 bp, synthetic construct
  source 1..80: mol_type = other DNA
tcttcaagtggactatcaacacccgttcttatgtacagttgaggagaaaatttgagctttttacatacataagatttgac

SEQ ID NO: 165748 - DNA, 80 bp, synthetic construct
  source 1..80: mol_type = other DNA
ggactcgtgcacgtgcttctttacaaagtggtagacgccccccgtgagcctgaaggactcatagtcttctcccgggcgca

SEQ ID NO: 165749 - DNA, 80 bp, synthetic construct
  source 1..80: mol_type = other DNA
gggttgcccacacttatgataccactcctgaacgggttgggtttttgtcatcaaatggagttgtgacaataccagcagga

SEQ ID NO: 165750 - DNA, 80 bp, synthetic construct
  source 1..80: mol_type = other DNA
atattccagggcacttggggaagattgaaatatattcactccaggttaccagaaatgaaagtgaaaagaatatactaatt

SEQ ID NO: 165751 - DNA, 80 bp, synthetic construct
  source 1..80: mol_type = other DNA
acaccaactgcaccgagtctaagaaaagcataggcgtgtgcaggtgcattacgttgtaggccgacatgttgagcctttca

SEQ ID NO: 165752 - DNA, 80 bp, synthetic construct
  source 1..80: mol_type = other DNA
aagaaatctttgcaattaaggtggatattgcatcacaacccctttcaaacacaataattggggaaattgccagttacttt

SEQ ID NO: 165753 - DNA, 80 bp, synthetic construct
  source 1..80: mol_type = other DNA
aagatgattataaatgctctagatcatgttttaatcttatattagattaagttcttgaggtacaatcacactgggtaatg

SEQ ID NO: 165754 - DNA, 80 bp, synthetic construct
  source 1..80: mol_type = other DNA
ctgctgagctctttgcaataccagttgacattacatcttcacccttagcaaccacacttttgggagagattgcttcttat

SEQ ID NO: 165755 - DNA, 80 bp, synthetic construct
  source 1..80: mol_type = other DNA
catttagctacaaagatgatctagttatgacagagctagccgccaaatacagattcgatttcttatggggtggcaatatg

SEQ ID NO: 165756 - DNA, 80 bp, synthetic construct
  source 1..80: mol_type = other DNA
gagacggtggagacggaggagagctggcccaaggagacgtcgaagagctgctagaactgctagacgacccagagtaagaa

SEQ ID NO: 165757 - DNA, 80 bp, synthetic construct
  source 1..80: mol_type = other DNA
atgatatgggcacattatgtgtccgtattgtgactgagcagcagacacatagggtcaaaataaccagcagaatattccat

SEQ ID NO: 165758 - DNA, 80 bp, synthetic construct
  source 1..80: mol_type = other DNA
cttactgttggcgcgccaacgcgacggcctcgctgactggaacgtcgtacgctgccgcggcacaggctttcgcgcacacg

SEQ ID NO: 165759 - DNA, 80 bp, synthetic construct
  source 1..80: mol_type = other DNA
ggcttccatgtacttaaaccatctctatatgaaggagccatgtctaacttacaaacacaagaatttaaacaaaacagaga

SEQ ID NO: 165760 - DNA, 80 bp, synthetic construct
  source 1..80: mol_type = other DNA
ctaggaactgtttatgcactgtacaaactgatgtgtatagcacaaggcccctatactggcttgccacaaccaaaaccaag

SEQ ID NO: 165761 - DNA, 80 bp, synthetic construct
  source 1..80: mol_type = other DNA
agtcaaggatgtgttagagaaaggcattcccacgcttcaatctccaactgtagaggcatgtgggtattctgataggatta

SEQ ID NO: 165762 - DNA, 80 bp, synthetic construct
  source 1..80: mol_type = other DNA
tggacaaatatggtatagacctaccacttgttacatatattaaagatgagcttagaggcaaagacaaagttagactaggc

SEQ ID NO: 165763 - DNA, 80 bp, synthetic construct
  source 1..80: mol_type = other DNA
gaaagcgctggctggatatgttttaaatcaattagataagtacatatagacatttaatttgattagaattagaagtttat

SEQ ID NO: 165764 - DNA, 80 bp, synthetic construct
  source 1..80: mol_type = other DNA
actactgtaaaaagtactacaacgaccccggactgctacacgaagtaagagtggtcgttagatgcccctacacagaacct

SEQ ID NO: 165765 - DNA, 80 bp, synthetic construct
  source 1..80: mol_type = other DNA
attcattaaatcctaacgaccggagtcctgtctctttgtgttcttgggggacttgagttagctgtctttcctcttattac

SEQ ID NO: 165766 - DNA, 80 bp, synthetic construct
  source 1..80: mol_type = other DNA
gggaaatttattaaacagactccaagttgccattggacaccggagctgtgaatcagtaacgaaagtgagtggggccagac

SEQ ID NO: 165767 - DNA, 80 bp, synthetic construct
  source 1..80: mol_type = other DNA
aattcaacctacaactccaacagcgattcaacaacctaaaacaattaatgcaaaatatataataaaacaaaatgtaaaaa

SEQ ID NO: 165768 - DNA, 80 bp, synthetic construct
  source 1..80: mol_type = other DNA
caaagagccgcacgctgaactcgaggctccgggcgtgcggcgccagcgaaccggcggcgttgaacgtggtccttttgttg

SEQ ID NO: 165769 - DNA, 80 bp, synthetic construct
  source 1..80: mol_type = other DNA
ccgacatcgtggacaaatgcttaaatatgtgggagcgcaaggccgcttcggcctccgccgcggccgcggccgccgcctgc

SEQ ID NO: 165770 - DNA, 80 bp, synthetic construct
  source 1..80: mol_type = other DNA
aggcacatcacatattactgaaatacattcagctgcagatgagtactggagagcagttacaactaacctacctcaacaaa

SEQ ID NO: 165771 - DNA, 80 bp, synthetic construct
  source 1..80: mol_type = other DNA
ggcagtaactcgcaaaggaataagaaccagccagatgaggatcctttctttaattgtaatggtacactgttggggaactt

SEQ ID NO: 165772 - DNA, 80 bp, synthetic construct
  source 1..80: mol_type = other DNA
ttagaacagtcagagataataatagtcttgggtatctaatgtgtaaaccatttctcactggaacaacaacagggaagata

SEQ ID NO: 165773 - DNA, 80 bp, synthetic construct
  source 1..80: mol_type = other DNA
actctaaaccctccaacagttttaaatccagaggcattggcccgtaggtttggatttgatttggacatgtgcctacactc

SEQ ID NO: 165774 - DNA, 80 bp, synthetic construct
  source 1..80: mol_type = other DNA
gctcgtgatagcggaagtgctatgcgtggtcgtagtcatcctttctatccttctctatgaatagcagcaatagcggtaaa

SEQ ID NO: 165775 - DNA, 80 bp, synthetic construct
  source 1..80: mol_type = other DNA
ctaactgacaagtggtacttttccaaagacgttgcagacctcacattgctaaacctcaacgcagtgtcagctgacctgcg

SEQ ID NO: 165776 - DNA, 80 bp, synthetic construct
  source 1..80: mol_type = other DNA
tcgtcagaagagagcgatcaagaagtcctccaagagacgcaagtactccagttcaagccagagcaacagcagcaactcca

SEQ ID NO: 165777 - DNA, 80 bp, synthetic construct
  source 1..80: mol_type = other DNA
tttgaactatttacatatgttaggtttgattctgaagttacattagttccctctatagctgctcaaggtgaggacatagg

SEQ ID NO: 165778 - DNA, 80 bp, synthetic construct
  source 1..80: mol_type = other DNA
agatatgggtatttttggagagaatatgttctatcactatcttggtaggagtggatatacagtgcatgttcagtgcaatg

SEQ ID NO: 165779 - DNA, 80 bp, synthetic construct
  source 1..80: mol_type = other DNA
gattgggattttatatccaccccaccattgataagattggtattcaatctagtaaaagaccctatacaaggagcagaaac

SEQ ID NO: 165780 - DNA, 80 bp, synthetic construct
  source 1..80: mol_type = other DNA
taactatctacaacttaaccacaaaaaacgctggaaaatataccaggcgtcaccgtgataacggtcaagaagaaaattac

SEQ ID NO: 165781 - DNA, 80 bp, synthetic construct
  source 1..80: mol_type = other DNA
gcaactatatataacagaattactcaagaaagcaagaacaggaaagagttaacaaactcattacaagcaattttccaggg

SEQ ID NO: 165782 - DNA, 80 bp, synthetic construct
  source 1..80: mol_type = other DNA
ggatcaacttgagaacaaacaactcagccaccatcatgttaccctggatgaattgcgcgccaatggactttgcactaaga

SEQ ID NO: 165783 - DNA, 80 bp, synthetic construct
  source 1..80: mol_type = other DNA
gctgggggtggtggttatgtttgctttgcggacatcagaggtttggacatgtttcaagcagaataccagggaatatcaga

SEQ ID NO: 165784 - DNA, 80 bp, synthetic construct
  source 1..80: mol_type = other DNA
acgcagatggagctcgacgccgcggactacgctgcttgctcacaggcccgccaacacctctacggtcaaacacaacccca

SEQ ID NO: 165785 - DNA, 80 bp, synthetic construct
  source 1..80: mol_type = other DNA
tgattgggaagtaggttctcatggttggtggtggaagctgccagatgccctcaaagatatgggtgtgtttggtcaaaata

SEQ ID NO: 165786 - DNA, 80 bp, synthetic construct
  source 1..80: mol_type = other DNA
cctaccaagatgttacttataaccctaactgtgacagaggagttaaaaacagagtgtgggttcagcctctcactaaaccc

SEQ ID NO: 165787 - DNA, 80 bp, synthetic construct
  source 1..80: mol_type = other DNA
gaatgatgcgtgacactccaatgatcacacaaaaagctgacattctacaaaatccagttgaagaattcatagatacaact

SEQ ID NO: 165788 - DNA, 80 bp, synthetic construct
  source 1..80: mol_type = other DNA
cagttgtcgcgacagatgaagactacttccgcgcagagcaaggtgatgaccaatgtgagcacaaacgacgtcaacacctc

SEQ ID NO: 165789 - DNA, 80 bp, synthetic construct
  source 1..80: mol_type = other DNA
cctcagcagggacaacaaagtgcagattctttcatccaggcacatccgtacactacaacttctgtacatacatacctgca

SEQ ID NO: 165790 - DNA, 80 bp, synthetic construct
  source 1..80: mol_type = other DNA
taccgaacaaacaccacaggagatgactatataccaacatgtgattgcactgaagcaacatattattgtagacataaaaa

SEQ ID NO: 165791 - DNA, 80 bp, synthetic construct
  source 1..80: mol_type = other DNA
tttttcgcattcctgttcagagcgggaaccgtcagagcgcacaagtctttggtttccaagttcaaccagggttagacagc

SEQ ID NO: 165792 - DNA, 80 bp, synthetic construct
  source 1..80: mol_type = other DNA
tcaactaaaagccccccaataaaatgtcaaggccgtgggagtttcactgctcggtgtctgcttcttaaggtcactaagca

SEQ ID NO: 165793 - DNA, 80 bp, synthetic construct
  source 1..80: mol_type = other DNA
tttatatctgtaccacaggtggatagacaattttatttagatcaatatagtatactgtttactgtagaacatgtataata

SEQ ID NO: 165794 - DNA, 80 bp, synthetic construct
  source 1..80: mol_type = other DNA
aaacacaagattgaagtcacgacaagagtatatcataaagcaaaacatgtcaaggtgtggtgcccaagaccacctagggc

SEQ ID NO: 165795 - DNA, 80 bp, synthetic construct
  source 1..80: mol_type = other DNA
tacatcaaatgagacaaacctattttgaggagttaacctctaaggggccacaaacaacaaaaagtgaggaaggctacagt

SEQ ID NO: 165796 - DNA, 80 bp, synthetic construct
  source 1..80: mol_type = other DNA
gatgctttataacagggtggctgcccctcattatctgtggaaatggacacacccaatttaactttataactcacatggat

SEQ ID NO: 165797 - DNA, 80 bp, synthetic construct
  source 1..80: mol_type = other DNA
ggcaatacacatacaacaaaccaatgcaaaaaatatattatgaagcagcaaacaagcaagatagtggctttaaaaataca

SEQ ID NO: 165798 - DNA, 80 bp, synthetic construct
  source 1..80: mol_type = other DNA
ggagtattgtgaacaagaaggtttgatagcaaaggctacacacacaatagaaaagaacttagaatatacacaatactgct

SEQ ID NO: 165799 - DNA, 80 bp, synthetic construct
  source 1..80: mol_type = other DNA
taaactttgatggcacactgctagggaacataaccatctttccgcaccaattcattaatttgaggagtaacaattcagcc

SEQ ID NO: 165800 - DNA, 80 bp, synthetic construct
  source 1..80: mol_type = other DNA
cagagtggcaaccatcagagttcacaggtcttcggcttccaagtgcaacctggactggacggtgtcttcaaacacacatt

SEQ ID NO: 165801 - DNA, 80 bp, synthetic construct
  source 1..80: mol_type = other DNA
aggatgcatgtctcacccccaactacaaaaatttaaaccaccaaacacaggaccaggcgaaaacaaatacttttttacac

SEQ ID NO: 165802 - DNA, 80 bp, synthetic construct
  source 1..80: mol_type = other DNA
gtttgcatccagtgtggtttcaagcactggaacaactactgaataaccttggttttcctggggaattagcctacaaactg

SEQ ID NO: 165803 - DNA, 80 bp, synthetic construct
  source 1..80: mol_type = other DNA
tctgtttcccataaacgaaaccattacccaagaacctcacaccgcagtgcctggactgttacgttgctttgtgtcgcctg

SEQ ID NO: 165804 - DNA, 80 bp, synthetic construct
  source 1..80: mol_type = other DNA
ccgagtcccgcatggacataaaccatgttccagacactgtgaaaccggaccttcagacatttggggcttttgggcaacag

SEQ ID NO: 165805 - DNA, 80 bp, synthetic construct
  source 1..80: mol_type = other DNA
tacacggaatacgtgtatgaatgcgatttgccatgtaatacaagtgactatgatgaatatgacatactaaactatcttga

SEQ ID NO: 165806 - DNA, 80 bp, synthetic construct
  source 1..80: mol_type = other DNA
ttagatggactaagaaaccctcacaaatgcaagaacacgttctgtcgttgtgtcatctcatgtggcataacgggcgagat

SEQ ID NO: 165807 - DNA, 80 bp, synthetic construct
  source 1..80: mol_type = other DNA
ccaaattgcccgttgtgcgtgtaagacaggtgtatacttttgtgaatctagagggaaacactatcctattacaattacac

SEQ ID NO: 165808 - DNA, 80 bp, synthetic construct
  source 1..80: mol_type = other DNA
aaatgggagcacaggtgtctacacaaaagactggtgcgcatgagacccttcttgaagctgcccagggtgccacaataaat

SEQ ID NO: 165809 - DNA, 80 bp, synthetic construct
  source 1..80: mol_type = other DNA
acacaagaagatgggagcgcaagtttcaacgcagaaaactggtgcacatgaaacgggattgaatgccagtggcaactctg

SEQ ID NO: 165810 - DNA, 80 bp, synthetic construct
  source 1..80: mol_type = other DNA
gtcgggcgagacgccgacggtggccaggaaccacgcgggctccttgggccggtgcggcgccaggaggccttccatctgtt

SEQ ID NO: 165811 - DNA, 80 bp, synthetic construct
  source 1..80: mol_type = other DNA
actacgctgcacaactatccgttctggagattaatacagaagccttaactctagagcaagcagtttgtggtatcaagaat

SEQ ID NO: 165812 - DNA, 80 bp, synthetic construct
  source 1..80: mol_type = other DNA
agtggttgtgccagaacaccagttggcatcacgcactgaaggaaatgtatctgtaaattataaatacacccacccaggtg

SEQ ID NO: 165813 - DNA, 80 bp, synthetic construct
  source 1..80: mol_type = other DNA
ctatcctggatctcaacaggaatgaaaaatttagagatatcagagcattcatatcagaagactttgaaggggtggaagca

SEQ ID NO: 165814 - DNA, 80 bp, synthetic construct
  source 1..80: mol_type = other DNA
acagccagatacctcatcaaatagattttatacactagagagtaaagtatggacacgagattccaagggctggtggtgga

SEQ ID NO: 165815 - DNA, 80 bp, synthetic construct
  source 1..80: mol_type = other DNA
tcaagagaaactgccacatagccacaacagatagaggagatttcaatttgcttggcatttatgacaactgtgctgtgctg

SEQ ID NO: 165816 - DNA, 80 bp, synthetic construct
  source 1..80: mol_type = other DNA
ccgcatgtccaaccaccacgttgaacaggatgtggcaccctaagaggacgcaggcatacaaggttattacccagtccttg

SEQ ID NO: 165817 - DNA, 80 bp, synthetic construct
  source 1..80: mol_type = other DNA
gagaacattgtctgtgtgatctgcccttacaccgtgcctcccctatatgacaagagccaccccaacacggggtacgtgtt

SEQ ID NO: 165818 - DNA, 80 bp, synthetic construct
  source 1..80: mol_type = other DNA
gcctttgccacagaagcccaccttagacccaggaccactactcccacaggacagccaataactaatgagaatactagtag

SEQ ID NO: 165819 - DNA, 80 bp, synthetic construct
  source 1..80: mol_type = other DNA
agtggggccagacttcgccttagggcctttatcttcttgccatttgttagtgtcggtggttgccataggcttcggcctcc

SEQ ID NO: 165820 - DNA, 80 bp, synthetic construct
  source 1..80: mol_type = other DNA
ctactagactactacctgggcttttacagccccatattcctgtccccaggtagatccaacatagaattctttacagcctt

SEQ ID NO: 165821 - DNA, 80 bp, synthetic construct
  source 1..80: mol_type = other DNA
acgcagatggcttgatttgttttaaaatttccttctttagatatatagagtataaatttagtgtagtgaatttttcctct

SEQ ID NO: 165822 - DNA, 80 bp, synthetic construct
  source 1..80: mol_type = other DNA
agcgatggggcttcaagctacgtgcccataacagtgacggtggcccccatgtgtgcagagtataacggtctaagactggc

SEQ ID NO: 165823 - DNA, 80 bp, synthetic construct
  source 1..80: mol_type = other DNA
aattacccataacagttaccattgcgcccatgtgctgtgagtttaatggcttgagaaacatcactatcccagcaacccaa

SEQ ID NO: 165824 - DNA, 80 bp, synthetic construct
  source 1..80: mol_type = other DNA
agcgtgtggatatagtgaccgagtggcacaactaacggtgggtaactcctccattacgacacaagaggctgccaatatag

SEQ ID NO: 165825 - DNA, 80 bp, synthetic construct
  source 1..80: mol_type = other DNA
gattagtcaaactcactataggttggtgcagcaggacgagtacacaagcgctggcaatgtcacatgctggtatcagactg

SEQ ID NO: 165826 - DNA, 80 bp, synthetic construct
  source 1..80: mol_type = other DNA
tacccacgtgactgatcacgtgggcgacacgtcatcgccgccattttacatcacaaaatggcggacttccttcctctttt

SEQ ID NO: 165827 - DNA, 80 bp, synthetic construct
  source 1..80: mol_type = other DNA
ttgtgaaacgacgggaaacgattctcccggttcttcataaccaccatactttgtttcaacgctataaacaccttcttgta

SEQ ID NO: 165828 - DNA, 80 bp, synthetic construct
  source 1..80: mol_type = other DNA
taaaaaacaccgaaaaaacaaatccaccctttaaatatgaaaacaaagactccctatggggagaccctgtatataaaaca

SEQ ID NO: 165829 - DNA, 80 bp, synthetic construct
  source 1..80: mol_type = other DNA
acaagtgtgtggtgttgtgttttgtatcggcttgtaatgatttctcggtgcgcatgctgcgtgacacaccattcattgga

SEQ ID NO: 165830 - DNA, 80 bp, synthetic construct
  source 1..80: mol_type = other DNA
tatactacaccaacaaccagtactagaagatatagcaagatcaggcccattttcacttaagcagcagatacccagcgcca

SEQ ID NO: 165831 - DNA, 80 bp, synthetic construct
  source 1..80: mol_type = other DNA
cgtgcacacagacaacactacataccaacaagaaattactacttttgaaaactggctatataataaatgcactcactatc

SEQ ID NO: 165832 - DNA, 80 bp, synthetic construct
  source 1..80: mol_type = other DNA
cacagggtgaattatcagttactattgataaattaaagaaaggattggatggtcttgcaccactttatgccagggaaaac

SEQ ID NO: 165833 - DNA, 80 bp, synthetic construct
  source 1..80: mol_type = other DNA
tgacttataatagttccagtcctagtgaagttttttgtattttgcaaggtagaatgggagaagatgccaaatttttctgc

SEQ ID NO: 165834 - DNA, 80 bp, synthetic construct
  source 1..80: mol_type = other DNA
tttccactggttctgctgacgcgtccaggccagtcccgagaccgtgagacgcgcctgccacatctgcttgcccgacgcgt

SEQ ID NO: 165835 - DNA, 80 bp, synthetic construct
  source 1..80: mol_type = other DNA
catgtctgaacactctgtgaagggaaagctcaacatggcgactgcgacgcagttatgcaaagagtgtccaccgcccgcta

SEQ ID NO: 165836 - DNA, 80 bp, synthetic construct
  source 1..80: mol_type = other DNA
atcgcggcctcgagcaagacgtttcccgttgaatatggctcataacaccccttgtattactgtttatgtaagcagacagt

SEQ ID NO: 165837 - DNA, 80 bp, synthetic construct
  source 1..80: mol_type = other DNA
gtctcatcagcagtaacagacatgagaatcatgataaggtgcccctacacagaaccagccctagtgggggcctcacagga

SEQ ID NO: 165838 - DNA, 80 bp, synthetic construct
  source 1..80: mol_type = other DNA
agggacaaacagtaacgaaacatataaccccagtggcacaaaagaaaacatgacatggacacaatcacattactccttat

SEQ ID NO: 165839 - DNA, 80 bp, synthetic construct
  source 1..80: mol_type = other DNA
cggcgtgtggacaagctgatttgaaaaaatagactgggtgggccctggacactggacccaggcggcgcatgaggcgcagt

SEQ ID NO: 165840 - DNA, 80 bp, synthetic construct
  source 1..80: mol_type = other DNA
caccaatgaatcttgaattatcagggattagatccaaaacagtggtgaaagaacagggccttcctacaacactaacacct

SEQ ID NO: 165841 - DNA, 80 bp, synthetic construct
  source 1..80: mol_type = other DNA
ttgttatatctatgtatgaatgatttaagtagactgtcacgataaaaccttctaggagttcttggagtgaagcagtcctc

SEQ ID NO: 165842 - DNA, 80 bp, synthetic construct
  source 1..80: mol_type = other DNA
gcttatgagtctatcgctaagctagtaaatgacaacaattaccagtccgtagccatccccttgttgtccacaggaatttt

SEQ ID NO: 165843 - DNA, 80 bp, synthetic construct
  source 1..80: mol_type = other DNA
tccctaccggcattaaattcaccctccgcagaggaatgtggatacagtgatcgcgtaaggtccattaccatcggcaactc

SEQ ID NO: 165844 - DNA, 80 bp, synthetic construct
  source 1..80: mol_type = other DNA
acatagatgtaacctataaccccatagtagacaaaggcctgggaaaccacatatggtttcagtacctcacaaagcccacc

SEQ ID NO: 165845 - DNA, 80 bp, synthetic construct
  source 1..80: mol_type = other DNA
gacgctactcccggatacgcgtcataagctactggaccctagggaggagtgtctacagggctacgtgcacgcccccttac

SEQ ID NO: 165846 - DNA, 80 bp, synthetic construct
  source 1..80: mol_type = other DNA
caagtggggattgttctggtagacactacgtgtatcagataatgtatattccccccggggcaccactcccattaaaatgg

SEQ ID NO: 165847 - DNA, 80 bp, synthetic construct
  source 1..80: mol_type = other DNA
agaaggaggtggagacgacgaggactacagatcctggccttggcagatcagatacatccacttcctgattcgccaactga

SEQ ID NO: 165848 - DNA, 80 bp, synthetic construct
  source 1..80: mol_type = other DNA
cgctgctactgtctgagctgccagatccaaagaaaaaaccacctggtgatatgacctggcgccccccggtacacaatgcc

SEQ ID NO: 165849 - DNA, 80 bp, synthetic construct
  source 1..80: mol_type = other DNA
aagctacccccttaactatgtttttcggcagagtttaccgccaccagaaaaggaaagtgcttctgtccctggtgcatact

SEQ ID NO: 165850 - DNA, 80 bp, synthetic construct
  source 1..80: mol_type = other DNA
gagatgtttacttatattaggtttgacatggaagtaactatagtaactaataaccaaggtttaatgcaaatcatgtatgt

SEQ ID NO: 165851 - DNA, 80 bp, synthetic construct
  source 1..80: mol_type = other DNA
aataatgttcattcaatgaaaaataaaataggtatgtatgcagtgcaggttggtgtccaaacaagtttacaagctgaaat

SEQ ID NO: 165852 - DNA, 80 bp, synthetic construct
  source 1..80: mol_type = other DNA
aagtctttggtgttggctttgtagatagtataaaacaacaggtgaattttattaacccaaccagtaagattggctcaaaa

SEQ ID NO: 165853 - DNA, 80 bp, synthetic construct
  source 1..80: mol_type = other DNA
gtgatgaggtcgatgatcctgttgggggcggcaaagaccgaccccacgaacatgcgctcctccccgtccaacgccttttc

SEQ ID NO: 165854 - DNA, 80 bp, synthetic construct
  source 1..80: mol_type = other DNA
atcgacattgtgtttcaaaattgcataagttttggtcttagcttgatgtcagttgtggaacaattcacatcaagctaaga

SEQ ID NO: 165855 - DNA, 80 bp, synthetic construct
  source 1..80: mol_type = other DNA
tcccctgtactactagcgcatcaaccaccatcagtgaaagtacctccgaatcccccaccaccgtcactggtaccagtcct

SEQ ID NO: 165856 - DNA, 80 bp, synthetic construct
  source 1..80: mol_type = other DNA
tcggggtactcgcagtgagagcagtcaaccgtagtagcccgcatgccatacatacatccatcagggtctatatgaagccc

SEQ ID NO: 165857 - DNA, 80 bp, synthetic construct
  source 1..80: mol_type = other DNA
aagggacgcagctacataaaagtaaggataaaaccccccactctctttaatgaccactggtactttcagaaagacctgtg

SEQ ID NO: 165858 - DNA, 80 bp, synthetic construct
  source 1..80: mol_type = other DNA
ggagataactttgccaactgggtgattagcacgcgacaagttgctcaatttcgccgaaagcttgaaatgttcacgtacgc

SEQ ID NO: 165859 - DNA, 80 bp, synthetic construct
  source 1..80: mol_type = other DNA
agacgcttattcggctgctggatacataacgtgctggtatcaaactaatatcatcgtaccgccgtccacgcccactcaat

SEQ ID NO: 165860 - DNA, 80 bp, synthetic construct
  source 1..80: mol_type = other DNA
tgggatgttggactacaatctagctgtgtgttgtgcgtaccctggataagccagacacattacaggtttgttgcggatga

SEQ ID NO: 165861 - DNA, 80 bp, synthetic construct
  source 1..80: mol_type = other DNA
gaatctaacctaactccttattatgtattacatgccaaaaagggcagtaatacaacagaaaatttaacaacccagcaacc

SEQ ID NO: 165862 - DNA, 80 bp, synthetic construct
  source 1..80: mol_type = other DNA
acagtacaagagctaacataggcaatgtcaacatgtatacagttacccttcaacctcaaactgacatggctactgaagtt

SEQ ID NO: 165863 - DNA, 80 bp, synthetic construct
  source 1..80: mol_type = other DNA
ccccggtgatactggatacgctttacccaatcggcgaaaaccgggctcatcgttatccgcaaagtgcctacgagaagtct

SEQ ID NO: 165864 - DNA, 80 bp, synthetic construct
  source 1..80: mol_type = other DNA
gccgggggggttagcggcggggacgggggggatggcagtgagggcctttctcggcggggacagtggtggggacgacgaca

SEQ ID NO: 165865 - DNA, 80 bp, synthetic construct
  source 1..80: mol_type = other DNA
taaacacacgaaaatgggagctcaagtgtcaactcaaaaatctgggtctcatgaaactggcaatgtagccactggaggct

SEQ ID NO: 165866 - DNA, 80 bp, synthetic construct
  source 1..80: mol_type = other DNA
cgctaactcagccaaacaaagaggggtgaacggagaccccgctttttgccacctaacaggaatatactcacctccctggc

SEQ ID NO: 165867 - DNA, 80 bp, synthetic construct
  source 1..80: mol_type = other DNA
tacgtgcctgacactatccgcccagaagttcgcacggctggtgcatttggacagcaatctggcgcagtgtatgtaggaaa

SEQ ID NO: 165868 - DNA, 80 bp, synthetic construct
  source 1..80: mol_type = other DNA
aaataacgttatcaaagaagaccagtgaatgtaacctacccagtatacacaccccatgcaaaaccaaattgcagcctagt

SEQ ID NO: 165869 - DNA, 80 bp, synthetic construct
  source 1..80: mol_type = other DNA
ccgtcacggggggcgcatagaaggggtatatctaggaggcggcccgtaccccatctcagtcacggggggcgcatgggagg

SEQ ID NO: 165870 - DNA, 80 bp, synthetic construct
  source 1..80: mol_type = other DNA
tctaatgggtatcaacctccgccagggtcgccgggtggtcctgggtcgagttccacgccactagtaatcagaagacatcg

SEQ ID NO: 165871 - DNA, 80 bp, synthetic construct
  source 1..80: mol_type = other DNA
aagaaagaaccagacatggggtacgtgttctatgacatgctgttcgggtcaggcaaaatgccggacggccgaggccaggt

SEQ ID NO: 165872 - DNA, 80 bp, synthetic construct
  source 1..80: mol_type = other DNA
gtgcaagactgctgagagacaccacacatatttcacagaaaaccatgatcgcacgcacacaggggatagaagagacaata

SEQ ID NO: 165873 - DNA, 80 bp, synthetic construct
  source 1..80: mol_type = other DNA
ggacgatactacccggtaacagtgactcaacatgactggtatgagattcaagaatcaatatactatccaaagcacatcca

SEQ ID NO: 165874 - DNA, 80 bp, synthetic construct
  source 1..80: mol_type = other DNA
gtgttttgtataaaatcggtagtattattggcatccatgttggtggtaatggaagagatggcttctctgctatgctcctt

SEQ ID NO: 165875 - DNA, 80 bp, synthetic construct
  source 1..80: mol_type = other DNA
aagagtctgaatctggagaatatagtgcaggactttgaggccatcttcacctccccgtctgataccatcagtgaggctga

SEQ ID NO: 165876 - DNA, 80 bp, synthetic construct
  source 1..80: mol_type = other DNA
accgctcccccgtccccgccgcaatcaacaccccgtgcccagcgcaacccccgtggccgccgccggcgttcagcgcggcc

SEQ ID NO: 165877 - DNA, 80 bp, synthetic construct
  source 1..80: mol_type = other DNA
cggtgctgatgatgcagaactacaagtgcatactagtaaagagttacaagacgcaccccggggggcgaccgtacataaca

SEQ ID NO: 165878 - DNA, 80 bp, synthetic construct
  source 1..80: mol_type = other DNA
tatacagtatatatattgtagtagttataagcccatatactagtcctgctatgtataacaaagctaaacctaaccatggc

SEQ ID NO: 165879 - DNA, 80 bp, synthetic construct
  source 1..80: mol_type = other DNA
gctggcggcgccgtcgcagacgccgagtaccaagaagacgagctcaacgccctgttcgacgccgtcgagcaagaagagta

SEQ ID NO: 165880 - DNA, 80 bp, synthetic construct
  source 1..80: mol_type = other DNA
tggatttgttctgttaggaaattcctcaataaagttgactcgggtaatcttagtgattagaagtcatcatttcaacaatg

SEQ ID NO: 165881 - DNA, 80 bp, synthetic construct
  source 1..80: mol_type = other DNA
cctctcagacacacctacctacccttggctccccgtctccaatcctgaaataaaagtgagctttaagctcggtttcaaat

SEQ ID NO: 165882 - DNA, 80 bp, synthetic construct
  source 1..80: mol_type = other DNA
agacgagggcaacttacaaaacgagctacagagagaattacaaaagacaaaatccctcaaacaactcttttaccaattac

SEQ ID NO: 165883 - DNA, 80 bp, synthetic construct
  source 1..80: mol_type = other DNA
gaaccaggaaatgatgttataccagattgtgactgtgtggaagggtgttactattgtaaatctcaagatagatattttcc

SEQ ID NO: 165884 - DNA, 80 bp, synthetic construct
  source 1..80: mol_type = other DNA
gcaccactgtaagaaactacaacgtacatagccaggactatgtccaatatgaaagctatggaggaggcatgaccaccact

SEQ ID NO: 165885 - DNA, 80 bp, synthetic construct
  source 1..80: mol_type = other DNA
agccacgaaacaacgcgggatgtccttgtaggacaggtcatccttgcgttgccgcaggtaaagctcggccatagtgttga

SEQ ID NO: 165886 - DNA, 80 bp, synthetic construct
  source 1..80: mol_type = other DNA
tggtaggaaaaagaatacaggctactgttatgacaggggatacccctataaatatctttggaaggaacattttagttaag

SEQ ID NO: 165887 - DNA, 80 bp, synthetic construct
  source 1..80: mol_type = other DNA
taaagggcatttttaatacagttatctttaagagccttgcccatagcccggccagtcccgagggcgggtgccgaaggtga

SEQ ID NO: 165888 - DNA, 80 bp, synthetic construct
  source 1..80: mol_type = other DNA
ttggcttaaagaaaaattaatacctgctgtgcagagtaagaaagatttacttaaggaatgcaaaaagatatcattatacc

SEQ ID NO: 165889 - DNA, 80 bp, synthetic construct
  source 1..80: mol_type = other DNA
ccacaaacgaagatacagcgacagctcagacagcagctcaaacagcaacagcgactcggagaccagctccgactcgtcca

SEQ ID NO: 165890 - DNA, 80 bp, synthetic construct
  source 1..80: mol_type = other DNA
ccagtcaactgctccatcaaaagccctgtttcaaaatatggagcagttgaagtacagttcattgttgaattatgggaagg

SEQ ID NO: 165891 - DNA, 80 bp, synthetic construct
  source 1..80: mol_type = other DNA
ccatagccacacccacagcctcttcaaccacaaccacgaaaacaaccacacccaaggagataaatgagaactctacatgc

SEQ ID NO: 165892 - DNA, 80 bp, synthetic construct
  source 1..80: mol_type = other DNA
cgctgtcactgcttgacgtgcgaactccacaggagaaacgggctcgtgacatgacctggcgcccaccggtacacaatgcc

SEQ ID NO: 165893 - DNA, 80 bp, synthetic construct
  source 1..80: mol_type = other DNA
agaagtacccagagacaacacttatggcatctccccaactaatgatatggggacattgtgtttccgatcattagatgatt

SEQ ID NO: 165894 - DNA, 80 bp, synthetic construct
  source 1..80: mol_type = other DNA
agaacactctatgacgagtacaagaggtttatgaactactggacagcctctaacgaggacctggacctctgtagatacag

SEQ ID NO: 165895 - DNA, 80 bp, synthetic construct
  source 1..80: mol_type = other DNA
ccttttattctttatatttgcatcctatggttacaacataagtaatcatgggtgcacaggttagcaaacagaatgttggc

SEQ ID NO: 165896 - DNA, 80 bp, synthetic construct
  source 1..80: mol_type = other DNA
agaatgctcagagatacacctttcgttgagcaaaagaccaagttgcaaggggatgacaaaaacacgactaacgcagccac

SEQ ID NO: 165897 - DNA, 80 bp, synthetic construct
  source 1..80: mol_type = other DNA
tgatttgtggtaaagccttggtgctgcaaaacaagagaacaaaggctagttactccatcaacactgttgttcaacagctt

SEQ ID NO: 165898 - DNA, 80 bp, synthetic construct
  source 1..80: mol_type = other DNA
aacaggaggtactctttaacaatgtcagatggttggctattcaatccagacgcttcgcaccactctacgctgcagaagca

SEQ ID NO: 165899 - DNA, 80 bp, synthetic construct
  source 1..80: mol_type = other DNA
aatccgcgctgctgcaaggagatgtagtggaggcagttgagagcgccgttgcgcgggtggcggatacaatcgggagcgtg

SEQ ID NO: 165900 - DNA, 80 bp, synthetic construct
  source 1..80: mol_type = other DNA
tgcgcgagggccgaacggatggcatcggccgccgtcctggcgcgaaagagggccccggctgcttcctccgctcctcgccc

SEQ ID NO: 165901 - DNA, 80 bp, synthetic construct
  source 1..80: mol_type = other DNA
gactatatagccttcaataggtacccagaagagtttggataccagtcagggctaccagagaaagagtggaaggttaggct

SEQ ID NO: 165902 - DNA, 80 bp, synthetic construct
  source 1..80: mol_type = other DNA
ggcccagggtcactggcttatgcgtgggacgtttagaaacaggccgcctatggggcctgtgactggtgcttgtggtgtgg

SEQ ID NO: 165903 - DNA, 80 bp, synthetic construct
  source 1..80: mol_type = other DNA
gtgcaactgcactgaagcaacatactactgcaaacacaaggatagatatttcccagtaaatgttaagaaacatcagtggt

SEQ ID NO: 165904 - DNA, 80 bp, synthetic construct
  source 1..80: mol_type = other DNA
ttcatcaatgcccgcgcagagaaaggcttttcacttgatgttgtcaaagcctacgcccgaacgctggtttcggaggtgcg

SEQ ID NO: 165905 - DNA, 80 bp, synthetic construct
  source 1..80: mol_type = other DNA
cttatgtgtttaacacaaggtgcatattcaggtgtgcccactccagtggttaaacggccagaactcaggaaagctacctt

SEQ ID NO: 165906 - DNA, 80 bp, synthetic construct
  source 1..80: mol_type = other DNA
tgtgcagttatcattatcaagccttcttcaaggcgtagtgatgatcgttgggcagaacccccaagctcctagcgatctgg

SEQ ID NO: 165907 - DNA, 80 bp, synthetic construct
  source 1..80: mol_type = other DNA
aaacaacactatgacaacactttatttaacaaaatagtattatataacacttttcaaacaatagctcagctcaaagaaac

SEQ ID NO: 165908 - DNA, 80 bp, synthetic construct
  source 1..80: mol_type = other DNA
gataatataagtggcagcacttccgaatggctgagttttccacgcccgtccgcggagagggagccacggaggggatcccg

SEQ ID NO: 165909 - DNA, 80 bp, synthetic construct
  source 1..80: mol_type = other DNA
ccgcgcttgtgcaaatatatcaacaggtacaatgtcaatttccacgtggagcctgtggcggaagcacgcgctgatatcaa

SEQ ID NO: 165910 - DNA, 80 bp, synthetic construct
  source 1..80: mol_type = other DNA
tcattttggatgatttaaaccaaaacccaaatggtgaagacatcagtacattctgtcaaatggtctcttcagttgatttt

SEQ ID NO: 165911 - DNA, 80 bp, synthetic construct
  source 1..80: mol_type = other DNA
accagcatggtggtgccagctgagacaccacagcagtgcacagtcttgtgctttgtttccgcatgcaatgacttttctgt

SEQ ID NO: 165912 - DNA, 80 bp, synthetic construct
  source 1..80: mol_type = other DNA
ttgaaatgctttgtaactgtatatcctcagttccgttcatagtcccaatggcacaccttgaagaaaaaggcaaattttat

SEQ ID NO: 165913 - DNA, 80 bp, synthetic construct
  source 1..80: mol_type = other DNA
aacacactgcactgacaaaacaggaactgccgtacgagttcacgcccaatgcagttacaggcaaggtggttcagaccgcc

SEQ ID NO: 165914 - DNA, 80 bp, synthetic construct
  source 1..80: mol_type = other DNA
ccacgattattgtgccatatgtgaatgcagttccaatggattcaatgcttagacataacaattggagcttggtgataatt

SEQ ID NO: 165915 - DNA, 80 bp, synthetic construct
  source 1..80: mol_type = other DNA
actagaaacaacgtaaaccgcataacgtgattacaaagtatcgacgctaatttacccaagatacattttaactactctgt

SEQ ID NO: 165916 - DNA, 80 bp, synthetic construct
  source 1..80: mol_type = other DNA
ttagaagcactagatttacatactagtgctggttacccatacacagcatgtggtatcaagaagaaggatttgataccaaa

SEQ ID NO: 165917 - DNA, 80 bp, synthetic construct
  source 1..80: mol_type = other DNA
ggtgaaggacaaaccaccatctttgaagtacaccgccccttttgggtgcgaaatacaagtgaacccggtgcgggcggaaa

SEQ ID NO: 165918 - DNA, 80 bp, synthetic construct
  source 1..80: mol_type = other DNA
attttgagaaactctcaacacaattaacacaacaggacttattaaaggagatttacaggaatcaattgagtgtcctaagc

SEQ ID NO: 165919 - DNA, 80 bp, synthetic construct
  source 1..80: mol_type = other DNA
acagagccagccctagtaggggcctcacaggaaactggctactgtgtggttagcgacacattttgcaacggagacatgcc

SEQ ID NO: 165920 - DNA, 80 bp, synthetic construct
  source 1..80: mol_type = other DNA
caaacggggccacagaccgcagttcataatgcaggcatgggcgtggccgtgggaaacttaacaatattccctcaccagtg

SEQ ID NO: 165921 - DNA, 80 bp, synthetic construct
  source 1..80: mol_type = other DNA
ttgtggtaaatctttagctacttctgtcattgcacgtggtcttgcaacggaggcaggtgtctactcactacccccagatc

SEQ ID NO: 165922 - DNA, 80 bp, synthetic construct
  source 1..80: mol_type = other DNA
catatgggcaggttgtacgtgagacacgtcaacaaacacagtcctaataccatcaagagtaatgtgagggtgtacttcaa

SEQ ID NO: 165923 - DNA, 80 bp, synthetic construct
  source 1..80: mol_type = other DNA
aagggatatgcgtacaacgacgaaaaaggatattggttacttatctgtgtgtctgacacctccgtggtgttataagaaat

SEQ ID NO: 165924 - DNA, 80 bp, synthetic construct
  source 1..80: mol_type = other DNA
ggtagcttaaagtttacttttatgttttgtggtacagcgatgacaactgggaagctattgctcgcttactccccaccagg

SEQ ID NO: 165925 - DNA, 80 bp, synthetic construct
  source 1..80: mol_type = other DNA
atagttagaaatagtacagatactcctacaatcatagccaccttagcattgcttggttgttctggttctccatggcgata

SEQ ID NO: 165926 - DNA, 80 bp, synthetic construct
  source 1..80: mol_type = other DNA
acaacattgcaaaacccaatagtggtggtttactggagcaaaaacactttcttaaacatagaccggatatcaaaagtgct

SEQ ID NO: 165927 - DNA, 80 bp, synthetic construct
  source 1..80: mol_type = other DNA
gtcgctcggcagcgcccgtcatgtatcccggcgccgtagcggcccctccttctgcttcgccagcaccgctgcctttgccg

SEQ ID NO: 165928 - DNA, 80 bp, synthetic construct
  source 1..80: mol_type = other DNA
tgtgtgaaagtcatggagtacactcttgggcagaacgttgaggctcacgacacgtacgctagttgggatatctcagtaag

SEQ ID NO: 165929 - DNA, 80 bp, synthetic construct
  source 1..80: mol_type = other DNA
ctaaattattaattgcttacacacccccaggagcccaaggtccaaccaaacgtaaagaagcaatgttaggtacacatgta

SEQ ID NO: 165930 - DNA, 80 bp, synthetic construct
  source 1..80: mol_type = other DNA
tacgtcactaaccacgtgtcctccacagaccaaccatatgctatgtcgtccacttcctggggtgtgtctacgtgataata

SEQ ID NO: 165931 - DNA, 80 bp, synthetic construct
  source 1..80: mol_type = other DNA
tcattgtaaaattcaggaccatgagctaaactcatgagaagagttgattccaacttctgaaaagaacaataagggtccaa

SEQ ID NO: 165932 - DNA, 80 bp, synthetic construct
  source 1..80: mol_type = other DNA
ggttacaggtttatgcaaatagatctgtaatcatgggcgctcaggtgactaaacaaaaagttggatcacatgataatacc

SEQ ID NO: 165933 - DNA, 80 bp, synthetic construct
  source 1..80: mol_type = other DNA
caaactatgatggtagtatacaccctgtttggtttcaggcacttaagcaagttctttcagatctttcatttgatccatcc

SEQ ID NO: 165934 - DNA, 80 bp, synthetic construct
  source 1..80: mol_type = other DNA
ggaggaggccggggtgttatctgctgactgaaacccgtccccgctgaccagtccgtgccccacccttggtgggaaaccgg

SEQ ID NO: 165935 - DNA, 80 bp, synthetic construct
  source 1..80: mol_type = other DNA
tgggtaatgctcgttgttgcccatttatatgtggtaaagctgtaactttcaaagaccgcaacacatgtcagagttatacc

SEQ ID NO: 165936 - DNA, 80 bp, synthetic construct
  source 1..80: mol_type = other DNA
cacagcgtttcgcctgctacgtgccacggaacatgtcctggcgcgttgtttgggaactttgccgtcatgccttggcgctc

SEQ ID NO: 165937 - DNA, 80 bp, synthetic construct
  source 1..80: mol_type = other DNA
cgcatgctggatgcggcgccccatgcgcttctatccaacagaccccccgttctacccctggctaccccccaagcgagata

SEQ ID NO: 165938 - DNA, 80 bp, synthetic construct
  source 1..80: mol_type = other DNA
gcacgaagggttatgccacttgggagattgatgtcatgggttttgtacagttaaggaggaagcttgaaatgttcacttac

SEQ ID NO: 165939 - DNA, 80 bp, synthetic construct
  source 1..80: mol_type = other DNA
gctaataacaactgctttttaaaagtcagcagtctttggggagaccacgtgtatgataaggaaaaattaattaatgggtg

SEQ ID NO: 165940 - DNA, 80 bp, synthetic construct
  source 1..80: mol_type = other DNA
ggcagcatgacaagcacggcatcgtgctcatcccccaaaccgatctgtgagcaagtcgcgtaggaaacgattgcatgaaa

SEQ ID NO: 165941 - DNA, 80 bp, synthetic construct
  source 1..80: mol_type = other DNA
tacatcatcaaagaagataggaggggtcaaaacgcggactgaaagtatataacgccgatcatgtccgaggaactgttaat

SEQ ID NO: 165942 - DNA, 80 bp, synthetic construct
  source 1..80: mol_type = other DNA
ccacctaggctggcactcccccatatttctcagcagacacaggagcaacatgaactttgccagggcctaccaagacgtca

SEQ ID NO: 165943 - DNA, 80 bp, synthetic construct
  source 1..80: mol_type = other DNA
tgttcaatgagagatggttgatacatggtggtatgccatctggatcaccgtgcactactgtgctaaactcactttgtaac

SEQ ID NO: 165944 - DNA, 80 bp, synthetic construct
  source 1..80: mol_type = other DNA
gctacgtcactaaccacgtgtgttccacaggccaaccgaagtctacgtcgtacacttcctgggcatggtctacataatta

SEQ ID NO: 165945 - DNA, 80 bp, synthetic construct
  source 1..80: mol_type = other DNA
actatgacaaagtaagaactaaatggataaaaatagctgaagatggctataaactagtatcaaaagaatacaaagaaata

SEQ ID NO: 165946 - DNA, 80 bp, synthetic construct
  source 1..80: mol_type = other DNA
acaggacttccctccgctccccagaagaaacctgagttgagaaaggcaacattacaaggtccagaacatgagtttatcag

SEQ ID NO: 165947 - DNA, 80 bp, synthetic construct
  source 1..80: mol_type = other DNA
tagtaccagaatatcagttggcatacattggtggtacaaacaccaatgttggatacaaacacacacacccaggagaagta

SEQ ID NO: 165948 - DNA, 80 bp, synthetic construct
  source 1..80: mol_type = other DNA
gggtggtcccatttcagccagagcggtgtgtacggctacactaccttgaacaacatgggccccctgtattttaggcatgt

SEQ ID NO: 165949 - DNA, 80 bp, synthetic construct
  source 1..80: mol_type = other DNA
gtccagtctggccagagggccggtctcgatctccgtgaaccagccgggttccacggcctccattctctccgccgcaccac

SEQ ID NO: 165950 - DNA, 80 bp, synthetic construct
  source 1..80: mol_type = other DNA
gggaagaaagtttatgaagattttctagaccagatcagaacagtacatctgggtagaatactacacctaccaccctactc

SEQ ID NO: 165951 - DNA, 80 bp, synthetic construct
  source 1..80: mol_type = other DNA
cggacgccatcacggacgccgaactcatggatcacaccagtctgtacgcggatcccttttttctcaaatacgtcaagcca

SEQ ID NO: 165952 - DNA, 80 bp, synthetic construct
  source 1..80: mol_type = other DNA
aaagagactcctcttcctcggaacaaagtctccgtacatcgtcagaagagacgccgccagcccacctactcagagtacac

SEQ ID NO: 165953 - DNA, 80 bp, synthetic construct
  source 1..80: mol_type = other DNA
gcaatgcgggcatgggtgtcggtgtcggcaaccttaccatttatcctcaccagtggataaacctgcgtaccaacaattgt

SEQ ID NO: 165954 - DNA, 80 bp, synthetic construct
  source 1..80: mol_type = other DNA
cgctcgtcgttgtgcgctgcgctggtgagggccacgttgcggaactggtacttgggataccacttgaactcggggatcac

SEQ ID NO: 165955 - DNA, 80 bp, synthetic construct
  source 1..80: mol_type = other DNA
catctcaccccctcctatgtcaaaaaaattaacaacaatcctgatggctctttaattactactcaagtaggcacaatgcc

SEQ ID NO: 165956 - DNA, 80 bp, synthetic construct
  source 1..80: mol_type = other DNA
cgtggcgcgcacgtagcgctgcaggtgaaccccgctcgcacgctcgcgcggcttcgggcgcttgtgggtccaggcatcac

SEQ ID NO: 165957 - DNA, 80 bp, synthetic construct
  source 1..80: mol_type = other DNA
gtaagtctggttattggcctcggtgaacgtcaatcgcacctgaaaagacacgctgtagtcccggaagacgtgggcccagc

SEQ ID NO: 165958 - DNA, 80 bp, synthetic construct
  source 1..80: mol_type = other DNA
gactatagcaattgaaacttacaagaatatagacttagacaaaatgaagataattgcttatggtgatgatgttgtcattt

SEQ ID NO: 165959 - DNA, 80 bp, synthetic construct
  source 1..80: mol_type = other DNA
tatgtttgggccattagccacctgggcattcgtgttactgtatactgacctcacggtagtgctgcagcagatgcttaaac

SEQ ID NO: 165960 - DNA, 80 bp, synthetic construct
  source 1..80: mol_type = other DNA
aacgacggcggcagcaccggtcccagacacgttatttggccgggtaccagcgtgctttgggcgccggacgttgtgatcac

SEQ ID NO: 165961 - DNA, 80 bp, synthetic construct
  source 1..80: mol_type = other DNA
aacttgggacctagtgatatgtttgttcataccaaagaagctatttataaatgtgcacacttgaccaaacccaatgaaca

SEQ ID NO: 165962 - DNA, 80 bp, synthetic construct
  source 1..80: mol_type = other DNA
tattcgcctcatggaccatcaatgcaaggcgtatggtacagatgagacgtaagcttgagatatttacatatgttaggttc

SEQ ID NO: 165963 - DNA, 80 bp, synthetic construct
  source 1..80: mol_type = other DNA
tgggtagcgtcagaagacgagctagatgtgagtcgcagggacgcgtgacacgaaacgcgttcaggattaacgtaggtttt

SEQ ID NO: 165964 - DNA, 80 bp, synthetic construct
  source 1..80: mol_type = other DNA
cacgcagcgcccgctggtgagcacggtgcgcgtatacttcaagcccaaacacgtacgcgggtggatccctaggccaccta

SEQ ID NO: 165965 - DNA, 80 bp, synthetic construct
  source 1..80: mol_type = other DNA
accgcttgactatgaggcatatagcacaaagccaaaaagacctagacttttccctgttacagagaggggcgaaggggtcc

SEQ ID NO: 165966 - DNA, 80 bp, synthetic construct
  source 1..80: mol_type = other DNA
gtttggcctcaatgattctctcaccccattgggcgtcaccggtggcctcttttaccatgtttccctcaaccccatcaact

SEQ ID NO: 165967 - DNA, 80 bp, synthetic construct
  source 1..80: mol_type = other DNA
atgataacccaccaaaagtccgttgctgaagcaattgtttcctgtggccccttcatgcccagagagcaggaagccgcaag

SEQ ID NO: 165968 - DNA, 80 bp, synthetic construct
  source 1..80: mol_type = other DNA
cacttaagtaggtcctatttatggcctcacctattactgaacctcccatttcagcttccgggacgcaaacaaccaagata

SEQ ID NO: 165969 - DNA, 80 bp, synthetic construct
  source 1..80: mol_type = other DNA
tagaaaacagaacgggtcagacacagcacaattatgcgccgtgccatataaaacaaataattaatacctggcacaaggta

SEQ ID NO: 165970 - DNA, 80 bp, synthetic construct
  source 1..80: mol_type = other DNA
ccgaatttgtaattgcgggtaggggagctaacaccaagcccaacaaagctccccatcctgggttcgccacgactttccct

SEQ ID NO: 165971 - DNA, 80 bp, synthetic construct
  source 1..80: mol_type = other DNA
ggtagctgatactgtcgctagtggacctagcaactccactagcatccctgcactaactgcagttgaaaccgggcatacgt

SEQ ID NO: 165972 - DNA, 80 bp, synthetic construct
  source 1..80: mol_type = other DNA
cttgcctcccttcttgcccaaaccctcgcccaacgcatctctggcaacccggacgatgtgtattcccccaccgccgcttc

SEQ ID NO: 165973 - DNA, 80 bp, synthetic construct
  source 1..80: mol_type = other DNA
cgctggacgcgcactgtacatccctccctacgaagtgctcctgcatgagtggtatgaaaaattttaatagaatatagaaa

SEQ ID NO: 165974 - DNA, 80 bp, synthetic construct
  source 1..80: mol_type = other DNA
cttcaaagcgcaaaccgcattctcagctaaaggcatgagagggtaataaccacagtactctaaggagttataaccaaaac

SEQ ID NO: 165975 - DNA, 80 bp, synthetic construct
  source 1..80: mol_type = other DNA
aagaaacacaatggacatgtacagggttagattgagcgatagtgcaaacctgacacaaccaatcttgtgtctgtccttgt

SEQ ID NO: 165976 - DNA, 80 bp, synthetic construct
  source 1..80: mol_type = other DNA
agtaggctatcacctaggaaaatatagccctatattcctaagttcatacagaaccaacctacaatttagaacagcataca

SEQ ID NO: 165977 - DNA, 80 bp, synthetic construct
  source 1..80: mol_type = other DNA
atatattacccaattttagccctacaaaacaaatacacataccaggtcaaataaagacaattatggatatggctagggta

SEQ ID NO: 165978 - DNA, 80 bp, synthetic construct
  source 1..80: mol_type = other DNA
gcgtgaccagacgccgtaggcgaaaggtgcggaaatactcgttttcccacaactgcgtgaggaagcgttctagcgactcg

SEQ ID NO: 165979 - DNA, 80 bp, synthetic construct
  source 1..80: mol_type = other DNA
aggttggacgatctcagtgcgtgacttagtgcagttgaggcgcaagttcgagatgttcacataccttaggttcgacatcg

SEQ ID NO: 165980 - DNA, 80 bp, synthetic construct
  source 1..80: mol_type = other DNA
aatggtgccctgcatcctgtgttggagctagcagcaagagaaacacctccccgcctttcgccagaggacactatagttct

SEQ ID NO: 165981 - DNA, 80 bp, synthetic construct
  source 1..80: mol_type = other DNA
gaggttgaaatcaccacgcgtgtgtatcataaggccaagcatgtaaaggcttggtgtccaagagcaccaagagcggtgcc

SEQ ID NO: 165982 - DNA, 80 bp, synthetic construct
  source 1..80: mol_type = other DNA
ttatgtagctttaggaatcagaaagaaagacttgataaatagagagactagggatgttagtaaaattaaaaattgcttag

SEQ ID NO: 165983 - DNA, 80 bp, synthetic construct
  source 1..80: mol_type = other DNA
ccacctgcctctacgcgggtctcagggcagccctgcagcgggccaggccggagattgagagtgacatggaggtgtttgat

SEQ ID NO: 165984 - DNA, 80 bp, synthetic construct
  source 1..80: mol_type = other DNA
gcctgttttatacacccttccccaatcgtaacttagaagctcaccacatacggtcaataggtgactcagtatgccaactg

SEQ ID NO: 165985 - DNA, 80 bp, synthetic construct
  source 1..80: mol_type = other DNA
ctaacgatgaactagaacttgtaaggtacctaggctgtagctttaccttgtacagagagcaaaatgttgactttttattt

SEQ ID NO: 165986 - DNA, 80 bp, synthetic construct
  source 1..80: mol_type = other DNA
tggatgtggatttaccaatcagatcagtgaaaaagttgctgagatcacatcgatggtaagcaacgtcattacagaaaagc

SEQ ID NO: 165987 - DNA, 80 bp, synthetic construct
  source 1..80: mol_type = other DNA
gagctctaccggcacctacaggtcaagatacgcaggtaagtagccatcgattggatactggtaaagttccagcactccaa

SEQ ID NO: 165988 - DNA, 80 bp, synthetic construct
  source 1..80: mol_type = other DNA
tcacccatgaggcattgagcaagggagaagtggccaaggagtttacgtcgactgacgccgtagacggggttcaaacagca

SEQ ID NO: 165989 - DNA, 80 bp, synthetic construct
  source 1..80: mol_type = other DNA
ctatgaaaactcaaagaatgatccatacccatttgagtattacacaggactgtattcaagcatttttctagctgcaggaa

SEQ ID NO: 165990 - DNA, 80 bp, synthetic construct
  source 1..80: mol_type = other DNA
acgtgtagtaacctgcatgcgcaagggtcacattggggattatcagagagacggaggtgttggagtcatttacccattct

SEQ ID NO: 165991 - DNA, 80 bp, synthetic construct
  source 1..80: mol_type = other DNA
gaaactagtagatccagataacatgaatttggaaattaccgttctccagttggacagaaatgaaaagttcagggatatta

SEQ ID NO: 165992 - DNA, 80 bp, synthetic construct
  source 1..80: mol_type = other DNA
catggtaatacatccagattaaaatcgccagaaacaggaggagccaaaggagatcaaccaatagagtccaccagttttgt

SEQ ID NO: 165993 - DNA, 80 bp, synthetic construct
  source 1..80: mol_type = other DNA
ccccacggtggacccgggggccatggtggagagcatcttgctggtcagagccagactgggtggtgtctgcagcaaaagag

SEQ ID NO: 165994 - DNA, 80 bp, synthetic construct
  source 1..80: mol_type = other DNA
cttccaccatattccagcttatacaggcaatggatagatgaatttatttgaatgatatagtattatgtttgcagtaggac

SEQ ID NO: 165995 - DNA, 80 bp, synthetic construct
  source 1..80: mol_type = other DNA
cttcagttacaaagacgactataaaaacacttgcatccaagcaaagtacaaatttaacttcagatggggtggtaatatgc

SEQ ID NO: 165996 - DNA, 80 bp, synthetic construct
  source 1..80: mol_type = other DNA
atcgtggagtacaaaacccaggacacgactcccgacaagatgtatgatagctgggttatcaataccagacaagtggcgca

SEQ ID NO: 165997 - DNA, 80 bp, synthetic construct
  source 1..80: mol_type = other DNA
gaaactacgcgctccacagcgacgacataaccccccagaacacccccttcgggggaggactcagtactacctcctggagc

SEQ ID NO: 165998 - DNA, 80 bp, synthetic construct
  source 1..80: mol_type = other DNA
tcctctatctcatctcccagatcagggccatcaagcccatccctctccgcgacggtacctacacctacaccggcaagcag

SEQ ID NO: 165999 - DNA, 80 bp, synthetic construct
  source 1..80: mol_type = other DNA
cgcttctttgtggtaaggcggtagttcttcaaaaccggcgcacatcagcaagcctctcacttaacatggttgtctcacaa

SEQ ID NO: 166000 - DNA, 80 bp, synthetic construct
  source 1..80: mol_type = other DNA
caagtattacactcaaatgtcagttacaccaagtactgaaaacgcagaaaaagatactgaaattctaaatcatctatatt

SEQ ID NO: 166001 - DNA, 80 bp, synthetic construct
  source 1..80: mol_type = other DNA
agcatacagactgcgaaatatggtcctctgcccaccctgaccacgctgcccacctcccggtgcccagggtcatcacatac

SEQ ID NO: 166002 - DNA, 80 bp, synthetic construct
  source 1..80: mol_type = other DNA
ttttgagcaaatctgataccagattggaagaacccatagagtgcttaattaagaaatcagcctcaaaatacagagttaac

SEQ ID NO: 166003 - DNA, 80 bp, synthetic construct
  source 1..80: mol_type = other DNA
tacttgacacatacaaaggtattgatctggacaaactgagaataatagcttatggtgatgatatcatagcatcataccca

SEQ ID NO: 166004 - DNA, 80 bp, synthetic construct
  source 1..80: mol_type = other DNA
gttattctataaatatggtagtagagcagatgagagaagaagcagataacaggtccaaaattaggcacaatcttgaggca

SEQ ID NO: 166005 - DNA, 80 bp, synthetic construct
  source 1..80: mol_type = other DNA
gtcaataatggtcaataacccacacctataggctaagctataccatcacctatagcataaggaagcgggggtgtatagac

SEQ ID NO: 166006 - DNA, 80 bp, synthetic construct
  source 1..80: mol_type = other DNA
tacccctatccacgcccagggaaatggacatcctcgggtttgtgtcagcttgcaatgatttcagcgtgcgcttgttacgt

SEQ ID NO: 166007 - DNA, 80 bp, synthetic construct
  source 1..80: mol_type = other DNA
cacggacccggaggctgcgtctcgtgacatggccaggcctggtgccagccgaccacgtcccgtgtcccagccgaggccgc

SEQ ID NO: 166008 - DNA, 80 bp, synthetic construct
  source 1..80: mol_type = other DNA
atatgaatgagtacaaacagtataacgctgcgggagggggctttagcacaatgctttttaccatgcaaaacctgtatgaa

SEQ ID NO: 166009 - DNA, 80 bp, synthetic construct
  source 1..80: mol_type = other DNA
tggattcactccattgaacacattcactcccagtatcatttcaatagtaatcagaattagacagttgtatcacaatgggt

SEQ ID NO: 166010 - DNA, 80 bp, synthetic construct
  source 1..80: mol_type = other DNA
tctcaaagaccggaccgtacgcatacagaggcgaactgaaaaactgttgcctgactgtatactacaactttatttttaac

SEQ ID NO: 166011 - DNA, 80 bp, synthetic construct
  source 1..80: mol_type = other DNA
gttccaagttaacaatgaactatggcagagtgttaaggcatgtgtcaaatctaaattcagagagatttttggaatgaatg

SEQ ID NO: 166012 - DNA, 80 bp, synthetic construct
  source 1..80: mol_type = other DNA
aaaccacgagtggcagcaggcctaagaagctcctcagcaacatggagacctcgaagggaaactggcaggagcagggagtc

SEQ ID NO: 166013 - DNA, 80 bp, synthetic construct
  source 1..80: mol_type = other DNA
agttcacgtatactcagcatgttcctagcatggagaatatcaattatgtaagtcattaaagatacagtgaaacaatctct

SEQ ID NO: 166014 - DNA, 80 bp, synthetic construct
  source 1..80: mol_type = other DNA
gaattttgtataaaatagggcaagtccttggaattcatgtaggaggaaatgggagagatggttttgctgccatgttattg

SEQ ID NO: 166015 - DNA, 80 bp, synthetic construct
  source 1..80: mol_type = other DNA
cagcactacaaatgaaaaataacaaaacacaaggatatgttatctatgcagataactttgccaacggaaacatgccctac

SEQ ID NO: 166016 - DNA, 80 bp, synthetic construct
  source 1..80: mol_type = other DNA
ctttggtatccccaaccaattccaccccaacactaccaattaccatcaccattgcacccatgtttacggagtttactgga

SEQ ID NO: 166017 - DNA, 80 bp, synthetic construct
  source 1..80: mol_type = other DNA
agattgatagtgtcattccaatgaatgctgtggcgacaaaggttaaccaaatggaagcataccccatccctcttacacac

SEQ ID NO: 166018 - DNA, 80 bp, synthetic construct
  source 1..80: mol_type = other DNA
tagctttgacactaaacccgggggcagagctaaaattagagtcaaaataaagccccccactcttttagaggacaagtggt

SEQ ID NO: 166019 - DNA, 80 bp, synthetic construct
  source 1..80: mol_type = other DNA
ctgcaaaatttctacaacagtgtaattggaaactctataaatttaacagatgaaaaatttgagtccatattcagaaacta

SEQ ID NO: 166020 - DNA, 80 bp, synthetic construct
  source 1..80: mol_type = other DNA
gcacatataaccctctaaatgacaaaggaataggcaaccacgtatggtttcagtacaacagcaaggcagacacacaaata

SEQ ID NO: 166021 - DNA, 80 bp, synthetic construct
  source 1..80: mol_type = other DNA
cttatctcttaaatttctaccactgtatgcatctgaagcacgtaggattaaaaatctttataacaagtgcaataatgtca

SEQ ID NO: 166022 - DNA, 80 bp, synthetic construct
  source 1..80: mol_type = other DNA
aagggctcaccagctatcttccaacatacaatgaggaaggtactagaccccttcagaaaagccaatgaggatgtaattat

SEQ ID NO: 166023 - DNA, 80 bp, synthetic construct
  source 1..80: mol_type = other DNA
atggtggccgggctgtaaaattctggaggacggagagggcggccccggagttgttatcaaagaggcactggaggatgttg

SEQ ID NO: 166024 - DNA, 80 bp, synthetic construct
  source 1..80: mol_type = other DNA
aatccaaaacaaggctatgtgttctatgacaccctgtttggagatggaaaaatgcctacaggcacaggcctggtaccttt

SEQ ID NO: 166025 - DNA, 80 bp, synthetic construct
  source 1..80: mol_type = other DNA
gcaatacatgcctgggacttcagacgtgcctgtttggcccaaaagctattaagagaatgcaaacagaaccgttctctact

SEQ ID NO: 166026 - DNA, 80 bp, synthetic construct
  source 1..80: mol_type = other DNA
ggggcttccttccactgtttaactgctccagaaccgcctatcatagaaactttgtagaccacatggacgacgtgtacccc

SEQ ID NO: 166027 - DNA, 80 bp, synthetic construct
  source 1..80: mol_type = other DNA
ccagattggaagttaacttacatgactctctgttttcaaaatacaaaggaaatgttgaagttaacatcacagaaaacatg

SEQ ID NO: 166028 - DNA, 80 bp, synthetic construct
  source 1..80: mol_type = other DNA
ggtgccaaacctaaccgcagtggagactggtcatacatcgcaggtagtgcccggcgacaccatgcaaaccagacacgtgg

SEQ ID NO: 166029 - DNA, 80 bp, synthetic construct
  source 1..80: mol_type = other DNA
actggtcatctgactcattgtgcaggctaccagcatgatgaaattatcctacatggacattcaatcaagtatttggaaca

SEQ ID NO: 166030 - DNA, 80 bp, synthetic construct
  source 1..80: mol_type = other DNA
ctgtgccacctctgcagtcgcctagcgctgaagcatgcgggtatagtgatagagtagcgcagttaacggttggcaactca

SEQ ID NO: 166031 - DNA, 80 bp, synthetic construct
  source 1..80: mol_type = other DNA
ctatggaggtggaatgaccaccactatgtttaatttaaaggtgctgtacgaacagtttcagctgcaccaaaacttttgga

SEQ ID NO: 166032 - DNA, 80 bp, synthetic construct
  source 1..80: mol_type = other DNA
tactattgcatggacaaccaggatgtggtaagtccttggcctccaaagttatcgctagaggcctcactagtgagagcaat

SEQ ID NO: 166033 - DNA, 80 bp, synthetic construct
  source 1..80: mol_type = other DNA
ttccaggtgccctacatagaaaggcaagccaatgatggatggtttaggaagttcaatgatgcttgcaatgcagctaaagg

SEQ ID NO: 166034 - DNA, 80 bp, synthetic construct
  source 1..80: mol_type = other DNA
tgcatcgcataggaatggcggaacgtatgtggtgtgaccggaacagagaacgtcacaccgtcagcagcagcggcggcaac

SEQ ID NO: 166035 - DNA, 80 bp, synthetic construct
  source 1..80: mol_type = other DNA
agacatatagactggtggatacacacattactcaagattaaagacatggttctcagtgtctttaaaccaagcattgagag

SEQ ID NO: 166036 - DNA, 80 bp, synthetic construct
  source 1..80: mol_type = other DNA
gatgtgtggtcaacaggcatggggttatggaaacaagtgttgagcacttcttttctcgttcgggcctagcaggaatcttg

SEQ ID NO: 166037 - DNA, 80 bp, synthetic construct
  source 1..80: mol_type = other DNA
accacaaacgaacaacccttgtgtaactttccaaatattgcatgaggtttaccacgacttcctctctattacctcacaac

SEQ ID NO: 166038 - DNA, 80 bp, synthetic construct
  source 1..80: mol_type = other DNA
aggaaatgggcatctttggtgaaaatatgttttaccactacttgggcagaagtggttatacaatacatgtacagtgtaat

SEQ ID NO: 166039 - DNA, 80 bp, synthetic construct
  source 1..80: mol_type = other DNA
cgacgtcccctgggacatcctgggaatctttgcaggttctgggtccagggaaggtaagaaaagtggcggtggttctgggc

SEQ ID NO: 166040 - DNA, 80 bp, synthetic construct
  source 1..80: mol_type = other DNA
ctactattaagttactctccccctggtgctgcccccccaaaggatcgtaaagacgcaatgcttggcacccacgtcatctg

SEQ ID NO: 166041 - DNA, 80 bp, synthetic construct
  source 1..80: mol_type = other DNA
attaaacacaattcatgtgtggtcaccacttcaaatggtaaatttacaggcctaggaatctatgataggacattgattgt

SEQ ID NO: 166042 - DNA, 80 bp, synthetic construct
  source 1..80: mol_type = other DNA
cgtggggtttcccccttaggggacccggtttcttaagatgtttttcatcttcgcacgcgatgtactacatcaaagggtcg

SEQ ID NO: 166043 - DNA, 80 bp, synthetic construct
  source 1..80: mol_type = other DNA
tcagttacaccagataccgcaggtacaaaaaaagacgacgaaattcttgaccacttatactcaactgcagaatactatca

SEQ ID NO: 166044 - DNA, 80 bp, synthetic construct
  source 1..80: mol_type = other DNA
caagtggttcacaacagtttatgaccacagaagatgaacagtcacctaatatactaccagagtacagttcaacaaaggag

SEQ ID NO: 166045 - DNA, 80 bp, synthetic construct
  source 1..80: mol_type = other DNA
actgaaagcaaacacaaatgctgtcaattctctacccattacagtgaccattgccccagacaagtcagagttttcaggcg

SEQ ID NO: 166046 - DNA, 80 bp, synthetic construct
  source 1..80: mol_type = other DNA
tttcctatagcgttaaaagacatggggctattcggccaaaatatgttatatcactacttaggccgggcaggatacacgat

SEQ ID NO: 166047 - DNA, 80 bp, synthetic construct
  source 1..80: mol_type = other DNA
aatggtacactactaggcaatttattaatatttccccatcagttcatcaatttgaggaccaataacaccgccacattggt

SEQ ID NO: 166048 - DNA, 80 bp, synthetic construct
  source 1..80: mol_type = other DNA
agggcaacgtaactccatactttcaactttatagtacaacacgatcaaaagaccaaacagactaaaaataaatcgcataa

SEQ ID NO: 166049 - DNA, 80 bp, synthetic construct
  source 1..80: mol_type = other DNA
gttaagttactataggtgtttaagtttagtctcaatagttaagttctagtataggtttaagtccataagcagattactaa

SEQ ID NO: 166050 - DNA, 80 bp, synthetic construct
  source 1..80: mol_type = other DNA
aatggttaacagtgtcatcactgaaaagctactgaagaacctaatcaaattgatcagtagcctagtaataattatcagga

SEQ ID NO: 166051 - DNA, 80 bp, synthetic construct
  source 1..80: mol_type = other DNA
tggaagactttggctgccacgtctcgtaaaccaaccagtcataaaaactatacaaccacatcatctacagatcatctgta

SEQ ID NO: 166052 - DNA, 80 bp, synthetic construct
  source 1..80: mol_type = other DNA
attaagagaatgctccaacaacctacagctaatgaactttatccgtcagcacccaagaggcccaagaaacaaacagagcc

SEQ ID NO: 166053 - DNA, 80 bp, synthetic construct
  source 1..80: mol_type = other DNA
gttcaaagattgctaacgcatccagggaagtagtgtcatggttctcagacaaaatcaaatctatgcttagttttgtttta

SEQ ID NO: 166054 - DNA, 80 bp, synthetic construct
  source 1..80: mol_type = other DNA
ttgcaacaagagtgagtgattcatatgatatgtataataagcaagggattaaattagaaataacagctgtaatactagat

SEQ ID NO: 166055 - DNA, 80 bp, synthetic construct
  source 1..80: mol_type = other DNA
cctatcgtagacagtactttacctgaccagtaacgtcctacggataatcgtaccgcagccctacagtttatgaaagagaa

SEQ ID NO: 166056 - DNA, 80 bp, synthetic construct
  source 1..80: mol_type = other DNA
gttacctacattaaagatgaattaagaagtgcagataaggtaaggctgggcaaaagtagattgattgaagcctctagttt

SEQ ID NO: 166057 - DNA, 80 bp, synthetic construct
  source 1..80: mol_type = other DNA
ccataatggtggtctgacgactggtgggcaaaccggcgccgctggccacacgcggcacctgcacgtggaacagcattttt

SEQ ID NO: 166058 - DNA, 80 bp, synthetic construct
  source 1..80: mol_type = other DNA
atgtgctgcgagtttaacgggctcagaaacattaccataccatcaacccaaggcctccctgtgatgaacacaccgggcag

SEQ ID NO: 166059 - DNA, 80 bp, synthetic construct
  source 1..80: mol_type = other DNA
cgtcccagaaaaaagctaatactaacccagtggcagcccaccacaataagacactgtagaataaggggcatagcccccct

SEQ ID NO: 166060 - DNA, 80 bp, synthetic construct
  source 1..80: mol_type = other DNA
cctcatcatattcgagcccctcgttggtttccccgcaggccctcccttcttcgaccgctattagcttagtagtctccagg

SEQ ID NO: 166061 - DNA, 80 bp, synthetic construct
  source 1..80: mol_type = other DNA
gaacatatcaaggtagcagtttctcattattcagcacaattaatgacattagacattgattcaagtcccatttccttgga

SEQ ID NO: 166062 - DNA, 80 bp, synthetic construct
  source 1..80: mol_type = other DNA
ctaacaccccggcttcttctggtgtaaatacacaagaggtaccagcattaaccgcagtggagacgggtgctagtgggcaa

SEQ ID NO: 166063 - DNA, 80 bp, synthetic construct
  source 1..80: mol_type = other DNA
gctaatgccatagtcacggatgctgcagaggttcagggacttgtcctctatcgtctcatacagcttgttagtattgtgtt

SEQ ID NO: 166064 - DNA, 80 bp, synthetic construct
  source 1..80: mol_type = other DNA
taaaaagaaaaactggaaaaagatcatgacaatgagtacaaaatacaagtggaccagaaccaaaattgacatagcagaag

SEQ ID NO: 166065 - DNA, 80 bp, synthetic construct
  source 1..80: mol_type = other DNA
cagggggcaaatctagaattaaggttaaaattaagccccctgctctatttgaagacaagtggtacactcaacaagacttg

SEQ ID NO: 166066 - DNA, 80 bp, synthetic construct
  source 1..80: mol_type = other DNA
aagccgttatcttcagggaccgaaacacatgtcagacatacactctagcacaaatttataaccaaatacttgatgaagat

SEQ ID NO: 166067 - DNA, 80 bp, synthetic construct
  source 1..80: mol_type = other DNA
tggatttgctccattgattcaattcacgcctgatttgatatctgtagtgttattgattagaaaaagctaccataatgggt

SEQ ID NO: 166068 - DNA, 80 bp, synthetic construct
  source 1..80: mol_type = other DNA
tagtcgtcgtcatcgaaaggcgcgccggccgcgtccacgggcacgctgttgggtgggcacgcgcttttgaagaaatagac

SEQ ID NO: 166069 - DNA, 80 bp, synthetic construct
  source 1..80: mol_type = other DNA
tttcagagggtctttaatattaagactgtctgtgtattctagtactttcaacaggggtaggttaaggatgggtttctttc

SEQ ID NO: 166070 - DNA, 80 bp, synthetic construct
  source 1..80: mol_type = other DNA
taggatgggcatggtggacttgcagcagggtaatattcccattaagaggagacagtcgtctagagatacaggcatattgg

SEQ ID NO: 166071 - DNA, 80 bp, synthetic construct
  source 1..80: mol_type = other DNA
acgacgagggagctcctcgagcgaaagctccgagagcagcaactcctccagctccagctccagcgcctcacagtcagcct

SEQ ID NO: 166072 - DNA, 80 bp, synthetic construct
  source 1..80: mol_type = other DNA
aggtcagatgactttgttgtgaacaagggcttcgggggctccttcgccacagagaccttctccctgaaggtcctgtatga

SEQ ID NO: 166073 - DNA, 80 bp, synthetic construct
  source 1..80: mol_type = other DNA
tgggtaccgcctctagataatgttacccagcgtgagagaagctggttcaacagcttttttcagtctcacagagctttttg

SEQ ID NO: 166074 - DNA, 80 bp, synthetic construct
  source 1..80: mol_type = other DNA
cgacaacctacaatgtatctttcaagctaaacttcaaataaactaggccgtgggagtctcacttgtcggtgtctacctct

SEQ ID NO: 166075 - DNA, 80 bp, synthetic construct
  source 1..80: mol_type = other DNA
ttggggccgtggtgtaccctatggggaccgtatacccgagtctcattaagacaccgtgtagcattcggctgttctttgac

SEQ ID NO: 166076 - DNA, 80 bp, synthetic construct
  source 1..80: mol_type = other DNA
atttgaaatgttcacttatacgatgtttgattcagaaataactttggtgccatcgattgcagccaaagcatatgacatac

SEQ ID NO: 166077 - DNA, 80 bp, synthetic construct
  source 1..80: mol_type = other DNA
gtagcattcgttatccgcatgactactacgcgactgctagtagcattctgtgtgacatgtggggtttcgttcagcagaga

SEQ ID NO: 166078 - DNA, 80 bp, synthetic construct
  source 1..80: mol_type = other DNA
gcgtccgaattcactcgtgatgctgccacggctgcccccggcaaggtgcagactgcagtaattaatgcggcgatgggggt

SEQ ID NO: 166079 - DNA, 80 bp, synthetic construct
  source 1..80: mol_type = other DNA
aaacaatccaaacactcaaaattggagcgtgaattcaattatgtacaatattgtctaaattgtgtaggtagcatagtatt

SEQ ID NO: 166080 - DNA, 80 bp, synthetic construct
  source 1..80: mol_type = other DNA
gcaagacaaccatgacaagtattggaatgccagaaatgaccaaactttcagcgagtcaaaggcccttagtcacaaaactg

SEQ ID NO: 166081 - DNA, 80 bp, synthetic construct
  source 1..80: mol_type = other DNA
cccacgtggttggtcacgtgacgtgtgcgtcacagccgccattttagttcacaaaatggccgacttccttcctctttttt

SEQ ID NO: 166082 - DNA, 80 bp, synthetic construct
  source 1..80: mol_type = other DNA
cacatcccaaactgcacaaactataagacaaacaattaaaaataacatgacttcttactttaaaaaaatagaagaagaga

SEQ ID NO: 166083 - DNA, 80 bp, synthetic construct
  source 1..80: mol_type = other DNA
gattcctggatctacaagacctcttccttcaatggtctttgtggcgctccggtgatgtgcatctccggtggccttgtgtc

SEQ ID NO: 166084 - DNA, 80 bp, synthetic construct
  source 1..80: mol_type = other DNA
cttctcactcttcctctccccgttcccagcgcggtggcagcttggggggtgagggcaaattggagtagttggcgttgagc

SEQ ID NO: 166085 - DNA, 80 bp, synthetic construct
  source 1..80: mol_type = other DNA
actatactgcaggtggctacattacatgtttctaccaaaccaaagttgttgtaccactgcacacaccgactaaaatggat

SEQ ID NO: 166086 - DNA, 80 bp, synthetic construct
  source 1..80: mol_type = other DNA
ttcctaattgtaacataattagaagcatgacatacagtccaataggaggcggttaatccataaccgtcatagacaagcac

SEQ ID NO: 166087 - DNA, 80 bp, synthetic construct
  source 1..80: mol_type = other DNA
taccttcactgcctaaaccggcgttacatgtatgtgcaaccataagggagatcaataaaccaaagataaatcgcatccta

SEQ ID NO: 166088 - DNA, 80 bp, synthetic construct
  source 1..80: mol_type = other DNA
taaggttgcagaggtcgagggagacagacagctggccgaagcgtatgaatcaattgctaaactggttaatgacaataact

SEQ ID NO: 166089 - DNA, 80 bp, synthetic construct
  source 1..80: mol_type = other DNA
acaactcagggcagagaatgagacgagaggcaaagtcaaaaccaacctcagagctatattccaagggctaggagacacca

SEQ ID NO: 166090 - DNA, 80 bp, synthetic construct
  source 1..80: mol_type = other DNA
gatcacaacaagaatatatcacaaagcaaagcatgtcaaagtttggtgtccaagaccacccagagctgtcgagtacacac

SEQ ID NO: 166091 - DNA, 80 bp, synthetic construct
  source 1..80: mol_type = other DNA
gtaaaggtcaacaaacttgaaaaagggctccaggatcttgccccactatacgcactagaggccaaacaagtgcgtgagat

SEQ ID NO: 166092 - DNA, 80 bp, synthetic construct
  source 1..80: mol_type = other DNA
ttgagtggatgaaatcaatgttgccacaagcacaattgaaaatcaaataccttaatgaactcaagaaattgaatctttta

SEQ ID NO: 166093 - DNA, 80 bp, synthetic construct
  source 1..80: mol_type = other DNA
acgcaaaacaacggccagaggaaggggcaagacgcggaaaagaggaagtccctaggggaccgcggaggaaacgacagacg

SEQ ID NO: 166094 - DNA, 80 bp, synthetic construct
  source 1..80: mol_type = other DNA
tccttttggcgcagtcgcgagctgagctacgatgaccacgaagtcgaactataccgggcgttggacgcttatcgggcgcg

SEQ ID NO: 166095 - DNA, 80 bp, synthetic construct
  source 1..80: mol_type = other DNA
gattagatagcgcagcctcagatataaatgaaccgatattttgtctctcactctcgccagctagtgatcagagactacag

SEQ ID NO: 166096 - DNA, 80 bp, synthetic construct
  source 1..80: mol_type = other DNA
tctattgcccctgataaatcagaattctccggtgctagacaaagtaacaaaacccaaggcataccaatcagaatgcccag

SEQ ID NO: 166097 - DNA, 80 bp, synthetic construct
  source 1..80: mol_type = other DNA
acgctgctacaaccaccgtgtcgtccgcgttcgtcgtccccagggaccggcgtggcaggagcttccgccgtcccacacgg

SEQ ID NO: 166098 - DNA, 80 bp, synthetic construct
  source 1..80: mol_type = other DNA
ccggttctacacacttgaatcagtcaattggcagaaagaaagtgcaggatggtggtggaaatttcccgatgcgctgagag

SEQ ID NO: 166099 - DNA, 80 bp, synthetic construct
  source 1..80: mol_type = other DNA
ttattactcaaacaaaccactaaggactgttagagacaacaacagtcttggctatttaatgtgtaaacctttcttaacag

SEQ ID NO: 166100 - DNA, 80 bp, synthetic construct
  source 1..80: mol_type = other DNA
aaattataactacaataaaaaggaattagaaacatggctatacacaacaggcagcctataccacacctttcgtactcaag

SEQ ID NO: 166101 - DNA, 80 bp, synthetic construct
  source 1..80: mol_type = other DNA
caaggtcctatttctcttaagaacccaccgcctccagcgatagcagacttgttaaatgctgtcagaacaccagaagtcat

SEQ ID NO: 166102 - DNA, 80 bp, synthetic construct
  source 1..80: mol_type = other DNA
ctggccaggcatgtacataaatgtaatttataacccgtacaatgacaaaggaataggcaacaaagtatggatagactggt

SEQ ID NO: 166103 - DNA, 80 bp, synthetic construct
  source 1..80: mol_type = other DNA
gggattcaattgaagatatgattaattcagcagtctctaatgcactcaacaatgctatctccagaccatcaacccaaact

SEQ ID NO: 166104 - DNA, 80 bp, synthetic construct
  source 1..80: mol_type = other DNA
tatcctaattggtgagggaccttgtgaaccaggtgattgtggaggaaagcttttatgcaaacatggtgttataggtatag

SEQ ID NO: 166105 - DNA, 80 bp, synthetic construct
  source 1..80: mol_type = other DNA
ccccctccttacatagcccctccacctatagtggaggacctgctttttcctaacacccaaaaaaaaaaaaagttctccaa

SEQ ID NO: 166106 - DNA, 80 bp, synthetic construct
  source 1..80: mol_type = other DNA
gcaaggctcttagggtattcactcttaaaatgcacttttctagaatctctcgctcgaaaaggaaagtgtttctgccggca

SEQ ID NO: 166107 - DNA, 80 bp, synthetic construct
  source 1..80: mol_type = other DNA
acgtggaaagggttggcgtgacaacccggaagccaatcctctcacgtggcctgtcacgtggctaccacgtcatcggcgcc

SEQ ID NO: 166108 - DNA, 80 bp, synthetic construct
  source 1..80: mol_type = other DNA
tctcccatttaatttagaagcacgcgccaagacggtcaatagggagcccagtaagccaattgggccatgaccaagcactt

SEQ ID NO: 166109 - DNA, 80 bp, synthetic construct
  source 1..80: mol_type = other DNA
ctctaagttttattttgacacttaataccaaaagatgggagcacaagtttcgacccaaaagactggcgcacacgaaacag

SEQ ID NO: 166110 - DNA, 80 bp, synthetic construct
  source 1..80: mol_type = other DNA
cgtcccgcgagtccccgtgcccagcacgcccagaagccctccgtccccacacccgtgtcccccggtcccgcacaaagcgc

SEQ ID NO: 166111 - DNA, 80 bp, synthetic construct
  source 1..80: mol_type = other DNA
gttgagaatgggtttctttccaaatctaactcaggatgagcaacaagaactggacaacgcaatatatacaatatgtgata

SEQ ID NO: 166112 - DNA, 80 bp, synthetic construct
  source 1..80: mol_type = other DNA
caataagtggtggttcactgaccactttttaagatccctgcctcttctgcactttttgttataaccagaatagcatactc

SEQ ID NO: 166113 - DNA, 80 bp, synthetic construct
  source 1..80: mol_type = other DNA
cggtcaatgaggatatgctttacccaaggcaaaaaccttaaagatcgttatccgcacattaactacgcaaagcctagtac

SEQ ID NO: 166114 - DNA, 80 bp, synthetic construct
  source 1..80: mol_type = other DNA
acctataactcagtggaacccctccgtggtcagaaaatgcgtggtaaccggatacatacccctcctaatctgtggaacgg

SEQ ID NO: 166115 - DNA, 80 bp, synthetic construct
  source 1..80: mol_type = other DNA
ccttgttaatctgtctcccaacaccatgtttgattctacctttactactctccttcaatgcttcactttcttcactgctg

SEQ ID NO: 166116 - DNA, 80 bp, synthetic construct
  source 1..80: mol_type = other DNA
tagctccaaggatcccaaagttatagattactgtgtagagcaaggttgggtgggaaaagcacaatcaactatagagagag

SEQ ID NO: 166117 - DNA, 80 bp, synthetic construct
  source 1..80: mol_type = other DNA
agaagaaagatttgataccaaaggacaggaatcttgcaaaacttaaatgtgctatggaaaaatatggactggatctacca

SEQ ID NO: 166118 - DNA, 80 bp, synthetic construct
  source 1..80: mol_type = other DNA
gcagctactctgggtcgccctccgcgttctcggcaccccgggggccccggcactccgcagataagaaacctgccagcgct

SEQ ID NO: 166119 - DNA, 80 bp, synthetic construct
  source 1..80: mol_type = other DNA
atgcgtcgtatgccgccactttgcatcattacagacgcctataaagaaaccacgcatcagggtggcgcaactttcacgtg

SEQ ID NO: 166120 - DNA, 80 bp, synthetic construct
  source 1..80: mol_type = other DNA
tacttcaaacctaagcacgttagagtctgggtaccacgaccaccacgcctgagtccctacattaagtctagcaatgtcaa

SEQ ID NO: 166121 - DNA, 80 bp, synthetic construct
  source 1..80: mol_type = other DNA
acacctgacacatactctctagctgggtttataacatgttggtatcaaactaatcttgtgttccctccagacactccaac

SEQ ID NO: 166122 - DNA, 80 bp, synthetic construct
  source 1..80: mol_type = other DNA
tacacagagataatatacaacccatacaaagataagggcacaggcaaccacatatggatagactcactcactagaaataa

SEQ ID NO: 166123 - DNA, 80 bp, synthetic construct
  source 1..80: mol_type = other DNA
cctaaactacaaaaaccttcagcatccaacaaccaggtaacacaagagacgtactttgctccactagatgcactctgggg

SEQ ID NO: 166124 - DNA, 80 bp, synthetic construct
  source 1..80: mol_type = other DNA
aatccagcgagacggagacagaccagacagaggcacaaagcgaaagcgagaagacgacgccggagttcaagctccagctc

SEQ ID NO: 166125 - DNA, 80 bp, synthetic construct
  source 1..80: mol_type = other DNA
gatgggctcaccccactaccagaaaagggattaacgacttatggatttggacaccaaaacaaagctgtgtacacagctgg

SEQ ID NO: 166126 - DNA, 80 bp, synthetic construct
  source 1..80: mol_type = other DNA
tcaccaaaatccaggggtcataactgggtcagccgttgggtgtgatccagacacattttggtctgtcataccatgtctta

SEQ ID NO: 166127 - DNA, 80 bp, synthetic construct
  source 1..80: mol_type = other DNA
aatcagggataaatttggatgacacaccagaagcagggggggcgtcacatgatccagtgtactccatgaatggaacctta

SEQ ID NO: 166128 - DNA, 80 bp, synthetic construct
  source 1..80: mol_type = other DNA
gaaataactagtgcctactcaaaaccaaactcaaataacctaaaagaattatacaaagaattgttcacaaaagccacatc

SEQ ID NO: 166129 - DNA, 80 bp, synthetic construct
  source 1..80: mol_type = other DNA
ggtctagtgatattacctctctgccagctagactttgcttccagctccaccacggagatacctatcacagtgaccattgc

SEQ ID NO: 166130 - DNA, 80 bp, synthetic construct
  source 1..80: mol_type = other DNA
tgcctcaacattgacctcccccaatttgacgcagacggacaatttgaaactaattcaacttatagtagagaaaatgcaaa

SEQ ID NO: 166131 - DNA, 80 bp, synthetic construct
  source 1..80: mol_type = other DNA
ccaaactatttcaagacaagcggtacacccagcaggacctgtgttcagttcctcttgtccaactgaacgtgaccgcagct

SEQ ID NO: 166132 - DNA, 80 bp, synthetic construct
  source 1..80: mol_type = other DNA
aaacacatcctggtgaggcaggccacaccataacagcatctcagcagcggggtgagcacaatcctgatgagaacccattt

SEQ ID NO: 166133 - DNA, 80 bp, synthetic construct
  source 1..80: mol_type = other DNA
agcactatgaggttctccctaaaagtactctttgaagaacacctcagacacttaaacttttggacaaagagcaaccagga

SEQ ID NO: 166134 - DNA, 80 bp, synthetic construct
  source 1..80: mol_type = other DNA
gatttatgatagaatctgtgttatccctacacattcacaaccagaaaatgaggttcttcttaatggttacaatgttaaaa

SEQ ID NO: 166135 - DNA, 80 bp, synthetic construct
  source 1..80: mol_type = other DNA
tggtcccactttagtcaatccggggtgtacgggtacaccacgttaaataatatgggatctctatacctcaggcatgtgaa

SEQ ID NO: 166136 - DNA, 80 bp, synthetic construct
  source 1..80: mol_type = other DNA
acgaaagtgagtgaggccagacttcgccataaggcctttatcttctcgccattggatcgtggggagggggtacgtaggct

SEQ ID NO: 166137 - DNA, 80 bp, synthetic construct
  source 1..80: mol_type = other DNA
tgcgttttaccaaacagccatagtggtcccttcaggtgcacccaaaacgatgagcatgttggcttttgtcagcgcgtgca

SEQ ID NO: 166138 - DNA, 80 bp, synthetic construct
  source 1..80: mol_type = other DNA
accaccaggcattgaagctccagaatccctcaatgacaagagatggaatggagcttctaaccccagtgttttttaccaac

SEQ ID NO: 166139 - DNA, 80 bp, synthetic construct
  source 1..80: mol_type = other DNA
ccaacttgctgctacaggccaaacacagacgaaaaatccccagttttaaaaccaggccttttggtaaaaagacagttacc

SEQ ID NO: 166140 - DNA, 80 bp, synthetic construct
  source 1..80: mol_type = other DNA
ggtagctgacacgatacgcagtggaccctccaattccgaagcagttcccgcgctcacagccgctgaaaccgggcatacct

SEQ ID NO: 166141 - DNA, 80 bp, synthetic construct
  source 1..80: mol_type = other DNA
agtgttcaacggaacgctactgggtgaaatccttgactattataccctctggtcagggagcatcaacctaacatgcatga

SEQ ID NO: 166142 - DNA, 80 bp, synthetic construct
  source 1..80: mol_type = other DNA
agagatctgtgaaaaaaatggaaaaagagggacaactagaggaagcgccccctactaatccctacaacacacccaccttc

SEQ ID NO: 166143 - DNA, 80 bp, synthetic construct
  source 1..80: mol_type = other DNA
aaaaacatgccgtggagaccgccggcgcacgacatccagggcagagagagccagttctttgcgggatgttttcacatgca

SEQ ID NO: 166144 - DNA, 80 bp, synthetic construct
  source 1..80: mol_type = other DNA
tcatagcagctctgtaccccgagtacatctacaccgtcctcaagtacccggtgcaaatgtcactaccctccctcacagct

SEQ ID NO: 166145 - DNA, 80 bp, synthetic construct
  source 1..80: mol_type = other DNA
tttatcagcataggcaatgcgtacagcaacttttatgacggatggtcacacttccaccagaatggcgtgtacggatacaa

SEQ ID NO: 166146 - DNA, 80 bp, synthetic construct
  source 1..80: mol_type = other DNA
acataaagcaagggccaaaagaacccttccaaagctatgtagatagattctacaaaagcttacgggcagagcaaacagac

SEQ ID NO: 166147 - DNA, 80 bp, synthetic construct
  source 1..80: mol_type = other DNA
tcctccaggggcgcctagacctagttcttgggatgattacacctggcagtcatcatcaaacccttccatattctacatgt

SEQ ID NO: 166148 - DNA, 80 bp, synthetic construct
  source 1..80: mol_type = other DNA
agaagagcaaaacgaaagctcaggtttcagagtccagcagcgactcccctgggtccactccagccaagaaacgcaaagct

SEQ ID NO: 166149 - DNA, 80 bp, synthetic construct
  source 1..80: mol_type = other DNA
cgtctgcgcccccacggggccacacgccgaggggtcagggatgtgcccagcccccctcaagatgtagcacttgctcaaaa

SEQ ID NO: 166150 - DNA, 80 bp, synthetic construct
  source 1..80: mol_type = other DNA
gtgggccatgtgctacggatacgcagactactgcagaaaagtaaccggagactcgggggtcttctacaacgccagaatag

SEQ ID NO: 166151 - DNA, 80 bp, synthetic construct
  source 1..80: mol_type = other DNA
aaagtggagaacgttggcaatgaaattggtggaaatttattaactaaagtagcaaatgatgcatccaatgtattgggtcc

SEQ ID NO: 166152 - DNA, 80 bp, synthetic construct
  source 1..80: mol_type = other DNA
acaacggctacttaggcatccactcatttgatgcagactcagtagacacacaagtaaataatgtaactaactttttaaaa

SEQ ID NO: 166153 - DNA, 80 bp, synthetic construct
  source 1..80: mol_type = other DNA
gaaattttatgattttaacaagcggaaacaaggaagcgcgccagtcaatagcccctctcaaccgacaggcggcatatcca

SEQ ID NO: 166154 - DNA, 80 bp, synthetic construct
  source 1..80: mol_type = other DNA
gcgtcgattaaagagacgcaaaaagataaaaataactcagtggaatccatccgcggtaaagaaatgcgtgatctccggat

SEQ ID NO: 166155 - DNA, 80 bp, synthetic construct
  source 1..80: mol_type = other DNA
ctttggattttgcacaagcaagcagtgtccagattccaataacagtcacaatagcgcccatgttcactgagtttaacggg

SEQ ID NO: 166156 - DNA, 80 bp, synthetic construct
  source 1..80: mol_type = other DNA
attgtcatagaaacatacaaaaatattgatttagacaaattgaaaataatagcttacggggatgacgtgatagcatcata

SEQ ID NO: 166157 - DNA, 80 bp, synthetic construct
  source 1..80: mol_type = other DNA
actgtagagaacaaggatggattgtgcctgatactcctaccaacgttgagcgccacttgaatagagctgttttgattatg

SEQ ID NO: 166158 - DNA, 80 bp, synthetic construct
  source 1..80: mol_type = other DNA
caaggtgccaccctgagccagagtgttaggccaggggtagcgcagtcacaatattttgacctccccttaactcaacccat

SEQ ID NO: 166159 - DNA, 80 bp, synthetic construct
  source 1..80: mol_type = other DNA
ccagtttggataacaaagggatcttgttcacaagcaactttgttcttgcctcaactaactcaaacacactcagtcctcca

SEQ ID NO: 166160 - DNA, 80 bp, synthetic construct
  source 1..80: mol_type = other DNA
ggagggggtttcaatgcccgggggcctgagcgctagcactctgattctgcggaatctttgtgcgcctgttttataaccct

SEQ ID NO: 166161 - DNA, 80 bp, synthetic construct
  source 1..80: mol_type = other DNA
tcggcgtgagggccgcgcgctgcgcgcgcggccctcgagggaggcacagcctccctccccagcgcgcatgcgcgtgggtc

SEQ ID NO: 166162 - DNA, 80 bp, synthetic construct
  source 1..80: mol_type = other DNA
acacctacaaggccacctggttcatgcagttccgggcggtcctgtggcgatcctggctgtcggtgctcaaggaaccactc

SEQ ID NO: 166163 - DNA, 80 bp, synthetic construct
  source 1..80: mol_type = other DNA
tcaggtatctagacaacagactggaactcacgagaatgccaacattgccacaggcggctctaatataacttacaatcaaa

SEQ ID NO: 166164 - DNA, 80 bp, synthetic construct
  source 1..80: mol_type = other DNA
aacccactcacccggaaacatccgccgaccgtttctataccctcaaaagtgtgttatggggtgctacatcaaaaggatgg

SEQ ID NO: 166165 - DNA, 80 bp, synthetic construct
  source 1..80: mol_type = other DNA
atcacagagaaactactgaagaatttgattaaattggtgagtagtttggtaatcattaccagaaattatgaggactccac

SEQ ID NO: 166166 - DNA, 80 bp, synthetic construct
  source 1..80: mol_type = other DNA
gacatgcccctgtgggccctcctaaacggatatgtagactacttagagactcaaatacagtatggtgacctcagtaaaga

SEQ ID NO: 166167 - DNA, 80 bp, synthetic construct
  source 1..80: mol_type = other DNA
gctccccgcattcctgctttcggcgcccctgcggatcccgatgacagcaggcctttccttcccccgttaatgaaaagaat

SEQ ID NO: 166168 - DNA, 80 bp, synthetic construct
  source 1..80: mol_type = other DNA
atgtgataaacaaaaggcagagatcagaatgcactgtggagtccttcttggggagggctgcgttagtgacaatcatgagt

SEQ ID NO: 166169 - DNA, 80 bp, synthetic construct
  source 1..80: mol_type = other DNA
gggacgcggtagggagcaaaaccgggtacatggggtggaacatcgtccaacagtagcaccagcggattgggtagtggttg

SEQ ID NO: 166170 - DNA, 80 bp, synthetic construct
  source 1..80: mol_type = other DNA
ctaccagataaaacaagcaaaactcaactacaaagctttttacaaacaaatgtacaaaccaatcctaatgtaattaacac

SEQ ID NO: 166171 - DNA, 80 bp, synthetic construct
  source 1..80: mol_type = other DNA
tagacatgctggtatctgacatgataaaggaatacagaattagaaactccactcaggacaaactggaagcgctgtttcag

SEQ ID NO: 166172 - DNA, 80 bp, synthetic construct
  source 1..80: mol_type = other DNA
attacatgttttatgacggctatgatgaggcaaaggatgattccgttaaatatgggatctcatctacagatgatatgggc

SEQ ID NO: 166173 - DNA, 80 bp, synthetic construct
  source 1..80: mol_type = other DNA
ttcagctccaaattcagtggctgcaacaaactcattaactgcatctgaaattagaataggtggagatactgcatatcaat

SEQ ID NO: 166174 - DNA, 80 bp, synthetic construct
  source 1..80: mol_type = other DNA
caatgcttggaactcacatcatttgggatataggattgcaatccagttgcgttctatgtatcccatggatcagccagaca

SEQ ID NO: 166175 - DNA, 80 bp, synthetic construct
  source 1..80: mol_type = other DNA
ccattgcccaagaagtcctcaaaatcaggagggggcacagcctccaccccctactatcttcccatgcataaacaaggtct

SEQ ID NO: 166176 - DNA, 80 bp, synthetic construct
  source 1..80: mol_type = other DNA
ccttacaaatatctcagcccaagcctaacacaagccagcaatctttaccaaatacaagcagttcagaaccagtacattcc

SEQ ID NO: 166177 - DNA, 80 bp, synthetic construct
  source 1..80: mol_type = other DNA
tcttagctcctcccaccattacctcccttcaggcaatgaacaggcggtttttcctagatttagatattgtggtacatgat

SEQ ID NO: 166178 - DNA, 80 bp, synthetic construct
  source 1..80: mol_type = other DNA
gactgcacacacttagaaggaaaaatcattatagtagcagtacatgttgctagtggattcatagaagcagaggtcatccc

SEQ ID NO: 166179 - DNA, 80 bp, synthetic construct
  source 1..80: mol_type = other DNA
gacccccccaagcacccctaaatatgctgacatcatatgttttgtttcaggatgtaaggatttctgtttaagaatggcca

SEQ ID NO: 166180 - DNA, 80 bp, synthetic construct
  source 1..80: mol_type = other DNA
gtgcggacgcctgtatttagtctatgccaatgtttacctgccttgggttactattccaaacgaccacacctttgaggaca

SEQ ID NO: 166181 - DNA, 80 bp, synthetic construct
  source 1..80: mol_type = other DNA
atagtgccatatgtaaatgctgttccaatggattctatggttagacataacaactggagtttggttataatacctgtatg

SEQ ID NO: 166182 - DNA, 80 bp, synthetic construct
  source 1..80: mol_type = other DNA
acatccaagaccagatcacaggaaagatccttaaatggtttgttcgcattatcagtgcaatgactattatgattaggaat

SEQ ID NO: 166183 - DNA, 80 bp, synthetic construct
  source 1..80: mol_type = other DNA
gatagagacacaaggactgccagccccgttggggagggggtggtgggtacgggagagtttgggctcgtctaaacaaagcc

SEQ ID NO: 166184 - DNA, 80 bp, synthetic construct
  source 1..80: mol_type = other DNA
tccgcgcgctcccggcagcccccaccactcctagaccaccgtcatgtggtggaactggtggaagaggcgccggtggagac

SEQ ID NO: 166185 - DNA, 80 bp, synthetic construct
  source 1..80: mol_type = other DNA
agtggacttctacttgtcatcactgtgacagacaacaaaggagctttcaagtacataaaacctcaaagtcaattcattgt

SEQ ID NO: 166186 - DNA, 80 bp, synthetic construct
  source 1..80: mol_type = other DNA
gcgactctggacaatacaccatcgagcgaagaattgctagggggtgatgctgcaaaagagttcgcagacaaaccagttgc

SEQ ID NO: 166187 - DNA, 80 bp, synthetic construct
  source 1..80: mol_type = other DNA
agttagaaataacagtagtaaagctagttagaaatgagaaatttaaagacattaggaaatatttaccctcacgtgaggat

SEQ ID NO: 166188 - DNA, 80 bp, synthetic construct
  source 1..80: mol_type = other DNA
ttgtatgccagttttatcttccccaccccctatgtaacttagaagttttacacaaagaccaataggcagtaaccatccag

SEQ ID NO: 166189 - DNA, 80 bp, synthetic construct
  source 1..80: mol_type = other DNA
ccgccatctccggaaccaagacgattgcccaccctttgttcaccagttccaatggtcagcgatttgttgtcccggattgc

SEQ ID NO: 166190 - DNA, 80 bp, synthetic construct
  source 1..80: mol_type = other DNA
tggatttactgcattatctaagcacactccagatttaattcgtatcgttcttgcgattaggagagcacacttttccagca

SEQ ID NO: 166191 - DNA, 80 bp, synthetic construct
  source 1..80: mol_type = other DNA
agctcaacttaatccaaattttcgccctgcaaataaacctaacggtaacaacaaaactttaggtgacaaagttactaagt

SEQ ID NO: 166192 - DNA, 80 bp, synthetic construct
  source 1..80: mol_type = other DNA
taccggcgccacctcttcaattatatagtgtccgtaatggatgggggcgtgggtctgtttgacagacataaactcatcga

SEQ ID NO: 166193 - DNA, 80 bp, synthetic construct
  source 1..80: mol_type = other DNA
ggagcgtcagttctcagcctcggatgactacgaccggctgtacttcctgacgctgggctacctggcctccccggtggccc

SEQ ID NO: 166194 - DNA, 80 bp, synthetic construct
  source 1..80: mol_type = other DNA
tttcagtgcggctccttaaagacacgccattcatatcccagaagaacttctttcaaggtgacagggctgaggaggtgaca

SEQ ID NO: 166195 - DNA, 80 bp, synthetic construct
  source 1..80: mol_type = other DNA
ctgctttaacaagtttgtgaacacgctgctgacggattagatggggatatttaaaaggggcagcaatctcggctgtctgt

SEQ ID NO: 166196 - DNA, 80 bp, synthetic construct
  source 1..80: mol_type = other DNA
cccattctatccctggatgcccagacccgaaccccaatacagagtatccttcaaaattggatttaaaccctaaataaaaa

SEQ ID NO: 166197 - DNA, 80 bp, synthetic construct
  source 1..80: mol_type = other DNA
gcgggcccttttcccccttgttcaccccatagcaagaagggtaggttacatgggtattttcccatcagcacctgactggc

SEQ ID NO: 166198 - DNA, 80 bp, synthetic construct
  source 1..80: mol_type = other DNA
gtagtgggcgattgcccccagcacgaaggcggcgctcttgtggtcatccaggtagtttcgcaccgcaaacaccactgtgt

SEQ ID NO: 166199 - DNA, 80 bp, synthetic construct
  source 1..80: mol_type = other DNA
ggcagcgtcggacacaacacgccgcaaacgcggcgccgcgctgacggccctcaagcctccctcagccccgtcccgcaccg

SEQ ID NO: 166200 - DNA, 80 bp, synthetic construct
  source 1..80: mol_type = other DNA
cgtcacagccgccattttgttttacaaaatggccgacttccttccgcttttttaaaaataacggttcggcggcggcgcgc

SEQ ID NO: 166201 - DNA, 80 bp, synthetic construct
  source 1..80: mol_type = other DNA
gtctgaatgatacagtccaattcagaatgatatttggtaatctcttctccacattccacgccaacccaggtatcctcacc

SEQ ID NO: 166202 - DNA, 80 bp, synthetic construct
  source 1..80: mol_type = other DNA
caatttcttccgggtcaaaggtcgtacctacgtcataagtcacgtgggaagagctgctgtgaacctggaagtagctgacc

SEQ ID NO: 166203 - DNA, 80 bp, synthetic construct
  source 1..80: mol_type = other DNA
ctgcggcttcctttacacatccgttcggctcaccacaaacgaacaacccttgtgtaaccttccaggtgcttgactcaata

SEQ ID NO: 166204 - DNA, 80 bp, synthetic construct
  source 1..80: mol_type = other DNA
agctgcaacacaagcagcactaccaaactaccccacaataatgtccacagacttatatgaataccacgtgactcccacag

SEQ ID NO: 166205 - DNA, 80 bp, synthetic construct
  source 1..80: mol_type = other DNA
cacaatcccagcaacacagggactgccagtaatggtcacgccaggttcaagtcagtacctcacctcagacgacttccaat

SEQ ID NO: 166206 - DNA, 80 bp, synthetic construct
  source 1..80: mol_type = other DNA
tatggacagtcaatgacatccaaaaactagtgggtgtcctaaattgggcagcacaaatctacccagggataaagaccaaa

SEQ ID NO: 166207 - DNA, 80 bp, synthetic construct
  source 1..80: mol_type = other DNA
tccattagaggcaagttaaacatggccactgcaacacaactgtgcagggaatgtccccaaccagcaaattttaagaaatg

SEQ ID NO: 166208 - DNA, 80 bp, synthetic construct
  source 1..80: mol_type = other DNA
gcaaactccgagagtgtcccagcactgacagcagtagagactgggcatacatcccaagtcacacccagcgacacgatgca

SEQ ID NO: 166209 - DNA, 80 bp, synthetic construct
  source 1..80: mol_type = other DNA
ctaaacttttacctagtgtgttttatgatattttccctggaaccaaggaaccagccccactttctaacaaggatagtaga

SEQ ID NO: 166210 - DNA, 80 bp, synthetic construct
  source 1..80: mol_type = other DNA
taacgaaaaacatgtacagggccccttctgcataccaggcaccaccccgtcccagtgggatgatctccgagggtgtgata

SEQ ID NO: 166211 - DNA, 80 bp, synthetic construct
  source 1..80: mol_type = other DNA
aggctgcggagactggagcctcatccacagccacagatggtaacttgatagagacaagatgtgtcgtaaattccaatggc

SEQ ID NO: 166212 - DNA, 80 bp, synthetic construct
  source 1..80: mol_type = other DNA
tttagtaaccctacctcagtcgaattggattgggttatactgttgtaggggtaaatttttctttaattcggagaaaaaaa

SEQ ID NO: 166213 - DNA, 80 bp, synthetic construct
  source 1..80: mol_type = other DNA
gagtatttgtccaaactgaaacacctagacacacttgaaaaccagataaccaccctgcaccagtcgtgtcccagccaaga

SEQ ID NO: 166214 - DNA, 80 bp, synthetic construct
  source 1..80: mol_type = other DNA
taaaagtaactatagcaccccccactctactaactgacaagtggtactttagcaaagacatttgtgacacaaccttggtt

SEQ ID NO: 166215 - DNA, 80 bp, synthetic construct
  source 1..80: mol_type = other DNA
agctgctgagacaggacatacgtcgcaagcggtgcctagtgacaccatccagacaagatgtgtgttgaatcgacacaagc

SEQ ID NO: 166216 - DNA, 80 bp, synthetic construct
  source 1..80: mol_type = other DNA
aaagcaaatgtataatgagagactttccactatgggcttgctgttacggatacattgactggataattaaaagtacaggt

SEQ ID NO: 166217 - DNA, 80 bp, synthetic construct
  source 1..80: mol_type = other DNA
aaaacacaaagcctgggaggaaacaacagaggaagagacagaagccctctcagaaacggaggaggagagccaagagcagc

SEQ ID NO: 166218 - DNA, 80 bp, synthetic construct
  source 1..80: mol_type = other DNA
aggacaagctcccgactcccatagacagcctagagatgtacaagttacagacccgactaccgtgggaccgagattcgttt

SEQ ID NO: 166219 - DNA, 80 bp, synthetic construct
  source 1..80: mol_type = other DNA
cagcgaacacatccaccaacataaccaagagtaccacacccgcagccgccaacgcactcgaagaaataaacgaaacttct

SEQ ID NO: 166220 - DNA, 80 bp, synthetic construct
  source 1..80: mol_type = other DNA
aaaagacataatggacaaagctaataaatggtattgggagaatctaagtgtcgagaacaacttacattctatttatggca

SEQ ID NO: 166221 - DNA, 80 bp, synthetic construct
  source 1..80: mol_type = other DNA
agtggaagaaggatgcttaaagcatagtgctagtatgcatttctaacctgtgattatcacggggtggcaggtggcgtgcc

SEQ ID NO: 166222 - DNA, 80 bp, synthetic construct
  source 1..80: mol_type = other DNA
agctgtctttcctcttattacattgggctaacgggaggaaatgaacccaggggtggcagtggatggtgtcatttatgggc

SEQ ID NO: 166223 - DNA, 80 bp, synthetic construct
  source 1..80: mol_type = other DNA
ggatctacatgagaatcaaacatgttagggcttgggtcccaagaccccttagaagtcagaaatacttactcaagaactac

SEQ ID NO: 166224 - DNA, 80 bp, synthetic construct
  source 1..80: mol_type = other DNA
taatctacacagtggaagggggtatgccctctggtatatgtggcacaagtatttttaatactatgatcaacaatataatc

SEQ ID NO: 166225 - DNA, 80 bp, synthetic construct
  source 1..80: mol_type = other DNA
acaacccggggacgatagtgcgtttaagaggacactgttaggagagattttgaactactttgcaaattggtcgggaatta

SEQ ID NO: 166226 - DNA, 80 bp, synthetic construct
  source 1..80: mol_type = other DNA
atatattccagatagtgaggatgattatcctgattgttgtttggctttattggctaatcaaccagagccaacaataatag

SEQ ID NO: 166227 - DNA, 80 bp, synthetic construct
  source 1..80: mol_type = other DNA
tagatccagcatcacggccactactgatacaataattgaaaataggaccatgcaaaacacaggggcatttggtcaacagt

SEQ ID NO: 166228 - DNA, 80 bp, synthetic construct
  source 1..80: mol_type = other DNA
gtagtctcttacaattagatttccaaaatccaagagcatatggtgttgacgtagatatttatgaccatggtaaaaatgat

SEQ ID NO: 166229 - DNA, 80 bp, synthetic construct
  source 1..80: mol_type = other DNA
aacctgtaaagaaactcaaaaaactaatccaccgtttaaatatgaaaacttatcttccttatggggagataaaatttata

SEQ ID NO: 166230 - DNA, 80 bp, synthetic construct
  source 1..80: mol_type = other DNA
agatcacactaggaaattccacaattacaacccaggaagcagcaaatgcagtggtcgcatatggagagtggccaagttac

SEQ ID NO: 166231 - DNA, 80 bp, synthetic construct
  source 1..80: mol_type = other DNA
ttttaggcaatgccctgatatttccacatcagttcatcaatttaagaacaaacaatgctgccactctaatactgccatat

SEQ ID NO: 166232 - DNA, 80 bp, synthetic construct
  source 1..80: mol_type = other DNA
atacaattcagaggcaagtggtaccccacaatgctacaccaacaacaggtgttcgaggacattgccaggtcaggaccctt

SEQ ID NO: 166233 - DNA, 80 bp, synthetic construct
  source 1..80: mol_type = other DNA
aaaccaagactccagaacgacgtgtagtggctcagggaccagaggaagaatttgggttgtccttacttaaacataattca

SEQ ID NO: 166234 - DNA, 80 bp, synthetic construct
  source 1..80: mol_type = other DNA
agccataggtcagtcaggccccttcgcctaccatagtgatcaaaagaaagcagtactaggcctaaaatacagatttcact

SEQ ID NO: 166235 - DNA, 80 bp, synthetic construct
  source 1..80: mol_type = other DNA
gggtgtggggcaaagggtgtaatacttactcatcagtaggagtagacaaagggctccaagtggacagagaaggtctcttc

SEQ ID NO: 166236 - DNA, 80 bp, synthetic construct
  source 1..80: mol_type = other DNA
gtttgaaaatcagcaaatgacaagaacaccatcttacacgagctttgttcaagttgagcacggacaaaatctccatgttc

SEQ ID NO: 166237 - DNA, 80 bp, synthetic construct
  source 1..80: mol_type = other DNA
cagcagcaacagctgctggacgtggtcaaaagacaacaggaactgttgcggctgaccgtctgggggacgaaaaacctcca

SEQ ID NO: 166238 - DNA, 80 bp, synthetic construct
  source 1..80: mol_type = other DNA
attaatacatggagatccagggtgcggtaaatctctagccacaacaatagtgtcacgaggccttgcagcagagggagata

SEQ ID NO: 166239 - DNA, 80 bp, synthetic construct
  source 1..80: mol_type = other DNA
atgttggcatttgtaagcgcttgccctgatttctcagtgcgacttctgagggacaccacacacataagtcaatccacacc

SEQ ID NO: 166240 - DNA, 80 bp, synthetic construct
  source 1..80: mol_type = other DNA
tttcttcgcaagaggagcgtgcgttacaataatggctgtagacaattacaatgaaacattaagtagtaatcagaagtcaa

SEQ ID NO: 166241 - DNA, 80 bp, synthetic construct
  source 1..80: mol_type = other DNA
cttttacaacaatacagctactacaacacaaaacaaaccctagctcaacttaaatttgacttttttccaaaacagaaccc

SEQ ID NO: 166242 - DNA, 80 bp, synthetic construct
  source 1..80: mol_type = other DNA
gtgcgtggtacactggaatttaggttcctttgtacgcctgttttccccttccttttgtttgtgtatttcatgttaatttg

SEQ ID NO: 166243 - DNA, 80 bp, synthetic construct
  source 1..80: mol_type = other DNA
gcccgggcaccgagccatcgtgtcatgcatcaaatgcaacaaacgttaaccaccaagatgcaagactttttagacaagga

SEQ ID NO: 166244 - DNA, 80 bp, synthetic construct
  source 1..80: mol_type = other DNA
aggtgccatagcggtgaagggcccgcagccaggtttgcgcgtcccgcgcctgccctccgccatcaggcgttcccacaggg

SEQ ID NO: 166245 - DNA, 80 bp, synthetic construct
  source 1..80: mol_type = other DNA
tgttgtaatacaggttaccgtgtactggtgcgcgtgttacgacgacagtactttgtcggtgtaattgcatatcgattaat

SEQ ID NO: 166246 - DNA, 80 bp, synthetic construct
  source 1..80: mol_type = other DNA
ctgcaccggagtctgccggacttttctcccccagatcacggctgtctagacgcgtgggcctcccagggggtgttgctact

SEQ ID NO: 166247 - DNA, 80 bp, synthetic construct
  source 1..80: mol_type = other DNA
tgtgaaaccaaagcatactacagcatggattcccaggcctccccgcgctgtacaatacacacacacctacagtacaaact

SEQ ID NO: 166248 - DNA, 80 bp, synthetic construct
  source 1..80: mol_type = other DNA
gcggggcgtaatttttttaaggcagttattggtgcccttaaacgcctggttgctacgcctgaataagtgataataagcgg

SEQ ID NO: 166249 - DNA, 80 bp, synthetic construct
  source 1..80: mol_type = other DNA
tagtattagattaagcttcatgttttgtggtagtgcaaactcatctctaaaattactcattgcttacacccccccaggag

SEQ ID NO: 166250 - DNA, 80 bp, synthetic construct
  source 1..80: mol_type = other DNA
cccagagtaccaagaccccgcaggtgcaggaagcgactcaggttcaccggcgaaaagaccccgcacctggcaagaagaga

SEQ ID NO: 166251 - DNA, 80 bp, synthetic construct
  source 1..80: mol_type = other DNA
acagggcggctggtctacattaattgaagacaacattcctggatccagaaggtttagctggactttgtttcttgctggac

SEQ ID NO: 166252 - DNA, 80 bp, synthetic construct
  source 1..80: mol_type = other DNA
catcgtcgggggcttcgtcgcgtgacctggagaggacggcctccagagccgtgtgaaagccccgccgagtgcttgccgcc

SEQ ID NO: 166253 - DNA, 80 bp, synthetic construct
  source 1..80: mol_type = other DNA
gtatgtcattaccctttatcagtgttggcaacgcgtacagcagcttctacgacgggtggtcacacttcgaccagactggc

SEQ ID NO: 166254 - DNA, 80 bp, synthetic construct
  source 1..80: mol_type = other DNA
ttcccacatacagagcccaaaaagactacattttagaaagaagacagtgcaactttaactatgaagttaataatccagtt

SEQ ID NO: 166255 - DNA, 80 bp, synthetic construct
  source 1..80: mol_type = other DNA
ccaacaggaatgaccaccacaataccagtcacagtgaccatcgcccctatgtacactgaattttcaggtatcaggtcaaa

SEQ ID NO: 166256 - DNA, 80 bp, synthetic construct
  source 1..80: mol_type = other DNA
aaaaccgcatcaccatggtaatagcgatgactaatacgtagatgtactgccaagtaggaaagtcccgtaaggtcatgtac

SEQ ID NO: 166257 - DNA, 80 bp, synthetic construct
  source 1..80: mol_type = other DNA
gggcgtggtctacgtcctgatataaagcggtgcacttccgaatggctgagttttccacgcccgtccgcagcggcagcacc

SEQ ID NO: 166258 - DNA, 80 bp, synthetic construct
  source 1..80: mol_type = other DNA
aaacaaccgtacttgtcatgaaaacagtacaatatcacaagaatctgaaacattgttgaaggcaatacaaggagacaata

SEQ ID NO: 166259 - DNA, 80 bp, synthetic construct
  source 1..80: mol_type = other DNA
gtcacacgactgtaccatggccaaataaaactctcattccagattggaataacatgacatggcaacagtgggagaggcaa

SEQ ID NO: 166260 - DNA, 80 bp, synthetic construct
  source 1..80: mol_type = other DNA
ggcttcagagtactcaaaaactcctactactcacacctgtctaacctagcagatcacgacaatgaaaacagaaggcgagc

SEQ ID NO: 166261 - DNA, 80 bp, synthetic construct
  source 1..80: mol_type = other DNA
gacgcaagagacggtacagacgcagacgaaaaaagcctaagattgtaattaaacaatggcagccagacatggtcagacgg

SEQ ID NO: 166262 - DNA, 80 bp, synthetic construct
  source 1..80: mol_type = other DNA
gtgcaagctgtgtcttcatttgtggttgtctctggtatgttatacatcatctataagttgtttgccaattttcaaggggc

SEQ ID NO: 166263 - DNA, 80 bp, synthetic construct
  source 1..80: mol_type = other DNA
gttttctccgttttcctctcctccagtggtagtcgtgtatcatcatcaatcatcgtagtgacgtcgttgctgctgctgct

SEQ ID NO: 166264 - DNA, 80 bp, synthetic construct
  source 1..80: mol_type = other DNA
ttcgcgcgccgcccaccagggggcgctgcgcgccccccccgcgcatgcgcggccacgcccccgccgccattttgtatagc

SEQ ID NO: 166265 - DNA, 80 bp, synthetic construct
  source 1..80: mol_type = other DNA
ccgagtttgttgtggctgagcaagatgctactcaaaagcctaataccgctaaacatcctccgctagaagccacacagcct

SEQ ID NO: 166266 - DNA, 80 bp, synthetic construct
  source 1..80: mol_type = other DNA
gtataacaaagatggtgtcaaattagagataacagttgtcaaattgaatagaaatgagaagtttagagacattagaaagt

SEQ ID NO: 166267 - DNA, 80 bp, synthetic construct
  source 1..80: mol_type = other DNA
acgtacgggtttggtcaccaaaataaagccgtttacacagcgggttataagatctgcaattaccacctcgccacacaaga

SEQ ID NO: 166268 - DNA, 80 bp, synthetic construct
  source 1..80: mol_type = other DNA
tggacggtggcgggattgttgagggtgcccagggacttcccggtggccgcgggaggcaccggtgtggtggcattccccgc

SEQ ID NO: 166269 - DNA, 80 bp, synthetic construct
  source 1..80: mol_type = other DNA
atcagtagttccataacagataaattaacttccaagatcatcaaatggctaattagaattattagcgcatttactataat

SEQ ID NO: 166270 - DNA, 80 bp, synthetic construct
  source 1..80: mol_type = other DNA
tacatgttcccaacagagcctacagttaagcctatagtaggcagacaggcctgggaggacgagtacaccacctgcaaggt

SEQ ID NO: 166271 - DNA, 80 bp, synthetic construct
  source 1..80: mol_type = other DNA
tgataatggtaaatttacaggtctgggtatttatgataatgtcatgatattaccaactcatgctgatgctggtaaaactg

SEQ ID NO: 166272 - DNA, 80 bp, synthetic construct
  source 1..80: mol_type = other DNA
tcatccacaaacatcaccgacaagagggatagcatcacctacataccagacaccgtcaagcctgacgtgacaaatcacgg

SEQ ID NO: 166273 - DNA, 80 bp, synthetic construct
  source 1..80: mol_type = other DNA
cgtttcacacagtgatgcgttgtctagaaggttcgccttcgacatggaagtttacacgatgtcagaacactctatcagag

SEQ ID NO: 166274 - DNA, 80 bp, synthetic construct
  source 1..80: mol_type = other DNA
cttaagtacactaaagatgctgttcttatacagcttctcggccacaccacttcgaattatgggggtgtggctttgatgac

SEQ ID NO: 166275 - DNA, 80 bp, synthetic construct
  source 1..80: mol_type = other DNA
cagcactcttcaaatagtaattatttattaccacctgcagtttgttcttaaattgtctccagacagtcaaaatgggcgct

SEQ ID NO: 166276 - DNA, 80 bp, synthetic construct
  source 1..80: mol_type = other DNA
tcagtctctgcttacatctctttccgcgactttgaagcatacgtccctcggcaaacccctggtgtcggccccatccccac

SEQ ID NO: 166277 - DNA, 80 bp, synthetic construct
  source 1..80: mol_type = other DNA
tctcaagtgcaatccaaccactaaccaaggtcgattctataacaacattcggctttggtcaccagaacaaggcagtttat

SEQ ID NO: 166278 - DNA, 80 bp, synthetic construct
  source 1..80: mol_type = other DNA
ataagggggtagatcttgactcattgcggatgatcgcctacggcgatgacgtcctagccagctacccacaccaaatagac

SEQ ID NO: 166279 - DNA, 80 bp, synthetic construct
  source 1..80: mol_type = other DNA
ggctacagctcctttacacccaaagacgcaaacggaattaacaacataactataataagaaatgcaaacttccactacct

SEQ ID NO: 166280 - DNA, 80 bp, synthetic construct
  source 1..80: mol_type = other DNA
atatttcactagttatcatcccacttgtaccattacgatcagggtcaacacaggcaccacaaacactacctattacaata

SEQ ID NO: 166281 - DNA, 80 bp, synthetic construct
  source 1..80: mol_type = other DNA
cttaaaagatgaactgagaagtccagaaaagataaagagaggtaaaactagagccattgaagcagcaagcattaatgaca

SEQ ID NO: 166282 - DNA, 80 bp, synthetic construct
  source 1..80: mol_type = other DNA
cgcgctcgcgcgcgtcagaccacttcgggctcgcgggggtcgggaaatttgctaaacagactccgagttgccattggata

SEQ ID NO: 166283 - DNA, 80 bp, synthetic construct
  source 1..80: mol_type = other DNA
tttatggtgggggacatggtgctgggagccgtgaacctcttcctcgtcctgcccatattctggtacattctgacggaggt

SEQ ID NO: 166284 - DNA, 80 bp, synthetic construct
  source 1..80: mol_type = other DNA
ccgcgcccaccgcgtctgtgcccttacatcaacaagggtgacgtgaacttcgtggtcacagaagttaccgacgcacgaaa

SEQ ID NO: 166285 - DNA, 80 bp, synthetic construct
  source 1..80: mol_type = other DNA
gctggatatcccattattaatgcacccactagaacaaaattggaaccaagcgcattcttcgacgtcttcccaggagaaaa

SEQ ID NO: 166286 - DNA, 80 bp, synthetic construct
  source 1..80: mol_type = other DNA
ctcgttctccactggtaaatttctcctagcttatacgccaccaggtggcgcacatccaaagaatcgcaaggaagccatgc

SEQ ID NO: 166287 - DNA, 80 bp, synthetic construct
  source 1..80: mol_type = other DNA
ttgcacaagtagacactctaataccaattaacaacacaaaaactgctactggtttagacatgtatagaattccactcatg

SEQ ID NO: 166288 - DNA, 80 bp, synthetic construct
  source 1..80: mol_type = other DNA
accctcctttctatccctggatgcccaagcctaaacctgcatgccgtgtaacctttaagcttggctttcaataaacaaga

SEQ ID NO: 166289 - DNA, 80 bp, synthetic construct
  source 1..80: mol_type = other DNA
ccgaccagcggttgcaatataccatgcttggtgaaattttgaactactacactcactggactgggtccctcaggttcaca

SEQ ID NO: 166290 - DNA, 80 bp, synthetic construct
  source 1..80: mol_type = other DNA
gcccccccgctctgacctaaccaaaaaccctttctacccctggatgccttctacttacaatgtaaaatttaacctcaact

SEQ ID NO: 166291 - DNA, 80 bp, synthetic construct
  source 1..80: mol_type = other DNA
tggttaaccgaatggggacgctttgcgccagggttgttacaggcaaacaagtccatgatgttcaagttacaacaaatgtt

SEQ ID NO: 166292 - DNA, 80 bp, synthetic construct
  source 1..80: mol_type = other DNA
acctgggtatactaatggcggaggcttactaaatgtggctaaagccctacaaaaatgtgatgcctgcccaaaacctcatt

SEQ ID NO: 166293 - DNA, 80 bp, synthetic construct
  source 1..80: mol_type = other DNA
tgtgttttatgcgtgccctggataagtcaaacgcattacaggtttgttgcagatgatgtttacacagacgcaggttttgt

SEQ ID NO: 166294 - DNA, 80 bp, synthetic construct
  source 1..80: mol_type = other DNA
aggaagaaactcgagcttttcacctacgtgcgcttcgacatggaagttaccattgtaaccaataacacaggcttgatgca

SEQ ID NO: 166295 - DNA, 80 bp, synthetic construct
  source 1..80: mol_type = other DNA
ctcacagcagatttgcaaattgattatactgaagagagaggacctgacaccgtcccacaatgtgattgcatggagggttg

SEQ ID NO: 166296 - DNA, 80 bp, synthetic construct
  source 1..80: mol_type = other DNA
ggtttaatactctcaataacatggggaaactgtactttagacatgtgaatgataaaacaattagcccaataaccagcaaa

SEQ ID NO: 166297 - DNA, 80 bp, synthetic construct
  source 1..80: mol_type = other DNA
agaggctcctagacgagctcaataacgtaattgtgtcatttctgtgtgactcggggtctctggaagtggagagatgctcc

SEQ ID NO: 166298 - DNA, 80 bp, synthetic construct
  source 1..80: mol_type = other DNA
agaagccatgttgggtacacatgtggtgtgggacctgggattacaatcatcctgtagcatggtggcaccttggatctcca

SEQ ID NO: 166299 - DNA, 80 bp, synthetic construct
  source 1..80: mol_type = other DNA
gccgctctggcgcatgagggcatccagccgcgccccctcgtccaggacctcgtccagctcagggcgtgaggtcaggtggc

SEQ ID NO: 166300 - DNA, 80 bp, synthetic construct
  source 1..80: mol_type = other DNA
acctagctgtactccccagacattcacaaccagggaaaaccatttggattgaacacaagctggtgaggatcgtggatgcc

SEQ ID NO: 166301 - DNA, 80 bp, synthetic construct
  source 1..80: mol_type = other DNA
ttttgtaccaattgagaaagaccctgttcaaccatgatttggtcaaatttattgtaaaaatcttagttagaatcttgtgt

SEQ ID NO: 166302 - DNA, 80 bp, synthetic construct
  source 1..80: mol_type = other DNA
tcataccagaaccaaatccaagttatgctaaccctattaataaaaacttaagatcaagatttcaattgttgaatccatat

SEQ ID NO: 166303 - DNA, 80 bp, synthetic construct
  source 1..80: mol_type = other DNA
attcaaggatcagatctacgttgtggaaggtggaatgccatcaggttgttcaggtactagcattttcaattcaatgatta

SEQ ID NO: 166304 - DNA, 80 bp, synthetic construct
  source 1..80: mol_type = other DNA
taatcaatatcatgtctcttcctgatatacacctcatcgccgaatttttttcatttttccgaacgtttggccacccgact

SEQ ID NO: 166305 - DNA, 80 bp, synthetic construct
  source 1..80: mol_type = other DNA
aaaggaaagtgccactgccggaactgcgaactccaccgaagaaacctgctcctatgagtgtctggcgaccaccggcccac

SEQ ID NO: 166306 - DNA, 80 bp, synthetic construct
  source 1..80: mol_type = other DNA
gcatcgagcgaccgagtcagtcagaagtggattgcgccagtttaatggaaacgctgaagcggattcggttacgaaattcg

SEQ ID NO: 166307 - DNA, 80 bp, synthetic construct
  source 1..80: mol_type = other DNA
aagataagggcagagcatttaccagtgattatgtgatagctagcacaaacatgactgtcctcacaccacccactgtttcg

SEQ ID NO: 166308 - DNA, 80 bp, synthetic construct
  source 1..80: mol_type = other DNA
aaaactttaaaaaacacacagacagtaactatggctactgctcctactgtccctgtaactcaggcactaacgggacagta

SEQ ID NO: 166309 - DNA, 80 bp, synthetic construct
  source 1..80: mol_type = other DNA
acacctccaggcgctggtattccggaaacgcgacgtgatgccatgcttggtgtgcacgttgtgtgggatctgggtcttca

SEQ ID NO: 166310 - DNA, 80 bp, synthetic construct
  source 1..80: mol_type = other DNA
aagtcaacagtttactcactccctccagatccaaaacactttgatgggtaccaacaacaagaggtcgtaatcatggacga

SEQ ID NO: 166311 - DNA, 80 bp, synthetic construct
  source 1..80: mol_type = other DNA
tgctttgaaaaaaaactatacccagatactaacacccctaacaacatatggcaactaacatacaataaaccaatgcaaaa

SEQ ID NO: 166312 - DNA, 80 bp, synthetic construct
  source 1..80: mol_type = other DNA
tttccactatacaataaaattacggaatcatgtgaaaagtgtgctttttattaacagagcagagggtttacagtagatat

SEQ ID NO: 166313 - DNA, 80 bp, synthetic construct
  source 1..80: mol_type = other DNA
gctgccgccgttgcctgccaacaccagcgcctggacgttgcacgcggcgggtaccgaaagcggcgctaacgcggcaacgg

SEQ ID NO: 166314 - DNA, 80 bp, synthetic construct
  source 1..80: mol_type = other DNA
cccggcacattcgcggacaataagatttacaacctgtttgtgggagcgggactactgcccacgacggccgcgctgaacgt

SEQ ID NO: 166315 - DNA, 80 bp, synthetic construct
  source 1..80: mol_type = other DNA
cagactaaactgtctcctgttagtcaagtgtccctatacaaagcctcagctgtatgacaaaaaaaaccccgagaaactgt

SEQ ID NO: 166316 - DNA, 80 bp, synthetic construct
  source 1..80: mol_type = other DNA
gcttactctggctgatcggtacggctttgcagggtgcgcgccgccgccgggtggtcctaggccggggccccaagcggtaa

SEQ ID NO: 166317 - DNA, 80 bp, synthetic construct
  source 1..80: mol_type = other DNA
gcgctacgtctactatcgtaatgtagacagcgctggccgatccgcgggccgcgctccgggcggagatgaggacgacgcac

SEQ ID NO: 166318 - DNA, 80 bp, synthetic construct
  source 1..80: mol_type = other DNA
aacccaggcattttgactgggtcagctgtgggttgtgatcctgatattttctggtcacaaatccactctaccttagatgg

SEQ ID NO: 166319 - DNA, 80 bp, synthetic construct
  source 1..80: mol_type = other DNA
actacaattagagacaacaacttctactacctaacacactgggataactcaaacaataaccacataaatgctacctatgc

SEQ ID NO: 166320 - DNA, 80 bp, synthetic construct
  source 1..80: mol_type = other DNA
acgcagtggtccgtcggtgtctgcgagagtacgttggcgactatatgagcagaatcatactctgttgcgaacagaacgag

SEQ ID NO: 166321 - DNA, 80 bp, synthetic construct
  source 1..80: mol_type = other DNA
aatggtctaaggttagcttatcagcaaggtctaccagtgctgaacacaccgggcagcaaccagttcatgacttcggacga

SEQ ID NO: 166322 - DNA, 80 bp, synthetic construct
  source 1..80: mol_type = other DNA
gtatagatcagtcctttcgagccacaattgcttttgcggttgtattgatcctgttcgccatcttaacatcattgctggtc

SEQ ID NO: 166323 - DNA, 80 bp, synthetic construct
  source 1..80: mol_type = other DNA
cacgagggaggtgggatcgcgggccccggggcacactgcttccatcctgacacaccccgccaacacgcccgcgacacacc

SEQ ID NO: 166324 - DNA, 80 bp, synthetic construct
  source 1..80: mol_type = other DNA
gggtcacgcaaagttcaaaggtcatcctcaccggaactggtacaaaatggccgccaactgcttccgggtcaaaggttgct

SEQ ID NO: 166325 - DNA, 80 bp, synthetic construct
  source 1..80: mol_type = other DNA
tgcaacaatataaaacccactatgaaagaaacttatttaatgtagtacaatactatgacacctttcaaacaatagctcaa

SEQ ID NO: 166326 - DNA, 80 bp, synthetic construct
  source 1..80: mol_type = other DNA
aacacaagataatagtacccagtttagagaccagaaagaggggcagaaaaaagattaagataagaatagcaccccccact

SEQ ID NO: 166327 - DNA, 80 bp, synthetic construct
  source 1..80: mol_type = other DNA
gagtctgttgcaactggatttccagaacccacgcacctatgatactgatgtagatatttatgacaacagtccaccaaata

SEQ ID NO: 166328 - DNA, 80 bp, synthetic construct
  source 1..80: mol_type = other DNA
taccgccacaagaaaaggaaagtgctactgcgatcactgcgagctccacaggcgcctcgcagggctatgagctggcgtcc

SEQ ID NO: 166329 - DNA, 80 bp, synthetic construct
  source 1..80: mol_type = other DNA
atggttatgatagtcaagacatccacttgattgatgatttgggtcaaacaaggaaagaaaaagatatagaaatgctgtgc

SEQ ID NO: 166330 - DNA, 80 bp, synthetic construct
  source 1..80: mol_type = other DNA
aattcatggggttcacaaatggatttaacagatcctctttgcatagaggatagtgttgaagattgtaaacaggacatctc

SEQ ID NO: 166331 - DNA, 80 bp, synthetic construct
  source 1..80: mol_type = other DNA
cagtaaactacaatttccagaaacatccagtacagaaataccgattactatcacaattgccccaatgtgctgtgaattca

SEQ ID NO: 166332 - DNA, 80 bp, synthetic construct
  source 1..80: mol_type = other DNA
ttagtctctaccagcggcgccttgacactcatgttgttaccaaggctaccaagcacatggatgagatatcagacaccttc

SEQ ID NO: 166333 - DNA, 80 bp, synthetic construct
  source 1..80: mol_type = other DNA
acatacactatccaaacaacttcaaaaatcttgcaagttacaaggagtctacacaaatcctactgctagtgaatttatgg

SEQ ID NO: 166334 - DNA, 80 bp, synthetic construct
  source 1..80: mol_type = other DNA
gatgatttcggacgtcctcctaccgttccacaacccccggcaccaccacctccagtaaggccactgccagctctcccggc

SEQ ID NO: 166335 - DNA, 80 bp, synthetic construct
  source 1..80: mol_type = other DNA
gagacccataaaaacagttatactaagttacaagaatggttatataagacaaacacattctttgaaacaacacaagtaat

SEQ ID NO: 166336 - DNA, 80 bp, synthetic construct
  source 1..80: mol_type = other DNA
tggaagaagcaccccccaccaatccgtataacacacccacctttactatcaagaagaaggacaaaaacaaatggagaatg

SEQ ID NO: 166337 - DNA, 80 bp, synthetic construct
  source 1..80: mol_type = other DNA
gggaatgggacactgcttcaaaccccagtgtatttttccaaccacactctggttttccaagattcacgatcccttttaca

SEQ ID NO: 166338 - DNA, 80 bp, synthetic construct
  source 1..80: mol_type = other DNA
agagcaaagcaattcaatggttagagaggaacaaggaacatgtgtgtagcattcttgactatgcttcagatatcatcgtg

SEQ ID NO: 166339 - DNA, 80 bp, synthetic construct
  source 1..80: mol_type = other DNA
agaattaagtggtaccctatattattccaccagctagaactcatggaagaactagtgcaatccggaccgtttgcatacag

SEQ ID NO: 166340 - DNA, 80 bp, synthetic construct
  source 1..80: mol_type = other DNA
ctgcgcatgacacccgcagataagggggaaagctttgatgacgtcacctgggaaacagcgacgtttctgaagaggttctt

SEQ ID NO: 166341 - DNA, 80 bp, synthetic construct
  source 1..80: mol_type = other DNA
agtggggccagacttcgccataaggcctttatcttctcgccgtttgtcagtggcttccgggttcgtatggaggtcgccat

SEQ ID NO: 166342 - DNA, 80 bp, synthetic construct
  source 1..80: mol_type = other DNA
gtacacaggaccagcactttcgagtgcaaagttactcattgcctacacaccacctgggacagctggtcccactgaccgca

SEQ ID NO: 166343 - DNA, 80 bp, synthetic construct
  source 1..80: mol_type = other DNA
caaatttggagagggccgcatgccagacggcagcacatatgtacccatacaatacagaggaaagtggtatgtaaacttac

SEQ ID NO: 166344 - DNA, 80 bp, synthetic construct
  source 1..80: mol_type = other DNA
aaagtgagtggggccagacttcgccataaggcctttatcttcttgccattggatagtgtaaggggttgccataactttgg

SEQ ID NO: 166345 - DNA, 80 bp, synthetic construct
  source 1..80: mol_type = other DNA
acaatggtcaggtccccaaagacagccttcaaatgattcagcatagtagtctttcccacaccaggggcaccttccaaaaa

SEQ ID NO: 166346 - DNA, 80 bp, synthetic construct
  source 1..80: mol_type = other DNA
actggtacttactcagtggagcccccagacagtcagaaactgctccatcagaggcatagtccccatggtaatatgtggac

SEQ ID NO: 166347 - DNA, 80 bp, synthetic construct
  source 1..80: mol_type = other DNA
acagctcgacggtgttccggcggggtaaggtttccataagtgggtgactggagactaaagttacggatctcatctagaaa

SEQ ID NO: 166348 - DNA, 80 bp, synthetic construct
  source 1..80: mol_type = other DNA
tctcgctgacggaatggaatcgagaattgccgagcctcttttgcgactgtcctggcggcggtggcgcctcgggaaccgag

SEQ ID NO: 166349 - DNA, 80 bp, synthetic construct
  source 1..80: mol_type = other DNA
tgggagcaataacacaaaacccagtagagaaatacacagaagctgtcttaaatgaagtactagtagttccaaacattagt

SEQ ID NO: 166350 - DNA, 80 bp, synthetic construct
  source 1..80: mol_type = other DNA
cacgtggtcaataagcgtcagcggacagagtgcactgttgaatcatttttgggcagggctgcgtgtgtcgcaattattag

SEQ ID NO: 166351 - DNA, 80 bp, synthetic construct
  source 1..80: mol_type = other DNA
tcttcttcgtaatttacgcgcgcgaggaggagaaaaacaacacgggcaccgaggtagatcaatgtctggcctatcggagc

SEQ ID NO: 166352 - DNA, 80 bp, synthetic construct
  source 1..80: mol_type = other DNA
atagaaaatttcctctgtaggtctgcatgtgtctattacaccacttatgacacacacggtactgatgctgatgataaata

SEQ ID NO: 166353 - DNA, 80 bp, synthetic construct
  source 1..80: mol_type = other DNA
aggaatgccccaaaaatagtaagcagccgtgactagcacgaactgggcctcgtgggagccaaaggtgctaatgaaccacc

SEQ ID NO: 166354 - DNA, 80 bp, synthetic construct
  source 1..80: mol_type = other DNA
accagttggcaaatgcaaactctgctaaagcgggagctgggtataattacacacatcctggtgagcgaggtagacaagtt

SEQ ID NO: 166355 - DNA, 80 bp, synthetic construct
  source 1..80: mol_type = other DNA
tgcgcaaaaaccagcagctgacgtgtgtgaaacatgttgacgatacaacgtgctacgaaagtgcggattagcaaaaaagc

SEQ ID NO: 166356 - DNA, 80 bp, synthetic construct
  source 1..80: mol_type = other DNA
tcttgtcaaacagatggataagtgcaatgagaaatcttatttcattagatttatccataagaaagtacatggttgaaatt

SEQ ID NO: 166357 - DNA, 80 bp, synthetic construct
  source 1..80: mol_type = other DNA
gaaatataagcacattatttatatctttgctggattcgctccgttgacacattcttcaccaaagttgatttatacagtct

SEQ ID NO: 166358 - DNA, 80 bp, synthetic construct
  source 1..80: mol_type = other DNA
ttccagtacctaacaaaacccaccacagaattcagcgagacacagtgcaaatgtgcaattaaagacattcccctttatgc

SEQ ID NO: 166359 - DNA, 80 bp, synthetic construct
  source 1..80: mol_type = other DNA
ccagttaaggatgttcttgagaaaggaattccaactctacagtctccaacagtagaagcttgtggctactcagatagaat

SEQ ID NO: 166360 - DNA, 80 bp, synthetic construct
  source 1..80: mol_type = other DNA
atcaccaacaatttttcagtatacaatgaggaacctactggagccatttagaaaggcaaatgaagatgctgtcataattc

SEQ ID NO: 166361 - DNA, 80 bp, synthetic construct
  source 1..80: mol_type = other DNA
ctgtggtgcagcagccggccgaagctttcgcgcacgttcactgcgtccaggtactggagcaggtcgtgcaggcacttgcg

SEQ ID NO: 166362 - DNA, 80 bp, synthetic construct
  source 1..80: mol_type = other DNA
accgcgcagtacaaattctactttaactgggggggcgacgctatatttccacagattatcaaagacccctgccctcaatc

SEQ ID NO: 166363 - DNA, 80 bp, synthetic construct
  source 1..80: mol_type = other DNA
tacagagacgaggctccttccatcaccctgactgccgaatacaagtttcgttttaactgggggggcgactctatatttcc

SEQ ID NO: 166364 - DNA, 80 bp, synthetic construct
  source 1..80: mol_type = other DNA
aaccaactcaaacagttagatatcaagaccaccaagatgagcatggaggatgcttgttacggtacagagaacctggaagc

SEQ ID NO: 166365 - DNA, 80 bp, synthetic construct
  source 1..80: mol_type = other DNA
taccaagacttttcagcagataactggatgcaaaataataaaatatggtttgacaaagctgtaacagcatggacaaacct

SEQ ID NO: 166366 - DNA, 80 bp, synthetic construct
  source 1..80: mol_type = other DNA
ctcctccatcgtctttttctccttactcttcccataggccggacaccgtctacgtcatccacttcctgggcatggtctac

SEQ ID NO: 166367 - DNA, 80 bp, synthetic construct
  source 1..80: mol_type = other DNA
ctctttggaaaagaccagtagtcacagcatatatagaggatcagccagtacaggtactgctagatacaggagctgatgac

SEQ ID NO: 166368 - DNA, 80 bp, synthetic construct
  source 1..80: mol_type = other DNA
accatatgctatgtcgtccacttcctgggaggagtctacgtcctcatataagtaagtgcacttccgaatggctgagtttt

SEQ ID NO: 166369 - DNA, 80 bp, synthetic construct
  source 1..80: mol_type = other DNA
caacgccaagcaggaactctttcgcctgggcaacgccaaaatgctagagttgcagatggacctggaccgtctgagcacgc

SEQ ID NO: 166370 - DNA, 80 bp, synthetic construct
  source 1..80: mol_type = other DNA
cgcataaggtccccatcaaacacctcaaaacacagacccatgcccatttcaggctgagagggctccatccggctcgacca

SEQ ID NO: 166371 - DNA, 80 bp, synthetic construct
  source 1..80: mol_type = other DNA
gtgggtcttaaaccgatcaacaccccgagtaataccaagttgtaccctagcgtattctaccatgtatttccaggagaaaa

SEQ ID NO: 166372 - DNA, 80 bp, synthetic construct
  source 1..80: mol_type = other DNA
aaaatcacctaagtctgttgccactaacccatttgaggatgagagcccatataccaagccattggaagtcaggactatga

SEQ ID NO: 166373 - DNA, 80 bp, synthetic construct
  source 1..80: mol_type = other DNA
ccccttttatccctggatgcccaaacaattcactgttaaattttccatgggctttcaataaacaaggccgtgggagtttc

SEQ ID NO: 166374 - DNA, 80 bp, synthetic construct
  source 1..80: mol_type = other DNA
accaaaaaacacatttttcgtcttgtaaaaagtaactttcgcccattgccatgaaacaccgtgatggggaacggtgttgt

SEQ ID NO: 166375 - DNA, 80 bp, synthetic construct
  source 1..80: mol_type = other DNA
taattctgacatgcatgattctgtgttggtctcctattcatctgatttagtcatttaccgaacaaacactacaggtgatg

SEQ ID NO: 166376 - DNA, 80 bp, synthetic construct
  source 1..80: mol_type = other DNA
tgaagctctagttgaaaattttcttggtagatcttcactatgggccaacctgactctgacgaatggttttgccaagtggg

SEQ ID NO: 166377 - DNA, 80 bp, synthetic construct
  source 1..80: mol_type = other DNA
gtattagaaacctacaagaatatagatctagaccgactgaagatcgtggcctatggagatgatgttattgcttcttatcc

SEQ ID NO: 166378 - DNA, 80 bp, synthetic construct
  source 1..80: mol_type = other DNA
agaccacgactctggcaagaagaggacagcgagacgcagacgcagtcctcggaggggccggcggagacgacgagggagct

SEQ ID NO: 166379 - DNA, 80 bp, synthetic construct
  source 1..80: mol_type = other DNA
acttatttaagcgataatgaagctactgcagtggaccaaccgacgcaacctgatgtggcaacgtgccgcttctacacact

SEQ ID NO: 166380 - DNA, 80 bp, synthetic construct
  source 1..80: mol_type = other DNA
ttgttcttcaagtcatcttgaattttatcacaaacttcacactcagcaatctccttacggatcctagccaacattaaatc

SEQ ID NO: 166381 - DNA, 80 bp, synthetic construct
  source 1..80: mol_type = other DNA
tatgggaacgccccattatattctgtataaatttacccgcttgctgctctgtaatcagtcgctctgcggagaggctacca

SEQ ID NO: 166382 - DNA, 80 bp, synthetic construct
  source 1..80: mol_type = other DNA
atggacatcatgcatcaaaggaaattctgtcttcctacttcagcattctatcatctacaatcagctgttttacttataaa

SEQ ID NO: 166383 - DNA, 80 bp, synthetic construct
  source 1..80: mol_type = other DNA
aggtagggcggtagcgggtcgactaccttgtcctccacgtactttacccgctgcttgtacgagttgaattcgcgcatgat

SEQ ID NO: 166384 - DNA, 80 bp, synthetic construct
  source 1..80: mol_type = other DNA
attttcaaataacggatgtgaccgacaacagggaatcccttacggcaccacctggcatttggcccacccttcataccaga

SEQ ID NO: 166385 - DNA, 80 bp, synthetic construct
  source 1..80: mol_type = other DNA
caagacagttactggagagaaaacacagacagcatagtacccatagtagacctacctctatggatgtgtttcatgggata

SEQ ID NO: 166386 - DNA, 80 bp, synthetic construct
  source 1..80: mol_type = other DNA
cctggacaaaacccacaacagacagctatgagtaccacctaggcatgttcagccctatatttataggcccaacaagagca

SEQ ID NO: 166387 - DNA, 80 bp, synthetic construct
  source 1..80: mol_type = other DNA
atcattgctacttgtagcgcctgccctgacatgtctgttaggatgatgagggatagtccaatgatgaagcaagaagggaa

SEQ ID NO: 166388 - DNA, 80 bp, synthetic construct
  source 1..80: mol_type = other DNA
ttactactgcaaggaccagtctcaatgacgtaccaaccccaaaccacagcagcagtgtgcactttagtttgaagccacat

SEQ ID NO: 166389 - DNA, 80 bp, synthetic construct
  source 1..80: mol_type = other DNA
ggatgcaaatataacaaaattactagaagaggcacagatacaacaagaaaagaacatgtatgagttacagaaattaaatc

SEQ ID NO: 166390 - DNA, 80 bp, synthetic construct
  source 1..80: mol_type = other DNA
acaatgctgaaccaggaaagagatacatatataaagtcttaccacaaggatggaagggatcaccagcaatttttcagtac

SEQ ID NO: 166391 - DNA, 80 bp, synthetic construct
  source 1..80: mol_type = other DNA
accaacgtaccaaaatttcccatgttggatatagaaattggagatgtaaccccatatggagaaataaacctgagcggcaa

SEQ ID NO: 166392 - DNA, 80 bp, synthetic construct
  source 1..80: mol_type = other DNA
taagactaaagatagtgacccagtacaaagatacgccagctggcggatcaatacccgacaaatggtgcaattgaggagga

SEQ ID NO: 166393 - DNA, 80 bp, synthetic construct
  source 1..80: mol_type = other DNA
ggtattgatgatgtcatcgacaaagtgattaacaacgcactgcagctctcacaacccaatcgacctatcactgcatcgga

SEQ ID NO: 166394 - DNA, 80 bp, synthetic construct
  source 1..80: mol_type = other DNA
acacaccgcagtcaaggggcaattcgggctcgggactggccgggccccgggcaaggctcttaaatcgccatgttccttgg

SEQ ID NO: 166395 - DNA, 80 bp, synthetic construct
  source 1..80: mol_type = other DNA
ttatacttggtgtagtacacgcaagcagaccggctcatgaaattctcaatggaagactccgatctagtgtggaagttgtg

SEQ ID NO: 166396 - DNA, 80 bp, synthetic construct
  source 1..80: mol_type = other DNA
tgctccttcaccccaaaagatgacaaaggaattaagaacataactacaattagaaaaacaaacttccactatctcacaca

SEQ ID NO: 166397 - DNA, 80 bp, synthetic construct
  source 1..80: mol_type = other DNA
ggtgagatcacaaaccttatgcatatggcacgagtggactcattcatgccaataaacaatatcccaggccacataaacaa

SEQ ID NO: 166398 - DNA, 80 bp, synthetic construct
  source 1..80: mol_type = other DNA
agaccaaagttgtaaatgtttaatagaagacatacctctgtgggctatggcaaacggctacctagagttctgtgactcag

SEQ ID NO: 166399 - DNA, 80 bp, synthetic construct
  source 1..80: mol_type = other DNA
cagtaaacggcgtgatatgcatcgttgacactcttcaggtagccagcatccagtcctgactcatgtttcctccctcgctt

SEQ ID NO: 166400 - DNA, 80 bp, synthetic construct
  source 1..80: mol_type = other DNA
agaaagcaaggacgcaaacattagactaaactgcttgctgttaattaggtgcccttatagcaggcctaaactgtacaatc

SEQ ID NO: 166401 - DNA, 80 bp, synthetic construct
  source 1..80: mol_type = other DNA
aggactataagggactcagctgcactaggatatgtaatgtgtaaaccatttatgtcagggactacaggtggaaagataga

SEQ ID NO: 166402 - DNA, 80 bp, synthetic construct
  source 1..80: mol_type = other DNA
tcaggaaagcatacccatagaggatgtagacaaggataaatttggatctcaggacacaatattcgatctgtcagatacta

SEQ ID NO: 166403 - DNA, 80 bp, synthetic construct
  source 1..80: mol_type = other DNA
cgatcagtccgtgcggtggcacgccacccacagcctgcagtacgccgagggcctgcgccagctcaagggcgcactggtgg

SEQ ID NO: 166404 - DNA, 80 bp, synthetic construct
  source 1..80: mol_type = other DNA
acaattctaaatccagaggctctggccagaaggtttggatttgacctagacatttgcctgcatactacatttacaaaatc

SEQ ID NO: 166405 - DNA, 80 bp, synthetic construct
  source 1..80: mol_type = other DNA
gtggatctccaacactgactatcgacgtagcaccaaggacgactttactgagggagggtacatcaccgcgttttaccaaa

SEQ ID NO: 166406 - DNA, 80 bp, synthetic construct
  source 1..80: mol_type = other DNA
atcacagaaaaacttctaaaaaacttgatcaagctagtgagcagcttggtgataattgttagaaactatgaagataccac

SEQ ID NO: 166407 - DNA, 80 bp, synthetic construct
  source 1..80: mol_type = other DNA
ctggatgccccccgctcctcctcaatttaaggtgtcttttaaactaggctggaaataaaaacacacttttacactgtaca

SEQ ID NO: 166408 - DNA, 80 bp, synthetic construct
  source 1..80: mol_type = other DNA
gaagctgctagcctgaatgacactgtgcactttcgaatggtgtttggcaacttgttttctgctttccataaaaaccctgg

SEQ ID NO: 166409 - DNA, 80 bp, synthetic construct
  source 1..80: mol_type = other DNA
atgtatcaccatgccatggggagatcaggaatgctaatccacgtacagtgtaatgcaaccaagtttcacagtggttgctt

SEQ ID NO: 166410 - DNA, 80 bp, synthetic construct
  source 1..80: mol_type = other DNA
ttccggtagggaacatttacagaagatggattcaaatagggctgcagaaatgtgtccggatgtacaatcccaccaatata

SEQ ID NO: 166411 - DNA, 80 bp, synthetic construct
  source 1..80: mol_type = other DNA
tacagattcattggaaatattatttcaaggaccagtatataaagatttagagatagatgtgtgcaatacacctcctccag

SEQ ID NO: 166412 - DNA, 80 bp, synthetic construct
  source 1..80: mol_type = other DNA
accactagccatgttgcaggcccacaaatgtctgctaataaagagctttaaaacacaccccaagggtccgccatacgtta

SEQ ID NO: 166413 - DNA, 80 bp, synthetic construct
  source 1..80: mol_type = other DNA
tatgttaacttagataaactgaaaatattggcatatggtgatgatatactattttcctacccttatgagatggacatgaa

SEQ ID NO: 166414 - DNA, 80 bp, synthetic construct
  source 1..80: mol_type = other DNA
tcgtgactttgtgagccatgacacatctgggtggcaaggtgaggtcttctgggtttttaataccggggtcggcaccagtt

SEQ ID NO: 166415 - DNA, 80 bp, synthetic construct
  source 1..80: mol_type = other DNA
ctatgtccctactcaggaaaaatatagttacaatcactacttccaaaggagagtttacagcactggggatccacgatagg

SEQ ID NO: 166416 - DNA, 80 bp, synthetic construct
  source 1..80: mol_type = other DNA
gcaggtgggagtggatttgtttgttttgctgacatcagagaattggaatgcattgcagaggaacaaggtatcagtgacta

SEQ ID NO: 166417 - DNA, 80 bp, synthetic construct
  source 1..80: mol_type = other DNA
agtcacccttccattaaagtatttaatggctctaataaacctacacaagagcaatattttgctactaatgacagcttgtg

SEQ ID NO: 166418 - DNA, 80 bp, synthetic construct
  source 1..80: mol_type = other DNA
acgcgaagaatgtcaatttcgacgtgcaaggtgtaactgagtctagggaaaaaatcacccttgaccgatcaaatcacaat

SEQ ID NO: 166419 - DNA, 80 bp, synthetic construct
  source 1..80: mol_type = other DNA
taggtcactatgtatgttagcatggcactcaggtgaacaggagtacaacaagtttgtagaaggaatcagaggtacagaaa

SEQ ID NO: 166420 - DNA, 80 bp, synthetic construct
  source 1..80: mol_type = other DNA
ttggatctgacaacagttttgaaatcacaataccatattcattctcaacttggatgcgaaagactcatggtaaaccaatt

SEQ ID NO: 166421 - DNA, 80 bp, synthetic construct
  source 1..80: mol_type = other DNA
aatctccaagaaatggcccaaattagaaggaaatttgaattgttcacttacattagatttgattctgaaataaccttggt

SEQ ID NO: 166422 - DNA, 80 bp, synthetic construct
  source 1..80: mol_type = other DNA
ttcgaaacaacacaagtactagcccaactatcagcacactttcagcctgcattaaaacccaccaatacaacagcgaactc

SEQ ID NO: 166423 - DNA, 80 bp, synthetic construct
  source 1..80: mol_type = other DNA
cgccgccgccgaggaagacgatatgtgagtagaaggcgccgctacaggcgcagactcagacgaaggggcagacggagata

SEQ ID NO: 166424 - DNA, 80 bp, synthetic construct
  source 1..80: mol_type = other DNA
tcgccgcggacgggcagaaaaagctctaccacgcaaatataagccagaggggtgacgaatggtagagttttttctgcccg

SEQ ID NO: 166425 - DNA, 80 bp, synthetic construct
  source 1..80: mol_type = other DNA
tactttaagccaaaacacatcagagtctgggtaccgcgaccaccacgcctatgcccctacattaagtctagcaatgtcaa

SEQ ID NO: 166426 - DNA, 80 bp, synthetic construct
  source 1..80: mol_type = other DNA
tgggacaatgccacattcctaaagagagggtttcgagtggataagaggtataacttccttattcacccagttttcccgga

SEQ ID NO: 166427 - DNA, 80 bp, synthetic construct
  source 1..80: mol_type = other DNA
taaactactactcaaattggtctgggtcaatcaaacttacattcttttgtgtttgtgatagcttcagcactggcaagttc

SEQ ID NO: 166428 - DNA, 80 bp, synthetic construct
  source 1..80: mol_type = other DNA
ggagggagctcagttatgaaacgtacgttactaggagagattttaaactattatgcccactggtcagggagtcttaagct

SEQ ID NO: 166429 - DNA, 80 bp, synthetic construct
  source 1..80: mol_type = other DNA
cattaaaagcttaattagtacccattttacaagggagaataataacggtgcaaactttaaaacaggcaaaagcacccgat

SEQ ID NO: 166430 - DNA, 80 bp, synthetic construct
  source 1..80: mol_type = other DNA
cctacctacctgtcagacatagatgcaacatctgtggacaagccaactctccctgaaacctcagctgacagattttacac

SEQ ID NO: 166431 - DNA, 80 bp, synthetic construct
  source 1..80: mol_type = other DNA
tggtatcagaccagcatagttgtgcctgcggaggtacaaaaccaaagtgtcatactgtgctttgtatcagcttgtaacga

SEQ ID NO: 166432 - DNA, 80 bp, synthetic construct
  source 1..80: mol_type = other DNA
agaagaagatctcaccctccattataagaataaggtcttcccaatagaaaatccttctgttactcaggttaccctaggtg

SEQ ID NO: 166433 - DNA, 80 bp, synthetic construct
  source 1..80: mol_type = other DNA
gcggctactgcgtgataccaaatttatcaatcagggaaatttttaccaaggggaagtgccagatgctgtgaccggagcca

SEQ ID NO: 166434 - DNA, 80 bp, synthetic construct
  source 1..80: mol_type = other DNA
tggtctcaaatatggactcacaataacacctgctgacaaatctgaccagtttgtaaaagttgattggagtaatgccacat

SEQ ID NO: 166435 - DNA, 80 bp, synthetic construct
  source 1..80: mol_type = other DNA
tacagttacttcttatggcatagtaccggagtatgatgcctatttagatatggtagatggtgcgtcgtgttgcttagaca

SEQ ID NO: 166436 - DNA, 80 bp, synthetic construct
  source 1..80: mol_type = other DNA
tctagtaactcccaaacatcaaatgcagcaccagcactagatgctgctgagacaggacacacaaaccaggtccagccaga

SEQ ID NO: 166437 - DNA, 80 bp, synthetic construct
  source 1..80: mol_type = other DNA
gggaccgcgggagaaataacggccgcgaggtacggcacaacccgcgtcgaggacagacgcagaagaagcgtccggccgag

SEQ ID NO: 166438 - DNA, 80 bp, synthetic construct
  source 1..80: mol_type = other DNA
aatcatccagcaattaataaaaacccaacatcacctacacgtccccattatccactaatagggggcccagcaatgctgtt

SEQ ID NO: 166439 - DNA, 80 bp, synthetic construct
  source 1..80: mol_type = other DNA
tgaagactgttggaggctcatcgtatgtaccaataacaatcaccattgccccaatgtttgctgaatacaatgggcttaga

SEQ ID NO: 166440 - DNA, 80 bp, synthetic construct
  source 1..80: mol_type = other DNA
acataccgggcgaggttagaaaccttctcgaattgtgccaagtagagacaatgctagaagtcaacaacttagagtcaaac

SEQ ID NO: 166441 - DNA, 80 bp, synthetic construct
  source 1..80: mol_type = other DNA
taaagtcattaacaatgcattacaactatctcaaccaacgaggccaatcaccgcctcagacacccctagttcaagtggag

SEQ ID NO: 166442 - DNA, 80 bp, synthetic construct
  source 1..80: mol_type = other DNA
cacattggaattcaagaagaatgccgtgctgcactcgtgcacagtacctcacgaggtgaaattcaacccagtgggtagag

SEQ ID NO: 166443 - DNA, 80 bp, synthetic construct
  source 1..80: mol_type = other DNA
caattcagcaactatagttgctccatatatcaactgtgttccaatggacagtatgctcaaacataataacttgtctttgg

SEQ ID NO: 166444 - DNA, 80 bp, synthetic construct
  source 1..80: mol_type = other DNA
ctatagccccgatgtgcgctgaatacaatgggctgaggctggcagggcaccaagggttgccagtaatgaccacaccgggc

SEQ ID NO: 166445 - DNA, 80 bp, synthetic construct
  source 1..80: mol_type = other DNA
tgaataccttgatcctaaggagatagcagaaaccggccttaagtatggtttaacaatcacccctgctgataagtcagaaa

SEQ ID NO: 166446 - DNA, 80 bp, synthetic construct
  source 1..80: mol_type = other DNA
gcgcggccggcaccggtttcggcattatggattacgtggaattggctacgcgtacccttctcaccatgcgtcttggcatt

SEQ ID NO: 166447 - DNA, 80 bp, synthetic construct
  source 1..80: mol_type = other DNA
tggtcgttggcctgaattcatccgagatgacgaagcaaatccagtggaccaaccaacagagccggatgtagcaacttgta

SEQ ID NO: 166448 - DNA, 80 bp, synthetic construct
  source 1..80: mol_type = other DNA
cttttttataaagtacaacagaaaataccctttcacagacagccaactaacaggacccaaactgcacccagcaaatataa

SEQ ID NO: 166449 - DNA, 80 bp, synthetic construct
  source 1..80: mol_type = other DNA
gacggcgacggcgaatagttgcgcgtccccggggaaaagaggaagttcccaggtggacggcagcgcgggtccctggtgac

SEQ ID NO: 166450 - DNA, 80 bp, synthetic construct
  source 1..80: mol_type = other DNA
tcagtttaaggtgccccaatttctttttccccgtaccagcccctaaaccaactggttcaagggctgcagcatttcatgat

SEQ ID NO: 166451 - DNA, 80 bp, synthetic construct
  source 1..80: mol_type = other DNA
ttttggacagccagcaacgaggatctggacctgtccagatacctaggaggcacatttattttctttagacacccaacagt

SEQ ID NO: 166452 - DNA, 80 bp, synthetic construct
  source 1..80: mol_type = other DNA
gtggcttctatggcgaaaaaagtcttaaaagaatgcaacaaaaaccaacaaatgctgacttatttacaggaccttcaaaa

SEQ ID NO: 166453 - DNA, 80 bp, synthetic construct
  source 1..80: mol_type = other DNA
taccaccgctttgccgcccaaagtaggtttcaaggaaggaacaacaccgacacggccgccccggcctttcaccggagacg

SEQ ID NO: 166454 - DNA, 80 bp, synthetic construct
  source 1..80: mol_type = other DNA
ggtcctctcgaggtcttctctggacctaaggccatcactcctggttctttcccccctactttcgagcccaacactggggt

SEQ ID NO: 166455 - DNA, 80 bp, synthetic construct
  source 1..80: mol_type = other DNA
atatgcagaaagagtgattatgccgagacaagattgcattggctgaactgtttcaaaaacgcctacactctacttatccg

SEQ ID NO: 166456 - DNA, 80 bp, synthetic construct
  source 1..80: mol_type = other DNA
tccgttcgattgctgcgagacactccattcattagccagacggcccttttgcaaggcgatgttgtagaggcaatcgaagg

SEQ ID NO: 166457 - DNA, 80 bp, synthetic construct
  source 1..80: mol_type = other DNA
tagtgtaaatgacactgtgttatttaggacaacctttggaaacctcttttcaaagtttcacttgaatcctggtattgtca

SEQ ID NO: 166458 - DNA, 80 bp, synthetic construct
  source 1..80: mol_type = other DNA
gtgctcctccagaggccgacgcgcggaccctccgacgtcctggcccgccgctgccgccgccgccttcccttctcccgcca

SEQ ID NO: 166459 - DNA, 80 bp, synthetic construct
  source 1..80: mol_type = other DNA
ggaaagggctcagtgattgttaagatagccccccccacactgttccaagaccgttggtactttcaaaaggacttcagaaa

SEQ ID NO: 166460 - DNA, 80 bp, synthetic construct
  source 1..80: mol_type = other DNA
ggtggagacgtcgcagacgaagacctgctagacgccgtcgatttcgcagagtaaggagaaggcgcagggggtggtcgcgc

SEQ ID NO: 166461 - DNA, 80 bp, synthetic construct
  source 1..80: mol_type = other DNA
atccaataaaatcaaatgacaagaaaactttaaatgattattgtattggaaagaatgtggacagcatcatgcttcctttg

SEQ ID NO: 166462 - DNA, 80 bp, synthetic construct
  source 1..80: mol_type = other DNA
tagaaaagatgctatgcttggcacccacgttatatgggacttgggattgcagtctagctgtaccatggtggcaccgtgga

SEQ ID NO: 166463 - DNA, 80 bp, synthetic construct
  source 1..80: mol_type = other DNA
ctacatacagagaacactaggcccttaccaggacatagaaactgtgggcgtcatatgctttatcagtccctacacagacc

SEQ ID NO: 166464 - DNA, 80 bp, synthetic construct
  source 1..80: mol_type = other DNA
tggaaccactaccagtcaagaacttaaccacttatggctttggtcaccaaagcaaagcagtgtatgttgcaggttacaaa

SEQ ID NO: 166465 - DNA, 80 bp, synthetic construct
  source 1..80: mol_type = other DNA
ggacagatacttcccaatcactataaccccacacgactggtatgaaattcaggaatcaccatactatccaaaacacatac

SEQ ID NO: 166466 - DNA, 80 bp, synthetic construct
  source 1..80: mol_type = other DNA
acggacaagctaccgattcccatagacagcctagagacgtacaagtcactgacccgcttaccatgggaccccgatacgct

SEQ ID NO: 166467 - DNA, 80 bp, synthetic construct
  source 1..80: mol_type = other DNA
aaagctccggacaaacacccgcagaaagatccttcagcgcgcactaagcgccggctgcagcacgccgcaaacgccgcccc

SEQ ID NO: 166468 - DNA, 80 bp, synthetic construct
  source 1..80: mol_type = other DNA
gtgtatactatgtctgaacattccatcaaaggaaaactgaacatggcaactgccacagtattgtgtaaggagtgccccaa

SEQ ID NO: 166469 - DNA, 80 bp, synthetic construct
  source 1..80: mol_type = other DNA
aacacgagttttgtgcgttggggaacacgatagtcccggagccagtagcgttttgcgacgaggctttcggagacgtcctc

SEQ ID NO: 166470 - DNA, 80 bp, synthetic construct
  source 1..80: mol_type = other DNA
agctacacttcctacaatttttcaggtgagaaaggctatacatatgttacaaaaataagacactggtactggacacaact

SEQ ID NO: 166471 - DNA, 80 bp, synthetic construct
  source 1..80: mol_type = other DNA
ccgcgtgcgcgcccatccgtcgccgggaccgagcagaaagtgatgtggtggtacattgattttttccttgacaggaaaga

SEQ ID NO: 166472 - DNA, 80 bp, synthetic construct
  source 1..80: mol_type = other DNA
tcgcatgtaggatctggaggtttatagccgacccaaaaaacgccgaatacgggatgatttgaaccattgctacaccgaca

SEQ ID NO: 166473 - DNA, 80 bp, synthetic construct
  source 1..80: mol_type = other DNA
ggcatggggatggtggagacgaaggcgcaagtggtggtggagacgccggttcgcccgaagcagacttcgcagacgacgga

SEQ ID NO: 166474 - DNA, 80 bp, synthetic construct
  source 1..80: mol_type = other DNA
acctcgcgtgtcatcgtcatcacatccaacttccatgagcccaacgagcgcgcagcgcgctcgatgggagcccttaagag

SEQ ID NO: 166475 - DNA, 80 bp, synthetic construct
  source 1..80: mol_type = other DNA
accctaggcatcgtggagatcatcgacgagctctaccggagcagtcgcctggccatctacatcgaggacctcggtcgaaa

SEQ ID NO: 166476 - DNA, 80 bp, synthetic construct
  source 1..80: mol_type = other DNA
aaaccacaaaaacacattatccacaggtaacaactcaatatatggccttccatcttacaacccaataccagataaactta

SEQ ID NO: 166477 - DNA, 80 bp, synthetic construct
  source 1..80: mol_type = other DNA
tgtaccgattagaattgggagactacaaattgatagaaataacaccaattggcttcgcacctacaagtgaaaaaagatat

SEQ ID NO: 166478 - DNA, 80 bp, synthetic construct
  source 1..80: mol_type = other DNA
catttggaggatttggacaccagaacatggctgtgtatgtagctggttacaaaatctgtaactaccacttggccactcaa

SEQ ID NO: 166479 - DNA, 80 bp, synthetic construct
  source 1..80: mol_type = other DNA
ccacgacttcctctctataactgacaccgggctacttagcacagatggcaatgcatggaaacaacactataaatcatttt

SEQ ID NO: 166480 - DNA, 80 bp, synthetic construct
  source 1..80: mol_type = other DNA
actatggcttccccacatacaagcctataaagaactacatgctacaaagacgcgcctggtcatttaaatatgaaactgaa

SEQ ID NO: 166481 - DNA, 80 bp, synthetic construct
  source 1..80: mol_type = other DNA
agattttatcataaaaattaataccatgcctccttttctagacacagaactcacagcccctagcatacacccaggcatgc

SEQ ID NO: 166482 - DNA, 80 bp, synthetic construct
  source 1..80: mol_type = other DNA
ataggcaggcatccggcgtctttggtgcattggagatagctttcacccaacaactttcccaactaacccgtgtctggaca

SEQ ID NO: 166483 - DNA, 80 bp, synthetic construct
  source 1..80: mol_type = other DNA
gagtgttgtaatgcagcaaagggccttgagtggatcagtatcaagattggcaagtttattgattggctgaaagggaaact

SEQ ID NO: 166484 - DNA, 80 bp, synthetic construct
  source 1..80: mol_type = other DNA
ctagccattatgtccttgctagtaccaatctggattctttgtcccctccaaccattacaataccagaagcaatcagcagg

SEQ ID NO: 166485 - DNA, 80 bp, synthetic construct
  source 1..80: mol_type = other DNA
agaaaagaaatggctcatcccagaaattccaaccaatgttgaaagagcagttaatcaagcaacaaacttgataaacacta

SEQ ID NO: 166486 - DNA, 80 bp, synthetic construct
  source 1..80: mol_type = other DNA
ttaaactatacagacaccccactgtagactacatagtcacctacaacagaacaggcccattcgagataaatgaactcagc

SEQ ID NO: 166487 - DNA, 80 bp, synthetic construct
  source 1..80: mol_type = other DNA
taagtcgcgttacgttcaccgacacagaaacgccgcaactcaaggtgctcatccatttgcacatagccgcccaactggcg

SEQ ID NO: 166488 - DNA, 80 bp, synthetic construct
  source 1..80: mol_type = other DNA
gccgctccttggagcagcttgtcgaaataatgatccacggccacgggaacgccgtgccgctcggcgtaggccgggtcctc

SEQ ID NO: 166489 - DNA, 80 bp, synthetic construct
  source 1..80: mol_type = other DNA
ggaggaaggagaacaaaacagaaaggtacgtgttacttacctttatcgttggagggaaaagcgctaagataccccacctg

SEQ ID NO: 166490 - DNA, 80 bp, synthetic construct
  source 1..80: mol_type = other DNA
gattttgcacaagatccgtccaagttcaccgaacccattaaggacgtccttattaagaccgctcccatgctaaactcccc

SEQ ID NO: 166491 - DNA, 80 bp, synthetic construct
  source 1..80: mol_type = other DNA
ctggtgctgatgtgccagctagtagaaagcaagcaatgctagggactcatatcatctgggatattggactgcaatctagc

SEQ ID NO: 166492 - DNA, 80 bp, synthetic construct
  source 1..80: mol_type = other DNA
agctagatatcagtcccatttattaattgggtgcgggtttgcagagcctggagactgtggtggcatactcagatgcacac

SEQ ID NO: 166493 - DNA, 80 bp, synthetic construct
  source 1..80: mol_type = other DNA
tacctgcacttacagctgttgagacaggacacacctcacaagtcgaccccagtgacaccctacaaactaggcatgtggtg

SEQ ID NO: 166494 - DNA, 80 bp, synthetic construct
  source 1..80: mol_type = other DNA
gaaagtctaatcgtcaatatacaagtaaacaacctagtgatgataactggcttaactttgatggcacacttttgggtaat

SEQ ID NO: 166495 - DNA, 80 bp, synthetic construct
  source 1..80: mol_type = other DNA
gtcaatgatgaaaaatggacagaaatgaaagatgacaaaatagtctctttggtggagaaatttactagtaataaacactg

SEQ ID NO: 166496 - DNA, 80 bp, synthetic construct
  source 1..80: mol_type = other DNA
ggggcggttgcctggtggatagttggaggaggaggcaggttagcctggcctgggtcattagtggcttcgggtagcgtccg

SEQ ID NO: 166497 - DNA, 80 bp, synthetic construct
  source 1..80: mol_type = other DNA
tcaaagatatgggaatgtttggtcagaacatgtaccaccacgcactgggtcgatcgggctacatcatccacactcagtgc

SEQ ID NO: 166498 - DNA, 80 bp, synthetic construct
  source 1..80: mol_type = other DNA
acaacaggtagctacgactcaaacattaaaatagcaggagacagcaactacaactggtacccctacaaccttaaaaacaa

SEQ ID NO: 166499 - DNA, 80 bp, synthetic construct
  source 1..80: mol_type = other DNA
ggattcacgaacgacgtgtccaagttgccatcctttctgaaatagatgacgttctcaggatcatgtttcatgcgctcgcg

SEQ ID NO: 166500 - DNA, 80 bp, synthetic construct
  source 1..80: mol_type = other DNA
gtggagaaggagacggaggagacccagacgacgccgcacttatcgacgccgtcgacctcgcagagtaaggaggcgcaggg

SEQ ID NO: 166501 - DNA, 80 bp, synthetic construct
  source 1..80: mol_type = other DNA
tgactccaaacatacacagaaggtgcctgcattaactgccaacgaaacaggtgcaacattgccaacaaaaccatcagaca

SEQ ID NO: 166502 - DNA, 80 bp, synthetic construct
  source 1..80: mol_type = other DNA
cgcccacacaaccccagcggggaggtcaacggtgattctccacgaaccacctcgagagcccgaagctgtttccttcaagc

SEQ ID NO: 166503 - DNA, 80 bp, synthetic construct
  source 1..80: mol_type = other DNA
atgcaagctggtggctggaccaatgtaaatattgtcatgaactatatccgtaacctggatagtgaaacaggggcaatggt

SEQ ID NO: 166504 - DNA, 80 bp, synthetic construct
  source 1..80: mol_type = other DNA
gaaccagcagttagtaaagagaaagctaaagaatttgcaaaaaaatttttagaaaaagctatacctgacacacccgtaag

SEQ ID NO: 166505 - DNA, 80 bp, synthetic construct
  source 1..80: mol_type = other DNA
tggaatccaacgactattacccggctcgttaccaaactcacatgttgttaggtcacgggtttgcagagccaggtgattgt

SEQ ID NO: 166506 - DNA, 80 bp, synthetic construct
  source 1..80: mol_type = other DNA
gtcgatttaggcgcatacttagaaaaagaatcaatctattacgttacaactaattggaaacataccgctactagattcgc

SEQ ID NO: 166507 - DNA, 80 bp, synthetic construct
  source 1..80: mol_type = other DNA
ctacccagactaagttacaacccagtgtgtttcatgacattttcccaggttgcaaagaaccagctgctctcagttctcgt

SEQ ID NO: 166508 - DNA, 80 bp, synthetic construct
  source 1..80: mol_type = other DNA
tcaagtgctaaattaatcttggcttacaccccaccaggaactgaggggcctaagaccagaagagaagcaatgttgggtac

SEQ ID NO: 166509 - DNA, 80 bp, synthetic construct
  source 1..80: mol_type = other DNA
agaaaagatagtcaagtgtcacttcaatatgacaggattagaaagagataagaaaaaacagtacaatgaaacatggtact

SEQ ID NO: 166510 - DNA, 80 bp, synthetic construct
  source 1..80: mol_type = other DNA
ataagttgcaggatctatctgacgatagattgaataaattcttaacatgtattataacattcgataaaaatcctaacgct

SEQ ID NO: 166511 - DNA, 80 bp, synthetic construct
  source 1..80: mol_type = other DNA
caccagaacccactaaaaggaaggaagcaatgttaggtacacatatagtgtgggatgtgggtttgcaatctacttgctca

SEQ ID NO: 166512 - DNA, 80 bp, synthetic construct
  source 1..80: mol_type = other DNA
ctttatgggccaacctgacactcagagaaggattcactgaatgggagataaatttccaggagaatgcacacatcaggaag

SEQ ID NO: 166513 - DNA, 80 bp, synthetic construct
  source 1..80: mol_type = other DNA
gcccctcatctgtcaacgccgcgccgggtgagtcggcccctcaagtgtcaacgtccgcccctcatctgtcagtgagggcc

SEQ ID NO: 166514 - DNA, 80 bp, synthetic construct
  source 1..80: mol_type = other DNA
aatcctgtagacaattttgtagacaatgttttagaagaggttttggtggtgcctaaccacaaaccctcaggaccaatcca

SEQ ID NO: 166515 - DNA, 80 bp, synthetic construct
  source 1..80: mol_type = other DNA
taaaaagcacgcaagccaagaggcccgagaaggtcaccagcgtagaggaggagcaggcgctggccacgatcaccgaaagc

SEQ ID NO: 166516 - DNA, 80 bp, synthetic construct
  source 1..80: mol_type = other DNA
acccttgcatatacttccaggtatttagcaaggcatttagcaacatgctctctattagccctgacaaactgcaatccaat

SEQ ID NO: 166517 - DNA, 80 bp, synthetic construct
  source 1..80: mol_type = other DNA
caccagggtctagtcaatatctaacatctgatgatttccagtcgccatgtgccttaccaaattttgatgtcaccccacct

SEQ ID NO: 166518 - DNA, 80 bp, synthetic construct
  source 1..80: mol_type = other DNA
gatatggtgtgtggccacactacttaacagcagatgatgcctcagcaattgacaaacccacacagcctgacacatcttca

SEQ ID NO: 166519 - DNA, 80 bp, synthetic construct
  source 1..80: mol_type = other DNA
attctgtcaactccattgtagaacaacttagaaatgagaatgatgttaggagaaaagtcaagcacaacttaaatgccatc

SEQ ID NO: 166520 - DNA, 80 bp, synthetic construct
  source 1..80: mol_type = other DNA
cccacttcttttcaagagctggattagttggaatgttagatctgctcacctcagataagaccaccatgggctttactact

SEQ ID NO: 166521 - DNA, 80 bp, synthetic construct
  source 1..80: mol_type = other DNA
attgaacctgtatgtcttattattcatggctcaccaggaaccgggaaatcggtagcctctaacctcatagccagagcaat

SEQ ID NO: 166522 - DNA, 80 bp, synthetic construct
  source 1..80: mol_type = other DNA
agaaaagcaaatatcttaaatacctttttaacagaagggtcatacagaaaaccacaagtagacaagtacagaaaaccttt

SEQ ID NO: 166523 - DNA, 80 bp, synthetic construct
  source 1..80: mol_type = other DNA
acacccaggaccacgaaaccgtgggcatagttgttgtaatctgtccttacactagaccccaactgtttgtaaaagacaga

SEQ ID NO: 166524 - DNA, 80 bp, synthetic construct
  source 1..80: mol_type = other DNA
attattcagactatggcttcatctatcgtgtctaaagttcacttattctactattactatatatatgcactactatgtaa

SEQ ID NO: 166525 - DNA, 80 bp, synthetic construct
  source 1..80: mol_type = other DNA
gcgtctattataccaagtacaaaacaaaagacactgacccaacagaaatgtactccagttggaaagttacaaccagacaa

SEQ ID NO: 166526 - DNA, 80 bp, synthetic construct
  source 1..80: mol_type = other DNA
atagcacctccagaacctatcccagaccttttgttccccagtactaaaaaaaaaaagaaattttcaaaattagactggga

SEQ ID NO: 166527 - DNA, 80 bp, synthetic construct
  source 1..80: mol_type = other DNA
acaggcaatgtagtggccatccacgttggtgggaatggaagagtgggatacggtgctgctttactgcgcaagtactttgc

SEQ ID NO: 166528 - DNA, 80 bp, synthetic construct
  source 1..80: mol_type = other DNA
atgctgttgagacaggagctacatccaacacagaaccagaggaagctattcaaactcgtactgtgatcaatatgcatggt

SEQ ID NO: 166529 - DNA, 80 bp, synthetic construct
  source 1..80: mol_type = other DNA
aatggagacaatatatgggcaaactacatcaacaccgaaaaatttaacaaagaacagtcacctaaaaatgacaatggcat

SEQ ID NO: 166530 - DNA, 80 bp, synthetic construct
  source 1..80: mol_type = other DNA
ttggaaatgctcgatgttgtccttttatctgtggcaaagcagtcactttcagggatcgcaacacctgccaaaattacact

SEQ ID NO: 166531 - DNA, 80 bp, synthetic construct
  source 1..80: mol_type = other DNA
attaaaaacccgtgcaaagagcaagactcgccattcacctttaccagtagacagcctcgcgacctacaaattgctgaccc

SEQ ID NO: 166532 - DNA, 80 bp, synthetic construct
  source 1..80: mol_type = other DNA
cgtctcgccgggcatccagttcggtatcaaacacgagggcttagtcaaaacgctggtggaatgttacgtgatgcacggac

SEQ ID NO: 166533 - DNA, 80 bp, synthetic construct
  source 1..80: mol_type = other DNA
aggagatgacataattccgacatgtgattgtactgttggatgttacttctcaaagagccgcaatcggtattttcccattg

SEQ ID NO: 166534 - DNA, 80 bp, synthetic construct
  source 1..80: mol_type = other DNA
ggagcactggttgcacgcgcagggccagggacagccttcgttgtcggtcgcgctcccgctcaatatcaaccacgacgaca

SEQ ID NO: 166535 - DNA, 80 bp, synthetic construct
  source 1..80: mol_type = other DNA
gaaaaacaaatagaatcaatcagacttgccccatcctgtgaccaggagaaaatctttaatgaaataaacacacttcatga

SEQ ID NO: 166536 - DNA, 80 bp, synthetic construct
  source 1..80: mol_type = other DNA
ctttaaaaactcccagtggagcacctcgtaccttaccaattactgtttcaattgctccagacagatctgaatcttctggt

SEQ ID NO: 166537 - DNA, 80 bp, synthetic construct
  source 1..80: mol_type = other DNA
atcaatgctagtagtgggcatacatccaatgcagctccaacacttgatgcagcagagactggacatacgagccaaataca

SEQ ID NO: 166538 - DNA, 80 bp, synthetic construct
  source 1..80: mol_type = other DNA
ttcattgtgccacccaacacaccaaattcagcaaacattatatgttttgtttcagcatgtaaagatttttctttaaggat

SEQ ID NO: 166539 - DNA, 80 bp, synthetic construct
  source 1..80: mol_type = other DNA
gaggattggcgtgtgcggtgcttgtggaacacggtgttttaatatgtatccgcgtgtaatgcacgcggtgtgctttttag

SEQ ID NO: 166540 - DNA, 80 bp, synthetic construct
  source 1..80: mol_type = other DNA
ataacatagtatggtttactaaagatcaaagagcaattactcaaatacactctcaatatggaatgccaaatgaccacaca

SEQ ID NO: 166541 - DNA, 80 bp, synthetic construct
  source 1..80: mol_type = other DNA
gaacactgtctcagccagtaatggctcggttatcaaatacttcaacatcaactactacaaagactcggcaagttcaggat

SEQ ID NO: 166542 - DNA, 80 bp, synthetic construct
  source 1..80: mol_type = other DNA
tccctccctcgtcttgccctgcgcctggggccaccttcatcaccgtcgctgactccgccatccaagcctaggggagaccg

SEQ ID NO: 166543 - DNA, 80 bp, synthetic construct
  source 1..80: mol_type = other DNA
gattgaattgctacaatgggtgctcaagtgtctgctcagaacaacggaactcacgagaactccaatagtgctagtggagg

SEQ ID NO: 166544 - DNA, 80 bp, synthetic construct
  source 1..80: mol_type = other DNA
acactctattttctacaactctactgggcgaggtgctcaactactttacaaattggtcaggcagcattaccctaactttt

SEQ ID NO: 166545 - DNA, 80 bp, synthetic construct
  source 1..80: mol_type = other DNA
tggtgatgttaagaaattagcagaagttgtggctgagtctatgtctaacacagatgatgaagaaatcaaagaacaaattt

SEQ ID NO: 166546 - DNA, 80 bp, synthetic construct
  source 1..80: mol_type = other DNA
actgcttagagataccacacatatcacacagtcagctttacctcaagggttggaagatctaatacaacaagttgcgtcta

SEQ ID NO: 166547 - DNA, 80 bp, synthetic construct
  source 1..80: mol_type = other DNA
catttgcagctgctcaacaaaaaacaggaggaaaaaggagcacaataaaatgttggaattgtggcaaggagggacataca

SEQ ID NO: 166548 - DNA, 80 bp, synthetic construct
  source 1..80: mol_type = other DNA
ccacctggaaacattttcataaaagtagcaaaaataccaatacccactgaagggggggaggactcatacttaaacatata

SEQ ID NO: 166549 - DNA, 80 bp, synthetic construct
  source 1..80: mol_type = other DNA
tccccattggttttgtcctgacactgttctctcagtggcagggtgagatcaacgtcaacctggtcttcaccgggacgttc

SEQ ID NO: 166550 - DNA, 80 bp, synthetic construct
  source 1..80: mol_type = other DNA
gtgtagaaacccggacaaccatgatgcattacacaggttcagaaacaacattggaaaatttcttgggtagggcagcttgt

SEQ ID NO: 166551 - DNA, 80 bp, synthetic construct
  source 1..80: mol_type = other DNA
aactttataagacgctgctacatcataggctatctgcctctaatattctgtggcgaggacaccaccgcccagaactttgc

SEQ ID NO: 166552 - DNA, 80 bp, synthetic construct
  source 1..80: mol_type = other DNA
aggagggtgcaaatattctccagacgctgcacctcagagacctcctgctcaaagagacctcccaccgccacgtagacgcg

SEQ ID NO: 166553 - DNA, 80 bp, synthetic construct
  source 1..80: mol_type = other DNA
ggagagttggacttttgaaaataagccacgtctgccgtgaccggtgttacgataatctcacaggtggcctgctggccgtg

SEQ ID NO: 166554 - DNA, 80 bp, synthetic construct
  source 1..80: mol_type = other DNA
gtattatttgaagataagtggtacactcaacaagacctgtgccccgttaatcttttgtcacttgcggtcagcgcatgttc

SEQ ID NO: 166555 - DNA, 80 bp, synthetic construct
  source 1..80: mol_type = other DNA
atgcacaaataaggaagaagctagagtttttcacttatgtcaggtttgatttggaaattacaatcatagctagtaacccc

SEQ ID NO: 166556 - DNA, 80 bp, synthetic construct
  source 1..80: mol_type = other DNA
gccctcagcccgggcccgccaacaggtaccgtggtgcggcgcgctgacgcttacgcccctcaaacctccccgagccctgg

SEQ ID NO: 166557 - DNA, 80 bp, synthetic construct
  source 1..80: mol_type = other DNA
actcaacacttggttgtcaatgtggacatccatagctctctcatgcgtttggctacagcatcatagcgcttgtttctggt

SEQ ID NO: 166558 - DNA, 80 bp, synthetic construct
  source 1..80: mol_type = other DNA
ctccactttcacccacctatgggcccgcctgcacacgtctcccgtcgcagtcggctccacccctctcctgcctttggtgc

SEQ ID NO: 166559 - DNA, 80 bp, synthetic construct
  source 1..80: mol_type = other DNA
agaaggctcaggttcagtccaaagacaagagagaccgtggtcgacagacacggaagagacagaagcagaagcccaagaag

SEQ ID NO: 166560 - DNA, 80 bp, synthetic construct
  source 1..80: mol_type = other DNA
ggccagcccacgtgcagtgagtgatgtaagaggttttgaatgttgagggcattcttaacatagctgtgcttgtcttcctc

SEQ ID NO: 166561 - DNA, 80 bp, synthetic construct
  source 1..80: mol_type = other DNA
gcaaagaaagtcttaagagagtgtcagcagaatcagaaacttctgagtttttattctcaggcccaaaaaggccaagaatc

SEQ ID NO: 166562 - DNA, 80 bp, synthetic construct
  source 1..80: mol_type = other DNA
gtgctgcctttaaagtggatcctggacgaacaggaccctgggaatcaacacttgtaggccaaatctgtaaatattacacc

SEQ ID NO: 166563 - DNA, 80 bp, synthetic construct
  source 1..80: mol_type = other DNA
gctagatagcgttttcaaacacacgctactgggggagattttgaactactttgcacactggtctggtagtataaaactaa

SEQ ID NO: 166564 - DNA, 80 bp, synthetic construct
  source 1..80: mol_type = other DNA
gacgagcaactaacctcaagtacatccagctggaaagagtactacaaaaaatttttaaatgaggtctttaaaacagacag

SEQ ID NO: 166565 - DNA, 80 bp, synthetic construct
  source 1..80: mol_type = other DNA
ctgctggacgccgtcgaaagagacgaacagtaaggaggcgccgctggcgcggagggaggcgtcggtaccggggttggcga

SEQ ID NO: 166566 - DNA, 80 bp, synthetic construct
  source 1..80: mol_type = other DNA
tcttaatacatggtggcccagggtgtggtaaatcacttgccactacagtgattgctagaggtttaacagacagtggcaat

SEQ ID NO: 166567 - DNA, 80 bp, synthetic construct
  source 1..80: mol_type = other DNA
aataaagtacaacaaccaggacaacacaaacatttttgactactatacaggaatgtactctagcatatttttatcttcag

SEQ ID NO: 166568 - DNA, 80 bp, synthetic construct
  source 1..80: mol_type = other DNA
taccatacagaggagagggagtggacttaaaacaagggagtatcacaccactgaccccagtgaccagtataacaacatat

SEQ ID NO: 166569 - DNA, 80 bp, synthetic construct
  source 1..80: mol_type = other DNA
ccacggcgccgtccttcgacgaagctttcctcaccgatcgtctccagcagctcatcatccatgccgtcaatcaacgctcg

SEQ ID NO: 166570 - DNA, 80 bp, synthetic construct
  source 1..80: mol_type = other DNA
cgtcggtgtcctcttcgggcgcgacggtggactcggccttaaggcggccgcgtgtcataacgcccgccgtgcacgccgtc

SEQ ID NO: 166571 - DNA, 80 bp, synthetic construct
  source 1..80: mol_type = other DNA
aaggttttgcacattcagatgctgatgcccaacaacagctgatagtagaaatatccaaattgaagagagggctggacgat

SEQ ID NO: 166572 - DNA, 80 bp, synthetic construct
  source 1..80: mol_type = other DNA
ctcagtgaatgaaacaatcggcaacacagataatgcatcaggtggtgatattttgaccaaagttgcagatgatgcatcca

SEQ ID NO: 166573 - DNA, 80 bp, synthetic construct
  source 1..80: mol_type = other DNA
tatttttattatccttttggggactacgatttttcttcttgttctacataccactactactcgtaatcacatacatggac

SEQ ID NO: 166574 - DNA, 80 bp, synthetic construct
  source 1..80: mol_type = other DNA
cactactggaaaattttcttggccgctcatctctgtgggcagaatttcagttacagagtaaattcaagaaatgggaaatc

SEQ ID NO: 166575 - DNA, 80 bp, synthetic construct
  source 1..80: mol_type = other DNA
acggtaatcatatccacgttttcggaatgttgtaaccaaacttgtccgtgttcctgcgtttgtgtcaattctacaacagt

SEQ ID NO: 166576 - DNA, 80 bp, synthetic construct
  source 1..80: mol_type = other DNA
ttcctagctagaatgattaccaatgagagtgacatatactcacttcctccagaccctaaatattttgatggctatgacaa

SEQ ID NO: 166577 - DNA, 80 bp, synthetic construct
  source 1..80: mol_type = other DNA
agggcacgagataggtcgcaatacagatagaaatgaccaccaaccagatgaagaccctttctttaactgcaatggaacac

SEQ ID NO: 166578 - DNA, 80 bp, synthetic construct
  source 1..80: mol_type = other DNA
agctagccaccaatttcactcctcctacgtcttttcctagcaccaatgtcacaaaagaaacaatacaacaatttaattca

SEQ ID NO: 166579 - DNA, 80 bp, synthetic construct
  source 1..80: mol_type = other DNA
cctttaccagagccgagcgggtctctttagcgcagcctcgattacctctggggtcttcctgtccctgctggactcaattt

SEQ ID NO: 166580 - DNA, 80 bp, synthetic construct
  source 1..80: mol_type = other DNA
tgaacacgagaaaatggtggcacaagtttcaacacagaaatctggcagccatgaaactggcaatatagccactgaggggt

SEQ ID NO: 166581 - DNA, 80 bp, synthetic construct
  source 1..80: mol_type = other DNA
agcttttcagacgaaagtaatgactgacatagccatgagcggaccgttcagctacccggacgaactaaaaaacactacta

SEQ ID NO: 166582 - DNA, 80 bp, synthetic construct
  source 1..80: mol_type = other DNA
ttaggagttgccacaatagtatcagtaacacagtctatagactattccaagaactagctagaataccatctagaattagc

SEQ ID NO: 166583 - DNA, 80 bp, synthetic construct
  source 1..80: mol_type = other DNA
ctggagcacgtaatgcagcaaagacacaggggttacctgtattcgttactccaggttctgcacagtttcttactactgat

SEQ ID NO: 166584 - DNA, 80 bp, synthetic construct
  source 1..80: mol_type = other DNA
gggtggagtactaatactatttagacacccaacagtagactttttagtaagagtgcgcaccagtcctccattcaatgaca

SEQ ID NO: 166585 - DNA, 80 bp, synthetic construct
  source 1..80: mol_type = other DNA
acatgcgccatgtgaacgacggaagtccaggaccaattgtaagcactgtgcgcatttactttaaacctaaacacgtgaaa

SEQ ID NO: 166586 - DNA, 80 bp, synthetic construct
  source 1..80: mol_type = other DNA
gagagcgagcacaatcacttatttgttcgttggattcactcctttaacaaaattttattgttctcttaattagaaaacat

SEQ ID NO: 166587 - DNA, 80 bp, synthetic construct
  source 1..80: mol_type = other DNA
atacttgcacaaatttagtaccaactacaacaagcaaaagccggatagtagtggtcaagttgagccaaaacacttcctcc

SEQ ID NO: 166588 - DNA, 80 bp, synthetic construct
  source 1..80: mol_type = other DNA
cattggctttgtgcctttgtcatctacagtttattcaactctagtgttcttaatataccttaatagtaagaaatgggggc

SEQ ID NO: 166589 - DNA, 80 bp, synthetic construct
  source 1..80: mol_type = other DNA
aacagtactttgtacaaaaacagggtcaaatcattacaaaaagaaatgttagggaactaagtatcaaacccattaacact

SEQ ID NO: 166590 - DNA, 80 bp, synthetic construct
  source 1..80: mol_type = other DNA
ccggactttgttggctgggatagtgcagcaacagcaacagctgttggatgtggtcaagagacaacaggaaatgttgcgac

SEQ ID NO: 166591 - DNA, 80 bp, synthetic construct
  source 1..80: mol_type = other DNA
acgcgtaccagcaagccacgcagcaaaacgagggtcgcctcacgcagatccacgacctgcttcatgtcatcgagacgctg

SEQ ID NO: 166592 - DNA, 80 bp, synthetic construct
  source 1..80: mol_type = other DNA
catgggccaggaggatggagacaaggacctcctcctcctcctcccccaggcctggcctaatggcagaagcagccccagag

SEQ ID NO: 166593 - DNA, 80 bp, synthetic construct
  source 1..80: mol_type = other DNA
gagggagctctatctaaagaagatccgctccatggagtctcagctgcaggcctccctgggtcccggcggcaacaacccag

SEQ ID NO: 166594 - DNA, 80 bp, synthetic construct
  source 1..80: mol_type = other DNA
acagccgaagatcagccaacgcagccagacgttgcaacgtgtaggttttacactctggagtctgtggcttggtcgcaaaa

SEQ ID NO: 166595 - DNA, 80 bp, synthetic construct
  source 1..80: mol_type = other DNA
ccggcgccagggcttggacctctgccgtcatgaagataatggccacgtctgacgcctttgtctctctctcgggcactaag

SEQ ID NO: 166596 - DNA, 80 bp, synthetic construct
  source 1..80: mol_type = other DNA
aattgtgttactctaagcacatctttaaaacacagtactatgaagtagagggggggatgccatcaggatgtgcaggaacc

SEQ ID NO: 166597 - DNA, 80 bp, synthetic construct
  source 1..80: mol_type = other DNA
aaagttttatgcgtctatttgtaacaacacaacgtatcgttagtgtcatctttaaaacgatacaatgtattataaattta

SEQ ID NO: 166598 - DNA, 80 bp, synthetic construct
  source 1..80: mol_type = other DNA
agactttaaattaagattaatgaaagatacccaaactatctcacaaactgatgcactagaagaagggttgggagatgaac

SEQ ID NO: 166599 - DNA, 80 bp, synthetic construct
  source 1..80: mol_type = other DNA
cagaacaatttgacccgcgctattctccggcttgccctcacacagataggttgtcctgacacacttcttgaggctttcat

SEQ ID NO: 166600 - DNA, 80 bp, synthetic construct
  source 1..80: mol_type = other DNA
gccttaggcaagcagttacgcaagggtttcctactgagctgaagcctggtactaaccaatttctaactactgatgatggc

SEQ ID NO: 166601 - DNA, 80 bp, synthetic construct
  source 1..80: mol_type = other DNA
ccctacaaactagacaaatacagctgtcccagctaccacccagcaaagatgataatggctaaaaacaaaatactaatccc

SEQ ID NO: 166602 - DNA, 80 bp, synthetic construct
  source 1..80: mol_type = other DNA
tggttgatggcacacagggggtcgcagaacaggtgcttgtggaagtcttgcggggtgcacatctgcagccaggcccttag

SEQ ID NO: 166603 - DNA, 80 bp, synthetic construct
  source 1..80: mol_type = other DNA
tagtgtgttcggcacagaaggtctggaagcacttgatctcaccactagtgccggatttccttatgtgtccatgggtatta

SEQ ID NO: 166604 - DNA, 80 bp, synthetic construct
  source 1..80: mol_type = other DNA
caacaataaattttaccaacattaattactataaagactcctatgctgcatcagccactcgacaagatttcacacaggat

SEQ ID NO: 166605 - DNA, 80 bp, synthetic construct
  source 1..80: mol_type = other DNA
gacctactacaggagtatggcctctacagtccatactaccttaaccccacaagaattaacctagactggatgacccccta

SEQ ID NO: 166606 - DNA, 80 bp, synthetic construct
  source 1..80: mol_type = other DNA
agattcacatggggcggcaatcctatttccacacagattgttaaagacccctgcacccagcccacctttgaaatacccgg

SEQ ID NO: 166607 - DNA, 80 bp, synthetic construct
  source 1..80: mol_type = other DNA
cacctacataaggtttgatagtgaaataacaatagttcctacaatcaggctctacacctcaactggtgcatcatattcag

SEQ ID NO: 166608 - DNA, 80 bp, synthetic construct
  source 1..80: mol_type = other DNA
accagaggacatgatagaaaccagatatgttatcacagaccaaacaaaagacgagttgagtatagaaagttttctaggaa

SEQ ID NO: 166609 - DNA, 80 bp, synthetic construct
  source 1..80: mol_type = other DNA
tctagatttgaccttgaaatgacttttgtgttcacagagaactatcccagtacagctagtggagaagtgcgcaaccaggt

SEQ ID NO: 166610 - DNA, 80 bp, synthetic construct
  source 1..80: mol_type = other DNA
cgcccaccacgcccgcaatacttcctagctgcctgagcgcaaaactccctcagcccggtcggcgcgctgacgccacgcaa

SEQ ID NO: 166611 - DNA, 80 bp, synthetic construct
  source 1..80: mol_type = other DNA
actgaggcatgcaacgcagcaaagggactggaatggatctccaataagatatcaaagttcattgactggttaaaggagaa

SEQ ID NO: 166612 - DNA, 80 bp, synthetic construct
  source 1..80: mol_type = other DNA
cactgttctagccaccttagcattattgggttgtgacatctcaccatggtcatggctgaagaaaaaggtctgtgacatac

SEQ ID NO: 166613 - DNA, 80 bp, synthetic construct
  source 1..80: mol_type = other DNA
atgacaatgcacattccatacttaactttagccaagaaataactaacaaatggcacaaagctagagaagactgctataca

SEQ ID NO: 166614 - DNA, 80 bp, synthetic construct
  source 1..80: mol_type = other DNA
tacagatgtaaaaagatactcctcagtgaaaccgagaaataaaagaggtgtaatggtgctaggattcttgggattccttg

SEQ ID NO: 166615 - DNA, 80 bp, synthetic construct
  source 1..80: mol_type = other DNA
tgcacaagaatgatggaaacgcaaacctccacttggtttggctttaatggcactagggcagaaaacagaacgtatatcta

SEQ ID NO: 166616 - DNA, 80 bp, synthetic construct
  source 1..80: mol_type = other DNA
caaaaacaattacaatgtaacctttaagcttaacttcaaataaacaaggccgtgggagtttcacctgtcggtgtctacct

SEQ ID NO: 166617 - DNA, 80 bp, synthetic construct
  source 1..80: mol_type = other DNA
tagacagaaggcaatgctctcaactcatgtggtatgggatgttgggctccagtccactgtctcattggttgttccttgga

SEQ ID NO: 166618 - DNA, 80 bp, synthetic construct
  source 1..80: mol_type = other DNA
caaaaaacacatttggctatgatccccctaaaagtaaattccttatagaaaatctgccactgtggtctgcagtaacagga

SEQ ID NO: 166619 - DNA, 80 bp, synthetic construct
  source 1..80: mol_type = other DNA
cgcgcctcacggcgtgggacgctcatttcatgacatggtgcgaagagtctactgcgctaatcaaggctcctccggcccct

SEQ ID NO: 166620 - DNA, 80 bp, synthetic construct
  source 1..80: mol_type = other DNA
agccaacgcggtggttgcgtacggcgagtggcccagctatctcaaagactctgaggcgaatccagttgatgcacccactg

SEQ ID NO: 166621 - DNA, 80 bp, synthetic construct
  source 1..80: mol_type = other DNA
ttactgttagccatactaaggtagataacatttttggtcgtgcatggttggctcttgagcacacatttgcaaacgatgga

SEQ ID NO: 166622 - DNA, 80 bp, synthetic construct
  source 1..80: mol_type = other DNA
gcctcgcgacttacaaattgttgacccactcaccgtgggcccagaatgggtcttccacacatgggactggagacgtggac

SEQ ID NO: 166623 - DNA, 80 bp, synthetic construct
  source 1..80: mol_type = other DNA
aaacccattatttttaaaccctgtataaatcaggtttttatgtttccaccagacacccccaggcctattgtaaccaagga

SEQ ID NO: 166624 - DNA, 80 bp, synthetic construct
  source 1..80: mol_type = other DNA
aaagacaatgacatagcaggaacatatggcaaaccaaaaggagacgaggccaaatactttaactaccagctgggaatata

SEQ ID NO: 166625 - DNA, 80 bp, synthetic construct
  source 1..80: mol_type = other DNA
gatcagatatcagctaaagtaacagaactgcaggatgtggccaaagactttctaactaccaaagtgttgtccaaagtagt

SEQ ID NO: 166626 - DNA, 80 bp, synthetic construct
  source 1..80: mol_type = other DNA
accatactgctggcaatttcctcagatcttcaaatagacagcgcagatgagcctggtccagacaacatacccacatgtga

SEQ ID NO: 166627 - DNA, 80 bp, synthetic construct
  source 1..80: mol_type = other DNA
ggcctgtcgctcgagaaggtggccgtggactttggggaccatcccaagaacctcaagatgagccacatctacgtggccat

SEQ ID NO: 166628 - DNA, 80 bp, synthetic construct
  source 1..80: mol_type = other DNA
acccccgcatggcctgccaagtgcaagtcatgcacgacattaccatgaccggaccgttctcctaccacgacgaactagtg

SEQ ID NO: 166629 - DNA, 80 bp, synthetic construct
  source 1..80: mol_type = other DNA
cctgtggggagactcagtatactatactgacagctctcaaacaggctattctgcagacaaagatgtatattcagcatttg

SEQ ID NO: 166630 - DNA, 80 bp, synthetic construct
  source 1..80: mol_type = other DNA
ggtgaagaacagtataatgactttatcacaaaagtccgcacggtggcagtaggtaagacattgagtttaccaccatatag

SEQ ID NO: 166631 - DNA, 80 bp, synthetic construct
  source 1..80: mol_type = other DNA
tcagtgagcttaaagcagacaatgccaccaatgtcacggtccctatcactgtatcaattagtccaatgtttgctgaattc

SEQ ID NO: 166632 - DNA, 80 bp, synthetic construct
  source 1..80: mol_type = other DNA
atttacaggatccacacacagactacactactgtggaggcctatactcttccgtatggctatcagcaggtagatcctact

SEQ ID NO: 166633 - DNA, 80 bp, synthetic construct
  source 1..80: mol_type = other DNA
accttccctagcgtcatcctacattattcaggcactgcagcagaagaaaatctgattaagaagtctccaaaccacctgat

SEQ ID NO: 166634 - DNA, 80 bp, synthetic construct
  source 1..80: mol_type = other DNA
actctcagcaggacctctgcccagttccgcttgtcagtttgcggtttaccgcagctagcttccagtatccgttctgctca

SEQ ID NO: 166635 - DNA, 80 bp, synthetic construct
  source 1..80: mol_type = other DNA
gggaaggctgtgctcttcagagatagaaatacaggtgaccacttatcactggcaaccatatacaataaaattgttgaaga

SEQ ID NO: 166636 - DNA, 80 bp, synthetic construct
  source 1..80: mol_type = other DNA
atcactccggtgggatcaaaactagggagggtacagagagtaccaaaaccatcagttatgcagtgaaatcatgcaaagga

SEQ ID NO: 166637 - DNA, 80 bp, synthetic construct
  source 1..80: mol_type = other DNA
caccccgcacccagtccgactgatctagcttgcggagcatctcaacaggcatgagctgcagggccacggctgtcacggca

SEQ ID NO: 166638 - DNA, 80 bp, synthetic construct
  source 1..80: mol_type = other DNA
ggacattcagtaaaaactatgcctcccactcagatgactatgtacagaaaggaccctttggagggggactaagcagcatg

SEQ ID NO: 166639 - DNA, 80 bp, synthetic construct
  source 1..80: mol_type = other DNA
tacgttcagaggcagtttggcttcggctcctgcgcaaggcccgttatagatttgcgtgtcattgcgcgtacagtttaacc

SEQ ID NO: 166640 - DNA, 80 bp, synthetic construct
  source 1..80: mol_type = other DNA
gcgtcaggatgtacaacccaaccaacatcctagacataaaacagggaccaaaggagtcgttccagagttatgtagataga

SEQ ID NO: 166641 - DNA, 80 bp, synthetic construct
  source 1..80: mol_type = other DNA
caggtgcgtctgtcgggaattggggcacgagaggaccatcaggagtatcgggacggaattatatgaggcaacgagggaaa

SEQ ID NO: 166642 - DNA, 80 bp, synthetic construct
  source 1..80: mol_type = other DNA
gcagtagcttaccaacacacatacagtacaaattttgttcctagtggaggtctcacaaatttaagaacccaaattagaac

SEQ ID NO: 166643 - DNA, 80 bp, synthetic construct
  source 1..80: mol_type = other DNA
gcatggtgtcccagaccaccccgagcaacatcatacactcacaagttctctcccaattaccatatttcagtaggccagga

SEQ ID NO: 166644 - DNA, 80 bp, synthetic construct
  source 1..80: mol_type = other DNA
tacgtgggaaacacgcttcatgaacccgatgagtttgtcaaggaggcggccttacattatgccaaccaactcaagcagtt

SEQ ID NO: 166645 - DNA, 80 bp, synthetic construct
  source 1..80: mol_type = other DNA
acaaacgtaccctagattttcactcccatttctgagtattgcatctgcttactacatgttctatgatggttatgatggtc

SEQ ID NO: 166646 - DNA, 80 bp, synthetic construct
  source 1..80: mol_type = other DNA
caaccagaagatgtgattgaaaccagatatgtgattacagaccagactagggacgagatgtcaattgaatcttttcttgg

SEQ ID NO: 166647 - DNA, 80 bp, synthetic construct
  source 1..80: mol_type = other DNA
cagatctccctctcccgggagggagttcatgcagtcgtcgcctatgaaccaactgaaggcgacatctttctggaagtcct

SEQ ID NO: 166648 - DNA, 80 bp, synthetic construct
  source 1..80: mol_type = other DNA
ggtaattgaagaagagtgtgaattggactattttagagttaagtatcttgagtcctctgttaattctgatcatatattct

SEQ ID NO: 166649 - DNA, 80 bp, synthetic construct
  source 1..80: mol_type = other DNA
gcagcagctacactctggggtctcaggcctcccagtctatccaggaggaggacgtgagtgacactgatgagtctgactac

SEQ ID NO: 166650 - DNA, 80 bp, synthetic construct
  source 1..80: mol_type = other DNA
cttttcggccctgagaaatggatgctgaactcggtttctggtaggcaggtggcagcacagggcggtgtactggcccctgc

SEQ ID NO: 166651 - DNA, 80 bp, synthetic construct
  source 1..80: mol_type = other DNA
tcggccaaaacatgtttcaccatgccatggggagatctggatatattatacacactcaatgcaatgctaccaaattccac

SEQ ID NO: 166652 - DNA, 80 bp, synthetic construct
  source 1..80: mol_type = other DNA
cggattcaccccgctcactttatacacacccaatatagtatctattgtactgctactgaggcactaccaccgcaatggga

SEQ ID NO: 166653 - DNA, 80 bp, synthetic construct
  source 1..80: mol_type = other DNA
aataaagcttggttaacagtagtctctgcagtcaccagtgcaattagtatactacttttagtgactaaaatctttaagaa

SEQ ID NO: 166654 - DNA, 80 bp, synthetic construct
  source 1..80: mol_type = other DNA
cgcgggacgccacgcaacggcagtgcgcacaaaaggcgccggacacagcacgccgcaaacgcgctgaggacgccgccgcg

SEQ ID NO: 166655 - DNA, 80 bp, synthetic construct
  source 1..80: mol_type = other DNA
agtaaaagataaatggaaactagtggacccagacaacctgaacttagaaattacagtactagaattagatagaaatgaga

SEQ ID NO: 166656 - DNA, 80 bp, synthetic construct
  source 1..80: mol_type = other DNA
taagatggctcctcgcagaaccaccatctccagacgcaacccacagtcttcgatgaatgttaattccaacaaccgctgct

SEQ ID NO: 166657 - DNA, 80 bp, synthetic construct
  source 1..80: mol_type = other DNA
tgccttctaccaaacagccatagttgttccccctcaaactccaacggacatgtcaattttggccttcatcagtgcgtgca

SEQ ID NO: 166658 - DNA, 80 bp, synthetic construct
  source 1..80: mol_type = other DNA
gggctttactaaacagactccgagtcgctcttggactctgaggtggcgtacagcaacgaaagtgagtggggccagacttc

SEQ ID NO: 166659 - DNA, 80 bp, synthetic construct
  source 1..80: mol_type = other DNA
agtgggtggtggtggctcacgtttggatgtgctcggaccgtgacggtgggtttcgtcgcgcccacggtccgggcacaatc

SEQ ID NO: 166660 - DNA, 80 bp, synthetic construct
  source 1..80: mol_type = other DNA
caatcacacatgacaatgggccatggctttgctgaaccaggagactgtggtggcattctcagatgtcaacatggagtgat

SEQ ID NO: 166661 - DNA, 80 bp, synthetic construct
  source 1..80: mol_type = other DNA
catgtctcaatatcgaccttcctcaatttagtgaagacggtgaaccacaaaattatagtaaacctaacaaaaataactta

SEQ ID NO: 166662 - DNA, 80 bp, synthetic construct
  source 1..80: mol_type = other DNA
attgtcacatcaaagaaggttcatgaatgtggatatccaaccatacacacccctgcaaagacaaagctgcaacctagtgt

SEQ ID NO: 166663 - DNA, 80 bp, synthetic construct
  source 1..80: mol_type = other DNA
acagaatccagcaacagcgactcctcggcagaagcctcagatgcctcttccagcaactaacacgcacgcagatgggtctc

SEQ ID NO: 166664 - DNA, 80 bp, synthetic construct
  source 1..80: mol_type = other DNA
ccttgcctgcctcaccatgacacactaagcccctgctaatccatgagccccgcctttaggaagcaccacgtcccggggac

SEQ ID NO: 166665 - DNA, 80 bp, synthetic construct
  source 1..80: mol_type = other DNA
taataatcttatgcgcaaaacaggtcactatgacatctcacatggcacgcacactacatgggctcttatactaatttgca

SEQ ID NO: 166666 - DNA, 80 bp, synthetic construct
  source 1..80: mol_type = other DNA
tcaggcacaaatggaatatatcacaaaaagacagacagtaactatggataccactcttttcaagtaaaaggtaaaaaaga

SEQ ID NO: 166667 - DNA, 80 bp, synthetic construct
  source 1..80: mol_type = other DNA
tcaacctcagaagcaataactcagcaacactaatattgccatatgttaatgccgtacctatggactctatggttaggcat

SEQ ID NO: 166668 - DNA, 80 bp, synthetic construct
  source 1..80: mol_type = other DNA
aagaagaaagaaaataaaactaacacagtggaatcccacagtggtaaaaaaatgcgtggtaaaaggttacctgcccctcc

SEQ ID NO: 166669 - DNA, 80 bp, synthetic construct
  source 1..80: mol_type = other DNA
tagatcatgaagcagagcagtataatgcaccaggcaagaacttttctcagtggaagatcacaatcaaggagatggcccaa

SEQ ID NO: 166670 - DNA, 80 bp, synthetic construct
  source 1..80: mol_type = other DNA
gtccagaagtaggctatgttccagtaagtgacaccttttgcaacggagacatgccgtttcttgcaccatatatcccaatc

SEQ ID NO: 166671 - DNA, 80 bp, synthetic construct
  source 1..80: mol_type = other DNA
ccaatcatgtcaatacaatgtgtacagaaaaaagacgcgacaacgacgggggggggggcgtacgattaatcttacatatt

SEQ ID NO: 166672 - DNA, 80 bp, synthetic construct
  source 1..80: mol_type = other DNA
tccatgtactaaaaccttcactatatgaaggagcaatgtccaacctagccacagagccatgggcagacaatagaaaaaaa

SEQ ID NO: 166673 - DNA, 80 bp, synthetic construct
  source 1..80: mol_type = other DNA
agcatcctaaacagtttcgtttctcaatacatccccccttcgcgggaaatgactaaggatctgactgaactttgggaaag

SEQ ID NO: 166674 - DNA, 80 bp, synthetic construct
  source 1..80: mol_type = other DNA
ccgcaacaccctgtctgctccccgtccctcagcgcggtcccgcagtcaacccccgtccccgccggcgccacccctggccc

SEQ ID NO: 166675 - DNA, 80 bp, synthetic construct
  source 1..80: mol_type = other DNA
gcgtgtactttaagcccaaacatgtgcgcggatggatacccagaccacccagactgtgtcagtacaagaggaaggctacc

SEQ ID NO: 166676 - DNA, 80 bp, synthetic construct
  source 1..80: mol_type = other DNA
aaccagtggctgttgccggccggcgtggcctcgtgtaaatttctatcggtgatctactactcaagctgcacagtgggctt

SEQ ID NO: 166677 - DNA, 80 bp, synthetic construct
  source 1..80: mol_type = other DNA
tctctgcccccaaacccaaaacactttgatgggtacaatcagcaggatgtggtgatcatggatgatgtgtgtcagaaccc

SEQ ID NO: 166678 - DNA, 80 bp, synthetic construct
  source 1..80: mol_type = other DNA
cactagcaggtagagcctgggtgttccctgctagactctcaccagcacttggccggtgctgggcagacggctccacgctt

SEQ ID NO: 166679 - DNA, 80 bp, synthetic construct
  source 1..80: mol_type = other DNA
ccgttggaggatggtctggttgcgaccgctcagataccagatcacctttttcacccaggtggagcttttctccaccaagg

SEQ ID NO: 166680 - DNA, 80 bp, synthetic construct
  source 1..80: mol_type = other DNA
tactttaaacccaaacatatcagagtgtgggtgccaagaccaccacgtttgtgcccctatattaaatctagtaacgttaa

SEQ ID NO: 166681 - DNA, 80 bp, synthetic construct
  source 1..80: mol_type = other DNA
cccatatcaatggatgggttatgaattatggcccaagaagtggaagctgcaaaagatcaatttgccagaaaaagaggtat

SEQ ID NO: 166682 - DNA, 80 bp, synthetic construct
  source 1..80: mol_type = other DNA
gtaactactggggtggaacttgttcctcctaatgtgtggttggtggtatttgcctgtggacttgtttctcccacggtagg

SEQ ID NO: 166683 - DNA, 80 bp, synthetic construct
  source 1..80: mol_type = other DNA
ttgtggagggaagttgctgtgtaagcacggcgtgataggaatcatcacagctggtggtgaaggtcatgtcgcctttactg

SEQ ID NO: 166684 - DNA, 80 bp, synthetic construct
  source 1..80: mol_type = other DNA
attccactgtggtcagccctatttggatactctgaatatgtagagagccagctaggccccttccaggaccacgggaccgt

SEQ ID NO: 166685 - DNA, 80 bp, synthetic construct
  source 1..80: mol_type = other DNA
tgcgcaaccatagtggtgccatacatcaacagcgtcccgttcgactcagctcttaaccactgtaattttggtttggtagt

SEQ ID NO: 166686 - DNA, 80 bp, synthetic construct
  source 1..80: mol_type = other DNA
agagagattcgagtaccacctaggctggtactctcccatactactgagcaaccacagaagcaacttaaactttgccaggg

SEQ ID NO: 166687 - DNA, 80 bp, synthetic construct
  source 1..80: mol_type = other DNA
ctccgccggcgttttctccatcacgggaccgcgccgtgcgcgcgttcccaggcacgcggcccacgctctacccgcacttt

SEQ ID NO: 166688 - DNA, 80 bp, synthetic construct
  source 1..80: mol_type = other DNA
cggactgaaaatgcgaaccgtccctgtgactaaactgtacaccagccgcatggtcactaatcttaccgtgggccgttatg

SEQ ID NO: 166689 - DNA, 80 bp, synthetic construct
  source 1..80: mol_type = other DNA
cgcccgtatatgctacagtacatgtatgtgcctcccggtgctcctaaacctactggcagggacgcgtttcagtggcaaac

SEQ ID NO: 166690 - DNA, 80 bp, synthetic construct
  source 1..80: mol_type = other DNA
cctggctcagagacaccacaaaaagcccagtcataggctttagagtactaaaaaatagcatatacacaaacctcagtaac

SEQ ID NO: 166691 - DNA, 80 bp, synthetic construct
  source 1..80: mol_type = other DNA
gctgctccacagcgtatgtcgtgcgtttcctgggcgtggtttacatcctgatataaagaagtgcacttccgaatggctga

SEQ ID NO: 166692 - DNA, 80 bp, synthetic construct
  source 1..80: mol_type = other DNA
ttcaattggaccctgggaacagcccagtgttaaatcgtaccctgttaggggaaatcatcaactattatgcacactggtcg

SEQ ID NO: 166693 - DNA, 80 bp, synthetic construct
  source 1..80: mol_type = other DNA
cacaggcaagagtcctactagtatgtccctacacatatcctaaaatgtaccacgaaacaaacccactatatggctttatt

SEQ ID NO: 166694 - DNA, 80 bp, synthetic construct
  source 1..80: mol_type = other DNA
tggatttactccgctgactatctactcaccaggtcttattaaggttattctgttgattaggtcacaatttcacaatggga

SEQ ID NO: 166695 - DNA, 80 bp, synthetic construct
  source 1..80: mol_type = other DNA
cccgcctccatgggatccaactaattcagacgtaaacacaggtagacagtacctagaacatgactgtggtatctacagtc

SEQ ID NO: 166696 - DNA, 80 bp, synthetic construct
  source 1..80: mol_type = other DNA
ggtggtgggtatgtccccttctgcggagaagactacctcagtcaccgattccatcatgctcgctatcgtgaatttcaaat

SEQ ID NO: 166697 - DNA, 80 bp, synthetic construct
  source 1..80: mol_type = other DNA
caaattgaagattgtggcctatggtgatgatgttattgcgtcatacccataccctttagattccaagtttatagcagaga

SEQ ID NO: 166698 - DNA, 80 bp, synthetic construct
  source 1..80: mol_type = other DNA
tgtggtaccagtctgttattttggcacataactctttttgtggctgtgatgatcccattgggcatctgcttgggctgcac

SEQ ID NO: 166699 - DNA, 80 bp, synthetic construct
  source 1..80: mol_type = other DNA
acaggtcctaacagacatggaagatgttgacacagagataactcttttgtggttagaccaaaatgagaaatttagagaca

SEQ ID NO: 166700 - DNA, 80 bp, synthetic construct
  source 1..80: mol_type = other DNA
tttgtggcattggacgtccctttggaggacagcgtgggggccaaggtggtagcgttggtaatacgggtagtagcactggt

SEQ ID NO: 166701 - DNA, 80 bp, synthetic construct
  source 1..80: mol_type = other DNA
tgttaaggaacacggtctggtcactaaagttggtcaggctgacgtccaccccaccccggcgccacctgcagggcttcact

SEQ ID NO: 166702 - DNA, 80 bp, synthetic construct
  source 1..80: mol_type = other DNA
gcaagcatggtgtgattggtatgattactgcaggtggtgatagccatgttgccttcactgatctgcgcccatattctagc

SEQ ID NO: 166703 - DNA, 80 bp, synthetic construct
  source 1..80: mol_type = other DNA
aagcttgatatgagctatctagcccaaattggtgaacaatatggcttgaaaatgacccctgctgataaatcagatacatt

SEQ ID NO: 166704 - DNA, 80 bp, synthetic construct
  source 1..80: mol_type = other DNA
aatgtacgtccctcctggtggtccagtgccggcgtctgtagatagttacacctggcaatcctcgaccaatcccagtatct

SEQ ID NO: 166705 - DNA, 80 bp, synthetic construct
  source 1..80: mol_type = other DNA
taccccatcttaaagagacaaaaacaagtaatgaatgacatttgcaagacgggaccgttcgcctacagagacgagagact

SEQ ID NO: 166706 - DNA, 80 bp, synthetic construct
  source 1..80: mol_type = other DNA
atcttcatcgggccggcccaagggatcgggaagaggagtgtggttcatctgggagagcgggtgcgtgggagaggtcactc

SEQ ID NO: 166707 - DNA, 80 bp, synthetic construct
  source 1..80: mol_type = other DNA
ggtataactatacacaccctggtgagcgaggaaggcaggttggtgattcgcgtgatcctatcaccgcagtacatccaagt

SEQ ID NO: 166708 - DNA, 80 bp, synthetic construct
  source 1..80: mol_type = other DNA
cagaacgaactgtgtgacctaacactgttcaccatctttgcaaccgcagcggatctgcaatatccgttcggctcaccaca

SEQ ID NO: 166709 - DNA, 80 bp, synthetic construct
  source 1..80: mol_type = other DNA
cccgataagcaccctcgcctcctacaagtgtcgaacccgaaactgctcggaccgaggacagtgttccacaagtgggacat

SEQ ID NO: 166710 - DNA, 80 bp, synthetic construct
  source 1..80: mol_type = other DNA
gggccctgccggccccggaggcggagacccctcaccggagacacgtccgccgggagaaccccggtagcggcgtgccatgg

SEQ ID NO: 166711 - DNA, 80 bp, synthetic construct
  source 1..80: mol_type = other DNA
tggtgcctgagcaccagttggcttatataggtgcagatgcacgagtgagctatgaacacactcatccaggagaaaaaggc

SEQ ID NO: 166712 - DNA, 80 bp, synthetic construct
  source 1..80: mol_type = other DNA
gatttcgaccaggttcgttcactcatggaaaatagcgatcgctgccaggatatacgtaatctggcatttctggggattgc

SEQ ID NO: 166713 - DNA, 80 bp, synthetic construct
  source 1..80: mol_type = other DNA
tccacctgcagctcgcgcagcagcagcagatcgggcagcagctccgattcctgttccaacaaatgctcaaaacccaggcc

SEQ ID NO: 166714 - DNA, 80 bp, synthetic construct
  source 1..80: mol_type = other DNA
accttggtgaggcttttggagccggtttcatagataacattaaggagcaaattcagattataaaccctatcaacaaaatt

SEQ ID NO: 166715 - DNA, 80 bp, synthetic construct
  source 1..80: mol_type = other DNA
ctttggccataatcccagtcgtccctctcaatactagtggtggaacaactatggtgccaatcactgtctctatagcccct

SEQ ID NO: 166716 - DNA, 80 bp, synthetic construct
  source 1..80: mol_type = other DNA
ccgacactaggaaagacattaacaccgtgacctcgatacagagtgaacgtcgcggtgatatgtccgcactaaacacacat

SEQ ID NO: 166717 - DNA, 80 bp, synthetic construct
  source 1..80: mol_type = other DNA
cccacgcggtgcagtggtcttgtattacggtacatttccataccagttttatacaccccaccccgaaactcatagaagtt

SEQ ID NO: 166718 - DNA, 80 bp, synthetic construct
  source 1..80: mol_type = other DNA
agtgcagggtgtcactgaggagagaaacaacattaattacgtcccggggctcagtcacagtagcagtttgcgcatgcaac

SEQ ID NO: 166719 - DNA, 80 bp, synthetic construct
  source 1..80: mol_type = other DNA
tagaaagaaagatctaattaataatagcacaaaggatataaccaaactgaagctggcacttgataaatatggggtcgatt

SEQ ID NO: 166720 - DNA, 80 bp, synthetic construct
  source 1..80: mol_type = other DNA
ccaaatgtccagtacaatacgcgtgtatttcaaacccaagcacatccgggtgtgggtgccacgaccaccacgtttgtgcc

SEQ ID NO: 166721 - DNA, 80 bp, synthetic construct
  source 1..80: mol_type = other DNA
tgggtattgtggtggtgtactgtataaagtgggttccatccttggtatacatgttggaggcaatgggagagatggctttt

SEQ ID NO: 166722 - DNA, 80 bp, synthetic construct
  source 1..80: mol_type = other DNA
aaaagtagattgattgaagcttctagtttgaatgattctgtgaatatgagaatgaagttagggagtctctataaaacttt

SEQ ID NO: 166723 - DNA, 80 bp, synthetic construct
  source 1..80: mol_type = other DNA
gcaggggggggcggttatgtctgttttgcagatataagacaattagattgcattgcagaggagcagggcttgaatgatta

SEQ ID NO: 166724 - DNA, 80 bp, synthetic construct
  source 1..80: mol_type = other DNA
gactcatcaaccactcgttcgaccaaagacgggggctctttactgacagagctatcaaaagaatgtacgatgaacagatt

SEQ ID NO: 166725 - DNA, 80 bp, synthetic construct
  source 1..80: mol_type = other DNA
tcgggctccattttaggccttccggactacaaaaatggcggatttcgtgacgtcacggccgccattttaagtaaggcgga

SEQ ID NO: 166726 - DNA, 80 bp, synthetic construct
  source 1..80: mol_type = other DNA
ctggactatactgcccaagcgtctgaatatgtgccagtgactgtcacgattgccccaatgtgtgctgagtacaacggcct

SEQ ID NO: 166727 - DNA, 80 bp, synthetic construct
  source 1..80: mol_type = other DNA
catcgccgcccacgtcaacggtggcgacaccgtactttcccatgcggtttataaacgtcaagagtcacgtcagtcgccca

SEQ ID NO: 166728 - DNA, 80 bp, synthetic construct
  source 1..80: mol_type = other DNA
acatcatttttaagtgtttatcaaataacagtcttcttttaattaacgtaaccgtaaattacaccaacacttaccgtact

SEQ ID NO: 166729 - DNA, 80 bp, synthetic construct
  source 1..80: mol_type = other DNA
tgattataatgaaagagtgaagaactacaatgcctggaaacagcaattggagaatcaaactcttgatgacttagatgatg

SEQ ID NO: 166730 - DNA, 80 bp, synthetic construct
  source 1..80: mol_type = other DNA
ctagaagacatgcccctgtgggcaatgtgctttgggtacagtgactatgtagagacccagctaggaccaaatgtggacca

SEQ ID NO: 166731 - DNA, 80 bp, synthetic construct
  source 1..80: mol_type = other DNA
accgcgggctacaagtttagattctcatggggcggtgatatggtttccgaacaggtcattaaaaacccagacagaggaga

SEQ ID NO: 166732 - DNA, 80 bp, synthetic construct
  source 1..80: mol_type = other DNA
attgaacaggttgacttataatagttcaagccctagctcagtacattgtattgttcaagggagattgggtagtgatgcaa

SEQ ID NO: 166733 - DNA, 80 bp, synthetic construct
  source 1..80: mol_type = other DNA
gatatgtagtgtacaacagaaactttggcaggggcaagtggatagacggaggaggctacatccccctgcacgagaggaca

SEQ ID NO: 166734 - DNA, 80 bp, synthetic construct
  source 1..80: mol_type = other DNA
gtggggtgttagtgggaaatgcttttgcgtttcctcaccaaatcattaacttgagaaccaacaacagtgccactcttgtg

SEQ ID NO: 166735 - DNA, 80 bp, synthetic construct
  source 1..80: mol_type = other DNA
tgtggcacagcaaacaccactctcaagttactgctggcatatacacctccaggtatagataaaccaacaactaggaaaca

SEQ ID NO: 166736 - DNA, 80 bp, synthetic construct
  source 1..80: mol_type = other DNA
tcagcttccaggtccttagttccgtttacaacgactacctcagtattaatgcctttaataatgacagctcagacaacaat

SEQ ID NO: 166737 - DNA, 80 bp, synthetic construct
  source 1..80: mol_type = other DNA
atttctgagtgagggtgacaccgccaaggaattttcagaggcggctgtttcaacatcacacggagttcagacggctgtac

SEQ ID NO: 166738 - DNA, 80 bp, synthetic construct
  source 1..80: mol_type = other DNA
actacatttacatcttccaccaatacatccacaggattcaccacaaattctgtaaaaagcacagatgggagctctactat

SEQ ID NO: 166739 - DNA, 80 bp, synthetic construct
  source 1..80: mol_type = other DNA
tgcacttacaaatggggagcgagctaacactttccaggcaactgttaacaataaccaaaacgacgtgcaaaacgtggtac

SEQ ID NO: 166740 - DNA, 80 bp, synthetic construct
  source 1..80: mol_type = other DNA
tctacaaacactgctgctactatcagtcctttctcaccacccaatttatagccaaaatcactcgcacaccagatggacaa

SEQ ID NO: 166741 - DNA, 80 bp, synthetic construct
  source 1..80: mol_type = other DNA
catgtagactctaaacaagcaaataatactgactactcagagtgtaaacatactaaaataactaagcaagtagaaaccaa

SEQ ID NO: 166742 - DNA, 80 bp, synthetic construct
  source 1..80: mol_type = other DNA
atccacagatggaaatacatttcaaacatgggctacacaaaaccctcacaaaaacacattatatggtggatcagcatatg

SEQ ID NO: 166743 - DNA, 80 bp, synthetic construct
  source 1..80: mol_type = other DNA
ataaatgcgtggtactgtgttttgtgtcggcgtgtaatgacttttctgtgcgcatgctacgtgacactccatttattgga

SEQ ID NO: 166744 - DNA, 80 bp, synthetic construct
  source 1..80: mol_type = other DNA
tcgccacgacgtctccgcgtatctttgtagcctcaggaatccgtccccacgtccacccatcccgagcactccacacgcta

SEQ ID NO: 166745 - DNA, 80 bp, synthetic construct
  source 1..80: mol_type = other DNA
cgatctccccctggtttccagcagactcttgccagagacgtcgggcgggactgtcgtcgtcaaccacagcagcgtcgcga

SEQ ID NO: 166746 - DNA, 80 bp, synthetic construct
  source 1..80: mol_type = other DNA
actttgtaccaggcagtgctataccagtaggctgcattctagtcacgtgttcagcatgtccagacatggcagcacgcatg

SEQ ID NO: 166747 - DNA, 80 bp, synthetic construct
  source 1..80: mol_type = other DNA
cacatagtagatccctcatatacaacagtccaacaaaaagtacccagtggaactgcaaaacccaacaaatgggacaaaga

SEQ ID NO: 166748 - DNA, 80 bp, synthetic construct
  source 1..80: mol_type = other DNA
taggtcagaacaaatgtgacgaaccaccctcaaatctgtgacagataaccctcagactatcctgtcgtcatggaagtgat

SEQ ID NO: 166749 - DNA, 80 bp, synthetic construct
  source 1..80: mol_type = other DNA
ataacacagctactacaagcactctcatcacttctaatccaaatacatcgtatgttttcacctcttacaatacatcgaca

SEQ ID NO: 166750 - DNA, 80 bp, synthetic construct
  source 1..80: mol_type = other DNA
agtgcgacgcaagttttcgggttcaagctgcaaccaggggatgatagtgtgttcaaaaggacactgctgggagagatctt

SEQ ID NO: 166751 - DNA, 80 bp, synthetic construct
  source 1..80: mol_type = other DNA
gggctgcggctacaagtacgactggtccaacgtggtgacgcccaaggcggcgtacgccgagcttttctttctgctctgct

SEQ ID NO: 166752 - DNA, 80 bp, synthetic construct
  source 1..80: mol_type = other DNA
gggcagtacaacggtacaagaacagttacagcaacagctccagcaacagcgagtcatgggaatccaactccgaaacgtct

SEQ ID NO: 166753 - DNA, 80 bp, synthetic construct
  source 1..80: mol_type = other DNA
aaatgattaacttgagaacaaataattcggctaccattgtggttccatatataaatgctctacccatggacaatatgctc

SEQ ID NO: 166754 - DNA, 80 bp, synthetic construct
  source 1..80: mol_type = other DNA
acatatccagaagcggcccctttagttatacagaaaaaaacaacagtgtaaacataacagcaaaatacaaatttagatgg

SEQ ID NO: 166755 - DNA, 80 bp, synthetic construct
  source 1..80: mol_type = other DNA
aattaagaagagggcaatcctcaataaggacacacaggatatcaccaaaatgcaggagtgtctcagtaaatacggaattg

SEQ ID NO: 166756 - DNA, 80 bp, synthetic construct
  source 1..80: mol_type = other DNA
aaaatttactttcctgttttgcgggagcatgatggctacgggcaaattacttatctcctatgccccgcccggggccaaac

SEQ ID NO: 166757 - DNA, 80 bp, synthetic construct
  source 1..80: mol_type = other DNA
aataccacacaggcatctacagccccatatttctcagcagacacagaagcacactaaactttgccagggcctaccaggac

SEQ ID NO: 166758 - DNA, 80 bp, synthetic construct
  source 1..80: mol_type = other DNA
tcgcacccatgtgcgcggaatacaacggattgagactctcaacgcaaccacagggtttgccagtgatgaacacaccggga

SEQ ID NO: 166759 - DNA, 80 bp, synthetic construct
  source 1..80: mol_type = other DNA
aattttacaaattggagaataaacgcacgaaaaattgctcaactccagcgaaagttggaaatgttcacatacttgacgtt

SEQ ID NO: 166760 - DNA, 80 bp, synthetic construct
  source 1..80: mol_type = other DNA
atctacagagcatggacgcatatcatatagaagtgaacacaggaaatcatcagggtgataagatctttgcattccaaata

SEQ ID NO: 166761 - DNA, 80 bp, synthetic construct
  source 1..80: mol_type = other DNA
agcagcaaatatcaacaccacgataaaccacaccaagctgagtaatggagaggtggcaagtgaattcaagcccagtacca

SEQ ID NO: 166762 - DNA, 80 bp, synthetic construct
  source 1..80: mol_type = other DNA
cttaccttcgcataccccgcgacccggcacctcgacacctgtgaacaccccggagcagatccgtagagcccgggctctgc

SEQ ID NO: 166763 - DNA, 80 bp, synthetic construct
  source 1..80: mol_type = other DNA
gctcctgcaaagcacacatagaagacataccactgtgggcagccttctatggctacagtgacttcatagagtcagagcta

SEQ ID NO: 166764 - DNA, 80 bp, synthetic construct
  source 1..80: mol_type = other DNA
cgccaatcctggaatcttgacggggtcggcagttggctgtgatcccgacatcttctggtcacaactccacgcttcattag

SEQ ID NO: 166765 - DNA, 80 bp, synthetic construct
  source 1..80: mol_type = other DNA
tgtgaaatcaactccactaacggcagaagaaggaacaaatattacaatacatggcaatgacacgtgggattgtcccgacg

SEQ ID NO: 166766 - DNA, 80 bp, synthetic construct
  source 1..80: mol_type = other DNA
caggaagccaactcttgggacataactgtaggctacaacgccacttttaaatggggcggttcccctctgccttcacagcc

SEQ ID NO: 166767 - DNA, 80 bp, synthetic construct
  source 1..80: mol_type = other DNA
gataaaaacccacatcaaaatacactatatgcaggcagtacatacataactcaaccacaaaaccaaaagaaaacaccacc

SEQ ID NO: 166768 - DNA, 80 bp, synthetic construct
  source 1..80: mol_type = other DNA
ctcaagaggggtttcaaaccagatgagagacactctttcctaatacatccaatatacccagaggaagaagtgtgggaatc

SEQ ID NO: 166769 - DNA, 80 bp, synthetic construct
  source 1..80: mol_type = other DNA
aaatcacaaaaacaacgagtgtcaaagaatttggattgccaactatacacacaccaagcaagactaaattgcagcctagt

SEQ ID NO: 166770 - DNA, 80 bp, synthetic construct
  source 1..80: mol_type = other DNA
tgaccttcgtaataactagctcccaggatgatgggacacagttggcgcaggatatgccagtgcttacgcatcaagtcatg

SEQ ID NO: 166771 - DNA, 80 bp, synthetic construct
  source 1..80: mol_type = other DNA
taccaccaggaggccctattccaaaaaccaggaatgctgatgaatggcaaacaggcaccaatgcatcagtcttttggcag

SEQ ID NO: 166772 - DNA, 80 bp, synthetic construct
  source 1..80: mol_type = other DNA
gggtttactttaaacccaaacacgtacgcggatgggtcccacgtccacccagactatgcccatacatcagaaaggccaac

SEQ ID NO: 166773 - DNA, 80 bp, synthetic construct
  source 1..80: mol_type = other DNA
ctactgcaaaaataattacaatgtaacctttcagctcaactacaaataaagtgcagcttcaatttgctaggccgtgggag

SEQ ID NO: 166774 - DNA, 80 bp, synthetic construct
  source 1..80: mol_type = other DNA
aagggcaaaaagtacaaaaaactaagaataggacccccaacactactaactgacaagtggtactttcaaaaggacatctg

SEQ ID NO: 166775 - DNA, 80 bp, synthetic construct
  source 1..80: mol_type = other DNA
gcatcgccattataacttcacattaatgatcataccatttgtgcccttggattatagcgacggagcatctacgtatgtcc

SEQ ID NO: 166776 - DNA, 80 bp, synthetic construct
  source 1..80: mol_type = other DNA
ctacctgaacatgagggtaccagagaagccattagaaaaagactgcacccagactctcccacaggctcaactccaaacca

SEQ ID NO: 166777 - DNA, 80 bp, synthetic construct
  source 1..80: mol_type = other DNA
cagtaataattgattcttgtccttttgatcacaatcatgctgatgatgactcagaagatcaaacagaagactctgcatat

SEQ ID NO: 166778 - DNA, 80 bp, synthetic construct
  source 1..80: mol_type = other DNA
ttggaagatggccgccgtcaggctgttggccaacagatagatgaaaagcaccgtggcgttactagggtgctcgttgccca

SEQ ID NO: 166779 - DNA, 80 bp, synthetic construct
  source 1..80: mol_type = other DNA
gtgatcgctcgagaccgattctgtgcttgtccctgtcgcctgcctcagaccctcgactctcttataccatgttaggtgag

SEQ ID NO: 166780 - DNA, 80 bp, synthetic construct
  source 1..80: mol_type = other DNA
tggatggacacctgatggctttcgattattcaaattttgatgcttcattatccccagtatggtttacctgtctagagaga

SEQ ID NO: 166781 - DNA, 80 bp, synthetic construct
  source 1..80: mol_type = other DNA
acagtaccttcataaatacagtcctaattatcacatcaagaaagtaggtacccaggagctcaccgaaaaccattacttga

SEQ ID NO: 166782 - DNA, 80 bp, synthetic construct
  source 1..80: mol_type = other DNA
taccgtctgcgatggcaaattgaactggcttttaagcggctcaaaagtttgctgcacctggatgctttgcgtgcaaagga

SEQ ID NO: 166783 - DNA, 80 bp, synthetic construct
  source 1..80: mol_type = other DNA
gccaagtagagaccatccttgaagttaacaacgtccctaccaatgctaccagtttgatggaaaggctacggttcccggtg

SEQ ID NO: 166784 - DNA, 80 bp, synthetic construct
  source 1..80: mol_type = other DNA
tctgattcaccccacttttccagagagtgaaatctttgaatctattagatggacaaagaaaccttctcagatgcaggagc

SEQ ID NO: 166785 - DNA, 80 bp, synthetic construct
  source 1..80: mol_type = other DNA
tcaagtgaattcaaacagctagattataacaatgtgacctttctaaaaagaggattcagacaagatgagagatatacttt

SEQ ID NO: 166786 - DNA, 80 bp, synthetic construct
  source 1..80: mol_type = other DNA
tggtaatatcttgcttagtgggaatcaaactgctaggatgcttaaatataattatccaactaaatctggttactgtggag

SEQ ID NO: 166787 - DNA, 80 bp, synthetic construct
  source 1..80: mol_type = other DNA
acaaagattcagctagcagtggattgagcaaacaagacttttccatggaccctgaaaagttcacaaaaccaatagcagag

SEQ ID NO: 166788 - DNA, 80 bp, synthetic construct
  source 1..80: mol_type = other DNA
ccccaaccaccaggaaggatgccatgttgggtacccacatcatatgggacttggggcttcaatcatcatgtacaatgttg

SEQ ID NO: 166789 - DNA, 80 bp, synthetic construct
  source 1..80: mol_type = other DNA
cgcgtacatgatcgttgagctcttgccaatattgtttggcacactccagatcggaggtttgtggatagtcgggtcggatc

SEQ ID NO: 166790 - DNA, 80 bp, synthetic construct
  source 1..80: mol_type = other DNA
acccacaaccaccaccggcaccacggcgtggtggtgggcaagacgccgccgacggtggccgtggaggagacgatggagac

SEQ ID NO: 166791 - DNA, 80 bp, synthetic construct
  source 1..80: mol_type = other DNA
cattccaggacagagtcgtctattgagaacttcctgtgcagggccgcatgtgtgtacataacaacgtacaaatcagccgg

SEQ ID NO: 166792 - DNA, 80 bp, synthetic construct
  source 1..80: mol_type = other DNA
acaaaaaagtagctgacgaaggcattagcaaactaagccattcagtttttgcacataatgtaggcatatttagtagtaca

SEQ ID NO: 166793 - DNA, 80 bp, synthetic construct
  source 1..80: mol_type = other DNA
taagatttgatagtgagataaccattgttcctactattagactcttcacgtccactggtgtatcatactcgggtcttcct

SEQ ID NO: 166794 - DNA, 80 bp, synthetic construct
  source 1..80: mol_type = other DNA
aaaactcattttgtcccctcgactgggttttgggatgcggggtaatggcgggcaatgccacagtcttcccccatcaattc

SEQ ID NO: 166795 - DNA, 80 bp, synthetic construct
  source 1..80: mol_type = other DNA
cccgcaagtccccgccgcaagcagctcccccgtccccagcgcaacccccggctccccgtccccaacggcgcacaaaaacc

SEQ ID NO: 166796 - DNA, 80 bp, synthetic construct
  source 1..80: mol_type = other DNA
cattaagaagacaagactaaatatagtaggctctgattcttggaatatccataatctgcacatcaatgtttaccctgctt

SEQ ID NO: 166797 - DNA, 80 bp, synthetic construct
  source 1..80: mol_type = other DNA
attatcaggaaaatgcacatattcggaagaaactagagatgtttacatacgtccgatttgatctggagataactattgtc

SEQ ID NO: 166798 - DNA, 80 bp, synthetic construct
  source 1..80: mol_type = other DNA
ccagcctcgtcttcgccggcgttcacgagaaagcagccacctcccgtctcgccgggcacgccgaagcaaatggagttgcc

SEQ ID NO: 166799 - DNA, 80 bp, synthetic construct
  source 1..80: mol_type = other DNA
tgctaaaaaaactacaagtagtacaggtaacaaggctccaactttaggtgaggcagtacctacgttaaaaaccgacttta

SEQ ID NO: 166800 - DNA, 80 bp, synthetic construct
  source 1..80: mol_type = other DNA
gtaactatatctataataggcatggagatacccttgaaggagcaggagagctcattaaaatcctgcaaagagcaatcttc

SEQ ID NO: 166801 - DNA, 80 bp, synthetic construct
  source 1..80: mol_type = other DNA
agaagtctcggaagaagagaaagaagccgaagtccaagaggggtcgatacaaagacagctcacagtccagctccgagagc

SEQ ID NO: 166802 - DNA, 80 bp, synthetic construct
  source 1..80: mol_type = other DNA
ctatcatgagtgttgacaattacaatgagacccttgctaccggtcagaagtccagtttgtttgccacctggaatgtcact

SEQ ID NO: 166803 - DNA, 80 bp, synthetic construct
  source 1..80: mol_type = other DNA
atggttataccaattgtgcctataactgctagcactggctctcctcctagcattccagtcactgtcacaatagctccaat

SEQ ID NO: 166804 - DNA, 80 bp, synthetic construct
  source 1..80: mol_type = other DNA
cacaagtggtacttactattgcaagagtaaggataggtatttcccgattgaatttgtccaccatagttggtatgaaatac

SEQ ID NO: 166805 - DNA, 80 bp, synthetic construct
  source 1..80: mol_type = other DNA
aggttggcaacacttgtaaccactgttaatggaacaccaatgttaatttcagaggggcctctcaaaatggaggaaaaggc

SEQ ID NO: 166806 - DNA, 80 bp, synthetic construct
  source 1..80: mol_type = other DNA
gacttggaacaatgcaactttcttgaagagaggttttaaaccagactccaaatacccatttcttattcatccaattttcc

SEQ ID NO: 166807 - DNA, 80 bp, synthetic construct
  source 1..80: mol_type = other DNA
agcgcgatatcccgaaaatatgtaacataaacttcaaaataaagctgcaagagtgagtgattcgaggccctcctctgttc

SEQ ID NO: 166808 - DNA, 80 bp, synthetic construct
  source 1..80: mol_type = other DNA
ccagacagtcagaaactgctccatcagaggcatagtccccatggtaatatgtggacacaccagagcagggagaaactatg

SEQ ID NO: 166809 - DNA, 80 bp, synthetic construct
  source 1..80: mol_type = other DNA
gtcagcagggcccgcaattgatccggattgttgtacagcagggccagagtgtccaggaaagcatcgtccaacagcacgga

SEQ ID NO: 166810 - DNA, 80 bp, synthetic construct
  source 1..80: mol_type = other DNA
cccagactaccctaagcaaaactatgaatcttttgttaaaaactaccttaaacaaaatgtaactacaaactatgacacaa

SEQ ID NO: 166811 - DNA, 80 bp, synthetic construct
  source 1..80: mol_type = other DNA
cagaaaccctgagggagaccctatacaaaacgactctacagcaaatataacttttaatcctaccactacaaattttactg

SEQ ID NO: 166812 - DNA, 80 bp, synthetic construct
  source 1..80: mol_type = other DNA
ggacaatctcggtattttgcagccgttaggtgtggatttcacttccaagtccaggtaaatgtgaaccaaggtacagcggg

SEQ ID NO: 166813 - DNA, 80 bp, synthetic construct
  source 1..80: mol_type = other DNA
aaaaccacctgcaatgagccagtggtgcccgcctgtccacagcgttcagggtcgcaaccaccagtggtatgaagcctgct

SEQ ID NO: 166814 - DNA, 80 bp, synthetic construct
  source 1..80: mol_type = other DNA
ttaaacaaaagaaaaggtgtgaaccagtggctgttgtaattcatggagaaccaggtactggcaagtctatgacaacaaat

SEQ ID NO: 166815 - DNA, 80 bp, synthetic construct
  source 1..80: mol_type = other DNA
aagtgccactgccagacctgcaccagctaccgcaaggccgggctaaccgtactatgagctggagaccaccggtacaccat

SEQ ID NO: 166816 - DNA, 80 bp, synthetic construct
  source 1..80: mol_type = other DNA
cttctatcttgacactgaacttaaagccctgagtagttatgtagaacatggtttgttgaacacagcaaaagcattgcaac

SEQ ID NO: 166817 - DNA, 80 bp, synthetic construct
  source 1..80: mol_type = other DNA
tcacggcaggacctggtttcggtggagcgtttgtgggctcatataaaatcataaactaccacttagctacagacaatgaa

SEQ ID NO: 166818 - DNA, 80 bp, synthetic construct
  source 1..80: mol_type = other DNA
gttttaattaatggtcaagctgttcaattaaaagacaaatacaaattggttgacccagataataccaatctagagctcac

SEQ ID NO: 166819 - DNA, 80 bp, synthetic construct
  source 1..80: mol_type = other DNA
aaaaccagaattaagaaaagctgtgattcaaggaccagaacacgaatttggcatggccctgattaaaagaaactgtcaca

SEQ ID NO: 166820 - DNA, 80 bp, synthetic construct
  source 1..80: mol_type = other DNA
tgtttccgccatgacagatccatgtgaagtgtgacaagtttttagattgtcacactaaataaaaaagagtcaataagcag

SEQ ID NO: 166821 - DNA, 80 bp, synthetic construct
  source 1..80: mol_type = other DNA
ccttcacaggcacttttacgccagataacaaccagacgacacccgcccgtaaattctgcccagtggattacctctttggg

SEQ ID NO: 166822 - DNA, 80 bp, synthetic construct
  source 1..80: mol_type = other DNA
tcccctctcaggctatcgacgacccgagccagaagcccacccacgcgctacccgagcccggtacgctccctagaatctta

SEQ ID NO: 166823 - DNA, 80 bp, synthetic construct
  source 1..80: mol_type = other DNA
acctatataccagatactgtcaagcctgatgtgacaaatcacggagcatttggtcagcaatccggggccatatatgtggg

SEQ ID NO: 166824 - DNA, 80 bp, synthetic construct
  source 1..80: mol_type = other DNA
atgaacacagcagagggcaagacacatcagggagcgataccatctgcgccccctgcagatccggcagtggagatgctgaa

SEQ ID NO: 166825 - DNA, 80 bp, synthetic construct
  source 1..80: mol_type = other DNA
gagagtcgtgctcaagggattgatactattgccagatgttcctgtaagtgcggcgtgtactactgtgaatccatgcgtaa

SEQ ID NO: 166826 - DNA, 80 bp, synthetic construct
  source 1..80: mol_type = other DNA
ctgtgacgtttaagtcacgtgggaagggcgtgcctaaacccggaagcatccctgatcacgtgactgtgacgtcgcggccg

SEQ ID NO: 166827 - DNA, 80 bp, synthetic construct
  source 1..80: mol_type = other DNA
tcaccaaatattttaccagaatacagttcaaccaaaatgatacatatacctgggaaaatagataatatcttacatatggc

SEQ ID NO: 166828 - DNA, 80 bp, synthetic construct
  source 1..80: mol_type = other DNA
atatactcccagggttccaccccaccaagcaaatccacatacctgggcaaattaaaacaatcatggatatggcacgggtg

SEQ ID NO: 166829 - DNA, 80 bp, synthetic construct
  source 1..80: mol_type = other DNA
aggtaccgataaagtggtcacagcagacaatttgacaaatggcgagcaagcgtctgagttcacacgtgacgctgccaccg

SEQ ID NO: 166830 - DNA, 80 bp, synthetic construct
  source 1..80: mol_type = other DNA
ctgatgtcttctggtcccaaatcaggtctacaatgggggaaaacatactagcttttgattacacaaattatgatgggagc

SEQ ID NO: 166831 - DNA, 80 bp, synthetic construct
  source 1..80: mol_type = other DNA
atgtatactgtcactttgactagagaaacggactcagccaaagagatctttgccattaaagttgacattgcatcacaccc

SEQ ID NO: 166832 - DNA, 80 bp, synthetic construct
  source 1..80: mol_type = other DNA
ttccagatcctggggccccacacaggccaaccagagtctacgtcgtgcacttcctgggcatggtctacatcataatataa

SEQ ID NO: 166833 - DNA, 80 bp, synthetic construct
  source 1..80: mol_type = other DNA
tgtgacattgcttgcctttttgccacatgttttctggacacaggactaaccatgccatctctgattatagctctggcact

SEQ ID NO: 166834 - DNA, 80 bp, synthetic construct
  source 1..80: mol_type = other DNA
gtcacctccacgtaccatactacccctagtgggtcctagagcctacctgttcccaaaacgcttgccacaagtgtggacta

SEQ ID NO: 166835 - DNA, 80 bp, synthetic construct
  source 1..80: mol_type = other DNA
taccagttatgttaactccaggttcagagcaatttctaacaactgatgatgctcagtcaccttctgctttgccttatttc

SEQ ID NO: 166836 - DNA, 80 bp, synthetic construct
  source 1..80: mol_type = other DNA
ggagatcgcagaagtggactcagtggtcccagtcaataatgtgaatgaaaatgttaatagcctggaggcttacaggatac

SEQ ID NO: 166837 - DNA, 80 bp, synthetic construct
  source 1..80: mol_type = other DNA
gctccaaaacaatgatcccgtggaatccttcattcacacaacgctagaggaagtactagttgtgccagacaccaaaccat

SEQ ID NO: 166838 - DNA, 80 bp, synthetic construct
  source 1..80: mol_type = other DNA
ggtttcagcatgcaaagatttctgtttacgcatggctagggatacaaatcaacacactcagcttggagcaatagagcaga

SEQ ID NO: 166839 - DNA, 80 bp, synthetic construct
  source 1..80: mol_type = other DNA
caaatgtacaaaataccttatgacagcaactatggctttcctacatacaaacccataaaagagtatatgctggccagaag

SEQ ID NO: 166840 - DNA, 80 bp, synthetic construct
  source 1..80: mol_type = other DNA
aacatcatagtaccaccagagactccttcagatagcgtggtgttgtgttttgtttctgcgtgcaatgacttttcagtgag

SEQ ID NO: 166841 - DNA, 80 bp, synthetic construct
  source 1..80: mol_type = other DNA
acaaatacaatcagaaaaagatgtcagatgggaatacacatacacaaacttaatgaggcctatatacaatgcttcaccag

SEQ ID NO: 166842 - DNA, 80 bp, synthetic construct
  source 1..80: mol_type = other DNA
caccttatttgaagacaagtggtatactcagagtgacttatgttccgttaacttgctgtcacttgcggtttctgcggctt

SEQ ID NO: 166843 - DNA, 80 bp, synthetic construct
  source 1..80: mol_type = other DNA
aaattttttcttccctgttccagctccaaaaaccacaccacgctcggaaagtcgtgctctacggggcgatatggccaatt

SEQ ID NO: 166844 - DNA, 80 bp, synthetic construct
  source 1..80: mol_type = other DNA
ggtgaagaaccgtacaaagagttcataaacaaaatcagaaaggcagaggtgggtcgtaggttgtatcttcccccgtccaa

SEQ ID NO: 166845 - DNA, 80 bp, synthetic construct
  source 1..80: mol_type = other DNA
aattgtagcatatggtgatgatgtgatagcttcatacccagaggaacttgacccagcacagatagccgtttctggcctca

SEQ ID NO: 166846 - DNA, 80 bp, synthetic construct
  source 1..80: mol_type = other DNA
tcaccgataagtataacccaagcactgatgcagcagatggacgcaagtttgctgccgttgactacttgcttgggtgtgga

SEQ ID NO: 166847 - DNA, 80 bp, synthetic construct
  source 1..80: mol_type = other DNA
acaagcttggattcccgggtcacatgatggaaaaattaagtaaaacaacacacatatataaagataaagtctaccagact

SEQ ID NO: 166848 - DNA, 80 bp, synthetic construct
  source 1..80: mol_type = other DNA
ccttttctcatctaacaggcatatacagctcaccatacctcaactcaggcagaataagtccagaaatatttggactatac

SEQ ID NO: 166849 - DNA, 80 bp, synthetic construct
  source 1..80: mol_type = other DNA
gcggctaatcttaaacctgcagccaccacatgcacgccagcatgcaggtggtcgtaatgagcaattgcgggatggaaccg

SEQ ID NO: 166850 - DNA, 80 bp, synthetic construct
  source 1..80: mol_type = other DNA
gtacatgttgttgaaatcagaaataaacgacccacagatggtgaagaacacaaaacacagctcttgtttaatgattggaa

SEQ ID NO: 166851 - DNA, 80 bp, synthetic construct
  source 1..80: mol_type = other DNA
agtattataccatgaacatagatgagaccacaaagtttactagttggacaattagtgcaaggcgaatggtgcaaatgaga

SEQ ID NO: 166852 - DNA, 80 bp, synthetic construct
  source 1..80: mol_type = other DNA
cgcagaggccggagccgcagaggccggagacgacggcggggagttggtctttgcaggactatacctggcggcagggaatg

SEQ ID NO: 166853 - DNA, 80 bp, synthetic construct
  source 1..80: mol_type = other DNA
atcccaggtaaggtgaccaatttggcagaaatatgccaagtagacactttgatcccagttaataatgtgcaagcttccaa

SEQ ID NO: 166854 - DNA, 80 bp, synthetic construct
  source 1..80: mol_type = other DNA
gcgggtacggtggttacgttggcgacggggattacgttaggtacggagatggcgaggacaggaggtgtttgcggcgagga

SEQ ID NO: 166855 - DNA, 80 bp, synthetic construct
  source 1..80: mol_type = other DNA
tctcacccgagaccagaaagcggcgggtggccaggcccaacgactccgccgtcgtgctgtatctcagggtgaagaggagt

SEQ ID NO: 166856 - DNA, 80 bp, synthetic construct
  source 1..80: mol_type = other DNA
agacgaccaagaaagacggtaaggagacgccggcgccgtcccacacgcacctaccgacgggggtggcgacgcagacggta

SEQ ID NO: 166857 - DNA, 80 bp, synthetic construct
  source 1..80: mol_type = other DNA
actacgctggcaactccattaaaccgaccggcactagccgtactgccattactacccttggaaagttcggccagcaatct

SEQ ID NO: 166858 - DNA, 80 bp, synthetic construct
  source 1..80: mol_type = other DNA
actactgacaaaggggagtttacaggattaggagtatatgacagactgttggtcattccaacacatgcacaaccagctga

SEQ ID NO: 166859 - DNA, 80 bp, synthetic construct
  source 1..80: mol_type = other DNA
tgtcattgtctccagcgagcgatcccagactatccttcacaatgttaggggagattctaaattactatacacactgggct

SEQ ID NO: 166860 - DNA, 80 bp, synthetic construct
  source 1..80: mol_type = other DNA
ttgctgacatgccccgcactgcagccgggtatccaactggccaccatgaaaaagagaaagataatacttcctagctataa

SEQ ID NO: 166861 - DNA, 80 bp, synthetic construct
  source 1..80: mol_type = other DNA
acgggggcgactaatccactagagccatctgacacagtgcaaactagacatgtgattcaaactagatcacgctcagaatc

SEQ ID NO: 166862 - DNA, 80 bp, synthetic construct
  source 1..80: mol_type = other DNA
cggctgagctccgttgaaaagcagagctcccccatggggaccctgccttcacggaggtctgtgtaggcctggtttaggat

SEQ ID NO: 166863 - DNA, 80 bp, synthetic construct
  source 1..80: mol_type = other DNA
acaagggggttacggctacaacacactgaacaagatgggcaagttgttcgtcagacatgtgaacaaagagaccccaacgc

SEQ ID NO: 166864 - DNA, 80 bp, synthetic construct
  source 1..80: mol_type = other DNA
ggtgcactatgcatgagaattgtcacaaataaacaggttcatgatgttgaggtcacaaccaatatttatcataaggccaa

SEQ ID NO: 166865 - DNA, 80 bp, synthetic construct
  source 1..80: mol_type = other DNA
atgaatatgtaaaacacagaaatacatggagcagaagcaacgtagacctagaactagtaagatacaaaggatgccaattc

SEQ ID NO: 166866 - DNA, 80 bp, synthetic construct
  source 1..80: mol_type = other DNA
tcaaatacttacaaagttccagggccaatggcagactcatttattttaaatggaaaaacatacacatacagcagcatcaa

SEQ ID NO: 166867 - DNA, 80 bp, synthetic construct
  source 1..80: mol_type = other DNA
tgcaatagactatcaacagtgtgttaggagtatgtgggaacgtgacatcatgatagtggagtccagggcacaaggaaagg

SEQ ID NO: 166868 - DNA, 80 bp, synthetic construct
  source 1..80: mol_type = other DNA
aacagacatgcatgatactgatacagaaattacactcttgtggttggaccagaatgaaaaatttagggatattagaagat

SEQ ID NO: 166869 - DNA, 80 bp, synthetic construct
  source 1..80: mol_type = other DNA
cgctctatgatccagtcgattttcagagagacgatgcctgagccatccggcttacgatactgacacagggattcgtataa

SEQ ID NO: 166870 - DNA, 80 bp, synthetic construct
  source 1..80: mol_type = other DNA
aggccaaatgccagatgggtcatcatatgttcctataaaatggagaggaaagtggtaccctaacatgatacatcaacaaa

SEQ ID NO: 166871 - DNA, 80 bp, synthetic construct
  source 1..80: mol_type = other DNA
accgttccgcttgctccagaacccgtcgttaagtacgggtttaggtcagtatctctgaagcttcatccaaagcaccctac

SEQ ID NO: 166872 - DNA, 80 bp, synthetic construct
  source 1..80: mol_type = other DNA
tgggttgagattggcatcacaccaaggattgcccacaatgttgacccctgggagcaaccagtttttgacttctgatgatt

SEQ ID NO: 166873 - DNA, 80 bp, synthetic construct
  source 1..80: mol_type = other DNA
cagtgccggcgcgtttaataagtacggttacaacagcataaatgactttggaaccctggctgtgcgtgtggtgaatgaac

SEQ ID NO: 166874 - DNA, 80 bp, synthetic construct
  source 1..80: mol_type = other DNA
cggcgccgcgcactgtgtttaggcgcccaccaaccccgatgccgcgctccctgcctttgaaaccggccccgtcccggtgc

SEQ ID NO: 166875 - DNA, 80 bp, synthetic construct
  source 1..80: mol_type = other DNA
ttttgtcaagtctggctacaagaagaaagatttaatttgtcttggaccatactcggtaagccctatgctagaaaaattag

SEQ ID NO: 166876 - DNA, 80 bp, synthetic construct
  source 1..80: mol_type = other DNA
ctcaaatttttaccgcagctaaaaatgctagacaagcatacacagaagcagccaaaagaataataacaccatggattttc

SEQ ID NO: 166877 - DNA, 80 bp, synthetic construct
  source 1..80: mol_type = other DNA
tgcttatccacaccagttgatcaatttgcgcactaataattcttgtactatcgtagtaccctacataaatgctgtgccca

SEQ ID NO: 166878 - DNA, 80 bp, synthetic construct
  source 1..80: mol_type = other DNA
gaactgtccattcaatggctcaagtcgaccctaacctgggggttcatttgtcacctcttagagattgcatagccagagtc

SEQ ID NO: 166879 - DNA, 80 bp, synthetic construct
  source 1..80: mol_type = other DNA
cgcctcggcccaaccgctgcatggctcggttgagccgcgtgtagagctcgttcctcttttgcaggatggcccggtactgg

SEQ ID NO: 166880 - DNA, 80 bp, synthetic construct
  source 1..80: mol_type = other DNA
atgagttacggagtcctgccaaggtaaaagctgggaaaactagagcaatagaagcagctagtgtgaatgatacagcaaac

SEQ ID NO: 166881 - DNA, 80 bp, synthetic construct
  source 1..80: mol_type = other DNA
tggcgtgcgagctgcacaggcgaaacaacctggtgatatgagctggagccgtccagtacataatgccgccgggatcgaaa

SEQ ID NO: 166882 - DNA, 80 bp, synthetic construct
  source 1..80: mol_type = other DNA
cttgcctatttcaccttgtcttagtgtggcatggggggggtggcattgcgggtggatagcctcgcgactcgtgggaaaat

SEQ ID NO: 166883 - DNA, 80 bp, synthetic construct
  source 1..80: mol_type = other DNA
tccgcgcacaattacaggcgtacagaatcagacagctttactgagggtggatatgttagtttgtggtatcaaactgcctt

SEQ ID NO: 166884 - DNA, 80 bp, synthetic construct
  source 1..80: mol_type = other DNA
gctgcgccaccactaaaatcaccttctgttgaggcatgtggatacagtgatagagtggcacaattaactgtgggcaactc

SEQ ID NO: 166885 - DNA, 80 bp, synthetic construct
  source 1..80: mol_type = other DNA
cggggacaaggcgccgcgggttgacgtcgcagacgggggccttttgcgccggggacggtgggggggaccgcgcgttgagg

SEQ ID NO: 166886 - DNA, 80 bp, synthetic construct
  source 1..80: mol_type = other DNA
ttggcctggatggcctggtgcatgcatgcctgcaggacattgtgttgtaaccagtatactccttactatgttgtggacct

SEQ ID NO: 166887 - DNA, 80 bp, synthetic construct
  source 1..80: mol_type = other DNA
acgccaggcaacatcaacaaaatggaggcgtaccccatcccacttgctcagggtgctccagtaaaggaccaagcaatatt

SEQ ID NO: 166888 - DNA, 80 bp, synthetic construct
  source 1..80: mol_type = other DNA
ccccattgagtgtgtttattttaagtacaatttcaacagttatttcaatcagacaattgtatcataatgggtgctcaggt

SEQ ID NO: 166889 - DNA, 80 bp, synthetic construct
  source 1..80: mol_type = other DNA
tggcagtggagtgaggagcttcagctggtctgggtggcggccgccagtctttggggactttctgatacacgccagctcct

SEQ ID NO: 166890 - DNA, 80 bp, synthetic construct
  source 1..80: mol_type = other DNA
gatctatagccaccatctcccagcttctgcacctcgagatcaaggccctctgcagctggataatatcccaggatggcatg

SEQ ID NO: 166891 - DNA, 80 bp, synthetic construct
  source 1..80: mol_type = other DNA
gcattggcagagtcgctgacaccattggtagtggaccatcgaactcggaagctatacctgcactcacagcagttgaaaca

SEQ ID NO: 166892 - DNA, 80 bp, synthetic construct
  source 1..80: mol_type = other DNA
accagactaacatagtatcacccccagatatcccagcagatagcacgattctgtgttttgtttcagcatgcaatgacttt

SEQ ID NO: 166893 - DNA, 80 bp, synthetic construct
  source 1..80: mol_type = other DNA
attattacaaggatgcagcaagttctggattgaccaaacaggattttagccaggatccctcaaagtttacccaacctgtt

SEQ ID NO: 166894 - DNA, 80 bp, synthetic construct
  source 1..80: mol_type = other DNA
tacaagtcgttgacccgcaaaccatcacaccgccgtgggtcctccacacgttcgaccagagacgaggactgtttactgaa

SEQ ID NO: 166895 - DNA, 80 bp, synthetic construct
  source 1..80: mol_type = other DNA
gacaacaaactctaccaattactatatccattgctcctatcaaatcagagttttcaggagctagacaggccattaaagct

SEQ ID NO: 166896 - DNA, 80 bp, synthetic construct
  source 1..80: mol_type = other DNA
tccttcctcttttttcaaaatggcgtaccagcggcggcgcgcgcgccgccgctggtacgccattttgaaaaaagaggaag

SEQ ID NO: 166897 - DNA, 80 bp, synthetic construct
  source 1..80: mol_type = other DNA
gacttcggagagtactgacaacaatcagggactggctaagacttaaaacagcctacttgcagtatgggtgcgagtggatc

SEQ ID NO: 166898 - DNA, 80 bp, synthetic construct
  source 1..80: mol_type = other DNA
ccaagtccccgtgtactggcagcagcggtggtacccccgcatgaccttccagctacaggtaatgcacgacataacactaa

SEQ ID NO: 166899 - DNA, 80 bp, synthetic construct
  source 1..80: mol_type = other DNA
agctcccctcaacattttggccgatgccagtaatattgacgtcagcgccatggatgttcagcttaaacccaaaaacctcg

SEQ ID NO: 166900 - DNA, 80 bp, synthetic construct
  source 1..80: mol_type = other DNA
ccctgccctaccggcaccccctgagcagcaaccacggcctggtggagatacagaaggcgcccctggcgaccctggagacg

SEQ ID NO: 166901 - DNA, 80 bp, synthetic construct
  source 1..80: mol_type = other DNA
ctataatagttccttacatcaactgtgtaccaatggacaacatgttgaagcacaacaacttatcactcttgatcgtacct

SEQ ID NO: 166902 - DNA, 80 bp, synthetic construct
  source 1..80: mol_type = other DNA
tcgtatgtcattcagactcggagcaggagtgagtcacagtcgaatcatttttgcgagagggcttgtgttactataatgtc

SEQ ID NO: 166903 - DNA, 80 bp, synthetic construct
  source 1..80: mol_type = other DNA
gaattcctgtaccaagagtttaaaaagcagcacaacaggtggtcttctagcaacagagactttgacctggtgagatacca

SEQ ID NO: 166904 - DNA, 80 bp, synthetic construct
  source 1..80: mol_type = other DNA
tatcttccaccgtacaatctactggaacgcacttggattgacaaattcatctaaatcttttagcaatgtagaaatctacc

SEQ ID NO: 166905 - DNA, 80 bp, synthetic construct
  source 1..80: mol_type = other DNA
agtcacgtatactgcgacgttgtttccacccgtttccccgtcccgccgtttccgaacaacccacccgggttcagacaacc

SEQ ID NO: 166906 - DNA, 80 bp, synthetic construct
  source 1..80: mol_type = other DNA
gccattttaagtcagcgccggggagggtcacgtaaagttcaaaggtcatcctcaccggaactggcacaaaatggtggcca

SEQ ID NO: 166907 - DNA, 80 bp, synthetic construct
  source 1..80: mol_type = other DNA
gtgggttgcttgtcgtaatgcgcaagtccgtggcggaaccgactactttgggtgtccgtgtttcactttttacttttatg

SEQ ID NO: 166908 - DNA, 80 bp, synthetic construct
  source 1..80: mol_type = other DNA
gaatacaactaactctggcagatatagccgccgttgctacaaagattacaatggaccatatgaagacgaaaacttcagac

SEQ ID NO: 166909 - DNA, 80 bp, synthetic construct
  source 1..80: mol_type = other DNA
caaacaaaaactaacgacaaatggtacaattggcaatatacatacaataaacttatgaagccaatttactatgcagcttc

SEQ ID NO: 166910 - DNA, 80 bp, synthetic construct
  source 1..80: mol_type = other DNA
gactcacttactaaaaaagacaacaaatacaaagagggacaaagcatactgctaatgcaagacatgccactttacatact

SEQ ID NO: 166911 - DNA, 80 bp, synthetic construct
  source 1..80: mol_type = other DNA
gtggtgcaacaactgcggcaggaaaagaaaaacagaaagtgtgtagagcacaatctcactgccatattccaaggattggg

SEQ ID NO: 166912 - DNA, 80 bp, synthetic construct
  source 1..80: mol_type = other DNA
ttcctatgattatatgcggacagggacgctggtcacagaactacagcagtcacctagaagaccgtgtagtaaaacagagc

SEQ ID NO: 166913 - DNA, 80 bp, synthetic construct
  source 1..80: mol_type = other DNA
ccggggttcttattagagaaacagcacgtaggtcaggatccagatgctaatggcaatcatgatgacgatgatcatgcagg

SEQ ID NO: 166914 - DNA, 80 bp, synthetic construct
  source 1..80: mol_type = other DNA
cacccggcaccagcagggtggagtagcagaggttgtgagccatgatgatggaagggtagaggctggcaaagtcgaacacg

SEQ ID NO: 166915 - DNA, 80 bp, synthetic construct
  source 1..80: mol_type = other DNA
tgccaacccttgcatcaccttccaggttttgaaagagttctattacccagccatgggctatggagcccctgaaacaactg

SEQ ID NO: 166916 - DNA, 80 bp, synthetic construct
  source 1..80: mol_type = other DNA
gtatttgaggcaggcctgaacaaaccagcagtcaaacctcgaatgatcaaggcagcacaaaaggagacactagtagatca

SEQ ID NO: 166917 - DNA, 80 bp, synthetic construct
  source 1..80: mol_type = other DNA
agaaatacaatggatgaggcctagtaaggatgctggatatccggtaataaacgccccctccaaaactaagctagaaccaa

SEQ ID NO: 166918 - DNA, 80 bp, synthetic construct
  source 1..80: mol_type = other DNA
tgacatatggtaaactcttctctagtttccataaaaacccagggatcatcacaggttcagcggtaggatgtgatcccgaa

SEQ ID NO: 166919 - DNA, 80 bp, synthetic construct
  source 1..80: mol_type = other DNA
aactgccggccagcaaagttatagcctcacacggctgttcaccgcgggccctagccagaaattgcagctcgtcaacacca

SEQ ID NO: 166920 - DNA, 80 bp, synthetic construct
  source 1..80: mol_type = other DNA
ataatgttccagctgcaaacggtatggataggctcagagtgcccattgcatcccacactgatatggattcgctgttattc

SEQ ID NO: 166921 - DNA, 80 bp, synthetic construct
  source 1..80: mol_type = other DNA
agctgtgtgttgtgtgtaccctggataagccaaacacattataggtttgttgcagatgatgtttacacagatgcaggctt

SEQ ID NO: 166922 - DNA, 80 bp, synthetic construct
  source 1..80: mol_type = other DNA
cttctcgttgtccaactcggagatgcgtttgctcttcttcttgcggggtccggtgctcgccccgccgctgctctgatggc

SEQ ID NO: 166923 - DNA, 80 bp, synthetic construct
  source 1..80: mol_type = other DNA
tatgagctggagacccccggtacacaatgccccaggcattgagagaaactggtatgaatcagtcctcagatcgcacgcat

SEQ ID NO: 166924 - DNA, 80 bp, synthetic construct
  source 1..80: mol_type = other DNA
taagagctgtcaaaacacttaactttattgtaacaataaacacttgtcaatgggagcgcaagtgtccacacaaaagaccg

SEQ ID NO: 166925 - DNA, 80 bp, synthetic construct
  source 1..80: mol_type = other DNA
gcatggtcgttccagctggcacccctaccacatgttccatcctgtgctttgcgtcggcctgcaacgatttctcggtaagg

SEQ ID NO: 166926 - DNA, 80 bp, synthetic construct
  source 1..80: mol_type = other DNA
cccgggcagggagaaccagtggtttgcgagcgttttccacggccacgctgcgttttgcggctgcggtgaccctgttgggc

SEQ ID NO: 166927 - DNA, 80 bp, synthetic construct
  source 1..80: mol_type = other DNA
atatcgacacgacaatgggagctcaggtatcatctcagaaagtgggtgcccacgaaaattctaaccgagcctacggtggc

SEQ ID NO: 166928 - DNA, 80 bp, synthetic construct
  source 1..80: mol_type = other DNA
ataaaagaaagtcacgcaaccacatcaaattcagcccctgctttagatgctgccgaaactggacataccagcagtgtgca

SEQ ID NO: 166929 - DNA, 80 bp, synthetic construct
  source 1..80: mol_type = other DNA
atatgaagaacacttaagacacaataacttctggacttatagcaacaaagacttagaacttggcagatacctaggagcca

SEQ ID NO: 166930 - DNA, 80 bp, synthetic construct
  source 1..80: mol_type = other DNA
gaccagagcaaatttacatttaaacccactatctttcccgcaagagataagctagacatgtttggtaatataatagatag

SEQ ID NO: 166931 - DNA, 80 bp, synthetic construct
  source 1..80: mol_type = other DNA
gtttgtgcggcgtctctccgcagcttttgcgcggcggtgttttcgggcgtgctgggcgccggcgccggtaacgggagtta

SEQ ID NO: 166932 - DNA, 80 bp, synthetic construct
  source 1..80: mol_type = other DNA
gacacgcgcggcggagatgcagccgacggcgtggccgcggtgggctgcccccgaggacgggcgccggccgccagcgcccc

SEQ ID NO: 166933 - DNA, 80 bp, synthetic construct
  source 1..80: mol_type = other DNA
catgtacaagaatgatggaaacacaaacctctacatggttcgggtttaatggaacaagggcagaaaatagaacatatatc

SEQ ID NO: 166934 - DNA, 80 bp, synthetic construct
  source 1..80: mol_type = other DNA
gtgctcagtttggctcacttatgctggcatagtggaccagaacaatatgctgattttgtcaacaaaatcagatcaacatc

SEQ ID NO: 166935 - DNA, 80 bp, synthetic construct
  source 1..80: mol_type = other DNA
tagtctgcacccaatatggtttgaggcattagggaaggttttagatcagatagggtaccctggtaatttaatgaaaaaac

SEQ ID NO: 166936 - DNA, 80 bp, synthetic construct
  source 1..80: mol_type = other DNA
acaagacctgcccctatacatactaacatatgggtacctagactactgtgtaaaagaactaggcataaagtcagcctgga

SEQ ID NO: 166937 - DNA, 80 bp, synthetic construct
  source 1..80: mol_type = other DNA
caggatctggtcaattcctgacaacagatgatacacaatctccatctgcatttccatactttcacccaactaaggaaata

SEQ ID NO: 166938 - DNA, 80 bp, synthetic construct
  source 1..80: mol_type = other DNA
caggttgagaatttcaatgcgacaacaacggaagataagagaaagcagttcactacctggcctatcacatacacggacac

SEQ ID NO: 166939 - DNA, 80 bp, synthetic construct
  source 1..80: mol_type = other DNA
atatttttgggacccacacccttagccagcatcaagcagttggccttgtaggcactattcttttaactgcaggtttgatg

SEQ ID NO: 166940 - DNA, 80 bp, synthetic construct
  source 1..80: mol_type = other DNA
gatgattcagtattaatttgttactccagtgatttagtcatataccgaacaaatactaaaggtgatgattacattccagt

SEQ ID NO: 166941 - DNA, 80 bp, synthetic construct
  source 1..80: mol_type = other DNA
acaagtggtacactcagcaagacctttgtccagtaaatcttgtgtcacttgcggttagcgcagcttcctttctacatccg

SEQ ID NO: 166942 - DNA, 80 bp, synthetic construct
  source 1..80: mol_type = other DNA
ggcctcctagcccaagcaggaaaagattatggattagtcatgacaccagcagacaagggtgctacttttacagatgtaga

SEQ ID NO: 166943 - DNA, 80 bp, synthetic construct
  source 1..80: mol_type = other DNA
tcaactacactactattaattactataaagacagtgctagtaatgcggcgacaaagatggacttttctcaagacccttct

SEQ ID NO: 166944 - DNA, 80 bp, synthetic construct
  source 1..80: mol_type = other DNA
tttcccaaagaaaggccatggtatgttgtctcagttttttgcttatttcactggtgagataaatcttcatgtactgtatt

SEQ ID NO: 166945 - DNA, 80 bp, synthetic construct
  source 1..80: mol_type = other DNA
agaaatgatcaagaaggaagcaatatatgtaggatgggtgccagctcacagaggactaggtggtaatcaggaagtagacc

SEQ ID NO: 166946 - DNA, 80 bp, synthetic construct
  source 1..80: mol_type = other DNA
acgatatgggcacattgtgtgttcgtattgtgactgagcagcagacacataaggttaagataaccagtaggatattccac

SEQ ID NO: 166947 - DNA, 80 bp, synthetic construct
  source 1..80: mol_type = other DNA
ctaagacaaaaaatctaccacatataaagccaatttacaaatatgtaactattgaaggaactgagactgccgaaggcata

SEQ ID NO: 166948 - DNA, 80 bp, synthetic construct
  source 1..80: mol_type = other DNA
ctaacctaaccgcagcacatatccacccgggcatcatgatgctcagcaaaaaacacatactcataccctcactcaagacc

SEQ ID NO: 166949 - DNA, 80 bp, synthetic construct
  source 1..80: mol_type = other DNA
cccttaattgtaactttagaagatttgaactcacgacaaataggaagccaacaagccacgttggttaatgtcaagcactt

SEQ ID NO: 166950 - DNA, 80 bp, synthetic construct
  source 1..80: mol_type = other DNA
gtaccaaaccttaaatacaacacaggagacttttacaccaagcaaaacccagtatttggcatgtgtaaatacaagccaac

SEQ ID NO: 166951 - DNA, 80 bp, synthetic construct
  source 1..80: mol_type = other DNA
gctcaaatgcacctcaaagcaaagacacctggtacaaaggcaacacatacaaccaaaacattaaacagttagctgaacaa

SEQ ID NO: 166952 - DNA, 80 bp, synthetic construct
  source 1..80: mol_type = other DNA
cagggaaaaaccagattcgaatcgatggaggagccgcagctgacttcaatttgagagacagaattctaagagatattcag

SEQ ID NO: 166953 - DNA, 80 bp, synthetic construct
  source 1..80: mol_type = other DNA
ctgcatgactggaccctaccgccttaccgggtagccccatcctgaaaccctcgtcccaggtccagtctcacccccccccc

SEQ ID NO: 166954 - DNA, 80 bp, synthetic construct
  source 1..80: mol_type = other DNA
tagagtactgtgagagtgaaggatggataaaatctttgaaacagaacaagttagaaagagaactaaattacacccagtat

SEQ ID NO: 166955 - DNA, 80 bp, synthetic construct
  source 1..80: mol_type = other DNA
actgtgtcatcacctgaagctatagacagaagattcttcttggattgtgatgttaagattatgccagcttacaattcaaa

SEQ ID NO: 166956 - DNA, 80 bp, synthetic construct
  source 1..80: mol_type = other DNA
cagtgtgaatgatactatactattcagaacaacctttggtaacctcttttcaaaatttcacttaaacccaggcattgtca

SEQ ID NO: 166957 - DNA, 80 bp, synthetic construct
  source 1..80: mol_type = other DNA
ctaaatctggttttcctcgcttcactatcccttttactggtttaggctcagcatattatgttttctatgatgggtatgat

SEQ ID NO: 166958 - DNA, 80 bp, synthetic construct
  source 1..80: mol_type = other DNA
ccctttaagctaaacaagtacagcagcgccatgctacatccaggcatgatgatgcagcagaaatataaactcttaattcc

SEQ ID NO: 166959 - DNA, 80 bp, synthetic construct
  source 1..80: mol_type = other DNA
gcgctgcgctcgccgcccccgggcgaaggctcatcctcccccccccgcgcgcatgggcggtgtggttaccccttcctctg

SEQ ID NO: 166960 - DNA, 80 bp, synthetic construct
  source 1..80: mol_type = other DNA
aagaagcactagtcatttggggacgaataccaaaatttcacctaccagtagaaagagatacctgggaacagtggtgggat

SEQ ID NO: 166961 - DNA, 80 bp, synthetic construct
  source 1..80: mol_type = other DNA
cgctcgtgctgacgcgctcgcgcgcgtcagaccacttcgggctcgcgggggtcggaaaatttgctaaacagactccgagt

SEQ ID NO: 166962 - DNA, 80 bp, synthetic construct
  source 1..80: mol_type = other DNA
cagacaccgtacaaactagacatgttatacagcacagatcgcggtcagagtccagtgttgagtccttcttcgcacgcggt

SEQ ID NO: 166963 - DNA, 80 bp, synthetic construct
  source 1..80: mol_type = other DNA
acagacgcagactgtatatcagacgaaagagaaagaaactgactcttaagatctggcagccccagaatgtcagaaaatgt

SEQ ID NO: 166964 - DNA, 80 bp, synthetic construct
  source 1..80: mol_type = other DNA
ggcgtgctcaagcagggcagcggtcgcaccttgctggtggaaccgtgcgcgcgcgtctacgagatcaagtgccgctacaa

SEQ ID NO: 166965 - DNA, 80 bp, synthetic construct
  source 1..80: mol_type = other DNA
tatagtataatgagcaacagggccagacaggcggcggggcctgggtagtagcgggcaacgagagactctgtgcaatcaaa

SEQ ID NO: 166966 - DNA, 80 bp, synthetic construct
  source 1..80: mol_type = other DNA
agagaacttcttaggcagatcagccctatgggccaacctaacactggcaaacagctttgttgcatgggatataaatttcc

SEQ ID NO: 166967 - DNA, 80 bp, synthetic construct
  source 1..80: mol_type = other DNA
gctggaagaagttgttatcgataaaatgaaacaggtgacagcttcagttcaaagtggatccaaacacacacagaaggtac

SEQ ID NO: 166968 - DNA, 80 bp, synthetic construct
  source 1..80: mol_type = other DNA
tacatagatgtcctgtataacccagctaatgacaaaggaataggcaacaaaatctggatggactggtgcacaaaaaatga

SEQ ID NO: 166969 - DNA, 80 bp, synthetic construct
  source 1..80: mol_type = other DNA
cgcaaggatgccatgctaggtacgcacgttgtgtgggatgtgggattgcaatcaagctgtgtgttgtgcattccgtggat

SEQ ID NO: 166970 - DNA, 80 bp, synthetic construct
  source 1..80: mol_type = other DNA
gtcgccgataacccagagcgtgatgaaaaaaacgctggtgagcacccgtgtgcatatgagctcccaacgcttagcgcgaa

SEQ ID NO: 166971 - DNA, 80 bp, synthetic construct
  source 1..80: mol_type = other DNA
ctcatccaggtgagcaaggtagggaaatatcgtctaatcggtcttctgaagacaatagaaggcctagtgatgatagctgg

SEQ ID NO: 166972 - DNA, 80 bp, synthetic construct
  source 1..80: mol_type = other DNA
agggacacggcatgttgtcccagttctttgcttatttcacaggtgagataaatatacacatcctatacatggcagaacag

SEQ ID NO: 166973 - DNA, 80 bp, synthetic construct
  source 1..80: mol_type = other DNA
ttgtatcaactttcacacctgacacatcagctcaaccagaacgcaaattccaaccagttgattacttattcggcagtgga

SEQ ID NO: 166974 - DNA, 80 bp, synthetic construct
  source 1..80: mol_type = other DNA
aggcagataactatacagaggggggctacgtatcattgtggtaccaaacagattttataccatctaatggcacatcagct

SEQ ID NO: 166975 - DNA, 80 bp, synthetic construct
  source 1..80: mol_type = other DNA
gcgagtgtcggaaacaccttgaacgccactgccctatgcaacggtgatgtcgctatgactttcacaaagggcagagtaaa

SEQ ID NO: 166976 - DNA, 80 bp, synthetic construct
  source 1..80: mol_type = other DNA
cctggcccaaggggcgctctaaagtcaaactcaagataaagccccccaagatgttcgttgacaagtggtacacacaagag

SEQ ID NO: 166977 - DNA, 80 bp, synthetic construct
  source 1..80: mol_type = other DNA
agcattatccagtgcaaaactcttaattgcatacactcccccaggtgccccagggccaaaaaccagaaaggacgccatgt

SEQ ID NO: 166978 - DNA, 80 bp, synthetic construct
  source 1..80: mol_type = other DNA
tggattggaaaatcaccttgcaagagatggcacaagttagaaggaaatttgaaatgtttacctatgttagatttgactca

SEQ ID NO: 166979 - DNA, 80 bp, synthetic construct
  source 1..80: mol_type = other DNA
ggccgatctgatctccgataccaccacatccaggggccggggcaccgagtccgcgagtctcaggaacaagacggccagga

SEQ ID NO: 166980 - DNA, 80 bp, synthetic construct
  source 1..80: mol_type = other DNA
ggctgcaaagtatagtgaaagctgatacacagtttcatataccctcctgcacctacgtgctggaggacaagccactgtgg

SEQ ID NO: 166981 - DNA, 80 bp, synthetic construct
  source 1..80: mol_type = other DNA
ctgacgcaccgcaaacctcccttagtccggtctcgcgaacaaatagcgtgggacgccacgcaccggtagtgtgtacaaag

SEQ ID NO: 166982 - DNA, 80 bp, synthetic construct
  source 1..80: mol_type = other DNA
aagtggctgtatgggtcctgcacccactaccagacatttgccacagagagtagactaagacccccaacagggccacaacc

SEQ ID NO: 166983 - DNA, 80 bp, synthetic construct
  source 1..80: mol_type = other DNA
cttaccatcccgaagctataaaagacacaattatgaaaatgagggagaacaactttaagctagagacaggacccaatgac

SEQ ID NO: 166984 - DNA, 80 bp, synthetic construct
  source 1..80: mol_type = other DNA
ctcagacatttccactgtgctgaggagcagggaattacagactacatacacatgctgggtgaagcatttggaaatggatt

SEQ ID NO: 166985 - DNA, 80 bp, synthetic construct
  source 1..80: mol_type = other DNA
atgtatttatcaaaataacgagtgcagtgtacaacccaatgagaacgctccgaacattaagtggcaatgtgtacagaatc

SEQ ID NO: 166986 - DNA, 80 bp, synthetic construct
  source 1..80: mol_type = other DNA
acaaccaaaagtaagaaaacctgaactaaggaaagctgtcatccaaggtccagaacacgagtttggaatggccttaatca

SEQ ID NO: 166987 - DNA, 80 bp, synthetic construct
  source 1..80: mol_type = other DNA
gctgcccatggttatatgtggacacggtatgagtgccaataactatgccataaggtctgatgatacagagactatgaaat

SEQ ID NO: 166988 - DNA, 80 bp, synthetic construct
  source 1..80: mol_type = other DNA
catacaacacaatgaccactccgacaccaacatatttgactactacacaggcatgtactgcagcatattcttatctagcg

SEQ ID NO: 166989 - DNA, 80 bp, synthetic construct
  source 1..80: mol_type = other DNA
agtcatcagtcgagaactttatgtgtagagcagcgtgtgtgtactacgtggactaccacacacaaaatgaccaagaggac

SEQ ID NO: 166990 - DNA, 80 bp, synthetic construct
  source 1..80: mol_type = other DNA
tattcacaaaatgcatactggtccagccacttaaccccctactttcttgctggactaaagaatccttatccctcaagtga

SEQ ID NO: 166991 - DNA, 80 bp, synthetic construct
  source 1..80: mol_type = other DNA
cccgacttgcacaaatcgacgctagcgcgcaccgcggcaaagtacatgtgctcaaagatgcgctcgatcaagtcccaaga

SEQ ID NO: 166992 - DNA, 80 bp, synthetic construct
  source 1..80: mol_type = other DNA
gtcattgacagtaccctacacacaaggcttgccggtgatgaatacccctggatctaatcagttcttaacaactgacaact

SEQ ID NO: 166993 - DNA, 80 bp, synthetic construct
  source 1..80: mol_type = other DNA
gaatcgccgccgtgatggtgcggttcgccgtcatcgttgtcgtaagacttaccgtagtgggggttaaggggcaccgaggc

SEQ ID NO: 166994 - DNA, 80 bp, synthetic construct
  source 1..80: mol_type = other DNA
ctcggaagatcagcatgcgtgcacattgactcgtataagaccaagggagtgaccggcgagagcacccggtacgcatcatg

SEQ ID NO: 166995 - DNA, 80 bp, synthetic construct
  source 1..80: mol_type = other DNA
gaagtcaaaaccaaaagtatacagaactacaaactgactggacaactcatatttatagcaaaaaatcagacagcaacttt

SEQ ID NO: 166996 - DNA, 80 bp, synthetic construct
  source 1..80: mol_type = other DNA
acatacactatccagacagttgcagaagtcatgtaaactaaatggtgtgtacaccaatccaactgctagtgaatttatgg

SEQ ID NO: 166997 - DNA, 80 bp, synthetic construct
  source 1..80: mol_type = other DNA
aattcaaagataggtggtacccctctctcatgcaccaagaagaagtcatagaggacatagtcagaagcggcccctttgcc

SEQ ID NO: 166998 - DNA, 80 bp, synthetic construct
  source 1..80: mol_type = other DNA
agaccacttcgggctcgcgggggtcggaaaatttgctaaacagactccgagttgccattggacacagtagctgtgaatca

SEQ ID NO: 166999 - DNA, 80 bp, synthetic construct
  source 1..80: mol_type = other DNA
ccagaaccaatttcaatggagaaagcagtttatggtactgagaacttagaaccacttgaccttacaaccagtgcaggata

SEQ ID NO: 167000 - DNA, 80 bp, synthetic construct
  source 1..80: mol_type = other DNA
ggagcgcgcccagcacgcccgtttgcacgctctggcgcaacgaggcgctccacaccaacagatactgctccaggtcctct

SEQ ID NO: 167001 - DNA, 80 bp, synthetic construct
  source 1..80: mol_type = other DNA
gggagtggccggattattgtccagatgtagatgccaccgcagtggacaaaccaactagaccagatgttgctgtaaacaga

SEQ ID NO: 167002 - DNA, 80 bp, synthetic construct
  source 1..80: mol_type = other DNA
agaatcagtactactcaccaaaagatgcacagtggggagacgccattcatattatctcttcatcagaaactacaggaaac

SEQ ID NO: 167003 - DNA, 80 bp, synthetic construct
  source 1..80: mol_type = other DNA
cagctgataaaaacccagcagggagtccatatagatccatcccttgtgtaggcccaaaagcccttctgtttcccgaaatg

SEQ ID NO: 167004 - DNA, 80 bp, synthetic construct
  source 1..80: mol_type = other DNA
caactataccgccctctagaggcgtgttctaataaatgttattgcaaaaaatgctgctatcattgtcagttatgctttct

SEQ ID NO: 167005 - DNA, 80 bp, synthetic construct
  source 1..80: mol_type = other DNA
ctcggttgtgcccctatatcaatagtggcaatgtaaattttgacccaaaacccgtgacggaagtcagaagcagcatcatc

SEQ ID NO: 167006 - DNA, 80 bp, synthetic construct
  source 1..80: mol_type = other DNA
gctgtgttgccaacccattccagccccggtgatacagtggttatagctgggaaggaagtgaaggtcaaagacgccaggcg

SEQ ID NO: 167007 - DNA, 80 bp, synthetic construct
  source 1..80: mol_type = other DNA
ggccgaattcgtgacgtcatgcccgccattttaagtaaggcggaaccaggctgtcaccccgtgtcaaaggtcaggggtca

SEQ ID NO: 167008 - DNA, 80 bp, synthetic construct
  source 1..80: mol_type = other DNA
caacacttagggctgtggtaactcaaggaccaaacactgaatttgcactctcactgctaaggaaaaacatagtaactgtg

SEQ ID NO: 167009 - DNA, 80 bp, synthetic construct
  source 1..80: mol_type = other DNA
tactggtcacaccaggatcgagccaatacctaacatctgatgatttccagtcgccgtgtgcacttccaaactttgatgta

SEQ ID NO: 167010 - DNA, 80 bp, synthetic construct
  source 1..80: mol_type = other DNA
ctcgcccgtatatgctgcaatacatgtacgtaccccctggtgcccctaaaccaactggaagggatgcatttcagtggcaa

SEQ ID NO: 167011 - DNA, 80 bp, synthetic construct
  source 1..80: mol_type = other DNA
acattacctataactatcacaatcgccccaaccaaatctgagttttcaggtgccatgcaaaaacagcaaggactacccac

SEQ ID NO: 167012 - DNA, 80 bp, synthetic construct
  source 1..80: mol_type = other DNA
caagtctaaacttacagaattactaacatggtattggaaacaactacaaaaatccaatgacattacatccacatatggaa

SEQ ID NO: 167013 - DNA, 80 bp, synthetic construct
  source 1..80: mol_type = other DNA
tttgattacaccaattatgacggaagtatacacccaatatggtttgaagcacttaaaatgattttaacaaatttgcactt

SEQ ID NO: 167014 - DNA, 80 bp, synthetic construct
  source 1..80: mol_type = other DNA
acattcccacctgcatgggcacaaagacaatacctaagtcatgactatggcatatttagcccttactttttaacacctca

SEQ ID NO: 167015 - DNA, 80 bp, synthetic construct
  source 1..80: mol_type = other DNA
caccacaaactcaaggtacagtttatttactctctttcattagcgcgtgttcagattttaaattgagactgatgaaagac

SEQ ID NO: 167016 - DNA, 80 bp, synthetic construct
  source 1..80: mol_type = other DNA
tgctcgaaatcagtcagttaaaatacaaggactaccagttatgttgactccaggatcagcacaatttcttaccactgatg

SEQ ID NO: 167017 - DNA, 80 bp, synthetic construct
  source 1..80: mol_type = other DNA
gaaaatactcgtcaagcagctccagcagcagaaactccaccagcgagtcctcaaacgaggactccgagtcctgctcggag

SEQ ID NO: 167018 - DNA, 80 bp, synthetic construct
  source 1..80: mol_type = other DNA
ggcggtggacagcagttggtatagggcaaggttgggcccctgggtagtcacgttcagccgcaactcgcgtagcaccacgt

SEQ ID NO: 167019 - DNA, 80 bp, synthetic construct
  source 1..80: mol_type = other DNA
atatgggagattaactatacagatactgtccagctcaggaggaaattagagatgttcacatactcacgttttgatacaga

SEQ ID NO: 167020 - DNA, 80 bp, synthetic construct
  source 1..80: mol_type = other DNA
ttagagtattatttaagagataacaaattcaatgaatgtgatttacacaactgtgtagttaatcaaagttatcttaaggc

SEQ ID NO: 167021 - DNA, 80 bp, synthetic construct
  source 1..80: mol_type = other DNA
gatagaaaagacatgggctacatattctatgacacaaactttggcaatggaaaactgggcaatggcagcggccaggtgcc

SEQ ID NO: 167022 - DNA, 80 bp, synthetic construct
  source 1..80: mol_type = other DNA
cgtcgagtgcgtccaatagacaggatctacagcaggacccagggaagtttacagaccctgtgaaagacataatggtaaaa

SEQ ID NO: 167023 - DNA, 80 bp, synthetic construct
  source 1..80: mol_type = other DNA
tcactggactggaagtgttaggttcagcttcatgttctgtgggtcagcacttacaacattaaaattactaattgcataca

SEQ ID NO: 167024 - DNA, 80 bp, synthetic construct
  source 1..80: mol_type = other DNA
ctcgggactggccgggctatgggcaaggctcttaaaaaagcatgtttctcggtaaactttacagaaagaaaaggaaactg

SEQ ID NO: 167025 - DNA, 80 bp, synthetic construct
  source 1..80: mol_type = other DNA
tggaggtgggacaaattaccatggcaggtctaataaacttaagtagcacacccacaggaagaatgatacggtatgaatat

SEQ ID NO: 167026 - DNA, 80 bp, synthetic construct
  source 1..80: mol_type = other DNA
aaatgacagtttctgggtagaatctagcagactaaaaacagaaatagtggacctaccactatggatgtgcttcaatggat

SEQ ID NO: 167027 - DNA, 80 bp, synthetic construct
  source 1..80: mol_type = other DNA
ctagcttgatggttcatttatcacctctgagagactgcattgctagggtgcaccaaaaacttaaaaatcttggctccatt

SEQ ID NO: 167028 - DNA, 80 bp, synthetic construct
  source 1..80: mol_type = other DNA
cccggaattagagttccagaaaacaggaaagaggccatgctaggaacacatctcatatgggatgtcggtttgcaatctac

SEQ ID NO: 167029 - DNA, 80 bp, synthetic construct
  source 1..80: mol_type = other DNA
ggcgacaactttgcttattgggtaatcaatacaaggcaagttgcgcaattgcgtcgcaaattggagatgttcacatatgc

SEQ ID NO: 167030 - DNA, 80 bp, synthetic construct
  source 1..80: mol_type = other DNA
ggccggcttctatggctactctgactttgtagacaacgagctaggcccttttgtggacggagaaaccgtgggtctcgtct

SEQ ID NO: 167031 - DNA, 80 bp, synthetic construct
  source 1..80: mol_type = other DNA
cttccaagggttgggctcagaggagactccaggatttattattgatttgctctcttcatgtaaagacccccgggtgatag

SEQ ID NO: 167032 - DNA, 80 bp, synthetic construct
  source 1..80: mol_type = other DNA
gtgatgcacttgccagaagattcgccttcgatatggaggtctacacaatgtcagaacacgcgatcaaaggcaagttgaac

SEQ ID NO: 167033 - DNA, 80 bp, synthetic construct
  source 1..80: mol_type = other DNA
agtttcaacgttttggcatggcgcccaggtgtgtgaaagttcacgtcgcgtccgtggtgttcgccaacgcaggcggccaa

SEQ ID NO: 167034 - DNA, 80 bp, synthetic construct
  source 1..80: mol_type = other DNA
tcatgtgcgtgtgtgactccttctccacagggaaattcctcttagcatacacaccaccaggtggagctcaccccaaagac

SEQ ID NO: 167035 - DNA, 80 bp, synthetic construct
  source 1..80: mol_type = other DNA
tgaatagtcaggaagtgccagcactcactgcggttgagactggagcctcagggcaagccatgccttcagatgtgatcgaa

SEQ ID NO: 167036 - DNA, 80 bp, synthetic construct
  source 1..80: mol_type = other DNA
tttgaaatacaagagagtgattattacccaaaacatatacagtacaacattttgattggtgatggtcctgtccaggctgg

SEQ ID NO: 167037 - DNA, 80 bp, synthetic construct
  source 1..80: mol_type = other DNA
ccacagagtattgtgcaccgcaatattgtgtacttgagactcttcccaaatcttaatgtttttgtcaactcatattctta

SEQ ID NO: 167038 - DNA, 80 bp, synthetic construct
  source 1..80: mol_type = other DNA
tgcacaaccccccaccagccgtaaggaggctatgttgggcacacataccatttgggatcttggcctgcaatcatcttgta

SEQ ID NO: 167039 - DNA, 80 bp, synthetic construct
  source 1..80: mol_type = other DNA
tatgtgcatgttggaaacctcatttatagaaaccttcatcttttcaactcggatatgcatgattctatactagtttctta

SEQ ID NO: 167040 - DNA, 80 bp, synthetic construct
  source 1..80: mol_type = other DNA
tccaggttctgcaatccatgtatgatgaaaaaattagcatattacctgaccaaaaagcaaacagagagaacctactaact

SEQ ID NO: 167041 - DNA, 80 bp, synthetic construct
  source 1..80: mol_type = other DNA
caaagatgccaggccccccaacccccgaaaaagaaagctacactttactccaagccctccaagagtcgggccaggagagc

SEQ ID NO: 167042 - DNA, 80 bp, synthetic construct
  source 1..80: mol_type = other DNA
taggcgttatggagcagaatccagtggaaaaatacacagaagctatcttaaatgaagttcttgtagtcccaaacattaca

SEQ ID NO: 167043 - DNA, 80 bp, synthetic construct
  source 1..80: mol_type = other DNA
ggagtgcgaccctccttcgggttcaccccctgccctggtgcaacgccctcggagtccggcgctacgcgcttcgcgctgcg

SEQ ID NO: 167044 - DNA, 80 bp, synthetic construct
  source 1..80: mol_type = other DNA
gcaggatttctgcgtcctggtaaaattctggatctttggaatctggcggggctccccagccacagcaccctgcgaacatt

SEQ ID NO: 167045 - DNA, 80 bp, synthetic construct
  source 1..80: mol_type = other DNA
tacacaccacaacaagttatacatcgcaatattgtgaagttgagtcagttttcaaatctaaaaccttttgtcaatgcata

SEQ ID NO: 167046 - DNA, 80 bp, synthetic construct
  source 1..80: mol_type = other DNA
acaaagcctgatacttcagcatgtagattctataccttggatagtaaaacttggaccaatcagtcaaaagggtggtgttg

SEQ ID NO: 167047 - DNA, 80 bp, synthetic construct
  source 1..80: mol_type = other DNA
tcaggtgggacatttaaaaatgcgttctcagcataatagactgattgttgtgggccttacccaaataatggataccaaca

SEQ ID NO: 167048 - DNA, 80 bp, synthetic construct
  source 1..80: mol_type = other DNA
gagacgagtaaggagaaggcgatggagggggaggaggcggtatacccgacggtggcgactcagactgagacgcagacgta

SEQ ID NO: 167049 - DNA, 80 bp, synthetic construct
  source 1..80: mol_type = other DNA
catggttacccacgaggtgcagtggtcttgtattacggtacatttccataccagttttataaaccctaccctgaaactta

SEQ ID NO: 167050 - DNA, 80 bp, synthetic construct
  source 1..80: mol_type = other DNA
accactctggtggtatcaaaactagggaaggtactgaaagtacaaaaaccattagttatactgttaaatcatgcaaggga

SEQ ID NO: 167051 - DNA, 80 bp, synthetic construct
  source 1..80: mol_type = other DNA
cgctagtcgctaaccaacaagaacccaccatactagaagttggtgactgctgctcatatggaaatatactcttgagtggt

SEQ ID NO: 167052 - DNA, 80 bp, synthetic construct
  source 1..80: mol_type = other DNA
gaagaagaacaagcaccccaaaaagaaagctcggaaaaagaggagctactcaagcagctccagctccagcgacacaacca

SEQ ID NO: 167053 - DNA, 80 bp, synthetic construct
  source 1..80: mol_type = other DNA
acggcagccattttaagtcagcttcggggagggtcacgcaaagttcaaaggtcatcctcaccggaactggtacaaaatgg

SEQ ID NO: 167054 - DNA, 80 bp, synthetic construct
  source 1..80: mol_type = other DNA
gggttccaagtcccgacgagcccgccgcaaagcgagcagctccagcagcagcagctcgccctccagctcgcagaccagca

SEQ ID NO: 167055 - DNA, 80 bp, synthetic construct
  source 1..80: mol_type = other DNA
tctagtacatcagacgctggcacattttctatccgttcagcacctagtttgaccggtagtgacatttcaacgaggagcag

SEQ ID NO: 167056 - DNA, 80 bp, synthetic construct
  source 1..80: mol_type = other DNA
gcacacgtgccaacacacagcacaaagcccaccaaagacgtatgggaatacagaataggaatgtattcacctatattcct

SEQ ID NO: 167057 - DNA, 80 bp, synthetic construct
  source 1..80: mol_type = other DNA
agaatggtactttaagcaggaaaccacagacaaccccatacatggcagttacttaaaacctacattaaactctgtagatt

SEQ ID NO: 167058 - DNA, 80 bp, synthetic construct
  source 1..80: mol_type = other DNA
gtgttcaaccccacacagtgtaaatgccatgtaatagatttacccttgtggtcagcattccatggatacatagactttgt

SEQ ID NO: 167059 - DNA, 80 bp, synthetic construct
  source 1..80: mol_type = other DNA
cccgtccccgcaacacgccgtccccgccggcggccaccacgtccaaaaacccccgtccagagcgaagcgccgcgcaaaag

SEQ ID NO: 167060 - DNA, 80 bp, synthetic construct
  source 1..80: mol_type = other DNA
gtggcggccgtgctggccggattgttgtgagaagccgagggaaaggcggcggcgtactgccgcttaaaacccacggcgtg

SEQ ID NO: 167061 - DNA, 80 bp, synthetic construct
  source 1..80: mol_type = other DNA
tatatctgcttaaaaattaccccaactttgataacactaagatcctcaacgcctcccacaacagagcttctatcacatca

SEQ ID NO: 167062 - DNA, 80 bp, synthetic construct
  source 1..80: mol_type = other DNA
aaaaacatactagaggacctaaaaaaaatgagagacaacaactttaagctacacacaggcaaaaacgacctgtatggaga

SEQ ID NO: 167063 - DNA, 80 bp, synthetic construct
  source 1..80: mol_type = other DNA
aaatttcagcctggttgttataccggtgtcgccgttggagtaccagaacggggccaccacagccatccccataacagtca

SEQ ID NO: 167064 - DNA, 80 bp, synthetic construct
  source 1..80: mol_type = other DNA
gatttggccgtggagtttcaaaactacgtcaagaacagcgtgcggcacatgagctctttcgtcagttccgatatcgacgg

SEQ ID NO: 167065 - DNA, 80 bp, synthetic construct
  source 1..80: mol_type = other DNA
gggttgctgacacaatgcccacgggcccgcgaaacaccgagagggtgcccgcgctaactgcggttgagaccgggcacacc

SEQ ID NO: 167066 - DNA, 80 bp, synthetic construct
  source 1..80: mol_type = other DNA
ggacggatactgcactacatggaaaacgaagaacgtgaccaatgacatgccgttggctaagttatgcccttctcattcgc

SEQ ID NO: 167067 - DNA, 80 bp, synthetic construct
  source 1..80: mol_type = other DNA
caaatttaacaactgttggacctagtgacatgtatgtacatgttggtaatctgatatatagaaatctacatttgttcaac

SEQ ID NO: 167068 - DNA, 80 bp, synthetic construct
  source 1..80: mol_type = other DNA
tcactttaggtaattcaacaattacgactcaggagggtgctaatgtagtcattgggtacggggaatggcctgaatattta

SEQ ID NO: 167069 - DNA, 80 bp, synthetic construct
  source 1..80: mol_type = other DNA
gcactgtgcgcagagccattaacaataccacaaatattgaatctgcagctaacaccgccccaagctcacatcgactggag

SEQ ID NO: 167070 - DNA, 80 bp, synthetic construct
  source 1..80: mol_type = other DNA
caattaagactgcagggccaagtgacatgtatgtgcatgttggaaatcttatttatagaaatctacatctctttaactca

SEQ ID NO: 167071 - DNA, 80 bp, synthetic construct
  source 1..80: mol_type = other DNA
agcgttgatcaatggcctgttcaaaaacagttctcatccggatctgacctttaccaacttcatccgtttcacgtacaaca

SEQ ID NO: 167072 - DNA, 80 bp, synthetic construct
  source 1..80: mol_type = other DNA
ggtaagggaggtgctaccttgtcatttccatatgtcttggatgcaggcattcccatttctcagcttctcatctgcccaca

SEQ ID NO: 167073 - DNA, 80 bp, synthetic construct
  source 1..80: mol_type = other DNA
tggaattcagtacagaataacactgcactttcaatagagggtacaaacgcaccacttagccgagacacttggtacaaagg

SEQ ID NO: 167074 - DNA, 80 bp, synthetic construct
  source 1..80: mol_type = other DNA
tgcgtacaaagcggcgcacagacacccgcagaaagagccctcagtgcgcaaacgctccgcgcaaactatctgagacgaaa

SEQ ID NO: 167075 - DNA, 80 bp, synthetic construct
  source 1..80: mol_type = other DNA
aatgggatattttcagtaattggtttgacttcacctcctggatggcatacatcaggttaggattatatatagtaatagga

SEQ ID NO: 167076 - DNA, 80 bp, synthetic construct
  source 1..80: mol_type = other DNA
gccaacacatccttgaagcagggcgtaggaatggtaccaaactcggggcccaccccatcaaagacataatatgtctcata

SEQ ID NO: 167077 - DNA, 80 bp, synthetic construct
  source 1..80: mol_type = other DNA
atcagtggcagaccgccaccaatccatcgatattcgcaaagttgagtgacccaccccctcaagtgtctgttccattcatg

SEQ ID NO: 167078 - DNA, 80 bp, synthetic construct
  source 1..80: mol_type = other DNA
ttcttcgtgtgtccccagggacccgcgctgcccgcgcggccgtccccctggggacttcctcttttccgcgtcttttccgc

SEQ ID NO: 167079 - DNA, 80 bp, synthetic construct
  source 1..80: mol_type = other DNA
actcagcagccggcttcatcacggcgtggtaccaaaccaacattatagtccccccaggtgcatccccgcattgttacacc

SEQ ID NO: 167080 - DNA, 80 bp, synthetic construct
  source 1..80: mol_type = other DNA
caatgggcatgtatagagtagaactgggttcttctaaatctcaaacagatccaattttatgtctcagtttgagcccagcc

SEQ ID NO: 167081 - DNA, 80 bp, synthetic construct
  source 1..80: mol_type = other DNA
tttatagacaagttcaccccagcaaccaacacatccgcaaataagaatgaatttgccccagtcgactggcttttgggttg

SEQ ID NO: 167082 - DNA, 80 bp, synthetic construct
  source 1..80: mol_type = other DNA
tggtttgtggcaaagcaatcagcttggtagacagaaccaccaacattagatacagtgtagaccaacttgttacagctata

SEQ ID NO: 167083 - DNA, 80 bp, synthetic construct
  source 1..80: mol_type = other DNA
atgcccctcagagagcaactcctccacaacctcagagagcagcagcaactcagaaagggcctccagtgtgtcttccagca

SEQ ID NO: 167084 - DNA, 80 bp, synthetic construct
  source 1..80: mol_type = other DNA
cctcctgaattttttgcaggacctccaaaaaagagcagattcgaggtacccgcaaatgtcggagacgactacagttcaaa

SEQ ID NO: 167085 - DNA, 80 bp, synthetic construct
  source 1..80: mol_type = other DNA
tacctctttacaacctaccacccagaaaacatcccagacaaaatcaaagaaatgagagataactactttgaattagaaac

SEQ ID NO: 167086 - DNA, 80 bp, synthetic construct
  source 1..80: mol_type = other DNA
gggttttactcctataacagcaaatacccttcatcttatcaccatcacactactgattagatatcactaccacaatgggc

SEQ ID NO: 167087 - DNA, 80 bp, synthetic construct
  source 1..80: mol_type = other DNA
agaccaacagcaacaatgccaggcgacgaaaactacttttacacaccagatggtctctggggagacccagtttatagcta

SEQ ID NO: 167088 - DNA, 80 bp, synthetic construct
  source 1..80: mol_type = other DNA
tttgcaagatttctattacacacaaatgggtgttactcaaatgactggcacaactctaactgaagcagataataacatct

SEQ ID NO: 167089 - DNA, 80 bp, synthetic construct
  source 1..80: mol_type = other DNA
cccgtccccgtccccagtcccgcacaaagcgccggcgcccagcacgcccaaaagccctccgtccacgccgccaaccccgt

SEQ ID NO: 167090 - DNA, 80 bp, synthetic construct
  source 1..80: mol_type = other DNA
cagaggcaagccagaactgctttaaaaaagttagcagtctgtggggagaccacgtatatgagaaaaacaaattaatagaa

SEQ ID NO: 167091 - DNA, 80 bp, synthetic construct
  source 1..80: mol_type = other DNA
agcctgacgacccgcagccacggcgtggtggtggggacggtggcgccgccgctggcgccgcaggcgaccgtggagaccga

SEQ ID NO: 167092 - DNA, 80 bp, synthetic construct
  source 1..80: mol_type = other DNA
tatattctactccaaatcctcccagtgtatcttctacaactcttgatacatctaccgactcacagatatcaatcgcctca

SEQ ID NO: 167093 - DNA, 80 bp, synthetic construct
  source 1..80: mol_type = other DNA
tatgaaacatgcaaggcctgggacaggcccgctagatccttccacacagacatacctacctacccctggatgcccaaacc

SEQ ID NO: 167094 - DNA, 80 bp, synthetic construct
  source 1..80: mol_type = other DNA
tgccgccaccagcagcaccagcacacccccttccaggtgtcatttatgaccaacaagcacttcctccaactccagggcca

SEQ ID NO: 167095 - DNA, 80 bp, synthetic construct
  source 1..80: mol_type = other DNA
ggcggcagatgaacttgatcatggaaaagctgttcacaaaggcaagcctccctgcccgttcccagtaggtgttgatgcac

SEQ ID NO: 167096 - DNA, 80 bp, synthetic construct
  source 1..80: mol_type = other DNA
agttatttgcaaagtgggccattacatatacagacactgtacaactgaggcgaaaattggagtttttcacctactccaga

SEQ ID NO: 167097 - DNA, 80 bp, synthetic construct
  source 1..80: mol_type = other DNA
catgccgcggggaccatccaggccaactgcccacagctgtttatgagacgccagcaccccggcctctttcccttcgttaa

SEQ ID NO: 167098 - DNA, 80 bp, synthetic construct
  source 1..80: mol_type = other DNA
gaggaaactccaggtttggggctatttacacatgtaattacaagataatgaactaccatctgatgacacatgaagatcac

SEQ ID NO: 167099 - DNA, 80 bp, synthetic construct
  source 1..80: mol_type = other DNA
acaatgtaggcacaaatgttaaaaatgttaatatgtatacagtgcttctagagagacaagacaacctagcacaggaaatt

SEQ ID NO: 167100 - DNA, 80 bp, synthetic construct
  source 1..80: mol_type = other DNA
aatctctatttgggtagtatatgctacccagatatagatcaggatagcatatactaccctaatctctatttggatagtaa

SEQ ID NO: 167101 - DNA, 80 bp, synthetic construct
  source 1..80: mol_type = other DNA
ggtattgacaatgttattgacaaggtgattaacaatgcactgcaactctcacaacccactcgacctgtcactgcgtcaga

SEQ ID NO: 167102 - DNA, 80 bp, synthetic construct
  source 1..80: mol_type = other DNA
tcactatagtagtgggggtagaattgtttcgcaaaccagcaacgccggaaggtcgttgctcgacagaagttgcggtatta

SEQ ID NO: 167103 - DNA, 80 bp, synthetic construct
  source 1..80: mol_type = other DNA
cgcgctagaaatcggcgctactgcagatgtgggaccagaggcaatgatagaaactaggtatgttatgaatagtaatacca

SEQ ID NO: 167104 - DNA, 80 bp, synthetic construct
  source 1..80: mol_type = other DNA
caataggttttatactttaaagagtgtgacttggtctaactcttcaaaaggttggtggtggaaattaccagatgcattga

SEQ ID NO: 167105 - DNA, 80 bp, synthetic construct
  source 1..80: mol_type = other DNA
atcaattatttcaaagatgcagcctcaagtggtgcatcaaagttggagttttcacaagatccaagtaaatttactgatcc

SEQ ID NO: 167106 - DNA, 80 bp, synthetic construct
  source 1..80: mol_type = other DNA
aatggttgatccgcgttattagcgctttaaccatcatgatcagaaattcaacagatacagcaacagtgttagccacatta

SEQ ID NO: 167107 - DNA, 80 bp, synthetic construct
  source 1..80: mol_type = other DNA
ttatttcaagcccaagcatatcagggcgtgggtgccgcgacctccacgtctgtgtcagtacaaaaacaaggcaaatgtga

SEQ ID NO: 167108 - DNA, 80 bp, synthetic construct
  source 1..80: mol_type = other DNA
cggtgcgagctgtatcgcaagcacggcctgtcatgagctggcgccgtcccgtacataatgctccagggatcgagcgaaat

SEQ ID NO: 167109 - DNA, 80 bp, synthetic construct
  source 1..80: mol_type = other DNA
ggagcccccccagggtaacaacaacaacaaccagcaaatgcagagatggcttggggatggtggaagcgacggaggcgcgg

SEQ ID NO: 167110 - DNA, 80 bp, synthetic construct
  source 1..80: mol_type = other DNA
gggctatcgtcctccgtccagccacgcaggatgttcacgtgggccccggcaccatagcatgtcacacattccccgttatc

SEQ ID NO: 167111 - DNA, 80 bp, synthetic construct
  source 1..80: mol_type = other DNA
cggccggcgctttgcgcgcgctgccggtgcgtgtcgtttcgccgcttgcggcgcggacggtggtgtgcgtggacggagga

SEQ ID NO: 167112 - DNA, 80 bp, synthetic construct
  source 1..80: mol_type = other DNA
atatcaaaattcatcagttgatttcgcccaaaacgcggtggcaatgaatcaagtggctacaattagaacatatggatttg

SEQ ID NO: 167113 - DNA, 80 bp, synthetic construct
  source 1..80: mol_type = other DNA
gctagtcagaacgcagcagggagtccacgtagacccctgccttgcgtaggccccaagcagtggctatttccagagagaaa

SEQ ID NO: 167114 - DNA, 80 bp, synthetic construct
  source 1..80: mol_type = other DNA
caataattctacatgcttacaaaaatatagacttggatcagttgaggatactcacatatggtgatgatataattttcact

SEQ ID NO: 167115 - DNA, 80 bp, synthetic construct
  source 1..80: mol_type = other DNA
tacctcaaacccagatggatctaccactattaaaggaccaaataataaaccttcacaagacgacatgtcagactttaaca

SEQ ID NO: 167116 - DNA, 80 bp, synthetic construct
  source 1..80: mol_type = other DNA
tgggccagagatgtggcggtctcaaactgctgcccccgggcctcttggaatgcagctggggccagtggagtcggcaggtt

SEQ ID NO: 167117 - DNA, 80 bp, synthetic construct
  source 1..80: mol_type = other DNA
gggggtgattcctagaggcgatgagactggcgtgcgctaaaagcgtcatggccacaatggggttgtctgccaggtcttcc

SEQ ID NO: 167118 - DNA, 80 bp, synthetic construct
  source 1..80: mol_type = other DNA
ctacgcaaagcctagtatcatctttgatgtattaagactggtcgttccctgcaaccccagcagtagacctggcagatgag

SEQ ID NO: 167119 - DNA, 80 bp, synthetic construct
  source 1..80: mol_type = other DNA
gtcacctgcgtgataactagctatcaagtgccaggcacattgcaaacacaggacatgccagtattgacacatcaaattat

SEQ ID NO: 167120 - DNA, 80 bp, synthetic construct
  source 1..80: mol_type = other DNA
catacatgaggttcaatgctgaattcacattcgtggcaactgggctcaatggcactgcaccacagaccatgctccaatac

SEQ ID NO: 167121 - DNA, 80 bp, synthetic construct
  source 1..80: mol_type = other DNA
atgtggagatcacatttgtgatcacaagcacacaggggacatcaacccagacaaacacagacacccctgtgctcacacac

SEQ ID NO: 167122 - DNA, 80 bp, synthetic construct
  source 1..80: mol_type = other DNA
actattcatgtgcaatgtaatgcaacaaaattccacagtgggtgtttattgatcgttgtcattccagaacatcagctggc

SEQ ID NO: 167123 - DNA, 80 bp, synthetic construct
  source 1..80: mol_type = other DNA
ggcaattcgggctcgggactggccgggctatgggcaaggctcttagggtattcattcttaatatgcgcttttccagaatt

SEQ ID NO: 167124 - DNA, 80 bp, synthetic construct
  source 1..80: mol_type = other DNA
tgcaggtgttaatggtgagcttattttaactataccactcaatatgagcaacacattattttctaccactctgttaggtg

SEQ ID NO: 167125 - DNA, 80 bp, synthetic construct
  source 1..80: mol_type = other DNA
cagcctcaaaccttagagaaattaattcaaaaaatacaaacaaatgcagaaaatgtgttaactaaaataaaccaagaact

SEQ ID NO: 167126 - DNA, 80 bp, synthetic construct
  source 1..80: mol_type = other DNA
agttaatgatagatataaagacccgcaagggaaactaaatgtttctgcagcctttcaaccttgtgatgttgatgcaaagg

SEQ ID NO: 167127 - DNA, 80 bp, synthetic construct
  source 1..80: mol_type = other DNA
acccgcaaaccatctaataactgacaaaataataataatctgatttaatttactgcacttttacttattccacacaccaa

SEQ ID NO: 167128 - DNA, 80 bp, synthetic construct
  source 1..80: mol_type = other DNA
cactaacaaggacctagacctggccctgtactatggctgccgcttcaggttttacagacacgaccgcacagactttatag

SEQ ID NO: 167129 - DNA, 80 bp, synthetic construct
  source 1..80: mol_type = other DNA
agaaatacttacttaaaaactacccaaactttgacggagccaaccttacaccaacatctgctagtagggctaacatcacc

SEQ ID NO: 167130 - DNA, 80 bp, synthetic construct
  source 1..80: mol_type = other DNA
aaataatcaacgcaccaaaaattaatcgcattataattttattatctacgtcactaccagtaattcgtaatatccggtat

SEQ ID NO: 167131 - DNA, 80 bp, synthetic construct
  source 1..80: mol_type = other DNA
cggcaactaaagatgcaggttactacaccatcaacaccccatccaaaagtaaattgcaccctagtgttttctatgacatc

SEQ ID NO: 167132 - DNA, 80 bp, synthetic construct
  source 1..80: mol_type = other DNA
tcggatgcctagtggtgcacaacagtttatgaccactgaggatgagcaatcagctaatatactcccagagtttagtccta

SEQ ID NO: 167133 - DNA, 80 bp, synthetic construct
  source 1..80: mol_type = other DNA
ggagaccatggcggcgcagatggaggacccgcagaactcgcagacgaagacctgctagacgctttcgagctcgccgaaga

SEQ ID NO: 167134 - DNA, 80 bp, synthetic construct
  source 1..80: mol_type = other DNA
ttattaagtggccaatttatgggtttttattattgcaaagtggggggtgggggactaacaacagcgtaaatttattttac

SEQ ID NO: 167135 - DNA, 80 bp, synthetic construct
  source 1..80: mol_type = other DNA
caacaagagattctatttaacaatgtcaggtggttagctttaaatgctagaaaatttgcaccactgtatgcctatgaagc

SEQ ID NO: 167136 - DNA, 80 bp, synthetic construct
  source 1..80: mol_type = other DNA
tacggtatgacgtggaggtaacctttgtcatcaccagctcgcaagacccctcaacaaacgtcagccaggacgcacctgtg

SEQ ID NO: 167137 - DNA, 80 bp, synthetic construct
  source 1..80: mol_type = other DNA
tggcagtatacacccaatctggtttgaagctctaaaacaagttttaaacaatttatcatttgaagacaaacttatagata

SEQ ID NO: 167138 - DNA, 80 bp, synthetic construct
  source 1..80: mol_type = other DNA
ggctcccactgaacaaaacgctgatgacctttttgccacgtggaagattagttattactacgcataccaattgcgcagga

SEQ ID NO: 167139 - DNA, 80 bp, synthetic construct
  source 1..80: mol_type = other DNA
acctcggccgggacttcttctaccacgggtctcttgctctcctcttcttccttgtcgggatcgcacggcattagctccgc

SEQ ID NO: 167140 - DNA, 80 bp, synthetic construct
  source 1..80: mol_type = other DNA
gcaaacaccacacgtggactaagcccaccgatgactactacgaataccacctaggcctattcagtcccatattcataggg

SEQ ID NO: 167141 - DNA, 80 bp, synthetic construct
  source 1..80: mol_type = other DNA
tggaaccaagagccagtgttaaatgacttagcaaagagcggaccgtttgcatacaaaaacaccaaaacaagtgtgactgt

SEQ ID NO: 167142 - DNA, 80 bp, synthetic construct
  source 1..80: mol_type = other DNA
gtcatggcgctttttgtggttgtggcaattttattaatcacctttcttatctgggcgagcgttacggcttcaggccaaat

SEQ ID NO: 167143 - DNA, 80 bp, synthetic construct
  source 1..80: mol_type = other DNA
actgccctctacagaaagtcttcccaacacacaacaatcggcaccttcgcattctcaagaggtcccggcgctgacagcag

SEQ ID NO: 167144 - DNA, 80 bp, synthetic construct
  source 1..80: mol_type = other DNA
gcatatggagtttggcctcattatctcacaccacaagacgctactgctatagacaagccaactagacctgatacttcctc

SEQ ID NO: 167145 - DNA, 80 bp, synthetic construct
  source 1..80: mol_type = other DNA
cgtttgcaccagaagcctctactatgattccaattacagtgaccatagcaccaatgtatacagaatttaatggattgaga

SEQ ID NO: 167146 - DNA, 80 bp, synthetic construct
  source 1..80: mol_type = other DNA
tgccgagggaagtaggcagggccatggatgtgctgagattaataagagtaacttgcccttcatattccagagcaatctat

SEQ ID NO: 167147 - DNA, 80 bp, synthetic construct
  source 1..80: mol_type = other DNA
tacccatcaccgtaaccgtggccccaatgtctgcagagtacaatggattgcggctcgccagtacgcaaggtttgcctact

SEQ ID NO: 167148 - DNA, 80 bp, synthetic construct
  source 1..80: mol_type = other DNA
attacaactagtaggggtgagtttaacatgctcgggatacatgataattgtgctgtagtacctacccatgcagagtgtgg

SEQ ID NO: 167149 - DNA, 80 bp, synthetic construct
  source 1..80: mol_type = other DNA
ttcatggcttggcgcagcgggctttgcgagaccgattccagaactttgaagcagttcttgcaagaggaatgcatgtggaa

SEQ ID NO: 167150 - DNA, 80 bp, synthetic construct
  source 1..80: mol_type = other DNA
aaccttgcagaatcctgtggaagatttcatagatgaaactttaaaagaagtcctggtggttccgaacactcaaccatccg

SEQ ID NO: 167151 - DNA, 80 bp, synthetic construct
  source 1..80: mol_type = other DNA
aagaactttttccaaggggatgagagtgcaaaggctacagtttccaacacacagcctagcggtccaagtaattctgtcag

SEQ ID NO: 167152 - DNA, 80 bp, synthetic construct
  source 1..80: mol_type = other DNA
acaaccaggcaataggctttagtgcaacacaagacaagattgacaatgtatttaacattttataccaaaacaactcttat

SEQ ID NO: 167153 - DNA, 80 bp, synthetic construct
  source 1..80: mol_type = other DNA
accataggaatggtgacagcaggaggagagaaccatgttgcatttatagacttgaggaactacagttcactcagtgaaca

SEQ ID NO: 167154 - DNA, 80 bp, synthetic construct
  source 1..80: mol_type = other DNA
cacaaatccaccactcacagataaaacaaacacagacatgggatttgtaccatatgactataactttggagacggaaaaa

SEQ ID NO: 167155 - DNA, 80 bp, synthetic construct
  source 1..80: mol_type = other DNA
agacgtagaaatgttcttaggtaggtctgcactctgggcaaacatcaaactcgcaaacgggttttataaatgggatataa

SEQ ID NO: 167156 - DNA, 80 bp, synthetic construct
  source 1..80: mol_type = other DNA
gcagctcgttggagaggacccggcgaagggcgggccagatttggaactcgatgaaggcggccgggaagaaggtgctgtgg

SEQ ID NO: 167157 - DNA, 80 bp, synthetic construct
  source 1..80: mol_type = other DNA
cgatgtaagatgggaatacacatacacaaatttaatgcgaacaatatataactcatgctcaacactaacaggctcaacat

SEQ ID NO: 167158 - DNA, 80 bp, synthetic construct
  source 1..80: mol_type = other DNA
tacaaaaaagaaactacttgctatgagctggcagcctactactcataatgtcaccggtcgtgagaatctctggtttagaa

SEQ ID NO: 167159 - DNA, 80 bp, synthetic construct
  source 1..80: mol_type = other DNA
ggtaagtctgggaggcagagggacggcctaggcccggggaagtggagcgggatcgcccgggtctctgttggcagagtccg

SEQ ID NO: 167160 - DNA, 80 bp, synthetic construct
  source 1..80: mol_type = other DNA
tcgcctgcagcatcgacccacagtacataaaacaaaactatgacaatttaatgacatttataaaaactaactactcatta

SEQ ID NO: 167161 - DNA, 80 bp, synthetic construct
  source 1..80: mol_type = other DNA
agaccaaagacacaacaaaaatggaagagtgcttgagtaaatatggcattgacctgccattggttacttacataaaagat

SEQ ID NO: 167162 - DNA, 80 bp, synthetic construct
  source 1..80: mol_type = other DNA
cacgaccccggctccagccagaaccacagccaacctaacaataataaatgaaaattcttcctgtataggcaacaacaact

SEQ ID NO: 167163 - DNA, 80 bp, synthetic construct
  source 1..80: mol_type = other DNA
agtaacgaaagcccatatggtcaagaacaagtgacaacaatgaaattagcttacttagacaggggtttctataaacacta

SEQ ID NO: 167164 - DNA, 80 bp, synthetic construct
  source 1..80: mol_type = other DNA
gatttactgagtgggaaattaacttccaggaaaatgcacatattagaaagaagtttgagctgttcacctacattaggttt

SEQ ID NO: 167165 - DNA, 80 bp, synthetic construct
  source 1..80: mol_type = other DNA
aaggctaacacaatggaaatgtacccaataccacttaatgataaagggagcgctgaccccattttcagtatatctttgag

SEQ ID NO: 167166 - DNA, 80 bp, synthetic construct
  source 1..80: mol_type = other DNA
tcaagcctaagggagtaacaaccactagggacagcattacattagtgaaatccaacaccggacacgcacgagtgaaaacg

SEQ ID NO: 167167 - DNA, 80 bp, synthetic construct
  source 1..80: mol_type = other DNA
atctattcaaagccaacccaaattacaccggcaactccattaagccaaccggtaccagtcgcacggcgatcaccactctt

SEQ ID NO: 167168 - DNA, 80 bp, synthetic construct
  source 1..80: mol_type = other DNA
gcccgctcacaatgggaccccagtttatattccactcatgggactggcgacgggggttctttaatcaaaaaactctcaaa

SEQ ID NO: 167169 - DNA, 80 bp, synthetic construct
  source 1..80: mol_type = other DNA
tgctgagcgtcttggaaggcctcaacctcctagaccacctggcggcccaccgggccctgcaataagggtgcttcctgcac

SEQ ID NO: 167170 - DNA, 80 bp, synthetic construct
  source 1..80: mol_type = other DNA
tacgggatcaacctcccactcgtgacgtatgtcaaagatgagttgaggtcaagaaataaggtggagttaggaaaatccag

SEQ ID NO: 167171 - DNA, 80 bp, synthetic construct
  source 1..80: mol_type = other DNA
cgcgtgtgttgaccgcgcatttgctagcccgcgcgtggccattgaggcgtgtaacgttgtgctcaaggataactttccaa

SEQ ID NO: 167172 - DNA, 80 bp, synthetic construct
  source 1..80: mol_type = other DNA
cgcagcttaaagtaaagtacttaaatgagttaaaaaagttgaacttgcttgaaaaacagattgagaacctgagaagtgct

SEQ ID NO: 167173 - DNA, 80 bp, synthetic construct
  source 1..80: mol_type = other DNA
tggccctgctcctgatgtttctgaggtggacctgacgttgccggcccttggggagcgggagttctccaggctcctggatc

SEQ ID NO: 167174 - DNA, 80 bp, synthetic construct
  source 1..80: mol_type = other DNA
acatagttcagtataatatcactgcacctttcactatagacaaagacagcagtcccagctatcatccaggcatgctaatg

SEQ ID NO: 167175 - DNA, 80 bp, synthetic construct
  source 1..80: mol_type = other DNA
ccactagtacaaattggggcctcaatagggaacttgcggtttccgttctgccgaccacaaactgacaacccttgcatcac

SEQ ID NO: 167176 - DNA, 80 bp, synthetic construct
  source 1..80: mol_type = other DNA
ctgtttttttgtggctagttttgcacccacaacatgtaagggcccgctacccctacaacacaaaacaaactatctccact

SEQ ID NO: 167177 - DNA, 80 bp, synthetic construct
  source 1..80: mol_type = other DNA
gccttccgctttacacaaaatggacgctaaaaacatccgggtcaaaggtcaccgctacgtcacaagtcacgtgactggag

SEQ ID NO: 167178 - DNA, 80 bp, synthetic construct
  source 1..80: mol_type = other DNA
gtgtgtgtcctgcagagaagaaacaacataccatgagcgactggattcctcctacacagaatgtaccctctagagaggaa

SEQ ID NO: 167179 - DNA, 80 bp, synthetic construct
  source 1..80: mol_type = other DNA
gtactgagaaaaattggttttgaatcagcaaatttaataaaacaaatatgtaccactcaccacatatttagagatcaagt

SEQ ID NO: 167180 - DNA, 80 bp, synthetic construct
  source 1..80: mol_type = other DNA
tctacctggaggaagtcatgccacaggctgaaaaccaggaccctgaagccaaagaccatgtcaattctttgggtgaaaat

SEQ ID NO: 167181 - DNA, 80 bp, synthetic construct
  source 1..80: mol_type = other DNA
aacaagtcaatggcttcagctcagctgattcagaagctcaacaacaactcattgttgaagtcgacatcttgaagaaggga

SEQ ID NO: 167182 - DNA, 80 bp, synthetic construct
  source 1..80: mol_type = other DNA
gaagtcctccaagaatgacacgttcgtctatagaacgtggttcaaaacgcttgttgtgtactttgtgatgtttgtcatgt

SEQ ID NO: 167183 - DNA, 80 bp, synthetic construct
  source 1..80: mol_type = other DNA
ctacgtacacttcctgggctgggtctacccgtgcatataactacacgtacttccgaatggctgagtttttcacgcccgtc

SEQ ID NO: 167184 - DNA, 80 bp, synthetic construct
  source 1..80: mol_type = other DNA
tgtgacctcaccggggaaacagaagtgcttgttcgtggtggtactggtttgtaccaccacgaacaagcacttctgtttcc

SEQ ID NO: 167185 - DNA, 80 bp, synthetic construct
  source 1..80: mol_type = other DNA
gccgccgtcgctggtgggcacgggcgtgcaccgcggtctgctcacggccacgggctgctgtctgctgcacaacgtcacgg

SEQ ID NO: 167186 - DNA, 80 bp, synthetic construct
  source 1..80: mol_type = other DNA
accagctggagagcaaatgtctctatctgctccattctactcacacaggccattgagaacaattcgcaatgaggatgcat

SEQ ID NO: 167187 - DNA, 80 bp, synthetic construct
  source 1..80: mol_type = other DNA
attcacatctcggtgtctgttcctttaagtaaaaacttatataaacatccaccactctccctaatacgcaggcgcaaaag

SEQ ID NO: 167188 - DNA, 80 bp, synthetic construct
  source 1..80: mol_type = other DNA
agctgcgaggaggaccactggggagaggccttagtatggaagtttgattcctctctggcatatagctatcaggcatttat

SEQ ID NO: 167189 - DNA, 80 bp, synthetic construct
  source 1..80: mol_type = other DNA
agacattactttactttcagagaagacatcaaaacagcaggacccagtgatttatttgtgcacacccaggagttcatata

SEQ ID NO: 167190 - DNA, 80 bp, synthetic construct
  source 1..80: mol_type = other DNA
ttacaagaatgctttctataccactgagggagggatgccatcaggtatctgtggtacctcaatctttaacactatgataa

SEQ ID NO: 167191 - DNA, 80 bp, synthetic construct
  source 1..80: mol_type = other DNA
gttgcaatgggcacggcgtccttgacgctgtcagcccagtctcggactttattggccgggatagtgcagcaacagcaaca

SEQ ID NO: 167192 - DNA, 80 bp, synthetic construct
  source 1..80: mol_type = other DNA
tgataaatacaaccccagtgctgaaaccacagaagcgcgtgcatttgcagcagtggactatttattaggttgtggggtct

SEQ ID NO: 167193 - DNA, 80 bp, synthetic construct
  source 1..80: mol_type = other DNA
tggtaaaagataatatagtgttggtatttgttgaaatcaattctgtagtggcagccgtattggatatattagcatatgat

SEQ ID NO: 167194 - DNA, 80 bp, synthetic construct
  source 1..80: mol_type = other DNA
gcgtgtgctgtggaggtgcggttggaacggcggcggcgaataaaagcggcgcgcgtgtgtctgtgtggagttgatctgtg

SEQ ID NO: 167195 - DNA, 80 bp, synthetic construct
  source 1..80: mol_type = other DNA
aatgcaaccacagccattgtttccaataggaattctatcactaccatgccaaatgatatctcgctcacaaccagagggcc

SEQ ID NO: 167196 - DNA, 80 bp, synthetic construct
  source 1..80: mol_type = other DNA
agacccagaagtggcatacatgtggactaactgcagaggagaatttctctactgcaacatgacttggttcctcaattggg

SEQ ID NO: 167197 - DNA, 80 bp, synthetic construct
  source 1..80: mol_type = other DNA
aagtacgtcactaaccacgtgacttctttcagcgaaccaatgtgctatgtcgtgcacttcctgggccgggtctacgtcct

SEQ ID NO: 167198 - DNA, 80 bp, synthetic construct
  source 1..80: mol_type = other DNA
acatcaattactttaaggatgcagcgtccagcggcgcatctaaactagagttttcacaggacccaagcaaattcacagac

SEQ ID NO: 167199 - DNA, 80 bp, synthetic construct
  source 1..80: mol_type = other DNA
cccttatgtgggcttgggtataaagaagaggtccattctaaataaggaaacacaagacacaacaaaaatgcaagagtgtt

SEQ ID NO: 167200 - DNA, 80 bp, synthetic construct
  source 1..80: mol_type = other DNA
accagggtgttgtgactgactatctcacccaattaggaaatgcttttggtgagggattcacacaaaacatcaaagatggc

SEQ ID NO: 167201 - DNA, 80 bp, synthetic construct
  source 1..80: mol_type = other DNA
gaaattggacaaaatctcaactggtaaaactagatgcatcgaggcatgtgaagtggattactgcattgtctacagaatga

SEQ ID NO: 167202 - DNA, 80 bp, synthetic construct
  source 1..80: mol_type = other DNA
gtgaggatacagatgaagaattggacaatgctatctacactatatgtgatattggtagtgacaacagttttgaaataaca

SEQ ID NO: 167203 - DNA, 80 bp, synthetic construct
  source 1..80: mol_type = other DNA
gtggcctgtcacgtggctaccacgtcatcggcgccatcttgtatcacaaaatggcggacaacttccgcttttttaaaaaa

SEQ ID NO: 167204 - DNA, 80 bp, synthetic construct
  source 1..80: mol_type = other DNA
cgggcaaggctcttaaaaaatgcactttcgcagagtgcgagcgaaaaggaaactgctactgcaagctgtgcgagctccac

SEQ ID NO: 167205 - DNA, 80 bp, synthetic construct
  source 1..80: mol_type = other DNA
actttagatttagaagaactttgatgtgcaagatcacatactcgaatcctgttgaaagatatatgtggattataaaaaac

SEQ ID NO: 167206 - DNA, 80 bp, synthetic construct
  source 1..80: mol_type = other DNA
tcacaaaacccactacagagtttatagagacccaagccaaatgcaccattactaacattcccctctatgctgctttctat

SEQ ID NO: 167207 - DNA, 80 bp, synthetic construct
  source 1..80: mol_type = other DNA
gggattcggttcgcgtcccgaatgtatccgctcacttgcttttggagaagctgattatatcgtccgggttcactggcgag

SEQ ID NO: 167208 - DNA, 80 bp, synthetic construct
  source 1..80: mol_type = other DNA
ggttaggggggcctatgtctcccactgatattccgccgtctaaacgggtgaagaaaaaggcctatccagagcgcaagacg

SEQ ID NO: 167209 - DNA, 80 bp, synthetic construct
  source 1..80: mol_type = other DNA
acaccaaaatttgcctgcattaccggtcgatgcaacgagtgatgaggttcgcaagaacctgatggacatgttcagggatc

SEQ ID NO: 167210 - DNA, 80 bp, synthetic construct
  source 1..80: mol_type = other DNA
aacttgaaatcacagttataaagttagataggaatgaaaaatttagggacataaggaaatatatacctgaaaatgaagat

SEQ ID NO: 167211 - DNA, 80 bp, synthetic construct
  source 1..80: mol_type = other DNA
tgctaaaaggcttgggtcactacttgcgtgcagaagggaaagtcgaatgttatcgtactttgtatcctgtccctttgtac

SEQ ID NO: 167212 - DNA, 80 bp, synthetic construct
  source 1..80: mol_type = other DNA
taaagatatgtaaagacactgatgaggtaacccaacaagctgtcctacaaggagatcccgtagaggacataatccatgat

SEQ ID NO: 167213 - DNA, 80 bp, synthetic construct
  source 1..80: mol_type = other DNA
ctcaaagcttcagaaaacaatgctaatgagtccatcttttctatatcattgagtcctgcagcagacaacaggttgtccca

SEQ ID NO: 167214 - DNA, 80 bp, synthetic construct
  source 1..80: mol_type = other DNA
attacaaaccacatgagggtgatgtaaagattttcattagacccagagatgatccaaagtttgtaactgctggaccaagt

SEQ ID NO: 167215 - DNA, 80 bp, synthetic construct
  source 1..80: mol_type = other DNA
caataagccaaagacgactggcagcactgagttggaaccaaagcacttctttaaatacagacaagacattacaagtatca

SEQ ID NO: 167216 - DNA, 80 bp, synthetic construct
  source 1..80: mol_type = other DNA
ggcgtggaaaactcagccaaccgagtgctatgtcgtccacttcctgggtggagtctacgtcctcatataagtaagtgcac

SEQ ID NO: 167217 - DNA, 80 bp, synthetic construct
  source 1..80: mol_type = other DNA
gaggccgtgaaggagaggctcgtctgaggtgaactctatgttgtcgcgaatcagcatgttgttggtaaatgtgcagaagg

SEQ ID NO: 167218 - DNA, 80 bp, synthetic construct
  source 1..80: mol_type = other DNA
tttacaccatgtccgaacattcaatcaagggaaagttaaacatggcaaccgctacagtgttgtgcagagattgtcccaaa

SEQ ID NO: 167219 - DNA, 80 bp, synthetic construct
  source 1..80: mol_type = other DNA
accctccaccccgtctcatacggagcctgccggcactgccagcggctccggaacccggtgagcagccacggcctggtgga

SEQ ID NO: 167220 - DNA, 80 bp, synthetic construct
  source 1..80: mol_type = other DNA
gaggcataaaagaacaagtaatccagaaagcatttctaaaggcacaaagacagggtttatcaatgttagcaacgggaggt

SEQ ID NO: 167221 - DNA, 80 bp, synthetic construct
  source 1..80: mol_type = other DNA
caggcatcctaactgggtcagctataggctgtgatcctgacatcttctggtcacaactatatgcttcaatggaaaaacac

SEQ ID NO: 167222 - DNA, 80 bp, synthetic construct
  source 1..80: mol_type = other DNA
cataactatccacactggaacaccctagcaggtgggcttgcatatggcaacgccaatggcacaaatacatcaactaaaac

SEQ ID NO: 167223 - DNA, 80 bp, synthetic construct
  source 1..80: mol_type = other DNA
attacacacttggagatgatgatataattgtaatacccagacaaaccttaacaacagctggaccaagtgatatgtatgtc

SEQ ID NO: 167224 - DNA, 80 bp, synthetic construct
  source 1..80: mol_type = other DNA
gtccgttgaaaacttcctgtgtcggtctgcgtgtgtatactataccacctatgacacacatggtgacgaagcagaccaaa

SEQ ID NO: 167225 - DNA, 80 bp, synthetic construct
  source 1..80: mol_type = other DNA
agatggccgcgaatatactgatctttctcgctttcttcgcgagcctgactctactactgggttccttgtctcttcttacc

SEQ ID NO: 167226 - DNA, 80 bp, synthetic construct
  source 1..80: mol_type = other DNA
tgcgtttcggcagtgcggcacgcggtctccgtcgtttcgccagtacgacgctgtggacggggtttcgccgcgctccggga

SEQ ID NO: 167227 - DNA, 80 bp, synthetic construct
  source 1..80: mol_type = other DNA
gtgttccaaatacgctgcagagcactccagcccactcacaagaggtccccgctttgactgcggttgaaacgggagccacg

SEQ ID NO: 167228 - DNA, 80 bp, synthetic construct
  source 1..80: mol_type = other DNA
tggcggctgatgcagcaccgtgtcgacgctggtcgaggacgacaaagagctcgacgaggaacaatgcgacggagatcggc

SEQ ID NO: 167229 - DNA, 80 bp, synthetic construct
  source 1..80: mol_type = other DNA
gtcacagtcgggtacaaacacacacatcctggagagtctggtagaataatagcaactaattcagttaataacaatacaag

SEQ ID NO: 167230 - DNA, 80 bp, synthetic construct
  source 1..80: mol_type = other DNA
tctacaagtcaaaaaccagccatacataaaaacggggaacaaattcctgaaacacaatatctacaaactacagttacaga

SEQ ID NO: 167231 - DNA, 80 bp, synthetic construct
  source 1..80: mol_type = other DNA
ccacgcttataacgaacctaacagtttattagcccttgacaggataggtcaaaagattatatgtaggttttccggtaaac

SEQ ID NO: 167232 - DNA, 80 bp, synthetic construct
  source 1..80: mol_type = other DNA
gtggggaactgagccagtaggatattaggcaagggtgacacagtgcccatgcattataatttaaccaaacagtggtcgtg

SEQ ID NO: 167233 - DNA, 80 bp, synthetic construct
  source 1..80: mol_type = other DNA
catggttaaaactcagtctctgcctccccaagcagtgcggcggcggtctctggatcgtgatagcgtcttctgcgtaggcc

SEQ ID NO: 167234 - DNA, 80 bp, synthetic construct
  source 1..80: mol_type = other DNA
ccacccacagggcccactgggcgctgcccactgggcgctagcactccgattctgcggaatctttgtgcgcctgttttata

SEQ ID NO: 167235 - DNA, 80 bp, synthetic construct
  source 1..80: mol_type = other DNA
atggtgggatgcggagaggcatcgctagacacaggttgatcgctgtgctagccccacctgatcagcgtcatgggtaaagc

SEQ ID NO: 167236 - DNA, 80 bp, synthetic construct
  source 1..80: mol_type = other DNA
aaacatcctaacaatactgaaaaccagcaagcaccagagtttaacgaatgggttgaaaagaagtttaaaacaggcaagtt

SEQ ID NO: 167237 - DNA, 80 bp, synthetic construct
  source 1..80: mol_type = other DNA
caaaggcataggtaacatgatatggctagatgtaataactaaatcagatagtaaatacacagaaaacaaatctaaatgcc

SEQ ID NO: 167238 - DNA, 80 bp, synthetic construct
  source 1..80: mol_type = other DNA
catgcttgtggaccttatgctcacacagctgtcctctagtcactaagtgtggaaactaatgaaatgtgggaacttagttg

SEQ ID NO: 167239 - DNA, 80 bp, synthetic construct
  source 1..80: mol_type = other DNA
cccgaccccatcgtcgacccgggctgccctcctggcgtggcgcccagcattcccgtctacgatccctcgtcctcacccaa

SEQ ID NO: 167240 - DNA, 80 bp, synthetic construct
  source 1..80: mol_type = other DNA
cgcagaaagagacaaaaaattaagataaaacagtggaacccagcagtgactaaattctgcagaataatagggtactaccc

SEQ ID NO: 167241 - DNA, 80 bp, synthetic construct
  source 1..80: mol_type = other DNA
ttagtctgagatgccccaattttttcttccctgtaccagcacctaaaccaaccggtacaagagccatagctttccatgat

SEQ ID NO: 167242 - DNA, 80 bp, synthetic construct
  source 1..80: mol_type = other DNA
acgtggcctacgtggaccgcttcgtgcggccgcccagctccatccgcaacccctcgtacgccgccgagatgacgcggctt

SEQ ID NO: 167243 - DNA, 80 bp, synthetic construct
  source 1..80: mol_type = other DNA
tgtgcaacactacccacatatacaaagatcaagtgtacatggttgagggtggaatgccatctggcatatgcggtaccagt

SEQ ID NO: 167244 - DNA, 80 bp, synthetic construct
  source 1..80: mol_type = other DNA
gctatcagaaaactttggatcaacgtattcttgtcagtgtccctgtaacagtactgcttcaaattattctaccaatggca

SEQ ID NO: 167245 - DNA, 80 bp, synthetic construct
  source 1..80: mol_type = other DNA
ttccgtgacgtcatggccgccattttaagtaagcaccgcccaggactgacgtcaaagttcaaagttcatcctcggccgga

SEQ ID NO: 167246 - DNA, 80 bp, synthetic construct
  source 1..80: mol_type = other DNA
tacacaacttacaagaacgccaacccaggagagacaggaggggtatttgtggatagttttaccgccacaacacaaccaac

SEQ ID NO: 167247 - DNA, 80 bp, synthetic construct
  source 1..80: mol_type = other DNA
tccgtccttgaagcaatagtttcctgtagcccgtttatggttagagatcaggaagccagcagttgggacataaccatggg

SEQ ID NO: 167248 - DNA, 80 bp, synthetic construct
  source 1..80: mol_type = other DNA
cgtagtgttgtgggaagcggcagtgtaatctgcacaaagaggcgcggggcgcgcaacgttgggaggtcgttggcggcagg

SEQ ID NO: 167249 - DNA, 80 bp, synthetic construct
  source 1..80: mol_type = other DNA
gggcagcagaatgtagagcgcctcggtagccgtcgcggtgccttccacgaggatgggctgccggtgcctttcgtgatttt

SEQ ID NO: 167250 - DNA, 80 bp, synthetic construct
  source 1..80: mol_type = other DNA
ggggaagctattcatggacaggtaaattcagaactagggacatggcaaatggactgtacacatttagagggaaaggttat

SEQ ID NO: 167251 - DNA, 80 bp, synthetic construct
  source 1..80: mol_type = other DNA
ccagcaccggctgggccaaatctcccagtccaaagatccccagctccagaggcatcagcgcgcgcaggcgggcagcggtg

SEQ ID NO: 167252 - DNA, 80 bp, synthetic construct
  source 1..80: mol_type = other DNA
atgctaaaccaagaggcagtaatggaagacataagcagatcagggccctttgcaccaaagcaagaaatgcccagcacaga

SEQ ID NO: 167253 - DNA, 80 bp, synthetic construct
  source 1..80: mol_type = other DNA
ggtccgaaccacgagttcctgtgttcactcatacgcagaaactgccatgtagccacaacagatagaggggattttaacct

SEQ ID NO: 167254 - DNA, 80 bp, synthetic construct
  source 1..80: mol_type = other DNA
cataaatataccaatgcctactgaataaaaagtagtattgcaatgaactggcggattacggttacgtggacgatattact

SEQ ID NO: 167255 - DNA, 80 bp, synthetic construct
  source 1..80: mol_type = other DNA
cacctggctttattgtggatttgttgtcttcatccaaagaccccaaagttatagagtattgtgcagaacaggggtggatt

SEQ ID NO: 167256 - DNA, 80 bp, synthetic construct
  source 1..80: mol_type = other DNA
actactggacggcctctaacgaggacctggacctctgtagatacaggggctgcaccctgtggttttttagacacccagaa

SEQ ID NO: 167257 - DNA, 80 bp, synthetic construct
  source 1..80: mol_type = other DNA
gagcagtgcaatatacacacaaatatagtaccaactaccattacaaggctgatgagaatagtccccttagggatagacac

SEQ ID NO: 167258 - DNA, 80 bp, synthetic construct
  source 1..80: mol_type = other DNA
ccctactaagacaaaattacaacccagtgttttccatgatgtatttccaggtagtaaagaaccagctgtactatctacaa

SEQ ID NO: 167259 - DNA, 80 bp, synthetic construct
  source 1..80: mol_type = other DNA
agaaaagtgcatgatttgggattgaagccaataaatacacctagcaagacaaagttactccctagtgttttttataatgt

SEQ ID NO: 167260 - DNA, 80 bp, synthetic construct
  source 1..80: mol_type = other DNA
attcaagttcaaataaatcccactccttttcagcagggaggactgatctgtgctatggttcctggagatcagagttatgg

SEQ ID NO: 167261 - DNA, 80 bp, synthetic construct
  source 1..80: mol_type = other DNA
gttgccatcaccactgttgtatgaatgtcacaattccacattaagcattcttcatgtaaacgtctcagatcccagaaact

SEQ ID NO: 167262 - DNA, 80 bp, synthetic construct
  source 1..80: mol_type = other DNA
tttgggaaatcaactacaccgatacagtgcaattgaggcgtaagctggagtttttcacatactctcgatttgacctagaa

SEQ ID NO: 167263 - DNA, 80 bp, synthetic construct
  source 1..80: mol_type = other DNA
gaacgacaactccccgttgatcgaaccgacgggcacagacgacgaagaggacgaggacgacgacgtctgataaggaaggc

SEQ ID NO: 167264 - DNA, 80 bp, synthetic construct
  source 1..80: mol_type = other DNA
agaatactacaccacaaacacagatgaaaccaaaagatttgccagttggacaattaatgcaaggcgcatggtgcagatga

SEQ ID NO: 167265 - DNA, 80 bp, synthetic construct
  source 1..80: mol_type = other DNA
cagaaacaatgatggatagaatcgctcttggtgatcttgaatcctcagttgatgatcctcgatctgaagaggatcgtaaa

SEQ ID NO: 167266 - DNA, 80 bp, synthetic construct
  source 1..80: mol_type = other DNA
gtcagaacccaacagggagtccacgtagatccctgcctcgtgtaggcccggagcagtggctactccccgagagaaagcct

SEQ ID NO: 167267 - DNA, 80 bp, synthetic construct
  source 1..80: mol_type = other DNA
acaccagataccttttcacaagcaggatacataacatgctggtatcaaacttcccttgtgacgcctcccagtacgcccgc

SEQ ID NO: 167268 - DNA, 80 bp, synthetic construct
  source 1..80: mol_type = other DNA
gtacacaaagtggaaaatcacaactcggcaggttgcgcaactgaggagaaaaatggaaatgttcacttacatgcgatttg

SEQ ID NO: 167269 - DNA, 80 bp, synthetic construct
  source 1..80: mol_type = other DNA
acaaaatcaggatactgtggtggagtcttgtacaaaattgggcagattgttggcatacatgtaggtggcaatggtagaga

SEQ ID NO: 167270 - DNA, 80 bp, synthetic construct
  source 1..80: mol_type = other DNA
ttacacctcctataagaatgccaacccaggagagactgggggtgagtttgtggacaagttcgcagctgccactgaagcat

SEQ ID NO: 167271 - DNA, 80 bp, synthetic construct
  source 1..80: mol_type = other DNA
ggatcattaccgcaggcggtaatggaattgtggcatttgctgacattagggatttgtgggtctatgaggaagaagccatg

SEQ ID NO: 167272 - DNA, 80 bp, synthetic construct
  source 1..80: mol_type = other DNA
ggtgaccaatggcgtggggctggtggaagagacggcgccgaggctggtggaggcgacgctggacccgtggcagaattcgc

SEQ ID NO: 167273 - DNA, 80 bp, synthetic construct
  source 1..80: mol_type = other DNA
gattcagctgccttagggtatgtgatgtgcaagcctttcatgtctggtactacaggagggaaaattgagatttatctaag

SEQ ID NO: 167274 - DNA, 80 bp, synthetic construct
  source 1..80: mol_type = other DNA
ggtctggtaggagtagttaatatgtcagacggtggcacagacactacagggtatgccacgtgggatatagacatcatggg

SEQ ID NO: 167275 - DNA, 80 bp, synthetic construct
  source 1..80: mol_type = other DNA
catctcgaataagctgttaccattatacccaaaggagaataagatcataaaagatctacttaaacaggctaaaagcatga

SEQ ID NO: 167276 - DNA, 80 bp, synthetic construct
  source 1..80: mol_type = other DNA
gactttgcatacggccgcatgcctgggggagtacaacaaataccaattagatggagaatgaggtggtaccccatgctatt

SEQ ID NO: 167277 - DNA, 80 bp, synthetic construct
  source 1..80: mol_type = other DNA
tcttttccacggggaaccaggaactgggaaatcaatcgccacatccatcctggctaggatgctaactactgagtcagaca

SEQ ID NO: 167278 - DNA, 80 bp, synthetic construct
  source 1..80: mol_type = other DNA
atcgccacgaccctcgagcacctcagcggtgtacccgtcacgcccaatgtggacctgctggccgagctcatggcgcgctc

SEQ ID NO: 167279 - DNA, 80 bp, synthetic construct
  source 1..80: mol_type = other DNA
ttggcatggcagggataataggactatcatcagcttaaacaagcattataatctcactatgcgttgtaggaggccaggaa

SEQ ID NO: 167280 - DNA, 80 bp, synthetic construct
  source 1..80: mol_type = other DNA
tgttgatgaactcaggtttggatatcgcgcaagtcttcgacggctgttaccacagcgaggcctaccgcatgctcttccag

SEQ ID NO: 167281 - DNA, 80 bp, synthetic construct
  source 1..80: mol_type = other DNA
acaacttagaatggagaacaacactagggacaaagtcaagagtaatctcagagccatcttccagggattgggcgatacaa

SEQ ID NO: 167282 - DNA, 80 bp, synthetic construct
  source 1..80: mol_type = other DNA
gctcgccgttcaagccaatagcatcacggatcacctgaagcgctttgacgccgtccgcgtccctgagagctgtcgtgggg

SEQ ID NO: 167283 - DNA, 80 bp, synthetic construct
  source 1..80: mol_type = other DNA
atgcttctcccaaggcaaaaaccttagagatcgttatccccgcattgcctacacagagcctagtatcacctttgatgtat

SEQ ID NO: 167284 - DNA, 80 bp, synthetic construct
  source 1..80: mol_type = other DNA
aaagccagttcaatttgccatcgcagacggtaacaatcagccacttgctctgctgaatattcatcttccggtaatgatgt

SEQ ID NO: 167285 - DNA, 80 bp, synthetic construct
  source 1..80: mol_type = other DNA
tggtttggtatcgacattataattggtctacacatggacaccacatttatcccaatacacattacaaaactttgatacat

SEQ ID NO: 167286 - DNA, 80 bp, synthetic construct
  source 1..80: mol_type = other DNA
atataactcatgctcaacactaacaggctcaacatacaactggaaaaactacagcaataaagcaaattatgaaaaatgct

SEQ ID NO: 167287 - DNA, 80 bp, synthetic construct
  source 1..80: mol_type = other DNA
tgccatctggatgctctgggaccagcatatttaacacaatgattaacaatattatcattagaacactagttctggatgca

SEQ ID NO: 167288 - DNA, 80 bp, synthetic construct
  source 1..80: mol_type = other DNA
gccccggcacctctgggagggccaactcgtagtggtgccccaggtatgaaacagagccaagatgcatgtgtacatcgagc

SEQ ID NO: 167289 - DNA, 80 bp, synthetic construct
  source 1..80: mol_type = other DNA
cagtcacattcaaagatcgcaacacatgcttgagttacccattaagccaaatttacaacctaatccttgaagaagacaaa

SEQ ID NO: 167290 - DNA, 80 bp, synthetic construct
  source 1..80: mol_type = other DNA
atctacaggtggatacctcagatgtccaaggaccagacaatatacctacatgtgactgtactcaggcgtgttattatgct

SEQ ID NO: 167291 - DNA, 80 bp, synthetic construct
  source 1..80: mol_type = other DNA
cattagactgaacaaggcaaaatgggagcacaggtctcgacacaaaagaccggggctcatgaaaccggtttgaacgcgag

SEQ ID NO: 167292 - DNA, 80 bp, synthetic construct
  source 1..80: mol_type = other DNA
cggtttccgttctgctcaccacaaactggcaacatttgcatatacttccagattttagatccctactggtataaccgccg

SEQ ID NO: 167293 - DNA, 80 bp, synthetic construct
  source 1..80: mol_type = other DNA
aggtgggtttagtactttaatgtttaacctaagaatactatttgatgaatataaaaagcaaagatgtcgctggagcagat

SEQ ID NO: 167294 - DNA, 80 bp, synthetic construct
  source 1..80: mol_type = other DNA
aaacctatcaaatcttacacctcctacagttcaaatcccagaggcactgcacaggagattcttcatggacatggatatca

SEQ ID NO: 167295 - DNA, 80 bp, synthetic construct
  source 1..80: mol_type = other DNA
tgtgggggtggaaatatgagcaagaataaggacggctccttattaacctgatcagccccggagttgcctgtttcatcact

SEQ ID NO: 167296 - DNA, 80 bp, synthetic construct
  source 1..80: mol_type = other DNA
gttttagcgggtaatgctttcgtgtatccacaccaggttattaacttaagaaccaacaattgcgccaccttggtgttgcc

SEQ ID NO: 167297 - DNA, 80 bp, synthetic construct
  source 1..80: mol_type = other DNA
ccagcgctccaggctgccgagacaggagcatcctcaaccgctacggatgaaaggatgattgagaccaggtgtgtggtaaa

SEQ ID NO: 167298 - DNA, 80 bp, synthetic construct
  source 1..80: mol_type = other DNA
ttcatagtcaagattctagttaggatgtttggcttatggcaatggagaaccatataccataatatccttaccacagcttg

SEQ ID NO: 167299 - DNA, 80 bp, synthetic construct
  source 1..80: mol_type = other DNA
agctacgcccctgacggtacctcactaagtcacaactgcaaaaagtggacacaatcagattggcaatcatttaaggccca

SEQ ID NO: 167300 - DNA, 80 bp, synthetic construct
  source 1..80: mol_type = other DNA
aattttttaagctctgtagtaataaactgagtgtaatttttggtgatctggggatattttgtgtatatgtcgctctgtaa

SEQ ID NO: 167301 - DNA, 80 bp, synthetic construct
  source 1..80: mol_type = other DNA
catacttatgtgcaggcagactagccgtagagatcccaggcctatacacagacataatatataacccatacacagacaaa

SEQ ID NO: 167302 - DNA, 80 bp, synthetic construct
  source 1..80: mol_type = other DNA
tcccccctgaggcaactccctcgaagtccggcgctacgcgcttcgcgctgcgccggacatctcggacctgtctcttactt

SEQ ID NO: 167303 - DNA, 80 bp, synthetic construct
  source 1..80: mol_type = other DNA
aggtgacactgtagcagacatgattgaaggtcatgtgtcaaccgcgatgaatgacattctcaatccacatcagcaaccga

SEQ ID NO: 167304 - DNA, 80 bp, synthetic construct
  source 1..80: mol_type = other DNA
aatagcatttatggacaacctaactacaatccccagtacacaaatttaacaaatattagaaaatggttttttgaacaaag

SEQ ID NO: 167305 - DNA, 80 bp, synthetic construct
  source 1..80: mol_type = other DNA
tatacccatgcatacagtacaaactatcactacagaaagaaaactgaaccagaacaaaatctaaggaatagacacttcat

SEQ ID NO: 167306 - DNA, 80 bp, synthetic construct
  source 1..80: mol_type = other DNA
agtccataccaccaagcctcaaactttgggcgcactagagatcggcgctactgcagatgtgggaccagaggcaatgatag

SEQ ID NO: 167307 - DNA, 80 bp, synthetic construct
  source 1..80: mol_type = other DNA
acaccgccatacacctcactgccagagtagtagtcagatgcccctacactgaacccatgcttatagaccactcagacccc

SEQ ID NO: 167308 - DNA, 80 bp, synthetic construct
  source 1..80: mol_type = other DNA
agatgagcttaggaaacaggagaagatttctgctggaaagacacgtgtcatagaagctagtagtgtaaatgacactgtga

SEQ ID NO: 167309 - DNA, 80 bp, synthetic construct
  source 1..80: mol_type = other DNA
cctaggagctagcataaaaatatacagacacccagacactgactatatagtaatatacaacagaaaaagccccctgggag

SEQ ID NO: 167310 - DNA, 80 bp, synthetic construct
  source 1..80: mol_type = other DNA
gatcgagatgttcctagggagatctgcattatgggccaatatagatttggatgacaagtttgccaagtgggatattagct

SEQ ID NO: 167311 - DNA, 80 bp, synthetic construct
  source 1..80: mol_type = other DNA
agtttgcgacatggaaggtaagtgttagacaggccgcacaactaaggagaaagttggagttgttcacgtacctgcgctgt

SEQ ID NO: 167312 - DNA, 80 bp, synthetic construct
  source 1..80: mol_type = other DNA
tttctggagattgtacgccgcgcttcggaaaagtccgagctggtttcgcgcgggcccgtcagtccgctgcagccggacaa

SEQ ID NO: 167313 - DNA, 80 bp, synthetic construct
  source 1..80: mol_type = other DNA
tcagaatacacagagtatgatgaatattttgaaacaggtctgccatcaaaaagaaaaaagttcgacacgccggcagaagg

SEQ ID NO: 167314 - DNA, 80 bp, synthetic construct
  source 1..80: mol_type = other DNA
cctaaacagagtgtggtttcagtacagcacaaaacccaccacggactttgtagaaaagcaagctaaatgtttgctgcaaa

SEQ ID NO: 167315 - DNA, 80 bp, synthetic construct
  source 1..80: mol_type = other DNA
tccacagaaaaaacggcctgctatgagctggcagccccctatgcacaatgccagaggccgggagcaccacttctggcagg

SEQ ID NO: 167316 - DNA, 80 bp, synthetic construct
  source 1..80: mol_type = other DNA
atgagaacaaaagagtgacaaaaatacaaaaagacttaaggcaacttacagcatacctgaaaacacatagacatgagcca

SEQ ID NO: 167317 - DNA, 80 bp, synthetic construct
  source 1..80: mol_type = other DNA
aattattcaccacttggagaattacatacacacagacataccaacttagaagaaaattagagttatttacttactcaaga

SEQ ID NO: 167318 - DNA, 80 bp, synthetic construct
  source 1..80: mol_type = other DNA
attctcatggtacccgtgcatgtttcaccaacaaaactttatgaatgacatagttcaaagcggaccctttgcctacaaag

SEQ ID NO: 167319 - DNA, 80 bp, synthetic construct
  source 1..80: mol_type = other DNA
ttaggatagttaatgatcatgatgttcatacaactttagtaaagattagggtttaccacagagcaaaacatgtccaggca

SEQ ID NO: 167320 - DNA, 80 bp, synthetic construct
  source 1..80: mol_type = other DNA
tgcttctatactgcaaggccagaagcacaccagtcacattaagcaaagaccaactaagtggggtcatagctgtttcctga

SEQ ID NO: 167321 - DNA, 80 bp, synthetic construct
  source 1..80: mol_type = other DNA
gcttcggctagacgcgtgaggaacttgagcacatagtcgcgatcgcgcgtgcgattcagcaaaaagagcgtggccagcat

SEQ ID NO: 167322 - DNA, 80 bp, synthetic construct
  source 1..80: mol_type = other DNA
ggtgaggctaatccagtcgaccaaccgactgaaccagatgttgcagcttgtagattttacacacttgaaacagtctcttg

SEQ ID NO: 167323 - DNA, 80 bp, synthetic construct
  source 1..80: mol_type = other DNA
agcatgggctcacaagtttccacacaacggtccggctcgcacgagaactccaactcagctacagaaggttccactataaa

SEQ ID NO: 167324 - DNA, 80 bp, synthetic construct
  source 1..80: mol_type = other DNA
cgcccatgtggagttgtgcactgttattccggtaactttacacgccagttttatttcccccctccccaaatgtaacttag

SEQ ID NO: 167325 - DNA, 80 bp, synthetic construct
  source 1..80: mol_type = other DNA
aggcatcttccatgagcctgtggcgacccccggcccacaatgtctccggcagggagagaaattggtttgaggcctgttac

SEQ ID NO: 167326 - DNA, 80 bp, synthetic construct
  source 1..80: mol_type = other DNA
ttaatactggatccaggttgttcccacctggatctcccaagcggagtggtacactattatcccggtaattttgtacgcca

SEQ ID NO: 167327 - DNA, 80 bp, synthetic construct
  source 1..80: mol_type = other DNA
aaaagaaacaggacaggttagacttaattaacaaaattataaaaaacgccaaaaatgttctaatcaaagtaaaccaagaa

SEQ ID NO: 167328 - DNA, 80 bp, synthetic construct
  source 1..80: mol_type = other DNA
ccaggaggcacccatcattttgttacagagtcccgcgcccccccgattcacaccagtgcccatggtagccttaggacata

SEQ ID NO: 167329 - DNA, 80 bp, synthetic construct
  source 1..80: mol_type = other DNA
ctttgtttccaacgacgccgtctacatcaactcgctcaacgtcaatattcgcggttcctaccccgagtttctgtactcgc

SEQ ID NO: 167330 - DNA, 80 bp, synthetic construct
  source 1..80: mol_type = other DNA
agacatagatggcttgagctattctgaattaaactaaatacatatatagagatttaatttgagtagaatttttcctctat

SEQ ID NO: 167331 - DNA, 80 bp, synthetic construct
  source 1..80: mol_type = other DNA
gcaaacaaaccatgataactactggaatgccagaaatgaccagacattcagcgagtcaaaggccctcagtcacaaaaccg

SEQ ID NO: 167332 - DNA, 80 bp, synthetic construct
  source 1..80: mol_type = other DNA
catacctgttagccgaagcagggaaagattacggttttataatgaccccagcagacaagggagaatgcttcaatgaggtg

SEQ ID NO: 167333 - DNA, 80 bp, synthetic construct
  source 1..80: mol_type = other DNA
caacacatacagttccacaatttgcactttagcacaaaaaaccagagaaagatttaaagcagcaacaaaggcagccctgc

SEQ ID NO: 167334 - DNA, 80 bp, synthetic construct
  source 1..80: mol_type = other DNA
accaaggaaagatacagaagtactccaagaagggcagcaagaagaaggctcaggttcagtacaccagcgagtcctccagc

SEQ ID NO: 167335 - DNA, 80 bp, synthetic construct
  source 1..80: mol_type = other DNA
ggctgagggacgtggagctttggcgggactgggctgagggactgtggtcaggagaccggtggtgacgccgcggacgtgga

SEQ ID NO: 167336 - DNA, 80 bp, synthetic construct
  source 1..80: mol_type = other DNA
tggatcccaagggcaccaagagcactaccatatgtgtcaattggacgttcaaattatgacaaaagtgccaaaccagttat

SEQ ID NO: 167337 - DNA, 80 bp, synthetic construct
  source 1..80: mol_type = other DNA
tgttcaacttaggaggaaattggagttcttcacatattccagatttgatctagagatgacttttgtcataactgaaagat

SEQ ID NO: 167338 - DNA, 80 bp, synthetic construct
  source 1..80: mol_type = other DNA
tatggtattatagttggggagcatgtataccaattagattcagacgacatctttaaaacagcattaacaggaaaagctaa

SEQ ID NO: 167339 - DNA, 80 bp, synthetic construct
  source 1..80: mol_type = other DNA
gtgtcttttccatggaggcattgctccatggaaaagacacttacctacactacataaaaattttggaacctcatctgaaa

SEQ ID NO: 167340 - DNA, 80 bp, synthetic construct
  source 1..80: mol_type = other DNA
gggcagatggtccgtgaggcattcttgtgccttagtccaaacatggaggccaggaggcaggggccctgcgaatggtcgcc

SEQ ID NO: 167341 - DNA, 80 bp, synthetic construct
  source 1..80: mol_type = other DNA
agccgcaagtgccagtagtgatcttatcctagctataccacttgacatgaataatactctattttctactactctactag

SEQ ID NO: 167342 - DNA, 80 bp, synthetic construct
  source 1..80: mol_type = other DNA
tgcacttgatgccgcagaaactggacacactagtaatgtacaaccagaggacatggttgaaacaagatatgtccagacat

SEQ ID NO: 167343 - DNA, 80 bp, synthetic construct
  source 1..80: mol_type = other DNA
catgaggttcaatgcagaattcacatttgtcacaacgactgagaatggagaggctcgtccatacatgctgcaatatatgt

SEQ ID NO: 167344 - DNA, 80 bp, synthetic construct
  source 1..80: mol_type = other DNA
ttgactacctggtgcatctcaccaggacccctccttttaaggaggacctactaagcattatcagccatcaaccagcactc

SEQ ID NO: 167345 - DNA, 80 bp, synthetic construct
  source 1..80: mol_type = other DNA
acttgctctgcgtgttctgacatgtcagtgcgcatgcttcgagacaccccaatgatgaagcaagaagttaatattgcaca

SEQ ID NO: 167346 - DNA, 80 bp, synthetic construct
  source 1..80: mol_type = other DNA
aaaatttctcagtaaagcagcgaaagtgtcggggaggagtttcgaatacaaagaccatacttcgtctacagcacaaacag

SEQ ID NO: 167347 - DNA, 80 bp, synthetic construct
  source 1..80: mol_type = other DNA
aattcatggggctcacagatggatttgacagatccactagaggtagaggattgcactgaggactgtaagcaatctttgtc

SEQ ID NO: 167348 - DNA, 80 bp, synthetic construct
  source 1..80: mol_type = other DNA
acaagccaagcacaggcgattatgccacagttataccagttagagacaatgttagggcagtaaagaatgtaggacccagt

SEQ ID NO: 167349 - DNA, 80 bp, synthetic construct
  source 1..80: mol_type = other DNA
atcgagacctaaaaatagatattaagactagcccaccccctgagtgtataaatgacctgcttcaagcggttgactcccag

SEQ ID NO: 167350 - DNA, 80 bp, synthetic construct
  source 1..80: mol_type = other DNA
tcccaattacaatcacagtcgcccccatggatgccgagtacaatgggctgcggctagcgggacaccaaggattaccaact

SEQ ID NO: 167351 - DNA, 80 bp, synthetic construct
  source 1..80: mol_type = other DNA
attagatctaccctatatcacctacctcaaagatgaactccgtagccctcagaagattaaggttggaaaaactcgggcta

SEQ ID NO: 167352 - DNA, 80 bp, synthetic construct
  source 1..80: mol_type = other DNA
tcttttataccattaaataacatagaaggggagacaacaaaacccagtgtttattgtgtgacagttccaaagaaaacaaa

SEQ ID NO: 167353 - DNA, 80 bp, synthetic construct
  source 1..80: mol_type = other DNA
gtagggtgctcgaccgaccagtgtcccactcgcccactgctgctaacacccaggtaagccagcattccattgagacaggg

SEQ ID NO: 167354 - DNA, 80 bp, synthetic construct
  source 1..80: mol_type = other DNA
gagacgacgcagagcgccatctccttctggaggccggcggcgttaactgctacagctgcggcggcgacaacagctgcgat

SEQ ID NO: 167355 - DNA, 80 bp, synthetic construct
  source 1..80: mol_type = other DNA
atcactatcggaagttctacaataactacacaggatgccgtgaacaccgtcttggcatatggggagtggcctagttactt

SEQ ID NO: 167356 - DNA, 80 bp, synthetic construct
  source 1..80: mol_type = other DNA
gacacagacactgagattaccatcctgtggttggatcaaaatgaaaaattcagagatatcagaagatttatccctgagta

SEQ ID NO: 167357 - DNA, 80 bp, synthetic construct
  source 1..80: mol_type = other DNA
ccagcaacagaaagagcaaagttagcatacaggcagcaaaataatgatgatgtagatagtgatgataatgacttagtagg

SEQ ID NO: 167358 - DNA, 80 bp, synthetic construct
  source 1..80: mol_type = other DNA
ttgcaagacttttactacacccacctaactgtcactccaaccacaactacctctttaaccacagaagaccaaagtatatt

SEQ ID NO: 167359 - DNA, 80 bp, synthetic construct
  source 1..80: mol_type = other DNA
cccagcttctgacaggaggttacaatatactatgttaggggaggtccttaattattacacacattggaccggttcattga

SEQ ID NO: 167360 - DNA, 80 bp, synthetic construct
  source 1..80: mol_type = other DNA
cggcggcgtcccggcacacatcctggatgccctccacgacgctctttagcgtctggaggtccgtggagtagtggcgtggg

SEQ ID NO: 167361 - DNA, 80 bp, synthetic construct
  source 1..80: mol_type = other DNA
ggctaccccccagtaaacactccagctaaaactaaacttttacctagtgttttctttgatgtttttcctggtagtaaaga

SEQ ID NO: 167362 - DNA, 80 bp, synthetic construct
  source 1..80: mol_type = other DNA
ggatttactccactcactcgattcacccctgttatattgtttattgcattgttggttaggtaacatcattacaatgggag

SEQ ID NO: 167363 - DNA, 80 bp, synthetic construct
  source 1..80: mol_type = other DNA
aggtgtaacataactggcataattcccctcataatatgcggacagggacgctcctcctttaactatggcatccactcgga

SEQ ID NO: 167364 - DNA, 80 bp, synthetic construct
  source 1..80: mol_type = other DNA
aattcatgggggtcacaaatggacttgacagaccctctttgcattgaagatagcgttgaggactgcaagcaagatatttc

SEQ ID NO: 167365 - DNA, 80 bp, synthetic construct
  source 1..80: mol_type = other DNA
caagaatatggggatctttggtgaaaaccttttctatcatttccttggcagagctgggtacaccgttcatgtacagtgta

SEQ ID NO: 167366 - DNA, 80 bp, synthetic construct
  source 1..80: mol_type = other DNA
agaggtactataccagcaattctgggcatgctaggaatgctttttatcaaattatgaacgtgcctcctgtagcacctaca

SEQ ID NO: 167367 - DNA, 80 bp, synthetic construct
  source 1..80: mol_type = other DNA
ttggtacacacattgtttgggatgttgggttacaatcaactgtgtctctggttgtcccatgggttagtgctagccatttc

SEQ ID NO: 167368 - DNA, 80 bp, synthetic construct
  source 1..80: mol_type = other DNA
aagcctcaaaggaatctacaccaaacaaccaaattacagcagatgaatactttcaaaaactagacgccttatggggagat

SEQ ID NO: 167369 - DNA, 80 bp, synthetic construct
  source 1..80: mol_type = other DNA
gttaaattacttttctaactggtctggcagcataacaatcacattcatgtgtgtttgtgacagcttcagtacaggaaaat

SEQ ID NO: 167370 - DNA, 80 bp, synthetic construct
  source 1..80: mol_type = other DNA
aatcccctaaatgaccatggaaaaggaaacatgatttggtttcaatacttatcaaaaccaaacacagactacgaccccac

SEQ ID NO: 167371 - DNA, 80 bp, synthetic construct
  source 1..80: mol_type = other DNA
caagcaagactccaggcataccaagaactaacaaaaaaaaccaatggcgataagtggtacaattggcaatatacatacaa

SEQ ID NO: 167372 - DNA, 80 bp, synthetic construct
  source 1..80: mol_type = other DNA
acgtgggttcccaggccaccaaggctatgccaatatcaaaaagcaggtaatgttaattttgagccaacaggggtgacaga

SEQ ID NO: 167373 - DNA, 80 bp, synthetic construct
  source 1..80: mol_type = other DNA
ttgtattaaatgaattaggttttgatggtgaattaactgaaaaacttaaaaagacaacacatgtatataaggatgaagtg

SEQ ID NO: 167374 - DNA, 80 bp, synthetic construct
  source 1..80: mol_type = other DNA
ttctaattgtttacatgatcttgacactaattaaagactccgcaataattgtacaagcaactggtacagatttcaatact

SEQ ID NO: 167375 - DNA, 80 bp, synthetic construct
  source 1..80: mol_type = other DNA
catacaatatcaaaacaaaccaaacacaaacttgtttgactactacacaggtatgtacagcagtatatttttatcatcag

SEQ ID NO: 167376 - DNA, 80 bp, synthetic construct
  source 1..80: mol_type = other DNA
ccgggtcaaagggcatcctcggcggaacctatacaaaatggtggtcaattccttccgggtcaaaggtcacgcctacgtca

SEQ ID NO: 167377 - DNA, 80 bp, synthetic construct
  source 1..80: mol_type = other DNA
cacaccctggggaacttggaagagtagttggacaagctagaactcagaatagtgaaaatcaacctagtgatgataattgg

SEQ ID NO: 167378 - DNA, 80 bp, synthetic construct
  source 1..80: mol_type = other DNA
ttccaattacaatttcaatagcaccagacaaatcagaattctcaggggcaaggcaatctgtgaaacaaggattaccaaca

SEQ ID NO: 167379 - DNA, 80 bp, synthetic construct
  source 1..80: mol_type = other DNA
ttgaatggatgaaatcaatgctcccacaagcccaacttaaagttaaatacttgaatgagctcaaaaaactaaatttatat

SEQ ID NO: 167380 - DNA, 80 bp, synthetic construct
  source 1..80: mol_type = other DNA
gggaccctaggcgtcccctctcctcccctccaggcccgagcctctccctcgcggagaggggcctcttcgagccctcaagt

SEQ ID NO: 167381 - DNA, 80 bp, synthetic construct
  source 1..80: mol_type = other DNA
cgaccagcagcaggttgtcatattagatgatcttggacaaaatcctgatggcaaagatttaagcacattctgtcagatgg

SEQ ID NO: 167382 - DNA, 80 bp, synthetic construct
  source 1..80: mol_type = other DNA
atataaggcaaataattaacacctggcataaggtagggaagaatgtatatttgcctcccagggaaggggagttgacctgc

SEQ ID NO: 167383 - DNA, 80 bp, synthetic construct
  source 1..80: mol_type = other DNA
gcaatactagacttacttaaatctgttagaaatcctgatgtcattaaatactgtgaggaaaacaaatggattgtgccagc

SEQ ID NO: 167384 - DNA, 80 bp, synthetic construct
  source 1..80: mol_type = other DNA
tgcccctcacaagagcagcaggaggttttgttcaataacatcaggtggcttgcactgaaggctagaaaatttgcaccctt

SEQ ID NO: 167385 - DNA, 80 bp, synthetic construct
  source 1..80: mol_type = other DNA
attaggcggccattttctatgaagacatctgcagcgtaattctgttccattcacctcataatgatacacatatgctaaaa

SEQ ID NO: 167386 - DNA, 80 bp, synthetic construct
  source 1..80: mol_type = other DNA
ccccttctgtgtggaaaagcagtggtcttacaaaacaaaagaacccagggtagctattcagttttaactgttgtggaaca

SEQ ID NO: 167387 - DNA, 80 bp, synthetic construct
  source 1..80: mol_type = other DNA
cgaccaagttaacactagtagcccatcacaagataaaggattcaacattaacatacaaacatttagagacagcaactata

SEQ ID NO: 167388 - DNA, 80 bp, synthetic construct
  source 1..80: mol_type = other DNA
cccccgaatgttcacagataagtggtacccccagacagacctctgtgacatgacactcctaacgatctttgcctctgcgg

SEQ ID NO: 167389 - DNA, 80 bp, synthetic construct
  source 1..80: mol_type = other DNA
agcaaaggcggttttcaggtcgtgcgcctgatgcgccatcgcctccagcgcggcgagcccctttcccagccctgaggcgg

SEQ ID NO: 167390 - DNA, 80 bp, synthetic construct
  source 1..80: mol_type = other DNA
taacaacatggttaataaacaaacagtactaaacacattagcaacaccatttatactaaaatggccagcaccagtaaaaa

SEQ ID NO: 167391 - DNA, 80 bp, synthetic construct
  source 1..80: mol_type = other DNA
ttaaacagaagaaaaggagtgaaccagtagcaataatgatacatggtcctccagggactggcaaatcaataacaactagt

SEQ ID NO: 167392 - DNA, 80 bp, synthetic construct
  source 1..80: mol_type = other DNA
agggctatgccatatgtgaattctggtgtcgacttcaagccaacagataaggttatgactcaagttgcctccattagaac

SEQ ID NO: 167393 - DNA, 80 bp, synthetic construct
  source 1..80: mol_type = other DNA
gtgcggaaatcagttgacggtgtaactacccgcaatgaaatggaaaatatattgcaaaatctgaccctccgcattcaagt

SEQ ID NO: 167394 - DNA, 80 bp, synthetic construct
  source 1..80: mol_type = other DNA
gtgacgttcagagcggttgacgttgtatagggagaatatggcgtagtagtactttgagatttcttactctttttttctga

SEQ ID NO: 167395 - DNA, 80 bp, synthetic construct
  source 1..80: mol_type = other DNA
aagtcactaagcactccgagcgaagcgaggagtgcgacccttccacggcgcgccccctactgccctggtgcaacgccctc

SEQ ID NO: 167396 - DNA, 80 bp, synthetic construct
  source 1..80: mol_type = other DNA
tcacaagtggtccctagtgacacaatgcaaacaagacacgtgaagaattatcactccagaacagaatcttcaattgaaaa

SEQ ID NO: 167397 - DNA, 80 bp, synthetic construct
  source 1..80: mol_type = other DNA
atgccttcgggtatctgtggcacatcaattttcaataccatgatcaataatataatcattagagtgttggttctagaaac

SEQ ID NO: 167398 - DNA, 80 bp, synthetic construct
  source 1..80: mol_type = other DNA
ccacgacctacaaaagacgaagcccaagaaaacaaccagagtgaagaaaagcatctaacaacgacggacaattctgtttc

SEQ ID NO: 167399 - DNA, 80 bp, synthetic construct
  source 1..80: mol_type = other DNA
aagaatggatccagaattttgatgtagtgttgataagtgtcttttctagtaggtaaattagacactgaaaatatgataca

SEQ ID NO: 167400 - DNA, 80 bp, synthetic construct
  source 1..80: mol_type = other DNA
atgccaccgtagatgagtcgggccaggaagctgtagacatactcgggctgctcatgcccgtgggcctccacgaagctgtc

SEQ ID NO: 167401 - DNA, 80 bp, synthetic construct
  source 1..80: mol_type = other DNA
aaagaggaagttcccggagacagtgggggggggggcgcgcgcgccccgggcacagcttccatccagcctcgcacaccctc

SEQ ID NO: 167402 - DNA, 80 bp, synthetic construct
  source 1..80: mol_type = other DNA
ctgcaatgaacagaagatttttcctagatttggatatagtagtgcatgagagatataaagataaccaagggaaactagat

SEQ ID NO: 167403 - DNA, 80 bp, synthetic construct
  source 1..80: mol_type = other DNA
agcaccaacctcaacaaactcaaccacaaccataacaccaatgagctcaaccccagggttgttaaatgaggattctttat

SEQ ID NO: 167404 - DNA, 80 bp, synthetic construct
  source 1..80: mol_type = other DNA
ttggcgatggattcacaagctccataagacaaacactcatgggcgcttgcgaggtgtccgacaaactgactggcaaaata

SEQ ID NO: 167405 - DNA, 80 bp, synthetic construct
  source 1..80: mol_type = other DNA
tttaaaaacggaacaaacggaacaaaccaggagaggaccaatattacttccactataattaacgaaacagacccatgcat

SEQ ID NO: 167406 - DNA, 80 bp, synthetic construct
  source 1..80: mol_type = other DNA
cttgaaggaagccttgactgtgaggatctacatgagaatcaagcatgtcaaggcttgggtcccaaggccccttagaagcc

SEQ ID NO: 167407 - DNA, 80 bp, synthetic construct
  source 1..80: mol_type = other DNA
tcactttcctaaaaagagggttcaagagtgatccaaaataccctttcttgattcacccagtgtatccaatgaaagatgtt

SEQ ID NO: 167408 - DNA, 80 bp, synthetic construct
  source 1..80: mol_type = other DNA
ataacaccaccagataagtcaccaaagtttacaaaaatggattggcatacagtcacattcttaaagagacactttaaacc

SEQ ID NO: 167409 - DNA, 80 bp, synthetic construct
  source 1..80: mol_type = other DNA
tgtgtcaggcaaggccaacacaatggacatgtacagaattccactgagcaccacgggcactacaagccccatattctgtc

SEQ ID NO: 167410 - DNA, 80 bp, synthetic construct
  source 1..80: mol_type = other DNA
tatatcagcatgggtgcctcggcctcctagagcaactgagtacactcataagttcagtactaattactattttaaatcaa

SEQ ID NO: 167411 - DNA, 80 bp, synthetic construct
  source 1..80: mol_type = other DNA
ctggaaacccaggaggcgccgctggagacgtctacgatggagaagacctagacgcgctgttcgccgccgtcgccgaggac

SEQ ID NO: 167412 - DNA, 80 bp, synthetic construct
  source 1..80: mol_type = other DNA
actaacatacacatcactaatgaaaagattttacacagcagctgcaaatgacaccacagaccccataacagacaaaaact

SEQ ID NO: 167413 - DNA, 80 bp, synthetic construct
  source 1..80: mol_type = other DNA
aattgcagctgaccactatgctgctcaactcagtgttttaaatatttccccagagccactatcattagaacaggctgtat

SEQ ID NO: 167414 - DNA, 80 bp, synthetic construct
  source 1..80: mol_type = other DNA
ataaattgaggatcatcgcatatggtgatgatataatagcctcatatccagataagttggacccaaaagagttagccaca

SEQ ID NO: 167415 - DNA, 80 bp, synthetic construct
  source 1..80: mol_type = other DNA
taaactgcggttgggagggtgaacggcaccgcgtagtccactacatccccggcacctcgggtctgctgccctcgtgcgag

SEQ ID NO: 167416 - DNA, 80 bp, synthetic construct
  source 1..80: mol_type = other DNA
ggccgggccatgggcaaggctcttaaaaagctatgtctctcggtaaaatctacaggaagaaaaggaaactgcttctgcag

SEQ ID NO: 167417 - DNA, 80 bp, synthetic construct
  source 1..80: mol_type = other DNA
ccattttatccatggatgcccagacaaaccccaaaattctctgtaagcttcaagcttggctttaaaccctaaataaaatt

SEQ ID NO: 167418 - DNA, 80 bp, synthetic construct
  source 1..80: mol_type = other DNA
agatcttacttttctgaaacacagggacagataattacttccaagtctacaagtgaatgtggtttgcctagtattcacac

SEQ ID NO: 167419 - DNA, 80 bp, synthetic construct
  source 1..80: mol_type = other DNA
cattgtggcaccagacagcattcgtgtccaatggaacctcaggatctataatggttacttgctctgcatgctctgacatg

SEQ ID NO: 167420 - DNA, 80 bp, synthetic construct
  source 1..80: mol_type = other DNA
cacccctcccccatgtaacttagaagataagcacacagaccaatagctggcaatcatccagattgttaatggtcaagcac

SEQ ID NO: 167421 - DNA, 80 bp, synthetic construct
  source 1..80: mol_type = other DNA
gtacaaaactcaacacaacttaattcattaggtacaaatgcaactgaaagcagagacacttggtacaaaggcaatacata

SEQ ID NO: 167422 - DNA, 80 bp, synthetic construct
  source 1..80: mol_type = other DNA
tggggctttgtgatagctaatgaatgtggcagctgttgtttgtactggaccctgaattggaaacagtaacttggattctg

SEQ ID NO: 167423 - DNA, 80 bp, synthetic construct
  source 1..80: mol_type = other DNA
cgttatgttatgaaatatcaactgatgaacacaaacataaaattgaagtgaccacttcaatatatcacaaggcaaaacat

SEQ ID NO: 167424 - DNA, 80 bp, synthetic construct
  source 1..80: mol_type = other DNA
atctccagtccataacgttattaaatttcggttaacgggcattgatgtttcttcggacgttgttgatctttcttgcccgt

SEQ ID NO: 167425 - DNA, 80 bp, synthetic construct
  source 1..80: mol_type = other DNA
tctggctcacgcgatctcactggagtccctctccgcgcctgtgcgccggcgcgcaaacactgatagccgtcgcacagggt

SEQ ID NO: 167426 - DNA, 80 bp, synthetic construct
  source 1..80: mol_type = other DNA
tgcaaacccaagcctcgctaaaccacttggaccaaattttgggtccacaactcctgatccatgagacgcagcaggccctg

SEQ ID NO: 167427 - DNA, 80 bp, synthetic construct
  source 1..80: mol_type = other DNA
tcaatttggttctgctatcgaatacaacaaaatgggagctcaggtgtcgacacagaagactggggctcatgagaccctgc

SEQ ID NO: 167428 - DNA, 80 bp, synthetic construct
  source 1..80: mol_type = other DNA
gtcaatgctagtaaatttaataagaaaaaattcctgactgcttcaactaagtacaagtggacacgggctaaaattgatat

SEQ ID NO: 167429 - DNA, 80 bp, synthetic construct
  source 1..80: mol_type = other DNA
cggccagagacaagacgcggaaaagaggaaagaacagacacacgcaaaacaacggccagaggaagctcgggggcgcaagg

SEQ ID NO: 167430 - DNA, 80 bp, synthetic construct
  source 1..80: mol_type = other DNA
ctcttgtcactcctggcccctcccccccttctgccactgttgctgcttttctccatgtcgcggacgacttcgacgttcgc

SEQ ID NO: 167431 - DNA, 80 bp, synthetic construct
  source 1..80: mol_type = other DNA
ctccagcaggcccaaaggtacctcgatggatgccaggggtcggagaagaccacacgcaaagagaagactcgagttcagag

SEQ ID NO: 167432 - DNA, 80 bp, synthetic construct
  source 1..80: mol_type = other DNA
cacaacttggtcaagcaccaccactacttacactataccaagtgacaacacctacaaaaactggggaaactggtggaaat

SEQ ID NO: 167433 - DNA, 80 bp, synthetic construct
  source 1..80: mol_type = other DNA
cagttgaaaactatgtagatgaggtgctcaatgaagttctggttgtacctaacatcagggagagtcatccaagcacatct

SEQ ID NO: 167434 - DNA, 80 bp, synthetic construct
  source 1..80: mol_type = other DNA
taattggtgagatagctagttactatactcattggacaggcagtatccgattcagctttcttttctgtggatctgcaaat

SEQ ID NO: 167435 - DNA, 80 bp, synthetic construct
  source 1..80: mol_type = other DNA
gattatcccacacgcccaggtcaatgtggcggagtcattctcaatacaggcaacattgtcgccatccacgtgggcgggaa

SEQ ID NO: 167436 - DNA, 80 bp, synthetic construct
  source 1..80: mol_type = other DNA
gtgtggacggcgactagttgcgtgtggtgcgacggcgaataaaagcgacgtgcgcggcgcacgtcgcaaagaagacgcgt

SEQ ID NO: 167437 - DNA, 80 bp, synthetic construct
  source 1..80: mol_type = other DNA
agcactacactgcacagctatacatgttagacataaatccagaacctatatctatggatcaagctgtgtatggcatggaa

SEQ ID NO: 167438 - DNA, 80 bp, synthetic construct
  source 1..80: mol_type = other DNA
acaagaacacatgcaagaaccgtcttcagaaacctgtaaagaaactcaaaaaactaatccaccgtttaaatatgaaaact

SEQ ID NO: 167439 - DNA, 80 bp, synthetic construct
  source 1..80: mol_type = other DNA
tctggtgctcgtgcaaaaagtcaagggttaccagttatgatcacacctggttctggtcaattcttaaccacagatgattt

SEQ ID NO: 167440 - DNA, 80 bp, synthetic construct
  source 1..80: mol_type = other DNA
aagttacacacacaaaaattccaccaactaccatacaccaactggggctagtgatggtacacttaaggaaaaacattacc

SEQ ID NO: 167441 - DNA, 80 bp, synthetic construct
  source 1..80: mol_type = other DNA
agacaccatcgagaaagttgttggagacgctctggcaatctcaatgccaaaggtagccgacacaaaaccatccggcccag

SEQ ID NO: 167442 - DNA, 80 bp, synthetic construct
  source 1..80: mol_type = other DNA
tagtgcccatggcagctttggaggacaaaggtcggactttcactagtaaatatgtcctagccagcacaaatttgtgtcat

SEQ ID NO: 167443 - DNA, 80 bp, synthetic construct
  source 1..80: mol_type = other DNA
caatgcagtaccaattactatttctataagccccatgtgtgctgaattctctggtgcacgtgcaagaagtcaaggcctac

SEQ ID NO: 167444 - DNA, 80 bp, synthetic construct
  source 1..80: mol_type = other DNA
gcataaactcagccattcggaagtgaatccgaacgtcccgagggcaggtgccggaggtgagtttacacaccgaagtcaag

SEQ ID NO: 167445 - DNA, 80 bp, synthetic construct
  source 1..80: mol_type = other DNA
gaagctagactacgcagcgacagcatcgacgtacgtgccaataacagtcactgtggcacccatgtgcgccgagtacaatg

SEQ ID NO: 167446 - DNA, 80 bp, synthetic construct
  source 1..80: mol_type = other DNA
tgagttatcagttgctattgataaactgaagaagggtttagatggtctcgcaccactctatgccagggaaaataaactag

SEQ ID NO: 167447 - DNA, 80 bp, synthetic construct
  source 1..80: mol_type = other DNA
tccaggatatgcgggtccctggaccccaaggtctcaacatccatgttataggcacccctgggcaccatggtctcaagatc

SEQ ID NO: 167448 - DNA, 80 bp, synthetic construct
  source 1..80: mol_type = other DNA
agagcttgagtaatggagagacagctaacacgttcgactcacaaaacacgactgggcagacagctgtgcaggccaacgtc

SEQ ID NO: 167449 - DNA, 80 bp, synthetic construct
  source 1..80: mol_type = other DNA
attcactgaatgttgtaatgcagcaaagggcctggaatggataggaattaagattagtaaattcatagactggttaaaag

SEQ ID NO: 167450 - DNA, 80 bp, synthetic construct
  source 1..80: mol_type = other DNA
ccaacactgaatttgcattgtcactgctcagaaagaacattgtcacaataacaacatctaagggagaatttacagcttta

SEQ ID NO: 167451 - DNA, 80 bp, synthetic construct
  source 1..80: mol_type = other DNA
ggaggccgccggcggggacgcgccgtgcgcgatggcgggagccgtgtggtctgctgtgactttacctccgcagccgtacg

SEQ ID NO: 167452 - DNA, 80 bp, synthetic construct
  source 1..80: mol_type = other DNA
tccaaatattagggagagtcacccaaccacatcaaattcagctcccgctctggatgcagcagaaactggtcatacaagta

SEQ ID NO: 167453 - DNA, 80 bp, synthetic construct
  source 1..80: mol_type = other DNA
cagcgagaactccgaaagcgactccgagccctgttccaaagcctccaaaagacgcaggcgggtctccacgtaaatccatt

SEQ ID NO: 167454 - DNA, 80 bp, synthetic construct
  source 1..80: mol_type = other DNA
agcaacaaggatgggtagtggaagcaccatcagattcactcaccatagagagacacatttcgaaagctgccaccatatta

SEQ ID NO: 167455 - DNA, 80 bp, synthetic construct
  source 1..80: mol_type = other DNA
tgaggcagtggcaacctgacgttgttaaaaagcgtaaaataacaggatggatgcctcttataatctgtggctctggaagc

SEQ ID NO: 167456 - DNA, 80 bp, synthetic construct
  source 1..80: mol_type = other DNA
ggatgcccaggacgtgaccgcgagcgccgtgcgcgccttcgtgggtgcgttgccgagctcgggctaccactttggcttcg

SEQ ID NO: 167457 - DNA, 80 bp, synthetic construct
  source 1..80: mol_type = other DNA
gaccgtcaacactggtgtcggagaaaacccaatggtgtcctctgaggcatctgctggaaaaacccccgctccttccaaca

SEQ ID NO: 167458 - DNA, 80 bp, synthetic construct
  source 1..80: mol_type = other DNA
gtaataattaaaccaaatacattattcactgacaaatggtactttcaaaaggacatttgcaaactgccactagtctcaat

SEQ ID NO: 167459 - DNA, 80 bp, synthetic construct
  source 1..80: mol_type = other DNA
ctggagcacctggaccggaaaccagaaaggatgctatgcttggcacacatgttgtgtgggatataggcctacaatcaaca

SEQ ID NO: 167460 - DNA, 80 bp, synthetic construct
  source 1..80: mol_type = other DNA
tacagtacccattacaatatcaattagccctatgtttgcagagttttcaggcgcacgcgcaagaagtcagggattgccgg

SEQ ID NO: 167461 - DNA, 80 bp, synthetic construct
  source 1..80: mol_type = other DNA
ggcatatatgtccttaaaaactctgtgtataacaacaacttaacaaacctacatggagggggccacgaagaaggcagaaa

SEQ ID NO: 167462 - DNA, 80 bp, synthetic construct
  source 1..80: mol_type = other DNA
caccaggagaatccatagttattgatggcaaggaaattaaaataattgatgcacaagcactggtagaccaagctggcact

SEQ ID NO: 167463 - DNA, 80 bp, synthetic construct
  source 1..80: mol_type = other DNA
actataagccccaaacaggcgaggtcacccttccaattgaagtaagagacaatcctagatacataaagaatgtaggacct

SEQ ID NO: 167464 - DNA, 80 bp, synthetic construct
  source 1..80: mol_type = other DNA
atgtatgtgcatgttggaaatttaatatacagaaatttacacttatttaattcagaagcacatgattctgtattggtgtc

SEQ ID NO: 167465 - DNA, 80 bp, synthetic construct
  source 1..80: mol_type = other DNA
tgtcaactctcttgattatggacgtaacttcttcatccgtcttatcaccctcctgcaaagcgctcatgcagtgcttgatg

SEQ ID NO: 167466 - DNA, 80 bp, synthetic construct
  source 1..80: mol_type = other DNA
agacgagctgttcgccgctatcgaaggagaagagtaaggaggcgccgcggctgggggcggtatgggcgacgcaggcgcag

SEQ ID NO: 167467 - DNA, 80 bp, synthetic construct
  source 1..80: mol_type = other DNA
cagttttatatatccttccccgaaacatatagaagcttgtacacaacgaccaataggtggtaaccatccaggttactgac

SEQ ID NO: 167468 - DNA, 80 bp, synthetic construct
  source 1..80: mol_type = other DNA
ttacaacaatgtaaaagaccaggggactaaagccctagaacaaaagcattttctaacctcaaggactgacatcaagaacg

SEQ ID NO: 167469 - DNA, 80 bp, synthetic construct
  source 1..80: mol_type = other DNA
aggatacctattcccttcataagcgtgtgtaatgcctacagctgtttttacgatgtttggtctcacttctcggataacgg

SEQ ID NO: 167470 - DNA, 80 bp, synthetic construct
  source 1..80: mol_type = other DNA
caaccacacagacacccccttctacccctgggctcctaaggcccccccacaattcaaagtgtctttcaaactcggctgga

SEQ ID NO: 167471 - DNA, 80 bp, synthetic construct
  source 1..80: mol_type = other DNA
tactggccaactacccaatgtgggcaatgtgctacgggtacctggactggtgtgacaaagtactagaccatataaatata

SEQ ID NO: 167472 - DNA, 80 bp, synthetic construct
  source 1..80: mol_type = other DNA
gaaaagaaaaaggagctactcatcgagcagctccaccagcaaaaacaccaccagcgagtcctcagacgaggcctcaaact

SEQ ID NO: 167473 - DNA, 80 bp, synthetic construct
  source 1..80: mol_type = other DNA
tctatacaaaagacattgttgaaggattcttcaagaatgcagagaacatgtacaccgcaagaaaaaatgtgagttaccaa

SEQ ID NO: 167474 - DNA, 80 bp, synthetic construct
  source 1..80: mol_type = other DNA
aaggccagaggaatgtggaaagatgagcgaggacaggtgtggaggttttggactagctcttagtttctgggtgtgagaga

SEQ ID NO: 167475 - DNA, 80 bp, synthetic construct
  source 1..80: mol_type = other DNA
cttggggactcaacttcttcggagtccggcgctacgccttcggctgcgccggacacctcagacccccgctcgtgctgaca

SEQ ID NO: 167476 - DNA, 80 bp, synthetic construct
  source 1..80: mol_type = other DNA
cttctaatttattggggccaaatagttatgccacaacatccaagccagaaaacaaagatgttgttcaagctactacaact

SEQ ID NO: 167477 - DNA, 80 bp, synthetic construct
  source 1..80: mol_type = other DNA
aagtagaaatatatatcagcttgaggtgtcccaattttttctttcctttgccagcacctaagccaacagggacatctagg

SEQ ID NO: 167478 - DNA, 80 bp, synthetic construct
  source 1..80: mol_type = other DNA
aagcaatacagagagcagcagcaactcagatgccagctcgagcacctgattctggaagtagcaaagacccagcaacacct

SEQ ID NO: 167479 - DNA, 80 bp, synthetic construct
  source 1..80: mol_type = other DNA
ccaaaacaatttgacgcgtgctatcttgcgtttggcactcacagaaatcggttgtcccgatttcctgctcgaggctttca

SEQ ID NO: 167480 - DNA, 80 bp, synthetic construct
  source 1..80: mol_type = other DNA
aaagcaaacactatggagatgtatccaattcccttggacgataaaggtggcagctcacccattttcagcatctctttaag

SEQ ID NO: 167481 - DNA, 80 bp, synthetic construct
  source 1..80: mol_type = other DNA
acaaactcagagtcctctgcaggcagctcaccagtctccaagccgggcacggcctacacccattatttcaacagggccta

SEQ ID NO: 167482 - DNA, 80 bp, synthetic construct
  source 1..80: mol_type = other DNA
cagcttgtcgccgcgcaccgtaaagtcgagcacttgcggctccatgatcatcacattctgtctagtgaaatccgtatgga

SEQ ID NO: 167483 - DNA, 80 bp, synthetic construct
  source 1..80: mol_type = other DNA
gcaaatcagacaaggaaagcagccaaagaaattgtggaatggttcagtagtaaaatcaagtcaatgttgagttttgtaga

SEQ ID NO: 167484 - DNA, 80 bp, synthetic construct
  source 1..80: mol_type = other DNA
ttggacggtggaaatccccatcagcgttacctcacctgacgacagttcctcgggggaggtccctgatcacccgacagcta

SEQ ID NO: 167485 - DNA, 80 bp, synthetic construct
  source 1..80: mol_type = other DNA
ggggatacattctacggagtagtatccataaatgattttggcaccctagccattagagtagtcaatgagtttaaccctgc

SEQ ID NO: 167486 - DNA, 80 bp, synthetic construct
  source 1..80: mol_type = other DNA
aatagtggcagttcatgtagccagtggattcatagaagcagaagtaataccccaagaaacaggaagacagacagctctct

SEQ ID NO: 167487 - DNA, 80 bp, synthetic construct
  source 1..80: mol_type = other DNA
gggtgtcagatgtgatcgaaagctctataagagacagtgtgagtggggcagtcacccagtcccctccggcacccacagga

SEQ ID NO: 167488 - DNA, 80 bp, synthetic construct
  source 1..80: mol_type = other DNA
cccgtctggttcagggctttggagatggtcttacgggacattggctactcagaggaagcagtgtcactcatagaagataa

SEQ ID NO: 167489 - DNA, 80 bp, synthetic construct
  source 1..80: mol_type = other DNA
gggcacagcactatgagattctccttaacagtactgtacaatgactttttaagacacatgaacttttggacaaaaagcaa

SEQ ID NO: 167490 - DNA, 80 bp, synthetic construct
  source 1..80: mol_type = other DNA
tcgggcgtctggcagcgcattaccaccgagtcgtcttcttgcggtaccggtggtggcggcgccggcggcggctgctgctg

SEQ ID NO: 167491 - DNA, 80 bp, synthetic construct
  source 1..80: mol_type = other DNA
acacctaagggaccctcacttagagtgatgattaatagtagatccgcagtcctagcacaaatgcctagtaagtttacaat

SEQ ID NO: 167492 - DNA, 80 bp, synthetic construct
  source 1..80: mol_type = other DNA
ccgcggtcccctagggacgagcgcttccccttttccgcgcgcgaccgtccccggggacttcctcttgtctctggccgtcg

SEQ ID NO: 167493 - DNA, 80 bp, synthetic construct
  source 1..80: mol_type = other DNA
cgtccgacagagaagccccgatactgtgtttatcattgtccccagcaagtgaccccagactgtcttttacaatgttaggt

SEQ ID NO: 167494 - DNA, 80 bp, synthetic construct
  source 1..80: mol_type = other DNA
gtctatgcactatacaagcttatgtgtatagcacaaggtccctactctggtcaaccacaaccagtgcacaaaaaacctga

SEQ ID NO: 167495 - DNA, 80 bp, synthetic construct
  source 1..80: mol_type = other DNA
ggtagcatcattcttattcttggaacagtgtacgccctctacaagcttatgtgtattgctcaaggcccatacaccggact

SEQ ID NO: 167496 - DNA, 80 bp, synthetic construct
  source 1..80: mol_type = other DNA
aagttgactacaatgattacaatgggcaaaacaagaactttacacagtggaaaatcacactgcaggagatggcacaaatt

SEQ ID NO: 167497 - DNA, 80 bp, synthetic construct
  source 1..80: mol_type = other DNA
agaaggggcaaaaaaaagattataataagacagtggcagcccaactacagaagacgctgcaacatagtgggctacatgcc

SEQ ID NO: 167498 - DNA, 80 bp, synthetic construct
  source 1..80: mol_type = other DNA
gagaatggcccagatacctctctgacttggatgcaacagcagttgacaaacccacacatccggaaacatcctcagacaga

SEQ ID NO: 167499 - DNA, 80 bp, synthetic construct
  source 1..80: mol_type = other DNA
accatccacagccccactcttgcctcggcgctgggactgcctggggaaaatgtacccatcccggccctcttccgtgcctc

SEQ ID NO: 167500 - DNA, 80 bp, synthetic construct
  source 1..80: mol_type = other DNA
gattcactgaatgggagataaatttccaggagaatgcacacatcaggaagaagtttgaactattcacctatattaggttt

SEQ ID NO: 167501 - DNA, 80 bp, synthetic construct
  source 1..80: mol_type = other DNA
cggccgcctggtccagcattgcctcctggggggccatgctcagcagcttgtctcgtgtgaggtcaaatcgtaggctgagg

SEQ ID NO: 167502 - DNA, 80 bp, synthetic construct
  source 1..80: mol_type = other DNA
tattttattacaaccattatggagacaatcaagaatatcgcagacatggccaccagcactgtgagcacaattgattccac

SEQ ID NO: 167503 - DNA, 80 bp, synthetic construct
  source 1..80: mol_type = other DNA
tagatatgtaagacgcaagagaaagactctaatatggagacagtggcagccacagaacataagaaaatgtagaattaggg

SEQ ID NO: 167504 - DNA, 80 bp, synthetic construct
  source 1..80: mol_type = other DNA
tctggttcccgtgaacaacctggccgctcatgtcaacggtgtagaggcatatgccatccctgtgcagtcagtcacccaga

SEQ ID NO: 167505 - DNA, 80 bp, synthetic construct
  source 1..80: mol_type = other DNA
gaatccaccatgagagacatcacaatgacaggacccttcagctacaaagacgaacttaaaaacacagtactgactgccaa

SEQ ID NO: 167506 - DNA, 80 bp, synthetic construct
  source 1..80: mol_type = other DNA
ttcccactaacgcatcacccactctacctgtcacagtgacaatagctccaatgtgtaccgaattcacaggcataagatcc

SEQ ID NO: 167507 - DNA, 80 bp, synthetic construct
  source 1..80: mol_type = other DNA
ttaaaagcgtagaatgacagcccctcccgcgggaaggcgtcccaccgggccagataagtgtcggccaccagctcttccac

SEQ ID NO: 167508 - DNA, 80 bp, synthetic construct
  source 1..80: mol_type = other DNA
aactcctagctatattcaaatgccccctaaaaacccagatggcacactcaacaataacgcacaatccttcaaccaatggg

SEQ ID NO: 167509 - DNA, 80 bp, synthetic construct
  source 1..80: mol_type = other DNA
tgattctttccttccctttttcgcagagacgctgcgcgcctgctcctgctccgtgtgtcggccgctcaaacgtcgggccg

SEQ ID NO: 167510 - DNA, 80 bp, synthetic construct
  source 1..80: mol_type = other DNA
ggccccaaagccttactgttcccagaacgcttaccacaggtgtggaccaagcaagactgggaaacagaacatcaaaccgc

SEQ ID NO: 167511 - DNA, 80 bp, synthetic construct
  source 1..80: mol_type = other DNA
aggtgacgtcgctggtgtctgctgtaaacacggaagtaggccccgctacgtcacttgtcacgtgactgctacgtcacagc

SEQ ID NO: 167512 - DNA, 80 bp, synthetic construct
  source 1..80: mol_type = other DNA
ctaaagatgcaggttactacaccattaataccccatctaaaagtaaattacaccctagtgttttccatgacatttttcct

SEQ ID NO: 167513 - DNA, 80 bp, synthetic construct
  source 1..80: mol_type = other DNA
gtcaatttcttggaagcaaatataacagctctattagaagaagctcagatacaacaagaaaagaacatgtatgaattaca

SEQ ID NO: 167514 - DNA, 80 bp, synthetic construct
  source 1..80: mol_type = other DNA
atctggcgactagtcttggacgtcctcctcaacccagacctccaggagccccgcagccgcctccactgaggccgctgccg

SEQ ID NO: 167515 - DNA, 80 bp, synthetic construct
  source 1..80: mol_type = other DNA
aaccataacatgttagccccacccactataacttcattaccagcaatgaacaggagattctatcttgatttagacataat

SEQ ID NO: 167516 - DNA, 80 bp, synthetic construct
  source 1..80: mol_type = other DNA
gccttgtgtgcataatatgcccatacactgagccccccatgtatgacaagaccaatccaaacagtggctatgtagcatat

SEQ ID NO: 167517 - DNA, 80 bp, synthetic construct
  source 1..80: mol_type = other DNA
catttacatagaaaagagacacactctagattaattaagggccggccgcatcagcttgatatcgaattcctgcagatctg

SEQ ID NO: 167518 - DNA, 80 bp, synthetic construct
  source 1..80: mol_type = other DNA
gtcagggcgcgcctgttctcacgcatcaagtcatgtacgtgccaccaggtggtgcagtacccgctagtgtggacgattat

SEQ ID NO: 167519 - DNA, 80 bp, synthetic construct
  source 1..80: mol_type = other DNA
tatgaagcaataggaaagacaaattatcctaagatgattactccagtaattaagaaaagagataatataacaacttacgg

SEQ ID NO: 167520 - DNA, 80 bp, synthetic construct
  source 1..80: mol_type = other DNA
ggtattgcaaccacaataccacaaagtcattggcttccccattttagccaatttcaacactaacgacataagtaactttg

SEQ ID NO: 167521 - DNA, 80 bp, synthetic construct
  source 1..80: mol_type = other DNA
atgagaagagcagacgcgccaacattggaaactgcatggaggcgctgtttcaaggaccgattcagtacaaagacattaaa

SEQ ID NO: 167522 - DNA, 80 bp, synthetic construct
  source 1..80: mol_type = other DNA
tacaaaccaagcacaggtgattacaccacagccatacaaaccagagagcatgttagagcagtcaaaaatgtaggtcctag

SEQ ID NO: 167523 - DNA, 80 bp, synthetic construct
  source 1..80: mol_type = other DNA
tctatcctctaccagctgcactctgtgtttcccatcctgaatctgtcttttccactgcctacaatgctcacgcctacttc

SEQ ID NO: 167524 - DNA, 80 bp, synthetic construct
  source 1..80: mol_type = other DNA
ttctctgacttccgccgcacaatgacagacgccagttctaacatgaggactgacgagcttcggcttgctgccgaggcact

SEQ ID NO: 167525 - DNA, 80 bp, synthetic construct
  source 1..80: mol_type = other DNA
aggtacaagtcgttgacccggtcaccatgggcccccgattcgtgtttcactcctgggactggagacgagggttccttagt

SEQ ID NO: 167526 - DNA, 80 bp, synthetic construct
  source 1..80: mol_type = other DNA
atttgtggatgtgaacccaacgcaggctccagtgatccaactagtccatgctgtttatgattccatgttggtaagaggca

SEQ ID NO: 167527 - DNA, 80 bp, synthetic construct
  source 1..80: mol_type = other DNA
cccttttagctacaaattcggagcaggacaaatgccagacggcagtgcatacattccttttctatatagagcaaagtggt

SEQ ID NO: 167528 - DNA, 80 bp, synthetic construct
  source 1..80: mol_type = other DNA
accgtcacgtaacgggtactgtgggtgttggaataatcgtcgggcattaattgcatggttttgttttcatagctgtccct

SEQ ID NO: 167529 - DNA, 80 bp, synthetic construct
  source 1..80: mol_type = other DNA
catttcacactcccccagctcagaccctggctcccctccagtcaggaaacgcagagccaaagcgaagaagagcagcagac

SEQ ID NO: 167530 - DNA, 80 bp, synthetic construct
  source 1..80: mol_type = other DNA
atgtggaggtcacatttgtaataactagcaggcaagatgaggcgggtacccagtatggtcaagacgctcctccgttaaca

SEQ ID NO: 167531 - DNA, 80 bp, synthetic construct
  source 1..80: mol_type = other DNA
cagtgacctcgccaatacccagaacagcaacaacaggccaagaactgaaaacggtggaccgatgaattctaccatgggga

SEQ ID NO: 167532 - DNA, 80 bp, synthetic construct
  source 1..80: mol_type = other DNA
acgaggccttccccaccttcccgctgtatgaccaagatgataactcatccgcggacaacgtcgctgcgtctggcgccgct

SEQ ID NO: 167533 - DNA, 80 bp, synthetic construct
  source 1..80: mol_type = other DNA
atggcagactaagtccagacttcccaggagtgtatacagaggtagtttacaatccgctattagacaaaggagagggcaac

SEQ ID NO: 167534 - DNA, 80 bp, synthetic construct
  source 1..80: mol_type = other DNA
ttggtgagttgtagatttaatatgacaggcttaaaaagggataagaaacaagagtataaagaaacatggtattctcatga

SEQ ID NO: 167535 - DNA, 80 bp, synthetic construct
  source 1..80: mol_type = other DNA
acggttgtaccaataacagtcatgtcaggactaatttttcattcacagcctatcaataaaagacccagacaagcttggtg

SEQ ID NO: 167536 - DNA, 80 bp, synthetic construct
  source 1..80: mol_type = other DNA
tccgccggactccgtgacggcggtgttgagtgagctacctcagctgttgccgcgtctggccgacgacgtgagtcgtgaga

SEQ ID NO: 167537 - DNA, 80 bp, synthetic construct
  source 1..80: mol_type = other DNA
tcagaaagtaaacggcatctttgaggccctgaaagccccgcaccaggggctcaatactaccatcatgccagtggccataa

SEQ ID NO: 167538 - DNA, 80 bp, synthetic construct
  source 1..80: mol_type = other DNA
aagttacaattgaaaattacaataagaaaaactatacagtatgggctattaatttacaagaaatggctcaaattagaagg

SEQ ID NO: 167539 - DNA, 80 bp, synthetic construct
  source 1..80: mol_type = other DNA
ggacctgcagatgtcccgaccagtcctttaagaattccagcagatttagcacagcagatcggtccctactccttattagc

SEQ ID NO: 167540 - DNA, 80 bp, synthetic construct
  source 1..80: mol_type = other DNA
atcgtactgtgtctgcgatggtcgtctcttactggcattctctcggctgcctcttgctttcatgattgaaaaggaaaaaa

SEQ ID NO: 167541 - DNA, 80 bp, synthetic construct
  source 1..80: mol_type = other DNA
agttagtgggagtattaaattgggcagctcaacttttcccggggattaagaccaggcatatatgtaaactaataaggtga

SEQ ID NO: 167542 - DNA, 80 bp, synthetic construct
  source 1..80: mol_type = other DNA
gaattctatatgatgaatacaagagatttatgaattactggacagcctcaaacgaggacctagacctgtgtagataccta

SEQ ID NO: 167543 - DNA, 80 bp, synthetic construct
  source 1..80: mol_type = other DNA
gttagtttgtggtaaagctataagcttggtggatagaacatcaaatgttagatatagtgtagaccaattagttacagcca

SEQ ID NO: 167544 - DNA, 80 bp, synthetic construct
  source 1..80: mol_type = other DNA
accgccgccattttagttcacaaaatggcggacttccttccgcttttttaaaaaaaaacggcctgcggcggcgcgcgcgc

SEQ ID NO: 167545 - DNA, 80 bp, synthetic construct
  source 1..80: mol_type = other DNA
cttataggtgaaattgctagctattacacacactggacagggagcataagaatcagttttatgttttgtgggtctgccaa

SEQ ID NO: 167546 - DNA, 80 bp, synthetic construct
  source 1..80: mol_type = other DNA
ggctgtgccctatagaggagagggtgttgacattaagcaggacacaataacaccattaaccccagtgagtaaaatcacta

SEQ ID NO: 167547 - DNA, 80 bp, synthetic construct
  source 1..80: mol_type = other DNA
aaaccgtgaaaagtcacgtttcacgaacacggtgtttttaaatcacaaagaaccacctgacggtttacaagcagaaacac

SEQ ID NO: 167548 - DNA, 80 bp, synthetic construct
  source 1..80: mol_type = other DNA
tacacacttagaaggaaaggtcattatagtagcagtacatgttgcaagtggatttatagaagcagaagtcatcccacagg

SEQ ID NO: 167549 - DNA, 80 bp, synthetic construct
  source 1..80: mol_type = other DNA
aatttccaccacgtgtcgctcgctgcataaagggcgagcgtccccggagagggtatattcgtttggcgagagcgggcagc

SEQ ID NO: 167550 - DNA, 80 bp, synthetic construct
  source 1..80: mol_type = other DNA
aatgctgaaaacgcgaacctgttcacaaaagagaaaaacaccaccgagcacgaagtacagaccatagtgcataatgcggg

SEQ ID NO: 167551 - DNA, 80 bp, synthetic construct
  source 1..80: mol_type = other DNA
gcgtgttcacctccggatcaacgtcacctccaatggcgttgcattcgatccagtgaatgcgctcaaccccatccctggta

SEQ ID NO: 167552 - DNA, 80 bp, synthetic construct
  source 1..80: mol_type = other DNA
attgccaattattatacacattggactggcagcttgagatttagcctcatgttttgtggaacagctggcaccacactcaa

SEQ ID NO: 167553 - DNA, 80 bp, synthetic construct
  source 1..80: mol_type = other DNA
taaatccagaggcattggcacgtagatttggttttgatttagatatgtgtctccacaccacattcaccagatctggaaaa

SEQ ID NO: 167554 - DNA, 80 bp, synthetic construct
  source 1..80: mol_type = other DNA
agcaggaaccaccagcacggtggaagaacagatccaatggatgtataggcaacaaaaccctataccggtaggaaacatct

SEQ ID NO: 167555 - DNA, 80 bp, synthetic construct
  source 1..80: mol_type = other DNA
ctccaggagcacaacaacaaaacaaaaatcacaagctcccttgaggttcttttccaaggtccagtatacaaggatttaaa

SEQ ID NO: 167556 - DNA, 80 bp, synthetic construct
  source 1..80: mol_type = other DNA
gcgcggacggggtgttgcggggacggggtgttgcgaagacggggtgttgcgaagacagggtgttgggggggggtttgcgg

SEQ ID NO: 167557 - DNA, 80 bp, synthetic construct
  source 1..80: mol_type = other DNA
ccggaggggaccactaggtcgccggaggtcgaccctcctgtcaccacctccctgataatgtcttcaatagacagaaattg

SEQ ID NO: 167558 - DNA, 80 bp, synthetic construct
  source 1..80: mol_type = other DNA
atcaacaattactccaacgctgttggaatcaccgtcaagcgttacgcgaatattaacaacgttctctaccgttcatagta

SEQ ID NO: 167559 - DNA, 80 bp, synthetic construct
  source 1..80: mol_type = other DNA
acatcccagactgtgattgcttagagggctgttattactgcaagagtcaagatcgctacttcccaatccaatgccaagca

SEQ ID NO: 167560 - DNA, 80 bp, synthetic construct
  source 1..80: mol_type = other DNA
tctgacatcgaccgctcttgagtacatccacggcgtaacggtgaaagctgttacgtagtagtgcgctgaggtctaggtag

SEQ ID NO: 167561 - DNA, 80 bp, synthetic construct
  source 1..80: mol_type = other DNA
tgctcagccaatactatataaagaagcatccggacccggagcggatcgatttccgtgacctgcctaccgtctacctggtc

SEQ ID NO: 167562 - DNA, 80 bp, synthetic construct
  source 1..80: mol_type = other DNA
ccaatattggtagatttaataagagaaagtttttgactgcttcaactaaatataaatggacacgaactaaagttgatata

SEQ ID NO: 167563 - DNA, 80 bp, synthetic construct
  source 1..80: mol_type = other DNA
atttgatgtgacacctagtatgaacataccaggagaagtgaaaaatctaatggaagtggcagaagtggactctgttgtac

SEQ ID NO: 167564 - DNA, 80 bp, synthetic construct
  source 1..80: mol_type = other DNA
cctggtcaagaaagttaggcaggaatcgatcgaaaagccaacatacgggcgaagtgcaattggccttccaacaaccaaag

SEQ ID NO: 167565 - DNA, 80 bp, synthetic construct
  source 1..80: mol_type = other DNA
ttggtacaacactgcatgcagcatatccccctcacacttagacaacaattatactgcctttaaaaatcatcttaagacta

SEQ ID NO: 167566 - DNA, 80 bp, synthetic construct
  source 1..80: mol_type = other DNA
gtagtgataatagttttgagattactatcccttattctttttccacatggatgcggaaaactgaaggccatcctattgga

SEQ ID NO: 167567 - DNA, 80 bp, synthetic construct
  source 1..80: mol_type = other DNA
tccctgatgcgtgaatagtctctaaaagggttgaagctgtagcattcgttacccgcacttgtactacgcgatggctagta

SEQ ID NO: 167568 - DNA, 80 bp, synthetic construct
  source 1..80: mol_type = other DNA
agctaggcatctccgccgagatccacaacataggcatagtagtagtacagtgtccctacacttttcctcccatgtttaac

SEQ ID NO: 167569 - DNA, 80 bp, synthetic construct
  source 1..80: mol_type = other DNA
atagtaacctgggagacctcagcaccctttacagacagtgtagtgtctgggccacaccagcacccaggcatacaaatgct

SEQ ID NO: 167570 - DNA, 80 bp, synthetic construct
  source 1..80: mol_type = other DNA
cacttcagtatgtaggttttacactttagatagtaaaacgtggcaacaagattcaaagggttggtgttggaaactaccag

SEQ ID NO: 167571 - DNA, 80 bp, synthetic construct
  source 1..80: mol_type = other DNA
gagtcgaaagaccaatcgaaaatgaaaacccaggaattttatcaaagatattcagactgcttagctaaattcaaaccaat

SEQ ID NO: 167572 - DNA, 80 bp, synthetic construct
  source 1..80: mol_type = other DNA
agtttccatggtagtaccgtgggtgtcagcaagtcattataggtatacaactccagatacctattctcaagctggataca

SEQ ID NO: 167573 - DNA, 80 bp, synthetic construct
  source 1..80: mol_type = other DNA
gtagtgttcttgtattccggtacacttgcacgccagttttgctaccctccccatattgtaacttagaagatcaacacaaa

SEQ ID NO: 167574 - DNA, 80 bp, synthetic construct
  source 1..80: mol_type = other DNA
acagggctggcactatgccgttggcgcactgtccctgcacatcggggaaggcgagccaagccagcaggcagaccgtgagg

SEQ ID NO: 167575 - DNA, 80 bp, synthetic construct
  source 1..80: mol_type = other DNA
ttttatcaaaccaaaattgttgtgcccatgaacacaccaataaaaatggatatgctagcgtatgtgagtgcgtgtcctga

SEQ ID NO: 167576 - DNA, 80 bp, synthetic construct
  source 1..80: mol_type = other DNA
ggcgtgtgccgtaggtgagtttacacaccggagtcaaggggcaattcgggctcgggactggccggaccccgggcaaggct

SEQ ID NO: 167577 - DNA, 80 bp, synthetic construct
  source 1..80: mol_type = other DNA
gcaagtttaaaacgccaaatggtttgctagatgtggctaaagcattacaaccttgtacaaagtgttccaaacctatgcac

SEQ ID NO: 167578 - DNA, 80 bp, synthetic construct
  source 1..80: mol_type = other DNA
cacaccccagcccctggcctttggaggaggcatgagcacagtaacattcagcctagaggttctgtacgaccagtaccaga

SEQ ID NO: 167579 - DNA, 80 bp, synthetic construct
  source 1..80: mol_type = other DNA
acaaaaacaagcacacccagcaaccaacctacaaaccagcaatactttggcgacttagacgcactgtggggagaccccat

SEQ ID NO: 167580 - DNA, 80 bp, synthetic construct
  source 1..80: mol_type = other DNA
agatcttacttcagtgagacacagggacaaataactaagacaacaaatgttagggagtgtggtttaccaactatacatac

SEQ ID NO: 167581 - DNA, 80 bp, synthetic construct
  source 1..80: mol_type = other DNA
ttgaatggatttcacagaaaataggcaagtttattgattggataaaaaccagaattttgccagaagcacaagacaaagta

SEQ ID NO: 167582 - DNA, 80 bp, synthetic construct
  source 1..80: mol_type = other DNA
cttccactagtggggttaattcacaggaagtgccagcactgaccgctgtggaaacaggggcttctgggcaagctgtgccc

SEQ ID NO: 167583 - DNA, 80 bp, synthetic construct
  source 1..80: mol_type = other DNA
ccccccctcccctcggccggacgcttcttctgcgtgtgtgctggacgcgggttgccgtgattccccccgcggtccccagg

SEQ ID NO: 167584 - DNA, 80 bp, synthetic construct
  source 1..80: mol_type = other DNA
ctgcagagtagttataagaagcccctttactaaccctcagctactagaccacaacaacccactgaggggctacgtaccct

SEQ ID NO: 167585 - DNA, 80 bp, synthetic construct
  source 1..80: mol_type = other DNA
atgtctcattttttaaaagaaaagggggaactggaagggattttctatagtgagagaaggcataaaatactagacacata

SEQ ID NO: 167586 - DNA, 80 bp, synthetic construct
  source 1..80: mol_type = other DNA
cccacccaggcactgattatatcccagactgtgattgcttagagggctgttattactgcaagagccaagatcgttacttc

SEQ ID NO: 167587 - DNA, 80 bp, synthetic construct
  source 1..80: mol_type = other DNA
aaacagtaggcctagtagtaatacagtgcccctacacaatgccatcactatatgacaaagacaaaaaagacatgggctac

SEQ ID NO: 167588 - DNA, 80 bp, synthetic construct
  source 1..80: mol_type = other DNA
ccgcttgctgcagatacgcttgggctcgcctccgtgcggacgccgtttcgtgcagacgctgagtagatcgagcagagaat

SEQ ID NO: 167589 - DNA, 80 bp, synthetic construct
  source 1..80: mol_type = other DNA
gtcaacaatcaaaacgccagtcaacaagattaccattaaggaattcttcaaccatgcaattgatggggatgagcagggac

SEQ ID NO: 167590 - DNA, 80 bp, synthetic construct
  source 1..80: mol_type = other DNA
taccgaggagatccagttacattcgctctacgcgtgcacgcgctgctttcgcacgcacctgtgtgatctgggcagcggct

SEQ ID NO: 167591 - DNA, 80 bp, synthetic construct
  source 1..80: mol_type = other DNA
tggctaaccaaagatgactcacaatattcaaaaacacagagcaaatgtctcatagagaacttgcctctgtgggcctcagt

SEQ ID NO: 167592 - DNA, 80 bp, synthetic construct
  source 1..80: mol_type = other DNA
ttcaagcacattgtttccccggcataggggtgttaggcttcacccgaggccgaaactctgattgtcgttatccgcacaac

SEQ ID NO: 167593 - DNA, 80 bp, synthetic construct
  source 1..80: mol_type = other DNA
gtgacccagccaagcgtgaccaaggggccgctgggtgacacagacaaccctgacaaaggccccccaggaaagacccccgg

SEQ ID NO: 167594 - DNA, 80 bp, synthetic construct
  source 1..80: mol_type = other DNA
tacttaaatgcaaatagaaaatttgacaaaaaatcaggtgcagcaagtgaaattcatgaaaaagcgtggctaggtaaaaa

SEQ ID NO: 167595 - DNA, 80 bp, synthetic construct
  source 1..80: mol_type = other DNA
ttccagcacatccgcatgcccctcatctacataagggcctaggtgcagacggaaatcgtggtcgtggtctccgttaaccc

SEQ ID NO: 167596 - DNA, 80 bp, synthetic construct
  source 1..80: mol_type = other DNA
agtaattagacagggctttaaaactccaacaggtttactcgacactgcaaaagcattacaagcatgtacagattgcccaa

SEQ ID NO: 167597 - DNA, 80 bp, synthetic construct
  source 1..80: mol_type = other DNA
taccaacactatacctagatacagaaacaactaaaaacagaggatacataccaataggtacaaactttgcatacggtcgc

SEQ ID NO: 167598 - DNA, 80 bp, synthetic construct
  source 1..80: mol_type = other DNA
ccggtcagcaggtatttgggttcaacctacaacccggtgcagattcagtattcaagaggactctgttgggtgaagttttg

SEQ ID NO: 167599 - DNA, 80 bp, synthetic construct
  source 1..80: mol_type = other DNA
gttaggttacggcccggcggaaagaaaaagtatatgttaaagcatataatatgggcagcaaaagaattggacagattcgg

SEQ ID NO: 167600 - DNA, 80 bp, synthetic construct
  source 1..80: mol_type = other DNA
cggcacccaacactcaccccggcatgcttatgctacagaaacagaaaatactaattcctagctggaaaaccagacccagg

SEQ ID NO: 167601 - DNA, 80 bp, synthetic construct
  source 1..80: mol_type = other DNA
agattgggcaatgatgccaagttttattgccccactggatcagtcacaacattccaaaactcttggggttcacaaatgga

SEQ ID NO: 167602 - DNA, 80 bp, synthetic construct
  source 1..80: mol_type = other DNA
accattaccgattgataagcagaggcggtggaagctcctgtcaccttacagaacctggcgtatgggttaccgtacgcaaa

SEQ ID NO: 167603 - DNA, 80 bp, synthetic construct
  source 1..80: mol_type = other DNA
attgaactcaaagcaccctctcttgccgcaactgttcacgcgggtctccgccaactcgagaaacaaaagtggtcactcgt

SEQ ID NO: 167604 - DNA, 80 bp, synthetic construct
  source 1..80: mol_type = other DNA
ctcaaggataccccattcatagaacaagctacagaactgcaaaatgatgtgcggcaagcagtggagggagcaataggtag

SEQ ID NO: 167605 - DNA, 80 bp, synthetic construct
  source 1..80: mol_type = other DNA
aatccaggggcgcgactgacctggcaccagactcggtaaccagcaagctccgcttcctagaggccaagactctgaaaggg

SEQ ID NO: 167606 - DNA, 80 bp, synthetic construct
  source 1..80: mol_type = other DNA
tatcccagtgtgttctatgatatattccctggtgaaaaagaacctgctgtgttgacccagaaagatcccagactagaaac

SEQ ID NO: 167607 - DNA, 80 bp, synthetic construct
  source 1..80: mol_type = other DNA
ctatacaagtcacttagaggacagaatctccaaaggaccgtttgggggagggcacgggactgctagaatgtctcttaaag

SEQ ID NO: 167608 - DNA, 80 bp, synthetic construct
  source 1..80: mol_type = other DNA
ccatggacatgtacagaattccgctgaatactgatggtgacaaaaaaccaatattctgcttaagtctctcccctgcctct

SEQ ID NO: 167609 - DNA, 80 bp, synthetic construct
  source 1..80: mol_type = other DNA
atggataatgcattatttgcaaccacactcctaggtgagatccttaactactatgctaactggtccgggagcgttagaat

SEQ ID NO: 167610 - DNA, 80 bp, synthetic construct
  source 1..80: mol_type = other DNA
acgggcgtgagcatcaggagtgtggtgtgataaatgagtgtttcggtggcgtaaagtatcagcgagctgcggatgatgtg

SEQ ID NO: 167611 - DNA, 80 bp, synthetic construct
  source 1..80: mol_type = other DNA
ccctcgcaggatcaacaggaggtcctgttcaataacataagatggcttgccgtcaaagctagaaagtttgcaccattata

SEQ ID NO: 167612 - DNA, 80 bp, synthetic construct
  source 1..80: mol_type = other DNA
ggtacagcaggcagtgctctagtagtgtatgaacctaagccagttgtcacctatgattcaaaacttgagtttggggcttt

SEQ ID NO: 167613 - DNA, 80 bp, synthetic construct
  source 1..80: mol_type = other DNA
ttccccgccgaggccgtcgaactgccactagatgtccagataaggcttgtctcacagatgagtatcatggccaggacagc

SEQ ID NO: 167614 - DNA, 80 bp, synthetic construct
  source 1..80: mol_type = other DNA
acagtttatgacaactgaggatgaacaatcagccaatctactacccagtttccatccaacaccagtgatgcacatacctg

SEQ ID NO: 167615 - DNA, 80 bp, synthetic construct
  source 1..80: mol_type = other DNA
ctgatttccgcaacgtagacatgttccactcaatggcctatgatgttactactggagataagaaccctagtaaattaatt

SEQ ID NO: 167616 - DNA, 80 bp, synthetic construct
  source 1..80: mol_type = other DNA
catcggtgtctacctctataagtcactaagcactccgagcgcaagcgaggagtgcgacccccctgcccggtagcaacttc

SEQ ID NO: 167617 - DNA, 80 bp, synthetic construct
  source 1..80: mol_type = other DNA
aatggccagattactgcccggacgttgacgccactgcggtggataaaccgactagaccagatgtggctgtgaacagattt

SEQ ID NO: 167618 - DNA, 80 bp, synthetic construct
  source 1..80: mol_type = other DNA
ataaagctaaacatatcaaggcatggtgtccaagagcacctagagcagtcccataccaacacacctataaccctaacttt

SEQ ID NO: 167619 - DNA, 80 bp, synthetic construct
  source 1..80: mol_type = other DNA
ctttataatattctttaacagaaagcctccctttaagctaaacaagtacagctgtgcctcctatcacccaggcatgctga

SEQ ID NO: 167620 - DNA, 80 bp, synthetic construct
  source 1..80: mol_type = other DNA
cggcaagacaatgccgagcacccaggagacagggctgctggaaatgtggcaagccaggacatgtcatggcgaagtgccca

SEQ ID NO: 167621 - DNA, 80 bp, synthetic construct
  source 1..80: mol_type = other DNA
aatgccaacccgggtgagagaggaggtacatttactgacaaattcactgcaagctcacgaaccaaccccacccgcaaatt

SEQ ID NO: 167622 - DNA, 80 bp, synthetic construct
  source 1..80: mol_type = other DNA
atgacttctgatgattttcaatccccatctgctttaccccagtacgatgttactcctcccatgaatattgcaggtgaggt

SEQ ID NO: 167623 - DNA, 80 bp, synthetic construct
  source 1..80: mol_type = other DNA
ttttatgagcatagggaatgcttatagcaacttttatgatgggtggtctcatttctcgcaaactggagtgtatgggttta

SEQ ID NO: 167624 - DNA, 80 bp, synthetic construct
  source 1..80: mol_type = other DNA
aacacaggcaagtttggccagcaatcaggtgccatttacgtggggaattttagggtggtgaatcgtcatcttgccactca

SEQ ID NO: 167625 - DNA, 80 bp, synthetic construct
  source 1..80: mol_type = other DNA
acggttttgccgcagcacttaaaagatcttacttcactgagcaacaaggagaaattcaatggatgcgacccagcaaggat

SEQ ID NO: 167626 - DNA, 80 bp, synthetic construct
  source 1..80: mol_type = other DNA
atgggtttaatgatatagggaagaacatcacagacaaattaacatctaaagtgtttaaatggcttattagaataataagt

SEQ ID NO: 167627 - DNA, 80 bp, synthetic construct
  source 1..80: mol_type = other DNA
tattcaggccaaccaaaacccaagacaagacaaccagaaagacgagttgtcatccaaggtccagtggaagagtttggaag

SEQ ID NO: 167628 - DNA, 80 bp, synthetic construct
  source 1..80: mol_type = other DNA
tgctgggaacacatgtagtatgggatgtggggttgcaatctagctgcgtcttgtgcgttccgtggataagccaaacgcac

SEQ ID NO: 167629 - DNA, 80 bp, synthetic construct
  source 1..80: mol_type = other DNA
acaggcaggggcaagagacccaagagagacacaggcggcccgcaagaacaaggccaagaagaaggctcgtcttccatcag

SEQ ID NO: 167630 - DNA, 80 bp, synthetic construct
  source 1..80: mol_type = other DNA
acctgataacacaatcctcattgatggtgtggaaactaagatcataaaacaagaggtcattactgatgaaaatgatgttg

SEQ ID NO: 167631 - DNA, 80 bp, synthetic construct
  source 1..80: mol_type = other DNA
taggtcgtaatgcggcgtgctgcacgctcaccgttaatggtaccaagtcgtcaaggctcgcaaagacgtgccacgagggg

SEQ ID NO: 167632 - DNA, 80 bp, synthetic construct
  source 1..80: mol_type = other DNA
taagagacaatactagtaaaattaaggaaaacatttatcaaaaacttcagttttataacacaaagcagacagaggctcag

SEQ ID NO: 167633 - DNA, 80 bp, synthetic construct
  source 1..80: mol_type = other DNA
aaacatcctgtcaatataacaagtaggatataccataaagccaaacatgttagtgcatggtgcccacgggcccccagagc

SEQ ID NO: 167634 - DNA, 80 bp, synthetic construct
  source 1..80: mol_type = other DNA
gttaactaagaattatacaaaattaatagacgcgatacaaaagggacaaaaaaaagacactgcttttaatacctttaaaa

SEQ ID NO: 167635 - DNA, 80 bp, synthetic construct
  source 1..80: mol_type = other DNA
tattgaatcattctttggacgcagtgcttgtgtagctatcctgagtgtagccaataagaaacccacaacagacaacactg

SEQ ID NO: 167636 - DNA, 80 bp, synthetic construct
  source 1..80: mol_type = other DNA
atagtagcactaagaagacaccagataatcaatatggaatagcaccaacaaatgacatgggaatattatgcttcagggca

SEQ ID NO: 167637 - DNA, 80 bp, synthetic construct
  source 1..80: mol_type = other DNA
tcccatggatagtatgttgcggcacaacaatgtgtcccttgttattatacccatttgtcccttacgacctccaaacccgg

SEQ ID NO: 167638 - DNA, 80 bp, synthetic construct
  source 1..80: mol_type = other DNA
cagtgcatcgtagccatgctgctgtttgtggttgtggggattttgtacgccatattactgctctggctgagagatacggc

SEQ ID NO: 167639 - DNA, 80 bp, synthetic construct
  source 1..80: mol_type = other DNA
agaaccatggtgcctttggacaacaatccggctccatctacgtgggaaattacaggattgtcaacagacatttggcaaca

SEQ ID NO: 167640 - DNA, 80 bp, synthetic construct
  source 1..80: mol_type = other DNA
taattggagaaatatccagctattatacccattggacaggttctattcgtttctcattcatgttttgtggaactgctaac

SEQ ID NO: 167641 - DNA, 80 bp, synthetic construct
  source 1..80: mol_type = other DNA
atatggcattccgggagggtcgcggtcttctggggcaccgggagtaggtggcaaccacaaccctccccagatccgtcgag

SEQ ID NO: 167642 - DNA, 80 bp, synthetic construct
  source 1..80: mol_type = other DNA
acaggttctataaaagcttaagggcagagcaagcagacccggcagtaaaaaattggatgacccaaacactgctggtacag

SEQ ID NO: 167643 - DNA, 80 bp, synthetic construct
  source 1..80: mol_type = other DNA
cacttggttgaagaaatttactgaaatgtgcaatgcagctaggggtttagaatggataggaaataaaatatcaaaattta

SEQ ID NO: 167644 - DNA, 80 bp, synthetic construct
  source 1..80: mol_type = other DNA
tgtgggaaagatgccagtaaagaacatataaaaggcaaacacacatgaattgttacaaacgcgtgtctatgctaggacaa

SEQ ID NO: 167645 - DNA, 80 bp, synthetic construct
  source 1..80: mol_type = other DNA
gggacattctgaatcgagaaacccaggaggtagaaaagatgaaattttacctagataaatatggaatagatttgccctta

SEQ ID NO: 167646 - DNA, 80 bp, synthetic construct
  source 1..80: mol_type = other DNA
accaagtcgccagagaatctccaataagtagatccagagacctaagactgcgttgaaaaaagagtgttagggtgggaaaa

SEQ ID NO: 167647 - DNA, 80 bp, synthetic construct
  source 1..80: mol_type = other DNA
ggtgaagaaccttacaaggaatttgtcaacaaaattaggaagacagaagtgggccgtagattgtatctcccaccatacaa

SEQ ID NO: 167648 - DNA, 80 bp, synthetic construct
  source 1..80: mol_type = other DNA
gggcagaaccatcagctcgcccacacagcgccagcagggcacagaggtgatgtagaggcgcgggtctgggatgggactta

SEQ ID NO: 167649 - DNA, 80 bp, synthetic construct
  source 1..80: mol_type = other DNA
ggagggggaatgagcacagtgactttctctctgaaagccttgtatgaccagtacctaaaacaccaaaacaggtggacttt

SEQ ID NO: 167650 - DNA, 80 bp, synthetic construct
  source 1..80: mol_type = other DNA
agccatccacaactaaaaaaaccaacagcaagcagcacacccagctccgtagtgcaacaaaataagtactttgcagaact

SEQ ID NO: 167651 - DNA, 80 bp, synthetic construct
  source 1..80: mol_type = other DNA
cagacctgcttttccctaacacacaaaaaaaaaaaacgattttccaactacgactgggtgtgcgagtacgagctggccaa

SEQ ID NO: 167652 - DNA, 80 bp, synthetic construct
  source 1..80: mol_type = other DNA
aaactagacatgtgattcaaacaagatccagaagtgagtccaccatcgaatcattctttgcacgaggcgcctgtgttacc

SEQ ID NO: 167653 - DNA, 80 bp, synthetic construct
  source 1..80: mol_type = other DNA
tcaagactcatgcatgggctagtacactccaaagaggacatcaaattgagcatgtcagtttgccaatggatttttgggat

SEQ ID NO: 167654 - DNA, 80 bp, synthetic construct
  source 1..80: mol_type = other DNA
ttgttattactacaccgtcatcagtaacgattagcaaagccgtgtctactgcagcttcatcaaccatactatctcaaacc

SEQ ID NO: 167655 - DNA, 80 bp, synthetic construct
  source 1..80: mol_type = other DNA
gatatggagtttggccagaatatttggctgatgatgatgctagtgccatagataaaccaacacatccagatacatcatct

SEQ ID NO: 167656 - DNA, 80 bp, synthetic construct
  source 1..80: mol_type = other DNA
cttgcttatggggaatggccacagtatctttctgacatcgatgctacatcatttgataaacctacacacccagaaacatc

SEQ ID NO: 167657 - DNA, 80 bp, synthetic construct
  source 1..80: mol_type = other DNA
gcgggtctccacataaaccctttattatctatccatgcctaaacaaagcttacatattcccagaaagggccccaaagccc

SEQ ID NO: 167658 - DNA, 80 bp, synthetic construct
  source 1..80: mol_type = other DNA
atccctattaataatacagcacaaaatttaagaaaggtgaacatgtataccatacaattatctaatcaaacagaaatggc

SEQ ID NO: 167659 - DNA, 80 bp, synthetic construct
  source 1..80: mol_type = other DNA
tttgaaagatactgatgccagtgctgtggataaacctactcaccctgagacttccaccgatcgattttacacacttacaa

SEQ ID NO: 167660 - DNA, 80 bp, synthetic construct
  source 1..80: mol_type = other DNA
agaggacagtcaccctccttataaacaaacacaacctggcgctgacggttttgaactgcaacacccgtacgtgctcgatg

SEQ ID NO: 167661 - DNA, 80 bp, synthetic construct
  source 1..80: mol_type = other DNA
tgaagctatattctcaaaatataaagggaatacaaagactgaaataacacataatatgagagttgctgcagctcattaca

SEQ ID NO: 167662 - DNA, 80 bp, synthetic construct
  source 1..80: mol_type = other DNA
ttaaaacagccgtctggttgatcccaccagcgggcacaatgtgcgttgtacactgcgattccggtcgctttgtatgcctg

SEQ ID NO: 167663 - DNA, 80 bp, synthetic construct
  source 1..80: mol_type = other DNA
ttacggcactgtacaggagggctaagcatccgggtccatagttgccggattttgtatccccctctgaattcacgcttcta

SEQ ID NO: 167664 - DNA, 80 bp, synthetic construct
  source 1..80: mol_type = other DNA
ggactgcagttacataatgtaacattgaacgattcaggaacatataccgaggacgtttacgagtgcgaccttttatgtaa

SEQ ID NO: 167665 - DNA, 80 bp, synthetic construct
  source 1..80: mol_type = other DNA
tctgaaacattcagggagcttagctatgacacagttacatttctcaaaaggggctttaaacaggatgcaaaatacccatt

SEQ ID NO: 167666 - DNA, 80 bp, synthetic construct
  source 1..80: mol_type = other DNA
cactgtagagtccttcttcgccagaggagcatgcgttactattatgtctgtggagaactttaatgagccagctagtgtct

SEQ ID NO: 167667 - DNA, 80 bp, synthetic construct
  source 1..80: mol_type = other DNA
ctcggggacgtcctcagactcagacgaggagtccactgggacccgggcctataataattccagcagagcccgtcccagat

SEQ ID NO: 167668 - DNA, 80 bp, synthetic construct
  source 1..80: mol_type = other DNA
aatgacccaaaagatgctataaatagggctttcgctaaagttgcaaaccccgtccgcaacggtccttctaactcccagca

SEQ ID NO: 167669 - DNA, 80 bp, synthetic construct
  source 1..80: mol_type = other DNA
aaaaagggtgtaacacaacacagtgcatgtcacctcaaatttcagactcatcttttagaaagaaagtaaatactaactac

SEQ ID NO: 167670 - DNA, 80 bp, synthetic construct
  source 1..80: mol_type = other DNA
tacccaaaatattatcaccagtggtggtaccactacctgagggatttccatatgcacgaagcaaaagatcaccccaaggg

SEQ ID NO: 167671 - DNA, 80 bp, synthetic construct
  source 1..80: mol_type = other DNA
acccaagcatgttagagtttggtgcccaagaccgccccgcgcagtaaaatattatggaccaggagttgactataaagcca

SEQ ID NO: 167672 - DNA, 80 bp, synthetic construct
  source 1..80: mol_type = other DNA
cccacacattctgatccaggatctgaaatattagttgatggtgttaaagtcaaggttttggattcttatgatctacataa

SEQ ID NO: 167673 - DNA, 80 bp, synthetic construct
  source 1..80: mol_type = other DNA
gaacaaaacctatgccactaaaataagacagtggtactggacaaacctaacacaactcacagccgcagtaccaaacatag

SEQ ID NO: 167674 - DNA, 80 bp, synthetic construct
  source 1..80: mol_type = other DNA
aatgttaattttgagcccactgacttgacagaaaagagggagtctatcacatatatccccaaatcattcagaaacatggg

SEQ ID NO: 167675 - DNA, 80 bp, synthetic construct
  source 1..80: mol_type = other DNA
acgcccagaaaccggacagcacgccgcaaaagctgcgtggaacgccgccgcgctcacggcccaaaaactcccgtcctcgc

SEQ ID NO: 167676 - DNA, 80 bp, synthetic construct
  source 1..80: mol_type = other DNA
ctcaatctacaacgacaaacttagcatcacacaaacagaattaacaaaaaattataacacattaatagaggccatacaaa

SEQ ID NO: 167677 - DNA, 80 bp, synthetic construct
  source 1..80: mol_type = other DNA
atgatatggctagagtggtgtacaaaacccaccactgagtacaaagaaacacagtgttacaacctaatacagcacgttcc

SEQ ID NO: 167678 - DNA, 80 bp, synthetic construct
  source 1..80: mol_type = other DNA
ggcatgggttgtacccacccatgccacccaagtggtgtagtgctcctgtatcccggtacacttgcacgccagtttgccct

SEQ ID NO: 167679 - DNA, 80 bp, synthetic construct
  source 1..80: mol_type = other DNA
cccccagtccaaagatccccagctccagaggcatcagcgcgcgcaggcgggcagcggggtcgtccccagacagcagcaac

SEQ ID NO: 167680 - DNA, 80 bp, synthetic construct
  source 1..80: mol_type = other DNA
tgttaggtgaagattctctattggaaaaattactaaaagcattgattaaaattgtgtcagctatggttatagtaatcaga

SEQ ID NO: 167681 - DNA, 80 bp, synthetic construct
  source 1..80: mol_type = other DNA
gtgaaagaaggagtgatatacttgtctgagaaaccagtgaatccagttgctacatcaagtcacgaggatgggaaaagaaa

SEQ ID NO: 167682 - DNA, 80 bp, synthetic construct
  source 1..80: mol_type = other DNA
aagagacggcgaccctctcccagcagctcaaacagcagctgcagcagcagcgagtcttgggagtcaaactcagactcctg

SEQ ID NO: 167683 - DNA, 80 bp, synthetic construct
  source 1..80: mol_type = other DNA
tgccacaggctgaaaaccaggaccctgaagccaaagaccatgtaaattctttgggtgaaaatctaaagaccctacggctc

SEQ ID NO: 167684 - DNA, 80 bp, synthetic construct
  source 1..80: mol_type = other DNA
ttaagtaaggcggaagtagttccactatacaaaatggcggcggagcacttccggcttgcccaaaatggtgggcaatttct

SEQ ID NO: 167685 - DNA, 80 bp, synthetic construct
  source 1..80: mol_type = other DNA
ccatctggtccatctcacacaactagaccaagtgcattgggagccatggagataggtgcctcttctactgccacaccaga

SEQ ID NO: 167686 - DNA, 80 bp, synthetic construct
  source 1..80: mol_type = other DNA
gcgtctgccaggggcgtcccagagactcccaggttcaggtccagtagcaggagaccctcgctgtgtggcgcccggtgcca

SEQ ID NO: 167687 - DNA, 80 bp, synthetic construct
  source 1..80: mol_type = other DNA
aggatccacagaatacctacactataccggaggcttatacacctccatatggttatcagcaggtagatcctactttgaaa

SEQ ID NO: 167688 - DNA, 80 bp, synthetic construct
  source 1..80: mol_type = other DNA
gaaagatgagctccgccccactgccaaagtggagcaaggactcaccaggattgttgaggctgcccccattcacgcgatcg

SEQ ID NO: 167689 - DNA, 80 bp, synthetic construct
  source 1..80: mol_type = other DNA
gaccgtgaagagccctcatccacctgaacagaccgctaaccgaaggaccccgagtcgcgtccgtcggtcccgacgtccgt

SEQ ID NO: 167690 - DNA, 80 bp, synthetic construct
  source 1..80: mol_type = other DNA
tgattacgcaggccacgggccgtttggcgtctcaggctatgaagaagattgaagacaaggtgcggaaatcagttgacggt

SEQ ID NO: 167691 - DNA, 80 bp, synthetic construct
  source 1..80: mol_type = other DNA
ctttccattgttcagaaggcatcagtcggcttgcgagtttacgtgcatggatctgcaacatgtcccaggtgacgatgtat

SEQ ID NO: 167692 - DNA, 80 bp, synthetic construct
  source 1..80: mol_type = other DNA
gactccgagccctgtaccaaaacctacaaaaaacgcaagcgggtctccacataaacccattattattcagccaagcataa

SEQ ID NO: 167693 - DNA, 80 bp, synthetic construct
  source 1..80: mol_type = other DNA
cgtagagaacttcctggcgcgctcggcgtgcgtattttacacaacgtacacaaacagcaagaacgctgccaaggaaaaga

SEQ ID NO: 167694 - DNA, 80 bp, synthetic construct
  source 1..80: mol_type = other DNA
ggccgacttccttccgcttttttaaaaaaaggcgcgaaaaaaccgccgcggcggtggcgcgcgcgctacgcgctcgcgcc

SEQ ID NO: 167695 - DNA, 80 bp, synthetic construct
  source 1..80: mol_type = other DNA
acacccaacctagtggggcatcaaactcagttagtgtgcctatgctaacagcggcagaaacaggccatacctcgcaaaca

SEQ ID NO: 167696 - DNA, 80 bp, synthetic construct
  source 1..80: mol_type = other DNA
tacgagaaagcagggagcgtggactttaaaccgactgcaattacctcaaccagagcaaccatcaacactgttcacagcac

SEQ ID NO: 167697 - DNA, 80 bp, synthetic construct
  source 1..80: mol_type = other DNA
tattcaaagctgagtaccaaggtatttcagactacatcctgaatttaggaaaagcttttggatctggatttacagagcac

SEQ ID NO: 167698 - DNA, 80 bp, synthetic construct
  source 1..80: mol_type = other DNA
gactgcaaaaaacccacacaataacactctatatggagggtctgcctggagaacacaaaaagagaacacatcacaagaca

SEQ ID NO: 167699 - DNA, 80 bp, synthetic construct
  source 1..80: mol_type = other DNA
tacagatgctgggtttattacatgctggtaccaaacgaacatagtgtcacctccagacatcccggcagacagcacaatcc

SEQ ID NO: 167700 - DNA, 80 bp, synthetic construct
  source 1..80: mol_type = other DNA
tcagaacaaccagtacatgatgagtattttacagggagcagcaagagacccaagaaagacaccaacccaagcccccaagg

SEQ ID NO: 167701 - DNA, 80 bp, synthetic construct
  source 1..80: mol_type = other DNA
taagtggacgttactgataatcacgttatctgaaggttgcaatcatacgtgcccctgtccgtgcagctgccttacctcca

SEQ ID NO: 167702 - DNA, 80 bp, synthetic construct
  source 1..80: mol_type = other DNA
cagacaatgcagtacacggctcctatggaaagcctgtatacaatgcagtagattaccatgtaggtaaatacagcatgata

SEQ ID NO: 167703 - DNA, 80 bp, synthetic construct
  source 1..80: mol_type = other DNA
actaccagccagaagatatagacgccctcgtcgccgcgctcgaggaagacgagtaaggaggcgaaaatgggtgcggcgga

SEQ ID NO: 167704 - DNA, 80 bp, synthetic construct
  source 1..80: mol_type = other DNA
aggactttctaagacacatgaacttttttacatacagcaaccaggacctagagctagtcagatactttggggtcaccttc

SEQ ID NO: 167705 - DNA, 80 bp, synthetic construct
  source 1..80: mol_type = other DNA
acccaccattagccggtgcacggccctgtgcctggccctctccccggcatccctgccaatgtaaatatcataaaggaggt

SEQ ID NO: 167706 - DNA, 80 bp, synthetic construct
  source 1..80: mol_type = other DNA
aaattagacaaaattgctgcaggtaaaaccaggtgcattgaagcttgtgaagtggactactgcattgtttacaggatgat

SEQ ID NO: 167707 - DNA, 80 bp, synthetic construct
  source 1..80: mol_type = other DNA
ccgggttcgtcccagtgtactggcagacccggtggagaccagaactgcttttccagggcgacgtactgactgacatagcc

SEQ ID NO: 167708 - DNA, 80 bp, synthetic construct
  source 1..80: mol_type = other DNA
ctgaagggctccacaactactggaccattctctttgcccctctgactcctcttgccactccaactggctcacccacttct

SEQ ID NO: 167709 - DNA, 80 bp, synthetic construct
  source 1..80: mol_type = other DNA
gtgcaggatgttgcgcgagtcagagaatcgcataagaacggggtggtgagcgggttcccacaggagtctctggcgcaaaa

SEQ ID NO: 167710 - DNA, 80 bp, synthetic construct
  source 1..80: mol_type = other DNA
gccccgtcttggacgcaatccgtgaggctgttgccccgctgcaatccccgtctgttgaagcatgcggctatagtgaccgt

SEQ ID NO: 167711 - DNA, 80 bp, synthetic construct
  source 1..80: mol_type = other DNA
atcacacctggatctggacagtttatgaccacagatgatttgcaatccccgtgtgctctaccatggtaccacccaactaa

SEQ ID NO: 167712 - DNA, 80 bp, synthetic construct
  source 1..80: mol_type = other DNA
tgtgggacaagcccaaccctatggggagataaacctaagtggcaacccaacatgccgactgcttaaatatgactacccca

SEQ ID NO: 167713 - DNA, 80 bp, synthetic construct
  source 1..80: mol_type = other DNA
accggtagctgctgtgtggggttgtccagcattttgatggcgacggaggtcgtatacttgggattgggcataaacaggcc

SEQ ID NO: 167714 - DNA, 80 bp, synthetic construct
  source 1..80: mol_type = other DNA
ggccgggctatgggcaaggctcttaaaaaagcatgtttattggtaggcattacaggcgaaagaagaggccactgccactg

SEQ ID NO: 167715 - DNA, 80 bp, synthetic construct
  source 1..80: mol_type = other DNA
cctagatacaggatgtcgtccatgctgaggagaggtggggtgtctgctcccccctgcggaagccgcctgggtgcggtggt

SEQ ID NO: 167716 - DNA, 80 bp, synthetic construct
  source 1..80: mol_type = other DNA
agccgttgccctagtggtttcggacacaccgccaacgctcagtgcggtgctaccgacccgaggtcaagtcccgggggagg

SEQ ID NO: 167717 - DNA, 80 bp, synthetic construct
  source 1..80: mol_type = other DNA
tgggtggaggacgaggaggaagtcgctgctaaaccgccacgcgcctgctgcacaatgtggccgccgacgtggcaggcggt

SEQ ID NO: 167718 - DNA, 80 bp, synthetic construct
  source 1..80: mol_type = other DNA
cccagcagccctctacaacccagaaccaagatgcccaaatcctcacccaccaaataatgtatgtgccgccaggtggcccg

SEQ ID NO: 167719 - DNA, 80 bp, synthetic construct
  source 1..80: mol_type = other DNA
gataggtggtcgcattgtatctcgttcttggcgtagttgaatcaccgccgtaatctgtggtgggctctgtacttgtccgg

SEQ ID NO: 167720 - DNA, 80 bp, synthetic construct
  source 1..80: mol_type = other DNA
atgacacccagggtgctatcacacatgtccaagatgttggtgaaagaggattacatccaatcaatacccccagcaaaagc

SEQ ID NO: 167721 - DNA, 80 bp, synthetic construct
  source 1..80: mol_type = other DNA
gaacaacactatacaaataatctatttaacaagatagaactgtacaacacttttcaaaccatagcccaacttaaagacac

SEQ ID NO: 167722 - DNA, 80 bp, synthetic construct
  source 1..80: mol_type = other DNA
gcatgcctgtacaaccttcagataacgttgagaccagggttacttacatgcatttcaatggctcagaaacagatattgaa

SEQ ID NO: 167723 - DNA, 80 bp, synthetic construct
  source 1..80: mol_type = other DNA
tcggtatagtcactgctggtggatctggtcatgtggcatttactgatcttaggccctatgtacttgatcaacaccaaggg

SEQ ID NO: 167724 - DNA, 80 bp, synthetic construct
  source 1..80: mol_type = other DNA
ctgctgtgattggaggttttgtgagctaggtaacagctgtgatttcacctgtcgccaacactgacagcgattacccaggt

SEQ ID NO: 167725 - DNA, 80 bp, synthetic construct
  source 1..80: mol_type = other DNA
gagtagcattacaacatatggtttcggacatcagaaccaagctgtgtttgttgctggatttaaaataatgaattaccacc

SEQ ID NO: 167726 - DNA, 80 bp, synthetic construct
  source 1..80: mol_type = other DNA
gctccagaatgcagatgtttctggacttgctgccatgctttcttgcttcacttacattgctgcagatctccgcttcaccc

SEQ ID NO: 167727 - DNA, 80 bp, synthetic construct
  source 1..80: mol_type = other DNA
cccctattcagaatggaccctggctccaacgatgctggtacgagtctgttgtgcgttcgcatgctgccttttgtagctgt

SEQ ID NO: 167728 - DNA, 80 bp, synthetic construct
  source 1..80: mol_type = other DNA
gtctgtcctcacaccacccacagtttcaacacctgaggctatagatagacgatttttcctggattgtgatgtcaaaatta

SEQ ID NO: 167729 - DNA, 80 bp, synthetic construct
  source 1..80: mol_type = other DNA
atgcagttagtgtcttatggaatagagatcttttgattacagagtctagggctcagggaatagacacaatagccagatgc

SEQ ID NO: 167730 - DNA, 80 bp, synthetic construct
  source 1..80: mol_type = other DNA
cccatgttgtctgggatgttgggctacaatccaccatatccatgattgttccctgggttagtgcaagtcattttaggaat

SEQ ID NO: 167731 - DNA, 80 bp, synthetic construct
  source 1..80: mol_type = other DNA
ttcttgtgcaccccttgtatccagagaaagaggtgtgggaatctataagatggacaaagaaccctcaaaacatgcaagaa

SEQ ID NO: 167732 - DNA, 80 bp, synthetic construct
  source 1..80: mol_type = other DNA
ctggtgcatgctgggaagtttcaaagaatggtagagattgggaaacattgaaattgcaagaactggttagcaaaattaca

SEQ ID NO: 167733 - DNA, 80 bp, synthetic construct
  source 1..80: mol_type = other DNA
tcagcgacaaaacgcagaccagccaagaagaaaacgaagaagagaagaaggagacgccacagatccagcagcagctcctc

SEQ ID NO: 167734 - DNA, 80 bp, synthetic construct
  source 1..80: mol_type = other DNA
agaatagaaaagaattgaacacttcattacaggccatatttcagggtccaatagatgtagttaataagccacctccacca

SEQ ID NO: 167735 - DNA, 80 bp, synthetic construct
  source 1..80: mol_type = other DNA
gctaggatgtacaacgtgcattctttctaccgctgtggatggcgtgctcatctgacggtcaacggctcccaattccactc

SEQ ID NO: 167736 - DNA, 80 bp, synthetic construct
  source 1..80: mol_type = other DNA
catatggctacctagactacaccacaaaatgcacaggctccaactccatctggacagacgccagagtagccattagatgt

SEQ ID NO: 167737 - DNA, 80 bp, synthetic construct
  source 1..80: mol_type = other DNA
tggcagcccaactacagacgcagatgcaacatagtgggctacatgcctctacttatatgtggggagaatactgttgccag

SEQ ID NO: 167738 - DNA, 80 bp, synthetic construct
  source 1..80: mol_type = other DNA
tacagttatccagtcaaacacaaacagctcaggagatttttgctattaaagtagacattgcctcacagcctttggcaaac

SEQ ID NO: 167739 - DNA, 80 bp, synthetic construct
  source 1..80: mol_type = other DNA
gatgcatgggagataagcacacgcgacatggtccagctacgccgtaaatgtgagatgtttacgtacttgcgcttcgacat

SEQ ID NO: 167740 - DNA, 80 bp, synthetic construct
  source 1..80: mol_type = other DNA
ggttagccgggccccaaggcttgccaaccatgctgaccccaggaagcaatcaatttttaacgtctgatgattttcagtca

SEQ ID NO: 167741 - DNA, 80 bp, synthetic construct
  source 1..80: mol_type = other DNA
gccacataagacaagtgacagcgcagctgataaaagacatagctgtgtggccgcgtgttgggcagcatggtgccaatata

SEQ ID NO: 167742 - DNA, 80 bp, synthetic construct
  source 1..80: mol_type = other DNA
ataagccttattaacatcacatttttaatcacaataaacagtgcaaatgggggctcaagtttcaacgcaaaagaccggtg

SEQ ID NO: 167743 - DNA, 80 bp, synthetic construct
  source 1..80: mol_type = other DNA
tcactcaaaacggtggttatggctataacacccttaataagatgggcaaaagttacgtcaggcacgtcaacaagcagaca

SEQ ID NO: 167744 - DNA, 80 bp, synthetic construct
  source 1..80: mol_type = other DNA
tagttggcagggcgattgcagaaagagaaaacacctcggtttactccctccccccagatccagcacattttgacggttac

SEQ ID NO: 167745 - DNA, 80 bp, synthetic construct
  source 1..80: mol_type = other DNA
cagtcgcactaataccggttgcaatcatcctaattggtactctagtgccgatacttttacatgaacaaaaaaaggcgttt

SEQ ID NO: 167746 - DNA, 80 bp, synthetic construct
  source 1..80: mol_type = other DNA
ccggcgaggacgggggtttttgggccgtgagcgcgccggcgccccacagtgtttgttcgcgggacagagctcagagactg

SEQ ID NO: 167747 - DNA, 80 bp, synthetic construct
  source 1..80: mol_type = other DNA
acaactactgaataaccttggttttcctggggaattagcctacaaactgtgcaacacaactcacatatacaaagatgaga

SEQ ID NO: 167748 - DNA, 80 bp, synthetic construct
  source 1..80: mol_type = other DNA
tagcaaagcctactacaaggaaggatgccatgttaggcacgcatgtagtgtgggatgtgggtctacagtctacaatttct

SEQ ID NO: 167749 - DNA, 80 bp, synthetic construct
  source 1..80: mol_type = other DNA
gaaacaaggattatatataataatgtggagaccttacctaagatcatggctcagagtaaatggtataagcctttcttatt

SEQ ID NO: 167750 - DNA, 80 bp, synthetic construct
  source 1..80: mol_type = other DNA
tgccactgccgacactgcgagtggtgccgcttccacaacctccatctatgagcagccagtggaaaccccccgttcacaat

SEQ ID NO: 167751 - DNA, 80 bp, synthetic construct
  source 1..80: mol_type = other DNA
atttttaacaccatgattaataacataataattagaactttgattctagaaacttatagaggtattgatctggataaact

SEQ ID NO: 167752 - DNA, 80 bp, synthetic construct
  source 1..80: mol_type = other DNA
aaaatgtcactccatttgaaaactggctatatacaaatcctagtcactatcaaacctttgccactgaggcacaagtaggc

SEQ ID NO: 167753 - DNA, 80 bp, synthetic construct
  source 1..80: mol_type = other DNA
tgttcttaatcttctcgatcttttggaggatgttctgcacggcgtccgacggcgttttggcgccccccatgccggcagaa

SEQ ID NO: 167754 - DNA, 80 bp, synthetic construct
  source 1..80: mol_type = other DNA
tttgatgtaacgcccctgctacacataccaggtgaggtgaaaaatttgatggaggttgctgaagtagactcagtggtccc

SEQ ID NO: 167755 - DNA, 80 bp, synthetic construct
  source 1..80: mol_type = other DNA
ttttgtacacccgttccccacacaaatgacgaatacgacctttttttttataaaaataaaccacgtgtattatataaaaa

SEQ ID NO: 167756 - DNA, 80 bp, synthetic construct
  source 1..80: mol_type = other DNA
tacaaagatttaaagatagatgtaaagactacaccacccccagaatgcatcaacgatttgctgcaagctgtagacagcca

SEQ ID NO: 167757 - DNA, 80 bp, synthetic construct
  source 1..80: mol_type = other DNA
caacaaaaccctcacccaggtttcccaatctgtctcccaagctgctcaggttgtctccaattttgacctgagtggtcctg

SEQ ID NO: 167758 - DNA, 80 bp, synthetic construct
  source 1..80: mol_type = other DNA
tcagtgtgtgggagatcaattacactgataccgtgcaacttcgcaggaagttggagatgttcacatactcacgctttgac

SEQ ID NO: 167759 - DNA, 80 bp, synthetic construct
  source 1..80: mol_type = other DNA
tccagcagcagctcaaggagcagcagctcatgggagtccaactccgagcgctgttccaacaattacaacgggtccaacaa

SEQ ID NO: 167760 - DNA, 80 bp, synthetic construct
  source 1..80: mol_type = other DNA
ggcaacaaaatatggtttcaatacttaacaaaacccactacaaaattcaatgaacagcaatgcaaatttgtaatacaaga

SEQ ID NO: 167761 - DNA, 80 bp, synthetic construct
  source 1..80: mol_type = other DNA
tggagacggcgctggaagccgagacggcggccagcgtggaccaagtaccgccgacgcaggtggagacgacttcgaccccg

SEQ ID NO: 167762 - DNA, 80 bp, synthetic construct
  source 1..80: mol_type = other DNA
acaggacatctcacacattgtgcggggtaccaacatgatgagataatattgcatggacactcaataaaatatcttgaaca

SEQ ID NO: 167763 - DNA, 80 bp, synthetic construct
  source 1..80: mol_type = other DNA
tccgccgggttctcgggggtgtagtgggtaggcattgcatatttttgccgcggtgctgttgggcattggactcggtgtga

SEQ ID NO: 167764 - DNA, 80 bp, synthetic construct
  source 1..80: mol_type = other DNA
taccgcctggtgcagcaggatgagtacaccagtgccggcaatgtcacctgttggtatcaaacgggcatcgtggtcccgcc

SEQ ID NO: 167765 - DNA, 80 bp, synthetic construct
  source 1..80: mol_type = other DNA
cggcgtcagcccccgccgcagttgcggcagaagccgcgtctgtagatatactgacgggcagcaccgcctccgcaatcgaa

SEQ ID NO: 167766 - DNA, 80 bp, synthetic construct
  source 1..80: mol_type = other DNA
tttcaaagttcaaggcgtgaccgacgcgcgcgcgtccctcactacaacaggcgctttcggccagcaatccggtgcggttt

SEQ ID NO: 167767 - DNA, 80 bp, synthetic construct
  source 1..80: mol_type = other DNA
tacacctgagactggtctggcccgacggcagctatcgtgactgggagtttttagcgcgtgacctgttacgagaagaaatg

SEQ ID NO: 167768 - DNA, 80 bp, synthetic construct
  source 1..80: mol_type = other DNA
gacaagtagtaaccaccaatgaatatttaaaccacaaaacaggcctatacagccccatattcttatcaaacagtagacta

SEQ ID NO: 167769 - DNA, 80 bp, synthetic construct
  source 1..80: mol_type = other DNA
aacgccaaccctggcgagagaggtggcacgttcgtatcaacctataaccccaccactgacactgcacagggccgcagttt

SEQ ID NO: 167770 - DNA, 80 bp, synthetic construct
  source 1..80: mol_type = other DNA
cgtccctgagttctacaatgccaggggggaccttaacatccgagacctccgtgcccacgtcaaggcccggatgatctcgt

SEQ ID NO: 167771 - DNA, 80 bp, synthetic construct
  source 1..80: mol_type = other DNA
acaaatacactgttcaattgagcagtcaaactgatttggctaaagaaatatttgcaattaaggttgatgtggcttcacaa

SEQ ID NO: 167772 - DNA, 80 bp, synthetic construct
  source 1..80: mol_type = other DNA
cagtgacttggcagaagaactcgaatgggtggtggtggaaatttcccgatgcgttgaaagatatggggttgtttggccaa

SEQ ID NO: 167773 - DNA, 80 bp, synthetic construct
  source 1..80: mol_type = other DNA
caaagtggtgtgattgcacaaaatcctgtagagagatatgtagatgaagttttgaatgaagtccttgtagtacccaatat

SEQ ID NO: 167774 - DNA, 80 bp, synthetic construct
  source 1..80: mol_type = other DNA
aaggattcacccagacattagaaactaacctaaaggagacctgctcaggcatttttgataaaataacgtcaaaaactgtc

SEQ ID NO: 167775 - DNA, 80 bp, synthetic construct
  source 1..80: mol_type = other DNA
gcgctgagggatctttctgcgggtgtgagggacggagcttttttcgcacgctgggcaccgggctggtggacgggtggtgt

SEQ ID NO: 167776 - DNA, 80 bp, synthetic construct
  source 1..80: mol_type = other DNA
gtgtctatgggttcaccaccctcaacaatatggggaaattgtacatcaggcatgtgaataaagacagtcccaacaaaata

SEQ ID NO: 167777 - DNA, 80 bp, synthetic construct
  source 1..80: mol_type = other DNA
atggggtacgctcaactgcgtaggaaactagagatgttcacttacatgcgcttcaatgctgagtttacatttgtggctac

SEQ ID NO: 167778 - DNA, 80 bp, synthetic construct
  source 1..80: mol_type = other DNA
gtatgccagtgcagccctcagataatgttgaaaccagaactacttatatgcactttaatggatcagaaacagatgttgaa

SEQ ID NO: 167779 - DNA, 80 bp, synthetic construct
  source 1..80: mol_type = other DNA
ggtatatacagcagtccataccttaactcaggcagaattagcccagaagtatttggcctttacactgaaattatttacaa

SEQ ID NO: 167780 - DNA, 80 bp, synthetic construct
  source 1..80: mol_type = other DNA
atcttaatcatctggcaactactttgggtcgccctccacgttctgggcccccgggcggaccccgcacgccacagataaga

SEQ ID NO: 167781 - DNA, 80 bp, synthetic construct
  source 1..80: mol_type = other DNA
gggtacaaaatcataaactaccacctagccactcccgaagactacaggcactgtgtaaagagcatgtgggagagggatct

SEQ ID NO: 167782 - DNA, 80 bp, synthetic construct
  source 1..80: mol_type = other DNA
tgtggcaattttattgatcaccttgttgctctgggtgatcgctatggcttccggccggggccccgcgctcctggggcacc

SEQ ID NO: 167783 - DNA, 80 bp, synthetic construct
  source 1..80: mol_type = other DNA
gctgtatacacatatccaatcttgatatagattataataactataactctgaggacaagaactttacaacatggcaaatc

SEQ ID NO: 167784 - DNA, 80 bp, synthetic construct
  source 1..80: mol_type = other DNA
cagtgatacattatacaaacattaactactacaaagattcagcatcaaactcggcaaatagacaggacttcacacaagat

SEQ ID NO: 167785 - DNA, 80 bp, synthetic construct
  source 1..80: mol_type = other DNA
tacgactgttcagtctagtatacactatgactccttatctaaggtcggtgtcattaagggtctgacatacaactataaga

SEQ ID NO: 167786 - DNA, 80 bp, synthetic construct
  source 1..80: mol_type = other DNA
agatgctgtttacaaatgtgcacacttaacagagccttctgataacaccattctcctagctattagttcagacctgcaaa

SEQ ID NO: 167787 - DNA, 80 bp, synthetic construct
  source 1..80: mol_type = other DNA
gttggtacatgtggtagtctcaacgtttgtatttgtcgttgtggatatctgtgtggttgttttcgacggttttgtagaaa

SEQ ID NO: 167788 - DNA, 80 bp, synthetic construct
  source 1..80: mol_type = other DNA
catggtggaatcacttataccactaaacaacattcccggacaggttggtacagtgggaatgtataatgttaccatagcat

SEQ ID NO: 167789 - DNA, 80 bp, synthetic construct
  source 1..80: mol_type = other DNA
cttaatcgtgagcgcgtagtacgccattagacggcgatcttcgaacaatagtcgttcgatgtcctctaacgagctccaca

SEQ ID NO: 167790 - DNA, 80 bp, synthetic construct
  source 1..80: mol_type = other DNA
ctcgcgtgatttccataggaatggtgtagccggggtggagggccgatatcacatcaagcagaaaggccataatctctcga

SEQ ID NO: 167791 - DNA, 80 bp, synthetic construct
  source 1..80: mol_type = other DNA
ccagtgacgaagtgttaataaatgggcaaacagtcaaattgaaagacaaatacaagctacttgatccagagaataccaat

SEQ ID NO: 167792 - DNA, 80 bp, synthetic construct
  source 1..80: mol_type = other DNA
gatacattaacacaaaactaaaactatacagacatgactcagtagactacatagtaacctacaacagaacaggtcccttt

SEQ ID NO: 167793 - DNA, 80 bp, synthetic construct
  source 1..80: mol_type = other DNA
tgtattcagtggttttgaacagagaaatagacccagcaaaagaagtctttgcaataaaagttgacattgcctctcaacca

SEQ ID NO: 167794 - DNA, 80 bp, synthetic construct
  source 1..80: mol_type = other DNA
cgcctactacaagtctcagacccgagcaagctcggccccaagacagtcttccacagctgggacatgcgacggggacagtt

SEQ ID NO: 167795 - DNA, 80 bp, synthetic construct
  source 1..80: mol_type = other DNA
aaaaatagaagacataacattggctcatgccttgaggcgctatttcagggacctttggaattcaaagacttaaaaataga

SEQ ID NO: 167796 - DNA, 80 bp, synthetic construct
  source 1..80: mol_type = other DNA
atggggatcacaaatggacctagctgatccattttgcattgaagatgatacagaaaattgtaaacaaaccatgtctccaa

SEQ ID NO: 167797 - DNA, 80 bp, synthetic construct
  source 1..80: mol_type = other DNA
gaaaaccatattactagcaatttcctcagatctccagatagacagtgcagatgagcctggtcctgacattatacctacat

SEQ ID NO: 167798 - DNA, 80 bp, synthetic construct
  source 1..80: mol_type = other DNA
agccttcacccggtatggtttcaggcacttgaacagcttctgaacaaccttgggtttcctggtgaattagcatacaagtt

SEQ ID NO: 167799 - DNA, 80 bp, synthetic construct
  source 1..80: mol_type = other DNA
gatcgtacccaaggaagcggctacttcaacatacataataggctttgcggccgccaagaacgatttctcactccgtctta

SEQ ID NO: 167800 - DNA, 80 bp, synthetic construct
  source 1..80: mol_type = other DNA
cagttagtaaaaggtgatcttaagcctaaagtgaccttgattaattcagccgtgagtgtaagtattcccagtcagatatc

SEQ ID NO: 167801 - DNA, 80 bp, synthetic construct
  source 1..80: mol_type = other DNA
gagaggcttcaaggctgatgaaaaacattctttccttattcatccaacatttcctgaaagtgaaatctttgaatcaatta

SEQ ID NO: 167802 - DNA, 80 bp, synthetic construct
  source 1..80: mol_type = other DNA
agaaaaccaccctttacagatagccaaataactgtaccaagtctacacccagcaaaccttattaacagcagaaagagaat

SEQ ID NO: 167803 - DNA, 80 bp, synthetic construct
  source 1..80: mol_type = other DNA
ttgtccaaattgaagcacctagacacacttgaaaatcaggtaactaccctgcaccaatcgtgtcccagtcaagaagacca

SEQ ID NO: 167804 - DNA, 80 bp, synthetic construct
  source 1..80: mol_type = other DNA
cacttctttgtggtaaagcaataattctccaaaacaggcgcacatcagcgagcctttcaattaatatggttgtttcacaa

SEQ ID NO: 167805 - DNA, 80 bp, synthetic construct
  source 1..80: mol_type = other DNA
ataaatcttaaagaaatggcccagataagaagaaaatttgagttattcacatatcttaggtttgattctgaaataacttt

SEQ ID NO: 167806 - DNA, 80 bp, synthetic construct
  source 1..80: mol_type = other DNA
ccgacataaacgctgtgccatcactggaacacgagcccttgcacacacacggtgccttcggccagcagtccggtgctgtg

SEQ ID NO: 167807 - DNA, 80 bp, synthetic construct
  source 1..80: mol_type = other DNA
caccgaccccgtcaaagacttgatgatcaaaacgctcccggctttgaattcacctagtgcagaagagtgtgggtatagtg

SEQ ID NO: 167808 - DNA, 80 bp, synthetic construct
  source 1..80: mol_type = other DNA
ggacaggcagtaccatcggatgttattgaaaccagacacgtggttaattataagacaagatctgaaagcaccctggagtc

SEQ ID NO: 167809 - DNA, 80 bp, synthetic construct
  source 1..80: mol_type = other DNA
actggcaaaactatcaaacaaactatgccacagtagcagctaaatttaaagaaagacaaacccaaaatctacaattaatt

SEQ ID NO: 167810 - DNA, 80 bp, synthetic construct
  source 1..80: mol_type = other DNA
tttgcgtgctgaggcacaggcccgtcaggctagtgttgaggtgcagcccacccagttgacccaagtatcccctcagcaac

SEQ ID NO: 167811 - DNA, 80 bp, synthetic construct
  source 1..80: mol_type = other DNA
tgttgataccgggaagccctgggccaacttttggcgaaaatgagacgttgatcggcacgtaagaggttccaactttcacc

SEQ ID NO: 167812 - DNA, 80 bp, synthetic construct
  source 1..80: mol_type = other DNA
ctttttgggatgatactagaaagcccgcctatggtcaagccaaatatttcgctgcagtaaggtgtggctttcatttccaa

SEQ ID NO: 167813 - DNA, 80 bp, synthetic construct
  source 1..80: mol_type = other DNA
tatttcaaatagcataataaacatgtttggtgaccccaaaccttacaacccttccagtaatgactggaaagaagagtacg

SEQ ID NO: 167814 - DNA, 80 bp, synthetic construct
  source 1..80: mol_type = other DNA
ctcggaaagatgaacctccatccttaaaacctcggatggaggttgagtttctaaagaggaaaccagggttcttcccagag

SEQ ID NO: 167815 - DNA, 80 bp, synthetic construct
  source 1..80: mol_type = other DNA
tatcccaacatagctcaccagaaggaagtgcttgaggcaatcatttcctgcagccccttcatgccccgtgaccaggacat

SEQ ID NO: 167816 - DNA, 80 bp, synthetic construct
  source 1..80: mol_type = other DNA
atgttggaccatctgatctttatgtacacgctggaaatcttatatacagaaatttacacttgtgtgaaccagagaattta

SEQ ID NO: 167817 - DNA, 80 bp, synthetic construct
  source 1..80: mol_type = other DNA
acaaatatgaccagtttgtggccaagattaggagtgttagcgctggtcgtgcactctatataccaccatacgaactcttg

SEQ ID NO: 167818 - DNA, 80 bp, synthetic construct
  source 1..80: mol_type = other DNA
gcgcgttgtcctcgcaccgggctttggatcgtccgtgatcgtcgcggacgcttgcgacgttggctctcgcaggccgaggt

SEQ ID NO: 167819 - DNA, 80 bp, synthetic construct
  source 1..80: mol_type = other DNA
agggacagcaacaccttatggagaaataacactaagtggaaaccccacctgcagactccttaagtatgattatcccacca

SEQ ID NO: 167820 - DNA, 80 bp, synthetic construct
  source 1..80: mol_type = other DNA
acaatggtctgcgcctagcaacgtcactacagggtctaccagtgttgaacgtgccaggtagtaaccaattcctcacgtct

SEQ ID NO: 167821 - DNA, 80 bp, synthetic construct
  source 1..80: mol_type = other DNA
ggtgtcttcacaaaaggtcggagctcatgagaataccaacattgctactggtgggtcaaccgttaattacaccactataa

SEQ ID NO: 167822 - DNA, 80 bp, synthetic construct
  source 1..80: mol_type = other DNA
taacaacaaccccgatggcagctcaattagtcagcgagtaggcacaatgcctgacatgacggagtataacaagtgggtat

SEQ ID NO: 167823 - DNA, 80 bp, synthetic construct
  source 1..80: mol_type = other DNA
agaaagcttgaaatgttcacctactctaggtttgatgcagagctcacatttgtgattactgagcgattcgctgcaagcgg

SEQ ID NO: 167824 - DNA, 80 bp, synthetic construct
  source 1..80: mol_type = other DNA
tcaatccatggcaggccccgccctcggacccccgagtggcctgttcaaggggagagtggccagaatgtcacagaccatga

SEQ ID NO: 167825 - DNA, 80 bp, synthetic construct
  source 1..80: mol_type = other DNA
agtaaagtacaactttcctcagtatgctcctaacatagacaaacttcacgaacttagaaaatactactttaaatgggaaa

SEQ ID NO: 167826 - DNA, 80 bp, synthetic construct
  source 1..80: mol_type = other DNA
gtcacattcactgtggagttggttgtggctgaagtagttatagatgtaacggttatttccgtagaactaacgttagtttc

SEQ ID NO: 167827 - DNA, 80 bp, synthetic construct
  source 1..80: mol_type = other DNA
tcaaaaaccgcaggtaaagacttaatacttgtcattcctctgcaaatggacaataccttgtttgccacaacactagtagg

SEQ ID NO: 167828 - DNA, 80 bp, synthetic construct
  source 1..80: mol_type = other DNA
agatgcaaacaaattaaacacatttgccaccgagggagcttttcataaaccacaggtagaaaaatatagagcaccatttg

SEQ ID NO: 167829 - DNA, 80 bp, synthetic construct
  source 1..80: mol_type = other DNA
agccaacacctgtgaccgagaaaaggaagaatctgatcaccacagggccatacgggcaacaatcaggggccatttatgtc

SEQ ID NO: 167830 - DNA, 80 bp, synthetic construct
  source 1..80: mol_type = other DNA
catcagcaaccacttcaacgctttcaaaatcatcgtcaagcgctacgccaacattaacgttttctaccattcatagtact

SEQ ID NO: 167831 - DNA, 80 bp, synthetic construct
  source 1..80: mol_type = other DNA
gacctagattggggcaatggcgaccgtcactcggactatcaaccactaggaaaccaagatccaagtttgtacttgggatt

SEQ ID NO: 167832 - DNA, 80 bp, synthetic construct
  source 1..80: mol_type = other DNA
ggtggtgtcaaatgtcaaaggtcacagcctgtcatgcttgcacaaaatggcggacttccgcgcgcgccgccgccgggccg

SEQ ID NO: 167833 - DNA, 80 bp, synthetic construct
  source 1..80: mol_type = other DNA
cagtcagcactgctacaaggcgacacagacgcagccattaacaacgcggtggccagggtagcagacacaattgccagcgg

SEQ ID NO: 167834 - DNA, 80 bp, synthetic construct
  source 1..80: mol_type = other DNA
cgtgatgattattggctgaagaggggtgagaagaaccgaaagtcgtaggacaactgggaactcggcgacgaagatgcgtc

SEQ ID NO: 167835 - DNA, 80 bp, synthetic construct
  source 1..80: mol_type = other DNA
gtggctaccccccgagcgagatatcccgaaaatatgtaacataaacttcaaaataaagcttcaagagtgagtgattcgag

SEQ ID NO: 167836 - DNA, 80 bp, synthetic construct
  source 1..80: mol_type = other DNA
aagaaacaaagcctggctaacagtagtttcagctgttaccagtgcaattagtatattgctcctggtgacaaaaattttta

SEQ ID NO: 167837 - DNA, 80 bp, synthetic construct
  source 1..80: mol_type = other DNA
cttcgggctcgcgggggtcgggaattttgctaaacagactccgaggtgctcttggacactgagtgggcgtacagcaacga

SEQ ID NO: 167838 - DNA, 80 bp, synthetic construct
  source 1..80: mol_type = other DNA
gatcaggtcaaggcatatccacattcttcagaggagttccagaaagaactaactacaaaactacatgttcttaagaaaaa

SEQ ID NO: 167839 - DNA, 80 bp, synthetic construct
  source 1..80: mol_type = other DNA
cacgaagcgaactagaaaacgcacacacgttatttgcaaaaagaaagcagctgccggcttattattttattaaaaattta

SEQ ID NO: 167840 - DNA, 80 bp, synthetic construct
  source 1..80: mol_type = other DNA
tactgctcctttaccccaaaagactctaaaggaattgaaaatatcaaaaaaattagagacacaaactttaaatacctaac

SEQ ID NO: 167841 - DNA, 80 bp, synthetic construct
  source 1..80: mol_type = other DNA
ataaatcagacacattcaagaagctagattatagcaatgccactttccttaaaaggggtttcaagcaggatgaaaagtac

SEQ ID NO: 167842 - DNA, 80 bp, synthetic construct
  source 1..80: mol_type = other DNA
atgagtcgatctgcttgtgtatattacaccaagtacaaaacaaaagacacagacccatcggagatgtattctagttggaa

SEQ ID NO: 167843 - DNA, 80 bp, synthetic construct
  source 1..80: mol_type = other DNA
cgtcactaaccacgtgactcccacaggccaaccagagtctatgtcgtgcacttcctgggcatggtctacgtgataatata

SEQ ID NO: 167844 - DNA, 80 bp, synthetic construct
  source 1..80: mol_type = other DNA
caaagtgttcccaattgaaagtccgtttgtgactcaagtaacattaggaggaaaacccatggatttggctatttttaagt

SEQ ID NO: 167845 - DNA, 80 bp, synthetic construct
  source 1..80: mol_type = other DNA
gaccttcctcaatttacagagtcaggagagataaatggaaattattctaagcctaaccaaagtaatttaaaagaattata

SEQ ID NO: 167846 - DNA, 80 bp, synthetic construct
  source 1..80: mol_type = other DNA
aagatgcaatgataccaagtactcaggctttgcacccaactgttctaaggtagtagcttctacatgcaccagaatgatgg

SEQ ID NO: 167847 - DNA, 80 bp, synthetic construct
  source 1..80: mol_type = other DNA
gatgcctgttcttccatcagataatgtggaaaccagaactacctacatgcattttaatggttcagaaactgatgtagaat

SEQ ID NO: 167848 - DNA, 80 bp, synthetic construct
  source 1..80: mol_type = other DNA
ccttccggtggcgcggtgccgacctcggacccagggacgtatccacctcaggtacacacagtaggctacctggacaccga

SEQ ID NO: 167849 - DNA, 80 bp, synthetic construct
  source 1..80: mol_type = other DNA
ccaccagcttaaattgctcgggcgtgtcctggcaggcctccagtgccagttccagacactgcccatacctgcgggcgagc

SEQ ID NO: 167850 - DNA, 80 bp, synthetic construct
  source 1..80: mol_type = other DNA
ggcatagaatattagacacatacttagaaaaggaggaaggaatagttccagattggcagaattatacacggggaccaggt

SEQ ID NO: 167851 - DNA, 80 bp, synthetic construct
  source 1..80: mol_type = other DNA
gtctccacgaggcactccggggcttgcagacggccccactttcgtccgtgacggcccgaccagccgacccgagccactat

SEQ ID NO: 167852 - DNA, 80 bp, synthetic construct
  source 1..80: mol_type = other DNA
ggtgccgggtacaccatctcgagttgccgcgcgccttccaccgccgccaccgtgtcgcgcagcagcaccgtgtcgtggtc

SEQ ID NO: 167853 - DNA, 80 bp, synthetic construct
  source 1..80: mol_type = other DNA
agggtgcaacatatactcaactgcttaggtagtctcaccctcatcttaggtacactatatgcattgtacaaactaatgtg

SEQ ID NO: 167854 - DNA, 80 bp, synthetic construct
  source 1..80: mol_type = other DNA
tactgaggcccgcgctgcagcagcaagtcgatatcgaaaaagaagagcgcagccacgggatcgtactgacgcagttccac

SEQ ID NO: 167855 - DNA, 80 bp, synthetic construct
  source 1..80: mol_type = other DNA
tacaccaattaagaaaagcatactttaaacaactaacatcagagggaccacaaacaacatctcaagacagtggctacagc

SEQ ID NO: 167856 - DNA, 80 bp, synthetic construct
  source 1..80: mol_type = other DNA
acatagatataacctacaaccccatagtggacaaaggccagggaaacaaagtatggttccagtacttaacaaaagaaacc

SEQ ID NO: 167857 - DNA, 80 bp, synthetic construct
  source 1..80: mol_type = other DNA
ccacgcttagcaccctacgccgagtcatctctcatttggaggtgcaggtagagaagggcatatagatccttaaataccca

SEQ ID NO: 167858 - DNA, 80 bp, synthetic construct
  source 1..80: mol_type = other DNA
cccccagagcgagttatgtgatgtaacattgctaactgtacaggcaaccgcagccgacttgcaatatccgttcggctcac

SEQ ID NO: 167859 - DNA, 80 bp, synthetic construct
  source 1..80: mol_type = other DNA
tgcttattctggagcacccacacctgttgtgaagaaaccagaactcaggaaagctacactacagggaccacaacatgagt

SEQ ID NO: 167860 - DNA, 80 bp, synthetic construct
  source 1..80: mol_type = other DNA
gcctagactggcatacagtgtttcaccatgtcagatacaatcccatggcagacaaaggcctaggaaacatgatatgggtt

SEQ ID NO: 167861 - DNA, 80 bp, synthetic construct
  source 1..80: mol_type = other DNA
tagaatgcttagggacacaaagttcataagccagaccaccttcttccagggtgatgtccagaatgcagttgagggggcaa

SEQ ID NO: 167862 - DNA, 80 bp, synthetic construct
  source 1..80: mol_type = other DNA
cggtaccagtcccaccgttacgcaccaatccacgtagagaccatagtcgtcgttatcggcgtactgatataaaatgtcgc

SEQ ID NO: 167863 - DNA, 80 bp, synthetic construct
  source 1..80: mol_type = other DNA
accagtggtcagtgatgaacgacatcgacaagacgggaccgtttgcatacagagacgaacgcccctcagctgtactgacc

SEQ ID NO: 167864 - DNA, 80 bp, synthetic construct
  source 1..80: mol_type = other DNA
tacatcctgtatatgatatggcagatgtccatgaatcaatcagatggaccaaggacccaaagaatacccaggatcatgtg

SEQ ID NO: 167865 - DNA, 80 bp, synthetic construct
  source 1..80: mol_type = other DNA
gataaggtgatcaataatgcattacaactatcacaacccactcgacccaccaccgcgtcagacacacccagtacgagtgg

SEQ ID NO: 167866 - DNA, 80 bp, synthetic construct
  source 1..80: mol_type = other DNA
acctcctgcaacaggaccaggagagaacacatactttaatacaccagatggactatggggagatgcaatatacagtaaaa

SEQ ID NO: 167867 - DNA, 80 bp, synthetic construct
  source 1..80: mol_type = other DNA
tggtgaagagccctacaaggagttcatatctaaaattagaaagacagaagtaggccgtaggttgtatcttccaccataca

SEQ ID NO: 167868 - DNA, 80 bp, synthetic construct
  source 1..80: mol_type = other DNA
atctattcaaagctaacccaaattacgccggtaactctattaaaccaaccggtgctagtcgcacagcgatcactactctt

SEQ ID NO: 167869 - DNA, 80 bp, synthetic construct
  source 1..80: mol_type = other DNA
acactgccatcatcacactgaagtacattttattgttaaacacaacaaaatgggagcacaagtgtcaaccacaaagaccg

SEQ ID NO: 167870 - DNA, 80 bp, synthetic construct
  source 1..80: mol_type = other DNA
cacaaataacttagttactaaaattaaaagctacagaaagaaaagatttaactggctaacaaccccaagctccagcaaca

SEQ ID NO: 167871 - DNA, 80 bp, synthetic construct
  source 1..80: mol_type = other DNA
tggctaccaatgtgaccaagtttccgatgcactttgtggatgtgggtcacactatcccatatggtgagataaatctcagt

SEQ ID NO: 167872 - DNA, 80 bp, synthetic construct
  source 1..80: mol_type = other DNA
ttgctttaaaatttcaattttcaattgttgttctttaagtttccattttaaagagggtactttacctatccagggacgtc

SEQ ID NO: 167873 - DNA, 80 bp, synthetic construct
  source 1..80: mol_type = other DNA
agaaactacaattataacaaagggagacaaagccttctgtcacctcacaggcattttctccccaccttggctaaacatag

SEQ ID NO: 167874 - DNA, 80 bp, synthetic construct
  source 1..80: mol_type = other DNA
tttgttgtacaaaatggccgacttccttccgcttttttgaaaaaaggcgccaaaaaacggccgcggcggtggcgcgcgcg

SEQ ID NO: 167875 - DNA, 80 bp, synthetic construct
  source 1..80: mol_type = other DNA
aagtggtacactcaacaagacctatgcgacgttactcttgtgacacttgcggttagcgcagcttcctttacacatccgtt

SEQ ID NO: 167876 - DNA, 80 bp, synthetic construct
  source 1..80: mol_type = other DNA
gcttatgccacactatcctccaacctatatgaataccacgcaggggcatactcctctatatttctatctccaggcagagc

SEQ ID NO: 167877 - DNA, 80 bp, synthetic construct
  source 1..80: mol_type = other DNA
tccaggcaaagaagttcaagttaatggcatccagactaaagtcttagactcatatgacctttacaacagggatgggatca

SEQ ID NO: 167878 - DNA, 80 bp, synthetic construct
  source 1..80: mol_type = other DNA
atgttaacggtctagaggcttacaggataccggtgcactcggtgacggaaactggatcacaagtctttggcttcacacta

SEQ ID NO: 167879 - DNA, 80 bp, synthetic construct
  source 1..80: mol_type = other DNA
cggtggggtggtggtggaagttcccagaagcgcttagtgatatgggattattcggtcagaacatgcaataccactacctg

SEQ ID NO: 167880 - DNA, 80 bp, synthetic construct
  source 1..80: mol_type = other DNA
tggcagccccagactattagaaaatgcagaataagaggaattatccccctactcatatgtggtcacctcagagagggtcg

SEQ ID NO: 167881 - DNA, 80 bp, synthetic construct
  source 1..80: mol_type = other DNA
aacaaacacggtctatctctttgagccccccagaggcctactccccatagtgggaaaagaggcctgggaggacgagtaca

SEQ ID NO: 167882 - DNA, 80 bp, synthetic construct
  source 1..80: mol_type = other DNA
aagaagtcccaaagggacggcagcgcgagtctctggggacgcgacgatcaactcccgaggtgtgagggacggcggaaaag

SEQ ID NO: 167883 - DNA, 80 bp, synthetic construct
  source 1..80: mol_type = other DNA
agcatacaatacaaacaacctgctgaatgttgccaaggctttgttaccatgtactgattgcccaaaaccagaattctaca

SEQ ID NO: 167884 - DNA, 80 bp, synthetic construct
  source 1..80: mol_type = other DNA
gaccgtacgcctacagagacgaatataaaaatgtacaactgactctctactacaactttatttttaactgggggggcgac

SEQ ID NO: 167885 - DNA, 80 bp, synthetic construct
  source 1..80: mol_type = other DNA
cgtggatcccaagaccaattagatctcaaccatatttactgaaaaacttccctaactacgacaatagcaagattgccaac

SEQ ID NO: 167886 - DNA, 80 bp, synthetic construct
  source 1..80: mol_type = other DNA
gacaaaacattagtattataccaacagacaaccaagaaaaactaaaaaactttatatcaacaaatgtacaaaataacata

SEQ ID NO: 167887 - DNA, 80 bp, synthetic construct
  source 1..80: mol_type = other DNA
tgaactatcatcttatgaccccagaagatcacttgaatctagtagccccccatccaaacagagatctagcagtagtatca

SEQ ID NO: 167888 - DNA, 80 bp, synthetic construct
  source 1..80: mol_type = other DNA
gtttcacaagacaatcggaaactttaagccatattacccgtggaatgcaccacctaatgaaaatccatatcacgcacgga

SEQ ID NO: 167889 - DNA, 80 bp, synthetic construct
  source 1..80: mol_type = other DNA
taaaggggaaacagcatgcacgttctccgtggaagcgacaaacgggcaaaatcaagtacagacagccgttcacaatgccg

SEQ ID NO: 167890 - DNA, 80 bp, synthetic construct
  source 1..80: mol_type = other DNA
cgaaaacgggatatggaggtcaaaacctcagcctgcctcctaagagtataccacaatctaaagactatactttttcatgg

SEQ ID NO: 167891 - DNA, 80 bp, synthetic construct
  source 1..80: mol_type = other DNA
ccctgttcttaagtcccagcagactaaacccacaggagccaggggcatacacagagataagttacaacccctggacagac

SEQ ID NO: 167892 - DNA, 80 bp, synthetic construct
  source 1..80: mol_type = other DNA
agcgctactcttgtggccccatggatctcaaacaccgactaccgacgcagcgccaaggatgactttactgagggaggata

SEQ ID NO: 167893 - DNA, 80 bp, synthetic construct
  source 1..80: mol_type = other DNA
gaatatgacatactaaactatcttgacaattgtactactaccataaacagcaccaattatattattaccgtattgtctcc

SEQ ID NO: 167894 - DNA, 80 bp, synthetic construct
  source 1..80: mol_type = other DNA
cacagggaactgaccaaattgcccgctgcgcgtgtcgaacaggtgtatacttctgtgagtctagagggaaacactacccc

SEQ ID NO: 167895 - DNA, 80 bp, synthetic construct
  source 1..80: mol_type = other DNA
gacccctgggcaagaccgtgctgtttatctcaatctttgtctattactttagcggggtagcggccctgagcgcagctatg

SEQ ID NO: 167896 - DNA, 80 bp, synthetic construct
  source 1..80: mol_type = other DNA
agaaaaggtaggcttagtacttcctttacgtgtaatcattggatattttcttgtgctgttaaaagtaacttcaaaccatt

SEQ ID NO: 167897 - DNA, 80 bp, synthetic construct
  source 1..80: mol_type = other DNA
gctgccagaggctggctgagccaccgagcgcccgctcgggctggcagccccgaatccgggcggtgctgccgcacaacgcg

SEQ ID NO: 167898 - DNA, 80 bp, synthetic construct
  source 1..80: mol_type = other DNA
ctaaagccaacacaaattatgaccctacaaagtgccgctatgtacttagagacatacccttgtgggccatggcccacgga

SEQ ID NO: 167899 - DNA, 80 bp, synthetic construct
  source 1..80: mol_type = other DNA
gggtgtggttcccataactgtgtctatcagtccaatgtttgctgaattttctggagcccgtgcaaggagccaaggattac

SEQ ID NO: 167900 - DNA, 80 bp, synthetic construct
  source 1..80: mol_type = other DNA
acttcgacgcaactgcagtcaccgaaacacgaaaaactataaacactgttcctgtgtcaaaccatggtggcaaacgccga

SEQ ID NO: 167901 - DNA, 80 bp, synthetic construct
  source 1..80: mol_type = other DNA
ttcaggtgaacctatcaagaaaactaaagttccagaaaggagggttgttgctcagggtccagaagaagaatttgggcggt

SEQ ID NO: 167902 - DNA, 80 bp, synthetic construct
  source 1..80: mol_type = other DNA
ataagtcactaagcactccgagcgtcagcgaggagtgcgaccctcgggggggactcaacttcttcggagccgcgcgctac

SEQ ID NO: 167903 - DNA, 80 bp, synthetic construct
  source 1..80: mol_type = other DNA
tcaagaacttcccaaactatgataacagtaaaatcgccaacagtgcacgagaccgggccagcatcaaacaagccaatatg

SEQ ID NO: 167904 - DNA, 80 bp, synthetic construct
  source 1..80: mol_type = other DNA
tagttgccccttggatgtcaagcactttctaccgcagaacaaaaggtgatgcctatacttctggaggttacattacccta

SEQ ID NO: 167905 - DNA, 80 bp, synthetic construct
  source 1..80: mol_type = other DNA
caaggtgctcattcccagctggaaaactaaacccaggggtcgcaagacagttaaggttaagatcggccccccccacttgt

SEQ ID NO: 167906 - DNA, 80 bp, synthetic construct
  source 1..80: mol_type = other DNA
tgtctgggttggagagcccacgcagacgatgcagggaatgcggccccggcggtagagtggggtgcgcagccaggcgttga

SEQ ID NO: 167907 - DNA, 80 bp, synthetic construct
  source 1..80: mol_type = other DNA
tgggaaagtgttagatcagcttggcttccctggacaccttacacaaagattgtgtaatacaacccacatcttcagagaca

SEQ ID NO: 167908 - DNA, 80 bp, synthetic construct
  source 1..80: mol_type = other DNA
aaacagaccaatcaactactacttcgtacacttcctggggcgtgtcctaccactgtatataagcaaaggcggtgacgaat

SEQ ID NO: 167909 - DNA, 80 bp, synthetic construct
  source 1..80: mol_type = other DNA
gaaaactacccatgtgtacaaggatgaagtgtatgttgtggatggaggaatgccatcaggaatatcaggcacctctattt

SEQ ID NO: 167910 - DNA, 80 bp, synthetic construct
  source 1..80: mol_type = other DNA
gaggctggaaacgccaatgggcgctgtggcgcacaggttgagcccggcggtggtgaacgacagaagcgccacatacagcg

SEQ ID NO: 167911 - DNA, 80 bp, synthetic construct
  source 1..80: mol_type = other DNA
caggacccagccctggagctcggggtgcggccgggtggcccgctgggtccgctgccccgctccggcgtgcggtggccggc

SEQ ID NO: 167912 - DNA, 80 bp, synthetic construct
  source 1..80: mol_type = other DNA
aaaggagctacaacgcatgacagcatatcacaaaacacaccgtcatgaaccagtgtgctgcctgatacgtggtccacctg

SEQ ID NO: 167913 - DNA, 80 bp, synthetic construct
  source 1..80: mol_type = other DNA
cgtagatggactctggggagacccagtatttggagactatgacaacaactcatccgacacacaacaagcaaatattgcca

SEQ ID NO: 167914 - DNA, 80 bp, synthetic construct
  source 1..80: mol_type = other DNA
tccaccaccaccttctcactagaggtgctgtacgaccagtacaagcgctttatgaacacctggtcgtaccccaacgacca

SEQ ID NO: 167915 - DNA, 80 bp, synthetic construct
  source 1..80: mol_type = other DNA
tccagtcagtaacaaaatatggccacaatccactaccacaaaaccaacagtagactactatgaatatcacgcaggctggt

SEQ ID NO: 167916 - DNA, 80 bp, synthetic construct
  source 1..80: mol_type = other DNA
gttatggtgtgtggcctcattatttaagtgcaacagatgctactgccattgataaacctacacaacctgacacttcttca

SEQ ID NO: 167917 - DNA, 80 bp, synthetic construct
  source 1..80: mol_type = other DNA
ggagggggaggtggaggaggacttatagaaaatggcggagtggcagaaagagacgaaagcacaagagacgcttagtactg

SEQ ID NO: 167918 - DNA, 80 bp, synthetic construct
  source 1..80: mol_type = other DNA
ggcaactggcaagctaatcttaacctattcaccccctggtgccgcacccccaaaaaatagaaaggatgcaatgctgggta

SEQ ID NO: 167919 - DNA, 80 bp, synthetic construct
  source 1..80: mol_type = other DNA
ggtcccgcgattccccgtcgccaacgtaacccccgtacccgcaacgcccatgccaccccgccgttccgcacacccgccgt

SEQ ID NO: 167920 - DNA, 80 bp, synthetic construct
  source 1..80: mol_type = other DNA
agagtggcaaccatcagagcacacaggtctttggctttcagattcaaccaggactagacagcgtgttcaaacacacgttg

SEQ ID NO: 167921 - DNA, 80 bp, synthetic construct
  source 1..80: mol_type = other DNA
acaccaactgggagatcacgaccagacaagtggcgcagttgaggcgcaaactggagatgttcacatatatgaggttcgat

SEQ ID NO: 167922 - DNA, 80 bp, synthetic construct
  source 1..80: mol_type = other DNA
catggctcagatcaggcaccaagagccccatcataggcatatatgtccttaaaaactctgtgtataacaacaacttaaca

SEQ ID NO: 167923 - DNA, 80 bp, synthetic construct
  source 1..80: mol_type = other DNA
atgcttaatagcacattacccactttggagcatagtttatggatatgtagacttttgtgaaaaaacaataagtcacacaa

SEQ ID NO: 167924 - DNA, 80 bp, synthetic construct
  source 1..80: mol_type = other DNA
caccaaggcctactcttcctcaacccagaataccactgataataccaccaaggcatactaatcaaccagccacaacacca

SEQ ID NO: 167925 - DNA, 80 bp, synthetic construct
  source 1..80: mol_type = other DNA
cctggaccagactacatcccagattgtgactgcaccactggtacttattactgtcatagtaaggataggtattatccaat

SEQ ID NO: 167926 - DNA, 80 bp, synthetic construct
  source 1..80: mol_type = other DNA
tcacaatcactgttgcgcccatggatgcagaatataacggactgcggcttgcgggacaccaagggttaccgaccatgaat

SEQ ID NO: 167927 - DNA, 80 bp, synthetic construct
  source 1..80: mol_type = other DNA
tattagagttccaagaaatagaaaagaagcaatgcttggtacacatctaatatgggacgttggtctacagtccacagtgt

SEQ ID NO: 167928 - DNA, 80 bp, synthetic construct
  source 1..80: mol_type = other DNA
aattctaagtgatgaaagtccatatgatggtctgtcagcaaaacagacaatgcagcttgcctatttggacagaggcttct

SEQ ID NO: 167929 - DNA, 80 bp, synthetic construct
  source 1..80: mol_type = other DNA
agacgccaccagcgactcctcctcagaggaatcaaacacctcttcggggacgtgcaccgactccggagaggagtccactg

SEQ ID NO: 167930 - DNA, 80 bp, synthetic construct
  source 1..80: mol_type = other DNA
cgatacagcgattggacactgtcggtccgtgacatggtgcaaatacgacgcaaatttgagatgtttacttacatgagatt

SEQ ID NO: 167931 - DNA, 80 bp, synthetic construct
  source 1..80: mol_type = other DNA
catccacaactgcaccacaatctgtagtacataggaacattgtttacttaaaattatttcccaatttgaatgtttttgtc

SEQ ID NO: 167932 - DNA, 80 bp, synthetic construct
  source 1..80: mol_type = other DNA
caccacgtgatttgtgacgtggtgtgcacgtcacaggcgccattttgaatcacaaaatggcggacttccttcctcttttt

SEQ ID NO: 167933 - DNA, 80 bp, synthetic construct
  source 1..80: mol_type = other DNA
gaagccagcagttgggacataaccatgggttacagctcaaagttcttatgggggggctccccattaccttcacagcctat

SEQ ID NO: 167934 - DNA, 80 bp, synthetic construct
  source 1..80: mol_type = other DNA
cgacgtcgccggctgtcaatgacgtgcctgcgtcagtggctatgatttatagcttttggacacaaccgcaacggatctgt

SEQ ID NO: 167935 - DNA, 80 bp, synthetic construct
  source 1..80: mol_type = other DNA
acttccaatgctacagatgaaaatatgattgagacccgctgtgtggttaacaggaatggggtgttagaaaccactatcaa

SEQ ID NO: 167936 - DNA, 80 bp, synthetic construct
  source 1..80: mol_type = other DNA
cagccatagtggtcccttcaggtgcgcctaaaacaatgagcatgttggcctttgtcagtgcgtgcaatgacttttcagcg

SEQ ID NO: 167937 - DNA, 80 bp, synthetic construct
  source 1..80: mol_type = other DNA
tcaaaatgacttccgttcagttcctctagtaaccacagaggccgtagccgcaagcctgcggtttccgatgtgctcaccac

SEQ ID NO: 167938 - DNA, 80 bp, synthetic construct
  source 1..80: mol_type = other DNA
aaggttactactagaatctatcataaagctaaacatgttaaagcttggtgtccaagaccccctagagcagtagaatatac

SEQ ID NO: 167939 - DNA, 80 bp, synthetic construct
  source 1..80: mol_type = other DNA
cccagctatctgcagccttccaacctgctaaaaaagctattgctggaaacaaggaagccaccaaaaccacactaggcaac

SEQ ID NO: 167940 - DNA, 80 bp, synthetic construct
  source 1..80: mol_type = other DNA
tggtcaccaatgtgcctaaattcccgatgcttgatatcgaggttggggatgtggtgccatatggtgatatcaacctgagc

SEQ ID NO: 167941 - DNA, 80 bp, synthetic construct
  source 1..80: mol_type = other DNA
agaggctgaactgcagggtgataaggtggcaaccgtggaggacactaaagctagtggaccaagcaactccgaacaggtac

SEQ ID NO: 167942 - DNA, 80 bp, synthetic construct
  source 1..80: mol_type = other DNA
ggagcacttccggcttgcccaaaatggtggcaaaaaacatccgggttaaaggtcgttaccacgtcacaagtcacgtggga

SEQ ID NO: 167943 - DNA, 80 bp, synthetic construct
  source 1..80: mol_type = other DNA
catcaggctgcatgtgctcttccccccggccatctttgccggaacggtgaccttcgacagcccggtgcagcgcctatacc

SEQ ID NO: 167944 - DNA, 80 bp, synthetic construct
  source 1..80: mol_type = other DNA
acaagtggaaattagttgatccagataacctaaatttggaaataacagtgtttgaattggatagaaatgaaaaatttagg

SEQ ID NO: 167945 - DNA, 80 bp, synthetic construct
  source 1..80: mol_type = other DNA
acatagacattacatacaaccccataacagacaaaggagaaggtaacatagtgtggttccaatatgccactaaacctact

SEQ ID NO: 167946 - DNA, 80 bp, synthetic construct
  source 1..80: mol_type = other DNA
cctgggtccctagaccaccacgcctgtgcaaatacctgcacgccggaaatatgaactttgaagtgcagggcgtcaccgag

SEQ ID NO: 167947 - DNA, 80 bp, synthetic construct
  source 1..80: mol_type = other DNA
cgaactatccggaggggatagcgccaggatgttcaccgacaccagagtggtggagtctaatgctaagaaggtacagacag

SEQ ID NO: 167948 - DNA, 80 bp, synthetic construct
  source 1..80: mol_type = other DNA
gggtatgatgcccatgctgtgggccggtgccggcaccgggggccacaactatgccgtccgctccgacgactataccatga

SEQ ID NO: 167949 - DNA, 80 bp, synthetic construct
  source 1..80: mol_type = other DNA
gcggatcctgagggagtggtgttgtcaggtgcactaacggaaggagagcgcgccaaggaatttacctccgggaacgcgac

SEQ ID NO: 167950 - DNA, 80 bp, synthetic construct
  source 1..80: mol_type = other DNA
tcaacgtcaatgccagagaacaaggatgttgtccaggctaccacgactgttaataccaccaatctgacacaacacccgtc

SEQ ID NO: 167951 - DNA, 80 bp, synthetic construct
  source 1..80: mol_type = other DNA
acaaatgtgggacccagtgacatgtttgtacacactaaagaagctatctataaatgtgctcatttgactacaccttctga

SEQ ID NO: 167952 - DNA, 80 bp, synthetic construct
  source 1..80: mol_type = other DNA
ccggcagacttggtgcagaccagacacgttattaacgttaaatccaggtctgagtccactattgagtcattcttcgccag

SEQ ID NO: 167953 - DNA, 80 bp, synthetic construct
  source 1..80: mol_type = other DNA
atgcctggatacacaaccccaggtgggttacttaacactgccaaagcactgcaacaatgcacaaactgcactcaaccacc

SEQ ID NO: 167954 - DNA, 80 bp, synthetic construct
  source 1..80: mol_type = other DNA
tggtcaaatgttaccttccttaaaagaggttttagacctgacaagaaatatgaatttttaatccatcctgtttatgatat

SEQ ID NO: 167955 - DNA, 80 bp, synthetic construct
  source 1..80: mol_type = other DNA
cgctccgggtggggggtggccccgctgggcaccgctgcgccgccgccaggtcctggagcagccggtgttcctggcgctcc

SEQ ID NO: 167956 - DNA, 80 bp, synthetic construct
  source 1..80: mol_type = other DNA
ctttcgccagaggacactgtagttctgcgttatcatgtgttgcttgaggagataattgaacgaaattcagagacatttac

SEQ ID NO: 167957 - DNA, 80 bp, synthetic construct
  source 1..80: mol_type = other DNA
ccgtcgcaaagcacgtcccaaactggcttggggagtcaacggtggttctgtgggtcgggtgtagcgcgagtgttttccgt

SEQ ID NO: 167958 - DNA, 80 bp, synthetic construct
  source 1..80: mol_type = other DNA
tggatagcatgctacgccacaacaatgtatcacttgtcatcataccaatttgccccctacgggctccagcaacagctccc

SEQ ID NO: 167959 - DNA, 80 bp, synthetic construct
  source 1..80: mol_type = other DNA
ctattcccaggatccctccaaattcaccgaaccactgaaggatgtgttgatcaagacagcaccagctctcaactctccaa

SEQ ID NO: 167960 - DNA, 80 bp, synthetic construct
  source 1..80: mol_type = other DNA
accgcgccgaagacctagacgacctgttcgccgctatcgaaggagaccagtaaggagaaagcgtcggtgggggaggcgag

SEQ ID NO: 167961 - DNA, 80 bp, synthetic construct
  source 1..80: mol_type = other DNA
aataccactcaggtatatactcctctattttccttagtgcaggaaggtcttactttgagagaacaggggcctactcagac

SEQ ID NO: 167962 - DNA, 80 bp, synthetic construct
  source 1..80: mol_type = other DNA
attaatgaccctagatatagaccctagtaatataactttagaggagagtgtgtttggcactgagggtttggaagcacttg

SEQ ID NO: 167963 - DNA, 80 bp, synthetic construct
  source 1..80: mol_type = other DNA
gcggtcagaatcatcagtcgagaacttcctgtgccgctcagcgtgcgtttactacaccacatacgacactcacggggatg

SEQ ID NO: 167964 - DNA, 80 bp, synthetic construct
  source 1..80: mol_type = other DNA
ctcacccaacttctcaacttccccgccacgccccaactttccatccccactgccaacctccaacggcagggcaactcggt

SEQ ID NO: 167965 - DNA, 80 bp, synthetic construct
  source 1..80: mol_type = other DNA
ctggagtgggtcattggcaaaaaggtaaataaagtcatcgcacgggggttttgcctccttctcgtctcttgtttcgggta

SEQ ID NO: 167966 - DNA, 80 bp, synthetic construct
  source 1..80: mol_type = other DNA
catactgacagcaggtggtgatggacatgccgctttcactgatttgagaccatatcgagatttgcaatttgcaaacaaac

SEQ ID NO: 167967 - DNA, 80 bp, synthetic construct
  source 1..80: mol_type = other DNA
aggctggcaaagtccaccaccagaaccggggagttgtagaatccggacaggggctggatgacggtggccccctggtagcc

SEQ ID NO: 167968 - DNA, 80 bp, synthetic construct
  source 1..80: mol_type = other DNA
tgggacgcccctattaactacagaattctccttagatctccatacacctttccaaaactataccatgacacacaaccaga

SEQ ID NO: 167969 - DNA, 80 bp, synthetic construct
  source 1..80: mol_type = other DNA
cagtgacagtgggagaaacacggcctctgagacatgtatgggggtgttcatctcacgcagaaaatctttgcccagctcaa

SEQ ID NO: 167970 - DNA, 80 bp, synthetic construct
  source 1..80: mol_type = other DNA
aaactatggtgcatgctggctctggtgcagttgttaaatacttcaatatcaattattataaggatgctgctagctccggt

SEQ ID NO: 167971 - DNA, 80 bp, synthetic construct
  source 1..80: mol_type = other DNA
ctatactaaccttagataggaacgaaaagttcagagacattagaggattcatatcagaagatgttgaagggttagatgct

SEQ ID NO: 167972 - DNA, 80 bp, synthetic construct
  source 1..80: mol_type = other DNA
cacctgaacgcacccgtttacccctggtaggacccaaagcaactctgttcccaaaaaccttaccacaagtgtggaccaag

SEQ ID NO: 167973 - DNA, 80 bp, synthetic construct
  source 1..80: mol_type = other DNA
acatatgtcagatacaacccactagcagacaaaggcataggcaacagaatctttgtacaatggtgctcagaaagcacctc

SEQ ID NO: 167974 - DNA, 80 bp, synthetic construct
  source 1..80: mol_type = other DNA
agttcatctgtaaaagcatgaaactgtccggactccgagtagcgggcctcggtgtgagaggcacccccatcattccccat

SEQ ID NO: 167975 - DNA, 80 bp, synthetic construct
  source 1..80: mol_type = other DNA
attgttcaactacagctgcacaaaccaccgtttctacagaaccatcggtaacaaccatgcggatatcaacattaagcaca

SEQ ID NO: 167976 - DNA, 80 bp, synthetic construct
  source 1..80: mol_type = other DNA
caaaaccaacaaaacatgtactcaaacagaaaaatggaaacatatttaggaagccaatacctaaactttaaaacaggagt

SEQ ID NO: 167977 - DNA, 80 bp, synthetic construct
  source 1..80: mol_type = other DNA
ggaatacagtaacctttttaaaaagacatttcaaaccagatagtgaattcccatttcttgttcacccagtaatgccaatg

SEQ ID NO: 167978 - DNA, 80 bp, synthetic construct
  source 1..80: mol_type = other DNA
tgttgggtacccatatcatctgggacgttggactgcaatcgtcatgtgtgctatgcataccatggattagccagacacat

SEQ ID NO: 167979 - DNA, 80 bp, synthetic construct
  source 1..80: mol_type = other DNA
cggtggttgcgccaggaacggggaagctgctggccgccggcagggacggcgtgttgcggggacgcgggttgcgctggccc

SEQ ID NO: 167980 - DNA, 80 bp, synthetic construct
  source 1..80: mol_type = other DNA
tctcacagttcctattactgtgtcaattagtccaatgtttgctgaattttctggagcacgtgcaagaccagcaagagctg

SEQ ID NO: 167981 - DNA, 80 bp, synthetic construct
  source 1..80: mol_type = other DNA
aaccataagcctaaaagtactctacgacgagtttaccagacacctgaaccggtggtcgtacggaaacgaccagctggacc

SEQ ID NO: 167982 - DNA, 80 bp, synthetic construct
  source 1..80: mol_type = other DNA
gtttatggacaaattagtaacaaagctatacacaacaggatcatactggaactcctttcacacagcagaatatttaaacc

SEQ ID NO: 167983 - DNA, 80 bp, synthetic construct
  source 1..80: mol_type = other DNA
tggatagttcctgcagattgtcaaattgaaagggatttgaacatagctaacagtataattacaattatagctaatattat

SEQ ID NO: 167984 - DNA, 80 bp, synthetic construct
  source 1..80: mol_type = other DNA
tacagctcctttacaccaaaagaccaaacaggtattaaaaatataattacaataagaaacaacaacttcaaatcactaac

SEQ ID NO: 167985 - DNA, 80 bp, synthetic construct
  source 1..80: mol_type = other DNA
ctactatggctgtgttaacatgcacaacaccttttgtggctgtgacaactttctcacccacctgcagcgcataacaacat

SEQ ID NO: 167986 - DNA, 80 bp, synthetic construct
  source 1..80: mol_type = other DNA
attctgacacaccatccaccacatatgggcacgatgccaagggttatttcaaatggtctgctataactaatcccatgtat

SEQ ID NO: 167987 - DNA, 80 bp, synthetic construct
  source 1..80: mol_type = other DNA
acaaaacaactcagacataagagacaaaattaaatcaaacatgaaaacttactaccaaaaaatactagatgagacaacaa

SEQ ID NO: 167988 - DNA, 80 bp, synthetic construct
  source 1..80: mol_type = other DNA
taaaggaagcttcacccttgatgacgccaccagccctgcacgaagcttctgtccagttgattatctctttgggagtggag

SEQ ID NO: 167989 - DNA, 80 bp, synthetic construct
  source 1..80: mol_type = other DNA
gatttcaacctgttgggtatatacagtaactgtgcagtcattccaactcatgctgactgtggagaatcagttctaattga

SEQ ID NO: 167990 - DNA, 80 bp, synthetic construct
  source 1..80: mol_type = other DNA
ttaggggtcaagattatgccctggagcatatatgaaacaccctactcagagtctggaagcagtagaagaagcgatagaag

SEQ ID NO: 167991 - DNA, 80 bp, synthetic construct
  source 1..80: mol_type = other DNA
ttaagaaaagctacattacaggggcctcagcatgaatttatacgagcactaataaagaggaactgtcatgtcctaacaac

SEQ ID NO: 167992 - DNA, 80 bp, synthetic construct
  source 1..80: mol_type = other DNA
tgtgcgattatgtgtatgcacataatgttgatttcacccccagaggagtcacagacaaaagggacaagatcacactggaa

SEQ ID NO: 167993 - DNA, 80 bp, synthetic construct
  source 1..80: mol_type = other DNA
gcataacgccttatctgggaggagcgacggattatagccaataagagagctcaagacgcagggctcgcaaagtatagtgg

SEQ ID NO: 167994 - DNA, 80 bp, synthetic construct
  source 1..80: mol_type = other DNA
gaaaaatatcacagcaatgtaaaggaattgacccataaatttggcatcccacagctagtggcaaaacaaatagtaaatac

SEQ ID NO: 167995 - DNA, 80 bp, synthetic construct
  source 1..80: mol_type = other DNA
ataatgctgcatcaaaatatgggtctgtggtcactaatgacatgggaaccatatgtgttagaatagttacatctaaccag

SEQ ID NO: 167996 - DNA, 80 bp, synthetic construct
  source 1..80: mol_type = other DNA
acacaaacctcacaggacccagcatacacccaggcatgctcatgctcaccaaaaacaaaatatttgtgcccagtttaaag

SEQ ID NO: 167997 - DNA, 80 bp, synthetic construct
  source 1..80: mol_type = other DNA
ttactaactacattcctataaaacactggttcaagtggtaccccatgattgcaaaccagaaatccgttttagaaaccata

SEQ ID NO: 167998 - DNA, 80 bp, synthetic construct
  source 1..80: mol_type = other DNA
ttctcataaatggacaaaaggtccaaatcagagataaatataagttagttgacccagagaatgttaatttagagctcact

SEQ ID NO: 167999 - DNA, 80 bp, synthetic construct
  source 1..80: mol_type = other DNA
tagggatagactgtgagcggcggccgcaacggcgtggtcggccgccgttcgtcgtcacggggcgacgcgagtgaggagga

SEQ ID NO: 168000 - DNA, 80 bp, synthetic construct
  source 1..80: mol_type = other DNA
cgcgggaagtggtcccaacaccggcggaccgcgacccggcggtgcgggactccgtcaactacgccaacaactgacggtcc

SEQ ID NO: 168001 - DNA, 80 bp, synthetic construct
  source 1..80: mol_type = other DNA
acacagacgcagagtcagtaggcctagtctgtgtaatatgtccatacaccaaaccccccatgaaaaatccagacaacccc

SEQ ID NO: 168002 - DNA, 80 bp, synthetic construct
  source 1..80: mol_type = other DNA
gaacatgtttctcggtaaaatttacaggcagaaaagggcactgtcactgcacagcgtgcgagcttcaaagaagaaaccac

SEQ ID NO: 168003 - DNA, 80 bp, synthetic construct
  source 1..80: mol_type = other DNA
acagtgctattgcaaaatgacccagcgaccgccatcgagggagcagtgaggcgtgttgcagataccatacaaagtggacc

SEQ ID NO: 168004 - DNA, 80 bp, synthetic construct
  source 1..80: mol_type = other DNA
acatggagtcataggcataatcacagcaggtggagacgaccatgtggcattcactgacttgcgcccctatgcatgtctca

SEQ ID NO: 168005 - DNA, 80 bp, synthetic construct
  source 1..80: mol_type = other DNA
ttatgtatatacccccgggggccccagtaccgagtaaatgggatgactttacatggcaaacttccacaaacccatctgta

SEQ ID NO: 168006 - DNA, 80 bp, synthetic construct
  source 1..80: mol_type = other DNA
ctttggacttaaacactagtgcaggttttccatatataagcatgggcataaagaaaagggacttaattgataaaaatact

SEQ ID NO: 168007 - DNA, 80 bp, synthetic construct
  source 1..80: mol_type = other DNA
aagcacttctgtttccccgggtgtgtgaatagaccctaccagggttgaagctgtagcactcgttatccgcatggctacta

SEQ ID NO: 168008 - DNA, 80 bp, synthetic construct
  source 1..80: mol_type = other DNA
ctcaccgtccgagagcagttgcagcagcaataccaagagcagctcagaatcagacagggaatcaaacacctcttcgagca

SEQ ID NO: 168009 - DNA, 80 bp, synthetic construct
  source 1..80: mol_type = other DNA
gtacatgcctgcggtgaggccatgggccaggtggatggagacgaggacctcctcctcctcctcccccaggcctagcctaa

SEQ ID NO: 168010 - DNA, 80 bp, synthetic construct
  source 1..80: mol_type = other DNA
gaccccaaactgtagggccgaggccacggtcttgacagcccccacgtactctgcgtactcgaccggggtctcggtgatac

SEQ ID NO: 168011 - DNA, 80 bp, synthetic construct
  source 1..80: mol_type = other DNA
tgggcaccgctgcgccgccgccaggtcctggggcagccggggttcctggcgctccggtggcagccggtcggccgccggtg

SEQ ID NO: 168012 - DNA, 80 bp, synthetic construct
  source 1..80: mol_type = other DNA
aaaccaaagtcccagaaaggagagtagtggcacagggaccagaagaagaatttggtcgatcacttatcaaacataattca

SEQ ID NO: 168013 - DNA, 80 bp, synthetic construct
  source 1..80: mol_type = other DNA
ctacctacgccatcagtggctggaaaatttcatataattaatatagaacactatttgtacccttagaatagatgtgatat

SEQ ID NO: 168014 - DNA, 80 bp, synthetic construct
  source 1..80: mol_type = other DNA
aaaagcggtttccagcgtcagcaatccgtagacacgcatgacgatcgcggtccgccgtagccaacacaccgcatcttcgg

SEQ ID NO: 168015 - DNA, 80 bp, synthetic construct
  source 1..80: mol_type = other DNA
tgatttatataatttacaaattgttttgctccttacaagggccatattcaggtgaacctaaaccagcaaccagaaaacca

SEQ ID NO: 168016 - DNA, 80 bp, synthetic construct
  source 1..80: mol_type = other DNA
cgaaggcgcaagtggtggtggagacgacgctggacccgtggcagagttcgcagacgatggcctagacgagctggtcgccg

SEQ ID NO: 168017 - DNA, 80 bp, synthetic construct
  source 1..80: mol_type = other DNA
gatggtgaaggtggcgtcgcgaaaagtaatggtctgcagctgctgcacggcagcctttacctcctcgtacgaacggtcga

SEQ ID NO: 168018 - DNA, 80 bp, synthetic construct
  source 1..80: mol_type = other DNA
acagcatctacactaacctcagcaacctgccactacacaaagaagccagattagacattattaacaaaacattacaccca

SEQ ID NO: 168019 - DNA, 80 bp, synthetic construct
  source 1..80: mol_type = other DNA
cagggtgccttattagtggtagcaattccagaacatcagaggggagcgcacaatactaccactagtccagggtttgatga

SEQ ID NO: 168020 - DNA, 80 bp, synthetic construct
  source 1..80: mol_type = other DNA
gtacaaatctgaatcaactaagtcctcccactattacaatcccagaagcaatcacacgtaggttctttctagatgtagac

SEQ ID NO: 168021 - DNA, 80 bp, synthetic construct
  source 1..80: mol_type = other DNA
cggcggggacttgcagggacgagggttgcgctcagggacgaggacggggcgttgcgtggacggagggctttagccccgag

SEQ ID NO: 168022 - DNA, 80 bp, synthetic construct
  source 1..80: mol_type = other DNA
aaaagatacatctataaggtcctaccacaagggtggaaagggtccccagcaatttttcaatactccgtagggaaagtact

SEQ ID NO: 168023 - DNA, 80 bp, synthetic construct
  source 1..80: mol_type = other DNA
cgccgcttgcgagctaaaccgaaagcaccacctgctatgagctggcgctgccctaccgaggatgccgcggcgagagagat

SEQ ID NO: 168024 - DNA, 80 bp, synthetic construct
  source 1..80: mol_type = other DNA
caaccaatgttacaagggactgataggaccaaagcagaggtttacttaagcttgagatgccccaacttcttctttccagt

SEQ ID NO: 168025 - DNA, 80 bp, synthetic construct
  source 1..80: mol_type = other DNA
gtaacgggagttacgctgcggttgacggggacggttagcagcggggacttgcgggcttttgcggagacggcgacggtggt

SEQ ID NO: 168026 - DNA, 80 bp, synthetic construct
  source 1..80: mol_type = other DNA
ctcaattacatcatagatctcaacacaacaaaatgggagcacaagtatcaacacaaaaaactggggctcacgaaaccagc

SEQ ID NO: 168027 - DNA, 80 bp, synthetic construct
  source 1..80: mol_type = other DNA
gtatacaacccaaacaatgatagaggaataggaaacaaagtctggttagacatatgtatgaaacaagatgctaaatggtc

SEQ ID NO: 168028 - DNA, 80 bp, synthetic construct
  source 1..80: mol_type = other DNA
gggacacagcactatgagattctccctacaggtgctctacgaggagcacctaaaacaccacaattactggacacgcagca

SEQ ID NO: 168029 - DNA, 80 bp, synthetic construct
  source 1..80: mol_type = other DNA
agcagttgctcaaggtccagaccatgagtttggtgtggctctcttgaagaggaattgccacatagccacaactgataaag

SEQ ID NO: 168030 - DNA, 80 bp, synthetic construct
  source 1..80: mol_type = other DNA
cgtttggcgcagtcacgctgcttgctgtggttgtggcgatgttattggtcaccttaatgatctggcggctcgttttggac

SEQ ID NO: 168031 - DNA, 80 bp, synthetic construct
  source 1..80: mol_type = other DNA
taatatgtccgtacacagacccacctcttcgtagaacagacctaacaaaaaaaacctgggggtacgtaccttatgacaca

SEQ ID NO: 168032 - DNA, 80 bp, synthetic construct
  source 1..80: mol_type = other DNA
ccgggtgtgaagccaatgtatagacagggtgagaagagtcgagtgtgcttcacatgagtcctccggcccctgaatgcggc

SEQ ID NO: 168033 - DNA, 80 bp, synthetic construct
  source 1..80: mol_type = other DNA
ccaccacgaccgccgcccagaccgtcgctcgggcccccgctcacgtcccgtccaccacccccgccagcaccgccgcccgg

SEQ ID NO: 168034 - DNA, 80 bp, synthetic construct
  source 1..80: mol_type = other DNA
aagatggaatttattggctttatacaagaatcagagaatattatgatgtcaactatggcaataagaaggatgttcttaat

SEQ ID NO: 168035 - DNA, 80 bp, synthetic construct
  source 1..80: mol_type = other DNA
ggtgcgtatgggggccgccattttagcttcggccgccattttaggccctcgcgggcctccgtaggcgcgttttaatgacg

SEQ ID NO: 168036 - DNA, 80 bp, synthetic construct
  source 1..80: mol_type = other DNA
agaggagctactcaagcagctccagctccagcgacacaaccagcgactcctcaccaagggaatcaaacacctgctcggag

SEQ ID NO: 168037 - DNA, 80 bp, synthetic construct
  source 1..80: mol_type = other DNA
aagcggtatcaaatccgaggaactgagggatcaacagatagatacgctagctggaggatttcagtccgtgacttggtgca

SEQ ID NO: 168038 - DNA, 80 bp, synthetic construct
  source 1..80: mol_type = other DNA
acaagccaacacatagtaaggttgacaaagtgtaacaaattgttataaggtagagaaaatggggcaattggctaattttc

SEQ ID NO: 168039 - DNA, 80 bp, synthetic construct
  source 1..80: mol_type = other DNA
ctacacaaacagagtgggccaataacccagaatccagtggaaaattatatagatcaggtgcttaacgaagttctggtagt

SEQ ID NO: 168040 - DNA, 80 bp, synthetic construct
  source 1..80: mol_type = other DNA
tgtggggtgccccttgttagtttgaggttaaccgcagcaagcctgcggtttcctttctgctcaccacaaactgtcacttc

SEQ ID NO: 168041 - DNA, 80 bp, synthetic construct
  source 1..80: mol_type = other DNA
cgcgggtccctggggacacacgaacagcaactcccagaggccagcgacgcggaaacgacgcggaaaagaggaagtcccca

SEQ ID NO: 168042 - DNA, 80 bp, synthetic construct
  source 1..80: mol_type = other DNA
ctccaggagctcctgcaccatcatcacacaatgacaaaaagtgggatggtgcttcaaacccgtgtgtcttctaccaaccc

SEQ ID NO: 168043 - DNA, 80 bp, synthetic construct
  source 1..80: mol_type = other DNA
tgctaagggacaccacgcacatctcacagaaggcactcccacaaggcctagaggatttgattgcagaggtggcgtccaac

SEQ ID NO: 168044 - DNA, 80 bp, synthetic construct
  source 1..80: mol_type = other DNA
cttgttctgtggcagtatgatggcaactggtaagttgatactgacttattccccacctggggcagcccccccgaaaaaca

SEQ ID NO: 168045 - DNA, 80 bp, synthetic construct
  source 1..80: mol_type = other DNA
accgcagcttttgtagctgcgacgatcctgtgggccatattaatactctcgcccgcgataatagtcctctggcccagact

SEQ ID NO: 168046 - DNA, 80 bp, synthetic construct
  source 1..80: mol_type = other DNA
actgtgcggtgcaaacactgccagttttaactatggcatgcacagcgatgacagcactccccagccagaaaaattcgggg

SEQ ID NO: 168047 - DNA, 80 bp, synthetic construct
  source 1..80: mol_type = other DNA
ccggtgtgtaaactcacctccggcacccgccctcgggactggccgggctatgggcaaggctcttagggtcttcgctctta

SEQ ID NO: 168048 - DNA, 80 bp, synthetic construct
  source 1..80: mol_type = other DNA
catagaaagagattttaattatgtccaatatgttttaaattgtttgggtagtctcctaattattttaggaacaatatatg

SEQ ID NO: 168049 - DNA, 80 bp, synthetic construct
  source 1..80: mol_type = other DNA
gcaatccaccaaagacaagggtccccatagacctacgcgacctgtacttagaggcccagctccacgccgcccccctccac

SEQ ID NO: 168050 - DNA, 80 bp, synthetic construct
  source 1..80: mol_type = other DNA
ggccttcggaggttggttcctctcgttcttcttctttggaagcgacgtcaacagcggggactagtacgagtactgcgggt

SEQ ID NO: 168051 - DNA, 80 bp, synthetic construct
  source 1..80: mol_type = other DNA
cgcagaaggccatgagcggcaggaaggcctcgttgcacgagtgggccagcccgagttcggggtgcatcatctggtagcgc

SEQ ID NO: 168052 - DNA, 80 bp, synthetic construct
  source 1..80: mol_type = other DNA
gtggaagcgtctcagtgaaatacaaatatacacatccaggtgatcaaggaattgacttgggaacaactgaagaaaatttt

SEQ ID NO: 168053 - DNA, 80 bp, synthetic construct
  source 1..80: mol_type = other DNA
acgtcactaaccacgtgacacccacaggccaacccactgctacatcgtgcacttcctgggcagagtctaccttataatat

SEQ ID NO: 168054 - DNA, 80 bp, synthetic construct
  source 1..80: mol_type = other DNA
ttccgtctccggggacgccagtcgcatgggcagcaggtcctccagcgcgatggaagcgcccagcaccgagagctgctgtt

SEQ ID NO: 168055 - DNA, 80 bp, synthetic construct
  source 1..80: mol_type = other DNA
aaattattcaagtagatactctaatcccaatgaacaatacccacaatagggatgaagtgaaaagctaccttatacccctg

SEQ ID NO: 168056 - DNA, 80 bp, synthetic construct
  source 1..80: mol_type = other DNA
ggtgggtgtcttttccagacgcacgatggcctcacgccggccgctgaaacggtggtttcggtgtcccttctttcccatga

SEQ ID NO: 168057 - DNA, 80 bp, synthetic construct
  source 1..80: mol_type = other DNA
agaatggagtgtatgggtatagtaccctaaacaacatggggagactgttcatgcgacatgtaaacaaacaaagcccatac

SEQ ID NO: 168058 - DNA, 80 bp, synthetic construct
  source 1..80: mol_type = other DNA
gactaacactgtacagaaacccagacacagactttatactaacctacaacagaaagggacccttcacagacagccagctt

SEQ ID NO: 168059 - DNA, 80 bp, synthetic construct
  source 1..80: mol_type = other DNA
aagacttcaagaaatgatggacttgtatggaattgacttaccctacatcacatatttgaaagatgaactcagaagcccag

SEQ ID NO: 168060 - DNA, 80 bp, synthetic construct
  source 1..80: mol_type = other DNA
acgctggttgggcagccgccgtggtgacggtaattatgatctacgttttgatccactttaacgttccggcaactctgaga

SEQ ID NO: 168061 - DNA, 80 bp, synthetic construct
  source 1..80: mol_type = other DNA
tggccatcttatctgaaagatagcgaggcaacttcggaggaccagcctacgcagccagatgtcgccacgtgcagatttta

SEQ ID NO: 168062 - DNA, 80 bp, synthetic construct
  source 1..80: mol_type = other DNA
cggcgccggctcgtcttttccctccaggattccgttaatgtccatgagcttgctgacgatcgccgttaatagttgcgtct

SEQ ID NO: 168063 - DNA, 80 bp, synthetic construct
  source 1..80: mol_type = other DNA
ctagagtagactcattcatgcccatacataacataccgtctaatgtagggaaaattgacatatacagtctgcaaatcaca

SEQ ID NO: 168064 - DNA, 80 bp, synthetic construct
  source 1..80: mol_type = other DNA
gttgagatgcgtgtagcccagaagcgtgtagttctcggtggtggaggcgtagtccaggaggccgtgaaggagaggctcgt

SEQ ID NO: 168065 - DNA, 80 bp, synthetic construct
  source 1..80: mol_type = other DNA
gacctctataacaaagttcttaatattgatctcccaaaattaaaaaccgaagacggtgaattagaaccagccacaggcaa

SEQ ID NO: 168066 - DNA, 80 bp, synthetic construct
  source 1..80: mol_type = other DNA
cagaacaaaacaaactgactgggtgggccagtatgacatatcagaaccctacaagctagacaaatacagctgccccaact

SEQ ID NO: 168067 - DNA, 80 bp, synthetic construct
  source 1..80: mol_type = other DNA
tgatggaaatcgcagaagtggactcggtagtccctttgaataacgttgggtcagctgtcaacaccctggaggcttaccgc

SEQ ID NO: 168068 - DNA, 80 bp, synthetic construct
  source 1..80: mol_type = other DNA
aacatccctccaggcaatgaataggcgcttctttcttgacttagacattgtagtgcatgacaattacaaagattcacaag

SEQ ID NO: 168069 - DNA, 80 bp, synthetic construct
  source 1..80: mol_type = other DNA
ttgagaattacaatgaaaccaatgtcactaagagcaaattatttgctaaatggaatatcacctacactgacacagtgcag

SEQ ID NO: 168070 - DNA, 80 bp, synthetic construct
  source 1..80: mol_type = other DNA
tggatttacccctttgaattttcgcacactaattctcattaaagtcaccttattgctgagaaattgctatcacaatgggt

SEQ ID NO: 168071 - DNA, 80 bp, synthetic construct
  source 1..80: mol_type = other DNA
agtaaccttcaacacagtacctccttttaaaataaacaaatacagcagctgcatgtaccatcctggcatgctaatgatgc

SEQ ID NO: 168072 - DNA, 80 bp, synthetic construct
  source 1..80: mol_type = other DNA
aaactgtttgctaactttcagggggcatacacaggtctgcccaaccaaaagcccaaagttcccacgcttcgagtggctaa

SEQ ID NO: 168073 - DNA, 80 bp, synthetic construct
  source 1..80: mol_type = other DNA
cccacagatagtgttcttgtaaatggacagaaggtccaaatcaaagataaatataagttagttgacccagagaatgttaa

SEQ ID NO: 168074 - DNA, 80 bp, synthetic construct
  source 1..80: mol_type = other DNA
gcgccgaaacaccgtcccgaagcccggtgccgacaacaaataccgtgggacgacacgcaccggcagtgcgcaggcagcgt

SEQ ID NO: 168075 - DNA, 80 bp, synthetic construct
  source 1..80: mol_type = other DNA
caggataaatttgtgctttgtgtagctctcagaaattgtacaaccccgcttttccactccgtcatgaaagatcgtaataa

SEQ ID NO: 168076 - DNA, 80 bp, synthetic construct
  source 1..80: mol_type = other DNA
gtcctgggatcagcacaaccaaatttcacaatgcgattgtgtagagatgcagtatctctcacccaaacggcagaatttca

SEQ ID NO: 168077 - DNA, 80 bp, synthetic construct
  source 1..80: mol_type = other DNA
taaatgagtacacttccgaatggctgagtttatgctgcccgtccgcggagaggagccacggcagagactccgaacgcccc

SEQ ID NO: 168078 - DNA, 80 bp, synthetic construct
  source 1..80: mol_type = other DNA
ccatctttattgacaattatcaaaaaaccaccttatttccaaactttaatattcttcgtaccggcgccacctcttcaatt

SEQ ID NO: 168079 - DNA, 80 bp, synthetic construct
  source 1..80: mol_type = other DNA
tcaaaaacccatgtaaaaatgaacagtcagcctttacctataccggtagacaacctcgtgacctacaagtcgctgacccg

SEQ ID NO: 168080 - DNA, 80 bp, synthetic construct
  source 1..80: mol_type = other DNA
cttacaaaagctactacaacaattatacactaatggccagtactggcagacattcatcacaggcccttttatcaaagaca

SEQ ID NO: 168081 - DNA, 80 bp, synthetic construct
  source 1..80: mol_type = other DNA
ggcagctaaaagtgtatgtctggactccactgactatccccacagggtctgctaaccaagtagatgtgactatattgggt

SEQ ID NO: 168082 - DNA, 80 bp, synthetic construct
  source 1..80: mol_type = other DNA
ctgtacaaaacaaaacacccctaaacttccaaggcaataaccagtcctctgcaaatgacacctggtaccttggaaaagca

SEQ ID NO: 168083 - DNA, 80 bp, synthetic construct
  source 1..80: mol_type = other DNA
aattacaaggacatgcaagggaagttagatgtatccaaggcttttcaaccctgtgatatcaacaccaaaattggcaatgc

SEQ ID NO: 168084 - DNA, 80 bp, synthetic construct
  source 1..80: mol_type = other DNA
cagcctattacattttctatgatgggtacagtaccaggctggaacctacaaagaacacttatggtatagctccaaccaat

SEQ ID NO: 168085 - DNA, 80 bp, synthetic construct
  source 1..80: mol_type = other DNA
aaagattagggtgtacttaaagccaaagcacattagggtatggtgtccgcgcccacctcgagcggtagcatactacggtc

SEQ ID NO: 168086 - DNA, 80 bp, synthetic construct
  source 1..80: mol_type = other DNA
gtgccggctcttactgctgttgagacgggcactaccaaccccgtggtaccgtctgatgtgatagagaccagacacgtgat

SEQ ID NO: 168087 - DNA, 80 bp, synthetic construct
  source 1..80: mol_type = other DNA
gctcaagtgtcatcccaaaaagtaggcgctcacgagaattccaaccgagcctatggcggttccaccatcaactacaccac

SEQ ID NO: 168088 - DNA, 80 bp, synthetic construct
  source 1..80: mol_type = other DNA
tttaattctattctgtttgcattgctggccgcagctggcggactacaaggcatttacggttagtgtgcctctgttctgga

SEQ ID NO: 168089 - DNA, 80 bp, synthetic construct
  source 1..80: mol_type = other DNA
ccccctttccaggaaaacctattagacgccatgagcagacagcccctcataatgttacagactcacaagtgcatactggt

SEQ ID NO: 168090 - DNA, 80 bp, synthetic construct
  source 1..80: mol_type = other DNA
acgtcacaataatgtgtcattaatggttattcccatcgcaccattagcagcaccaacaggttccgctacaacattaccaa

SEQ ID NO: 168091 - DNA, 80 bp, synthetic construct
  source 1..80: mol_type = other DNA
ccagccgaactgcaatcagacactcggggtgatgcctcgtcagtggccaacacagatgcgaccgggccatccaactccac

SEQ ID NO: 168092 - DNA, 80 bp, synthetic construct
  source 1..80: mol_type = other DNA
agaccttctccctcagggtcctctatgaccagtatcagaggggcttcaacaggtggtcccacaccaacaaagacttagat

SEQ ID NO: 168093 - DNA, 80 bp, synthetic construct
  source 1..80: mol_type = other DNA
ttgaacttagctccagtgaacactccaacaaagacaaagctacaccctagtgtattctatgatgttttccctggaaacaa

SEQ ID NO: 168094 - DNA, 80 bp, synthetic construct
  source 1..80: mol_type = other DNA
cacggatgcgatgttatagccaggtgtcgctgttcaacgggggtctactactgtcagtctaagggtaagcactacccagt

SEQ ID NO: 168095 - DNA, 80 bp, synthetic construct
  source 1..80: mol_type = other DNA
ctgtcactatacaaaatggcggtgacagacttccggcttacacaaaatggatgccaagttcttccgggtcaaaggtcaca

SEQ ID NO: 168096 - DNA, 80 bp, synthetic construct
  source 1..80: mol_type = other DNA
cccacaggccaaccgacgtgtacgtgatacacttcctgggcgtgacttatatcctaatataactaactgcacttccgaat

SEQ ID NO: 168097 - DNA, 80 bp, synthetic construct
  source 1..80: mol_type = other DNA
tcaacattactaattatggatgtcacctcctcttctgtgttgtcaccttcatgtaaggctctcatgcagtgtcttatgga

SEQ ID NO: 168098 - DNA, 80 bp, synthetic construct
  source 1..80: mol_type = other DNA
cgccactaccccttagacctcccgcactacccgtggctaccaaaaaagcccaatacccactctacctatagagtgtcctt

SEQ ID NO: 168099 - DNA, 80 bp, synthetic construct
  source 1..80: mol_type = other DNA
taagttcttgatagcatacacccctccaggtgctgacatcccagagacacgccgtgatgcaatgctcggcacgcatgttg

SEQ ID NO: 168100 - DNA, 80 bp, synthetic construct
  source 1..80: mol_type = other DNA
ataacttacagcagacgaacccctctaggaggtaacatactaactgcaccagcactacatccaggcaatgccatacttag

SEQ ID NO: 168101 - DNA, 80 bp, synthetic construct
  source 1..80: mol_type = other DNA
aattagacaaaattgcagctggtaagactaggtgtattgaggcttgtgaggttgattattgtattgtttacagaatgatc

SEQ ID NO: 168102 - DNA, 80 bp, synthetic construct
  source 1..80: mol_type = other DNA
gatgatgatggcccccgcgtagatgtcgcagatgtagaggatgaactgggccaccccgttgtaactgccgtgcaggacct

SEQ ID NO: 168103 - DNA, 80 bp, synthetic construct
  source 1..80: mol_type = other DNA
ggcagagcggctccacgcttgcttgcttacaacgacctcttaataaagctgccaaattagaagtaagcaagtgtgtgtgt

SEQ ID NO: 168104 - DNA, 80 bp, synthetic construct
  source 1..80: mol_type = other DNA
ggtgtgagctgctgagcatgaggaggagccggggtagctgatggcaggggctgctgctgaggaggaagaggagaaggagc

SEQ ID NO: 168105 - DNA, 80 bp, synthetic construct
  source 1..80: mol_type = other DNA
ggactttgttaacctcgtctctactgctcctttcattctccccatggcctcgctggaagacaagggaactccctacacca

SEQ ID NO: 168106 - DNA, 80 bp, synthetic construct
  source 1..80: mol_type = other DNA
ggagcatcataaaagacagacccgaccgccaaggccgccaccgcccaaattcggggatagaaccgcggcccatctctcgc

SEQ ID NO: 168107 - DNA, 80 bp, synthetic construct
  source 1..80: mol_type = other DNA
ctctggtgttagatgcatataagaatatagatttggataagcttaaaataatagcctatggtgatgatgtaatattctca

SEQ ID NO: 168108 - DNA, 80 bp, synthetic construct
  source 1..80: mol_type = other DNA
gcgcgcttctgggtcacagacattcggcgaacgtgacaaagcttgtggtaaacgagcgcaagacccgcctggacatactg

SEQ ID NO: 168109 - DNA, 80 bp, synthetic construct
  source 1..80: mol_type = other DNA
gtgagatgttcacgtacatgcgctttgacatcgagatgaccatggtaataactagctgccaagaccaaggaactcaacta

SEQ ID NO: 168110 - DNA, 80 bp, synthetic construct
  source 1..80: mol_type = other DNA
caatgaataatacccacactaaagatgaagttaagagctacctcataccactggttgcaaaccaacaaaatcagaaaatc

SEQ ID NO: 168111 - DNA, 80 bp, synthetic construct
  source 1..80: mol_type = other DNA
cgtaatcatcgaaaaggtcgcttggcacggtagtcagtttgaattagccatttcgaaagtcacagctggtggtgtcttca

SEQ ID NO: 168112 - DNA, 80 bp, synthetic construct
  source 1..80: mol_type = other DNA
ataccaggactttacacagaaatactatacaacccatacacagacaaaggcaaaggcaacaaagtatggctagaccccct

SEQ ID NO: 168113 - DNA, 80 bp, synthetic construct
  source 1..80: mol_type = other DNA
atattcatttatttcttttacctccacccttgcaaataacaggcatatactagggtggaggtagaacgatttctttgaga

SEQ ID NO: 168114 - DNA, 80 bp, synthetic construct
  source 1..80: mol_type = other DNA
gatgcggaaaagccagcaccaggcccagacagagcaagaaggtgcaggtgccctgcacggccacggtgctgtagacccgc

SEQ ID NO: 168115 - DNA, 80 bp, synthetic construct
  source 1..80: mol_type = other DNA
ccatcaccatttccatcagtccgatgtgtgctgaattctcgggggctagagcaagaaatcaaggtctgccagttatgtta

SEQ ID NO: 168116 - DNA, 80 bp, synthetic construct
  source 1..80: mol_type = other DNA
agaagtgttagtcgtgccagacacaaagccctcaggacctcaacacacaacaaaaccatcaatattgggtgccatggaga

SEQ ID NO: 168117 - DNA, 80 bp, synthetic construct
  source 1..80: mol_type = other DNA
ttgtcagtagggcacaccaattatgggagttgcttgactcaatgtttgaggaatttggaaacaatatgtacaatatagta

SEQ ID NO: 168118 - DNA, 80 bp, synthetic construct
  source 1..80: mol_type = other DNA
ataaacccattattgttggtccgccagtaaacagggcgtaccttttccccccgaagggtccccgtcccataaccacttct

SEQ ID NO: 168119 - DNA, 80 bp, synthetic construct
  source 1..80: mol_type = other DNA
gaaacggtggaaaggtacgggtaggctgtactcgatcaacgtcttaggcgccgtcacgacgcagcagccgttgtaaagca

SEQ ID NO: 168120 - DNA, 80 bp, synthetic construct
  source 1..80: mol_type = other DNA
gcgtacgccgcgctctcttcaccggcggcagcgacccctcggacagcgtgagcggcgtccgcggtggacgcaaacgcccg

SEQ ID NO: 168121 - DNA, 80 bp, synthetic construct
  source 1..80: mol_type = other DNA
ggtggttacacaaggaccacaggaggaatttgggagaagcttaattaaacataacacttgtgttgtaacaacaagcaatg

SEQ ID NO: 168122 - DNA, 80 bp, synthetic construct
  source 1..80: mol_type = other DNA
actgtttgacgagcacattaagtttagaaacaaatggagctatcctaatacagaactagaccttgccagatacaggggag

SEQ ID NO: 168123 - DNA, 80 bp, synthetic construct
  source 1..80: mol_type = other DNA
tgttgttgtggggtacggtgtgtggcccacctacctatctgatgatgaagccactgcagaagatcaaccaacgcagccag

SEQ ID NO: 168124 - DNA, 80 bp, synthetic construct
  source 1..80: mol_type = other DNA
tgttactagccgtactaatagcgattgcgatcatcctaaccggtatcctagttccggaaattttacatgaacgaaaaagg

SEQ ID NO: 168125 - DNA, 80 bp, synthetic construct
  source 1..80: mol_type = other DNA
acctgctctcaccgcagtggaaacgggagccacaaacccgttggttccatcggacacggtacagaccagacacgtcatac

SEQ ID NO: 168126 - DNA, 80 bp, synthetic construct
  source 1..80: mol_type = other DNA
gcaccgcggcagcggcggacttgatcgccagtaacaacgcgtcgaccgagcgccgcggcaagaagggcggttcgagttcc

SEQ ID NO: 168127 - DNA, 80 bp, synthetic construct
  source 1..80: mol_type = other DNA
attgacatcaaggagacacccgcaccagagtatattaatgaccttctacaatcagtggacagccaggagctcagggacta

SEQ ID NO: 168128 - DNA, 80 bp, synthetic construct
  source 1..80: mol_type = other DNA
cggcggagcacttccggcttgcccaaaatggcggtcaacctcttccgggtcaaaggtgagcagctacgtcataagtcacg

SEQ ID NO: 168129 - DNA, 80 bp, synthetic construct
  source 1..80: mol_type = other DNA
tgggcagtgcagttccgggaaaggcactgctggctagtgacttaactggagcagaggaacccatggagtttaagaacaca

SEQ ID NO: 168130 - DNA, 80 bp, synthetic construct
  source 1..80: mol_type = other DNA
gtcttggctaaattgggttttaaacactcatctctgatccaaacaatttgtcatacccaccacatattcaaagatgaaat

SEQ ID NO: 168131 - DNA, 80 bp, synthetic construct
  source 1..80: mol_type = other DNA
acaagcaagggtgaacaagacaatacaaacaacaatgcgctagtacaccaaatcatgtacatcccgcccgggggcccaat

SEQ ID NO: 168132 - DNA, 80 bp, synthetic construct
  source 1..80: mol_type = other DNA
gcacactaaagatgccatatacacatgtgcacacctcacccagcccaatgataacacgatcttgctggcactgacagcgg

SEQ ID NO: 168133 - DNA, 80 bp, synthetic construct
  source 1..80: mol_type = other DNA
catccaataaggccaacaggcacaacagcaccaacatcaggatttccaggcactgtatttaacacctttaaaacacaaga

SEQ ID NO: 168134 - DNA, 80 bp, synthetic construct
  source 1..80: mol_type = other DNA
ttggaaacacccattccaggtgtgcttctttttggtgaaataaaaacagcgttctttatatgaaaatgtgtattctcttg

SEQ ID NO: 168135 - DNA, 80 bp, synthetic construct
  source 1..80: mol_type = other DNA
ggggaatcagacagacacagacacgcgtcttctttgcgacgtgcgcggcgcacgtcgcttttattccccaccgcaccacc

SEQ ID NO: 168136 - DNA, 80 bp, synthetic construct
  source 1..80: mol_type = other DNA
acgcaactagagctgcgcaattcgtaccagatccccttcctggccaagcagttagtgctgtttctgcgtgcttgcctgct

SEQ ID NO: 168137 - DNA, 80 bp, synthetic construct
  source 1..80: mol_type = other DNA
cttcattaagtaatgaggacacagcgattagcttctcccgtacggagtctaacggtcagcacacggtacagactgcagtc

SEQ ID NO: 168138 - DNA, 80 bp, synthetic construct
  source 1..80: mol_type = other DNA
caggaccaggttgcagaccggaagccggggattaaagtattcatgccgggagacaaagagctgctcgctcaggctgttct

SEQ ID NO: 168139 - DNA, 80 bp, synthetic construct
  source 1..80: mol_type = other DNA
agcatataacacaaacaaccttctaaatgttgctaaagctttgttgccatgtactgattgcccaaaaccagaattttata

SEQ ID NO: 168140 - DNA, 80 bp, synthetic construct
  source 1..80: mol_type = other DNA
actgtcccagtgacacaagggttacccacacttgccactcctggttccaaccaatttctaacatcagacaactaccagtc

SEQ ID NO: 168141 - DNA, 80 bp, synthetic construct
  source 1..80: mol_type = other DNA
caatggtgaagaaccttacaaggaattcatatccaaaattaggaagacagaagtgggccgtagattgtatcttccaccat

SEQ ID NO: 168142 - DNA, 80 bp, synthetic construct
  source 1..80: mol_type = other DNA
aatccctggatatgcgaagaaccaaagcacgaatgggacacttctcataaaccgaccagtcacaaagatgatacaaccac

SEQ ID NO: 168143 - DNA, 80 bp, synthetic construct
  source 1..80: mol_type = other DNA
acacgtagtagaccccagatgggagaactacaagcaacaaaacaccaataacgttactaataaatacctaacggtatcta

SEQ ID NO: 168144 - DNA, 80 bp, synthetic construct
  source 1..80: mol_type = other DNA
ggggcgtcaagttcggccattccagaatctgtcatagaaactagatatgtggtgaatgacaatactaatgaagaagcaga

SEQ ID NO: 168145 - DNA, 80 bp, synthetic construct
  source 1..80: mol_type = other DNA
atggtaaaatgccaggaggtagtagtaatgtgcctattagaatgagagctaaatggtatccaacattatttcaccagcaa

SEQ ID NO: 168146 - DNA, 80 bp, synthetic construct
  source 1..80: mol_type = other DNA
cccctccgtggtgctgccgctgcggacgggcgtggtttacatcataatataagtagcagcacttccgaatggctgagttt

SEQ ID NO: 168147 - DNA, 80 bp, synthetic construct
  source 1..80: mol_type = other DNA
acgactttacggtgaggttacttaaagactccccccatgtgattcaaacaaatgcagtggtccaagggataggtgactcg

SEQ ID NO: 168148 - DNA, 80 bp, synthetic construct
  source 1..80: mol_type = other DNA
catgcatggaatgttcacacactggacaggcatgtttagcccagcctttttagactataacagactaagtccagaaattc

SEQ ID NO: 168149 - DNA, 80 bp, synthetic construct
  source 1..80: mol_type = other DNA
aaactatgccacccactcagacgacagctactaccctggaccctttggggggggaatgaccgcagacaaatttactctaa

SEQ ID NO: 168150 - DNA, 80 bp, synthetic construct
  source 1..80: mol_type = other DNA
ctgcacacccttattgggtgtgaagccagagattggacagggtgcgaagagcctactgtgctcaccttgagtcctccggc

SEQ ID NO: 168151 - DNA, 80 bp, synthetic construct
  source 1..80: mol_type = other DNA
ggctcgctgatcgttttggccatggccgaaggcttgggcgacatcaccccagctgattcttccacttggttcaacttccc

SEQ ID NO: 168152 - DNA, 80 bp, synthetic construct
  source 1..80: mol_type = other DNA
agcacttgatttgaacactagtgcaggttttccatatgtcaccatgggtatcaagaagagggatttgatcaataagcaaa

SEQ ID NO: 168153 - DNA, 80 bp, synthetic construct
  source 1..80: mol_type = other DNA
atgccacaacaatgagacagtggtactggactaaactaacacaaatgacagccacagtaccacacattaaccccacttat

SEQ ID NO: 168154 - DNA, 80 bp, synthetic construct
  source 1..80: mol_type = other DNA
cacgcgaagaacgtcacttaaagattacaatgtaacgggtctgccgaaaggctttgcggactcgtttaccggtaacgtag

SEQ ID NO: 168155 - DNA, 80 bp, synthetic construct
  source 1..80: mol_type = other DNA
cgccagctgggctataaccacacgcaaagttgctcagctgcgtaggaagctagaaatgttcacatacttgaggtttgatc

SEQ ID NO: 168156 - DNA, 80 bp, synthetic construct
  source 1..80: mol_type = other DNA
agacgagggctcaagctcgtctttacagacatcctccgactccgccagggagtccactggaaccccgagctcacatagag

SEQ ID NO: 168157 - DNA, 80 bp, synthetic construct
  source 1..80: mol_type = other DNA
aaacccaagggagtgacaaccactaggggcagtatcacactagtgaaatccaacaccggtcacgcgcaagtgaaaacgca

SEQ ID NO: 168158 - DNA, 80 bp, synthetic construct
  source 1..80: mol_type = other DNA
ccgcgagcaaataccgtgggacgacacgcacagtcgccgcgcaaacacccgcagaaagatcccctcagccctgccccgtt

SEQ ID NO: 168159 - DNA, 80 bp, synthetic construct
  source 1..80: mol_type = other DNA
tgggcgtgtaccggctgcacgttaatatcgatcacttttttctgccggccgtggtgtgcaatagcaactcctcgctggac

SEQ ID NO: 168160 - DNA, 80 bp, synthetic construct
  source 1..80: mol_type = other DNA
cttaaaaaaggcatgtttctcggtagggcttggagaaagaaaagggcactgctactgtctggcctgcgagctccaaagaa

SEQ ID NO: 168161 - DNA, 80 bp, synthetic construct
  source 1..80: mol_type = other DNA
cagatctacaagtggatagtgccagtgagccaggcccagattatattccaaattgtgattgcatcattggcacctactat

SEQ ID NO: 168162 - DNA, 80 bp, synthetic construct
  source 1..80: mol_type = other DNA
tattagggggtttctgcccctgttcttctgcggacaggtggcctaccacagaaactttacagaccactatgacgatgtgt

SEQ ID NO: 168163 - DNA, 80 bp, synthetic construct
  source 1..80: mol_type = other DNA
acaattactacacaaagcctagtaatatcttgataagctctttggttggtcgttcagctgttacccccagtagacttggc

SEQ ID NO: 168164 - DNA, 80 bp, synthetic construct
  source 1..80: mol_type = other DNA
gcagcccccactctattcacagacaagtggtacttttccaaagacgtttgtgacctaacattgctaaacttggacgttac

SEQ ID NO: 168165 - DNA, 80 bp, synthetic construct
  source 1..80: mol_type = other DNA
acatggttctgaataacacagccgcacgtgaagtaggtcggttctctcgtctcctccgtggctgccgccaccactcccag

SEQ ID NO: 168166 - DNA, 80 bp, synthetic construct
  source 1..80: mol_type = other DNA
agtggttttgtttccttgatagagacacaaggactgccagccccgttggggagggggtggtgggtacgggagaatttgtg

SEQ ID NO: 168167 - DNA, 80 bp, synthetic construct
  source 1..80: mol_type = other DNA
cacatcaaggcctgggttcctagaccacctcgcactatgccatatatgtccattgcaaatacaaattacacaggtcatag

SEQ ID NO: 168168 - DNA, 80 bp, synthetic construct
  source 1..80: mol_type = other DNA
gggacggtgtttccgcgcgctgccggtgcgttccacggtccttgggcgctgcgcttctcggtggttttggagcgttctgg

SEQ ID NO: 168169 - DNA, 80 bp, synthetic construct
  source 1..80: mol_type = other DNA
ttatgatggcaagtaactcagccgactccactggagggatcacgtacgagaaggccaatccaggcgaggcgggtggtaag

SEQ ID NO: 168170 - DNA, 80 bp, synthetic construct
  source 1..80: mol_type = other DNA
aaaatgcgtggtgtccggatacatacccctcctcatctgtggaacgggtaccaccggcaccacctacaaaaactatggca

SEQ ID NO: 168171 - DNA, 80 bp, synthetic construct
  source 1..80: mol_type = other DNA
tgtggctcaggctcaggttccggccctgggacggcagcagccgccgggacggtgaagtcgtggaaggtagaggcccgtcc

SEQ ID NO: 168172 - DNA, 80 bp, synthetic construct
  source 1..80: mol_type = other DNA
gtccgccttcagaagcatcgaccctacacgggcccggtccggcgccagggcttcgaccctgccgtcatgaagataatggc

SEQ ID NO: 168173 - DNA, 80 bp, synthetic construct
  source 1..80: mol_type = other DNA
aaaaatcctgacaactctgacaactcatccgatgcctctaccttcaataattgggtagaatccacatttaaaacaggcaa

SEQ ID NO: 168174 - DNA, 80 bp, synthetic construct
  source 1..80: mol_type = other DNA
ctcgcccatgtcacctatgggcacattcttgggcaacgcgttggaacagaccttctgccaaaactgtaagcaggggagac

SEQ ID NO: 168175 - DNA, 80 bp, synthetic construct
  source 1..80: mol_type = other DNA
agtggatctcagcagtttatgactacagaggatgaacaatcaccaaacattctacctgagtacagtccaactaaagttgt

SEQ ID NO: 168176 - DNA, 80 bp, synthetic construct
  source 1..80: mol_type = other DNA
ggcaaaaaccaccttggacagcttcttcagtagggcaggattggtaggagagatagatctccctcttgagggtaccacta

SEQ ID NO: 168177 - DNA, 80 bp, synthetic construct
  source 1..80: mol_type = other DNA
aattatgttattctaaacacattttcaaaacttcatattatgaggtagaagggggcatgccatcaggctgtgctggtact

SEQ ID NO: 168178 - DNA, 80 bp, synthetic construct
  source 1..80: mol_type = other DNA
attgtaaagaaaagaaatggttaataccagagataccaaccaatgtggaaagagcagttaatcaagcaacttcacttata

SEQ ID NO: 168179 - DNA, 80 bp, synthetic construct
  source 1..80: mol_type = other DNA
aaaaaatcacctaacaagggattcgtattctacgactccctatttggagacggcaaaatgtctgacggacggggacaagt

SEQ ID NO: 168180 - DNA, 80 bp, synthetic construct
  source 1..80: mol_type = other DNA
aaaaatgggacaagatgccaggttcttttgtccgactggctctgttgtcacattccaaaattcatggggttcacaaatgg

SEQ ID NO: 168181 - DNA, 80 bp, synthetic construct
  source 1..80: mol_type = other DNA
gattttcttcctatcatgaaagcccatgctatcttctgtggaatcataataaatggataccgagaccggcacgggggggc

SEQ ID NO: 168182 - DNA, 80 bp, synthetic construct
  source 1..80: mol_type = other DNA
acacaaccagacggactatggggagatgcagttttcgagactaaagatactactattattaccaaaaacatggaatcata

SEQ ID NO: 168183 - DNA, 80 bp, synthetic construct
  source 1..80: mol_type = other DNA
gactggtgtagcagagatgaggccgcctacagcccaacacaaagcaaatgcatgcttaaagacctgccactattcatact

SEQ ID NO: 168184 - DNA, 80 bp, synthetic construct
  source 1..80: mol_type = other DNA
ggcttaactagtgaaggaggggtttactctctaccccctgatccaaagcattttgatggttacaaccagcagcctgtggt

SEQ ID NO: 168185 - DNA, 80 bp, synthetic construct
  source 1..80: mol_type = other DNA
cttagcaaatcagaccccaggcttgaggagccagttgaatgcttaattaaaaagtctgcttcaaaatatagagttaacaa

SEQ ID NO: 168186 - DNA, 80 bp, synthetic construct
  source 1..80: mol_type = other DNA
ctacgaacaaataacacagcaactattgtagtaccatacatcaactcagtgccaattgactcaatgacacgccataacaa

SEQ ID NO: 168187 - DNA, 80 bp, synthetic construct
  source 1..80: mol_type = other DNA
accgggtccgctgggtccgctgccccgctccggcgggtggtgcggatgcgctcccaggccggaccctggtgccaggcagg

SEQ ID NO: 168188 - DNA, 80 bp, synthetic construct
  source 1..80: mol_type = other DNA
agaacagaaggatgcataagtcacccacaattaaaaaaaccaaacccacaaacaaacaaaccatcagacacagaatactt

SEQ ID NO: 168189 - DNA, 80 bp, synthetic construct
  source 1..80: mol_type = other DNA
ctgtctagctttattagccaaccaacctgaacccactataatagaagtgggtgatagttgttcttatggtaacatcctgc

SEQ ID NO: 168190 - DNA, 80 bp, synthetic construct
  source 1..80: mol_type = other DNA
ggagaagacgcggctggggcgtatggagaaagagacctagaagaacttttcgccgccgccgaggaagacgatatgtgagt

SEQ ID NO: 168191 - DNA, 80 bp, synthetic construct
  source 1..80: mol_type = other DNA
acaggacaaatttcacaatttgctaaaaggtaaccaaatctctacaatctttaacacatgtctcaaggacgagcttagga

SEQ ID NO: 168192 - DNA, 80 bp, synthetic construct
  source 1..80: mol_type = other DNA
gaactaaggagtgtagataaagttagattaggaaagagtagattgattgaagcatccagtctcaatgattcagttaacat

SEQ ID NO: 168193 - DNA, 80 bp, synthetic construct
  source 1..80: mol_type = other DNA
atccatgttctatttcttagtgataggggttttctcagagttggacatacatatgacactgagacaaacagaaccaattt

SEQ ID NO: 168194 - DNA, 80 bp, synthetic construct
  source 1..80: mol_type = other DNA
actcgggcccagtttctaactttttccccttccctccctcgtcttgccctgcgcctggggccaccttcatcaccgtcgct

SEQ ID NO: 168195 - DNA, 80 bp, synthetic construct
  source 1..80: mol_type = other DNA
gcaagtgggacattagcttccaagaacaggcccatatcagaaagaaaatggaatggtttacttatgtgagatttgacatg

SEQ ID NO: 168196 - DNA, 80 bp, synthetic construct
  source 1..80: mol_type = other DNA
cttgccgtcgccgcaaaagccctcctgtccccgtcctcaacgtaacccccggccgcagcgccacccccgtccctcagccc

SEQ ID NO: 168197 - DNA, 80 bp, synthetic construct
  source 1..80: mol_type = other DNA
agtcagattaggaaaaagcagattaatagaagcatctagtctgaatgattctgtgaacatgagggtcaagttaggtgagt

SEQ ID NO: 168198 - DNA, 80 bp, synthetic construct
  source 1..80: mol_type = other DNA
ttctaaatacaactttaaatttacctggggtggtaatcctatatttcaacagactgtcaaagacccctgtaaacaatcca

SEQ ID NO: 168199 - DNA, 80 bp, synthetic construct
  source 1..80: mol_type = other DNA
agtacagagtaggcctattcagtcccatctttctctcaccactcagaagcagcaacatagagtggcccttcgcatacagg

SEQ ID NO: 168200 - DNA, 80 bp, synthetic construct
  source 1..80: mol_type = other DNA
gcaaggatttctgcttgcgaatggctcgggatactaatttgcacacacagagtgggccaataacccagaatccagtggaa

SEQ ID NO: 168201 - DNA, 80 bp, synthetic construct
  source 1..80: mol_type = other DNA
tgtgttttgtgtcagcttgtaaagacttttgcttacgcatggctagggacacagatatgcacactcagagtgatgctatt

SEQ ID NO: 168202 - DNA, 80 bp, synthetic construct
  source 1..80: mol_type = other DNA
gtactgactcaatggaaccccagcacagtaagaaagtgctggatcagaggcatgtttcctatgctcatctgtggaaacac

SEQ ID NO: 168203 - DNA, 80 bp, synthetic construct
  source 1..80: mol_type = other DNA
gcactacagctatcacaaccaaccaggcctgcactacccccttctgagcaaagtgttccaaacaccagtcaaagcactcc

SEQ ID NO: 168204 - DNA, 80 bp, synthetic construct
  source 1..80: mol_type = other DNA
gtcaaccaactcggtgttgccttcggagatggtttctccagcaatatcaaggaccacttgacaggattgtgtacaaccat

SEQ ID NO: 168205 - DNA, 80 bp, synthetic construct
  source 1..80: mol_type = other DNA
cacactaaaccacatgggacaactgtacgtgagacatgtaaatggtccttcgccgctaccggtgactagtactgtaagag

SEQ ID NO: 168206 - DNA, 80 bp, synthetic construct
  source 1..80: mol_type = other DNA
ctctataaacaggtatatggattttagaattattttatttctggtccttgtaatacttacatttgtattaatgatttact

SEQ ID NO: 168207 - DNA, 80 bp, synthetic construct
  source 1..80: mol_type = other DNA
aactactactcctacaggcactaccattgaaaatgacccagctaccccacctaagaacacatggaatgctacaaaaacac

SEQ ID NO: 168208 - DNA, 80 bp, synthetic construct
  source 1..80: mol_type = other DNA
ttataacactacacaaacactagcacagctaaaaccatatgtagacaacatgcagtctgttaatgcaagtgaaacatggg

SEQ ID NO: 168209 - DNA, 80 bp, synthetic construct
  source 1..80: mol_type = other DNA
cacgggcgcacggggtcgcagcccgacggccgtggagaggcgcgtggcagagggccgaatctccgcggcttcttcccggc

SEQ ID NO: 168210 - DNA, 80 bp, synthetic construct
  source 1..80: mol_type = other DNA
agagtgtcagaataccaaccgcctgatgaccttttttcaacaggcgtcgcatccaaaagaccccgattcgacactccagt

SEQ ID NO: 168211 - DNA, 80 bp, synthetic construct
  source 1..80: mol_type = other DNA
ttataagaatattgatttagataagttgaggatcattgcatatggagatgatgttattgcatcttacccagagaagttag

SEQ ID NO: 168212 - DNA, 80 bp, synthetic construct
  source 1..80: mol_type = other DNA
aggggtatccagcccttgcgccgcctcccccagcccgccagccaccccagacaggagatgataatgatgaggagcaccgg

SEQ ID NO: 168213 - DNA, 80 bp, synthetic construct
  source 1..80: mol_type = other DNA
tggatctcttaggtttacctttttgttttgtgggagcatgatggcaaccggaaagttaatcttgacatactcacctccag

SEQ ID NO: 168214 - DNA, 80 bp, synthetic construct
  source 1..80: mol_type = other DNA
caagacccctccaccaacgtcagtcaggatgcgcccgtgttgactcaccaacttatgtacgttccaccagggggacccgt

SEQ ID NO: 168215 - DNA, 80 bp, synthetic construct
  source 1..80: mol_type = other DNA
actgataagcaaggagagcaggtatccagatacacaaaatggaagatcacgactcggcaagtagcccaactaaggaggaa

SEQ ID NO: 168216 - DNA, 80 bp, synthetic construct
  source 1..80: mol_type = other DNA
agcatcatcctaatcctaggaactgtttatgcattgtataagttgatgtgtatagcacaaggtccctatactggactgcc

SEQ ID NO: 168217 - DNA, 80 bp, synthetic construct
  source 1..80: mol_type = other DNA
cgcctcgcccatgtgtacgcagcctccattgcgttccagcctggccgcgcgccgcagaccgtgttcgtagcggcgacgca

SEQ ID NO: 168218 - DNA, 80 bp, synthetic construct
  source 1..80: mol_type = other DNA
agaaaatgttcttaacacattatacgagcaaaactcgtactgggaatctaacattactcccttttatgtaataaacgtta

SEQ ID NO: 168219 - DNA, 80 bp, synthetic construct
  source 1..80: mol_type = other DNA
ttagacaagatctttatgttaacacacaaggaatagaggatacaatagagaaagtagttggggatgcactcaaaatttca

SEQ ID NO: 168220 - DNA, 80 bp, synthetic construct
  source 1..80: mol_type = other DNA
ttgtcaaaatcttagtcaggattctatgttacatggtgttgtattgccacaaaccaaatattttaaccactgcttgtcta

SEQ ID NO: 168221 - DNA, 80 bp, synthetic construct
  source 1..80: mol_type = other DNA
tctgtccgattgttgaaagacaccccattcattgaacagagtgcactacttcaaggtgatgtggtagaggcaatcgagag

SEQ ID NO: 168222 - DNA, 80 bp, synthetic construct
  source 1..80: mol_type = other DNA
tagtatagcaggaatcatatatataatatacaaacttttttgctctctacaaggcccatactcaggggaacccaagccaa

SEQ ID NO: 168223 - DNA, 80 bp, synthetic construct
  source 1..80: mol_type = other DNA
cgggttacacagtccatgtgcaatgcaatgctagtaagtttcatcagggaacacttgtaattgcagccattcctgaacac

SEQ ID NO: 168224 - DNA, 80 bp, synthetic construct
  source 1..80: mol_type = other DNA
ccctcccagcaattccgtgtaagcttcaaactaggctttcaataaaaacaggcaaggcctttcaactttcacttgtcggt

SEQ ID NO: 168225 - DNA, 80 bp, synthetic construct
  source 1..80: mol_type = other DNA
ctttctgaaacggggtttcaaacaagatgacagatataaattcttagtacacccaatttatccagaaagtgaagtttggg

SEQ ID NO: 168226 - DNA, 80 bp, synthetic construct
  source 1..80: mol_type = other DNA
tgtgccctacagctacaactttggaaagggcaaaatgcccggaggaaacccagtaccttctctctggatgagagtacact

SEQ ID NO: 168227 - DNA, 80 bp, synthetic construct
  source 1..80: mol_type = other DNA
ttacaatcactgtcgcacccatggatgccgagtacaacggcttacgactagcagggcatcaaggattgccaaccatgaac

SEQ ID NO: 168228 - DNA, 80 bp, synthetic construct
  source 1..80: mol_type = other DNA
acatacaaatgcctactaaaaatccagatggcacagctaacacagaagccactacatttaatcagtgggcaaactccaca

SEQ ID NO: 168229 - DNA, 80 bp, synthetic construct
  source 1..80: mol_type = other DNA
ataaataatgtgaatcagtctcatacactgggagtttactacatcacaatatcaaacgtgagcagtgagaggaaaatact

SEQ ID NO: 168230 - DNA, 80 bp, synthetic construct
  source 1..80: mol_type = other DNA
cggaaggtggctttatcacattgtggtaccagacagcgtttgtatccaacggagccacgggggctataatggtcacatgc

SEQ ID NO: 168231 - DNA, 80 bp, synthetic construct
  source 1..80: mol_type = other DNA
gagtatctctcttagagcgaacaaaataatcaaaaaacaacagctaggaaatcgagggttactctacgataaagtgtctc

SEQ ID NO: 168232 - DNA, 80 bp, synthetic construct
  source 1..80: mol_type = other DNA
tgatgggttctgcggtcggttgacgtccatcgccacgaattcccactacactatgttcgtgttagatcacggatccgtgc

SEQ ID NO: 168233 - DNA, 80 bp, synthetic construct
  source 1..80: mol_type = other DNA
tgggagaatactacaccacgaatacagacgagaccaagagatttgccaattggacaattaacgcaagacgtatggtgcag

SEQ ID NO: 168234 - DNA, 80 bp, synthetic construct
  source 1..80: mol_type = other DNA
cggtagttaaaagatgcaccataaggggctacatacccctcatagtgtgtggcacaggcaccactggaactactagtctg

SEQ ID NO: 168235 - DNA, 80 bp, synthetic construct
  source 1..80: mol_type = other DNA
cagatatggatgctacatcagtagacaaacccactcatcctgaaacatcagctgatcgcttctacacccttgccagtgtt

SEQ ID NO: 168236 - DNA, 80 bp, synthetic construct
  source 1..80: mol_type = other DNA
gtgaggatctacatgagaatcaagcatgtcaaggcttgggtcccgaggccccttaggagccagaaatacttgcttaaaaa

SEQ ID NO: 168237 - DNA, 80 bp, synthetic construct
  source 1..80: mol_type = other DNA
catagttcccaaaagaaaagacatctcaacctatggatttggaccaagatttggtggtgtgagtacagggagtataaaaa

SEQ ID NO: 168238 - DNA, 80 bp, synthetic construct
  source 1..80: mol_type = other DNA
aggtttcagttccttttatgtcccctgcagcagcttaccagtggttctatgacggttatcccacttttggagcacacccc

SEQ ID NO: 168239 - DNA, 80 bp, synthetic construct
  source 1..80: mol_type = other DNA
ccttggctgaagcgctaactaacccagcactcatgtcacccagtattgaggcttgtggattctctgataggctcaaacaa

SEQ ID NO: 168240 - DNA, 80 bp, synthetic construct
  source 1..80: mol_type = other DNA
gagtaatctctgcaatggttataataattagaaactcttctgatccacaaacaattatagccacattgaccttaatcgga

SEQ ID NO: 168241 - DNA, 80 bp, synthetic construct
  source 1..80: mol_type = other DNA
acaagaaagtgctaatgtggttgtggggtacggagagtggccatcttacctgagtgacaaggaagcaactgctgaggacc

SEQ ID NO: 168242 - DNA, 80 bp, synthetic construct
  source 1..80: mol_type = other DNA
tcaaagcctgggtacctaggccaccgcgcctgtgcaagtacctcaagtccagtaacgtcaattttgagcccacggactta

SEQ ID NO: 168243 - DNA, 80 bp, synthetic construct
  source 1..80: mol_type = other DNA
accttccaatgtggatgtcctgctttggcctagtagactggtgtaaaaaagaaacaggcaactggggaataccagcctgg

SEQ ID NO: 168244 - DNA, 80 bp, synthetic construct
  source 1..80: mol_type = other DNA
gacgggtttgcacgtgttcccattaaggacgaatcaaccgacagcggggatacgtattatggtcaaacatcgatcaatga

SEQ ID NO: 168245 - DNA, 80 bp, synthetic construct
  source 1..80: mol_type = other DNA
gagataagtaccgtttgggcacagtgtacacgttatgccactattctctgtacacacttttgtaactttttgtcctgatc

SEQ ID NO: 168246 - DNA, 80 bp, synthetic construct
  source 1..80: mol_type = other DNA
tccaacccgtccatcttttacacctatggatgtgcccctgctcgtatttcaatcccctatgttggaattgccaatgctta

SEQ ID NO: 168247 - DNA, 80 bp, synthetic construct
  source 1..80: mol_type = other DNA
ctactgccaccagaaccacaccagccccggtctgggagaagagccccttgtgtctacaccgctgacctagacatagaaag

SEQ ID NO: 168248 - DNA, 80 bp, synthetic construct
  source 1..80: mol_type = other DNA
ctggcacagtgcatacacctatgtcagatacaacccaatgtcagacaagggcataggtaatataatttgcatacaatggt

SEQ ID NO: 168249 - DNA, 80 bp, synthetic construct
  source 1..80: mol_type = other DNA
acaatacaggatcagcgcaagcagcagacagtattagacaaactataaaaaataacatggactcctattttaaaaagata

SEQ ID NO: 168250 - DNA, 80 bp, synthetic construct
  source 1..80: mol_type = other DNA
agctagagctgtgcggctgcttcgacaggccgcccaggaacaacccctacgaccaccccttctacccctggctgcccaaa

SEQ ID NO: 168251 - DNA, 80 bp, synthetic construct
  source 1..80: mol_type = other DNA
acaacccagactatggctatgtaccattttcctacaaatttggcgagggccgaatgccagacggcagctcctacgtccct

SEQ ID NO: 168252 - DNA, 80 bp, synthetic construct
  source 1..80: mol_type = other DNA
gcgacgctgcagaatcagaggcatgatgccctttatatgggccggggcaggtaccgaaggtagaaactatgcggttcgct

SEQ ID NO: 168253 - DNA, 80 bp, synthetic construct
  source 1..80: mol_type = other DNA
cgcactgtggatggccggacttcaaagcatccaagtgatgataattggcttaattttgatggcaccctactaggtaatgt

SEQ ID NO: 168254 - DNA, 80 bp, synthetic construct
  source 1..80: mol_type = other DNA
tatatttcaaacccaaacacgtccgcgcatgggtgcctcgtccgcccaggttgtgcccgtacaagaacaaggcgaatgtg

SEQ ID NO: 168255 - DNA, 80 bp, synthetic construct
  source 1..80: mol_type = other DNA
ctcccggcaccccgaggccacttcgagcactcccggcaccgccggcacctgaaccgccgccacggcgtggtggagatata

SEQ ID NO: 168256 - DNA, 80 bp, synthetic construct
  source 1..80: mol_type = other DNA
ccccccacagaaggagagcaagaaagccaaaggcaagaaagaagctccagttcagaggaagaaagcatccttatctcgca

SEQ ID NO: 168257 - DNA, 80 bp, synthetic construct
  source 1..80: mol_type = other DNA
gaggagtcatgccagacgggagcaaatacgtacctataggcctcagacacaagtggtaccccacaatgctaaaccaacag

SEQ ID NO: 168258 - DNA, 80 bp, synthetic construct
  source 1..80: mol_type = other DNA
atatattgaacaaaaccaccaaggacaccaccaaactagcaaaattgatggaagagtatggcatcgatttgccatacgtt

SEQ ID NO: 168259 - DNA, 80 bp, synthetic construct
  source 1..80: mol_type = other DNA
ggagtgcgaccccctgccctggtgcaacgccctcggagtccggcgctacgcgcttcgcgctgcgccggacacctcggacc

SEQ ID NO: 168260 - DNA, 80 bp, synthetic construct
  source 1..80: mol_type = other DNA
atacagaaaataatagacaacgcagacaactacttaaaaaaagtaaaacaagaattctcacaaactaccctagcaaccac

SEQ ID NO: 168261 - DNA, 80 bp, synthetic construct
  source 1..80: mol_type = other DNA
aaagatggaccaaaaatcagacaatggccactatccaaagaaaagatactggccctcaaagaaatctgtgaaaaaatgga

SEQ ID NO: 168262 - DNA, 80 bp, synthetic construct
  source 1..80: mol_type = other DNA
ggtaggagacacagacccaaactcataataagacagtggcagccagagattgtcagaaaatgccttataataggctattt

SEQ ID NO: 168263 - DNA, 80 bp, synthetic construct
  source 1..80: mol_type = other DNA
caggcgcagcctccacccccgggcacacaggcccccgaagcccactgtgtggccgagtccacgatccctgaggcgggagc

SEQ ID NO: 168264 - DNA, 80 bp, synthetic construct
  source 1..80: mol_type = other DNA
ccaaggtctcatccatggaagcctacagagttgaattgagtaccaacactgatgcagggactcaagtttttggcttccaa

SEQ ID NO: 168265 - DNA, 80 bp, synthetic construct
  source 1..80: mol_type = other DNA
caactcggaaagatcgatcttcaagccggcgcaaacatgtgtaaggtcaacgcactattctatgacagcacgacaagatc

SEQ ID NO: 168266 - DNA, 80 bp, synthetic construct
  source 1..80: mol_type = other DNA
ttagggaggacactgccaaggttgaagagcagatttccgtcagccagggtgacctggctcaggtccggcgccctgcgcag

SEQ ID NO: 168267 - DNA, 80 bp, synthetic construct
  source 1..80: mol_type = other DNA
gtacttaatctgaccaataggcagtagtaatccatactacttacggtcaagcacttctgttaccccggtatgcggagaat

SEQ ID NO: 168268 - DNA, 80 bp, synthetic construct
  source 1..80: mol_type = other DNA
gtgtcaaatatgggttgacaattacaccagcagacaaatcagataagttccaaaaactcacttatgagaatgccactttt

SEQ ID NO: 168269 - DNA, 80 bp, synthetic construct
  source 1..80: mol_type = other DNA
cgtggggagggcggcgtgtaacccggaagtcatcctcgtcacgtgacctgacgtcacggccgccattttgtgctgtccgc

SEQ ID NO: 168270 - DNA, 80 bp, synthetic construct
  source 1..80: mol_type = other DNA
ttttcgctcatgtgaagtgtcccagcctgtttatctacggcttaaaaagtgttcgaggggaaaataggttgcgcgagatt

SEQ ID NO: 168271 - DNA, 80 bp, synthetic construct
  source 1..80: mol_type = other DNA
aacatcttttgttcaatgattggagaattaatctgtccagcttggtacaactcagaaagaagcttgaactttttacctat

SEQ ID NO: 168272 - DNA, 80 bp, synthetic construct
  source 1..80: mol_type = other DNA
tggaacgactatacatggcaaagtgcatcaaatcccagtgtgtttttcaaggtgggtagcacagctaggtttagtgtacc

SEQ ID NO: 168273 - DNA, 80 bp, synthetic construct
  source 1..80: mol_type = other DNA
gatttgtatgtgcatgtgggaaatcttgtgtacaggaatctacacttgtttaattcagaagccaatgattcagtgctgat

SEQ ID NO: 168274 - DNA, 80 bp, synthetic construct
  source 1..80: mol_type = other DNA
ctctctgttgggaggttctgcggtggtacttgtagtgggtctatcactggcagccattgttgccatatatatattcacac

SEQ ID NO: 168275 - DNA, 80 bp, synthetic construct
  source 1..80: mol_type = other DNA
atagctcaagccccagttctgtacactgcatagtccaaggcagattaggcaatgatgccaagttcttttgtccagcaggc

SEQ ID NO: 168276 - DNA, 80 bp, synthetic construct
  source 1..80: mol_type = other DNA
actggtgctcatggagcagagactatacctcattgtaattgtacctctggtgtttattattccacctattatagaaaatt

SEQ ID NO: 168277 - DNA, 80 bp, synthetic construct
  source 1..80: mol_type = other DNA
cctacttagaaagaatatagtaactgtcaccactagcaagggtgaattcactggtcttggtatttatgatagaattttag

SEQ ID NO: 168278 - DNA, 80 bp, synthetic construct
  source 1..80: mol_type = other DNA
tctactcaaccaccctcgtggaaacactaggctccacacgggcacccatagcctccgagccctccacatcaaattccacc

SEQ ID NO: 168279 - DNA, 80 bp, synthetic construct
  source 1..80: mol_type = other DNA
ggagcacaatcacatagctgatggacgttggttgatccgttgattcccatggacattttaacggcgacagtacagctccc

SEQ ID NO: 168280 - DNA, 80 bp, synthetic construct
  source 1..80: mol_type = other DNA
ccccagcaattgttgatcttcttaagtctgttagaaacccagatgttattaagtactgtgaagataacaaatgggtagtt

SEQ ID NO: 168281 - DNA, 80 bp, synthetic construct
  source 1..80: mol_type = other DNA
aaagaagacgcgtgtctgtgtagaggaagttcccaggggacggcagcgcgggtccctggggacacacgaaaagcaacggc

SEQ ID NO: 168282 - DNA, 80 bp, synthetic construct
  source 1..80: mol_type = other DNA
ctacatgtttcaaaaaacttgattatagtaatgtaacatttttaaagagggggttcaagcaggatgaaaaacaccaattt

SEQ ID NO: 168283 - DNA, 80 bp, synthetic construct
  source 1..80: mol_type = other DNA
tcctgagtgcgggtgccggaggtgagtttacacaccgaagtcaaggggcaattcgggctcaggactggccgggctttgcg

SEQ ID NO: 168284 - DNA, 80 bp, synthetic construct
  source 1..80: mol_type = other DNA
tctatcggacaacgtattgttgatgagtttaggaagttaggaatgacagctacatcagctaataagtctgttccccaatt

SEQ ID NO: 168285 - DNA, 80 bp, synthetic construct
  source 1..80: mol_type = other DNA
gctgctttgcgtgatgatgacattcatcatgtatttccattcacacataccttttgtgcatacggtttatatatgaccat

SEQ ID NO: 168286 - DNA, 80 bp, synthetic construct
  source 1..80: mol_type = other DNA
ctccagaggccggttcctcgccccttccccgggcttcagagcccaggatgtcccccagaagggaccctaggcgtcccctc

SEQ ID NO: 168287 - DNA, 80 bp, synthetic construct
  source 1..80: mol_type = other DNA
agaccgatgacgcgcctttctccgcaaaagcccgtgcacacggtgatgccggtgttgatcagcaggcatgccaccgtgag

SEQ ID NO: 168288 - DNA, 80 bp, synthetic construct
  source 1..80: mol_type = other DNA
atatatgctaactctttaaacaatacatcaaatggaagtaataataacttaccaacaatagatagtatagcacaaattat

SEQ ID NO: 168289 - DNA, 80 bp, synthetic construct
  source 1..80: mol_type = other DNA
agtagaccccataataaaaatactagtagagaacatgaaaacataccaccaaaaatttatagacgagggttttccaacct

SEQ ID NO: 168290 - DNA, 80 bp, synthetic construct
  source 1..80: mol_type = other DNA
aagacacactagatgaaaaccacctaccagacattgataatttacttgatcatgctgcctcaggggatccaacactacca

SEQ ID NO: 168291 - DNA, 80 bp, synthetic construct
  source 1..80: mol_type = other DNA
acccaatgtttttccatcaactagaactcttagaagagcttgttcagtctggaccgtttgcatacaagggcgacgaaaaa

SEQ ID NO: 168292 - DNA, 80 bp, synthetic construct
  source 1..80: mol_type = other DNA
ttgctaatgcatactcacacttttatgatggctttgcacgggtgccgttgaaagatgaaaccacagactctggtgatacc

SEQ ID NO: 168293 - DNA, 80 bp, synthetic construct
  source 1..80: mol_type = other DNA
tatcttcttgccattggatagtgaaggggtcgccatagacttcgacctcaattttagggtccaaaaactaccaaaatggc

SEQ ID NO: 168294 - DNA, 80 bp, synthetic construct
  source 1..80: mol_type = other DNA
tactcttggaattatatattactcctcaactgtgagaaatggggtcacaagtctctactcagcgatccgggtcgcatgag

SEQ ID NO: 168295 - DNA, 80 bp, synthetic construct
  source 1..80: mol_type = other DNA
ctatatgggctaatttacagttggataataacgggtttaagaagtggagcataaacttccaagagcaggcacaaatcagg

SEQ ID NO: 168296 - DNA, 80 bp, synthetic construct
  source 1..80: mol_type = other DNA
acgaggacctagacttagctagattcctaggatcaagatggacattttacagacacccagaagtagactttatagtaacc

SEQ ID NO: 168297 - DNA, 80 bp, synthetic construct
  source 1..80: mol_type = other DNA
aaagtactatgggacgagcaccaaaaatttcagaacaggtggtcctatccaaacacacagctagacctagccaggtacag

SEQ ID NO: 168298 - DNA, 80 bp, synthetic construct
  source 1..80: mol_type = other DNA
attacacacttggagatgatgatgtggttgtgcaacccagatcaactttaacaacagctggaccaagtgacatgtatgtc

SEQ ID NO: 168299 - DNA, 80 bp, synthetic construct
  source 1..80: mol_type = other DNA
aattttagcttatggagatgatttgattgtttcttatccatatgaactcaatccagaagtgttagcaacccttggtaaaa

SEQ ID NO: 168300 - DNA, 80 bp, synthetic construct
  source 1..80: mol_type = other DNA
ggtcgttgtgttcaacttctaagttacatgggggtggggatttaaaactgggtccaggttgttcccacctggatctccta

SEQ ID NO: 168301 - DNA, 80 bp, synthetic construct
  source 1..80: mol_type = other DNA
tggggaccaggctgcgggacggggggtgttgcgaagacggggattacgtagaggccggggcgttgcggggccgagggtta

SEQ ID NO: 168302 - DNA, 80 bp, synthetic construct
  source 1..80: mol_type = other DNA
tgcccactgcgaactccaccgaagactcgcaggactatgagctggcgccccccggtccacaatggcgcaggaatcgaccg

SEQ ID NO: 168303 - DNA, 80 bp, synthetic construct
  source 1..80: mol_type = other DNA
ctcagactgccccctggtcatggactccacgtacgagcagagaacagtcctctgctcgtcggtggccgcctgtagccccc

SEQ ID NO: 168304 - DNA, 80 bp, synthetic construct
  source 1..80: mol_type = other DNA
aggacgatatgtgagtaggcggaggcgccgccgctactacaggcgcagactgagacggggcagacgcagagggcgacgaa

SEQ ID NO: 168305 - DNA, 80 bp, synthetic construct
  source 1..80: mol_type = other DNA
gtcactataatatcaccatacacacaaccaccactaacagataaaaccaacaccgacatgggttttgttccttttgacta

SEQ ID NO: 168306 - DNA, 80 bp, synthetic construct
  source 1..80: mol_type = other DNA
acagcacacacctatgggtgaacctataactggaaaaccattaacaggaattactatcgagaaaaatccaaaagttaccc

SEQ ID NO: 168307 - DNA, 80 bp, synthetic construct
  source 1..80: mol_type = other DNA
gctctttgctacatggaagattagttatcttgatatgtatcaattgagaagaaaattggaattcttcacatactccagat

SEQ ID NO: 168308 - DNA, 80 bp, synthetic construct
  source 1..80: mol_type = other DNA
agccagaagataccatagaaaccaggtatgtacaatcatctcaaacattagatgaaatgagtgtagaaagtttcttaggt

SEQ ID NO: 168309 - DNA, 80 bp, synthetic construct
  source 1..80: mol_type = other DNA
tcagtcaattctgtggtggaacaacttcgcaatgaaaatgatgtcaggagaaaggtcaaacataatctaaatgccatttt

SEQ ID NO: 168310 - DNA, 80 bp, synthetic construct
  source 1..80: mol_type = other DNA
ggaagataaatctcaaggaaatggcccaaattagaagaaaaaatgaacttttcacctatttaaggtttgattcagaaatt

SEQ ID NO: 168311 - DNA, 80 bp, synthetic construct
  source 1..80: mol_type = other DNA
tattactaattgcattaataccgattgcaattatcctaactggaactctagtgccggtaattttacatgaacaaaaaaag

SEQ ID NO: 168312 - DNA, 80 bp, synthetic construct
  source 1..80: mol_type = other DNA
cagggagctaactggaaagactattataaagaatttttacaaaaagcactaccaaatgacagagcagcaaacagactaaa

SEQ ID NO: 168313 - DNA, 80 bp, synthetic construct
  source 1..80: mol_type = other DNA
aattggccgccctagatgcatgctcgacctgcaggcggccgctttacttgtacagctcgtccatgccgagagtgatcccg

SEQ ID NO: 168314 - DNA, 80 bp, synthetic construct
  source 1..80: mol_type = other DNA
agtaaaagatgttttggagaaagggataccaactttacaatcacccacagtggaggcttgtggttattcagataggatca

SEQ ID NO: 168315 - DNA, 80 bp, synthetic construct
  source 1..80: mol_type = other DNA
taaagctgctatttgaccagaacctcagaggactgaacagatggacctctagcaacgaccagctagacctagccaggtac

SEQ ID NO: 168316 - DNA, 80 bp, synthetic construct
  source 1..80: mol_type = other DNA
gatgactatacacatgcaggttatgtaaccttgtggtatcaaacagacttcataaccacctcaaataatgtgggagaaat

SEQ ID NO: 168317 - DNA, 80 bp, synthetic construct
  source 1..80: mol_type = other DNA
ggaggaagagcttactttacactacaagaataaggtctttcctattgaaaacccgtcagtgacacaagtaacgcttggtg

SEQ ID NO: 168318 - DNA, 80 bp, synthetic construct
  source 1..80: mol_type = other DNA
ttgccattggatagtgtagggggtcgccataggcttcggcctcagtttcaggccttccggactacaaaaatggcgaatct

SEQ ID NO: 168319 - DNA, 80 bp, synthetic construct
  source 1..80: mol_type = other DNA
acaccagcgctaacagccgtagagacaggggccaccaacccattggtgccttcagacacggtacaaactcgtcacgtcat

SEQ ID NO: 168320 - DNA, 80 bp, synthetic construct
  source 1..80: mol_type = other DNA
gcgcgcgagctccgggcgttgctcttcgcgtgtctgccgtccctcttttccgcgtcttgtctcttcgtgtgtccccaggg

SEQ ID NO: 168321 - DNA, 80 bp, synthetic construct
  source 1..80: mol_type = other DNA
cctactacggaggttgttgtatggtgggcgggggtaatcgtgcgtatgtgatactcgtgagcggttacgagaccgccagc

SEQ ID NO: 168322 - DNA, 80 bp, synthetic construct
  source 1..80: mol_type = other DNA
atggttatgataaccaggacatccatctaatagatgacttgggccaaacaaggaaggaaaaagatattgaaatgctatgc

SEQ ID NO: 168323 - DNA, 80 bp, synthetic construct
  source 1..80: mol_type = other DNA
gaggcgccgccgaccagtatggagacgccgacctagacgccctgttcgccgccgtcgaagaagacaacgaacagtaagga

SEQ ID NO: 168324 - DNA, 80 bp, synthetic construct
  source 1..80: mol_type = other DNA
ggcccggtccatggccaatcttacttttaagcaacgaagaagtaatccacctgacggaccacctgctaagaggaggcgta

SEQ ID NO: 168325 - DNA, 80 bp, synthetic construct
  source 1..80: mol_type = other DNA
cactctttagaaaagaatttggaatacacacaatattgcttaaattgtttaggcagtttaatacttattttaggaaccat

SEQ ID NO: 168326 - DNA, 80 bp, synthetic construct
  source 1..80: mol_type = other DNA
ctattaactatagccttgtgcctggtccccactagtcgaaggcatcttgcaataagataagtggaataaggacgcttaaa

SEQ ID NO: 168327 - DNA, 80 bp, synthetic construct
  source 1..80: mol_type = other DNA
ccaagtgggagtttctgttacatcaagagtaccactaagaccaatgacctacaagttggcagtagatatgtcacatttta

SEQ ID NO: 168328 - DNA, 80 bp, synthetic construct
  source 1..80: mol_type = other DNA
tcttgcttatcctcctgctactgctgtacccctacctaacccagatgaaccctcaaaaccaagcccctcgggtgaccgaa

SEQ ID NO: 168329 - DNA, 80 bp, synthetic construct
  source 1..80: mol_type = other DNA
atatcagagacctttatgcgtacgaagatgaggccatggagcagggtatatctaattacatcgaatcactaggtgccgcc

SEQ ID NO: 168330 - DNA, 80 bp, synthetic construct
  source 1..80: mol_type = other DNA
gaacaaccatggagcgtttggccaccaatcaggtgctgtatatgtaggaaactacagggtgataaatagacacctagcca

SEQ ID NO: 168331 - DNA, 80 bp, synthetic construct
  source 1..80: mol_type = other DNA
agaactattcacctatattagatttgacatggaagtaacaatagtcaccaacaatcaaggtctcatgcaaatactatacg

SEQ ID NO: 168332 - DNA, 80 bp, synthetic construct
  source 1..80: mol_type = other DNA
cggagtacaaaagacgacttcactgagggtggctacataacggccttctaccagaccgccattgtggtcccagcaggcgc

SEQ ID NO: 168333 - DNA, 80 bp, synthetic construct
  source 1..80: mol_type = other DNA
tagggaacaagacccaagatcaagtatttggagtgagattgcagcctggactagacagtgtcttcaaacacacactactt

SEQ ID NO: 168334 - DNA, 80 bp, synthetic construct
  source 1..80: mol_type = other DNA
gggtgctattttcactatggaattaaattactgacattagacagtggacaccgggctatatgtggggatgtctgtggctt

SEQ ID NO: 168335 - DNA, 80 bp, synthetic construct
  source 1..80: mol_type = other DNA
gtcccctggacctgccgctggcggactacgccttcgttgcccacagtcaggtctggaccaggcccggtggggctcctccc

SEQ ID NO: 168336 - DNA, 80 bp, synthetic construct
  source 1..80: mol_type = other DNA
tttttggaatgaacaacggaaacctgcatatggccaggccaaatattttgctgctgttagatgcggcttccatttccaag

SEQ ID NO: 168337 - DNA, 80 bp, synthetic construct
  source 1..80: mol_type = other DNA
gcaaataagtttcaaacaggaaaatccagcttatatggctttaatacatacaagcctgacgaaagcaacttaaaagaggc

SEQ ID NO: 168338 - DNA, 80 bp, synthetic construct
  source 1..80: mol_type = other DNA
tgatggactggttctcatgcaaaattaagtctatgctaagctttgttgagaggaacaaggcttggcttacagtagtttca

SEQ ID NO: 168339 - DNA, 80 bp, synthetic construct
  source 1..80: mol_type = other DNA
tatagagaacttcctgtgtaggtcagcttgtgtacatatagccaaatacgaggctagcgcgaatgcaaacaatgaggata

SEQ ID NO: 168340 - DNA, 80 bp, synthetic construct
  source 1..80: mol_type = other DNA
tacgtcactaaccacgtgcactccacaggccagtagaagtctatgtcgtgcacttcctgggcgtggtttacgtcctcata

SEQ ID NO: 168341 - DNA, 80 bp, synthetic construct
  source 1..80: mol_type = other DNA
aaccactgcagagacaaacaccattatatggcacaaaacagacataccaaatggaaatacatttggcagatggaacggac

SEQ ID NO: 168342 - DNA, 80 bp, synthetic construct
  source 1..80: mol_type = other DNA
ggacaggaatttgacaaaacttaagtgtgccattgaaaaatatggcctagatttacccatgataacttttttaaaagatg

SEQ ID NO: 168343 - DNA, 80 bp, synthetic construct
  source 1..80: mol_type = other DNA
ttttgtcattcttatcttgctcagtgtacttatatatatgcaagtagcatatatataagtacacaacttactacctcaac

SEQ ID NO: 168344 - DNA, 80 bp, synthetic construct
  source 1..80: mol_type = other DNA
tgcctcgaccaccacggttgtgcccctacattaatagtggcaatgtgaatttcgatccaaaacccgtgacagaggttagg

SEQ ID NO: 168345 - DNA, 80 bp, synthetic construct
  source 1..80: mol_type = other DNA
atgggagctcaagtatcttcacaaaaagttggcgctcatgagaacactaacgtggccactggtggatcaaccgtgaatta

SEQ ID NO: 168346 - DNA, 80 bp, synthetic construct
  source 1..80: mol_type = other DNA
gacagtggcctttatctaaggaaaaattagaagcattaaaagagatatgtgagaaaatggaaaaggagggacaattggaa

SEQ ID NO: 168347 - DNA, 80 bp, synthetic construct
  source 1..80: mol_type = other DNA
gacgtcagtgtcaaaggtcatcctcgggcggaacttacatgaaatggcggtcaacctcttccgggtcaaaggtcggcgcc

SEQ ID NO: 168348 - DNA, 80 bp, synthetic construct
  source 1..80: mol_type = other DNA
gcgtacatgacaatgttgcagtgctgcccacacacgcatcaccaggtgaaaccattgtcattgatggcaaagaggttaaa

SEQ ID NO: 168349 - DNA, 80 bp, synthetic construct
  source 1..80: mol_type = other DNA
tgtatgtaataaaagcacaaactacaactggtacacctacaaagcaagtgcagtaaaggagacactacattcaatgagaa

SEQ ID NO: 168350 - DNA, 80 bp, synthetic construct
  source 1..80: mol_type = other DNA
ttatgcacattagggcagctaaggcctatagtaagtcaggtaagcttaatgtcagtcaagcaatgtcaatcatgtcaact

SEQ ID NO: 168351 - DNA, 80 bp, synthetic construct
  source 1..80: mol_type = other DNA
aaccagaaccttctacgtgcacttcctgggctgggtctatgagagcatataactaaatgcacttccgaatggctgagttt

SEQ ID NO: 168352 - DNA, 80 bp, synthetic construct
  source 1..80: mol_type = other DNA
gaacaacaacaggaaaaatagaggtctatcttagtctgaggtgtccaaatttcttttttcctcttcccgcacctaaagtt

SEQ ID NO: 168353 - DNA, 80 bp, synthetic construct
  source 1..80: mol_type = other DNA
cccgccaccagacgcagatgcaccataacggggtacctccccatagtgttctgcggccacaccaagggcaataaaaacta

SEQ ID NO: 168354 - DNA, 80 bp, synthetic construct
  source 1..80: mol_type = other DNA
acccattactctcgctgttgtccacttctatgtggcaaggcagttgttttggttaacaggaaaacacaggttagttatag

SEQ ID NO: 168355 - DNA, 80 bp, synthetic construct
  source 1..80: mol_type = other DNA
acctacttaaacacggaagtaggccccgacacgtcactgtcacgtgacagtgcgtcacagccgccattttgtataacaaa

SEQ ID NO: 168356 - DNA, 80 bp, synthetic construct
  source 1..80: mol_type = other DNA
tgtgtggtactgtgttttgtgtcagcatgcaatgatttttccgtgcgtatgctacgtgacactccattcatcggacagac

SEQ ID NO: 168357 - DNA, 80 bp, synthetic construct
  source 1..80: mol_type = other DNA
ttgaagaagtagctctccttgaacctctttttaaggctccggcaccactgcaagaattgactcatatgctccgccgtgac

SEQ ID NO: 168358 - DNA, 80 bp, synthetic construct
  source 1..80: mol_type = other DNA
aaaagccccctggtcttccctgctgagcttgatctcctgaaatctatggtggtctgccgggcctacatcacggaacaccg

SEQ ID NO: 168359 - DNA, 80 bp, synthetic construct
  source 1..80: mol_type = other DNA
tgcaaggagacaaccaagacagaacggtagcagacacacaaccaagcggcccatcaaactcaaaagagatacccgcactt

SEQ ID NO: 168360 - DNA, 80 bp, synthetic construct
  source 1..80: mol_type = other DNA
atcagaggacttagagggtatggaagccactttagtaattcattccaataactttaccaacactatattagatgtaggac

SEQ ID NO: 168361 - DNA, 80 bp, synthetic construct
  source 1..80: mol_type = other DNA
aaaactctcaaacgaatgcttgaaaaatcaattgatgatacagaatatccaacaggcccaaaagtgcctcgatggcttcc

SEQ ID NO: 168362 - DNA, 80 bp, synthetic construct
  source 1..80: mol_type = other DNA
aagggttttcagcacagttgagaaagcagtattttgttgccaagcagggacaggttgtaactagacagaaattaagggaa

SEQ ID NO: 168363 - DNA, 80 bp, synthetic construct
  source 1..80: mol_type = other DNA
ctcgcctggagtgcgcagaggcacgcattcgccgcgataacgacaggtcacacgctgcagttcgctgatgctgttgtcgt

SEQ ID NO: 168364 - DNA, 80 bp, synthetic construct
  source 1..80: mol_type = other DNA
tagtcccattaacatagttgcaaacagagacagcaactatgactggtatcctttaaatcccctaaatgctccagcagtta

SEQ ID NO: 168365 - DNA, 80 bp, synthetic construct
  source 1..80: mol_type = other DNA
tgaggacgccgccgcgcttacttatgtcccgcaacactccctcagagccgcacgcaccggcagcgcgcagaaagcgccgt

SEQ ID NO: 168366 - DNA, 80 bp, synthetic construct
  source 1..80: mol_type = other DNA
aaacaatatgggaaagttgttcatgagacacgtgaacaagcaaagcccatacacaatcgagagcacagccagaatatata

SEQ ID NO: 168367 - DNA, 80 bp, synthetic construct
  source 1..80: mol_type = other DNA
agacatagtctacaacccactactagacagaggcacaggcaacatggtgtggttccagtaccacactaaaactgacaaca

SEQ ID NO: 168368 - DNA, 80 bp, synthetic construct
  source 1..80: mol_type = other DNA
agtcatggagcatttggacaccagtctggtgcggcatacgtgggcaactataggattgtcaatagacacctggcaacgca

SEQ ID NO: 168369 - DNA, 80 bp, synthetic construct
  source 1..80: mol_type = other DNA
atgagggacagtcccgacattgggcaatcacaacaactagagggggccactgctgccttccaaatagaagaggtcataaa

SEQ ID NO: 168370 - DNA, 80 bp, synthetic construct
  source 1..80: mol_type = other DNA
tgaatcactattttcaaaatacaagggaaacacacattgtgtgatgaatgaacacataaaaattgcatcagcacattatg

SEQ ID NO: 168371 - DNA, 80 bp, synthetic construct
  source 1..80: mol_type = other DNA
ggcttcgttccactatactggcagaccaggtggagacccgaagtactcttccaagagtcagtaatgagagacattaccat

SEQ ID NO: 168372 - DNA, 80 bp, synthetic construct
  source 1..80: mol_type = other DNA
ccaaatcactagcaccattagggtctatttcaaaccaaaacacataaaagcttgggtaccacgcccaccgcggttgtgtc

SEQ ID NO: 168373 - DNA, 80 bp, synthetic construct
  source 1..80: mol_type = other DNA
ttacaaccggcctaaaaattccatttccagacaatgataaccccgaaaatcctggaaatggtacagctacaacacttaat

SEQ ID NO: 168374 - DNA, 80 bp, synthetic construct
  source 1..80: mol_type = other DNA
acaacctttccctagattctccttgccattcttgagtattgcatctgcttactacatgttctatgatggttatgatggtg

SEQ ID NO: 168375 - DNA, 80 bp, synthetic construct
  source 1..80: mol_type = other DNA
cgagcgtcagttttttgaatccacctttcgatcccacgccggttgttgtggctgtggcaactttgtccatcatcttactg

SEQ ID NO: 168376 - DNA, 80 bp, synthetic construct
  source 1..80: mol_type = other DNA
aagacctccaaaccagatacatcagtttgtagattctataccctggacagcaaaatgtggcaacaaaattcaaagggatg

SEQ ID NO: 168377 - DNA, 80 bp, synthetic construct
  source 1..80: mol_type = other DNA
tatgttccagaattaaaaagcaatggtacctttcacacaggccagaacccagtatttggcatgtgtagttaccaaccaac

SEQ ID NO: 168378 - DNA, 80 bp, synthetic construct
  source 1..80: mol_type = other DNA
tgattcagagatcactatagttgctaccattgctggacagggtgatgacatagggcacattgtacttcaatacatgtatg

SEQ ID NO: 168379 - DNA, 80 bp, synthetic construct
  source 1..80: mol_type = other DNA
gagatgttacgtcgcgacgaacagacgcgtctgcgactcatcaacgccgtactgagcatgttccacacattagtgatgcg

SEQ ID NO: 168380 - DNA, 80 bp, synthetic construct
  source 1..80: mol_type = other DNA
acaacaaaacttctttaagtggactatcaacacccgctcttatgtacagttgaggagaaaatttgaactttttacataca

SEQ ID NO: 168381 - DNA, 80 bp, synthetic construct
  source 1..80: mol_type = other DNA
ggtatagatgatgttatagacaaagtcatcagcaatgctctacaactctcacaaccatcgcggcctaacactgcatctga

SEQ ID NO: 168382 - DNA, 80 bp, synthetic construct
  source 1..80: mol_type = other DNA
gcaatggtagggttaagggaagaaatgatagagaaaattagaaccgaagcattaatgactaacgatagactcgaagcaat

SEQ ID NO: 168383 - DNA, 80 bp, synthetic construct
  source 1..80: mol_type = other DNA
catggtgtggtttcaatacagcacaaaacccaccacagaatttgatgagacccagtgcaaatgtgtacttaaagacatac

SEQ ID NO: 168384 - DNA, 80 bp, synthetic construct
  source 1..80: mol_type = other DNA
ctactgagtacactcatgcatacagtacaaattaccattataaggaaaaggatgcttcagaagatactttaaagagcaga

SEQ ID NO: 168385 - DNA, 80 bp, synthetic construct
  source 1..80: mol_type = other DNA
ccggggccgcaaaagccccccgtccccggcgcaacccccggcctgggcccgcaaaagtccgcccgtccccaccggtctcc

SEQ ID NO: 168386 - DNA, 80 bp, synthetic construct
  source 1..80: mol_type = other DNA
gctccgtggatctccaatagtgtttatagaaggtgtgtaaaagatgattacacggcaggcggttacataacatgttttta

SEQ ID NO: 168387 - DNA, 80 bp, synthetic construct
  source 1..80: mol_type = other DNA
catataaatatcaacttgatatggaagcaattgctaaagagggcacaaaatatggtcttacaatcactcctgctgataaa

SEQ ID NO: 168388 - DNA, 80 bp, synthetic construct
  source 1..80: mol_type = other DNA
gctacatgaagggcagccgcctcaaatccaccatgacccccatggctgtccgtgttgttggggtaataagtcacattgtt

SEQ ID NO: 168389 - DNA, 80 bp, synthetic construct
  source 1..80: mol_type = other DNA
tggtgctcgtgctactgcaaggaatcaaggtctgccagtcttcataactcctggatctggccaatttatgacaacagatg

SEQ ID NO: 168390 - DNA, 80 bp, synthetic construct
  source 1..80: mol_type = other DNA
tatgatggatttgctggatttgaaaagacggccaatggcctttacggtatcaacccagctaatactatgggcaatttgtg

SEQ ID NO: 168391 - DNA, 80 bp, synthetic construct
  source 1..80: mol_type = other DNA
ctccgaggtgccattggacactgaggtggtgaacagcaacgaaagtgagtggggccagacttcgccttagggcctttatc

SEQ ID NO: 168392 - DNA, 80 bp, synthetic construct
  source 1..80: mol_type = other DNA
taaggtcattagtaacgctttacaactttcacaaccaaccagaccaatcacagcatccgatacacccagcactagtggag

SEQ ID NO: 168393 - DNA, 80 bp, synthetic construct
  source 1..80: mol_type = other DNA
aagaaggggtggatagtgaagctcaataatgatctggtcgtagaaagaaatctgaacagggcggtgacaattttgcaagc

SEQ ID NO: 168394 - DNA, 80 bp, synthetic construct
  source 1..80: mol_type = other DNA
ttgaaggagaaggtttgtcatatattgggaatcccgtatgtgataaagcaaggtgactcctggatgaaaaagttttctga

SEQ ID NO: 168395 - DNA, 80 bp, synthetic construct
  source 1..80: mol_type = other DNA
atacacttattcttattaatttaacaactacatatagtagaaattactattttaattcttttgaaacccttggagtaaca

SEQ ID NO: 168396 - DNA, 80 bp, synthetic construct
  source 1..80: mol_type = other DNA
taactatcatgactgttgaaaacttcaacgccaccgaaatggtggataaaaagaaattgtttgccacttggaacatcacg

SEQ ID NO: 168397 - DNA, 80 bp, synthetic construct
  source 1..80: mol_type = other DNA
ttccaggaaaacccattgaagagggtaacaagcctaagaatcctacacttaaacctgtaatcggaagagatacagtaaag

SEQ ID NO: 168398 - DNA, 80 bp, synthetic construct
  source 1..80: mol_type = other DNA
aactgcatggatacctagaccaccaagagcaacagagtatactcatgcatacagcacaaactatcattacaaagcacccc

SEQ ID NO: 168399 - DNA, 80 bp, synthetic construct
  source 1..80: mol_type = other DNA
gtcgccgatacgataagtagcggaccaagcaattcagagagcgtgccagccttgactgcggcagagacgggacacacctc

SEQ ID NO: 168400 - DNA, 80 bp, synthetic construct
  source 1..80: mol_type = other DNA
tggcagccctctatagtcaaaaaatgttatatagtgggctttgaccctataataatatgtggactgaacagaacttcttt

SEQ ID NO: 168401 - DNA, 80 bp, synthetic construct
  source 1..80: mol_type = other DNA
ttcttagcgaaaaagctctcaaacgcttgcacgagaaacctctcgactatgaaagctattttacaaaaccaaaaagacct

SEQ ID NO: 168402 - DNA, 80 bp, synthetic construct
  source 1..80: mol_type = other DNA
tgtctgcgtcgcccctgcggcccgcaatcggcggcgcagcaggcggtacgcgcctatctgggcctatccaagaaactgga

SEQ ID NO: 168403 - DNA, 80 bp, synthetic construct
  source 1..80: mol_type = other DNA
ccaagaacacggaaagaggcgatgcttggcactcatctcatatgggaccttggtctacaatcaagcgcgacgatggtcgc

SEQ ID NO: 168404 - DNA, 80 bp, synthetic construct
  source 1..80: mol_type = other DNA
aagtggtatgttatgatgtaccaccaacaagagttcatggaagccatagtgcagagcggaccgtgggcttacaagggcga

SEQ ID NO: 168405 - DNA, 80 bp, synthetic construct
  source 1..80: mol_type = other DNA
tagtcaaaactgcccccgctttaaattcaccaaacattgaggcatgtgggtacagtgatagggtcctacaactgacactt

SEQ ID NO: 168406 - DNA, 80 bp, synthetic construct
  source 1..80: mol_type = other DNA
cggccctgtacgggtacgatgactacgtacagagaaccctaggaaaatttacagacacagaacaagtgggaatagtgtgt

SEQ ID NO: 168407 - DNA, 80 bp, synthetic construct
  source 1..80: mol_type = other DNA
tagtacactttaacagaaagtcccctatgggaggcaacatatacaccggtcctcagctgcacccaggagccctcatgcta

SEQ ID NO: 168408 - DNA, 80 bp, synthetic construct
  source 1..80: mol_type = other DNA
aacctaacccacaacaaaacaaaccatcagacaatcaatactttgcacccttagatggtctctggggagaccctatatat

SEQ ID NO: 168409 - DNA, 80 bp, synthetic construct
  source 1..80: mol_type = other DNA
tggtcaggtacgaggccgtctttgtctccgccaagctgcacaccactgtggccatcaatgtggccatcatacctatcctg

SEQ ID NO: 168410 - DNA, 80 bp, synthetic construct
  source 1..80: mol_type = other DNA
gctacgccgctcgacatgttagtattttcagcggatgcttccttgtcacccccgggcagcggcccttcctcgagctcgct

SEQ ID NO: 168411 - DNA, 80 bp, synthetic construct
  source 1..80: mol_type = other DNA
cccgcctacgtggtaaactgttacatagtgggctacatgcccctcatatactgtggagaaaatacctccagcagaaactt

SEQ ID NO: 168412 - DNA, 80 bp, synthetic construct
  source 1..80: mol_type = other DNA
ctggcaccaggctccctcgcagtttggcacgcgattggggcaaagctctgccataaccgtgtcgggaacaaataggtgca

SEQ ID NO: 168413 - DNA, 80 bp, synthetic construct
  source 1..80: mol_type = other DNA
cttatcatgcaaattcttaccattatatgcaagtgaggctaagagaatcaaggtattgcataacaaatgtaatgtaataa

SEQ ID NO: 168414 - DNA, 80 bp, synthetic construct
  source 1..80: mol_type = other DNA
tatatatgagtctcaggtgcccaaatttcttctttcctgttccagcaccaaaaaacacaccacgctcgcaaagtcgtgct

SEQ ID NO: 168415 - DNA, 80 bp, synthetic construct
  source 1..80: mol_type = other DNA
gtatcctcagcagtaacagacatgagaatagcaataatatgtccctacactgaaccagcacttatagggtcaactccaga

SEQ ID NO: 168416 - DNA, 80 bp, synthetic construct
  source 1..80: mol_type = other DNA
agctccagaggcgaaaccacctgctatgagctggagacccccggtgcacaaccctaatgggatcgagagaaacctgtggg

SEQ ID NO: 168417 - DNA, 80 bp, synthetic construct
  source 1..80: mol_type = other DNA
ttcttgggaggcaatgttctcaagacaacattgttgggtgaaatagcacagtactacacacattgggcaggttctattag

SEQ ID NO: 168418 - DNA, 80 bp, synthetic construct
  source 1..80: mol_type = other DNA
acacacaaactcctgaaaatgattcaggcataggaggcccttacaccaattattcagactcatggtacaaaggcacagta

SEQ ID NO: 168419 - DNA, 80 bp, synthetic construct
  source 1..80: mol_type = other DNA
acagggcctataaataaagtgtacctgtttcccccagagggtcccaaacccatagaaggctaccatgcatggctagatga

SEQ ID NO: 168420 - DNA, 80 bp, synthetic construct
  source 1..80: mol_type = other DNA
tgtccccgcaagggagagagattgggttgaagcaacgttcagagcccacgctgctttttgtggctgtcctaatcctgtta

SEQ ID NO: 168421 - DNA, 80 bp, synthetic construct
  source 1..80: mol_type = other DNA
gctccgagagcacctccgagagcagaaagtcctcaagtcccagatcaaattcgtcatcaagcagctcatgaaaacacaaa

SEQ ID NO: 168422 - DNA, 80 bp, synthetic construct
  source 1..80: mol_type = other DNA
taccctttctgcaaaaataattacaatgtaacctttcagcttaactacaaataaacaaggccgtgggactttcacttgtc

SEQ ID NO: 168423 - DNA, 80 bp, synthetic construct
  source 1..80: mol_type = other DNA
cttccaagaacaagcgaacattaggaaaaaatttgaactctttacctacctgcgcttcgatatggaagttacaatagtta

SEQ ID NO: 168424 - DNA, 80 bp, synthetic construct
  source 1..80: mol_type = other DNA
cttcccccgcggcccgccagcccccctgcacagagcggcgctacggcgggcgtgcggcggagggtcgaggtccgcaggct

SEQ ID NO: 168425 - DNA, 80 bp, synthetic construct
  source 1..80: mol_type = other DNA
agtatacctacttcagattactttcaaacactagatgcactatggggagaccccatatacgccaactcctcaaacgagtc

SEQ ID NO: 168426 - DNA, 80 bp, synthetic construct
  source 1..80: mol_type = other DNA
cactatttgctacaactcttttaggtgaagttctgaactactatgccaactggtctggaagtgtgaggatcaccttcatg

SEQ ID NO: 168427 - DNA, 80 bp, synthetic construct
  source 1..80: mol_type = other DNA
aaaagaaagatctgataaacactaaaactaaagatgttactaagcttaaagaggtcatgaataaatatggagtggatctc

SEQ ID NO: 168428 - DNA, 80 bp, synthetic construct
  source 1..80: mol_type = other DNA
cactattaggctattctgactactgcacaaaatatttcaatgacaaaggactaataaaagaagccagactgaccatcatc

SEQ ID NO: 168429 - DNA, 80 bp, synthetic construct
  source 1..80: mol_type = other DNA
attttgcacaaccacaaggtgaaattactggcaaacaaaatgtcgctgatgttggactaaatccaattaacacacccaga

SEQ ID NO: 168430 - DNA, 80 bp, synthetic construct
  source 1..80: mol_type = other DNA
cattcacagactctgtactaacaggtcctatgttacatcccggggtgctaatgaacagcaaaagaaaaatactaattcca

SEQ ID NO: 168431 - DNA, 80 bp, synthetic construct
  source 1..80: mol_type = other DNA
tgcccctctcaacacccagggagatggatatactcgggtttgtatcagcttgcaacgatttcagcgtgcgcttgctacga

SEQ ID NO: 168432 - DNA, 80 bp, synthetic construct
  source 1..80: mol_type = other DNA
aacacaatattaatgtttgtcagtacattaggtatagtatatgtcatatacaagttatttgctcaaacccaaggccctta

SEQ ID NO: 168433 - DNA, 80 bp, synthetic construct
  source 1..80: mol_type = other DNA
tctttgagcagcacctcctacacagaaacaggtggtccaaatctaactttgacctagaactagccagatacataggcacc

SEQ ID NO: 168434 - DNA, 80 bp, synthetic construct
  source 1..80: mol_type = other DNA
acaacggagaggaacagtacaatgattttgtgtccaaaatccgcaccgtggcagtaggtagaacattaagcataccaccc

SEQ ID NO: 168435 - DNA, 80 bp, synthetic construct
  source 1..80: mol_type = other DNA
tgcctccccgggtcccaggccagccggagggaccccggcagcccgggcggccccagaggccggttcctcgccccttcgcc

SEQ ID NO: 168436 - DNA, 80 bp, synthetic construct
  source 1..80: mol_type = other DNA
gatactaaaggtctaaaactatacaatgtaaccatgaatgactcgggaatttatacacaacacgtttatcactgtgatat

SEQ ID NO: 168437 - DNA, 80 bp, synthetic construct
  source 1..80: mol_type = other DNA
caggccccaatggcatgcagtggaacggcctggaaaaccccctctttcccgtctccacagacaccaactggacctcctcc

SEQ ID NO: 168438 - DNA, 80 bp, synthetic construct
  source 1..80: mol_type = other DNA
ctgctacttagctacagtccccctggtgcagcccccccaaaaacgcggaaggaagcaatgctaggcacccaccttatctg

SEQ ID NO: 168439 - DNA, 80 bp, synthetic construct
  source 1..80: mol_type = other DNA
aatatagacgtccttttattagaagtgctttgtactcacttgaaatttgcggccaaacgtacacccacagtcttctacac

SEQ ID NO: 168440 - DNA, 80 bp, synthetic construct
  source 1..80: mol_type = other DNA
atgtatacagtcaccttaaccagagaaacagatacagctaaagaaatttttgccattaaggttgacattgcatcacaccc

SEQ ID NO: 168441 - DNA, 80 bp, synthetic construct
  source 1..80: mol_type = other DNA
ccagtgaatctagggacactgaaggtaccatcggaagtaacattatacaagccattcagaaagctaacatccctctggga

SEQ ID NO: 168442 - DNA, 80 bp, synthetic construct
  source 1..80: mol_type = other DNA
ctgaaggacacggtagacgacgtgagagccaccttggtggactcggtttcggcgacgtgcgatttggacctggaggtcga

SEQ ID NO: 168443 - DNA, 80 bp, synthetic construct
  source 1..80: mol_type = other DNA
ccccccctgtccgcccttcagcgggcgggaggccagactcaagttccacttcttctcctggagcacattcatgctgtcat

SEQ ID NO: 168444 - DNA, 80 bp, synthetic construct
  source 1..80: mol_type = other DNA
agcaagaccctagtaagtttaccgaaccggtgcttgatgtcatggtaaaatccctcccagccttaaactcgcctagtgcc

SEQ ID NO: 168445 - DNA, 80 bp, synthetic construct
  source 1..80: mol_type = other DNA
cggtgtttgtacggtgtttcggggcggcgacggcggtgttttcggacgtgctgggcgccggcgccggtaacgggagttac

SEQ ID NO: 168446 - DNA, 80 bp, synthetic construct
  source 1..80: mol_type = other DNA
agcggttaccggggcgcagggcctctgccgggaagcccacccgggccagggcccggtaaagcaggtaccagtattcatcc

SEQ ID NO: 168447 - DNA, 80 bp, synthetic construct
  source 1..80: mol_type = other DNA
ctaatgatatgggaaccttatgctccagaatagtaactgatgaacaccaaacacaggttgcaatcacaactagagtatat

SEQ ID NO: 168448 - DNA, 80 bp, synthetic construct
  source 1..80: mol_type = other DNA
taatgtaaaaaagaacacgttgtaaacaagctattgctgtatcattcggctgactatgcttcattcggactgattttctt

SEQ ID NO: 168449 - DNA, 80 bp, synthetic construct
  source 1..80: mol_type = other DNA
tggctgagttttctacgcccgtccgcagcgaaggagccacggagggaatcctgcgcgtaccgagggcgggtgccgaaggt

SEQ ID NO: 168450 - DNA, 80 bp, synthetic construct
  source 1..80: mol_type = other DNA
tgcattcttctgttgagggggtatggggactgagtgtcattgtacatcttttgcaggctttccacggccaccgcgtggtt

SEQ ID NO: 168451 - DNA, 80 bp, synthetic construct
  source 1..80: mol_type = other DNA
gcgatccatcccggacagcgtgcaagtctcgactaaggagcgggcgcgagcgagcgaaagttttatagagagcacacacg

SEQ ID NO: 168452 - DNA, 80 bp, synthetic construct
  source 1..80: mol_type = other DNA
acaactagtcacacaaaaacccacagacacaacactcctacaagactttggcatatacagccccttctacctcacacccg

SEQ ID NO: 168453 - DNA, 80 bp, synthetic construct
  source 1..80: mol_type = other DNA
tcatataatagcactgggggctgcacaaaagaacttcacacttaaattgtgcaaggacacagacgaggtcacgcaacagg

SEQ ID NO: 168454 - DNA, 80 bp, synthetic construct
  source 1..80: mol_type = other DNA
ttcggggcagaagtggtgccaggatttcaggcgctgtcagaaggctgcctaccatatgatatcaatcaaatgctaaattg

SEQ ID NO: 168455 - DNA, 80 bp, synthetic construct
  source 1..80: mol_type = other DNA
acctcccctgctgttcccccagtttgccccatcgtttccctgacggcctcaggggccaagcaaaaccgcggaggcatgtg

SEQ ID NO: 168456 - DNA, 80 bp, synthetic construct
  source 1..80: mol_type = other DNA
acgcagcgagcagttacttgagcctgtaatataacgcattaccaatatgaaaagttgcaggaatagtatgtgttgcggta

SEQ ID NO: 168457 - DNA, 80 bp, synthetic construct
  source 1..80: mol_type = other DNA
gtttaaggtgtccaaattttttcttcccagtcccagcacttaaaccagtcaattcacgctcaattgagttcagcaatgaa

SEQ ID NO: 168458 - DNA, 80 bp, synthetic construct
  source 1..80: mol_type = other DNA
gagtgttggcaggaaatgcgtttgtctatccacaccaaataataaacctgcgcaccaataactgtgctacactagtgctg

SEQ ID NO: 168459 - DNA, 80 bp, synthetic construct
  source 1..80: mol_type = other DNA
tatcatctggattctaccgtcgcaccaaagcagacgatttcactgaagcaggatatgtcacactttggtaccagactgat

SEQ ID NO: 168460 - DNA, 80 bp, synthetic construct
  source 1..80: mol_type = other DNA
ggcatttactccactagatactaacacaccaattctaattagagcagttatactaattagatcaatacatcacaatgggt

SEQ ID NO: 168461 - DNA, 80 bp, synthetic construct
  source 1..80: mol_type = other DNA
gaccaaagagacggtggagatggaggcgccggcgccgacgacctgtcgcccgcagacgtcgaagacctgctcgactggct

SEQ ID NO: 168462 - DNA, 80 bp, synthetic construct
  source 1..80: mol_type = other DNA
attgccacatagccacaactgacagaggtgaatttaaccttcttggaatacatgacaactgtgcagtgatacccacacac

SEQ ID NO: 168463 - DNA, 80 bp, synthetic construct
  source 1..80: mol_type = other DNA
agacctaaaggcagagaaaaagttaaggtcaggataaagccccccaccatgttcatagacaagtggtacacccaggagga

SEQ ID NO: 168464 - DNA, 80 bp, synthetic construct
  source 1..80: mol_type = other DNA
tggcatggaaagactgagggttgaaatctcggtacagacagacatggacgcacttctcttcaacattccacttgacattc

SEQ ID NO: 168465 - DNA, 80 bp, synthetic construct
  source 1..80: mol_type = other DNA
caatcaccatcacaatagcacccatggatgcagaatacaatggactacggctgggaggctttcaagggttgcccaccatg

SEQ ID NO: 168466 - DNA, 80 bp, synthetic construct
  source 1..80: mol_type = other DNA
ttgcgcggccgttggggtacggcgtattcctcgggttcctcggcctcttcctccggtttcgtcgcggagagcaagttcac

SEQ ID NO: 168467 - DNA, 80 bp, synthetic construct
  source 1..80: mol_type = other DNA
atcagcgtgcaaggatttctgcttgcgtatggccagagacacggatatgcacatacaaaatgatgccattgaacaaaacc

SEQ ID NO: 168468 - DNA, 80 bp, synthetic construct
  source 1..80: mol_type = other DNA
aaccaggcatggggttaatataataatcttagatgtttgttactattgagcccctttcccagccctgaggcggctggtca

SEQ ID NO: 168469 - DNA, 80 bp, synthetic construct
  source 1..80: mol_type = other DNA
ctgctactgaaattagaaactatggagatacaaactatgactggtatccatacaaaatacctagtaaagagaaaatacat

SEQ ID NO: 168470 - DNA, 80 bp, synthetic construct
  source 1..80: mol_type = other DNA
tccactaattaacaacaaaaatacaaatgagggctttgtaccctacagtttctactttggaaaaggcagaatgccagacg

SEQ ID NO: 168471 - DNA, 80 bp, synthetic construct
  source 1..80: mol_type = other DNA
aattgtgctgttgtcccgacgcacgctgagtgtggggactatgtggacatagatggacgggtggtgaaagtgttgaaaca

SEQ ID NO: 168472 - DNA, 80 bp, synthetic construct
  source 1..80: mol_type = other DNA
tccgtcagctcgcaagtgcatggaaccagggtgtggacgacaaaattgatgcgctggtggatggcatggtcaatctagca

SEQ ID NO: 168473 - DNA, 80 bp, synthetic construct
  source 1..80: mol_type = other DNA
tactgtgctatgtaagagtcctccggcccctgaatgtggataatcctaaccactgatcccacgaacgcaagccagcgtgt

SEQ ID NO: 168474 - DNA, 80 bp, synthetic construct
  source 1..80: mol_type = other DNA
tgaaggagaacatggcgaaggtgctacctgtgaaacacgggaagaaagtgaggacacagagagcgatggggatgatgaag

SEQ ID NO: 168475 - DNA, 80 bp, synthetic construct
  source 1..80: mol_type = other DNA
tcccggccctcttccgtgcctcgggcctcaacgtccgtgagagcctgcccatgaccaacatgagagcaccgatcatctcg

SEQ ID NO: 168476 - DNA, 80 bp, synthetic construct
  source 1..80: mol_type = other DNA
tggtctacgtgataatataagacggcgcacttccgaatggctgagttttcgccgcccgtccgcagcgagatcgcgacgga

SEQ ID NO: 168477 - DNA, 80 bp, synthetic construct
  source 1..80: mol_type = other DNA
acacacattgtctaggcaattacaaaaatcatgtggccttaatggtgtttacaccaacccaacagctagtgagttcatgg

SEQ ID NO: 168478 - DNA, 80 bp, synthetic construct
  source 1..80: mol_type = other DNA
agcagcatcacatacataccagatactgtaaagcctgacatgtcgaaccacggggcatttggtcagcagtccggcgctgt

SEQ ID NO: 168479 - DNA, 80 bp, synthetic construct
  source 1..80: mol_type = other DNA
acctgtgctggatgctttacgcgaagcagtcccaccgttacaatcaccgagtgctgaggcatgtggttacagtgacagag

SEQ ID NO: 168480 - DNA, 80 bp, synthetic construct
  source 1..80: mol_type = other DNA
caccaggttctagtcagtacttgacatctgacgattttcagtcaccgtgtgctttgccaaattttgatgttacaccgccc

SEQ ID NO: 168481 - DNA, 80 bp, synthetic construct
  source 1..80: mol_type = other DNA
tcacactatctgggcccttcagctacaaggacgactataagaactgtgtactgacttgcaaatacaaatttaactttcgg

SEQ ID NO: 168482 - DNA, 80 bp, synthetic construct
  source 1..80: mol_type = other DNA
tgtttatcttccgggtcaaaggtcaccgctacgtcatcagtcacgtggggagggtatgctgtaaacccggaagcaatcct

SEQ ID NO: 168483 - DNA, 80 bp, synthetic construct
  source 1..80: mol_type = other DNA
ggtggctttgaaaatgcccagcgcaacaggcaacctagtgatgaaaattggctcaactgtaatggcactttactgggcaa

SEQ ID NO: 168484 - DNA, 80 bp, synthetic construct
  source 1..80: mol_type = other DNA
gtggtccctcctaaaacgcccaccacagcttacatcatagcaatggctgctgcccaaaagaacttcaccttgaaactttg

SEQ ID NO: 168485 - DNA, 80 bp, synthetic construct
  source 1..80: mol_type = other DNA
tcgttctcagtcgcttcaagcgacaggtactgtacttcaagttacaggtgagctacggcaagtgccggactggccacgct

SEQ ID NO: 168486 - DNA, 80 bp, synthetic construct
  source 1..80: mol_type = other DNA
tgacaaaccagagtccttatgaccagcaaccccaaaatcaaatgatgaaattggcttacctagatagaggtttctataag

SEQ ID NO: 168487 - DNA, 80 bp, synthetic construct
  source 1..80: mol_type = other DNA
atctccacgtaaaccccctattatccttcccgcaataaacaaggtgttcctgtttccaccagacaaacctactcccatac

SEQ ID NO: 168488 - DNA, 80 bp, synthetic construct
  source 1..80: mol_type = other DNA
ttttgttttgtggatcaatgatggcaactggaaaaatactggtcgcgtactcaccacctggtgcccaaccaccacaggat

SEQ ID NO: 168489 - DNA, 80 bp, synthetic construct
  source 1..80: mol_type = other DNA
gaaatcgggccgatccagaaaaaaaaaaaacgacagcgaaacaccgccgtgctcgagcgaagggtggcggagggccagaa

SEQ ID NO: 168490 - DNA, 80 bp, synthetic construct
  source 1..80: mol_type = other DNA
gaaataatactaattataccaacgacatctggatatgtccacaacctacgaaagacgaaacccaagcagacaaccaaagt

SEQ ID NO: 168491 - DNA, 80 bp, synthetic construct
  source 1..80: mol_type = other DNA
tgatcgcggcgaaaaaacacgctacccgcgttgcccttgcccgcgcggtagatgggtcggtttttcactcgcaccatgat

SEQ ID NO: 168492 - DNA, 80 bp, synthetic construct
  source 1..80: mol_type = other DNA
ttgaaaagaggattcaaacaagatgagaaatacaacttcttgatacaccctacatttcctgagagtgaaatatttgaatc

SEQ ID NO: 168493 - DNA, 80 bp, synthetic construct
  source 1..80: mol_type = other DNA
agcgctgggggtattcctaataccggagttcgtcatggcgtgcaatacagaaagcaagacgtcgtacgtgtcttatgtca

SEQ ID NO: 168494 - DNA, 80 bp, synthetic construct
  source 1..80: mol_type = other DNA
atttgggatctgggactacaatccagctgtgtgctctgtgtaccatggattagtcaaacacactacaggttggtgcaaca

SEQ ID NO: 168495 - DNA, 80 bp, synthetic construct
  source 1..80: mol_type = other DNA
ggcaattcgggctcgggactggccgggctatgggcaaggctcttaatgcgatcgctcttaaaaagccatgtttatcggta

SEQ ID NO: 168496 - DNA, 80 bp, synthetic construct
  source 1..80: mol_type = other DNA
tagaaatcatacaggtggacacactaattccaatgaataatgtgcacaatagtgatgaggtaaacagttatcttatacct

SEQ ID NO: 168497 - DNA, 80 bp, synthetic construct
  source 1..80: mol_type = other DNA
atgcatcatcaggagtacggataaaatgcttgatggtcggaagaggcataaattccgtcagccagtttagtctgaccatc

SEQ ID NO: 168498 - DNA, 80 bp, synthetic construct
  source 1..80: mol_type = other DNA
agtggtgtcatagagcaaaatccagttgaaaattatgtggatgaaattttaaatcaagttctggtagttccaaacaccat

SEQ ID NO: 168499 - DNA, 80 bp, synthetic construct
  source 1..80: mol_type = other DNA
gcgttaaaccaacctaatgacctggctgttaacatagcacaggcaaaggcagagagattcgagtaccacctaggctggta

SEQ ID NO: 168500 - DNA, 80 bp, synthetic construct
  source 1..80: mol_type = other DNA
cattagcactgctcggatgctccggatcaccatggcgctatttgaaagacaaagtctgcaaatggttgggtatcgatcca

SEQ ID NO: 168501 - DNA, 80 bp, synthetic construct
  source 1..80: mol_type = other DNA
gcgctcaggcgcaagtgtgtgtaacttgtcttccagatcgcagcaatcgcgcccctatcttggcccgcccacctacttat

SEQ ID NO: 168502 - DNA, 80 bp, synthetic construct
  source 1..80: mol_type = other DNA
gttaccatatataacacaacacaaacagcagctcaactaagtaaatttttaccaacaacaaacacaaacccactaaaccc

SEQ ID NO: 168503 - DNA, 80 bp, synthetic construct
  source 1..80: mol_type = other DNA
ccccggtatgcgtggaataggcctcttaaaggggctgaagccacaattatcgttacccgcatgtgaactacgcggaactt

SEQ ID NO: 168504 - DNA, 80 bp, synthetic construct
  source 1..80: mol_type = other DNA
gtggcaccggggacgggggttgcgctggggacggaggtgttgcttgcagcgtggacttgcagagacggtggttgcgctca

SEQ ID NO: 168505 - DNA, 80 bp, synthetic construct
  source 1..80: mol_type = other DNA
agtagcttctacatgcacaaggatgatggagacacaaacctccacttggtttggctttaatggcactagggcagaaaata

SEQ ID NO: 168506 - DNA, 80 bp, synthetic construct
  source 1..80: mol_type = other DNA
gaaagacaggcgggttttttagggttgggcccatggggaaagaagccccgcaacttccctatggcccaagtcccgcaggt

SEQ ID NO: 168507 - DNA, 80 bp, synthetic construct
  source 1..80: mol_type = other DNA
tggacagcatgttacggcacaataatgtatcattagttatcataccaatatgccctttacgtacatctggtaatgcccct

SEQ ID NO: 168508 - DNA, 80 bp, synthetic construct
  source 1..80: mol_type = other DNA
ctgcggtgtggaatgccggcatgggtgtcggtgtggggaatttaacaatatttccacaccagtggataaatctccgcacc

SEQ ID NO: 168509 - DNA, 80 bp, synthetic construct
  source 1..80: mol_type = other DNA
gctaaggtagaaccaataaaaataacattgaagccaggaaaagatggaccaaaattgagacagtggcccttaacaaaaga

SEQ ID NO: 168510 - DNA, 80 bp, synthetic construct
  source 1..80: mol_type = other DNA
atcagctagcttacataggtaaaggaaatgttacagttggatacaaccacactcatccaggggaaaagggtaggagaatt

SEQ ID NO: 168511 - DNA, 80 bp, synthetic construct
  source 1..80: mol_type = other DNA
acgtgtctaagggtatcaaaaagaaggatattctaaacaaaactactagggacaccacaaaactggcaaagttaatggaa

SEQ ID NO: 168512 - DNA, 80 bp, synthetic construct
  source 1..80: mol_type = other DNA
gcctttgtgtactttttgcactttctggcctcagttctacacgcctgcgcatgtgtgactcgcttctccccggtctgggt

SEQ ID NO: 168513 - DNA, 80 bp, synthetic construct
  source 1..80: mol_type = other DNA
gttctctcattgtgtcatctaatgtggcataatggctacgaggcttatagagacttcgaacggaagatacgcagtgttag

SEQ ID NO: 168514 - DNA, 80 bp, synthetic construct
  source 1..80: mol_type = other DNA
ttctttacatatttatgattctaatagctattatatcaattattgctttagtattatctatacgcttaaccaccaaatct

SEQ ID NO: 168515 - DNA, 80 bp, synthetic construct
  source 1..80: mol_type = other DNA
aggtccagatggagcgcaacctaaatagggccatgaccatcctgcaggcaataaccacctttgccgcagttgctggagtt

SEQ ID NO: 168516 - DNA, 80 bp, synthetic construct
  source 1..80: mol_type = other DNA
cttgttcgccgccgtcgcaggagacgccgaagaacgagagtaaggaggcggcgcggtggtcggtggtggcgcagacgcgg

SEQ ID NO: 168517 - DNA, 80 bp, synthetic construct
  source 1..80: mol_type = other DNA
agtagactggctaaaaaaagacactggaaactggggcatacctgcctgggccagaatagttattaaatgcccctacactt

SEQ ID NO: 168518 - DNA, 80 bp, synthetic construct
  source 1..80: mol_type = other DNA
accaatcttaacgttagctcaactggcacagaagatggtaatattagtacagaagacaaaaaaatatttgaagactggct

SEQ ID NO: 168519 - DNA, 80 bp, synthetic construct
  source 1..80: mol_type = other DNA
caaccccagaccacagtagtagcacccacatgcacctgagatcacatggtgcatttggtcaccagtctggtgctgtttat

SEQ ID NO: 168520 - DNA, 80 bp, synthetic construct
  source 1..80: mol_type = other DNA
ttgaatggatgaaatcaatgttaccacaagcacaacttaaagtgaaatatttgagtgagcttaaaaaattgaacctcctt

SEQ ID NO: 168521 - DNA, 80 bp, synthetic construct
  source 1..80: mol_type = other DNA
actggatgaccccctacacacacgtcaggtacaatccactagtagacaagggcttcggaaacagaatatacatacagtgg

SEQ ID NO: 168522 - DNA, 80 bp, synthetic construct
  source 1..80: mol_type = other DNA
tcgattgctgcgagacactccattcatcagccagacggcccttttacaaggtgatgttgtagaggcaatcgagagtgctg

SEQ ID NO: 168523 - DNA, 80 bp, synthetic construct
  source 1..80: mol_type = other DNA
ttctggaatccgtcatctacgtgtccgggccacagggagggaacgttaccctgatatccaacttcacttcaaacatcagc

SEQ ID NO: 168524 - DNA, 80 bp, synthetic construct
  source 1..80: mol_type = other DNA
ggtactactggcgccacattccatgacccatatattttggattctggagtgccactgagccaagctcttatataccctca

SEQ ID NO: 168525 - DNA, 80 bp, synthetic construct
  source 1..80: mol_type = other DNA
cctagtgtcttttatgacatattccctggaaagaaggaacccgcagcgttacacccaaaggataaaaggttggaagctga

SEQ ID NO: 168526 - DNA, 80 bp, synthetic construct
  source 1..80: mol_type = other DNA
aggtgtgtgacatactggaaatcccatttgttttgcgacaaggtgactcttggttgaaaaagttcactgaagcgtgcaac

SEQ ID NO: 168527 - DNA, 80 bp, synthetic construct
  source 1..80: mol_type = other DNA
ctaatgtggacttctcagtgaccaatttaactgagcaacgcgacagcatacgatggacaccaactatgggaccatcggtg

SEQ ID NO: 168528 - DNA, 80 bp, synthetic construct
  source 1..80: mol_type = other DNA
agacaaagacagcggaccgtcctaccatccgggagtactcatgcaggcgaaacacaaagtactagtgcccagttttgaca

SEQ ID NO: 168529 - DNA, 80 bp, synthetic construct
  source 1..80: mol_type = other DNA
caaatttcccactacaacataggaaagtcattgcccaaagacagacactccatacatatggtaataaccccagatttggg

SEQ ID NO: 168530 - DNA, 80 bp, synthetic construct
  source 1..80: mol_type = other DNA
gtcaataccacgtcaaaccaccgtgacttggctgaacgttgaaacataaagccaaagcgccgtcggcacttggcttcaga

SEQ ID NO: 168531 - DNA, 80 bp, synthetic construct
  source 1..80: mol_type = other DNA
ttgtcgaggatgtccttaatgatcataaaactcaacaaaagccgaagattaggactgtagcagcatacccctttggtgtg

SEQ ID NO: 168532 - DNA, 80 bp, synthetic construct
  source 1..80: mol_type = other DNA
aaccagaactaaggggccctgatgatgggtatgagcattagcaaataaaacaggttctactttatcgccatcctttttat

SEQ ID NO: 168533 - DNA, 80 bp, synthetic construct
  source 1..80: mol_type = other DNA
attttgtgcagcccgccaattctcgttcaaacaggccaatcaggaggctctacgtacacttcctggggtgtgtcttcgaa

SEQ ID NO: 168534 - DNA, 80 bp, synthetic construct
  source 1..80: mol_type = other DNA
ctaccaacctccgccggggtcccgccaggccccagggtcttcgggtacaccgccgctgatcagaggcctgagagcgctcc

SEQ ID NO: 168535 - DNA, 80 bp, synthetic construct
  source 1..80: mol_type = other DNA
agaggaggtggcgctggggcaggagacgacgcagacctcgctacagaagacgtagacgagctgctagaacttctagacga

SEQ ID NO: 168536 - DNA, 80 bp, synthetic construct
  source 1..80: mol_type = other DNA
gtagttcaaaaaataggaaaagaagcactagtcatttgaggacgaatacctaaatttcacctaccagtagagagagaggt

SEQ ID NO: 168537 - DNA, 80 bp, synthetic construct
  source 1..80: mol_type = other DNA
acaaccagtggtgttatgcacaaacacttctgtttccccggagcgaggtatagacggtccccactgtcaaaagcctttaa

SEQ ID NO: 168538 - DNA, 80 bp, synthetic construct
  source 1..80: mol_type = other DNA
atacaggagattaaagaaaaaggagtgggattgattggtgagtgtcgagcttttcttgattccataactagtaccttaaa

SEQ ID NO: 168539 - DNA, 80 bp, synthetic construct
  source 1..80: mol_type = other DNA
catgtttctgaagtcgcgtggggtccggtcttgcagggaccggcgcctcttgtcggacgaggaggaagagacttcacaga

SEQ ID NO: 168540 - DNA, 80 bp, synthetic construct
  source 1..80: mol_type = other DNA
tcttactgaatttacctatttattacacttgtataacaataatgggagctcaagtgtctactcagaagtctggatcacat

SEQ ID NO: 168541 - DNA, 80 bp, synthetic construct
  source 1..80: mol_type = other DNA
agtggggccagacttcgccatagggcctttatcttcttgccatttgtcagtgacggtggtcgctccagacgcggaccccg

SEQ ID NO: 168542 - DNA, 80 bp, synthetic construct
  source 1..80: mol_type = other DNA
gatccctctgccgccaggacataaaaacatgccgtggagaccgccggtgcatagtgtccaggggcgagaggatcagtggt

SEQ ID NO: 168543 - DNA, 80 bp, synthetic construct
  source 1..80: mol_type = other DNA
gccctgcttcagataagagattgcaatacactatgctgggtgagatcctcaattattacacccactggaccggctcactg

SEQ ID NO: 168544 - DNA, 80 bp, synthetic construct
  source 1..80: mol_type = other DNA
agacgcaggagggctcgatccgagagcagctccagcagcagctccaagagcagcttcaactccgaagagggctcaagtgc

SEQ ID NO: 168545 - DNA, 80 bp, synthetic construct
  source 1..80: mol_type = other DNA
ttgttagacaggcctatgaggctgtatcctggggacaccccgttctacccgtggctaccaaaaaagccaaatatccagcc

SEQ ID NO: 168546 - DNA, 80 bp, synthetic construct
  source 1..80: mol_type = other DNA
tcaaattatgtacgttccacccggtggcccagtcccggaaactgtggacgattacaactggcaaacctcaacgaacccta

SEQ ID NO: 168547 - DNA, 80 bp, synthetic construct
  source 1..80: mol_type = other DNA
ctactactatctcaacctctgatactaccaatacaacagtcaacagtaaaggtacctccggaccctctacaaccaccgct

SEQ ID NO: 168548 - DNA, 80 bp, synthetic construct
  source 1..80: mol_type = other DNA
tgaatacaacatgctagattattttgacaattgtacctacaacataaatagcaccaaatatattatcaccgtgttatctc

SEQ ID NO: 168549 - DNA, 80 bp, synthetic construct
  source 1..80: mol_type = other DNA
tgccaccccttaccccaagtaacttagaagcatgtaactttgatcaatagggagtggtaagccataccacttgagatcaa

SEQ ID NO: 168550 - DNA, 80 bp, synthetic construct
  source 1..80: mol_type = other DNA
tgggacaggcctcctagaaagtttctcacagacacccctttctacccctggatgccccctgcaccccctaaattctctgt

SEQ ID NO: 168551 - DNA, 80 bp, synthetic construct
  source 1..80: mol_type = other DNA
tgcgtagaacgatggggcgcccaggaaggcggcagcgtaggccggatgtgtgccgaccagcagcgccattatctcccgtt

SEQ ID NO: 168552 - DNA, 80 bp, synthetic construct
  source 1..80: mol_type = other DNA
gcaagatgtacaaaacacaacagcactaaacgctgaaggctcaaaccaaggccaaagcaatgacacttggtactatggta

SEQ ID NO: 168553 - DNA, 80 bp, synthetic construct
  source 1..80: mol_type = other DNA
gtaaagaaatgcgtgatctccggatacctgcccctcctcatctgtggaacgggcactaccgggaccacctacaaaaacta

SEQ ID NO: 168554 - DNA, 80 bp, synthetic construct
  source 1..80: mol_type = other DNA
ataatggcaaagataaatatgattcattcgtgaacaagatcaggagtgttagtgctggtcgcgcactctatatcccaccg

SEQ ID NO: 168555 - DNA, 80 bp, synthetic construct
  source 1..80: mol_type = other DNA
tatttatgaacataatgatcacggcacacatgaggacaaaaattttaatctgattatatatcctagaaataatactaaca

SEQ ID NO: 168556 - DNA, 80 bp, synthetic construct
  source 1..80: mol_type = other DNA
atgctgctaagggtttagaatggatagccaacaagatttctaaactaattgaatgggtcaaaaacaaaatcttgccacaa

SEQ ID NO: 168557 - DNA, 80 bp, synthetic construct
  source 1..80: mol_type = other DNA
gtcttggttcagcatactatattttctatgatgggtatgacagagcaaacaatgatactacagtatatggtatttcttca

SEQ ID NO: 168558 - DNA, 80 bp, synthetic construct
  source 1..80: mol_type = other DNA
gtaaccccgtgtcaaaggtcaggggtcagccttccgctttgcacaaaatggaggagaaatacatccgggtcaaaggtcgc

SEQ ID NO: 168559 - DNA, 80 bp, synthetic construct
  source 1..80: mol_type = other DNA
ccatattggcccttggaactgaaaaaccccccgtcaatcacatcacagatgccatctctcgctgccgcgagctggttggc

SEQ ID NO: 168560 - DNA, 80 bp, synthetic construct
  source 1..80: mol_type = other DNA
gcacgtagccgacctgctgaaaggccaacgtgtactagtagcgcgccacctcgaatacacgtcgcgagaccgcgacttcc

SEQ ID NO: 168561 - DNA, 80 bp, synthetic construct
  source 1..80: mol_type = other DNA
agaactattacgacgtctttggcaactctgaactgcatgataacgcagtacacgatgatggcaaaatatcaaattttgaa

SEQ ID NO: 168562 - DNA, 80 bp, synthetic construct
  source 1..80: mol_type = other DNA
gtctgctctatttggctacagtgaatatgtagaaagccaactgggcccctttcaagaccatgaaacagtaggcctagtag

SEQ ID NO: 168563 - DNA, 80 bp, synthetic construct
  source 1..80: mol_type = other DNA
tacgctgctcaactctacccattagacatcaatcctgaacctatatcaatggagaaagcagtttatggtgctgaaaactt

SEQ ID NO: 168564 - DNA, 80 bp, synthetic construct
  source 1..80: mol_type = other DNA
actccagatacatactcacaggctggttatatcacttgttggtatcaaaccaattttgtagttcccccaaacacaccaac

SEQ ID NO: 168565 - DNA, 80 bp, synthetic construct
  source 1..80: mol_type = other DNA
ctagtaataacccctgcaactattccagcttctggaactatggcgattgcgaactttgtggatggaacggatacatacaa

SEQ ID NO: 168566 - DNA, 80 bp, synthetic construct
  source 1..80: mol_type = other DNA
actacatgatttttatttgtgtggcccctttagctacaaagatgacctcaaaagctttactataaacacaacttacaagt

SEQ ID NO: 168567 - DNA, 80 bp, synthetic construct
  source 1..80: mol_type = other DNA
catctaaaagtaaattgcaccccagtgtgttttacaatgtatttgaagggaacaaacaaccagctgtgttaaaggatagt

SEQ ID NO: 168568 - DNA, 80 bp, synthetic construct
  source 1..80: mol_type = other DNA
gttcacagaggcaatagagatagacatagcgcatggccggcatctgaggtggacggtcaaggttacggacaaaggcctca

SEQ ID NO: 168569 - DNA, 80 bp, synthetic construct
  source 1..80: mol_type = other DNA
catttacatgcaacaagcagtgtttgaagatattagcagatcaggccccttctcacttaaagaaaacatacccagcgcaa

SEQ ID NO: 168570 - DNA, 80 bp, synthetic construct
  source 1..80: mol_type = other DNA
ggaggtgagcttctagcttttgactacactaattatgatggcagcctacatcctgtgtggttcaaggccctgggtaaagt

SEQ ID NO: 168571 - DNA, 80 bp, synthetic construct
  source 1..80: mol_type = other DNA
ccatggatatttaccgaatcccggtgcaaagtggaaatcaccaaagctctcaagtcttcggtttccagatccaacctggg

SEQ ID NO: 168572 - DNA, 80 bp, synthetic construct
  source 1..80: mol_type = other DNA
gctggcagctgttccgcctacggtgccacggttggacacagcaagtctctagccagatcagaacccgctgggaggaaagc

SEQ ID NO: 168573 - DNA, 80 bp, synthetic construct
  source 1..80: mol_type = other DNA
atattttacaaaacggattcccctgcttccaaccttccccacacccacatgaaagtgaagaaatccttcggtgcgaagat

SEQ ID NO: 168574 - DNA, 80 bp, synthetic construct
  source 1..80: mol_type = other DNA
tgctcatctcaatctactggctgctcgctatggttttactggggggccggcgccgccaggtggtcctggagcgctaccag

SEQ ID NO: 168575 - DNA, 80 bp, synthetic construct
  source 1..80: mol_type = other DNA
ctaatccatcccacatttcctgtttctgagattcatgaatcaatcagatggaccaagaaaccttcacaaatgcaggaaca

SEQ ID NO: 168576 - DNA, 80 bp, synthetic construct
  source 1..80: mol_type = other DNA
atcaaagtgttggaaacacgcgtgacattggcgctcgagcaggcgcaacgttccaatggcgccgtcgttaccgcggtgca

SEQ ID NO: 168577 - DNA, 80 bp, synthetic construct
  source 1..80: mol_type = other DNA
ggacacaggtggctggttaaacaatacctattgtaacaaaacatctaagacataacaaccgcacacctggtctccactgg

SEQ ID NO: 168578 - DNA, 80 bp, synthetic construct
  source 1..80: mol_type = other DNA
aggaaggggccaagttccagtatactggcagtgcagatggaggcccatgctgtggttccagcaacaagtactaaatgaca

SEQ ID NO: 168579 - DNA, 80 bp, synthetic construct
  source 1..80: mol_type = other DNA
tcttccactcgtgggactggcgacgagggttctataattcaaaaactctcaaaagaatgcttgaaaaatcagataatgat

SEQ ID NO: 168580 - DNA, 80 bp, synthetic construct
  source 1..80: mol_type = other DNA
ttgatggggacagggcggcgatgaacgcctacgcagaggccatcatggccgacgaggccctgcaagccaagatttcctgg

SEQ ID NO: 168581 - DNA, 80 bp, synthetic construct
  source 1..80: mol_type = other DNA
acattcccctgtatgctgctttctatggctacgaagactacctccaaagaacactaggcccctaccaagatgtagagacc

SEQ ID NO: 168582 - DNA, 80 bp, synthetic construct
  source 1..80: mol_type = other DNA
gtacgctgccgaagctaggaggatatacaacttagagaataaaatcaacaactatatacaattcaagaccaagcaccgca

SEQ ID NO: 168583 - DNA, 80 bp, synthetic construct
  source 1..80: mol_type = other DNA
gggagccgtgaacctcttcctcgtcctgcccatattctggtacattctgacggaggtgtggctggcctccttcctgcggc

SEQ ID NO: 168584 - DNA, 80 bp, synthetic construct
  source 1..80: mol_type = other DNA
gccccccagacagaccccagggtctccaggcagggtccggcatctccaggggcagcaggctcaccaccacaggcccccca

SEQ ID NO: 168585 - DNA, 80 bp, synthetic construct
  source 1..80: mol_type = other DNA
gggggagacccacaaataccagtaagatggagatgcaggtggtacccagcactatggaaccaacaaccagtattagaaga

SEQ ID NO: 168586 - DNA, 80 bp, synthetic construct
  source 1..80: mol_type = other DNA
ctacagggtttaaagtggctgctgagcttgaagtgccaggcactacagatgttgcaagcctccaagcactgagaaagcaa

SEQ ID NO: 168587 - DNA, 80 bp, synthetic construct
  source 1..80: mol_type = other DNA
aacactgctaactgcacctacaccataaacagcaccaaatatattatcaccgtgttctccccacatcattctgaacatac

SEQ ID NO: 168588 - DNA, 80 bp, synthetic construct
  source 1..80: mol_type = other DNA
aactgaggcggaaatttgagttgtttacctatatgcggtttgacatggaagtcacgtttgtcatcaccagtagacaactg

SEQ ID NO: 168589 - DNA, 80 bp, synthetic construct
  source 1..80: mol_type = other DNA
ggcgattatgagatcacctacatccgcgttggatcgcgcacgcttgacgtgtcgcgtgttacgcgggtggatgacggtga

SEQ ID NO: 168590 - DNA, 80 bp, synthetic construct
  source 1..80: mol_type = other DNA
cccgaatgaactcggtctaacatcagctcaggatgatggtccattaggtggggaaaagcctaattatttcctcaacttca

SEQ ID NO: 168591 - DNA, 80 bp, synthetic construct
  source 1..80: mol_type = other DNA
aacctcatatacaaaccactatcaaaaccacttatataacaatattcaactttatcaaacatttcaaacaatagctcaga

SEQ ID NO: 168592 - DNA, 80 bp, synthetic construct
  source 1..80: mol_type = other DNA
atgcaaaaagtaagcctgcgcgtgaccccccgcctggtgctggaagttaaccgccataacgccatctgcgtggccaccaa

SEQ ID NO: 168593 - DNA, 80 bp, synthetic construct
  source 1..80: mol_type = other DNA
aagcttgatgccctggtggatgggatggtcaacatgtcactggacacagttcaaaacacgatggctagtggatctgtgca

SEQ ID NO: 168594 - DNA, 80 bp, synthetic construct
  source 1..80: mol_type = other DNA
cactatcaggcctttgccacagaagcccaccttagacccagagacagaactcctcaaggagacccaatatcaaataatgg

SEQ ID NO: 168595 - DNA, 80 bp, synthetic construct
  source 1..80: mol_type = other DNA
gcacactcgcaggaggtgccagcattgacagctgttgaaactggagctaccaacccacttgaaccctcagacacagttca

SEQ ID NO: 168596 - DNA, 80 bp, synthetic construct
  source 1..80: mol_type = other DNA
ggtgccaccagcacagtagtgcctgcagaccttgtgcagacacgcagcgtcatccaggcacgcagcaggagtaggtccgc

SEQ ID NO: 168597 - DNA, 80 bp, synthetic construct
  source 1..80: mol_type = other DNA
aatagtgagtaaagctactacaaaagagaaaaatttatatagcatacacacaccaacaaaaaccaaattacagccaagtg

SEQ ID NO: 168598 - DNA, 80 bp, synthetic construct
  source 1..80: mol_type = other DNA
aggtgtacccaaaaaccgcaaagaggcaatgttgggtactcacatcatatgggatatcggattgcaatctagctgcgtat

SEQ ID NO: 168599 - DNA, 80 bp, synthetic construct
  source 1..80: mol_type = other DNA
gggtcatcacaacacgcaaagttgcacagctaagacgtaaactagagatgttcacctacctgagatttgacatggagatc

SEQ ID NO: 168600 - DNA, 80 bp, synthetic construct
  source 1..80: mol_type = other DNA
ctatgaagttgaggggggcatgccatcagggtgttcaggcactagtgtcttcaattcaatgataaacaacataatcatta

SEQ ID NO: 168601 - DNA, 80 bp, synthetic construct
  source 1..80: mol_type = other DNA
tgtgcatggtgtctgcgtgcaatgatttctcagtacgcatgctgagagacaccaaattcattgaacaaacgtctttctac

SEQ ID NO: 168602 - DNA, 80 bp, synthetic construct
  source 1..80: mol_type = other DNA
ttgggagccgcctttgggtctggattcactaaccaaatcggtgacaaaattagtgaaatcacatcgatggtgacatccac

SEQ ID NO: 168603 - DNA, 80 bp, synthetic construct
  source 1..80: mol_type = other DNA
aaatggaaaatatcactgctggaaatggcacaaatcagaaggaagtgtgaactttttacataccttagatttgactcaga

SEQ ID NO: 168604 - DNA, 80 bp, synthetic construct
  source 1..80: mol_type = other DNA
ctaagactaactacactagctatgtaaatgcaaatcctggagagaaaggtggtgagtttgttagtgtctttaacccagat

SEQ ID NO: 168605 - DNA, 80 bp, synthetic construct
  source 1..80: mol_type = other DNA
aaaagaagttccagccctgacagcggttgaaaccggggccacaagtcaggtcgtacctgctgatctcattgagacaagac

SEQ ID NO: 168606 - DNA, 80 bp, synthetic construct
  source 1..80: mol_type = other DNA
agggcggattctgtaacgttcgttatccgcacacgtactgcgtgacggctagtagcatcttgccttttctttaggtgttt

SEQ ID NO: 168607 - DNA, 80 bp, synthetic construct
  source 1..80: mol_type = other DNA
ttgcctgacgcattgtccaatctaggattatttgggcagaatatgcaatatcattatctgggccgaactgggtacaccat

SEQ ID NO: 168608 - DNA, 80 bp, synthetic construct
  source 1..80: mol_type = other DNA
aggacaagcactactgcagaggtaggggtggtgcaaaaagcagtgtacaacgcagggatgggaattggtgttggaaactt

SEQ ID NO: 168609 - DNA, 80 bp, synthetic construct
  source 1..80: mol_type = other DNA
atccctgcaactgtctcccaccaagtccatcctgaaaaaggcaccggagcccccacctccggagccccaagccaccttcg

SEQ ID NO: 168610 - DNA, 80 bp, synthetic construct
  source 1..80: mol_type = other DNA
actgtggcttcgacgtaactgtcgtggtcaatgcctcccagttccatggcggcgccttgattgttttggctatggctgaa

SEQ ID NO: 168611 - DNA, 80 bp, synthetic construct
  source 1..80: mol_type = other DNA
ctgagtcgactgtggagaatttcctcggtcggtcggcatgcgtgtacatggaagagtacaagaccactgataagcatgtt

SEQ ID NO: 168612 - DNA, 80 bp, synthetic construct
  source 1..80: mol_type = other DNA
aatcgagaacttcttaagccgctctgcatgtgtctattatgcaacgtacaaaacaacagccagcagacccgaagaccaat

SEQ ID NO: 168613 - DNA, 80 bp, synthetic construct
  source 1..80: mol_type = other DNA
ggattccatgctcagacacaacaattggtctctgttgattgtgccgatctcccagcttaggggtgataactctataccca

SEQ ID NO: 168614 - DNA, 80 bp, synthetic construct
  source 1..80: mol_type = other DNA
ctccccgcaacgatgaacattaccttaagggacaatggtactcaagtatacttagctctcactctgctttctgtggctgc

SEQ ID NO: 168615 - DNA, 80 bp, synthetic construct
  source 1..80: mol_type = other DNA
cgagaaatgccttgacaccactgacacctgccaacaacttgcctgatacacaatctagtggcccagcccactctaaggaa

SEQ ID NO: 168616 - DNA, 80 bp, synthetic construct
  source 1..80: mol_type = other DNA
acccgaaaatcctcggaccgtcgacagtcttccacacatgggacatcagacgtggcctctttagcacagcaagtcttaag

SEQ ID NO: 168617 - DNA, 80 bp, synthetic construct
  source 1..80: mol_type = other DNA
acgcggaaaagacgcggaaaagaggaagtccccaggggccgcgggggaaacaacagacgaagtacggcacaacccgccgg

SEQ ID NO: 168618 - DNA, 80 bp, synthetic construct
  source 1..80: mol_type = other DNA
ggttcgcctgaactcggcggcaatgtcggagagtaccggccagtatttggccatgtcccgccgctggagttcctctaggg

SEQ ID NO: 168619 - DNA, 80 bp, synthetic construct
  source 1..80: mol_type = other DNA
tacgttctgatccactttaacgttccggcaactctgagacacaaactacgaactagaaacaacgtaaatcgcatagcgtg

SEQ ID NO: 168620 - DNA, 80 bp, synthetic construct
  source 1..80: mol_type = other DNA
cagtagacacagttttcaataactttttatacagtaaagcagccttttaccaacaagtactagtagactcttacattaaa

SEQ ID NO: 168621 - DNA, 80 bp, synthetic construct
  source 1..80: mol_type = other DNA
ggaccaccatattcaatgatatgggaaaattgtgcttccgagcactggaagacactacacaacagaccatcaaagtttat

SEQ ID NO: 168622 - DNA, 80 bp, synthetic construct
  source 1..80: mol_type = other DNA
aaactttgtccagatgtccaggggtccccgagggcgaggcccagccccctcccgcccctgtccactgccccggtcccgcc

SEQ ID NO: 168623 - DNA, 80 bp, synthetic construct
  source 1..80: mol_type = other DNA
acagcggtagacacactatgtgctgctttcaaggtggaccccgggcgtgatggtccgtggcaatcaacactggttggtca

SEQ ID NO: 168624 - DNA, 80 bp, synthetic construct
  source 1..80: mol_type = other DNA
ctccaaaaagagagttttgtccagtggattacctcctaggatgtggggtgttgctgggaaacgcctttgtgtacccacac

SEQ ID NO: 168625 - DNA, 80 bp, synthetic construct
  source 1..80: mol_type = other DNA
cccagcagataactacaaacaagcaaataaagatactacatactatggaagagtagacagtcactggggagatcatgtat

SEQ ID NO: 168626 - DNA, 80 bp, synthetic construct
  source 1..80: mol_type = other DNA
agtcaaagagaatcagagatctcaaaaacaaaattatgaactacatgcaattcaaaaacaagcagaggaccgaaccagtt

SEQ ID NO: 168627 - DNA, 80 bp, synthetic construct
  source 1..80: mol_type = other DNA
ttttagacaacttgggcttcccaggggagttaatgatcaaattatgtaacacaacacatatctataaagataacatctac

SEQ ID NO: 168628 - DNA, 80 bp, synthetic construct
  source 1..80: mol_type = other DNA
cgcgacgacggtgttgctggaggtctggcggcagcagtacacgtcgagcgtcatgagggccatgtcgccttggtggtaca

SEQ ID NO: 168629 - DNA, 80 bp, synthetic construct
  source 1..80: mol_type = other DNA
gggtgaaacaaatcaaaaaaaagaagtggttaactatgtcaacaaagtataagtggacaagaaacaaaattgatatagca

SEQ ID NO: 168630 - DNA, 80 bp, synthetic construct
  source 1..80: mol_type = other DNA
atttgacaggccacccagaagcaagcttacagacactcctttctacccctactgtaaaaatcaatacaatgtaacctttc

SEQ ID NO: 168631 - DNA, 80 bp, synthetic construct
  source 1..80: mol_type = other DNA
gtaatgcaggaatgggagtgggcgtaggcaatctaaccatttaccctcaccagtggattaacttgcgcaccaacaactgc

SEQ ID NO: 168632 - DNA, 80 bp, synthetic construct
  source 1..80: mol_type = other DNA
tgccacttctccagaaaagaccgtcgcggttgttcgccagggtgcccgctgtgccctcggcgacatcgaccccgatgatc

SEQ ID NO: 168633 - DNA, 80 bp, synthetic construct
  source 1..80: mol_type = other DNA
attggaaaacgccgtagtcgcagcggatagcatcttcgcagcgctcgtcgcgctgtcggagataggtgccccaggcttcg

SEQ ID NO: 168634 - DNA, 80 bp, synthetic construct
  source 1..80: mol_type = other DNA
cttcgagagatgacatcaagtcagtgaccactgtaggacctagtgacttatatgtgcacgcaggtcactataaatacatt

SEQ ID NO: 168635 - DNA, 80 bp, synthetic construct
  source 1..80: mol_type = other DNA
gggctcatgggaagccgccgtttcttcttcttgcgacgtcgcggagtcggtttgagactcgccgttcgcttcccccaatt

SEQ ID NO: 168636 - DNA, 80 bp, synthetic construct
  source 1..80: mol_type = other DNA
acatgatcccggaaggtaccaccaaggcggttgaaacagcccgcctcaattccggcttcgtgtacccctatgtcatcctc

SEQ ID NO: 168637 - DNA, 80 bp, synthetic construct
  source 1..80: mol_type = other DNA
ctaggtggggactcaacgccttcggagccgcgcgctacgccttcggctgcgcgcggcacctcagacccccgctcgtgctg

SEQ ID NO: 168638 - DNA, 80 bp, synthetic construct
  source 1..80: mol_type = other DNA
aacgagttatgattaccagaaatcatcaaaaaaatatgctgctgcggaccaatctagaacgcctcacccattcgacaaag

SEQ ID NO: 168639 - DNA, 80 bp, synthetic construct
  source 1..80: mol_type = other DNA
gaatggtgacagataaacagaaaattaagaccaagattgactcaagaatatatctaaaagcaaaacacatcaaagcttgg

SEQ ID NO: 168640 - DNA, 80 bp, synthetic construct
  source 1..80: mol_type = other DNA
ctgactctgagaatattctatgacgaacacctacgcttcttaaacttttggacaaagagcaacgaggacttagacctgtg

SEQ ID NO: 168641 - DNA, 80 bp, synthetic construct
  source 1..80: mol_type = other DNA
cccttgtatttgctattcaatcaacctgattccccctgctcatacctccactcacaaccaagccactacggccacgtcca

SEQ ID NO: 168642 - DNA, 80 bp, synthetic construct
  source 1..80: mol_type = other DNA
attacagctggtggtgaaggggttgtcgcatttgcagatgtgagagacctgttcgcatatgaagaacaagccatggagca

SEQ ID NO: 168643 - DNA, 80 bp, synthetic construct
  source 1..80: mol_type = other DNA
ctgggacgttggcgggacaggcacggtggcttgggctgtggtaaccggtgggctcgtaaaagtccagcggagccgcagtt

SEQ ID NO: 168644 - DNA, 80 bp, synthetic construct
  source 1..80: mol_type = other DNA
aaccgaagtctacgtcgtgcacttcctgggcgtggtttacatcctaatataactacaagcacttccgaatggctgagttt

SEQ ID NO: 168645 - DNA, 80 bp, synthetic construct
  source 1..80: mol_type = other DNA
caaacactccaaatacagcagatatgttatgctttgtatcagcttgtaaagacttttgcttacgcatggctagggacaca

SEQ ID NO: 168646 - DNA, 80 bp, synthetic construct
  source 1..80: mol_type = other DNA
tgaccacagccagaaccagcttgaatgacgtcccaacacctaaccacagtactagcgtgcacatgagattacaaacaaga

SEQ ID NO: 168647 - DNA, 80 bp, synthetic construct
  source 1..80: mol_type = other DNA
tccctggtcacgtgactctgacgtcacggcggccattttgtgctgtccgccatcttgtgacttccttccgctttttcaaa

SEQ ID NO: 168648 - DNA, 80 bp, synthetic construct
  source 1..80: mol_type = other DNA
ttctgtacttgtggtttatcaccgttttttgtcaccagtactttatgccataagctactattttgacctttgacccatga

SEQ ID NO: 168649 - DNA, 80 bp, synthetic construct
  source 1..80: mol_type = other DNA
agaataggaacagtatttaacacatttaaaacagaagaacatattaaagacccaccaatagtacctgcaaaaaatgaaac

SEQ ID NO: 168650 - DNA, 80 bp, synthetic construct
  source 1..80: mol_type = other DNA
cccctcaaagcttcagaaaacaatgccaatgagtccatcttttccatatcattgagccctgcggcagataacaggttatc

SEQ ID NO: 168651 - DNA, 80 bp, synthetic construct
  source 1..80: mol_type = other DNA
acatagatctgcccaaattacaaaactttactaaaagtgggccaacctatgacaatccacacttttcaaacaaagagcac

SEQ ID NO: 168652 - DNA, 80 bp, synthetic construct
  source 1..80: mol_type = other DNA
tggatttacccctctgactaattacacactcaaccttattagaattgtagttctagtgagatactactgtcataatggga

SEQ ID NO: 168653 - DNA, 80 bp, synthetic construct
  source 1..80: mol_type = other DNA
aaatcatacaggtagatacactcattcctatgaacaacacacatgcaagggatgaagtcaatagttatcttataccatta

SEQ ID NO: 168654 - DNA, 80 bp, synthetic construct
  source 1..80: mol_type = other DNA
caacaaaacctcaccagactatggatatgtagtatatgactctctgtttggacaaggaaaaatgccaggcggtacctccc

SEQ ID NO: 168655 - DNA, 80 bp, synthetic construct
  source 1..80: mol_type = other DNA
aggggttaaactaatcttctacagacaccccactgtagactttatggtgcagatacacacacaacctcctttcctagaca

SEQ ID NO: 168656 - DNA, 80 bp, synthetic construct
  source 1..80: mol_type = other DNA
gccactaaacctaacacagagtacatagaggcccaagcaaaatgcaccatcacaaacatacccttgtatgctgcttttta

SEQ ID NO: 168657 - DNA, 80 bp, synthetic construct
  source 1..80: mol_type = other DNA
agaagaggaattaacactacattacaaaaataaagtatttcctattgagaacccatcagttacacaggtgacattaggtg

SEQ ID NO: 168658 - DNA, 80 bp, synthetic construct
  source 1..80: mol_type = other DNA
gtccttgctcggatgctgactgttgaaactgacatatattctttacccccagatcccaaatattttgatgggtatgatca

SEQ ID NO: 168659 - DNA, 80 bp, synthetic construct
  source 1..80: mol_type = other DNA
ggaaatttactgggttaggaatatatgataatgttatgatcatcccaacacatgctgatgcaggcaaagaagtggaaata

SEQ ID NO: 168660 - DNA, 80 bp, synthetic construct
  source 1..80: mol_type = other DNA
agatacatatataaggtcttaccacaagggtggaagggatcaccagcaatctttcaatatacaatgaggcagatcttaga

SEQ ID NO: 168661 - DNA, 80 bp, synthetic construct
  source 1..80: mol_type = other DNA
tgctcggggtccccttggcgttttcttaaagaaaaattctgcaagtggacacaacttaattatgtgcacaaagaatcaga

SEQ ID NO: 168662 - DNA, 80 bp, synthetic construct
  source 1..80: mol_type = other DNA
attaacacacctagaaactctaaactccaaccaagtgttttccatgatgttttccctggaaagaaagaacctgccgtttt

SEQ ID NO: 168663 - DNA, 80 bp, synthetic construct
  source 1..80: mol_type = other DNA
aatcaggcaatgttaatttcgagcctaagggagttactgaaagcagaccgtccataaagctagagaagagcagccacggt

SEQ ID NO: 168664 - DNA, 80 bp, synthetic construct
  source 1..80: mol_type = other DNA
atccgcatgtgtgtacttgggagaatacagggctacaggagaagaagagggtgatgtgaagcaatttgcagtgtggaata

SEQ ID NO: 168665 - DNA, 80 bp, synthetic construct
  source 1..80: mol_type = other DNA
caagaagaggagctaacactacactataagaacaaggtattcccaattgaaagcccttcagtcacacaagtaactcttgg

SEQ ID NO: 168666 - DNA, 80 bp, synthetic construct
  source 1..80: mol_type = other DNA
tggggagatgctattcacattaccaatgaacaaaaccttgaaaaagttaaagaaatcataactaacaatgcaaaaaacta

SEQ ID NO: 168667 - DNA, 80 bp, synthetic construct
  source 1..80: mol_type = other DNA
aactgaacgtaaccgcagcggatctgcaacatccgttcggctcaccactaactgacactccttgcatcaccttccaagtt

SEQ ID NO: 168668 - DNA, 80 bp, synthetic construct
  source 1..80: mol_type = other DNA
actccgtgcaaagacccgccgcgaaagccccccgagcgcccgcgacaccccgtccccagcgtcggtctcgcgaaacgaaa

SEQ ID NO: 168669 - DNA, 80 bp, synthetic construct
  source 1..80: mol_type = other DNA
acttatgctactccaaaaacacagaatagtagtgcccagcctactcaccaaacctaaaggcaagagatccataaaagtca

SEQ ID NO: 168670 - DNA, 80 bp, synthetic construct
  source 1..80: mol_type = other DNA
gagtcaccaccaccagagacaagataaccctagacaaaattacacatgtcccgtctgcacgaacgacgggggcttttggc

SEQ ID NO: 168671 - DNA, 80 bp, synthetic construct
  source 1..80: mol_type = other DNA
gaggtgcccaagacttattagcggcattagctacgtcccacattaaactggcggtcttcttgggtaaaccaggagccaca

SEQ ID NO: 168672 - DNA, 80 bp, synthetic construct
  source 1..80: mol_type = other DNA
cccagttttgcggctacatcctcgtgagtctgctggactccgaggaccaggtcgaccacctcaacatattcccccacgtg

SEQ ID NO: 168673 - DNA, 80 bp, synthetic construct
  source 1..80: mol_type = other DNA
ataattgaaaccatcacaagtaacggtccacgtaaccgtaaatcgccagtccattgcaatattagttttcgctcaatggg

SEQ ID NO: 168674 - DNA, 80 bp, synthetic construct
  source 1..80: mol_type = other DNA
ttcacctaagtattttgatggatatgatcaacaaagtgtggtcataatggatgatataatgcaaaatccaaatggtgagg

SEQ ID NO: 168675 - DNA, 80 bp, synthetic construct
  source 1..80: mol_type = other DNA
agattataatgatagagtcaaaaattatgaaacttggaagaaacaattagaggatcaaactatggatgatctagatgaca

SEQ ID NO: 168676 - DNA, 80 bp, synthetic construct
  source 1..80: mol_type = other DNA
tggctgtcccccggcagatcctactttgaaacaccaggagcatacacagacataaaatacaacccatttacagacagagg

SEQ ID NO: 168677 - DNA, 80 bp, synthetic construct
  source 1..80: mol_type = other DNA
cgaccagtttcgtgtaaccttcaaactgggctttcaataaaatttcaaggcagtaccctgttcacctgtcggtgtctacc

SEQ ID NO: 168678 - DNA, 80 bp, synthetic construct
  source 1..80: mol_type = other DNA
gatttaaatgacatcatgcaaaatattgagcccacctatcctcatggtcttcgagtagtatatgaaagtcttccttttta

SEQ ID NO: 168679 - DNA, 80 bp, synthetic construct
  source 1..80: mol_type = other DNA
tccagacacgtccagtacggaaataccgattactgtcacaattgccccaatgtgctgtgaattcaacgggctcagaaata

SEQ ID NO: 168680 - DNA, 80 bp, synthetic construct
  source 1..80: mol_type = other DNA
ctctttcctactacagaacaaacgcagagttaaaatccccagctttaaaaccaaaccatttggcagaaaaagagtaagag

SEQ ID NO: 168681 - DNA, 80 bp, synthetic construct
  source 1..80: mol_type = other DNA
acctaaccgcagctgatttccaacatccgttcggctcaccactaactgacactccttgcatcaccttccaggtcctgggg

SEQ ID NO: 168682 - DNA, 80 bp, synthetic construct
  source 1..80: mol_type = other DNA
tgaaagatagcgaggcaacttcggaggaccagcctacacagccagatgtcgccacgtgcagattttacacgctagaatca

SEQ ID NO: 168683 - DNA, 80 bp, synthetic construct
  source 1..80: mol_type = other DNA
agatgcgtaggaagtttgaactcttcacttacctgcgctttgatgtggaggttacatttgtaataaccagcaggcaagat

SEQ ID NO: 168684 - DNA, 80 bp, synthetic construct
  source 1..80: mol_type = other DNA
tgatgtagtggatatagatgggagggaggtgcgtgtcttgaaacagcaagtgctcactgatttgaatgatgtagatacag

SEQ ID NO: 168685 - DNA, 80 bp, synthetic construct
  source 1..80: mol_type = other DNA
ctcagaaagcagctccgagaacagcgagacctccgagtccaactcagagccctgttcgcccaagtcctcaaaacgcaagc

SEQ ID NO: 168686 - DNA, 80 bp, synthetic construct
  source 1..80: mol_type = other DNA
aaccagaccaatgaaaacgacagggaaacattatttaacaatgtgttgtggttggaacaaatgtcacaaaagtttgctcc

SEQ ID NO: 168687 - DNA, 80 bp, synthetic construct
  source 1..80: mol_type = other DNA
acctggacattttacagacaccagaccacagactacataatcacattcagcaggagggctcccctgggagggaacataat

SEQ ID NO: 168688 - DNA, 80 bp, synthetic construct
  source 1..80: mol_type = other DNA
caagaggaagaattgacactacattacaaaaataaagtttttcctattgcaagtccatcagtgactcaggtgactcttgg

SEQ ID NO: 168689 - DNA, 80 bp, synthetic construct
  source 1..80: mol_type = other DNA
gccccgagaactcattttccaggtctggcagaggtgttgggcatattggcgtgaggagcagggcatgtccattagctaca

SEQ ID NO: 168690 - DNA, 80 bp, synthetic construct
  source 1..80: mol_type = other DNA
ttgctcccctggactacactgcccaagcatctgagtatgtgccagtgactgtcacgattgccccaatgtgtgctgagtac

SEQ ID NO: 168691 - DNA, 80 bp, synthetic construct
  source 1..80: mol_type = other DNA
tttaatggcaactttgatgaactgctgaagattatggggtatacaagtggtgatctttatgaaattctacatagtgaatt

SEQ ID NO: 168692 - DNA, 80 bp, synthetic construct
  source 1..80: mol_type = other DNA
tttgaaaactggctatataaaaaatgcacccactatcagacattcgccacagacacaagactagcccctcagaaaaaagc

SEQ ID NO: 168693 - DNA, 80 bp, synthetic construct
  source 1..80: mol_type = other DNA
agtcccagcgttaacagcagtcgaaacagggcacacatcccaggtcgtacccagtgacaacatgcaaaccagacacgtga

SEQ ID NO: 168694 - DNA, 80 bp, synthetic construct
  source 1..80: mol_type = other DNA
ggcctttcaaaaaaaagtactcacagaccttagcatgagcggaccgtggacttacaaagacgagcttaaaaacaccacca

SEQ ID NO: 168695 - DNA, 80 bp, synthetic construct
  source 1..80: mol_type = other DNA
agaagtccgtcactaaccacgtgactcccacaggccacccatatgctacgttgtgcacttcctgggcggagtttatgtcc

SEQ ID NO: 168696 - DNA, 80 bp, synthetic construct
  source 1..80: mol_type = other DNA
gggccccatacttctctaaagtgatggggttaaaaaacgtctagagggccaaacccaggtgggaccctggattcctttta

SEQ ID NO: 168697 - DNA, 80 bp, synthetic construct
  source 1..80: mol_type = other DNA
acgccaccaaattccacagtggagctttgttagtagcagttgtccctgaacatcagttggcatacattggagtcgatgcc

SEQ ID NO: 168698 - DNA, 80 bp, synthetic construct
  source 1..80: mol_type = other DNA
cgaagaagaagagtccagttcgcagacgcagacgacgccactacagctcatcctcaggaagcagctccgagagcagagag

SEQ ID NO: 168699 - DNA, 80 bp, synthetic construct
  source 1..80: mol_type = other DNA
tcatgtttaggagactcatgacgatggtgtacaacacgacgctgacacagacgctgtttttagacagcgttccacgctgg

SEQ ID NO: 168700 - DNA, 80 bp, synthetic construct
  source 1..80: mol_type = other DNA
ccgagaacaacaatggttcgagtccaccgttagaagccacgacgctttctgtggctgtggtgattccgtgcttcatttta

SEQ ID NO: 168701 - DNA, 80 bp, synthetic construct
  source 1..80: mol_type = other DNA
gagatttgatagtagtggagtcaagagcacagggaattgacaccatagcccggtgcaactgcaagtgtggcgtatactac

SEQ ID NO: 168702 - DNA, 80 bp, synthetic construct
  source 1..80: mol_type = other DNA
gcagtagagacgggtgctagcggacaagcagtgcccgcagatgttatagagaccagaaaggtgattaactacaaaaccag

SEQ ID NO: 168703 - DNA, 80 bp, synthetic construct
  source 1..80: mol_type = other DNA
aacagaatttggttgttgcaacggcagcgcctgtcgtaatcttctagttctaaaacatggacggctaggggacatatggt

SEQ ID NO: 168704 - DNA, 80 bp, synthetic construct
  source 1..80: mol_type = other DNA
gcgagatcagcccgagcctgagctatggcgtggtcgtggtggtggaggcgaaggaaacgatggtggccgcgcagaaggag

SEQ ID NO: 168705 - DNA, 80 bp, synthetic construct
  source 1..80: mol_type = other DNA
caataaatacacctgagaagacaaagttacaccgcagtgtgttttatgatgttttccccggagaaaaggaaccagcagtg

SEQ ID NO: 168706 - DNA, 80 bp, synthetic construct
  source 1..80: mol_type = other DNA
gacaccacacacatagaacaaaaggcaattacacaaggtttgggccagatgcttgagagtatgatagacaacacagtccg

SEQ ID NO: 168707 - DNA, 80 bp, synthetic construct
  source 1..80: mol_type = other DNA
ccacaagcgacggtccaagaacaactactccagcagctccgagagcagcgagtcctcagagagcacctccagcaactcgc

SEQ ID NO: 168708 - DNA, 80 bp, synthetic construct
  source 1..80: mol_type = other DNA
cggcggcggtggtggtggcgggagagatttcaaggcaatgaaaaaaaaaatttcgttttgccatcaagtggtgacgataa

SEQ ID NO: 168709 - DNA, 80 bp, synthetic construct
  source 1..80: mol_type = other DNA
ccggagatgtttgcagagcaccccggcctggtgtttgaggtggaggagcgcagcgtgggtgaggtgctgcagaccctgcg

SEQ ID NO: 168710 - DNA, 80 bp, synthetic construct
  source 1..80: mol_type = other DNA
gcgtcctgcccatgattctagccggcgcgggccgctttgcttttaactacggactgcacagcgacgacataacagtccag

SEQ ID NO: 168711 - DNA, 80 bp, synthetic construct
  source 1..80: mol_type = other DNA
ggcaaaaacgacgtgtacggagacaataaggcccagtacaggtctagtacccaccttctagaataccacctaggcatcta

SEQ ID NO: 168712 - DNA, 80 bp, synthetic construct
  source 1..80: mol_type = other DNA
tttaattcgtgggtcacaccacctggctcaacacaattcattccaggaaacagtaatgtgcactacaacttttgtacgta

SEQ ID NO: 168713 - DNA, 80 bp, synthetic construct
  source 1..80: mol_type = other DNA
attagatatccaaaatactttggctggctatggcagctggaaccagtggacgtctcagaagaaaatgatgagacaaattg

SEQ ID NO: 168714 - DNA, 80 bp, synthetic construct
  source 1..80: mol_type = other DNA
gttagtctgggaattaataagaaatccatcttgaatagagaaacaaaggaagttgccaagatgcaagagtgcctaagcaa

SEQ ID NO: 168715 - DNA, 80 bp, synthetic construct
  source 1..80: mol_type = other DNA
tggatttactccgattacttctttcacttacaaaatcatcaccacagttttgctaattagaaatacataccataatgggt

SEQ ID NO: 168716 - DNA, 80 bp, synthetic construct
  source 1..80: mol_type = other DNA
aggaaaatcattgactacctcgataatcgggagagcaatagcagaacaatttaactcagcagtctactcccttcccccag

SEQ ID NO: 168717 - DNA, 80 bp, synthetic construct
  source 1..80: mol_type = other DNA
ctgacaaattctacgatgaggaattcttccagatgcaccgggatgagctggagacccgagtctctgctttcgcgcagagc

SEQ ID NO: 168718 - DNA, 80 bp, synthetic construct
  source 1..80: mol_type = other DNA
aaagtgaatgataggaatatattaattctacccttggaaatggacaacacactattctctagcacactcctaggtgaagt

SEQ ID NO: 168719 - DNA, 80 bp, synthetic construct
  source 1..80: mol_type = other DNA
aagcatcgacacgtgtgccaactttacctgctccttgaaggctgttggtaggatgattcaaccagaaaatgtgaagcatg

SEQ ID NO: 168720 - DNA, 80 bp, synthetic construct
  source 1..80: mol_type = other DNA
gcgaccgcatccaacggctcccacacagttcagagcatagttacaaatgccggaatgggagttggtgttgggaaccttac

SEQ ID NO: 168721 - DNA, 80 bp, synthetic construct
  source 1..80: mol_type = other DNA
tcctagcatacacaccaccaggaacagaaggaccaaagaatagaaaggaagcaatgttaggcacacatgtagtgtgggat

SEQ ID NO: 168722 - DNA, 80 bp, synthetic construct
  source 1..80: mol_type = other DNA
aagctattgatctcatactcacccccaggagcttccgtccccacatcgcggaaggatgcgatgttaggcacacacatcat

SEQ ID NO: 168723 - DNA, 80 bp, synthetic construct
  source 1..80: mol_type = other DNA
ctcgtaaaagtgcgacttattcagacaacggtgagtggttccagtggaaacaaatgatataacgcttacaattcttggaa

SEQ ID NO: 168724 - DNA, 80 bp, synthetic construct
  source 1..80: mol_type = other DNA
tctactttaaacccaaacatgtcagggcgtgggttcctaggccaccgagactgtgccagtatgagaagcagggcagcgtc

SEQ ID NO: 168725 - DNA, 80 bp, synthetic construct
  source 1..80: mol_type = other DNA
acagcacccaatttggccacaatacttattcgcctgacataaataaactaacagcagcaaacgattgctactggacagca

SEQ ID NO: 168726 - DNA, 80 bp, synthetic construct
  source 1..80: mol_type = other DNA
taacaactcccaatgaacgcacaatacttcttgcaataactgcagatctgcaagtggatgagtgtgaccaaccgggtcct

SEQ ID NO: 168727 - DNA, 80 bp, synthetic construct
  source 1..80: mol_type = other DNA
cccaatgcttcgagcatactgccgccactatggccccaggcccgtgtttgtagcttctgatgaatcattacccatgttcg

SEQ ID NO: 168728 - DNA, 80 bp, synthetic construct
  source 1..80: mol_type = other DNA
ctgaagcaagcgaatggcaaagatactggtcaaataaagaaaccacctatcaaggacaaacatacccacaaacctcaact

SEQ ID NO: 168729 - DNA, 80 bp, synthetic construct
  source 1..80: mol_type = other DNA
tgaccagctacaacactctgtgctacattgttagattgaacacagcaaaatgggcgcccaggtttcgactcaaaagactg

SEQ ID NO: 168730 - DNA, 80 bp, synthetic construct
  source 1..80: mol_type = other DNA
catgggaaatttccacccgtgagctggtacagatgcgcaggaagatggaattgtttacatacatgaggtttgatgtggag

SEQ ID NO: 168731 - DNA, 80 bp, synthetic construct
  source 1..80: mol_type = other DNA
gcctgacaccccaacgtcatgtgatatcatgtgctttgtgtcggcatgcaatgatttttctgtccgcatgttaagggata

SEQ ID NO: 168732 - DNA, 80 bp, synthetic construct
  source 1..80: mol_type = other DNA
acaagaggacctctgtcccgttaatcttgtgtcacttgcggtttctgcggctacactgacacatccgttctgcccaccac

SEQ ID NO: 168733 - DNA, 80 bp, synthetic construct
  source 1..80: mol_type = other DNA
gtacctgccgatttggtagtaatgcagacactagttgtagggcccacgaaggatgcccagaaggtacccgtaggtaacaa

SEQ ID NO: 168734 - DNA, 80 bp, synthetic construct
  source 1..80: mol_type = other DNA
gcgcgacacgtgaacaaggatacaccgtatcaaatgtcgagcacgattcgtgtgtactttaagcctaagcacattagggt

SEQ ID NO: 168735 - DNA, 80 bp, synthetic construct
  source 1..80: mol_type = other DNA
accacgattgcgatattgcacagagtcagcgcctgcccctccctcgagaacccaagttggaggctctgcacgcctggctc

SEQ ID NO: 168736 - DNA, 80 bp, synthetic construct
  source 1..80: mol_type = other DNA
atgggtgcacaagtgagcaagcagagcaatggtactcacgaaaatattgtttcagcaagtaatggagctgtagtcaagta

SEQ ID NO: 168737 - DNA, 80 bp, synthetic construct
  source 1..80: mol_type = other DNA
cccaaacaaaacccaaaaatgccaaaaaaagacaatgccaatttgtctaaagacccttctaaactaacaaaaggtaatgt

SEQ ID NO: 168738 - DNA, 80 bp, synthetic construct
  source 1..80: mol_type = other DNA
cagcatctacacagacctcagtaacctaccagaccacaatacacaaagaacacacatacaaagaaaactacacccagaca

SEQ ID NO: 168739 - DNA, 80 bp, synthetic construct
  source 1..80: mol_type = other DNA
ccccaagggccgttagttataggggccccggggttgatctcctgtcaacatcagtgacccccttgtcaaagcacgatctc

SEQ ID NO: 168740 - DNA, 80 bp, synthetic construct
  source 1..80: mol_type = other DNA
gcctagatacgccttccaccagtgggactggcgacgtgggtggcttggtgacaaagctctcaaaagaatgctccagaaac

SEQ ID NO: 168741 - DNA, 80 bp, synthetic construct
  source 1..80: mol_type = other DNA
atgcttggtacacatatagtttgggatgttgggttgcaatcaacagtctccttagttgttccatgggttagcgccagtca

SEQ ID NO: 168742 - DNA, 80 bp, synthetic construct
  source 1..80: mol_type = other DNA
ggaaggttggaggctgggggcccggtcaggagctccgggagcggtgtcgaccgcgacggcttccgggtctcgcgtcggct

SEQ ID NO: 168743 - DNA, 80 bp, synthetic construct
  source 1..80: mol_type = other DNA
aattaatgttaagaagcatgattggtatgaaatccaagaatctgaatattatccaaaacatatccagtgtaatatactaa

SEQ ID NO: 168744 - DNA, 80 bp, synthetic construct
  source 1..80: mol_type = other DNA
tgactacattccaacttgtgactgtacagatgcaacatattattgcaaacacaagaatagatactacccaattaaagtta

SEQ ID NO: 168745 - DNA, 80 bp, synthetic construct
  source 1..80: mol_type = other DNA
gaggtcagacttgacagtcttggagaaccccctctcagtgaaggtaggatccgccagggtctgcaggataaacatgggag

SEQ ID NO: 168746 - DNA, 80 bp, synthetic construct
  source 1..80: mol_type = other DNA
atcttgggccatctgatctttatgtgcatactggtaatctaatatatagaaatttacatttgtgtgaaccagagaattta

SEQ ID NO: 168747 - DNA, 80 bp, synthetic construct
  source 1..80: mol_type = other DNA
atctttctaaagtactagactggtactggaaagaagtaacagcagacaatgacattacaggctcctatcaaaaagcaaac

SEQ ID NO: 168748 - DNA, 80 bp, synthetic construct
  source 1..80: mol_type = other DNA
tcacccccaccaacataactgagaagagacagagcattaattacatacctgatacggttaaaccggatgtctcgacctac

SEQ ID NO: 168749 - DNA, 80 bp, synthetic construct
  source 1..80: mol_type = other DNA
agggctccaaggaaccagctgtgctatcagacaaggatccacgtctgcaaactgattttaaaactgctttgttttctaaa

SEQ ID NO: 168750 - DNA, 80 bp, synthetic construct
  source 1..80: mol_type = other DNA
cccacatggggtaatcggtcttcttacagcaggagggggtggagttgtagctttcaccgatatcagaaacctgctatggt

SEQ ID NO: 168751 - DNA, 80 bp, synthetic construct
  source 1..80: mol_type = other DNA
acacagcacttaactttcaaggtaataaccaaaacgcgtgtaatgacacctggtactatggcaatgcatataaagataat

SEQ ID NO: 168752 - DNA, 80 bp, synthetic construct
  source 1..80: mol_type = other DNA
aacaacatgggccaactattctttaggcatgtaaacaaacctagccccaacacgttcacaagtgtcgctcgcatatactt

SEQ ID NO: 168753 - DNA, 80 bp, synthetic construct
  source 1..80: mol_type = other DNA
taacagtgtggttttctttattgactagcggagtacacagtttacgagtaaaaaagacagggaaaggttatataaaatgc

SEQ ID NO: 168754 - DNA, 80 bp, synthetic construct
  source 1..80: mol_type = other DNA
gggtatgggcactggaggccaaaactatgccgtccgctcagatgactttgtggtagtcaaggggcaattcgggctcgtga

SEQ ID NO: 168755 - DNA, 80 bp, synthetic construct
  source 1..80: mol_type = other DNA
caggcattaaagccccttcagaaagaaccagtagggaatgggattctgcgtcaaacccaagtgtattctaccaaccacat

SEQ ID NO: 168756 - DNA, 80 bp, synthetic construct
  source 1..80: mol_type = other DNA
ccatcagatcatgtacattccaccaggtggtccggtcccgaatagcgctacagattttgcatggcagtcctctactaacc

SEQ ID NO: 168757 - DNA, 80 bp, synthetic construct
  source 1..80: mol_type = other DNA
acagcatttacacaaacctcagcaacctacctcagcacagagaagacagacttaacattattaacaacacattacaccca

SEQ ID NO: 168758 - DNA, 80 bp, synthetic construct
  source 1..80: mol_type = other DNA
aatttctatgacggctattcccatgacagcagaaccacagtttatggaataaatgtgttaaatcacatgggagtcatggc

SEQ ID NO: 168759 - DNA, 80 bp, synthetic construct
  source 1..80: mol_type = other DNA
gcaacggcaagaccccagagggactgggccaggttcacccttactggatgcagagatggagaccagtgtcccaggtgcaa

SEQ ID NO: 168760 - DNA, 80 bp, synthetic construct
  source 1..80: mol_type = other DNA
gaaggcaaaggtggccgttgggccagagaccgcgagcacctccccgctgccctcttcgatgatgcgccggtacgtggccg

SEQ ID NO: 168761 - DNA, 80 bp, synthetic construct
  source 1..80: mol_type = other DNA
aggctgctgttgtaggtgcactgggtggtgttttcacgcaggaagcggatgggtctcccgtaggtgttgagtagtaggtg

SEQ ID NO: 168762 - DNA, 80 bp, synthetic construct
  source 1..80: mol_type = other DNA
cccgctccttctgcagctcctctcccctctgttctcccttctgtaccttctcaggaccccttcacccgtgcggtgaacga

SEQ ID NO: 168763 - DNA, 80 bp, synthetic construct
  source 1..80: mol_type = other DNA
cactactaggaacaacattcacgggagggtacccctacctagaataccacggaggtctgtactcctccatctggctctct

SEQ ID NO: 168764 - DNA, 80 bp, synthetic construct
  source 1..80: mol_type = other DNA
aaatttgttatttacgatctaacgttaaacgattctggaaagtacgttgtcaagagaacacgtcatgacaatcaatacga

SEQ ID NO: 168765 - DNA, 80 bp, synthetic construct
  source 1..80: mol_type = other DNA
atggacacacatgcacttggctaccaatgtcactaagtttccaatgttagacgtagagataggtgatgttataccatatg

SEQ ID NO: 168766 - DNA, 80 bp, synthetic construct
  source 1..80: mol_type = other DNA
ctcaagaagacctgtgtccggtacctcttgtgcaaattgtggtttctgcggccagcctgctacatccgttctgcccacca

SEQ ID NO: 168767 - DNA, 80 bp, synthetic construct
  source 1..80: mol_type = other DNA
ctccctcagtgtcccgccctcggtttccagtcgggagccgatggtgcagatgtccaacctgcccccaccagtgacctctc

SEQ ID NO: 168768 - DNA, 80 bp, synthetic construct
  source 1..80: mol_type = other DNA
tggattcactcctttgactaaattcacccctgacatcatcttagttgtgatactgattaggagacttcatcataatggga

SEQ ID NO: 168769 - DNA, 80 bp, synthetic construct
  source 1..80: mol_type = other DNA
agacactcccctgacgggtcccagcatacacccaggcatgctgatgctcacaaaaaacaaaatactaatacccagcctga

SEQ ID NO: 168770 - DNA, 80 bp, synthetic construct
  source 1..80: mol_type = other DNA
cattcaaaaaattagagacaaaagatttacattcttaacatcagtagggtccacagcaacacaaaaccagcatgtaaaca

SEQ ID NO: 168771 - DNA, 80 bp, synthetic construct
  source 1..80: mol_type = other DNA
aaaatgaaacaggtgacagcttcaagccagagtgggccaaaacacactcaaaaggtaccagcactaagtgctaatgaaac

SEQ ID NO: 168772 - DNA, 80 bp, synthetic construct
  source 1..80: mol_type = other DNA
gttaacactacaaacttaacacaacacccttctgctcctactatgcctttcaccccagatttccgcaatatagatatgtt

SEQ ID NO: 168773 - DNA, 80 bp, synthetic construct
  source 1..80: mol_type = other DNA
agtgggattttgtatctacaccacctttggtaaggttagcatataaccttgtcaaagagcctctagaacgagtggaaact

SEQ ID NO: 168774 - DNA, 80 bp, synthetic construct
  source 1..80: mol_type = other DNA
ttttggttgtgcggtctgttttccccgcgttttccgatagaatagctgcctggatctgcgcccagtcccctttctgcgaa

SEQ ID NO: 168775 - DNA, 80 bp, synthetic construct
  source 1..80: mol_type = other DNA
acccacaaacctctacaacaggtatgaacgcaaatggcactattacaggcatacaaggacaaatgtacaaagtgccatat

SEQ ID NO: 168776 - DNA, 80 bp, synthetic construct
  source 1..80: mol_type = other DNA
ctcctctaggtcagacaggtagcggacgaggccagaacccccagatgcatcatccccaaaggagggctgctgcccgaagg

SEQ ID NO: 168777 - DNA, 80 bp, synthetic construct
  source 1..80: mol_type = other DNA
gaaagggtggatagtcaaattagacaacaacttgatcattgaacgcaatttaaatagagccatgacaattttgcaagcag

SEQ ID NO: 168778 - DNA, 80 bp, synthetic construct
  source 1..80: mol_type = other DNA
agtaatagcccgtagggaagcgacagaggagatttgcctctccgaggatgagtcgctatgcgaacctgacgctgagttgg

SEQ ID NO: 168779 - DNA, 80 bp, synthetic construct
  source 1..80: mol_type = other DNA
tgttaaaacaacatgggagaatgtgacatttctgaaaagatacttcagacctgaccctcagtatcctttcctcatccacc

SEQ ID NO: 168780 - DNA, 80 bp, synthetic construct
  source 1..80: mol_type = other DNA
ctaaatctagagattacagttttagaattagatagaaatgaaaagtttagagatatcagaatgtttattgctgatgaatc

SEQ ID NO: 168781 - DNA, 80 bp, synthetic construct
  source 1..80: mol_type = other DNA
taccatgtttccctcaaccccatcaacttccagcaaagctccctcctcagtgtccttggtgcatttacctacatctatgc

SEQ ID NO: 168782 - DNA, 80 bp, synthetic construct
  source 1..80: mol_type = other DNA
aaagatatgtagaaaacactcaaaaaaataccaatatgccaaatccttggcaatcaatatatgtaaatacaactccattc

SEQ ID NO: 168783 - DNA, 80 bp, synthetic construct
  source 1..80: mol_type = other DNA
aatgttaggaactcatgttgtgtgggattttggtctgcaatctagcatcactatcgtcataccttggattagtgggtcac

SEQ ID NO: 168784 - DNA, 80 bp, synthetic construct
  source 1..80: mol_type = other DNA
aatttcgctccagcccctggacattgtgaacagggggtctccactggctgctcatacgtgaaggttgtggaagcggcacc

SEQ ID NO: 168785 - DNA, 80 bp, synthetic construct
  source 1..80: mol_type = other DNA
ttaccgttgatgaaattacaaccttaatcatcaatgagaagatccggcgggccaacattggcaactgtatggaggcactg

SEQ ID NO: 168786 - DNA, 80 bp, synthetic construct
  source 1..80: mol_type = other DNA
cgcagccaggtttgcgcgtcccgcgcctgccctccgccatcaggcgttcccacgggggcgcccctggcagagaggtggca

SEQ ID NO: 168787 - DNA, 80 bp, synthetic construct
  source 1..80: mol_type = other DNA
tggtggacgatatgaagatgatcttggtggtattctgggccaggaaccccagaatggtgttgaaggcctctttcttgatg

SEQ ID NO: 168788 - DNA, 80 bp, synthetic construct
  source 1..80: mol_type = other DNA
ccaacaattcatgaccacagaagatgaacaatcagctaacttgctaccaggtttccatcctagtaaaaagattcacatcc

SEQ ID NO: 168789 - DNA, 80 bp, synthetic construct
  source 1..80: mol_type = other DNA
gcaaaccaggcacgtgagaaattaccactcgagatcggagtctactatagagaatttcttaagtagatcggcatgcgtgt

SEQ ID NO: 168790 - DNA, 80 bp, synthetic construct
  source 1..80: mol_type = other DNA
cagtcatgtcatcaatgttggtcaccttcaggtgtttgtgctgaaaggtgaagtaatcaatgacagtcaccttccccaaa

SEQ ID NO: 168791 - DNA, 80 bp, synthetic construct
  source 1..80: mol_type = other DNA
atgtagaccatgcccaggaaatgcatgactcctctcgcccaatcagagtgtatgtcgtgcatttcctgggcatggtctac

SEQ ID NO: 168792 - DNA, 80 bp, synthetic construct
  source 1..80: mol_type = other DNA
ttattagtggaagtgcagttacgaaccgtgatctgagtgtcgttacattgagtacaattagtacagttgtaaagccctgt

SEQ ID NO: 168793 - DNA, 80 bp, synthetic construct
  source 1..80: mol_type = other DNA
ccaacccctatatcctagagggacagctgacggtgggcatgacacaggacaacggcattcccgtgctttttgccaggcct

SEQ ID NO: 168794 - DNA, 80 bp, synthetic construct
  source 1..80: mol_type = other DNA
atcaaccccacaaatgaaacagatgacacagctgggaacaagcccaactaccagaggaaacctttggtgtccttcaaaga

SEQ ID NO: 168795 - DNA, 80 bp, synthetic construct
  source 1..80: mol_type = other DNA
tactacggggccacttcaattaatgattttggtatgttagcagtcagagtggtcaatgagtttaacccagccagaattac

SEQ ID NO: 168796 - DNA, 80 bp, synthetic construct
  source 1..80: mol_type = other DNA
catgaatgatgtagacactgagataactataatttggttagatcaaaatgaaaagtttagagatatcagaagattcatac

SEQ ID NO: 168797 - DNA, 80 bp, synthetic construct
  source 1..80: mol_type = other DNA
tatgaaacaattaaaaaagaataccaaaaagtataccccacactaacaacacaaacaccaacaaacttctttttaacaca

SEQ ID NO: 168798 - DNA, 80 bp, synthetic construct
  source 1..80: mol_type = other DNA
ttctatgtggggtggcagatggcgtgccataattctattagtgagataccacgcttgtggaccttatgctcacacagcca

SEQ ID NO: 168799 - DNA, 80 bp, synthetic construct
  source 1..80: mol_type = other DNA
gaatctaaccttactccttattatgtattacatgcgaaaaagggcagtaatacaatagaaaatttatcaagtagtcaacc

SEQ ID NO: 168800 - DNA, 80 bp, synthetic construct
  source 1..80: mol_type = other DNA
tacttttccccccagtcaagctcctcagacgagtccccccgtgggaagactcgcagcaggaggaaagcgggtcgcaaagc

SEQ ID NO: 168801 - DNA, 80 bp, synthetic construct
  source 1..80: mol_type = other DNA
actactcagacacccccacttatccctggatgccccaacaattccgtgtaagcttcaaacttggcttccaataaaaatgt

SEQ ID NO: 168802 - DNA, 80 bp, synthetic construct
  source 1..80: mol_type = other DNA
ttcgcacgctgggcaccgggctgggggagggggggtgtgcgggacggcagtgagacaggggcgttgcgggtacggggatt

SEQ ID NO: 168803 - DNA, 80 bp, synthetic construct
  source 1..80: mol_type = other DNA
tctcttcgggggcaaccccatcccacagcaaactctcaaggacccagcaagccaaccgaccttcccagtacccggtgccg

SEQ ID NO: 168804 - DNA, 80 bp, synthetic construct
  source 1..80: mol_type = other DNA
ggagaacaaatggataatcccagcagagtgcaaagttgaaagagatctaaatttagcaaataacataataactattatag

SEQ ID NO: 168805 - DNA, 80 bp, synthetic construct
  source 1..80: mol_type = other DNA
tcgtctatatcgtgctagatatattcagataagacgcgcaaaccatagatttctcatcagtatcatgaaagacctatagc

SEQ ID NO: 168806 - DNA, 80 bp, synthetic construct
  source 1..80: mol_type = other DNA
ggaggatatgatagagacacgttttgtgttgaattcacagactagggatgagatgagtattgaaagttttctaggaagat

SEQ ID NO: 168807 - DNA, 80 bp, synthetic construct
  source 1..80: mol_type = other DNA
tgacttacagagcacagtacttacagtgttctataagttccacttcttatggggtggtaatatgattcccgaacaggtca

SEQ ID NO: 168808 - DNA, 80 bp, synthetic construct
  source 1..80: mol_type = other DNA
caaatgctggaatgggggttggtgtcggtaacttaaccatctacccgcaccagtggattaacttgcgcactaacaatagc

SEQ ID NO: 168809 - DNA, 80 bp, synthetic construct
  source 1..80: mol_type = other DNA
gattctttttggatacagatttaaagatcatgtcaaattacaaaaaccaacacgggttgttagatactgccaaggcactg

SEQ ID NO: 168810 - DNA, 80 bp, synthetic construct
  source 1..80: mol_type = other DNA
tccaggtttggcgaaggtcctgggaatattggcatgatgaacagggcatgtcagctagttacactaagtatagatatttg

SEQ ID NO: 168811 - DNA, 80 bp, synthetic construct
  source 1..80: mol_type = other DNA
agcatgccgagcactagctacggcagcgacgtcgaagacccgcgggacgatctggccgaaaacctacggcatctctgaac

SEQ ID NO: 168812 - DNA, 80 bp, synthetic construct
  source 1..80: mol_type = other DNA
agcctaggcccagcgtcttcaaatgctttgcaaccaaagttgctaaccagacacgaaaggcagctaaggaagttgtagac

SEQ ID NO: 168813 - DNA, 80 bp, synthetic construct
  source 1..80: mol_type = other DNA
cactgtgagccatacaaaggttgacaacatctttggccgggcatggttcaatagtgaccacactttcacaaatggaaact

SEQ ID NO: 168814 - DNA, 80 bp, synthetic construct
  source 1..80: mol_type = other DNA
cacgaagcgatattctacaaaacagattcccctgcttccaaccttccccacacccatatgaaagtgaagaaatcctttgg

SEQ ID NO: 168815 - DNA, 80 bp, synthetic construct
  source 1..80: mol_type = other DNA
cttccgctttttcaaaaaaaaagaggaagtgtgacgtagcggcgggggggcggcgcgcttcgcgcgccgcccaccaggtg

SEQ ID NO: 168816 - DNA, 80 bp, synthetic construct
  source 1..80: mol_type = other DNA
actggcaacaaacacacacaacaaagcagtaccccattcttaaaagcaggtacaaacgcccctgccgatggtgacaccga

SEQ ID NO: 168817 - DNA, 80 bp, synthetic construct
  source 1..80: mol_type = other DNA
cctgcataaacaaaaacgaaggaaaatccgaatggggctacgttttctatgatgttaactttggaaacggaaagacccct

SEQ ID NO: 168818 - DNA, 80 bp, synthetic construct
  source 1..80: mol_type = other DNA
ccccccccccgcaactttagaagaaaacgaactccgagctcagtaggcgtcacgtttccagcgtgactacgagcaagcac

SEQ ID NO: 168819 - DNA, 80 bp, synthetic construct
  source 1..80: mol_type = other DNA
tatttaatgtgtaaaccttttttaacagggactgcaactggaaaaattgaggtttatcttagtttaagatgtcctaactt

SEQ ID NO: 168820 - DNA, 80 bp, synthetic construct
  source 1..80: mol_type = other DNA
cttcacccaattggggagtgcatttggtgagggattcactactaatgtccaaaaccactttagtcaattaagtcaatcca

SEQ ID NO: 168821 - DNA, 80 bp, synthetic construct
  source 1..80: mol_type = other DNA
gacaaaagtgtcatctgtcttctcaaatatactttacaaacactgtacatactaccaaagctttctcacacagcaattta

SEQ ID NO: 168822 - DNA, 80 bp, synthetic construct
  source 1..80: mol_type = other DNA
aggagaaaatattatccagtttctttcattgggcccaccttccaatacatggaagccaatgaatattacccggctagata

SEQ ID NO: 168823 - DNA, 80 bp, synthetic construct
  source 1..80: mol_type = other DNA
agagcaataccatatattgatgagtatctcaatattgagatgtcaacactaattgagcaaatggaagctttcatagaacc

SEQ ID NO: 168824 - DNA, 80 bp, synthetic construct
  source 1..80: mol_type = other DNA
ggccaccttggcctggtcctgcaggctctgcttctccagcagctccaccagcttgcccacccgtcggacgcgcagcgcct

SEQ ID NO: 168825 - DNA, 80 bp, synthetic construct
  source 1..80: mol_type = other DNA
catctgtgtacaagaagcccgacactcagaccattattaaggtgcaaagcgacttccattcgttcgtgttaccacgcatt

SEQ ID NO: 168826 - DNA, 80 bp, synthetic construct
  source 1..80: mol_type = other DNA
gccccttgactggccgggctatgggcaaggccgtcaaggggcaattcgggctcgggactggccgtgctatgggcaaggct

SEQ ID NO: 168827 - DNA, 80 bp, synthetic construct
  source 1..80: mol_type = other DNA
attattttcccgatgcaagcactaaactgcccatcactatcacaatagctccaatgtgctgtgagttcaatggactccgc

SEQ ID NO: 168828 - DNA, 80 bp, synthetic construct
  source 1..80: mol_type = other DNA
ggccggcggtgctggcgtcaccggtaaaaatttcggcgggtgtggctgcgaacggtagcagtcgccggggagccggtaac

SEQ ID NO: 168829 - DNA, 80 bp, synthetic construct
  source 1..80: mol_type = other DNA
agaaaacgcagacaaaacaaccataaaagttcacagtacatcttcaagcgatggaaacacatttaatcactgggcatcaa

SEQ ID NO: 168830 - DNA, 80 bp, synthetic construct
  source 1..80: mol_type = other DNA
cagagtatcaactacattccggagacggtgaaaccagatgtttcgacgcacggagcgtttggacagcaatcaggagcagt

SEQ ID NO: 168831 - DNA, 80 bp, synthetic construct
  source 1..80: mol_type = other DNA
atgcctctgtggtgtgcagtatttggctaccaagactggataaaaaaagaattaaaccactgggacgcaccatttaatta

SEQ ID NO: 168832 - DNA, 80 bp, synthetic construct
  source 1..80: mol_type = other DNA
aaacatagtaatgagcaatgaatatctaaaccacaaaacaggactctatagtcctatattcttatcaaacagtagactat

SEQ ID NO: 168833 - DNA, 80 bp, synthetic construct
  source 1..80: mol_type = other DNA
aaacactggccaccgcctcctcctcctcctcagcgatagcggcggcctcttcttcgtccgcggtaccaccgtcctacagc

SEQ ID NO: 168834 - DNA, 80 bp, synthetic construct
  source 1..80: mol_type = other DNA
tgcctgcgcccccgacctccggtaaccagtcacacgatcagggagggccatggcctggcgatggtggtggagaaggcgcc

SEQ ID NO: 168835 - DNA, 80 bp, synthetic construct
  source 1..80: mol_type = other DNA
ccggtcccagcacgcaccccggcatgctcatgcagcagaaacacaaaatactgatacccagctttgacactaaccccagg

SEQ ID NO: 168836 - DNA, 80 bp, synthetic construct
  source 1..80: mol_type = other DNA
ttaatggatgatgtggggcaaaaaccagatggtaaagatttaagcacattctgtcagatggtatcaacaacagatttcat

SEQ ID NO: 168837 - DNA, 80 bp, synthetic construct
  source 1..80: mol_type = other DNA
agcccttccagcactagcaacagtaggagacgaaatgctagaataccacacaggcatttacagctctatattcctatctg

SEQ ID NO: 168838 - DNA, 80 bp, synthetic construct
  source 1..80: mol_type = other DNA
tgaatgcataaatgatttattgagatctgtggattctgaagagatcagagagtattgcaaaaagaaaaactggacaatac

SEQ ID NO: 168839 - DNA, 80 bp, synthetic construct
  source 1..80: mol_type = other DNA
ttgggctacagagtacgcagcagcagcagctttcgatagacccccgagacctgtcctaacatccactcccttctacccct

SEQ ID NO: 168840 - DNA, 80 bp, synthetic construct
  source 1..80: mol_type = other DNA
atccttattttcaccatgtgcctcatctgtctttattttaaacgccgttgtattcctactccatctccagacaaggcaga

SEQ ID NO: 168841 - DNA, 80 bp, synthetic construct
  source 1..80: mol_type = other DNA
gatgtggaggatcatgaccaataagaaatagaccgaataaaggattgcggaaaccatcagtacacgggcaacgtaattct

SEQ ID NO: 168842 - DNA, 80 bp, synthetic construct
  source 1..80: mol_type = other DNA
cgcacaacgcgccggcgcgcagcacgcccaaaaggcacccgtccgcagcgcaacccgcgcgaaacatcctcagtccggtc

SEQ ID NO: 168843 - DNA, 80 bp, synthetic construct
  source 1..80: mol_type = other DNA
taacttagaagaaaatacacaacgaccaacaggtggcaattaaccaaattgtcaatggtcaagcacttctgtttccccgg

SEQ ID NO: 168844 - DNA, 80 bp, synthetic construct
  source 1..80: mol_type = other DNA
ggcgctcaggtctcatcccagaaagttggcgctcacgagaattcgaatagagcgtatggaggctctaccatcaactacac

SEQ ID NO: 168845 - DNA, 80 bp, synthetic construct
  source 1..80: mol_type = other DNA
ctctcaatgacatgggtcaactgtattttaggcatgtgaacgagggtagcccaggggcggtaacaagctacatcagaata

SEQ ID NO: 168846 - DNA, 80 bp, synthetic construct
  source 1..80: mol_type = other DNA
cggtctggtcaagtcgaggatacgggcgccagagtcacaggtggaggaggtcccaggcctagcgtcacgcactcgtggtg

SEQ ID NO: 168847 - DNA, 80 bp, synthetic construct
  source 1..80: mol_type = other DNA
aatatcattagtgcataatagtactagtctatattgtatgttaccatggcatcatattaatagattcaatttcgttttta

SEQ ID NO: 168848 - DNA, 80 bp, synthetic construct
  source 1..80: mol_type = other DNA
tgcttcgtgccccgcaaaatccgcccccgcctgataatccaagacccctacccgtgcgagcactgcctgctcccccggct

SEQ ID NO: 168849 - DNA, 80 bp, synthetic construct
  source 1..80: mol_type = other DNA
aactgcacaacaaattagagaaaaaattaaaaaaaacatggaaaattactatgccaaaatagtagaagaaaacacaataa

SEQ ID NO: 168850 - DNA, 80 bp, synthetic construct
  source 1..80: mol_type = other DNA
ctaactacaaccacagcacaagaaaaaacaatactgattcacaaaactgaatccacagatggaaatacatttcaaacatg

SEQ ID NO: 168851 - DNA, 80 bp, synthetic construct
  source 1..80: mol_type = other DNA
agtatttttaacactatgatcaacaatgtaatcattagaactcttgttttggatgcatataaaaacattgatttggataa

SEQ ID NO: 168852 - DNA, 80 bp, synthetic construct
  source 1..80: mol_type = other DNA
tcagacatagacgctacatcagtagacaaacccactcaccctgaaacctcagctgacaggttctacacactcacaagtgt

SEQ ID NO: 168853 - DNA, 80 bp, synthetic construct
  source 1..80: mol_type = other DNA
ggccagttcacacgctataggacttggtagagtcccggctctgcaagcggctgagacaggtgcctcctcaaatgccactg

SEQ ID NO: 168854 - DNA, 80 bp, synthetic construct
  source 1..80: mol_type = other DNA
tgggaatcacaaacgatgccgaggtaggggttatgaccacgctggagggccgtgcaggtatggtgtgggccggagttgga

SEQ ID NO: 168855 - DNA, 80 bp, synthetic construct
  source 1..80: mol_type = other DNA
gattatcaaccagaagcttttatttcacgacccggctgccatgctggcggcacgcacacagctgcgtctagccttcgagg

SEQ ID NO: 168856 - DNA, 80 bp, synthetic construct
  source 1..80: mol_type = other DNA
tgaagattgagctacgtttccgggcagacatcttatgaagctgaacaataaactaaaacattctgtaaggctcagcgttc

SEQ ID NO: 168857 - DNA, 80 bp, synthetic construct
  source 1..80: mol_type = other DNA
tggctgtggcaaatgcgaccctcatagagttgtgtttcaggtctgtgtcctgttttgcggtgggttatttcccccctcag

SEQ ID NO: 168858 - DNA, 80 bp, synthetic construct
  source 1..80: mol_type = other DNA
cagaggctcaatttagagtacccttatatgccccagacggagaatccaatactaacaaagacacatggacaaacacatgg

SEQ ID NO: 168859 - DNA, 80 bp, synthetic construct
  source 1..80: mol_type = other DNA
gacctccaaaaaagagcagattcgaggtacccgcaaatgtcgcagacgactacagttcaaaggagcaaaaatggcatccg

SEQ ID NO: 168860 - DNA, 80 bp, synthetic construct
  source 1..80: mol_type = other DNA
gaactacatcggtgggaaaaacactctacctaccaccgtatgagtacctggagaggaggtggatagacaaatttatctga

SEQ ID NO: 168861 - DNA, 80 bp, synthetic construct
  source 1..80: mol_type = other DNA
ctgggatctacatcctagtaggcactcaaatgaggaaggacatgtggacaaccctaagggtattcgcctgttgctgcgtg

SEQ ID NO: 168862 - DNA, 80 bp, synthetic construct
  source 1..80: mol_type = other DNA
tgggtggatcaagaaatttacagagatgtgtaatgctgccaggggtttggaatggttaggtaataaaatatcaaaattta

SEQ ID NO: 168863 - DNA, 80 bp, synthetic construct
  source 1..80: mol_type = other DNA
cgtgccccccacagcccactcccccgcctgtacgtccacttcctgggctggctctacccggtgatataaagcggtgcact

SEQ ID NO: 168864 - DNA, 80 bp, synthetic construct
  source 1..80: mol_type = other DNA
tttgattacacaaactatgatggtagtatacaccctatttggtttgaagccctcaaattggtactctcagaattgtcatt

SEQ ID NO: 168865 - DNA, 80 bp, synthetic construct
  source 1..80: mol_type = other DNA
ggccactcacaggactatgatgtacaatttcgctaccaaagctagtcagtgtggtggtgttgtcgctgccgtaggtaaag

SEQ ID NO: 168866 - DNA, 80 bp, synthetic construct
  source 1..80: mol_type = other DNA
agatgatggataagtttggcctagatttaccttatgtgacctacttaaaagatgagcttagggcaccagagaagataaga

SEQ ID NO: 168867 - DNA, 80 bp, synthetic construct
  source 1..80: mol_type = other DNA
ctacaaaaggaaacgtcaccgctgggtataattatacacatcctggtgaaatgggtagggatgtaggcaaaattggcaga

SEQ ID NO: 168868 - DNA, 80 bp, synthetic construct
  source 1..80: mol_type = other DNA
taccaacacaactatctcatcttttaccaacgtaacgccaaatgctacatcatcttatagcacaacaatcaccgtgactg

SEQ ID NO: 168869 - DNA, 80 bp, synthetic construct
  source 1..80: mol_type = other DNA
acactcaccccggtgaagcaggtagggatgttggtcaaaatagagatgctaataataggcaaccaagtgatgacaactgg

SEQ ID NO: 168870 - DNA, 80 bp, synthetic construct
  source 1..80: mol_type = other DNA
cagtaataccacagaacacctaagtcccactataacagacacagagtttaaaaacaaagttaacaccaactataattggt

SEQ ID NO: 168871 - DNA, 80 bp, synthetic construct
  source 1..80: mol_type = other DNA
tgattccactgaacaatctaggtgccacagacaccatgaatgagtaccgaattccgctcactgcaggcagagtgaacgaa

SEQ ID NO: 168872 - DNA, 80 bp, synthetic construct
  source 1..80: mol_type = other DNA
attactactggtgacaaaaatcccaataagttgattaggatagcaaatggaacttgggaaaatacacgacacaggcaaga

SEQ ID NO: 168873 - DNA, 80 bp, synthetic construct
  source 1..80: mol_type = other DNA
ccatttgactttacggggcagcagctgcgccgggcctatcaggaacaccgacgtcgtaaacatctagccgtgcagcgtta

SEQ ID NO: 168874 - DNA, 80 bp, synthetic construct
  source 1..80: mol_type = other DNA
acacaaacaatctcccaaacagaggcacttacagagggactggatggtgaactagaagaagtcattgttgagaaaacgaa

SEQ ID NO: 168875 - DNA, 80 bp, synthetic construct
  source 1..80: mol_type = other DNA
tataatttaaccaaacagtggtcgtgagttttaggccggccatgggggcttacaagaataacatgccaatgacccggccc

SEQ ID NO: 168876 - DNA, 80 bp, synthetic construct
  source 1..80: mol_type = other DNA
gtctactgggcgcagtgctctcatattccggtatgcttgcacgccagttttattcccccttccccattgtaacttagaag

SEQ ID NO: 168877 - DNA, 80 bp, synthetic construct
  source 1..80: mol_type = other DNA
cgaggtccgactcgagcgtcagaccgcggatgtcgtacttgccgtgcgccgtagcgcaggctgaatggaccagacagctg

SEQ ID NO: 168878 - DNA, 80 bp, synthetic construct
  source 1..80: mol_type = other DNA
atagaggtggtctatgctctcctcgaaggaggcaatgtagttatcgatggtgtagaaggtgatggatttcaggatgttca

SEQ ID NO: 168879 - DNA, 80 bp, synthetic construct
  source 1..80: mol_type = other DNA
attaactactacaaagatgcagccagttctggattgaccaaacaggatttttcacaagatccttccaaattcacccaacc

SEQ ID NO: 168880 - DNA, 80 bp, synthetic construct
  source 1..80: mol_type = other DNA
gcactttgggggcaatcctgtttccgaacaggttattaaagacccgtgcacccagtccaccttcgaaatgcccggaaccg

SEQ ID NO: 168881 - DNA, 80 bp, synthetic construct
  source 1..80: mol_type = other DNA
aaatctacatacaggcacaaaatgaagcaactagcaactttaaaaacaagccttacaactggcaaaactacaaagacaac

SEQ ID NO: 168882 - DNA, 80 bp, synthetic construct
  source 1..80: mol_type = other DNA
actatagcagcccatgtttgttccagggtgggggaaaggcacgtgcccttagaaaacttagctgcaaaaattctattgtg

SEQ ID NO: 168883 - DNA, 80 bp, synthetic construct
  source 1..80: mol_type = other DNA
tgcgcgagagactcttagccgcacggggagagaactatgggagactctggtgcgggttggaagatggcttcgagctatac

SEQ ID NO: 168884 - DNA, 80 bp, synthetic construct
  source 1..80: mol_type = other DNA
gcaaaaattctattgtgttgggagagcctctatatctaaaggcctttcctcacaatacaaatgttactaacgtctgccct

SEQ ID NO: 168885 - DNA, 80 bp, synthetic construct
  source 1..80: mol_type = other DNA
aaaaggcacacaattcacagctagtaagtttctaaaccataagacaggcctgtactcttccatatttttaagcagacaaa

SEQ ID NO: 168886 - DNA, 80 bp, synthetic construct
  source 1..80: mol_type = other DNA
ccacgtcgttgagaaaacgcgactgcacggtgatcacgcagggctccttcttgggctgcttgggcaccacgggcaagcgg

SEQ ID NO: 168887 - DNA, 80 bp, synthetic construct
  source 1..80: mol_type = other DNA
tggaggacccgccgccgcagaagaagacgacctagacgcccttttcgccgccgccgaagagtaaggagacggaggggtcg

SEQ ID NO: 168888 - DNA, 80 bp, synthetic construct
  source 1..80: mol_type = other DNA
tgttcttctaatagatcactgactgcgtatataagacggtcaacagggcaaactaaatctttgtgacactcatataaagt

SEQ ID NO: 168889 - DNA, 80 bp, synthetic construct
  source 1..80: mol_type = other DNA
cacaataagtggtcgcgcagcaacctggactttgacttagtgagatacaagggcacagtgataaagctgtacagacacca

SEQ ID NO: 168890 - DNA, 80 bp, synthetic construct
  source 1..80: mol_type = other DNA
gcagctgcagattttacgtactagccaaaagcagcaaaagcagcaggtaaataagagaaggagtccagataatgtccagc

SEQ ID NO: 168891 - DNA, 80 bp, synthetic construct
  source 1..80: mol_type = other DNA
gacccaagactacatagttacatggaacagaagggctcccctgggaggcaacatactgacagcccctaacatgcacccag

SEQ ID NO: 168892 - DNA, 80 bp, synthetic construct
  source 1..80: mol_type = other DNA
ccaagcaagagaacaccagcgtgtactcccttcccccagatccatctcactttgatggttacaagcaacagggcgtcgtc

SEQ ID NO: 168893 - DNA, 80 bp, synthetic construct
  source 1..80: mol_type = other DNA
ccggtaagctcttactagcctactcaccacctggggccgatgtgcctaaatctcgaaaagatgcaatgttgggaacccac

SEQ ID NO: 168894 - DNA, 80 bp, synthetic construct
  source 1..80: mol_type = other DNA
ccggagaaaagaggaagaagtccccaggggacggcagcgcgggtccctggggacacgcaaagagcaacgtccggtggttg

SEQ ID NO: 168895 - DNA, 80 bp, synthetic construct
  source 1..80: mol_type = other DNA
gaagtgggccgtaggttgtatctcccaccatataatctactggagcgttcttggatcgacaagttcatttaaacaatgta

SEQ ID NO: 168896 - DNA, 80 bp, synthetic construct
  source 1..80: mol_type = other DNA
tgggttatgtgatatatgacgccctgtttggagacggaaagatgcccgacggacgcggacaggtccccccttactggcag

SEQ ID NO: 168897 - DNA, 80 bp, synthetic construct
  source 1..80: mol_type = other DNA
attgagacgtaaatgtgagatgttcacttacatgaggttcgacctcgaagtgacattcgtgataaccagctgtcaggacc

SEQ ID NO: 168898 - DNA, 80 bp, synthetic construct
  source 1..80: mol_type = other DNA
tacaagctagacaaatacagctgccccaactatcaccctggaaacatgattaaggcaaagcacaaattcttaattccaag

SEQ ID NO: 168899 - DNA, 80 bp, synthetic construct
  source 1..80: mol_type = other DNA
agtaccactacttatatagatctggcttcttatgccatgtgcagtgtaatgcaacaaagtttcaccagggcgcactgttg

SEQ ID NO: 168900 - DNA, 80 bp, synthetic construct
  source 1..80: mol_type = other DNA
gctaccgcaaactgctacaaaaaagtaagcagtttatggggagaccacgtatatgacaaagataaaattataaacgcgtg

SEQ ID NO: 168901 - DNA, 80 bp, synthetic construct
  source 1..80: mol_type = other DNA
acacacaagctgcccaaaagataattacaccttgggttttcggtaatgttaccgacaaccacctagagtaccacgcaggc

SEQ ID NO: 168902 - DNA, 80 bp, synthetic construct
  source 1..80: mol_type = other DNA
ggtacatctaacaataggatactggctatacccttggatatgagtaatacgctgttctctaccacactgatgggtgaaat

SEQ ID NO: 168903 - DNA, 80 bp, synthetic construct
  source 1..80: mol_type = other DNA
acagtaccccaactactagaccacaacaacagtcttagaggctatgtaccctacagctttaattttggaaatggtaaaat

SEQ ID NO: 168904 - DNA, 80 bp, synthetic construct
  source 1..80: mol_type = other DNA
tcacagaaaaaagatagtcataaaacagtggcaaccaaactttattagacgctgctacattatagggtacttacccttaa

SEQ ID NO: 168905 - DNA, 80 bp, synthetic construct
  source 1..80: mol_type = other DNA
gggttcccgcgattcaccattcccttcactggtttagcctcagcttattacatgttctatgatggctatagcaccacatc

SEQ ID NO: 168906 - DNA, 80 bp, synthetic construct
  source 1..80: mol_type = other DNA
caaaagaccacggcaacaagagacaaaatccacaacctgagatccctcaagaagtacgaggtttacaacttaccggagaa

SEQ ID NO: 168907 - DNA, 80 bp, synthetic construct
  source 1..80: mol_type = other DNA
gagcccgccgatactgagggcgctcccggcaccggagccccgtcgccaccgacagacggagaacccggggtctgagccat

SEQ ID NO: 168908 - DNA, 80 bp, synthetic construct
  source 1..80: mol_type = other DNA
acattacttcttattaatttgacaactcaccatagcgcaatttattactttaagtgtttctacatgtttaatacgaaagt

SEQ ID NO: 168909 - DNA, 80 bp, synthetic construct
  source 1..80: mol_type = other DNA
ctgattccctggggacacacgaaaaacaacggccagagacaagacgcggaaaagaggaagtccctaggggaccgcggagg

SEQ ID NO: 168910 - DNA, 80 bp, synthetic construct
  source 1..80: mol_type = other DNA
ttggatttactccactcccccaatttactcctagcataatatccgttgttttgttaacaagacattactatcacaatggg

SEQ ID NO: 168911 - DNA, 80 bp, synthetic construct
  source 1..80: mol_type = other DNA
atgtatagagtccgcttgagcgacaagccccacacagacgatccaattctctgtttatcgctctcccccgcctcggaccc

SEQ ID NO: 168912 - DNA, 80 bp, synthetic construct
  source 1..80: mol_type = other DNA
tgttttaactttaactggggcggtaaccctatcattgaacagattgttaaagaccccagcttccagcccacctatgaaat

SEQ ID NO: 168913 - DNA, 80 bp, synthetic construct
  source 1..80: mol_type = other DNA
tttaaaaacgcaacaatgtcagcactaccaaactaccccacaataatgtccacagacttatatgaataccactcaggcat

SEQ ID NO: 168914 - DNA, 80 bp, synthetic construct
  source 1..80: mol_type = other DNA
cccaggcaaacctgacaaataaggccccccaggaaagacccccgggtggcatcgggaggtggtgtcgggcccgcgcattc

SEQ ID NO: 168915 - DNA, 80 bp, synthetic construct
  source 1..80: mol_type = other DNA
acacgagggcaacatccaacacaaccacaccccagagcatattaaatgaaggctctccatgcataaataataacagctgt

SEQ ID NO: 168916 - DNA, 80 bp, synthetic construct
  source 1..80: mol_type = other DNA
ggtaaaacagattggagtaatgttactttcttaaaaagaaattttagaccagatccagaatttccattcctcattcatcc

SEQ ID NO: 168917 - DNA, 80 bp, synthetic construct
  source 1..80: mol_type = other DNA
caccatggatatcaaatactaactatagaaggtgtgttaaggatgatttcacagaaggtggatatatttgtgctttctat

SEQ ID NO: 168918 - DNA, 80 bp, synthetic construct
  source 1..80: mol_type = other DNA
cacaatacctgttaaatcagagtttgcacagtggaaaaagaaattcacagacactagagacagctcctttctttttgcca

SEQ ID NO: 168919 - DNA, 80 bp, synthetic construct
  source 1..80: mol_type = other DNA
aaaggtgatgacctgatccccacatgtaattgcacacaagctacatattattgtagacacaaaaatagatactacccaat

SEQ ID NO: 168920 - DNA, 80 bp, synthetic construct
  source 1..80: mol_type = other DNA
atgtgtggaggtttgctcatttccaaagtggaagggaattttaaaatccttggaatgcacatagctgggaatggggaaat

SEQ ID NO: 168921 - DNA, 80 bp, synthetic construct
  source 1..80: mol_type = other DNA
taaccatttattgatttaatccaggaacaaaaaacagtcctagtgacccagtggccggagagagaatggccctgacaagt

SEQ ID NO: 168922 - DNA, 80 bp, synthetic construct
  source 1..80: mol_type = other DNA
tattctggtgagccaaaaccaatatctagaaaaccagaaagaagaatcgtaacacaaggtccacaagaagaatttggacg

SEQ ID NO: 168923 - DNA, 80 bp, synthetic construct
  source 1..80: mol_type = other DNA
cgcagtcctcgcaagaagaagccgctcaagaagccctccaagaagtccaagaggcgtcgttacagcagcacctcctccag

SEQ ID NO: 168924 - DNA, 80 bp, synthetic construct
  source 1..80: mol_type = other DNA
aagacatgttagaaacaaggcaagtacaaaatttccaaactagagatgaaatgagtattgagagtttcctaggcagatct

SEQ ID NO: 168925 - DNA, 80 bp, synthetic construct
  source 1..80: mol_type = other DNA
caaggagttgaccaaatcgccaggtgtacatgcactactggtatatactactgttcatcgcggaacaagcactaccccat

SEQ ID NO: 168926 - DNA, 80 bp, synthetic construct
  source 1..80: mol_type = other DNA
cttagtggataccctcactaatcctgcattaatgtcaccatcagtagaggcatgtgggttttctgataggctcaagcaaa

SEQ ID NO: 168927 - DNA, 80 bp, synthetic construct
  source 1..80: mol_type = other DNA
aagacccaatatcacctccacgcacccattatccctagtaggacctccagccttactgttcccagagatgaccaaaaaaa

SEQ ID NO: 168928 - DNA, 80 bp, synthetic construct
  source 1..80: mol_type = other DNA
gcctaccccgcaagactgggccacagagtaccaggccgccggagctttcgacagaccccccagaagtaacctgtcagata

SEQ ID NO: 168929 - DNA, 80 bp, synthetic construct
  source 1..80: mol_type = other DNA
ctttaaaccgaaaggagtcactgaagcccggacatcgattaaactagagaaaccaagtaccggcggcaggctgacaacac

SEQ ID NO: 168930 - DNA, 80 bp, synthetic construct
  source 1..80: mol_type = other DNA
tcaaacaaagaaagagaagtgagccagtggctgtgatgatacatggaccacctggtactggtaaatccataacaaccagt

SEQ ID NO: 168931 - DNA, 80 bp, synthetic construct
  source 1..80: mol_type = other DNA
gtgagattactaacataatgcatatggcgagggtggactccttcatgccaattaacaatattgaaggtcaagcaattgat

SEQ ID NO: 168932 - DNA, 80 bp, synthetic construct
  source 1..80: mol_type = other DNA
ccgtcaacgtggattcactatgcgtggacgcggaacagcgccaactgctgggcaccgtggccacctccttctgtcaccgc

SEQ ID NO: 168933 - DNA, 80 bp, synthetic construct
  source 1..80: mol_type = other DNA
tgaaaaagcctgaactcagaaaagccacactccaggggccacaacatgaatttattagggcactagtgaagaggaactgt

SEQ ID NO: 168934 - DNA, 80 bp, synthetic construct
  source 1..80: mol_type = other DNA
aaggggtctctgttgtctagctatttgtggaaacagtagatctggcaataactatgcagtgcacagcgaagactacacca

SEQ ID NO: 168935 - DNA, 80 bp, synthetic construct
  source 1..80: mol_type = other DNA
tcctgacatcttttggtcacaactatattcatctatggaaaagcatctgttagtgtttgactataccaattatgatggaa

SEQ ID NO: 168936 - DNA, 80 bp, synthetic construct
  source 1..80: mol_type = other DNA
aatgcctctatgttggcacatggtgtataaaccgcagtgggtagcagaatagggcccctcttgccccgtgctgcagcgta

SEQ ID NO: 168937 - DNA, 80 bp, synthetic construct
  source 1..80: mol_type = other DNA
gggcgatgctatatttgtaaatacagcacaaaatttacaatcactaaaagaaaaaattaaaaataacattaagaactaca

SEQ ID NO: 168938 - DNA, 80 bp, synthetic construct
  source 1..80: mol_type = other DNA
ttggaatcggacaagacgttccccattttactggacggacgcgtaaatgggtatgcgtgcgtggtaggaggtaaactatt

SEQ ID NO: 168939 - DNA, 80 bp, synthetic construct
  source 1..80: mol_type = other DNA
cctaggatcaggtccgagacagcgccgcagcggtaggtacccatggcgttgttagtatcgaactggtcaaaaaattgggg

SEQ ID NO: 168940 - DNA, 80 bp, synthetic construct
  source 1..80: mol_type = other DNA
gataagtatctataatgtcactgttccacggaaatccaacaacattggtctcatattgacaatcccattagaaatgaaca

SEQ ID NO: 168941 - DNA, 80 bp, synthetic construct
  source 1..80: mol_type = other DNA
caacacaaccactaataacgcagtgggaatgctgatgcaaaggctgctgatcccagtggaagctaaatcaactccagata

SEQ ID NO: 168942 - DNA, 80 bp, synthetic construct
  source 1..80: mol_type = other DNA
ccctccattccaatggatgggatatgaattgtggccaactaaatggaagctgcaaaaaatacaattgccccaaaaggaaa

SEQ ID NO: 168943 - DNA, 80 bp, synthetic construct
  source 1..80: mol_type = other DNA
aaaaaagtcacagaaatgcaaaaagaattgaaaaggttaagctcttatagaagaactcatcgccatgagccagtttgcct

SEQ ID NO: 168944 - DNA, 80 bp, synthetic construct
  source 1..80: mol_type = other DNA
ttccaatggccagtttagaggacaagggtaaaacattcaccagtgattatgtgttagctagcacaaatcttgttacattg

SEQ ID NO: 168945 - DNA, 80 bp, synthetic construct
  source 1..80: mol_type = other DNA
ccccagggggagagaccattaacctcatactacagtacatgtatgcaccccccggagccccattaccatctaaacgggac

SEQ ID NO: 168946 - DNA, 80 bp, synthetic construct
  source 1..80: mol_type = other DNA
aagccccgaccctacgtccagtaattgtgcaagggcctaacacagagtttgcattgtctttgctcaggaaaaacatagta

SEQ ID NO: 168947 - DNA, 80 bp, synthetic construct
  source 1..80: mol_type = other DNA
aaaaagatacaaaaaaataagaataaaagctcccaaactaatgctaaacaagtggtattttgccagagacatatgtgaca

SEQ ID NO: 168948 - DNA, 80 bp, synthetic construct
  source 1..80: mol_type = other DNA
ggatgcagtggatcaccatggaggtttcttaaaaacaaattttgtaattggtttggcttaacttatgtacacaaagaatc

SEQ ID NO: 168949 - DNA, 80 bp, synthetic construct
  source 1..80: mol_type = other DNA
ccagtcccaccgagacccgagtggcccggatcccccaccggcccttctctttccccctactcctctccaaccttcgctcc

SEQ ID NO: 168950 - DNA, 80 bp, synthetic construct
  source 1..80: mol_type = other DNA
aggattgcatgcccttgacagtggccccataacatatgccgatgatgtctttcaggacagtcagctcaaagaagctcttg

SEQ ID NO: 168951 - DNA, 80 bp, synthetic construct
  source 1..80: mol_type = other DNA
aagaagccgctcaagaagtcctccagcaggtccaagaggcgccgctacagcagcacctcctccagcagtaccgagagcag

SEQ ID NO: 168952 - DNA, 80 bp, synthetic construct
  source 1..80: mol_type = other DNA
gcacaggaaacatggtctggatagactacctcacaaaaccagactccatatacacaaagaacaaaagcaaatgtgagata

SEQ ID NO: 168953 - DNA, 80 bp, synthetic construct
  source 1..80: mol_type = other DNA
tgtgtaaaaagtccatgcctgtgatgaggctagagatccaggctcgtggggcatttagacagtagtagcagagcagggca

SEQ ID NO: 168954 - DNA, 80 bp, synthetic construct
  source 1..80: mol_type = other DNA
gaacgtctgcaccttgaaatagcttacctacaatatgggtggcagtatttcaaagaagcattccaagcgttcgggaaagc

SEQ ID NO: 168955 - DNA, 80 bp, synthetic construct
  source 1..80: mol_type = other DNA
tgcacgccgaagacggcgccgctctcgttcaccagtatggagatgtccaggcgctgctgcgactccaccggcacggcccg

SEQ ID NO: 168956 - DNA, 80 bp, synthetic construct
  source 1..80: mol_type = other DNA
ttgtagtttccaggccttccttttcatcataactgagcagggcaaagccacaaaaaatgcaggatttctgcgtcctggta

SEQ ID NO: 168957 - DNA, 80 bp, synthetic construct
  source 1..80: mol_type = other DNA
ctttaaacaagccacaaacaaaccttataactgggaaaactacggcacaccagcggactatggcagcacatacacaacat

SEQ ID NO: 168958 - DNA, 80 bp, synthetic construct
  source 1..80: mol_type = other DNA
ctaaagctatgttgggaactcatgtggtgtgggatgttgggttgcaatctacagtttccatggtggtcccctggatatcc

SEQ ID NO: 168959 - DNA, 80 bp, synthetic construct
  source 1..80: mol_type = other DNA
tccttacataaaaccacccccgtttatccccgatcttctttttccttctactaacaaaaaaaaaaaattctccaaattcg

SEQ ID NO: 168960 - DNA, 80 bp, synthetic construct
  source 1..80: mol_type = other DNA
cgccgttaagaagcccataacccaagagctccactccaagataaagagcctgagggacaggtgcgtctgtcgggaattgg

SEQ ID NO: 168961 - DNA, 80 bp, synthetic construct
  source 1..80: mol_type = other DNA
tacacaaacgaaatcactaaggtgccacttgccgcagcaaaagtgtatgaaactcaaacaaaaaacctgctgtctacaac

SEQ ID NO: 168962 - DNA, 80 bp, synthetic construct
  source 1..80: mol_type = other DNA
ggaagtttcccgatgcattgaaggacatggggttatttggtcaaaatatgtactaccactacctcgggcgagcagggtac

SEQ ID NO: 168963 - DNA, 80 bp, synthetic construct
  source 1..80: mol_type = other DNA
aacaattggggtcttgtgatattaccccttgagccgttagcatttgcttcagaggcttccaccgcgattccaattacggt

SEQ ID NO: 168964 - DNA, 80 bp, synthetic construct
  source 1..80: mol_type = other DNA
tcctccccccaaactgttcgttgacaagtggtatacgcaagaggacctgtgcgacgttaatcttgtgtcacttgcggttt

SEQ ID NO: 168965 - DNA, 80 bp, synthetic construct
  source 1..80: mol_type = other DNA
atgataccagaacaccaattggctgctgccaaaggtggtactgttacagcaggatacaaatacacacatcctggtgaagc

SEQ ID NO: 168966 - DNA, 80 bp, synthetic construct
  source 1..80: mol_type = other DNA
tggtcagctcagttgattcatctgtcaatgcagtcaatgagaaggtggagaatgtgggcaatgaaatcggaggcaatcta

SEQ ID NO: 168967 - DNA, 80 bp, synthetic construct
  source 1..80: mol_type = other DNA
agtccaagaagactcaagcgatgatgaatatgttgcagggcctttaccaagaaaaagaaacaagctggacaccaggacag

SEQ ID NO: 168968 - DNA, 80 bp, synthetic construct
  source 1..80: mol_type = other DNA
aaaagaaggatttgattgataatcgaacaaaagatatatccaaacttaaggtagctttagataaatatggagttgatcta

SEQ ID NO: 168969 - DNA, 80 bp, synthetic construct
  source 1..80: mol_type = other DNA
tgttacatcatgtgcttcgtctcagcttgtaatgatttctccgtgcggttattgcgcgacaccaaattcatcaaccaaga

SEQ ID NO: 168970 - DNA, 80 bp, synthetic construct
  source 1..80: mol_type = other DNA
ccaggtggacgcagtgcccgtcagttccaagggctactagctgggaagcagccccaaccagcccaccgggtggcctggag

SEQ ID NO: 168971 - DNA, 80 bp, synthetic construct
  source 1..80: mol_type = other DNA
actcttgcccactctgctaacgccgttcgctccaacctcgaactggctaagcagcttctcactcttgcccacggtgctaa

SEQ ID NO: 168972 - DNA, 80 bp, synthetic construct
  source 1..80: mol_type = other DNA
gcacgccatctatacccataacagtatcaattagtccaatgttttcagagttctcaggaccaagaaataaggttgttttt

SEQ ID NO: 168973 - DNA, 80 bp, synthetic construct
  source 1..80: mol_type = other DNA
aaagtgccgcggcatgggacagaccaccgcgaacagaccttacaagtacacccttttacccctggatgccaagaccacac

SEQ ID NO: 168974 - DNA, 80 bp, synthetic construct
  source 1..80: mol_type = other DNA
gttggagaacatgattgatggtacagtgagggaaaccgtgggcgcggcaacctccagagatgcccttccaaacaccgagt

SEQ ID NO: 168975 - DNA, 80 bp, synthetic construct
  source 1..80: mol_type = other DNA
aggatagtttgacaccgctttctacaaaagcactcaacacttatgggtttggacaccaaaataaggcagtctacacagca

SEQ ID NO: 168976 - DNA, 80 bp, synthetic construct
  source 1..80: mol_type = other DNA
ccaacaattcatgacgactgaggacgagcaatcgcccaacattctacctggtttccatccaagtaagaaaatacacatac

SEQ ID NO: 168977 - DNA, 80 bp, synthetic construct
  source 1..80: mol_type = other DNA
ggcaatcgtcaaccaaccctattgtgttttggactgagggtaatgccccggcacgcatgtccatccctttcatcagcatt

SEQ ID NO: 168978 - DNA, 80 bp, synthetic construct
  source 1..80: mol_type = other DNA
acccatggacagcatgttacgccataataatgtgtcacttgttattatacctatatgtcctctgcgagcaccagccacag

SEQ ID NO: 168979 - DNA, 80 bp, synthetic construct
  source 1..80: mol_type = other DNA
agaaagtttgaaatgtttacatatgttaggtttgactctgaaataacaatagtaccatgtgttgctgccacagaaggaaa

SEQ ID NO: 168980 - DNA, 80 bp, synthetic construct
  source 1..80: mol_type = other DNA
acaaccttgaagggaacataactagtgaagctatgtattcaatagaactgcagtcatcgactgaacaaagtaagatattt

SEQ ID NO: 168981 - DNA, 80 bp, synthetic construct
  source 1..80: mol_type = other DNA
cgtccttcgagctcgtgcgcgagaccggcggcaccggcgccgccaagaaaccgagcgaaaagaaacgatcgtcgtcacgt

SEQ ID NO: 168982 - DNA, 80 bp, synthetic construct
  source 1..80: mol_type = other DNA
caaccaattctccagagtcttcggaactggctgagacttaagacagcttacctgcaatatgggagcgagtggatccaaga

SEQ ID NO: 168983 - DNA, 80 bp, synthetic construct
  source 1..80: mol_type = other DNA
ccagtaaattccatcagggtaccttgatagtcgttgccataccagaacatcagttggcttacataggtggaggcaatgtt

SEQ ID NO: 168984 - DNA, 80 bp, synthetic construct
  source 1..80: mol_type = other DNA
aataaaatggggacactttttgtgagacacgtgaacaaggaaactccaaagcctgtcacgagcatggttagggtctactt

SEQ ID NO: 168985 - DNA, 80 bp, synthetic construct
  source 1..80: mol_type = other DNA
ttaacaatgacaccagttactataactgggacaactggtggagatatgacttttactcctccaaagcagacagcctttat

SEQ ID NO: 168986 - DNA, 80 bp, synthetic construct
  source 1..80: mol_type = other DNA
ggtcatcagccgctgcgcaaacggactcaacgtggtctccttctttatctccatcctgaagcgaagcagctccgccctca

SEQ ID NO: 168987 - DNA, 80 bp, synthetic construct
  source 1..80: mol_type = other DNA
acaagaacaagtttgccccatgggactgggtgttagggtgcggtgtaatggcaggaaacatcactgtatttccgcatcaa

SEQ ID NO: 168988 - DNA, 80 bp, synthetic construct
  source 1..80: mol_type = other DNA
tgtagggatagctaatgcctattcccacttttatgacggctatgcagtggtgccattgaaagattccacccaggatgctg

SEQ ID NO: 168989 - DNA, 80 bp, synthetic construct
  source 1..80: mol_type = other DNA
ttaaaactgagtgtgggttgtccccacccacactgtctacggacgtagtactctcatatcacggtatgtttgtacgccag

SEQ ID NO: 168990 - DNA, 80 bp, synthetic construct
  source 1..80: mol_type = other DNA
cagtttgcctacgtcggcgatgctgagcttgtggtcgaaagtgcagaagatgttggcctccatggccgccatagcggcgg

SEQ ID NO: 168991 - DNA, 80 bp, synthetic construct
  source 1..80: mol_type = other DNA
tagattggactggcagttctagagggtggtggtggaagataccagattgtcttagagagatggggatgtttggtcagaac

SEQ ID NO: 168992 - DNA, 80 bp, synthetic construct
  source 1..80: mol_type = other DNA
cctatcctgcaaatttctccctctatatgctagtgaggccaaaagaatcaaagtaatttacaataaatgtaataatgtca

SEQ ID NO: 168993 - DNA, 80 bp, synthetic construct
  source 1..80: mol_type = other DNA
ccgggacgctagtgctgcatgggctcctccggggtaagcttcggccatggccggagctcgtcgacgggcaaggtgagagt

SEQ ID NO: 168994 - DNA, 80 bp, synthetic construct
  source 1..80: mol_type = other DNA
tcacagtagaagaactgacaaaaggggaagaggcaatggagtttaccgcaggcaaccaccagggaaccactgcaagtgta

SEQ ID NO: 168995 - DNA, 80 bp, synthetic construct
  source 1..80: mol_type = other DNA
cataagtcacgtgacagggaggggcgacaaacccggaagtcatcctcgcccacgtgacttaccacgtggtgtgtacgtca

SEQ ID NO: 168996 - DNA, 80 bp, synthetic construct
  source 1..80: mol_type = other DNA
taaaacccagcgccacagaaaccgggtttactcccaattggcaaaactgccaaaactctaataaacttaacactaacggc

SEQ ID NO: 168997 - DNA, 80 bp, synthetic construct
  source 1..80: mol_type = other DNA
aacgtccacccacccccgggacaaaaaagcccgccgcctccttgcccttttaactcataaactttcaggtctcgcgtacg

SEQ ID NO: 168998 - DNA, 80 bp, synthetic construct
  source 1..80: mol_type = other DNA
tgtacatgacaactataaagataatcaagggaaattagatgtctccagagcatttcaactatgtgatgttgattcaaaga

SEQ ID NO: 168999 - DNA, 80 bp, synthetic construct
  source 1..80: mol_type = other DNA
atgccttgcgtatgatgaaagtagagcgcaaaaggacagaaggacgtgactttcgtgagcaccccgccgtcgtaacaaag

SEQ ID NO: 169000 - DNA, 80 bp, synthetic construct
  source 1..80: mol_type = other DNA
gatggggtgttcaagactacactatttggagaaatagcacaatattacacccactggtcaggttcaatcaggatctcttt

SEQ ID NO: 169001 - DNA, 80 bp, synthetic construct
  source 1..80: mol_type = other DNA
aggcagggatgttgggaaaactgatcgtgaacagaataaccgacaacctagtgatgacaattggcttaactttgatggca

SEQ ID NO: 169002 - DNA, 80 bp, synthetic construct
  source 1..80: mol_type = other DNA
acacagctaattgaagcccaggcaaagtgccacatacaagacctacccctctacgccatgaccttcgggtacgaggacta

SEQ ID NO: 169003 - DNA, 80 bp, synthetic construct
  source 1..80: mol_type = other DNA
tttttggtagggcatggtttgcatatgatcatacatatagagatgaagggacctggaggcaagctttagattttccaaag

SEQ ID NO: 169004 - DNA, 80 bp, synthetic construct
  source 1..80: mol_type = other DNA
gaacggagaatacgtagtgtgagcgctggtcgtgcactatatattcctccttatgaaatgcttctgcatgagtggtatgc

SEQ ID NO: 169005 - DNA, 80 bp, synthetic construct
  source 1..80: mol_type = other DNA
aatggacagtatgttgcgccacaacaatgtctctcttgtgatcatacccatttgtcctttgcgtgcttccagtggagcgc

SEQ ID NO: 169006 - DNA, 80 bp, synthetic construct
  source 1..80: mol_type = other DNA
taaccataccatattcattctctacctggatgcgtaagacgcatggccacgccattggtttgttccaaattgaagtattg

SEQ ID NO: 169007 - DNA, 80 bp, synthetic construct
  source 1..80: mol_type = other DNA
taaaagaaaaagggggactggaagggatgttttacagtagggatagacatagaatcctagacttgtacctagaaaaggag

SEQ ID NO: 169008 - DNA, 80 bp, synthetic construct
  source 1..80: mol_type = other DNA
ataggtgagatcgctagttactatacacattggacaggctctcttagattttcttttatgttttgtggtactgcaaacac

SEQ ID NO: 169009 - DNA, 80 bp, synthetic construct
  source 1..80: mol_type = other DNA
agaagtccagctgggcattccccacccggcagggctggcagaaagaaaaagaataacagtactagatataggagatgcct

SEQ ID NO: 169010 - DNA, 80 bp, synthetic construct
  source 1..80: mol_type = other DNA
aagtgagaaatcaccatgagtgacgactgaatccggtgagaatggcaaaagtttatgcatttctttccagacttgttcaa

SEQ ID NO: 169011 - DNA, 80 bp, synthetic construct
  source 1..80: mol_type = other DNA
agagggtcagacatagcgggaaccaccagcacagtagaagaacagatacagtggatgtacagaccccaaaatcctgtccc

SEQ ID NO: 169012 - DNA, 80 bp, synthetic construct
  source 1..80: mol_type = other DNA
gccctgggagtcatccctgttacagtctccgggaagggcctttgcacccgttagcccacaacccatgccagtagaacccg

SEQ ID NO: 169013 - DNA, 80 bp, synthetic construct
  source 1..80: mol_type = other DNA
gtaccttatatcaattgtattcccatggataacatgctgagacacaacaacctatcactgctcattattcctatggtacg

SEQ ID NO: 169014 - DNA, 80 bp, synthetic construct
  source 1..80: mol_type = other DNA
ggggctagaagttcctcactggcgacagtgttctagcccgcgtggctgcctgctcccttatgggagaagccattctactg

SEQ ID NO: 169015 - DNA, 80 bp, synthetic construct
  source 1..80: mol_type = other DNA
atgtgtcccaggtgactgtggaggcaaattactgtgcagacatggggttatcggcatcataacagctggtggtgatggcc

SEQ ID NO: 169016 - DNA, 80 bp, synthetic construct
  source 1..80: mol_type = other DNA
gcggggacgggagttggcggcggggccggggggtgacgttgaagacgggagtttttggacgtagtggggacggcggcgga

SEQ ID NO: 169017 - DNA, 80 bp, synthetic construct
  source 1..80: mol_type = other DNA
tctggggcgcgtgcaagaccagcaagagctactacacagggattacccatatttatgacaccaggctcaggccagttcat

SEQ ID NO: 169018 - DNA, 80 bp, synthetic construct
  source 1..80: mol_type = other DNA
acaaaacatttctaagtgagggtgacaccgccaaagaattttcagaggcggccgtctcaacttcacacggagttcaaacg

SEQ ID NO: 169019 - DNA, 80 bp, synthetic construct
  source 1..80: mol_type = other DNA
ggacagatacccgtatactggcagagcaggtggcgaccgtacctaaaatggcagctgcaagtaatgaatgacatttgcaa

SEQ ID NO: 169020 - DNA, 80 bp, synthetic construct
  source 1..80: mol_type = other DNA
agaccacaccatgcacacacgcggggcttttggccaacaatcaggggcagtgtatgtgaggaattacagggtgattaaca

SEQ ID NO: 169021 - DNA, 80 bp, synthetic construct
  source 1..80: mol_type = other DNA
cacacctcccaagtggtgcctggagataccatgcagaccagacacgtgaaaaatttccacactcggtccgaatcatcagt

SEQ ID NO: 169022 - DNA, 80 bp, synthetic construct
  source 1..80: mol_type = other DNA
cactcaccgcagcggaaacaggccacacatcacaagtaacgcccagtgataacttgcaaacgcgccatgttaagaactac

SEQ ID NO: 169023 - DNA, 80 bp, synthetic construct
  source 1..80: mol_type = other DNA
tgctagcagtgtcttccagcgtactctgcttggtgagatcttgaactactatacacactggtctggtagcataaaactga

SEQ ID NO: 169024 - DNA, 80 bp, synthetic construct
  source 1..80: mol_type = other DNA
ttgaagtgtacctaagtttgagatgcccaaatttgttctttcctattcctgctccaaaaccggccaatgcctcaagatca

SEQ ID NO: 169025 - DNA, 80 bp, synthetic construct
  source 1..80: mol_type = other DNA
acacggcccctctcaaggccattgtgggccacggggggcgagacatgtacaaggacatcctggcccatctggagcagaac

SEQ ID NO: 169026 - DNA, 80 bp, synthetic construct
  source 1..80: mol_type = other DNA
ccgctcttgagagagttgcgacattcaccatcccaactacctctcgacccggcgatcttcttttcaccctacagaataat

SEQ ID NO: 169027 - DNA, 80 bp, synthetic construct
  source 1..80: mol_type = other DNA
gcacttactatcaaaaaggttacaactgcaccgacaaacatataacactatcttgtttcaacctaacggtggttcctcga

SEQ ID NO: 169028 - DNA, 80 bp, synthetic construct
  source 1..80: mol_type = other DNA
tacaacctggggcggacgcagtgatggaaagaacacttttgggtgagattctcaattactatgcaaactggtccggcagc

SEQ ID NO: 169029 - DNA, 80 bp, synthetic construct
  source 1..80: mol_type = other DNA
tcaaggacctatttcaaattatctgacacagttaggcaatgcatttggtgagggttttacccaaaatattaaggacagtt

SEQ ID NO: 169030 - DNA, 80 bp, synthetic construct
  source 1..80: mol_type = other DNA
actagcggaaatagacagtgttattccaatgaacgcagtagcaggtaaagtcaacacaatggaggcatacccaattccat

SEQ ID NO: 169031 - DNA, 80 bp, synthetic construct
  source 1..80: mol_type = other DNA
cgtatagaggagaaggtgtagacatcaaaaatgggactattacaccactgacccccgtgaatagcatcacaacatatgga

SEQ ID NO: 169032 - DNA, 80 bp, synthetic construct
  source 1..80: mol_type = other DNA
ttgattggatcaagtctatgctaccccaagcaaagctaaaagtgacatatatacaatctcttaaacagttaccactgttg

SEQ ID NO: 169033 - DNA, 80 bp, synthetic construct
  source 1..80: mol_type = other DNA
caaccacacccacaacagcatccccgcgtacaataaaacccgtgacagagataagtgagaattccacatgcatacgcgca

SEQ ID NO: 169034 - DNA, 80 bp, synthetic construct
  source 1..80: mol_type = other DNA
aagcaccgaacacagtgctccagtacatgtacgtgcctcccggagcaccggtaccaacaacacgtgactctttccaatgg

SEQ ID NO: 169035 - DNA, 80 bp, synthetic construct
  source 1..80: mol_type = other DNA
ggcttcatgatcccaccgcctttcccgatgatgatgacaaccgcggctgtctgaagcggctgacgaaatcggttgagatt

SEQ ID NO: 169036 - DNA, 80 bp, synthetic construct
  source 1..80: mol_type = other DNA
gcgcagctcgtgtctgggttgcactttctgccaggctccaatctctggatgggcggccaccgccagcatcgactgtagga

SEQ ID NO: 169037 - DNA, 80 bp, synthetic construct
  source 1..80: mol_type = other DNA
ccttaatttcattttgctacttaatagtacaaaatgggagctcaagtgtcaacacaaaaaactggagcgcatgaaacagg

SEQ ID NO: 169038 - DNA, 80 bp, synthetic construct
  source 1..80: mol_type = other DNA
gatcagggtgcatacatgaatctaaactggaggtcacgcttacaaattacaatgaaaacaatttcaaagtgtggaatatc

SEQ ID NO: 169039 - DNA, 80 bp, synthetic construct
  source 1..80: mol_type = other DNA
aactagaaattacagtcataaaattggataggaatgaaaaatttagagatattagaaagtacataccagaaaaagaagat

SEQ ID NO: 169040 - DNA, 80 bp, synthetic construct
  source 1..80: mol_type = other DNA
caaaatgatcgcatatggggacgacgtgattgcttcatacccagagaagcttgatcctaaagagttatccataactggag

SEQ ID NO: 169041 - DNA, 80 bp, synthetic construct
  source 1..80: mol_type = other DNA
tttagagctcactataataacccttgatagaaatgaaaaatttagggatattaggggatttatatcagaggatttagaag

SEQ ID NO: 169042 - DNA, 80 bp, synthetic construct
  source 1..80: mol_type = other DNA
aaatcgttttcgttaccgcttgcaggcatcatgacagaacactacttcctataaacgctacacaggctcctgagattaat

SEQ ID NO: 169043 - DNA, 80 bp, synthetic construct
  source 1..80: mol_type = other DNA
taaaattagagaaaactactttcagttaagtataggcaaaaacgacgtattcggagaccacacaagccaatacagaggag

SEQ ID NO: 169044 - DNA, 80 bp, synthetic construct
  source 1..80: mol_type = other DNA
tggcatatttggtgagagagctatcaagcgagtgtcagcaaaacaaatcattactgagtctcttacaggcccaaaaagac

SEQ ID NO: 169045 - DNA, 80 bp, synthetic construct
  source 1..80: mol_type = other DNA
gggtgtgggctgtgcgagtgtcatgaggcaggtgtggtgtcgggcccgcgcattcctggaaaaagtggaggtggcgtggc

SEQ ID NO: 169046 - DNA, 80 bp, synthetic construct
  source 1..80: mol_type = other DNA
ctgagctgtgcttcacgtaggtgacattgtaggtgaccttgacccgttcttcatcctgctcggttcccaccgggaccatg

SEQ ID NO: 169047 - DNA, 80 bp, synthetic construct
  source 1..80: mol_type = other DNA
gtcagtgacgtttgtttcttcccaacgtacgtatgattcgaatggactcgtgtgcgctattgcccgcaatacgtaactgt

SEQ ID NO: 169048 - DNA, 80 bp, synthetic construct
  source 1..80: mol_type = other DNA
agagatatatttggttcacatgcactcagccagcatcaggccattgggttagttgggacaatactcttaactgctgggtt

SEQ ID NO: 169049 - DNA, 80 bp, synthetic construct
  source 1..80: mol_type = other DNA
atgacttttatgccacaaaatcagacagcctatatggctactgctcctttacccctaaagacgaaagaggacgcaacaat

SEQ ID NO: 169050 - DNA, 80 bp, synthetic construct
  source 1..80: mol_type = other DNA
gcactcgccgcagagtaaggaggcggagggtgaggtggaggagacgatacagacgctggcgcagacgcgggtggcgacgc

SEQ ID NO: 169051 - DNA, 80 bp, synthetic construct
  source 1..80: mol_type = other DNA
ccatattaggcaggtaattaacacatggcataaagtagggagaaatgtgtatttgcctccaagagaaggagatctcacct

SEQ ID NO: 169052 - DNA, 80 bp, synthetic construct
  source 1..80: mol_type = other DNA
gagcgcagacaaaccctgttttacaagggctgcctgtccttaacactccagggtccaatcaattcctaacaacagacaac

SEQ ID NO: 169053 - DNA, 80 bp, synthetic construct
  source 1..80: mol_type = other DNA
ggagaattccagaaaactgctgcattgacagcgggagacgggaaaaactcattttgtcccctagactgggttctgggatg

SEQ ID NO: 169054 - DNA, 80 bp, synthetic construct
  source 1..80: mol_type = other DNA
caaacacggcatgtgaaaaactatcactcacgctctgaatctacgatagaaaatttcctcagtcggtcagcgtgcgtgta

SEQ ID NO: 169055 - DNA, 80 bp, synthetic construct
  source 1..80: mol_type = other DNA
aattcttggggatcgcaaatggatttatctgacccattatgcatagaggacagcacagaagattgtaaacaatctatctc

SEQ ID NO: 169056 - DNA, 80 bp, synthetic construct
  source 1..80: mol_type = other DNA
acgtaaaacaaagtatcgaagatgtaattgctaaaataatttctaatgcagagaactactttaaaaaattacaaagcgaa

SEQ ID NO: 169057 - DNA, 80 bp, synthetic construct
  source 1..80: mol_type = other DNA
tccatatgacagcaactttggctaccccacttacagagcacaaccagactacattaaacaaagaagagcagcaaatttta

SEQ ID NO: 169058 - DNA, 80 bp, synthetic construct
  source 1..80: mol_type = other DNA
gtacagccacatgtcccccctctacgcccgacagcacccaccattttgtcacctctgtcacaaccgaggcttacccctcc

SEQ ID NO: 169059 - DNA, 80 bp, synthetic construct
  source 1..80: mol_type = other DNA
caatgcttgggacccatgttatttgggacgtggggttgcagtccagttgcgttctatgtgtgccttggattagtcaaaca

SEQ ID NO: 169060 - DNA, 80 bp, synthetic construct
  source 1..80: mol_type = other DNA
taagccaccgcactataagcagtgctgccctttgctttgtggtaaagctatagtactccaaaatcgccgcacatctgcta

SEQ ID NO: 169061 - DNA, 80 bp, synthetic construct
  source 1..80: mol_type = other DNA
tcgagaactacaatgagaccaatgtctccaagagtaagttgtttgctaaatggaacatcacttacaccgacactgtgcag

SEQ ID NO: 169062 - DNA, 80 bp, synthetic construct
  source 1..80: mol_type = other DNA
tgggcccatggggaaagaagccccgcaacttccctgtggcccagatcccacaggggctgacaccaacagcaccaccaata

SEQ ID NO: 169063 - DNA, 80 bp, synthetic construct
  source 1..80: mol_type = other DNA
tttatctacctccaacgaatcagaatttatagactcttttttaaaagttgcttttccagataacaaaccaagacacgcca

SEQ ID NO: 169064 - DNA, 80 bp, synthetic construct
  source 1..80: mol_type = other DNA
acacacgcccaacctgataacacaatcctcattgatggtgtagaaactaagatcataaaacaagaggtcattactgatga

SEQ ID NO: 169065 - DNA, 80 bp, synthetic construct
  source 1..80: mol_type = other DNA
ctgtttccccggtctgacgggatatgcttcacccgaggcagaaactcagatgatcgttatccgcaaagtgcctacgggaa

SEQ ID NO: 169066 - DNA, 80 bp, synthetic construct
  source 1..80: mol_type = other DNA
cacactatggcactacagtagttaatgacatgggcacattatgtttcaggatagtcaccgaagaacacactagcagggtg

SEQ ID NO: 169067 - DNA, 80 bp, synthetic construct
  source 1..80: mol_type = other DNA
ggaagttttggcatattgccatgattcaccagatctcgtgatgcaactccacaaacctgtgatcgattcagatcatgttg

SEQ ID NO: 169068 - DNA, 80 bp, synthetic construct
  source 1..80: mol_type = other DNA
cctttggtagtttgttttctaaatttcaccaaaacccaggtatagtaacgggatcagcagttgggtgtgacccagagacc

SEQ ID NO: 169069 - DNA, 80 bp, synthetic construct
  source 1..80: mol_type = other DNA
tgtgggcccttaaattctatttgaaaccatatttctgtatcagatccatgatgtctatacatccacttagataaaggatg

SEQ ID NO: 169070 - DNA, 80 bp, synthetic construct
  source 1..80: mol_type = other DNA
gcctacactcccgtaggtgacaaaataattaatgatacacaaagtactacatgtacatggaatggcacaaccactaccta

SEQ ID NO: 169071 - DNA, 80 bp, synthetic construct
  source 1..80: mol_type = other DNA
tggatccccagagctcctagggcgttgccttatgagacaattggccgcacaaatttcccaagaaatccacctaaaataat

SEQ ID NO: 169072 - DNA, 80 bp, synthetic construct
  source 1..80: mol_type = other DNA
aaatactcaggatcatgtcagatcactgtgcatgctagcctggcactcaggtgaaaaagattacaatgattttatagcgt

SEQ ID NO: 169073 - DNA, 80 bp, synthetic construct
  source 1..80: mol_type = other DNA
actatgttaaaacagattcatctgacctagggcgtctaagagtatatgtttgggcaccattgacaataccatctggagca

SEQ ID NO: 169074 - DNA, 80 bp, synthetic construct
  source 1..80: mol_type = other DNA
gccccccaaactttttatagacaagtggtactctcaagaggatttgtgtaccgttaatcttgtgacatttgtggttagcc

SEQ ID NO: 169075 - DNA, 80 bp, synthetic construct
  source 1..80: mol_type = other DNA
aaagtggtgattatggatgatgtgggtcaaaatcctgatggtgaagatttaagcatcttttgccaaatggtctctactac

SEQ ID NO: 169076 - DNA, 80 bp, synthetic construct
  source 1..80: mol_type = other DNA
atctctaagacgccgttgccaaggaacaacaccatgttggcgtttaactttagtcctattttcaggaacaccagcctcct

SEQ ID NO: 169077 - DNA, 80 bp, synthetic construct
  source 1..80: mol_type = other DNA
ttgccatgtccgaggccgacagcctggagatgttgctggacaagttctccacggatcaggcctcgctggtggaggtgcag

SEQ ID NO: 169078 - DNA, 80 bp, synthetic construct
  source 1..80: mol_type = other DNA
taacatataatcccctagtggacaaaggcataggaaacattatctggctagacagccttacaaaagaagatgcagtacta

SEQ ID NO: 169079 - DNA, 80 bp, synthetic construct
  source 1..80: mol_type = other DNA
ggaaggccacggcgtagggattcagatccaggttgaaggcctgcgtggcgcccgccacctcgtcgcggctgctcttgagg

SEQ ID NO: 169080 - DNA, 80 bp, synthetic construct
  source 1..80: mol_type = other DNA
agcaacaaacaaaccagatgacaacagctactttgcaccactagatgctctgtggggagaccctatatactataatgaac

SEQ ID NO: 169081 - DNA, 80 bp, synthetic construct
  source 1..80: mol_type = other DNA
aagtatttccctgctgaagcgccgcgggaaaacatctctaccacttccaccactctcccaatcggtggtgatgccaaagg

SEQ ID NO: 169082 - DNA, 80 bp, synthetic construct
  source 1..80: mol_type = other DNA
tgctcagcaagagacgcatattaataccctctctaaagacccggccgagcagaaaacacagggtggtcgtcagggttggc

SEQ ID NO: 169083 - DNA, 80 bp, synthetic construct
  source 1..80: mol_type = other DNA
agccggccagcgctctaagcgaggcggtgtgcggcagctcctctgggacggtgatgaagttgcagcgtcgcaaaccgatg

SEQ ID NO: 169084 - DNA, 80 bp, synthetic construct
  source 1..80: mol_type = other DNA
cggcagcaccacggagggtgatccccgcgtcccgtgggcgggtgccggaggtgagtttacacaccgcagtcaagaggcaa

SEQ ID NO: 169085 - DNA, 80 bp, synthetic construct
  source 1..80: mol_type = other DNA
actaaggttactgcatcttctgcaacagacaagtgagtatggcacacactagcaatcacctacttattttgctcctgctt

SEQ ID NO: 169086 - DNA, 80 bp, synthetic construct
  source 1..80: mol_type = other DNA
gaactaactgtcccttactctttttcaacatggatgagaaaaactaatgggcgaccccttggtatgttccagatagaggt

SEQ ID NO: 169087 - DNA, 80 bp, synthetic construct
  source 1..80: mol_type = other DNA
cgctggggctggtggagacgtcgaggcagacgcagactactccccagaagacgtcgagcagctgctggccgccgccgccg

SEQ ID NO: 169088 - DNA, 80 bp, synthetic construct
  source 1..80: mol_type = other DNA
accgtggaaactccctcagcccggtcccgccaacaaataccgtgggacgacacgcaccggcagtgcgcaggcagcgtcgg

SEQ ID NO: 169089 - DNA, 80 bp, synthetic construct
  source 1..80: mol_type = other DNA
ttactgtatttatctacttgctacatccatccaaccataatgggagctcaagtgtccactcagaaatctggatcacacga

SEQ ID NO: 169090 - DNA, 80 bp, synthetic construct
  source 1..80: mol_type = other DNA
cggacggttcgacattgacccccatagattccctcgtgagctacaaattgcggaccctcgcaccatggggccccaatggg

SEQ ID NO: 169091 - DNA, 80 bp, synthetic construct
  source 1..80: mol_type = other DNA
cgccgactatacatataccgggcgaggtcaataatctcctagagctctgccaagtggagtccatccttgaggtcaacaat

SEQ ID NO: 169092 - DNA, 80 bp, synthetic construct
  source 1..80: mol_type = other DNA
aactagggcagacatcaaacttgtgaactttggaccctcagatctatttgtacacatggatgatctagtatatagaaact

SEQ ID NO: 169093 - DNA, 80 bp, synthetic construct
  source 1..80: mol_type = other DNA
tggctgatacgatcgccagcgggcctagcaattccaccagtattcctgccctgactgcggttgagaccggacacacttca

SEQ ID NO: 169094 - DNA, 80 bp, synthetic construct
  source 1..80: mol_type = other DNA
ggacacagcatcaaaccccagtgttttctatcaacccaagtctggatttccacgtttcaccatcccgtttacaggattag

SEQ ID NO: 169095 - DNA, 80 bp, synthetic construct
  source 1..80: mol_type = other DNA
ctgctatgctcttacaatcctacttttctgaaactcaaggcttaataactaaagaattacctgtatcaagtaaaaattta

SEQ ID NO: 169096 - DNA, 80 bp, synthetic construct
  source 1..80: mol_type = other DNA
gacaccaggaaagacatcaatagtgtaaccagtatgacacaaagtgagcgtcgaggtgacctgtctactctcaacacaca

SEQ ID NO: 169097 - DNA, 80 bp, synthetic construct
  source 1..80: mol_type = other DNA
ttcactgcaaagtataagtttgatttcttatggggcggtaatatgatatccgaacaggttatcaagaacccgtgcaaatc

SEQ ID NO: 169098 - DNA, 80 bp, synthetic construct
  source 1..80: mol_type = other DNA
gtctcctacagggagagaaattggcttcaggccgtcgaaggatcccacagttctttttgtggctgtggtgattctattat

SEQ ID NO: 169099 - DNA, 80 bp, synthetic construct
  source 1..80: mol_type = other DNA
tgtgtacatataacagagattgagaacgaaatacctcaaaatcccacaccggaagggacaaatacccacaaggaacaaaa

SEQ ID NO: 169100 - DNA, 80 bp, synthetic construct
  source 1..80: mol_type = other DNA
aaagttctttgggtggctatggaagctagtaccagtagatgttccacaagaggaggagggcgacgataccaactgcttac

SEQ ID NO: 169101 - DNA, 80 bp, synthetic construct
  source 1..80: mol_type = other DNA
aattgggcaaccaggtgatgcgaaaacactatacccatggggcatttggtcaacagtcaggtgcgatctatgtaggcaac

SEQ ID NO: 169102 - DNA, 80 bp, synthetic construct
  source 1..80: mol_type = other DNA
cttcggcgtcaagctgcagcgaattaaagagcgtaggcgggtacaacggcacgcgcaccgcctcgccgccgtacagtcgc

SEQ ID NO: 169103 - DNA, 80 bp, synthetic construct
  source 1..80: mol_type = other DNA
gacatccccggcaccggtaacttgcctcgcagaatacaagtcattgacccgaaagtcctcggtccccactactcattcca

SEQ ID NO: 169104 - DNA, 80 bp, synthetic construct
  source 1..80: mol_type = other DNA
tctctacacacacagtctttaatttcaactactcaaaaaactgcattatacacagaccaaaataagtttccaaaccccac

SEQ ID NO: 169105 - DNA, 80 bp, synthetic construct
  source 1..80: mol_type = other DNA
tacttagggatactacgcacataaaacaagatgccatgccccagggaattgaggaaatcattcaacaggtcgccagcaat

SEQ ID NO: 169106 - DNA, 80 bp, synthetic construct
  source 1..80: mol_type = other DNA
aaaaatacttaaatgcaactagagaagcccttccagcactagcaacagtaggagacgaaatgctagaataccacacaggc

SEQ ID NO: 169107 - DNA, 80 bp, synthetic construct
  source 1..80: mol_type = other DNA
gacggcggcggctgcgtggttaatgatgatgaggaggatgaggagggctccggctgaggcgacggaggcaccaccgcagt

SEQ ID NO: 169108 - DNA, 80 bp, synthetic construct
  source 1..80: mol_type = other DNA
tcaagactactaaaactacaaatacaatggacaaaagtatacccacagttacaaacacaaaaacccgacgatacaacact

SEQ ID NO: 169109 - DNA, 80 bp, synthetic construct
  source 1..80: mol_type = other DNA
accatgtacccacccccagccacagcagtagtgtgcgtgtgcgtcttggcaccacaggagcctttggacatcaggcaggg

SEQ ID NO: 169110 - DNA, 80 bp, synthetic construct
  source 1..80: mol_type = other DNA
ccctctacgtgtacgttgatccggcctataccaacaacacatccgcatcaggcaccggaatcgccgccgtgactcacgac

SEQ ID NO: 169111 - DNA, 80 bp, synthetic construct
  source 1..80: mol_type = other DNA
tacagacataaagacacagactttatagtgtactttacaaacaatcctcccatgaaaaccaaccagttctcagcgcccct

SEQ ID NO: 169112 - DNA, 80 bp, synthetic construct
  source 1..80: mol_type = other DNA
tactgcttgaactttggaaagcagacaggtgtaggaggcaggctcaattcctttagacccactctccagttttatccccg

SEQ ID NO: 169113 - DNA, 80 bp, synthetic construct
  source 1..80: mol_type = other DNA
tcgacttcaatcctaagggggttacagaaagtagagacaaaatcacgctggagagagacgaacacacaccctcagtagtg

SEQ ID NO: 169114 - DNA, 80 bp, synthetic construct
  source 1..80: mol_type = other DNA
caatgaaaaacaatgctactgcaccctagaagacatgcccctatgggcaatatgctttggatacactgactatgtagaga

SEQ ID NO: 169115 - DNA, 80 bp, synthetic construct
  source 1..80: mol_type = other DNA
gcacaacaaaactacgcacaagtatacaatgaatttaaagaggtatacccactaacagctacatggccaccacaatggac

SEQ ID NO: 169116 - DNA, 80 bp, synthetic construct
  source 1..80: mol_type = other DNA
tggtaatgtcactgcaggatataagtatacacaccctggtgaacttggtagggtagttggacaacccagaacacaaatta

SEQ ID NO: 169117 - DNA, 80 bp, synthetic construct
  source 1..80: mol_type = other DNA
cgtgatggccactaacactgaagcaaaaacatcgtatgtgtcatatgtgaatgcaaatcccggagaggccggtggtgtgt

SEQ ID NO: 169118 - DNA, 80 bp, synthetic construct
  source 1..80: mol_type = other DNA
cgccgcatccacgtccttgaacatcttgacaaagtcacgcgggccatggggctccttctctagctttccctcagcgtcta

SEQ ID NO: 169119 - DNA, 80 bp, synthetic construct
  source 1..80: mol_type = other DNA
tgtccccttatactggcagaccagatggagaccagagaccctttttcaagaatccaccatgagagacatcacaatgacag

SEQ ID NO: 169120 - DNA, 80 bp, synthetic construct
  source 1..80: mol_type = other DNA
aaatatgcaattaccatttagcaactcaggaagaccttcaaaatgtagtgagcattatgtggaatagagatttgattgtt

SEQ ID NO: 169121 - DNA, 80 bp, synthetic construct
  source 1..80: mol_type = other DNA
ccgtcagcacaaccaccgtgcttggacacgcgactttttccgcatgcgttcgaagtgacgtgatgcgtgacggagaaaaa

SEQ ID NO: 169122 - DNA, 80 bp, synthetic construct
  source 1..80: mol_type = other DNA
acgcagaatactgtgccaaggccacaggagactctaacatagacatgaacgccagagtagttatcagaagcccctacact

SEQ ID NO: 169123 - DNA, 80 bp, synthetic construct
  source 1..80: mol_type = other DNA
aagacagggctgctggaaatgtggcaagtcaggacacgtcatggcaaactgtccagaaagacaggcgggttttttagggt

SEQ ID NO: 169124 - DNA, 80 bp, synthetic construct
  source 1..80: mol_type = other DNA
aaagagaaaggcatatacagtatacatacaccaacaaaaacaaaattacaaccaagtgtatttcatgatgtttttcccgg

SEQ ID NO: 169125 - DNA, 80 bp, synthetic construct
  source 1..80: mol_type = other DNA
aggctacaattgaaaatttcctaggcagagcggcactatgggccaacatacaaatgagtgcaggtttcaagacatggaag

SEQ ID NO: 169126 - DNA, 80 bp, synthetic construct
  source 1..80: mol_type = other DNA
tggatttactccgctcacacagcttactcctaagataatatttattgtattgctggtaaggagacactattataatggga

SEQ ID NO: 169127 - DNA, 80 bp, synthetic construct
  source 1..80: mol_type = other DNA
atatggggcggaaaccccgtgtttccacaggttgttagaaacccctgcaaagacacccaaggttccacaggccctagaaa

SEQ ID NO: 169128 - DNA, 80 bp, synthetic construct
  source 1..80: mol_type = other DNA
aaataacactggtaataacaccacaagcattaatatgtacacagtacggcttgaaaggcagacaaatttaatgggtgaag

SEQ ID NO: 169129 - DNA, 80 bp, synthetic construct
  source 1..80: mol_type = other DNA
aaacccttgcaaagacgactctaccggttccaatagacagcctagagacgtacaagtggcagacccgacaaccgtggggc

SEQ ID NO: 169130 - DNA, 80 bp, synthetic construct
  source 1..80: mol_type = other DNA
gagacggggcagacgcagagggcgacgaaagagacacagacagactctagtagtgaggcagtggcaacctgacgttgtta

SEQ ID NO: 169131 - DNA, 80 bp, synthetic construct
  source 1..80: mol_type = other DNA
gtcgaggaggcagtggaggccggggtcgaggaggtagtggaggccgtggtcgaggacgtgaaagagccaggtgcggaagt

SEQ ID NO: 169132 - DNA, 80 bp, synthetic construct
  source 1..80: mol_type = other DNA
ggtataactgattacattcatatgttgggtgaagcatttgggagtggatttgttgacagtgttaaggagcaaataaatgc

SEQ ID NO: 169133 - DNA, 80 bp, synthetic construct
  source 1..80: mol_type = other DNA
caggggaggtacaaaacctcatggaaattgctgaagtcgactcggtggtgccagtcaacaacgtggaagggaaactcgac

SEQ ID NO: 169134 - DNA, 80 bp, synthetic construct
  source 1..80: mol_type = other DNA
agacaacgtacaaataagacaaaaaattaagaaaaacatggacagttactaccaaaaaattttagatgaaactacaataa

SEQ ID NO: 169135 - DNA, 80 bp, synthetic construct
  source 1..80: mol_type = other DNA
ttcacccagggtgcttatagtgggttacccaacccagttccaaagaaaccagaactaagaaaagcaacattgcagggtcc

SEQ ID NO: 169136 - DNA, 80 bp, synthetic construct
  source 1..80: mol_type = other DNA
tatcctggcttagcagcctccaagttttacaagacgtcccattgccctgcccttggtccaagtctcgccggttttcagca

SEQ ID NO: 169137 - DNA, 80 bp, synthetic construct
  source 1..80: mol_type = other DNA
acagcaaaccatcaaggtctacatcaagcctaaacacatatccacatggtgcccgcgaccaccacgggctacacaatatg

SEQ ID NO: 169138 - DNA, 80 bp, synthetic construct
  source 1..80: mol_type = other DNA
ggaaaaagttgctgagctaaccagcatggtcaccagttcaatcactgaaaagttgttaaagacacttgtgaagatcattt

SEQ ID NO: 169139 - DNA, 80 bp, synthetic construct
  source 1..80: mol_type = other DNA
tggtatatggtaatttatttgcagcttttcataaaaaccctgggatagtaacaggctctgcagtaggatgtgatccggaa

SEQ ID NO: 169140 - DNA, 80 bp, synthetic construct
  source 1..80: mol_type = other DNA
aggtaggggtgtgatgacgcgaaagcccagttttcccgtgcatatgcaaaaggggagcacatcttccatattatccgggt

SEQ ID NO: 169141 - DNA, 80 bp, synthetic construct
  source 1..80: mol_type = other DNA
atttgaattgacttgaccctaccgcgccaaccgaactaggtaacggtgcagtaggggtaaattctccgcattcggtgcgg

SEQ ID NO: 169142 - DNA, 80 bp, synthetic construct
  source 1..80: mol_type = other DNA
aaaagatgtagtttgtgaaccagataactccacagataagacaaatggcaccacaaataagcccccaattgaaaagagca

SEQ ID NO: 169143 - DNA, 80 bp, synthetic construct
  source 1..80: mol_type = other DNA
ctcccctgggaggcaacatactgacagcccctaacatgcacccaggtatagccatgcttagcaaacacaaggtggtggta

SEQ ID NO: 169144 - DNA, 80 bp, synthetic construct
  source 1..80: mol_type = other DNA
caaacaagtgcgcgagatgtctagggaactacagcgcatgatgtgctacaagaaaacccacagaacagaacctgtctgca

SEQ ID NO: 169145 - DNA, 80 bp, synthetic construct
  source 1..80: mol_type = other DNA
cagctgcagcatctttcttggtgacaaccttagcctagctatccgccccctctcgttctcttgaagaactctgattttaa

SEQ ID NO: 169146 - DNA, 80 bp, synthetic construct
  source 1..80: mol_type = other DNA
gcaaaaacaacaaacctactacacaaaaacctatggcgcctatgccacccagtattttactggaaaacaatactgggact

SEQ ID NO: 169147 - DNA, 80 bp, synthetic construct
  source 1..80: mol_type = other DNA
tttccctgttttgtgtaaatattaattcctgcaggttcagggttctttaatctgtttctctataagaacactcattttca

SEQ ID NO: 169148 - DNA, 80 bp, synthetic construct
  source 1..80: mol_type = other DNA
tcaagggataggaggaccagggcaaaaagccaggcttatggctgaagcattaaaagaagccttaaaccctacagccctac

SEQ ID NO: 169149 - DNA, 80 bp, synthetic construct
  source 1..80: mol_type = other DNA
aatacagccttgttttccaaatacaaaggtaatgtcaaatgtgagatgtctgaccatatgagagtggccatttctcatta

SEQ ID NO: 169150 - DNA, 80 bp, synthetic construct
  source 1..80: mol_type = other DNA
gctcccaaatctcgtaaggacgcaatgttgggcacacatgtcatatgggacgtgggtctgcagtcctcctgcgtgttgtg

SEQ ID NO: 169151 - DNA, 80 bp, synthetic construct
  source 1..80: mol_type = other DNA
gctcttcagttgtcccaacctaatagaccagccctgcccccagccgaacagtctgttcccaacaccaatcagaccacacc

SEQ ID NO: 169152 - DNA, 80 bp, synthetic construct
  source 1..80: mol_type = other DNA
attgtatgcggtacaaggagacaatattactataacacacaatttaaccaccacatcgtgctacaaacaagcttggctta

SEQ ID NO: 169153 - DNA, 80 bp, synthetic construct
  source 1..80: mol_type = other DNA
gagcctatactgcagcccagactcggggggggggggggaaggaggaaatggtaagagttatactctacttatcttttttg

SEQ ID NO: 169154 - DNA, 80 bp, synthetic construct
  source 1..80: mol_type = other DNA
attgcaacaagggttagtgattcatatgatatgtataacaagcagggaattaaattagaaattacagctgtgttattgga

SEQ ID NO: 169155 - DNA, 80 bp, synthetic construct
  source 1..80: mol_type = other DNA
ctcgcatactaacaacgtcaacgtgggctggttcaaagcggctacggccattgtgccgcgcgtctcgggcgctgacctgg

SEQ ID NO: 169156 - DNA, 80 bp, synthetic construct
  source 1..80: mol_type = other DNA
ataaccctatcaaaaagaactagcgagtgcaatctccccagtatacacaatccatgcaaaaccaaactgcaacccagtgt

SEQ ID NO: 169157 - DNA, 80 bp, synthetic construct
  source 1..80: mol_type = other DNA
ggcaggcagttgcgcagggtttccccactgaattgaaacctggcactaatcagttcttaaccacggatgatggtgtgtca

SEQ ID NO: 169158 - DNA, 80 bp, synthetic construct
  source 1..80: mol_type = other DNA
tagtagactacaaatcacgaacccgaggctgcaagaagaaggctacctctttcggaagtgggacatccgacgtggcttct

SEQ ID NO: 169159 - DNA, 80 bp, synthetic construct
  source 1..80: mol_type = other DNA
aacagaccacctagaaccaacctaaaagacacccccttctacccctgggtacctaaacctaaacctcaattccgtgtatc

SEQ ID NO: 169160 - DNA, 80 bp, synthetic construct
  source 1..80: mol_type = other DNA
actcacaagaaaatgaatggcaaacgttgtggtccaaaaaaagtgaatcgtggagcggaacctccacatatccacataca

SEQ ID NO: 169161 - DNA, 80 bp, synthetic construct
  source 1..80: mol_type = other DNA
caggagatgatgtgattccagcatgcgactgcactgttggatgctatttttcaaagagccgcaatcggtattttcccatc

SEQ ID NO: 169162 - DNA, 80 bp, synthetic construct
  source 1..80: mol_type = other DNA
accaaactgggattgtcgtgccggccggaacacctacatcgtgctcaataatgtgctttgtgtcagcctgcaacgacttc

SEQ ID NO: 169163 - DNA, 80 bp, synthetic construct
  source 1..80: mol_type = other DNA
aggtaagctcatctgtaattccactgtcaccagtcttatagccaacattgaagtgattaatcagactggcagtaattcca

SEQ ID NO: 169164 - DNA, 80 bp, synthetic construct
  source 1..80: mol_type = other DNA
ctttcttccgtagaacaaaggccgacagctactcatcaggtggttatatcacactgtggcatcagactgcatttgttagt

SEQ ID NO: 169165 - DNA, 80 bp, synthetic construct
  source 1..80: mol_type = other DNA
gcagaaaacactatcaagacagaggagtattaaaagaagccagattaacagtaatatgtccatacacacaaccaccacta

SEQ ID NO: 169166 - DNA, 80 bp, synthetic construct
  source 1..80: mol_type = other DNA
ggagacaataagtacttctttacaccagacggcctatggggagatcccatttacaactactcaaacggaacacaacaaca

SEQ ID NO: 169167 - DNA, 80 bp, synthetic construct
  source 1..80: mol_type = other DNA
gggaacaaggcagagaaatagggacttttggagagaacagtgtactggacagacaacctagtgatgagaattggctgaat

SEQ ID NO: 169168 - DNA, 80 bp, synthetic construct
  source 1..80: mol_type = other DNA
gaaaattttcttggtcgagcagcactgtggaccaatgtaacaatgaacaatggtttcaaagagtggaaaatcaattttca

SEQ ID NO: 169169 - DNA, 80 bp, synthetic construct
  source 1..80: mol_type = other DNA
aatctgctaccaagcagacaaacttctcgtcagagtactccttctgctgcacctccgcgccccccgccgccgtcaccgag

SEQ ID NO: 169170 - DNA, 80 bp, synthetic construct
  source 1..80: mol_type = other DNA
cagaggctcagtttagagtacccaacaattgtccagatggaacggtaaatacgtataaagcacagtggacaaaaatgtgg

SEQ ID NO: 169171 - DNA, 80 bp, synthetic construct
  source 1..80: mol_type = other DNA
aagttcttgatagcatacacacccccaggtgcaagcattccagagtcccggcgtgacgcgatgctaggcacgcacgtcat

SEQ ID NO: 169172 - DNA, 80 bp, synthetic construct
  source 1..80: mol_type = other DNA
tctacactcttgatcatggacgttacttcctcctcagttttgtccccatcatgtaaagcacttatgcaatgtcttatgga

SEQ ID NO: 169173 - DNA, 80 bp, synthetic construct
  source 1..80: mol_type = other DNA
tcctcaggtgtcctaacccaactcgttggcaccttttcaactactggctcctcccgttctgcctttcttgaaactcaatc

SEQ ID NO: 169174 - DNA, 80 bp, synthetic construct
  source 1..80: mol_type = other DNA
cgccgcgtggcctgcaccagatcctgatggagaaccttgttcatctccatcgcaccgacgccaccgccgatttatttacc

SEQ ID NO: 169175 - DNA, 80 bp, synthetic construct
  source 1..80: mol_type = other DNA
ataagccactaaggatggttaggagtgccaccgccctcggacatcttatgtgtaagcctatgttacatgggacaacaaga

SEQ ID NO: 169176 - DNA, 80 bp, synthetic construct
  source 1..80: mol_type = other DNA
tctttaaaacatgtttcttggcagggcctggagaaagaaaaggcaagtgccactgccgacactgccagtggtgccgcttc

SEQ ID NO: 169177 - DNA, 80 bp, synthetic construct
  source 1..80: mol_type = other DNA
gctcaaaacgcaagcgggtctccacatgaaccccctgttcttatcccagcaactaacagggtttacatgttccccccaga

SEQ ID NO: 169178 - DNA, 80 bp, synthetic construct
  source 1..80: mol_type = other DNA
taagaaaatactacttttactgggaaacagtacaaagtagttcacatcaaaattaccaggcagtccacgtccccacacac

SEQ ID NO: 169179 - DNA, 80 bp, synthetic construct
  source 1..80: mol_type = other DNA
accgtggtcccagaccgataatcagaccgacaacacgagtgggatcgtggtcccagactaataatcagaccgacgatacg

SEQ ID NO: 169180 - DNA, 80 bp, synthetic construct
  source 1..80: mol_type = other DNA
agcagcagctgatgcaacaaacaaaaaccaaatgcagggcaaaacctataactgggaaaactacaaaacacacttcccag

SEQ ID NO: 169181 - DNA, 80 bp, synthetic construct
  source 1..80: mol_type = other DNA
caaggtgataaataatgctttacagctctcacaaccaactcgaccagtcacggcatcagatacacccagtacgagtggag

SEQ ID NO: 169182 - DNA, 80 bp, synthetic construct
  source 1..80: mol_type = other DNA
gtaaaatctaagtgggactcactagcacaatcaggatacaaactagtaaaagatgaatacaatgcagtctatacaaccac

SEQ ID NO: 169183 - DNA, 80 bp, synthetic construct
  source 1..80: mol_type = other DNA
tcgcgcattgtatataccagcctatgaagttcttgagcatgaatggtatgagaaattttagatataaaactgttaaatgt

SEQ ID NO: 169184 - DNA, 80 bp, synthetic construct
  source 1..80: mol_type = other DNA
agtcccttacacacacagtaatgttacaaattacaaagtgcgggacggtgaaccaacactctttataaaaccaagagaga

SEQ ID NO: 169185 - DNA, 80 bp, synthetic construct
  source 1..80: mol_type = other DNA
gaataatatctgccatggtgataattataagaaatagttcagacccacaaacagtcatagctacacttacattaataggt

SEQ ID NO: 169186 - DNA, 80 bp, synthetic construct
  source 1..80: mol_type = other DNA
tgttcttaactattgacccgcctgtcattctattaattaaacaagagaagctatgtttagctattccaccaacactgcac

SEQ ID NO: 169187 - DNA, 80 bp, synthetic construct
  source 1..80: mol_type = other DNA
gcccctatgtgtactgaattcaacgggctcagaaacatcactgtaccagcacaccaaggcttgccagtgatgaacactcc

SEQ ID NO: 169188 - DNA, 80 bp, synthetic construct
  source 1..80: mol_type = other DNA
gactggagacgggggttctttaatcaaaaaactctcaaaagaatgcttgaaaaaccagttaatgatggagaatatccaac

SEQ ID NO: 169189 - DNA, 80 bp, synthetic construct
  source 1..80: mol_type = other DNA
aaccaaagaggaaaatcaatattagaaaaaagaaacttttaacaatgtcaactaagtataaatggactaggaacaaggtc

SEQ ID NO: 169190 - DNA, 80 bp, synthetic construct
  source 1..80: mol_type = other DNA
ttgtccaaacaggatttttctcaagacccgtccaagttcactcaacccgtggctgatgtcctgactaacccagccttgat

SEQ ID NO: 169191 - DNA, 80 bp, synthetic construct
  source 1..80: mol_type = other DNA
aacggctgcactgttgatgtcggacgaaacatgtccattcgagaacagtgccgccttcgaaacggtgcgacgttctccaa

SEQ ID NO: 169192 - DNA, 80 bp, synthetic construct
  source 1..80: mol_type = other DNA
ttcaaaaaatacaaacaaatgcagaaaatgtgttaactaaaataaaccaagaactgcaagaatatcaacaaacagctgca

SEQ ID NO: 169193 - DNA, 80 bp, synthetic construct
  source 1..80: mol_type = other DNA
gccctcagttctaaatatggctcagtagttactaatgccatgggcaccttatgtgttcgtgtggttacagaacagcaaag

SEQ ID NO: 169194 - DNA, 80 bp, synthetic construct
  source 1..80: mol_type = other DNA
acctgcaagtactgggaccgtcccgccagggttaaccacacagacaggccttactacccgtgggcacctacccccccccc

SEQ ID NO: 169195 - DNA, 80 bp, synthetic construct
  source 1..80: mol_type = other DNA
ctgagacccccaagatttgtcatgcacacctgcacacctgttggtattgggtttctattcttgagtgtgaaagtttgtaa

SEQ ID NO: 169196 - DNA, 80 bp, synthetic construct
  source 1..80: mol_type = other DNA
gctatagtgatcgtgtgcgttccatcactctgggcaactctacgatcaccacgcaagagtgcgctaacgtggttgttgca

SEQ ID NO: 169197 - DNA, 80 bp, synthetic construct
  source 1..80: mol_type = other DNA
tgggtgcttgtgatgtgtctgacaaattaaccagcaaaataattaagtggactattagactaatcagtgctttatctatc

SEQ ID NO: 169198 - DNA, 80 bp, synthetic construct
  source 1..80: mol_type = other DNA
tccctctccctcgtcctggtcggaaaagtctgaggaggagaaggagaatggggaggagtccaaaacggcacgccacctgc

SEQ ID NO: 169199 - DNA, 80 bp, synthetic construct
  source 1..80: mol_type = other DNA
ggcaattcgggctcgggactggccgggctatgggcaaggctcttaaagctatcgcttttaaatatgtttctcggtaaact

SEQ ID NO: 169200 - DNA, 80 bp, synthetic construct
  source 1..80: mol_type = other DNA
cttatgggctaacatagacatgacaaataattttgctaagtgggatataagcttccaagaacaggcaagtattaggaaga

SEQ ID NO: 169201 - DNA, 80 bp, synthetic construct
  source 1..80: mol_type = other DNA
gttccaatagaataacttcccggtctgtggccggggctggataaggggggtgattcctagaggcgatgagactggcgtgc

SEQ ID NO: 169202 - DNA, 80 bp, synthetic construct
  source 1..80: mol_type = other DNA
acaccgcctgaaccacatatgagtttctggagaccaccggtgcacaatgtaccgggtaatcacattaacaatctggcgac

SEQ ID NO: 169203 - DNA, 80 bp, synthetic construct
  source 1..80: mol_type = other DNA
gtggagaccgagactacgacgaagaagagctagacgagcttttccgcgccgccgccgaagacgatttgtaagtaggagat

SEQ ID NO: 169204 - DNA, 80 bp, synthetic construct
  source 1..80: mol_type = other DNA
tatttgaaaaacacttatttaaaaatccacaattctatcaaactgtccacacacaaggaataattagcaaaacacgaaga

SEQ ID NO: 169205 - DNA, 80 bp, synthetic construct
  source 1..80: mol_type = other DNA
agtgggtgtttgttagtggcagtggtacctgaacaccagttagcttatataggtgcagatgcacgggtaagctatgagca

SEQ ID NO: 169206 - DNA, 80 bp, synthetic construct
  source 1..80: mol_type = other DNA
caaaaagacttaagcaccatccccctactaacggttggtgccacaaccgcaagcctgcggtttccgttctgctcaccaca

SEQ ID NO: 169207 - DNA, 80 bp, synthetic construct
  source 1..80: mol_type = other DNA
ccctcagcaaaagacaccaaaaacacaaacactactactacaaataaatatacaaatgtaaccagtctctggggagacta

SEQ ID NO: 169208 - DNA, 80 bp, synthetic construct
  source 1..80: mol_type = other DNA
gaaaggtttttatatggcaaatgtacccactatcaaagatttgccacagacacaagactaaagcctcagagacccatatc

SEQ ID NO: 169209 - DNA, 80 bp, synthetic construct
  source 1..80: mol_type = other DNA
ttctcgcaaaacggggtgtatggctacaacacactcaaccacatgggtcaaatttatgttagacacgtgaatggatcatc

SEQ ID NO: 169210 - DNA, 80 bp, synthetic construct
  source 1..80: mol_type = other DNA
aaaatatgcgagacatgtacctcgatatgtgtacatcttcggcccacaggccacggccgccagcacctccgcggccgaaa

SEQ ID NO: 169211 - DNA, 80 bp, synthetic construct
  source 1..80: mol_type = other DNA
ctcatggaaattgcagaagtagactcagtagtgcccattaacaacacagcttccaatttacagagcatggatgcctatca

SEQ ID NO: 169212 - DNA, 80 bp, synthetic construct
  source 1..80: mol_type = other DNA
atgtcccaaatgtcaacaaaaaggagaagcaacacatgggcaagtagatgcatcagtagggacatggcagatggattgca

SEQ ID NO: 169213 - DNA, 80 bp, synthetic construct
  source 1..80: mol_type = other DNA
ggtagatcctactttgaaacaccaggtgcatacacagacattaaatataacccttttacagacagaggagaaggcaacat

SEQ ID NO: 169214 - DNA, 80 bp, synthetic construct
  source 1..80: mol_type = other DNA
ctttatgaaaactctaacaaacaaattatactctacgggttcctactggaactcctttcacactgcagagtacctaaacc

SEQ ID NO: 169215 - DNA, 80 bp, synthetic construct
  source 1..80: mol_type = other DNA
tctcatcacggtatgcaggggctggaaaagggtgtggcggttgtaggccgagagaagcacagatgtggcgcctccaatga

SEQ ID NO: 169216 - DNA, 80 bp, synthetic construct
  source 1..80: mol_type = other DNA
tcaaaggtggaaaaaggaatgaacctgtcgctgtgcttatacatggttccccaggaactgggaaatcacttgcaacatct

SEQ ID NO: 169217 - DNA, 80 bp, synthetic construct
  source 1..80: mol_type = other DNA
acaatagagaacttccttagtcgatcagcctgtgtctacatcgaagagtactttaccaaagaccaggacagtgccaacag

SEQ ID NO: 169218 - DNA, 80 bp, synthetic construct
  source 1..80: mol_type = other DNA
atcaaagtagtacccagaaggaaagcaaagatcataaggcactatggaggaggaaaagagttggattgtggtgccgacgt

SEQ ID NO: 169219 - DNA, 80 bp, synthetic construct
  source 1..80: mol_type = other DNA
ctttctctgtcgatcggcatgtgtgtattatactacatacgacacacacggggatgctgcggacgccaaatacgccagtt

SEQ ID NO: 169220 - DNA, 80 bp, synthetic construct
  source 1..80: mol_type = other DNA
tatgagtctattagatggacaaaggatcctcgtaacactcaagatcatgttcgatcgttatgcatgcttgcatggcataa

SEQ ID NO: 169221 - DNA, 80 bp, synthetic construct
  source 1..80: mol_type = other DNA
ataaatataggtttgcaggggcaataatggctggggtggctcttggtgtggcaacagcagctacagtgactgccgggatt

SEQ ID NO: 169222 - DNA, 80 bp, synthetic construct
  source 1..80: mol_type = other DNA
atccagaatccagttgaaaccttcacagaagaggtcctcaaggaggtgttagttgtgcccaacactcaacccagtggccc

SEQ ID NO: 169223 - DNA, 80 bp, synthetic construct
  source 1..80: mol_type = other DNA
ctactttggtaatcatcagtaggaactatgaagacaccaccacagtcttagcaacactagctcttcttggttgtgattgc

SEQ ID NO: 169224 - DNA, 80 bp, synthetic construct
  source 1..80: mol_type = other DNA
gatctgtttgtacatgtgggtaatttgatatacagaaatttacatttatttaattcagaagcacatgattcagtgttagt

SEQ ID NO: 169225 - DNA, 80 bp, synthetic construct
  source 1..80: mol_type = other DNA
gaagacactgacgccacagcaatgacactacaccctggcatgctagtactctctaaaaagagaataatgattcccagctt

SEQ ID NO: 169226 - DNA, 80 bp, synthetic construct
  source 1..80: mol_type = other DNA
ctgcttcgagcagttctgccgcgtggtcccgcgtcgcttcctagggacctgtaagcaaaactctgcaaagatgctggctc

SEQ ID NO: 169227 - DNA, 80 bp, synthetic construct
  source 1..80: mol_type = other DNA
tttcaaggtccacccggagaagctgtcgaacgagcgattgctcgcgtggctgatactataagcagtggccctgtcaattc

SEQ ID NO: 169228 - DNA, 80 bp, synthetic construct
  source 1..80: mol_type = other DNA
gtgaggttactaagggataccacccacatttctcaaaatgctttaattgcaacaacacagggcatagatgatgttattga

SEQ ID NO: 169229 - DNA, 80 bp, synthetic construct
  source 1..80: mol_type = other DNA
cagtctaagtattttgctgccgttaggtgtggttttcatttccaagttcaaataaatgttaaccaaggtacagctggaag

SEQ ID NO: 169230 - DNA, 80 bp, synthetic construct
  source 1..80: mol_type = other DNA
ctgacaaacggagaggatacctgcaaattgacccaagacgccgcagctgctgaaaaaggtaaggtccagacggcagtgtg

SEQ ID NO: 169231 - DNA, 80 bp, synthetic construct
  source 1..80: mol_type = other DNA
aatggatgttcttcgcctaataaggttgatgtgtccggcatattccagggcgatgtacctaaggacacagatgctgaagg

SEQ ID NO: 169232 - DNA, 80 bp, synthetic construct
  source 1..80: mol_type = other DNA
attttgtgtttatcgctctccccagccagtgacccaaggttatcatataccatgctaggtgagatcctcaattattacac

SEQ ID NO: 169233 - DNA, 80 bp, synthetic construct
  source 1..80: mol_type = other DNA
gcgttaccacttcaactatatccggccattgtttggtccaggaaatccaacttggtcaacgatattctcgcacatttgtc

SEQ ID NO: 169234 - DNA, 80 bp, synthetic construct
  source 1..80: mol_type = other DNA
atgtgaatatgaagatgactgagaacatgaaagtggcagtagatcattatgctggccaactaatgtcactagagatacca

SEQ ID NO: 169235 - DNA, 80 bp, synthetic construct
  source 1..80: mol_type = other DNA
catgagagcaacataaccgccaacaagggatctattattaagtatttcaacatcaattactataaggatgcagcaagctc

SEQ ID NO: 169236 - DNA, 80 bp, synthetic construct
  source 1..80: mol_type = other DNA
gatttaattgagacaaggcatgtgattaacaacaggctgagatcggaatgcacaatcgagtccttctttggtagatcagc

SEQ ID NO: 169237 - DNA, 80 bp, synthetic construct
  source 1..80: mol_type = other DNA
agaagacctatttcaaacaggcccatttgcatacaaaggagatgcaaaatcagctaccttaaacagtaaatatgctttta

SEQ ID NO: 169238 - DNA, 80 bp, synthetic construct
  source 1..80: mol_type = other DNA
tagcaccacaaactaatcaaaaagacagtgcagacagccaagatggagaccccatctaccaagcagatcaaatacttaac

SEQ ID NO: 169239 - DNA, 80 bp, synthetic construct
  source 1..80: mol_type = other DNA
ctctgtggccccgggagccacggcatcaaacaggtgagtcagccttgcccccgccagcgcctcctcgcaggcctgccgca

SEQ ID NO: 169240 - DNA, 80 bp, synthetic construct
  source 1..80: mol_type = other DNA
tccaggcaatgaataggcgcttctttcttgacttagacattgtagtacatgacaattataaagattcacaagggaaatta

SEQ ID NO: 169241 - DNA, 80 bp, synthetic construct
  source 1..80: mol_type = other DNA
tgtgatggagcaagtcgcaactatacgcacttttggttttgggcatcggaacaaggctatatacgtggcaggttacaaga

SEQ ID NO: 169242 - DNA, 80 bp, synthetic construct
  source 1..80: mol_type = other DNA
tggggctactttaccaacaaaaccatctgataatgtggaaactagaaccacatacatgcatttcactgggtcagaaacta

SEQ ID NO: 169243 - DNA, 80 bp, synthetic construct
  source 1..80: mol_type = other DNA
taataaggtgaccatgttctccaccagcactcccaaggcgcccagcaagggcgactgggagaccgagtaccaggccgccg

SEQ ID NO: 169244 - DNA, 80 bp, synthetic construct
  source 1..80: mol_type = other DNA
atcgaccctgcatttgcgatgtacttttctatgacggggatggtgagggccgcggtgtcggccagcggtggcgtggcttc

SEQ ID NO: 169245 - DNA, 80 bp, synthetic construct
  source 1..80: mol_type = other DNA
gcgccgtgccatataaaacaaataattaatacctggcacaaggtagggaaaaatgtatatttgcctcctagggaaggaga

SEQ ID NO: 169246 - DNA, 80 bp, synthetic construct
  source 1..80: mol_type = other DNA
gccaaatacacaggagactctgcagtcacagcaaactacagacttgttattagatgcccttacacagaccccatgcttat

SEQ ID NO: 169247 - DNA, 80 bp, synthetic construct
  source 1..80: mol_type = other DNA
aacacaacaattggggtattgtgattcttccatttgtgccccttcaatatgaggacggagcttccacagcaatccccata

SEQ ID NO: 169248 - DNA, 80 bp, synthetic construct
  source 1..80: mol_type = other DNA
aaatgccacatttttaaaaagaggcttcaggattgatgataaatactgttttcttgtacacccaacattcccagaacagg

SEQ ID NO: 169249 - DNA, 80 bp, synthetic construct
  source 1..80: mol_type = other DNA
atgggcatggttcagaaacaattccacattgtaactgcacatcaggagtttactattcaagacattacaacaaattctat

SEQ ID NO: 169250 - DNA, 80 bp, synthetic construct
  source 1..80: mol_type = other DNA
tgataatgagtgtcttgggggccgtgccaagacccgagacagtaatgtcaaatgtccgattgctcgcaaatgcaccagaa

SEQ ID NO: 169251 - DNA, 80 bp, synthetic construct
  source 1..80: mol_type = other DNA
acaccaagtatagatacctactgttgatacaaaaggccttgtttatgcactgcaaaaagggatgcaactgcaggggagaa

SEQ ID NO: 169252 - DNA, 80 bp, synthetic construct
  source 1..80: mol_type = other DNA
cagacactgtagatagcggtgctgcttattatggtgccgtatccataaatgattttgggttactggcggtgagagtggtg

SEQ ID NO: 169253 - DNA, 80 bp, synthetic construct
  source 1..80: mol_type = other DNA
aggagatggaggtggcgcagacgcagacgacttaaaccaagaagatatagacgagctcgtcgacctgctagacgcaccag

SEQ ID NO: 169254 - DNA, 80 bp, synthetic construct
  source 1..80: mol_type = other DNA
gtgccggtccaggttaaggtcgagcggtttcacacagaacatgttacggcgcacaccctccaggttttcttcaatgcgct

SEQ ID NO: 169255 - DNA, 80 bp, synthetic construct
  source 1..80: mol_type = other DNA
caccacgcctatgcccctacattaagtctagcaatgtcaactttgaaccaaccaatataactgaatcaaggacaagtgtt

SEQ ID NO: 169256 - DNA, 80 bp, synthetic construct
  source 1..80: mol_type = other DNA
gttggcatttctaatcatgtcagaagaggacacggggaggaagcaccggcaaatgtaaaagtgaagctggatgtcaatgg

SEQ ID NO: 169257 - DNA, 80 bp, synthetic construct
  source 1..80: mol_type = other DNA
agaaaacaaatggattattccagcagagtgtaagatagaaaaagagctgaatctggctaatacaattataacaatcattg

SEQ ID NO: 169258 - DNA, 80 bp, synthetic construct
  source 1..80: mol_type = other DNA
ccgttgtggccgctgaaacgtcggttttcaaacagcaggttaagtcccagacacatgaacgtgttcagattatctcccac

SEQ ID NO: 169259 - DNA, 80 bp, synthetic construct
  source 1..80: mol_type = other DNA
gcagtcctcatccaacccgtccattttctacacctatggttgcgcaccacctagaatgtctgtaccatttgttggaatcg

SEQ ID NO: 169260 - DNA, 80 bp, synthetic construct
  source 1..80: mol_type = other DNA
atacagaacatgccgtggaaagtgctatatccagggtagcagatactatcatgagtggtccgtcaaattcacaacaggtc

SEQ ID NO: 169261 - DNA, 80 bp, synthetic construct
  source 1..80: mol_type = other DNA
agggatagttgcagattggcagaattacactgaagggccaggagttaggtttccaaagacatttggctggctatggaaac

SEQ ID NO: 169262 - DNA, 80 bp, synthetic construct
  source 1..80: mol_type = other DNA
gtccccatttacaatgtacaagttcccagacaagctgctgacacccacggtggcctgatccttgctatacccttagacat

SEQ ID NO: 169263 - DNA, 80 bp, synthetic construct
  source 1..80: mol_type = other DNA
ccgcagctcatcaaagtatcgcacaagaagccctccatcgctttcttgcaactcatgacaccttcatcgagattggtccc

SEQ ID NO: 169264 - DNA, 80 bp, synthetic construct
  source 1..80: mol_type = other DNA
actctggaagggacctggtgatctattgtggaaaggggaaggagcagtcatcataaaggtagggacagaaatcaaagtaa

SEQ ID NO: 169265 - DNA, 80 bp, synthetic construct
  source 1..80: mol_type = other DNA
cgtacaaccgtatggtgcggtttatcattaactacgttggtaaatggcacatgcagacgctccacgttcttttggttgtg

SEQ ID NO: 169266 - DNA, 80 bp, synthetic construct
  source 1..80: mol_type = other DNA
ctacggaaagcaacattgcaagggccagagcatgagttcatacaagcactagtcagaagaaattgccacgtgctaacaac

SEQ ID NO: 169267 - DNA, 80 bp, synthetic construct
  source 1..80: mol_type = other DNA
ctaatgacttgcagccattgccaaccaaaaacttaaccacttatggatttggacaccaaaacaaagcagtatatgtggca

SEQ ID NO: 169268 - DNA, 80 bp, synthetic construct
  source 1..80: mol_type = other DNA
tgtaattatctgtggacagcacaaagcctcctttaactatgctatacatgcagacgactgcctaaaacagggactcagct

SEQ ID NO: 169269 - DNA, 80 bp, synthetic construct
  source 1..80: mol_type = other DNA
actcacacagtctcgcagagtcctcagtctctcacttcttcggacgagctggtctagttggtatgttgacactcttgact

SEQ ID NO: 169270 - DNA, 80 bp, synthetic construct
  source 1..80: mol_type = other DNA
caaaacagcgtggatggcgtctccaggcgatctgacggttcactaaacgagctctgcttatatagacctcccatcgtaca

SEQ ID NO: 169271 - DNA, 80 bp, synthetic construct
  source 1..80: mol_type = other DNA
ccggtcccgcagcgcaaaagccccccggtcccgcagcgcaaaagccccccggtctcgcagcgcaaaagccccccggtccc

SEQ ID NO: 169272 - DNA, 80 bp, synthetic construct
  source 1..80: mol_type = other DNA
tcgagtcagtggcccaaaatgctcttcaaatttcccaaccaaggccagcccaaagaccagcaatcactaatacagctgca

SEQ ID NO: 169273 - DNA, 80 bp, synthetic construct
  source 1..80: mol_type = other DNA
caatgccgggcgactgtggaggaattctacgatgcacccatggggtaatgggcttgattactgctggtggtgaaggtgtt

SEQ ID NO: 169274 - DNA, 80 bp, synthetic construct
  source 1..80: mol_type = other DNA
ggaatgaagtccagaattcaacaacacttactaaaggaggtgacaatgccactcagagtagagacacttggtataaagga

SEQ ID NO: 169275 - DNA, 80 bp, synthetic construct
  source 1..80: mol_type = other DNA
tccttactatgaaaacggatcttctaaagccaacaccaacatatttgactactacacaggcatgtacagtagtattttcc

SEQ ID NO: 169276 - DNA, 80 bp, synthetic construct
  source 1..80: mol_type = other DNA
cgcagaagctcctccttgttgaaaaatgcccggcaggggctgtagaggcccgggacggccgtctggcgataggaggagtt

SEQ ID NO: 169277 - DNA, 80 bp, synthetic construct
  source 1..80: mol_type = other DNA
acatgtgactgcacagatgcaacttattactgtagacataaaaacaggtactacccaataaaagtgactagccatgattg

SEQ ID NO: 169278 - DNA, 80 bp, synthetic construct
  source 1..80: mol_type = other DNA
aggagcatgtcttatctttgtgttacctaatgtggcacaatggtaagcaggcttatgaagactttgtgtctaaaatccgc

SEQ ID NO: 169279 - DNA, 80 bp, synthetic construct
  source 1..80: mol_type = other DNA
atttgtcaacaaatatagaagcagatggacctgttaaggacccagtttataatatgaatggtacactactgggtaattta

SEQ ID NO: 169280 - DNA, 80 bp, synthetic construct
  source 1..80: mol_type = other DNA
ctagaagagctgtacgccgccctcgaaggagacgagtaaggaggcgccgcggcagggggtggtacagagggcgacggtac

SEQ ID NO: 169281 - DNA, 80 bp, synthetic construct
  source 1..80: mol_type = other DNA
agctcatgcatacaaggaaacaactgctcagggctagggtacgaggagacggtcagttgtcagttcaatatgacaggatt

SEQ ID NO: 169282 - DNA, 80 bp, synthetic construct
  source 1..80: mol_type = other DNA
aaacacaccctggtgaggcaggccacaccattatggcatctaaacagtggggtgagcataatcctgatgaaaacccattc

SEQ ID NO: 169283 - DNA, 80 bp, synthetic construct
  source 1..80: mol_type = other DNA
catattcacagtgagccacactaaagttgataatatctttggtagggcttggtacctagattcccatgatttcagcaatg

SEQ ID NO: 169284 - DNA, 80 bp, synthetic construct
  source 1..80: mol_type = other DNA
catacagaggagagggagtggacctgaggagtggagccattactccgctaactccagtacaaaatatcaccacatacgga

SEQ ID NO: 169285 - DNA, 80 bp, synthetic construct
  source 1..80: mol_type = other DNA
tgaaccagccgggttccgcagcctccattctctccgccgcaccaccatcgtccacgagcagggattgcagtctctccctc

SEQ ID NO: 169286 - DNA, 80 bp, synthetic construct
  source 1..80: mol_type = other DNA
accaaggttaagtatagtcaaacccacccaggggaacgaggccacaccattgaagaaacaaccattcggaatcgtttcaa

SEQ ID NO: 169287 - DNA, 80 bp, synthetic construct
  source 1..80: mol_type = other DNA
agtacccacactgggacacactctacgggggcctagcttatggcaatgcacctaaatcaacagcaagcagttctgaaaaa

SEQ ID NO: 169288 - DNA, 80 bp, synthetic construct
  source 1..80: mol_type = other DNA
taattgttgcgccctacctgttttggctggcggctattgccgcctcgtgtttcacggcctcagttagtaccgttgtcagc

SEQ ID NO: 169289 - DNA, 80 bp, synthetic construct
  source 1..80: mol_type = other DNA
taaacccaaacaggacttttaagtcaccctctgacaaatttgacccctctctagtaagttggctaggcgcaaacggaagc

SEQ ID NO: 169290 - DNA, 80 bp, synthetic construct
  source 1..80: mol_type = other DNA
cccacagatattcagacacggttccgtaaagtgcttctttttttagtgcaggaattggaaaaaataataaaaaatatgaa

SEQ ID NO: 169291 - DNA, 80 bp, synthetic construct
  source 1..80: mol_type = other DNA
tgaatgcaaacccgggagaggcaggcggcaggtttactgaccagtataatcccagcgcagaagccactgagggaagaaaa

SEQ ID NO: 169292 - DNA, 80 bp, synthetic construct
  source 1..80: mol_type = other DNA
agccttcttgatggcacgtcgtgctaggtcactttcggcagaaagatatactttgttctttgatttagtatcctctggaa

SEQ ID NO: 169293 - DNA, 80 bp, synthetic construct
  source 1..80: mol_type = other DNA
aatagatgtgcacaccacaccaccgcctgaatgtattaatgacttgctcaagtcagttgactctgaagaactcagggaat

SEQ ID NO: 169294 - DNA, 80 bp, synthetic construct
  source 1..80: mol_type = other DNA
aagggtattgcagatatggcgacggcagctgttaatggaattgattctactctaactcaaactaatgagacatcagttaa

SEQ ID NO: 169295 - DNA, 80 bp, synthetic construct
  source 1..80: mol_type = other DNA
ttggcttcactgaccaaatttcaacaaaagtcacagaattacaagaagtggccaaggacttcctcaccacaaaagttttg

SEQ ID NO: 169296 - DNA, 80 bp, synthetic construct
  source 1..80: mol_type = other DNA
tcccagcatacatccaggcatgctagttctcaacaagagacacatattcattcctagcttacagagcagacccagcaaaa

SEQ ID NO: 169297 - DNA, 80 bp, synthetic construct
  source 1..80: mol_type = other DNA
ccagagatggcctggggatggtggaagcgaaggaggcgccgctggtggagaggcgtattcaggagacgccgccttgccag

SEQ ID NO: 169298 - DNA, 80 bp, synthetic construct
  source 1..80: mol_type = other DNA
aattcgagcgaaagatacgcagtgtcagcgcaggccgcgcactgtatatcccgccttatgagctgttactgcatgagtgg

SEQ ID NO: 169299 - DNA, 80 bp, synthetic construct
  source 1..80: mol_type = other DNA
ctcatttagagggaaagatcatcatagtagcagtccacgtggccagtggctacatagaagcagaagtaatcccacaagag

SEQ ID NO: 169300 - DNA, 80 bp, synthetic construct
  source 1..80: mol_type = other DNA
aaaatatgttgacagtgttctgaatgaggtgttagttgttcccaatattaatgaaagtcaccctagtacttcaaattcag

SEQ ID NO: 169301 - DNA, 80 bp, synthetic construct
  source 1..80: mol_type = other DNA
agccacactaccaacaacaccctcagacaatgtggaaaccagaacaaccttgatgcactatagaggatcagagacaactt

SEQ ID NO: 169302 - DNA, 80 bp, synthetic construct
  source 1..80: mol_type = other DNA
ctgccaagggcctggaatggattagcttgaaaataggaaaattcattgattggctaaaagagaaattaattcccacagtg

SEQ ID NO: 169303 - DNA, 80 bp, synthetic construct
  source 1..80: mol_type = other DNA
tggaacagtaactacgccctacatagcgaggactacacagaagagggccgctaccctcacggagggtccctctcgaccac

SEQ ID NO: 169304 - DNA, 80 bp, synthetic construct
  source 1..80: mol_type = other DNA
cagcagcagctcagagtccaactgcgagaacaacagcgactccgagtccacttgcagcacctcttcctccaactccaaaa

SEQ ID NO: 169305 - DNA, 80 bp, synthetic construct
  source 1..80: mol_type = other DNA
atgaaaccatgatccatgctggaactggagctgtggtaaagtactttaatgtcaactattataaggatgcagcaagctcc

SEQ ID NO: 169306 - DNA, 80 bp, synthetic construct
  source 1..80: mol_type = other DNA
tggtaacatactactcagtggcaaccagacagctagaatgctcaagtacaactatccaacaaaatctgggtactgtgggg

SEQ ID NO: 169307 - DNA, 80 bp, synthetic construct
  source 1..80: mol_type = other DNA
gaggggttttaagcaggatgagaaatacaacttcctcgtccatcccatttatccagaaacagaagtttgggaatccataa

SEQ ID NO: 169308 - DNA, 80 bp, synthetic construct
  source 1..80: mol_type = other DNA
cttaccacctatggttttggacaccaaaacaaagcagtttacgtggcgggatacaaaataataaactaccacttagctac

SEQ ID NO: 169309 - DNA, 80 bp, synthetic construct
  source 1..80: mol_type = other DNA
acaggcgctacctctaacgcaactgatgagagcatgatcgaaacacgctgcgttgtcaataagcatggagtgagtgagac

SEQ ID NO: 169310 - DNA, 80 bp, synthetic construct
  source 1..80: mol_type = other DNA
aaagatggggcaagatgctagattcttttgcccaactgggtccgtagttacattccaaaactcatggtggtcacaaatgg

SEQ ID NO: 169311 - DNA, 80 bp, synthetic construct
  source 1..80: mol_type = other DNA
ctgcctgtgtttatattgtggaatacaaaacgagagacgacactccagataagatgtatgatagttgggttataaacacc

SEQ ID NO: 169312 - DNA, 80 bp, synthetic construct
  source 1..80: mol_type = other DNA
ggacaattgccgcggcaacgatgataattatctgcatcctaacatacgtcaatgtttcaccaaacagaagacgcagacta

SEQ ID NO: 169313 - DNA, 80 bp, synthetic construct
  source 1..80: mol_type = other DNA
aggttttacaccctggaatcggtcacgtgggaaagagattcacccgggtggtggtggaaattcccggacgccctaaaaga

SEQ ID NO: 169314 - DNA, 80 bp, synthetic construct
  source 1..80: mol_type = other DNA
ctaaattcactgaaccagttaaggatgtgatgattaaaacagcacctgccctcaattcaccaaatatagaggcatgtggc

SEQ ID NO: 169315 - DNA, 80 bp, synthetic construct
  source 1..80: mol_type = other DNA
gtgatattgagcttacatttgtcatcactagtgcacaggacccatcgactgccacaaatctggatgtaccagtgctgacc

SEQ ID NO: 169316 - DNA, 80 bp, synthetic construct
  source 1..80: mol_type = other DNA
aatatagacatgaaaggaaaaacatataattggaaaaattacaaacaacactataacaaaacacaaaataaatggctagc

SEQ ID NO: 169317 - DNA, 80 bp, synthetic construct
  source 1..80: mol_type = other DNA
ggcactgtgccgcgacacggtgtccatctcgcgccacagcgcgttcctgtcggacggcagctcccgtgccggctcctgta

SEQ ID NO: 169318 - DNA, 80 bp, synthetic construct
  source 1..80: mol_type = other DNA
actggagagaaattggtaccaaggtgttattcactctcatgctgcttgctgtggctgtggtaaccctggggctcacttcg

SEQ ID NO: 169319 - DNA, 80 bp, synthetic construct
  source 1..80: mol_type = other DNA
gttcacagatctcagaccatatcgagatctaaaccaccaccagggacccatttcaaattatctgacacagttaggcaatg

SEQ ID NO: 169320 - DNA, 80 bp, synthetic construct
  source 1..80: mol_type = other DNA
ctggcgccgatgtaccggctagcagaaagcaggcaatgctgggaacccatatcatctgggacttagggctgcaatccagt

SEQ ID NO: 169321 - DNA, 80 bp, synthetic construct
  source 1..80: mol_type = other DNA
acataccatactcatatgaatttggtgcaggccaaatgccagatggcagtaactacgtacccataaagtggagaggtaaa

SEQ ID NO: 169322 - DNA, 80 bp, synthetic construct
  source 1..80: mol_type = other DNA
acggcagctgacctgcaatttccgttcggctcaccactaacgaactccatctgttgcaacttccagattttagacagtaa

SEQ ID NO: 169323 - DNA, 80 bp, synthetic construct
  source 1..80: mol_type = other DNA
ctggtctcaagaagacacccctgggaaacggagtcagagacagagtcacaaagcgaaaaagaagccccccaggaaacgag

SEQ ID NO: 169324 - DNA, 80 bp, synthetic construct
  source 1..80: mol_type = other DNA
gaggacgcggcttcggacaaggagaacctgcgtcggcccgtagtgccgtccacgtcgtctcgcggcagcgccgccagcgg

SEQ ID NO: 169325 - DNA, 80 bp, synthetic construct
  source 1..80: mol_type = other DNA
agacctgcttcatccagtaactcttcacaaacttataatcccagtggcacattagaagccataacctggggacaatcaga

SEQ ID NO: 169326 - DNA, 80 bp, synthetic construct
  source 1..80: mol_type = other DNA
ctcaagacccaaatgttgaagacattggtaccaaaaatgagggaaagtacacaatgaatcctaatgctaaagagtatatc

SEQ ID NO: 169327 - DNA, 80 bp, synthetic construct
  source 1..80: mol_type = other DNA
agggcttttcagcacaattaaggaagcagtactttatagagaaacaagggcaaataatttccagacaaaaagttagggat

SEQ ID NO: 169328 - DNA, 80 bp, synthetic construct
  source 1..80: mol_type = other DNA
tgccccagaggaagaggaggatggtgctgaggaacccaccgcctctggaggcaagagcacccaccctatggtgactagaa

SEQ ID NO: 169329 - DNA, 80 bp, synthetic construct
  source 1..80: mol_type = other DNA
aagccttaaaagaggccttacaacctatgcctataccctttgcagcagtccaacagagaggcggcccaaggaggccagtc

SEQ ID NO: 169330 - DNA, 80 bp, synthetic construct
  source 1..80: mol_type = other DNA
ggggataacttcgcgcaatgggtgatcaatacacgccaagtggctcagttacggcgaaagcttgagatgtttacgtatgc

SEQ ID NO: 169331 - DNA, 80 bp, synthetic construct
  source 1..80: mol_type = other DNA
catcaatgccccgttaaccgaaatttaataacgttatggactggagatttacggttaagtggacgttactgatgattacg

SEQ ID NO: 169332 - DNA, 80 bp, synthetic construct
  source 1..80: mol_type = other DNA
ctacatgcctcataagggagatctcaaggtgttcattaaacccagaactaatccaaaagaaattaccacagctggaccta

SEQ ID NO: 169333 - DNA, 80 bp, synthetic construct
  source 1..80: mol_type = other DNA
gaaacctggctatatggccagtgcacacactatcaaacatttgccactgagagtagattaagaccacccacaggcccaag

SEQ ID NO: 169334 - DNA, 80 bp, synthetic construct
  source 1..80: mol_type = other DNA
aataatcaagctcaatgcaatgacacctggtactatggaaaaacttatacatctgaaataactgaagcagcccgtaaaat

SEQ ID NO: 169335 - DNA, 80 bp, synthetic construct
  source 1..80: mol_type = other DNA
gtccacaattaccactccaggtctgaatctagcattgaaaacttccttagtaggtcagcatgtgtctacatgggagaata

SEQ ID NO: 169336 - DNA, 80 bp, synthetic construct
  source 1..80: mol_type = other DNA
gcggggccggggggtgtgcgtcgacggccacggggacctttcgcgacagggacggtcgtgggggcggcgcgttgaagggc

SEQ ID NO: 169337 - DNA, 80 bp, synthetic construct
  source 1..80: mol_type = other DNA
tcacccacaactaaaaaagcctaactcctctagtaaccccagcagcacagtagaaacagacaaatactttgccaagctag

SEQ ID NO: 169338 - DNA, 80 bp, synthetic construct
  source 1..80: mol_type = other DNA
agaagcgcaagtcccgacggagcagcagcagcagcagcacctcctcagactccaactccaagagcagcagcagctcggag

SEQ ID NO: 169339 - DNA, 80 bp, synthetic construct
  source 1..80: mol_type = other DNA
aagccgagacagagtactacagggtgttgaagggtaacgtgagggagatcatgtcatgtgcgggctgaagaccgtgcggg

SEQ ID NO: 169340 - DNA, 80 bp, synthetic construct
  source 1..80: mol_type = other DNA
taggttgggagatgatgctaggtttttctgtccggcaggttcactggtagagttccagaattcatggggatcgcaaatgg

SEQ ID NO: 169341 - DNA, 80 bp, synthetic construct
  source 1..80: mol_type = other DNA
taccaaggacaggtgaaatcacaacccacatcagattcagaaacactgttagagatctagcataccccacagaaatgaca

SEQ ID NO: 169342 - DNA, 80 bp, synthetic construct
  source 1..80: mol_type = other DNA
gcgcagcacctccaaaaacaaggaaagatgctatgctaggtactcatttgatctgggacataggcctgcagtctagcgca

SEQ ID NO: 169343 - DNA, 80 bp, synthetic construct
  source 1..80: mol_type = other DNA
gtaagttggagatgttcacgtatgtgcgcttcgacatggaagtgacttttgttataactagcagacaagaccccaccacg

SEQ ID NO: 169344 - DNA, 80 bp, synthetic construct
  source 1..80: mol_type = other DNA
gttttatggctacgtagactttatagagagtgaactgggcatctcagcagaaattcacaactttggcatagtgtgtgttc

SEQ ID NO: 169345 - DNA, 80 bp, synthetic construct
  source 1..80: mol_type = other DNA
tggtaagctatggggagtggcctagttatctggcagacgaccaggccactgcagaggatcagcccacccagccagacgtt

SEQ ID NO: 169346 - DNA, 80 bp, synthetic construct
  source 1..80: mol_type = other DNA
tcagattgctaggtgctcatgtgtggctggcgtgtattactgttcttcacgtcttaaatattatccagttaccataacca

SEQ ID NO: 169347 - DNA, 80 bp, synthetic construct
  source 1..80: mol_type = other DNA
ctttaaccctactgatctaactgacaaaagggagagcataacctacgtgcccgacaccatccgcccggatgtgcgtacaa

SEQ ID NO: 169348 - DNA, 80 bp, synthetic construct
  source 1..80: mol_type = other DNA
atgagccgctgcacgtccccgctcaacatacgtatacacgccgtgtactcgtgacgtatactggcgcgcagcagccgaat

SEQ ID NO: 169349 - DNA, 80 bp, synthetic construct
  source 1..80: mol_type = other DNA
ccggaggccctccgcagcacgccccgcccaaccctcctccggagggtgaccaccagccgccacggcgtggtggtgtggcc

SEQ ID NO: 169350 - DNA, 80 bp, synthetic construct
  source 1..80: mol_type = other DNA
caggtgaacaagggcacactttgcaggcgtctgacgatcgctcagacaacaaaccagacgaagatcctttttatttatgt

SEQ ID NO: 169351 - DNA, 80 bp, synthetic construct
  source 1..80: mol_type = other DNA
aagcgtctccactatacacaaaatggcggcggagcacttccggcttgcccaagatggcggcaaaaaacatccgggtcaaa

SEQ ID NO: 169352 - DNA, 80 bp, synthetic construct
  source 1..80: mol_type = other DNA
agaccgggaatgagagaagagaaaacagggagaacgaaggaggggagacgaggacgacagacaccaccgcggtcaaaagg

SEQ ID NO: 169353 - DNA, 80 bp, synthetic construct
  source 1..80: mol_type = other DNA
atccaaaaccaaatttaacaaaaggaaatacctgactgcttcaacaaagtacaaatggacacgcaacaaaattgacattg

SEQ ID NO: 169354 - DNA, 80 bp, synthetic construct
  source 1..80: mol_type = other DNA
ccgaatacgtgatggcaaccaacaccgaggcgaagacgtcctacgtctcctacgtcaacgccaacccaggagagacaggt

SEQ ID NO: 169355 - DNA, 80 bp, synthetic construct
  source 1..80: mol_type = other DNA
ttgcggaggtggattcagtggtcccggtcaataatgtggatgagaacgtgaacagcctggaggcctacagaataccggtg

SEQ ID NO: 169356 - DNA, 80 bp, synthetic construct
  source 1..80: mol_type = other DNA
aaccatcctaacatgtgggtaaaggtacaaaacacaactgctctatcacctaacggctcaaatgcacttctaagcaaaga

SEQ ID NO: 169357 - DNA, 80 bp, synthetic construct
  source 1..80: mol_type = other DNA
tgggtgtggcaattccattcaattttcttaagaatgacatgtcagatcaaggcattgttacagaaataacacctatccaa

SEQ ID NO: 169358 - DNA, 80 bp, synthetic construct
  source 1..80: mol_type = other DNA
gggcataactgattatgttcacatgcttggtgaggcctttggtttaggctttgtagacagtgttaaggaccaaataaatg

SEQ ID NO: 169359 - DNA, 80 bp, synthetic construct
  source 1..80: mol_type = other DNA
ccaacccaaaacaactaaaccagaacttaggagagctgtagcacaaggcccagatcatgaatttggcatggcattactaa

SEQ ID NO: 169360 - DNA, 80 bp, synthetic construct
  source 1..80: mol_type = other DNA
gaaacattttgaccccagcttgctaactgcacttggtaactatatctatgataggtatggagacacccttgaaggagcag

SEQ ID NO: 169361 - DNA, 80 bp, synthetic construct
  source 1..80: mol_type = other DNA
tcacagtaacagccacattagcattactagggtgtgatggttctccttggagattcttaaaaatgtacatcagtaagcat

SEQ ID NO: 169362 - DNA, 80 bp, synthetic construct
  source 1..80: mol_type = other DNA
catactaaacacatttagaacagagggatgcatgtcacaccctcaactacaaaaatttaaaccttcacacacagcactac

SEQ ID NO: 169363 - DNA, 80 bp, synthetic construct
  source 1..80: mol_type = other DNA
ggaagtggacttcgagcaagctctattttcaaagtacgtggggaacacgttacacgaacctgatgagttcgttagagagg

SEQ ID NO: 169364 - DNA, 80 bp, synthetic construct
  source 1..80: mol_type = other DNA
cacaatcaactcaagctactagcggtgttaatagccaggaggttcctgctcttaccgctgttgaaacaggtgcatcgggg

SEQ ID NO: 169365 - DNA, 80 bp, synthetic construct
  source 1..80: mol_type = other DNA
ctaaacagggacagatcacctccagacaaaaattgaaagatttaaatctgagcccagtaaatactcccacaaaaacaaag

SEQ ID NO: 169366 - DNA, 80 bp, synthetic construct
  source 1..80: mol_type = other DNA
atacgcgacgcagacgcaggtggcgacgcaaaagacttgtactgactcagtggcagcccgcagtgcgcagaaggtgtaaa

SEQ ID NO: 169367 - DNA, 80 bp, synthetic construct
  source 1..80: mol_type = other DNA
attagagttgtgaatgaattcaatcccgctcgcattacagcaaaggtgcgagtatacatgaaaccaaaacacatacgatg

SEQ ID NO: 169368 - DNA, 80 bp, synthetic construct
  source 1..80: mol_type = other DNA
ctcaattttgtgtatccttcaaactcggcttcaaataaattttctaggccgtggaactttcacttgtcggtgtctacctc

SEQ ID NO: 169369 - DNA, 80 bp, synthetic construct
  source 1..80: mol_type = other DNA
agaatttggcttttacagcccatactacttaacaccatccaaaagagacatagactggcacacaccatacacatacacaa

SEQ ID NO: 169370 - DNA, 80 bp, synthetic construct
  source 1..80: mol_type = other DNA
gtttaccaattttttatgctgataatgtcatcttgtaccttgacaaagaaatttattcagagtacttgcaaagtgtcttg

SEQ ID NO: 169371 - DNA, 80 bp, synthetic construct
  source 1..80: mol_type = other DNA
cctagactagaagtcaatctacatgactccctattctcaaaatacaaaggaaatgttgaaaccaatatcacagagaacat

SEQ ID NO: 169372 - DNA, 80 bp, synthetic construct
  source 1..80: mol_type = other DNA
tgtgtacacataacagagattgaaaacaaagtgcctgaaaatcccacaccagaaggaagaaacacccacaaagaacaaaa

SEQ ID NO: 169373 - DNA, 80 bp, synthetic construct
  source 1..80: mol_type = other DNA
aaaaatttgccgattgtgcaacactgttggcatctctcactccgataggcggctataagatagagaattaaaagtatgat

SEQ ID NO: 169374 - DNA, 80 bp, synthetic construct
  source 1..80: mol_type = other DNA
gtaaaagagagcccctgagggctccaaaagccggagccgggcggcgtcaaaggccaggacgggcacagccgcgacgggtg

SEQ ID NO: 169375 - DNA, 80 bp, synthetic construct
  source 1..80: mol_type = other DNA
ggctccgcgcacacgccgggtggtccccggccgaggcccccgacagtgagctctggtcccagtacttcctaccgacaccc

SEQ ID NO: 169376 - DNA, 80 bp, synthetic construct
  source 1..80: mol_type = other DNA
tcagataacccatgtggaattaccaaaagtcttttgggacaaaaccagtaagccggcctatggccaatcaaggtattttg

SEQ ID NO: 169377 - DNA, 80 bp, synthetic construct
  source 1..80: mol_type = other DNA
gacctcggttttaggccttccggactacaaaaatggcggattccgtgacgtcatggccgccattttgagtaaggcggaac

SEQ ID NO: 169378 - DNA, 80 bp, synthetic construct
  source 1..80: mol_type = other DNA
accgttactaatatattatgtatttattatcataatgagtacagagtaaaatccaatgaagacattttatacatcaagtg

SEQ ID NO: 169379 - DNA, 80 bp, synthetic construct
  source 1..80: mol_type = other DNA
tacgaactcttgtgccacgagtggtatgataagttctaatcagatatagaaattataagtgagtagtttatagtttttat

SEQ ID NO: 169380 - DNA, 80 bp, synthetic construct
  source 1..80: mol_type = other DNA
agaaaagagatttgataaacaagcaaacaaaagatattactaaattaaagatggcaatggacaaatatggtgttgatctg

SEQ ID NO: 169381 - DNA, 80 bp, synthetic construct
  source 1..80: mol_type = other DNA
cagtaatgtctgaatacagagtagttatcagaagcccatacacataccctctactaataaaagctagcgaccctctatgg

SEQ ID NO: 169382 - DNA, 80 bp, synthetic construct
  source 1..80: mol_type = other DNA
tctggcccatattggtaagcccgaagaactggatacttcggcacgtaatgccggggctctaacccgccgccgcgaaattc

SEQ ID NO: 169383 - DNA, 80 bp, synthetic construct
  source 1..80: mol_type = other DNA
agcttttactccacttagcacgaacacagttactttgattagaattgtgctattgatcagattgacacatcactatgggt

SEQ ID NO: 169384 - DNA, 80 bp, synthetic construct
  source 1..80: mol_type = other DNA
gcacactgattgttgcaatgatacctgagcaccaaattgccagtttacaacatggcaatgtaaacgttggatataagttc

SEQ ID NO: 169385 - DNA, 80 bp, synthetic construct
  source 1..80: mol_type = other DNA
aaaattcccccgatccctttgccgccaggacataaaaacatgccgtggagaccgccggtgcatagtgtccaggggcgaga

SEQ ID NO: 169386 - DNA, 80 bp, synthetic construct
  source 1..80: mol_type = other DNA
gacaaatggtacttccaaaaagacttctgcaaagttcccttactcaacctaggcgttagtttagggaacttgcggtttcc

SEQ ID NO: 169387 - DNA, 80 bp, synthetic construct
  source 1..80: mol_type = other DNA
tgaagtactcaactacttcaccaattggtctggtagtgtaaccctaacatttatgtgtgtctgtgactcgttctccaccg

SEQ ID NO: 169388 - DNA, 80 bp, synthetic construct
  source 1..80: mol_type = other DNA
agaagaaagttagaattattcacataccttagatttgatgctgagatcactatactcacaactgtagcagtgaatggtag

SEQ ID NO: 169389 - DNA, 80 bp, synthetic construct
  source 1..80: mol_type = other DNA
ctggcaagttcacacaacctgtattggatgcattacgtgaagctgtgccacctctacagtcgcctagtgccgaggcatgt

SEQ ID NO: 169390 - DNA, 80 bp, synthetic construct
  source 1..80: mol_type = other DNA
aaagaatttctatatcattacccatctaacatcacaacagacctaatagataactatagcctaacacatgactggggcct

SEQ ID NO: 169391 - DNA, 80 bp, synthetic construct
  source 1..80: mol_type = other DNA
gattaccaatctccaagtgcgttgccttggtttcatcccacaaaagagatatttataccaggtcaagtccataatctatc

SEQ ID NO: 169392 - DNA, 80 bp, synthetic construct
  source 1..80: mol_type = other DNA
agtgtatcagtgatttactcaaatcagttgactctgaagaactcagagagtattgcaaacagaaaaactggctcattcca

SEQ ID NO: 169393 - DNA, 80 bp, synthetic construct
  source 1..80: mol_type = other DNA
taactgcaggaggcgaaaatcatgttgcatttatagatttaagggattttctagttgctgaagaacaaggtgttttagat

SEQ ID NO: 169394 - DNA, 80 bp, synthetic construct
  source 1..80: mol_type = other DNA
ggagctgctgaacctgctggtcaagctctcggagaacaagaccatcagcggggtcacggacgtggtggaggagttcataa

SEQ ID NO: 169395 - DNA, 80 bp, synthetic construct
  source 1..80: mol_type = other DNA
agggcaagaaagcgccttcgctttccaggaagaaagagaggggtcctcgtcagaagagagcgatcaagaagccccgcaga

SEQ ID NO: 169396 - DNA, 80 bp, synthetic construct
  source 1..80: mol_type = other DNA
attgccaaacacgagcagctcagagccagtacactcccaggaagtgcccgccctcactgcagtggaaactggtgccacga

SEQ ID NO: 169397 - DNA, 80 bp, synthetic construct
  source 1..80: mol_type = other DNA
gaaaacattccactgtggagcgccctgttcgggtacggagaatacgtagagagtcagctaggccccttccaggaccacga

SEQ ID NO: 169398 - DNA, 80 bp, synthetic construct
  source 1..80: mol_type = other DNA
atagtagaggcaatgaaaaggaatgcacaaaacatgtatgacaaccacaagcggaccagctttcaagaatcccagtactt

SEQ ID NO: 169399 - DNA, 80 bp, synthetic construct
  source 1..80: mol_type = other DNA
acacccacccaggtgaggcaggacaccgcatcggtgcaagaacagaccgtggagatcacaacccagatgaaaacccattt

SEQ ID NO: 169400 - DNA, 80 bp, synthetic construct
  source 1..80: mol_type = other DNA
tacccctgggcgcccatacccaaacagcctttttctgtatctttcaaacttggctacaaataaaaattcaaggccgtggg

SEQ ID NO: 169401 - DNA, 80 bp, synthetic construct
  source 1..80: mol_type = other DNA
aaattaaaaagcgctagaaagaaatactggcagacattaataaaaaacaatgacttacacagcacttatggcaaggccca

SEQ ID NO: 169402 - DNA, 80 bp, synthetic construct
  source 1..80: mol_type = other DNA
caacacaaaccaagcaaaagatctacaatcacaaatgatagaagcaaaccaattttatacaaaggcaggcaaacaaatta

SEQ ID NO: 169403 - DNA, 80 bp, synthetic construct
  source 1..80: mol_type = other DNA
ccagtgggggctgttacagagcaggggatgttgaacctaggaggtaaacccaccaatcgaaccctgatgtacaattttcc

SEQ ID NO: 169404 - DNA, 80 bp, synthetic construct
  source 1..80: mol_type = other DNA
gtgcagggccgcattcttggaccggacggccacgttgtggacaaagggaggcactgaggcggcgggagaggccccatact

SEQ ID NO: 169405 - DNA, 80 bp, synthetic construct
  source 1..80: mol_type = other DNA
ccttaaagatctacctctgtgggctatgtttacaggctatgcagactttgtagagtcagagctaggcctacaagaagaag

SEQ ID NO: 169406 - DNA, 80 bp, synthetic construct
  source 1..80: mol_type = other DNA
ggcaccgcctaaaacgcgaaaagatgctatgctggggactcacctaatttgggacttaggactgcaatctagtgcaacga

SEQ ID NO: 169407 - DNA, 80 bp, synthetic construct
  source 1..80: mol_type = other DNA
attcacgaaattcatcgagaatgcttaaagcatagtgttagtatgcattcttgatgctcgtggaggacgtggcggtagat

SEQ ID NO: 169408 - DNA, 80 bp, synthetic construct
  source 1..80: mol_type = other DNA
acgtggtggtaggttacggtacgtggccaaattaccttcaagacaatgaggctacagccgaagaccaaccaacgcagcca

SEQ ID NO: 169409 - DNA, 80 bp, synthetic construct
  source 1..80: mol_type = other DNA
cattaaacaatatgggcaagttgtacgcacgacacgtgaacaaagacacaccataccaaatgtctagcacgatccgtgtg

SEQ ID NO: 169410 - DNA, 80 bp, synthetic construct
  source 1..80: mol_type = other DNA
tccgccgccaccgtaccagcttcgtcacgccacgtcactagtgacggtacccacgttgctgttatatacgtcatccgaca

SEQ ID NO: 169411 - DNA, 80 bp, synthetic construct
  source 1..80: mol_type = other DNA
aagtccgtcactaaccacgtgacccgtctcgcccaaccagagtctatgtcgttcatttcctgggcgtggtgtacatcctg

SEQ ID NO: 169412 - DNA, 80 bp, synthetic construct
  source 1..80: mol_type = other DNA
ttccgaacggagcaggaacctcctccgcgaacggcggcggcagattcagtaacctggagcagcgggtagcgcgtttgttg

SEQ ID NO: 169413 - DNA, 80 bp, synthetic construct
  source 1..80: mol_type = other DNA
ttacacaaacaaaaacttagaactcaccagatatctaggggcgactataaccttttacagacatcccaccagagacttta

SEQ ID NO: 169414 - DNA, 80 bp, synthetic construct
  source 1..80: mol_type = other DNA
tggttcgaaagcagccaaaccgagagccagacaacccagacagaagaagaggaggaggactcgcaaaacacgcagctcca

SEQ ID NO: 169415 - DNA, 80 bp, synthetic construct
  source 1..80: mol_type = other DNA
tgtgtgaccattttgtccctcaccaactcatcaggaagcggagacgagaggaaacactacaccacatggaacatcacata

SEQ ID NO: 169416 - DNA, 80 bp, synthetic construct
  source 1..80: mol_type = other DNA
cccatgtactcaacccacctacgagcttcccggtggcggtaacctccctggcagaatacaagtcattaacccgaaactac

SEQ ID NO: 169417 - DNA, 80 bp, synthetic construct
  source 1..80: mol_type = other DNA
caaatacaagtttggctttaagtggggtggcaacactgtccattctcagatcatcagaaacccatgcaaggaagaccgac

SEQ ID NO: 169418 - DNA, 80 bp, synthetic construct
  source 1..80: mol_type = other DNA
tagtgcaccctacatttccagttcaggagatacatgaatcaatcagatggacaaagaaaccctcacaaatgcaggagcat

SEQ ID NO: 169419 - DNA, 80 bp, synthetic construct
  source 1..80: mol_type = other DNA
atttcaagtgaataatgaactatggcaaggtgtgaaagcctgtgtcaagtcaaagttcagggaaatttttggagtgaatg

SEQ ID NO: 169420 - DNA, 80 bp, synthetic construct
  source 1..80: mol_type = other DNA
tcagtaacaagcataattgcaaacatagactggataagcgacaatgaaactaatatcaccatgagtgcagaagtggcaga

SEQ ID NO: 169421 - DNA, 80 bp, synthetic construct
  source 1..80: mol_type = other DNA
ccgggttgtgtgtgtcgcgggcgcggctgggtgcgtgggtgtgtgccgggtgtgtcgcgggcgtgtgcccgcgagtcccc

SEQ ID NO: 169422 - DNA, 80 bp, synthetic construct
  source 1..80: mol_type = other DNA
gccggcgaaggtggttctggccgagacgcaggcgatggaggacccgccgtcgcagacgagtaccggcccgaagacctcga

SEQ ID NO: 169423 - DNA, 80 bp, synthetic construct
  source 1..80: mol_type = other DNA
tcaaccggcggggcttctgagggattggtgcagaacgagccggactcaagagatcaacagtcccgagggcagagaaggtg

SEQ ID NO: 169424 - DNA, 80 bp, synthetic construct
  source 1..80: mol_type = other DNA
gtacttgctggcaatgcatttgtttttccccaccagatcattaacttgaggaccaacaatagtgccactttagttctacc

SEQ ID NO: 169425 - DNA, 80 bp, synthetic construct
  source 1..80: mol_type = other DNA
gccttaatacaagcagaggtgacaaccggccagatgaggaccccttttttaattgcaacggaacattgttgggcaacttg

SEQ ID NO: 169426 - DNA, 80 bp, synthetic construct
  source 1..80: mol_type = other DNA
tgactaagggtgaggctataacgcaggtcctgttccggagcggcggtggatagagaggagcgggatccggagaggaccac

SEQ ID NO: 169427 - DNA, 80 bp, synthetic construct
  source 1..80: mol_type = other DNA
caaacagttcagatgataacaccagggacttagacaatgcaatttacactatttgtgatattggttcggacaatagcttc

SEQ ID NO: 169428 - DNA, 80 bp, synthetic construct
  source 1..80: mol_type = other DNA
tttgccatcaatgtagatatagcctcgcaccctttggcaaccacattattaggggaaattgcaagttattacacacactg

SEQ ID NO: 169429 - DNA, 80 bp, synthetic construct
  source 1..80: mol_type = other DNA
ttaaaaatgacaactgctcgggattaggactagaaaacacatttaactgttcctttgacatgacaggactaaggagagat

SEQ ID NO: 169430 - DNA, 80 bp, synthetic construct
  source 1..80: mol_type = other DNA
acctacaaccccaacacagacaaaggcaaaggaaacaaaatatggattcagagctgtacaaaagaatccactatcctaga

SEQ ID NO: 169431 - DNA, 80 bp, synthetic construct
  source 1..80: mol_type = other DNA
gatctaagtccactctacgcgagtgaaaataaaagagtgactaatatgctcaaagaaattaaagcaatgacagcttacaa

SEQ ID NO: 169432 - DNA, 80 bp, synthetic construct
  source 1..80: mol_type = other DNA
ttttgggacaggatttactaatcaaattggagaaaaagttgctgaactaactagtatggttactaacacaattactgaga

SEQ ID NO: 169433 - DNA, 80 bp, synthetic construct
  source 1..80: mol_type = other DNA
ctagtgcactgttctctttccaactcgacccgggtcgtagcaccgtgttgcagcgcacactattgggtgagattctaaat

SEQ ID NO: 169434 - DNA, 80 bp, synthetic construct
  source 1..80: mol_type = other DNA
cgcgcattcctggaaaaagtggagtgggcgtggccttcccccgcggccccccagcccccctgcacagagcggcgctacgg

SEQ ID NO: 169435 - DNA, 80 bp, synthetic construct
  source 1..80: mol_type = other DNA
tcatgatcagaaattcaagtgacactgcaacaattctagcaacattagcacttctagggtgtcatggatccccatgggct

SEQ ID NO: 169436 - DNA, 80 bp, synthetic construct
  source 1..80: mol_type = other DNA
tttggcaaaaggcgcagttttctagggaaatgttgagcgccgctgtgatgctgtgtgtggtatgcatgttgcgcgtcagt

SEQ ID NO: 169437 - DNA, 80 bp, synthetic construct
  source 1..80: mol_type = other DNA
gaggcgcagacggtggaggagggggagacgaaaaacaaggacttacagacgcaggagacgctttagacgcaggagacgaa

SEQ ID NO: 169438 - DNA, 80 bp, synthetic construct
  source 1..80: mol_type = other DNA
gcggggcgcgcgcttcgcgcgcgccccggggggcaaggagaatttatcttagaaaaagaaaaagacttaagaaacgtaaa

SEQ ID NO: 169439 - DNA, 80 bp, synthetic construct
  source 1..80: mol_type = other DNA
ccgacactaggaaagacattaatactgtaacctcactacaaagtggtcgtcgaggtgacatgtccgcgctcaacacccac

SEQ ID NO: 169440 - DNA, 80 bp, synthetic construct
  source 1..80: mol_type = other DNA
tgccgccggagactgcacttcacaggagagaaggtggggtccctggtcagaatcagaaaagacatcggagaacgagacag

SEQ ID NO: 169441 - DNA, 80 bp, synthetic construct
  source 1..80: mol_type = other DNA
cctcttttccccggggattcaaagacacgcaacatcaaagacacgcaggacaggcgcgcggctgcttttcgccgtgcgtg

SEQ ID NO: 169442 - DNA, 80 bp, synthetic construct
  source 1..80: mol_type = other DNA
gtctcagcatgcaatgacttcactgtcagattgttgagggacaccacacacatcactcaggatgcactttatcaaggaat

SEQ ID NO: 169443 - DNA, 80 bp, synthetic construct
  source 1..80: mol_type = other DNA
gtggtggtaaattattgtgtaagcatggagtcataggaataattactgctggtggagaaggtcatgtggctttcattgat

SEQ ID NO: 169444 - DNA, 80 bp, synthetic construct
  source 1..80: mol_type = other DNA
catggggcggtaatatggtgtcccaacagagcatcagaaacccctgcaagacggacggacacgactccgactccaataga

SEQ ID NO: 169445 - DNA, 80 bp, synthetic construct
  source 1..80: mol_type = other DNA
gttgagtaagagactgattgcatctatgaggtttcacagaaacatatgcttctccctcatggatataaaccctggtttaa

SEQ ID NO: 169446 - DNA, 80 bp, synthetic construct
  source 1..80: mol_type = other DNA
cctccccccctatttcgcaacttagaagcaacgcgcatcattgatcaacagcaggcatggcgctccagccatgtcttgat

SEQ ID NO: 169447 - DNA, 80 bp, synthetic construct
  source 1..80: mol_type = other DNA
tggatttgctccattgactcaacttacgcctgaactaatatccgtaagtttattgattagaaaaagctatcataatgggt

SEQ ID NO: 169448 - DNA, 80 bp, synthetic construct
  source 1..80: mol_type = other DNA
cccgcaagtgctcggaccggcgacgctcttccactcgtgggacatcagacgtggactcattaacacaaaagctattaaga

SEQ ID NO: 169449 - DNA, 80 bp, synthetic construct
  source 1..80: mol_type = other DNA
cgtatcccaacggcgtcagcggctcgcggcaacagatgagctttgacgccgcctgtctggcggcggtaatgatcccgtcc

SEQ ID NO: 169450 - DNA, 80 bp, synthetic construct
  source 1..80: mol_type = other DNA
agaacccattaccatgctaggcgcatactcggcctggggcgcgggctcgttcgtggccacgctgatagtcctgctggtgg

SEQ ID NO: 169451 - DNA, 80 bp, synthetic construct
  source 1..80: mol_type = other DNA
caaattaattgcgaaagatcctaaatcttacttgccaatttgcattttgacaaccttgattcgaaaattttaataatggg

SEQ ID NO: 169452 - DNA, 80 bp, synthetic construct
  source 1..80: mol_type = other DNA
ggcgccgcgatcgaagggtacgtcaacaagctgacgttgatattaaatacgtctggctgcttttctacgatggaagcgca

SEQ ID NO: 169453 - DNA, 80 bp, synthetic construct
  source 1..80: mol_type = other DNA
ctgtcgtttctgcatagaccgtctccgggacatcgcccgtcctttgaaataccgctatcaacgtctcgtcgccaccgtgt

SEQ ID NO: 169454 - DNA, 80 bp, synthetic construct
  source 1..80: mol_type = other DNA
agaaaaaagacataatcaacaagaataccagagatatatcaaaaattaaaagctgtttagacacctatggagtagactta

SEQ ID NO: 169455 - DNA, 80 bp, synthetic construct
  source 1..80: mol_type = other DNA
tgtagcgtatccggtttggaatcgttcggctccggctcaggggatagtgaggaattctcaggggacgatatgggacccaa

SEQ ID NO: 169456 - DNA, 80 bp, synthetic construct
  source 1..80: mol_type = other DNA
ttgccaactgcaaagaaaaaaccacctatgagtctctggaggcctccactgcacaatgtcccggggatcgaacacctctg

SEQ ID NO: 169457 - DNA, 80 bp, synthetic construct
  source 1..80: mol_type = other DNA
agaacctgctgttcttagtgacaatgattctaggcttgaagttaaactctcagactccttgttttcgaagtacaagggta

SEQ ID NO: 169458 - DNA, 80 bp, synthetic construct
  source 1..80: mol_type = other DNA
ataagtatgaccagttcgtggctaagatcaggagtgttagcgcaggtcgcgcactctacataccaccttatgaactctta

SEQ ID NO: 169459 - DNA, 80 bp, synthetic construct
  source 1..80: mol_type = other DNA
tcagtgatatgcaaaagcatcttaaacaactcacagcatatcagagaacccaccgtacagagcctgtgtgtgtcctaata

SEQ ID NO: 169460 - DNA, 80 bp, synthetic construct
  source 1..80: mol_type = other DNA
agactttagagagttaaacagagtaactcaagattttagtgaagtccagttaggtataccccacccagcaggactagctg

SEQ ID NO: 169461 - DNA, 80 bp, synthetic construct
  source 1..80: mol_type = other DNA
gacatttcaatcaggcctattgattataaatcacctatgaattgttcaaaacccaatgatcatccaactatggaaccggg

SEQ ID NO: 169462 - DNA, 80 bp, synthetic construct
  source 1..80: mol_type = other DNA
aacgccagccccgtaaaggagataaacaacgccagggtcatcacgtaggaacctactagtacgcggctttcagagcacat

SEQ ID NO: 169463 - DNA, 80 bp, synthetic construct
  source 1..80: mol_type = other DNA
cccgggtcaaagttgatatgctccaacagggcaaaaacaactgcgatcgttatccgcaaagcgctacgaaagcctagtag

SEQ ID NO: 169464 - DNA, 80 bp, synthetic construct
  source 1..80: mol_type = other DNA
cggatctgcaacatcaaaaacagacttaaaaacacaaatgttaaaaggcaataacttttacaccaaggcaggtaaaaaac

SEQ ID NO: 169465 - DNA, 80 bp, synthetic construct
  source 1..80: mol_type = other DNA
tccccttagatctggaaacaccggtagaaccaccttacatataacagttaccatcgcaccagacaaatctgagctttcag

SEQ ID NO: 169466 - DNA, 80 bp, synthetic construct
  source 1..80: mol_type = other DNA
cgacgagctctaccggagcagtcgcctggccatctacatcgaggacctcggtcgaaaatactgccccgcgagcgcgaccg

SEQ ID NO: 169467 - DNA, 80 bp, synthetic construct
  source 1..80: mol_type = other DNA
gtgcaaagatggacatctctggctcgaaagactcggagtagccgtccaggtcctgcagaaaattcagcgagatggtctcc

SEQ ID NO: 169468 - DNA, 80 bp, synthetic construct
  source 1..80: mol_type = other DNA
cctggtgcagcgtactatggagcaacctccattaatgattttggcatcttagcagtgagagtggtgaacgaacacaaccc

SEQ ID NO: 169469 - DNA, 80 bp, synthetic construct
  source 1..80: mol_type = other DNA
gtacagccagcacgagctctgcaaggtgccccttgtcagttggcggttaaccgcagctgacatgcggtttccgttctgct

SEQ ID NO: 169470 - DNA, 80 bp, synthetic construct
  source 1..80: mol_type = other DNA
atctttctggctttgggctctggaagcctggccggtgctcggcgtaaccagatttacacctcgggtctcgagcggagacg

SEQ ID NO: 169471 - DNA, 80 bp, synthetic construct
  source 1..80: mol_type = other DNA
ccttttggccccctcgaagagagacaggtaataaatctgtagctccccaaccagccctccttcatcgtaaaatcgaaggg

SEQ ID NO: 169472 - DNA, 80 bp, synthetic construct
  source 1..80: mol_type = other DNA
gggctagttgcctctttaaggtgaactagttaaaaaacgtctagtgggccaaacccaggggggatccctggtttccttta

SEQ ID NO: 169473 - DNA, 80 bp, synthetic construct
  source 1..80: mol_type = other DNA
accggactatacaacatctgcaggaacttactatccaggatcttccagaccctccaacccatcctccagaatctcagaga

SEQ ID NO: 169474 - DNA, 80 bp, synthetic construct
  source 1..80: mol_type = other DNA
cacccaagtgtgttttatgacgtgttccccggtgaaaaagaacctgctgtgcttagccaaaaggatcctagactagaaac

SEQ ID NO: 169475 - DNA, 80 bp, synthetic construct
  source 1..80: mol_type = other DNA
tctacaaagtggcatatgttttgaatgcaacgacacctccctgactatatacaacttaaccacagcaaacgctggaaaat

SEQ ID NO: 169476 - DNA, 80 bp, synthetic construct
  source 1..80: mol_type = other DNA
atacattaaacaaaatggggaccctctttgtgagacatgtgaacaaggaaactccaaagcctgtcacgagcacggtcagg

SEQ ID NO: 169477 - DNA, 80 bp, synthetic construct
  source 1..80: mol_type = other DNA
gagcatctccgatgtccttcagccgaggcttgtaaaagacctttaggacaagatacaaactgctacaaacatgttaattc

SEQ ID NO: 169478 - DNA, 80 bp, synthetic construct
  source 1..80: mol_type = other DNA
agacgggggtaccttagtgaacgcgctatcaaacgcttgtacgaaaaacctctcgactatgatgagtatcctaaaaaacc

SEQ ID NO: 169479 - DNA, 80 bp, synthetic construct
  source 1..80: mol_type = other DNA
aattattcaatgattggagaatcaatttatcaagtcttgtacaactcaggaaaaaacttgaacttttcacatatgtcagg

SEQ ID NO: 169480 - DNA, 80 bp, synthetic construct
  source 1..80: mol_type = other DNA
tgcagcagcagtaccaagagcagctcaagctcagacagggaatcaaagtcctcttcgagcagctcataaggacccaacaa

SEQ ID NO: 169481 - DNA, 80 bp, synthetic construct
  source 1..80: mol_type = other DNA
acgactggtatgagattcaagaatcggagtactacccaaaacacatacagtacaatttgctcatcgggaaagggcactgt

SEQ ID NO: 169482 - DNA, 80 bp, synthetic construct
  source 1..80: mol_type = other DNA
gatatctaggatgcactttttacttctttagacaccctgaagtagactttattataaaaataaacaccatgcccccattc

SEQ ID NO: 169483 - DNA, 80 bp, synthetic construct
  source 1..80: mol_type = other DNA
gatatgccggattttcaaaagcatgcgccagggcactgactatgtccctgtctcggagacggtggaactggagctagagt

SEQ ID NO: 169484 - DNA, 80 bp, synthetic construct
  source 1..80: mol_type = other DNA
tacagctcaaaacaactgctttctaaaagtaagcagtctctggggagaccacgtatatagcaaagagaaactaatagaag

SEQ ID NO: 169485 - DNA, 80 bp, synthetic construct
  source 1..80: mol_type = other DNA
agctttgcatggcaaacgtctaccaacccaggtttattctggactgaggggaatgcgcctgctcgtatgtccatcccatt

SEQ ID NO: 169486 - DNA, 80 bp, synthetic construct
  source 1..80: mol_type = other DNA
ttcaccgacaaatacaacccaagcgaagagacgtcagagggccgcaagtttgcagctgtcgactacttacttggttgtgg

SEQ ID NO: 169487 - DNA, 80 bp, synthetic construct
  source 1..80: mol_type = other DNA
cccacctcagacagctacgagtaccacgtaggcatgttcagccccatattcctcaccccgtacagatcagcaagcctaga

SEQ ID NO: 169488 - DNA, 80 bp, synthetic construct
  source 1..80: mol_type = other DNA
gaaatagcacatatgattcactactaaaaatagttaccatatataacacaacacaaacagcagctcaactaagtaaattt

SEQ ID NO: 169489 - DNA, 80 bp, synthetic construct
  source 1..80: mol_type = other DNA
cttgatccagctgaaatatccatgtcaggaatcaaatatggtttaactatcaccccagcagacaaatcagaacacttcaa

SEQ ID NO: 169490 - DNA, 80 bp, synthetic construct
  source 1..80: mol_type = other DNA
tgccaaacctgcatactccacagaaaataccatctgtaatgagctggtcacccgctactaaaaatgtacaggagagagag

SEQ ID NO: 169491 - DNA, 80 bp, synthetic construct
  source 1..80: mol_type = other DNA
gaatctcattaacaaatgacatgggaactttatgtttccgtgctttagatggaaccggagcgagtgacatcaaagtgttt

SEQ ID NO: 169492 - DNA, 80 bp, synthetic construct
  source 1..80: mol_type = other DNA
gtagctaacaaaaggccagataacacaaacgctaaggatctctttacaacgtggagaataacttacttgcagacatacca

SEQ ID NO: 169493 - DNA, 80 bp, synthetic construct
  source 1..80: mol_type = other DNA
ctcgggcctagtacccatatactaccaaaacagatggtatcctagaataaagttccagagtcaagtagtgcatgacttta

SEQ ID NO: 169494 - DNA, 80 bp, synthetic construct
  source 1..80: mol_type = other DNA
caaaatctgtaggatccccaggatactggaatgaagttagaataactataatctgtccatacacacaaccacctctgaca

SEQ ID NO: 169495 - DNA, 80 bp, synthetic construct
  source 1..80: mol_type = other DNA
gcctgtagactgtttgatcaagaaatcagcgtctaaatatagagtcaacaaattccaagtaaataatgagttatggcaag

SEQ ID NO: 169496 - DNA, 80 bp, synthetic construct
  source 1..80: mol_type = other DNA
tggtgacttctatgttcactgaaaaactattgaaaaatttaatcaagttggttagcagtctggttataattgttagaaac

SEQ ID NO: 169497 - DNA, 80 bp, synthetic construct
  source 1..80: mol_type = other DNA
gtcccaattttttctttcctttgccagcacctaagccaacagggacatctaggagtgtggccaatccgtttgaggatgaa

SEQ ID NO: 169498 - DNA, 80 bp, synthetic construct
  source 1..80: mol_type = other DNA
ctctctttctgagcccccctagacaggtactcaacttcttcggagccgcgcgctacgccttcggctgcgcgcggcacctc

SEQ ID NO: 169499 - DNA, 80 bp, synthetic construct
  source 1..80: mol_type = other DNA
cacattaaggtcgctgttgcgcactactcggcacaactagctacccttgatattggcccagcaagtatgtctttggaaga

SEQ ID NO: 169500 - DNA, 80 bp, synthetic construct
  source 1..80: mol_type = other DNA
tctttctaaccagtaggggcctccacctaggtgctttgttaatctttagtgggaactagtgggagtgctgtgcctagggt

SEQ ID NO: 169501 - DNA, 80 bp, synthetic construct
  source 1..80: mol_type = other DNA
gccgcttctaccacgaatgctcgcagaccatgctgcacgaatacgtcagaaagaacgtggagcgtctgttggccacgagc

SEQ ID NO: 169502 - DNA, 80 bp, synthetic construct
  source 1..80: mol_type = other DNA
atggactaggaacaaaatagatatagcagaaggtcccggttcaatgaatatggccaatgtgctcagcacaactgctgccc

SEQ ID NO: 169503 - DNA, 80 bp, synthetic construct
  source 1..80: mol_type = other DNA
ttgacagtactatacaacgactttctaagacacgccaactactggacgtatagcaacgagaacctagagctagccagata

SEQ ID NO: 169504 - DNA, 80 bp, synthetic construct
  source 1..80: mol_type = other DNA
agcactaacctagacaccttgtcaccacctacagtcacaatacccgaggccataaaacggcgattcttcctggatgccga

SEQ ID NO: 169505 - DNA, 80 bp, synthetic construct
  source 1..80: mol_type = other DNA
gcaataacatcaaaaacagttaagtgggtagtacgcataataagtgcactcaccattgtaattcgcaacagctctgacat

SEQ ID NO: 169506 - DNA, 80 bp, synthetic construct
  source 1..80: mol_type = other DNA
cctagaggggctggatttgaccacaagcgctgggttcccttatgttactaagggcatcaagaaaagggacatacttaaca

SEQ ID NO: 169507 - DNA, 80 bp, synthetic construct
  source 1..80: mol_type = other DNA
gactttggagtcctggcaataagagcggtgaaccgcagcagcccatccactatacacacgtccattagagtgtacatgaa

SEQ ID NO: 169508 - DNA, 80 bp, synthetic construct
  source 1..80: mol_type = other DNA
tttccggaggtgcggtaagacgggcaaatacggtcgtgccgaggcaaaaaaacgcaccatcgacaccacaccctcatgag

SEQ ID NO: 169509 - DNA, 80 bp, synthetic construct
  source 1..80: mol_type = other DNA
aatgcaaccaatatgtataacgcccacaaacaatccagctttcaagaatcccagtacttaaactttaaaactggctacta

SEQ ID NO: 169510 - DNA, 80 bp, synthetic construct
  source 1..80: mol_type = other DNA
gaggttgagaatttcaatgcatctacaacagacgaaaagaaaaagcaattcaccacctggcctattacatacacgaacac

SEQ ID NO: 169511 - DNA, 80 bp, synthetic construct
  source 1..80: mol_type = other DNA
cctgtacggctattgctcctttaccccaaaagatgaaacgggaattaataacataactacaatcagaaaaacaaacttcc

SEQ ID NO: 169512 - DNA, 80 bp, synthetic construct
  source 1..80: mol_type = other DNA
caagcgaagaagaggactcgcaggaggagcaccagctccagcagcaagagctccagctcagactccagcagcagttcaga

SEQ ID NO: 169513 - DNA, 80 bp, synthetic construct
  source 1..80: mol_type = other DNA
ctttctatgccaacgggaataacaacacaggtggatgtaactgttctgggtagcttgttacaacttgattttcagaatcc

SEQ ID NO: 169514 - DNA, 80 bp, synthetic construct
  source 1..80: mol_type = other DNA
cgacaattttgaattattatccgctgcgtatagcccatgcaggataatacctgggaatcaacaaccaccttcgggttctc

SEQ ID NO: 169515 - DNA, 80 bp, synthetic construct
  source 1..80: mol_type = other DNA
tctagccaccgcagcttttgtagctgcgacgatcctctgggtcatattaatactatcgcccgcgataatagtactgtggc

SEQ ID NO: 169516 - DNA, 80 bp, synthetic construct
  source 1..80: mol_type = other DNA
tagcaggaaagttagcgacataaggaagaataaattaaaaacacctctcatctctccttttctccccatgacagaggagg

SEQ ID NO: 169517 - DNA, 80 bp, synthetic construct
  source 1..80: mol_type = other DNA
tttattgactggctcaaatcaatgctaccacaagctaaactcaaagttgacttcattgggaaactcaagcaactaccctt

SEQ ID NO: 169518 - DNA, 80 bp, synthetic construct
  source 1..80: mol_type = other DNA
acaaatgataggtagacttagaagaggctataggcctgttttctcttccccccccggttacttccaacagatccgtatcc

SEQ ID NO: 169519 - DNA, 80 bp, synthetic construct
  source 1..80: mol_type = other DNA
tgcttccgctcccactagcaggaagcaggcaatgttggggactcacatcatttgggatgtcggattgcaatccagctgtg

SEQ ID NO: 169520 - DNA, 80 bp, synthetic construct
  source 1..80: mol_type = other DNA
attattatttgcatatttcactggggagctaaatatacatgtcctattcttgtcagacagaggcttcttgagggttgtac

SEQ ID NO: 169521 - DNA, 80 bp, synthetic construct
  source 1..80: mol_type = other DNA
ggggattcaaaaatgatgccaaataccctttcctcactcatccaatatacccaatgaaagatgtttatgaatcaataaga

SEQ ID NO: 169522 - DNA, 80 bp, synthetic construct
  source 1..80: mol_type = other DNA
tgttgttttgtggattttcggtttcctcttcttggtcgtcatcgtcggacgtgtcgtcttcctcttgatcctcttcttcg

SEQ ID NO: 169523 - DNA, 80 bp, synthetic construct
  source 1..80: mol_type = other DNA
tgtgtatctctatctgctactacgagaatgtgaccgaggacgagatcatcggcgtggcttttacttggcagcataacgag

SEQ ID NO: 169524 - DNA, 80 bp, synthetic construct
  source 1..80: mol_type = other DNA
gatctagcggtcggtatgaggaatcacaacacagcttacatcaaagcttttttacatttcccaaccgagatacttgacgt

SEQ ID NO: 169525 - DNA, 80 bp, synthetic construct
  source 1..80: mol_type = other DNA
gatctgcactatggacaaatctaacattgagagatggttttgaaaaatgggaaataaacttccaagagcaggcacacata

SEQ ID NO: 169526 - DNA, 80 bp, synthetic construct
  source 1..80: mol_type = other DNA
gctttcaaatggacccggggtactctagtgtgctaaagcgtactttactaggagaaatgctgaattattacgctcactgg

SEQ ID NO: 169527 - DNA, 80 bp, synthetic construct
  source 1..80: mol_type = other DNA
tcacgacacgacacaaacagcgtaacgtggtttcccgaacacgtacgcggcacagacccccgacacgtactcgaagacct

SEQ ID NO: 169528 - DNA, 80 bp, synthetic construct
  source 1..80: mol_type = other DNA
tctgcgagtggaatttccttcgttatctccgtgtgtcggcatacaatgcgcttcacgggaagatgcgtgatacatagcgt

SEQ ID NO: 169529 - DNA, 80 bp, synthetic construct
  source 1..80: mol_type = other DNA
ataatagtgccccctgaaacgccatcggatagtgtggttctgtgctttgtctctgcttgcaatgacttctcggtgaggtt

SEQ ID NO: 169530 - DNA, 80 bp, synthetic construct
  source 1..80: mol_type = other DNA
tgttattgcatatttgtaacgtgtgacttatcgcaatgttgcctacgtcgtgtgatagtgtaatggcaggaagattcttg

SEQ ID NO: 169531 - DNA, 80 bp, synthetic construct
  source 1..80: mol_type = other DNA
gtgactgggtccaactacgtcatatgcggaagtaggccccgccacgtgactcgtcacgtgggtgctgcgtcacggcggcc

SEQ ID NO: 169532 - DNA, 80 bp, synthetic construct
  source 1..80: mol_type = other DNA
ctttacgcccagttgttgtgcaaggaccaaacacagaatttgcactatccctgttaaggaaaaacataatgactataaca

SEQ ID NO: 169533 - DNA, 80 bp, synthetic construct
  source 1..80: mol_type = other DNA
cagacacctgttcaccagcagaggaaatcccagacctccttttccccaatactggtaaaaaaaaaaaattttctcaattc

SEQ ID NO: 169534 - DNA, 80 bp, synthetic construct
  source 1..80: mol_type = other DNA
gaatgagaagagggcctgcggaaattagactcatcctcagactcacagtcagatttgtcatcaagcccaaggccggccag

SEQ ID NO: 169535 - DNA, 80 bp, synthetic construct
  source 1..80: mol_type = other DNA
ttctctcaataaacaaggcctttaactgttcacttgtcggtgtcaacctctataagtcactaagcactccgagcgaagcg

SEQ ID NO: 169536 - DNA, 80 bp, synthetic construct
  source 1..80: mol_type = other DNA
gcagtaaaaaattggatgacccaaacactgctagtgcagaatgccaacccagactgtaaattagtactaaagggattagg

SEQ ID NO: 169537 - DNA, 80 bp, synthetic construct
  source 1..80: mol_type = other DNA
aatgaagtatggtttaaaaaagcaaagacagcatggacaaacctacactcacaatatggaatacccacatcagaaggcct

SEQ ID NO: 169538 - DNA, 80 bp, synthetic construct
  source 1..80: mol_type = other DNA
ttggttcactgtcaaaactgagatgaggaacaatatcaaggagaataaaaagtattcaagacacaatcgtccccatataa

SEQ ID NO: 169539 - DNA, 80 bp, synthetic construct
  source 1..80: mol_type = other DNA
atacaaatgagaccaattatgatgacataggtgtgggatataaaacatggaaaattagccttcaggaaatggcacaaatt

SEQ ID NO: 169540 - DNA, 80 bp, synthetic construct
  source 1..80: mol_type = other DNA
ctgggttaacccccaggaagccaatgagtggacagggtgtgaagagccgcgtgtgctaccaatgagtcctccggcccctg

SEQ ID NO: 169541 - DNA, 80 bp, synthetic construct
  source 1..80: mol_type = other DNA
aatgggatacagcatctaaccccagcgtgttctatcaacctaaatcaggtttccccagattcactataccatttataggg

SEQ ID NO: 169542 - DNA, 80 bp, synthetic construct
  source 1..80: mol_type = other DNA
ttattgaacagagcgcactactccaaggagacgtggtggaggcaattgagagcgcggttgccagggtagcagacacaatt

SEQ ID NO: 169543 - DNA, 80 bp, synthetic construct
  source 1..80: mol_type = other DNA
catgtttgtcacattttgacataaatttttgaccaaaaggattatgaacatgcacacacttaggactccaattatgttct

SEQ ID NO: 169544 - DNA, 80 bp, synthetic construct
  source 1..80: mol_type = other DNA
ctacactaagtataagacaaaagacacagacccaccagaaatgtattccagttggagggttaccaccagacaagttgcac

SEQ ID NO: 169545 - DNA, 80 bp, synthetic construct
  source 1..80: mol_type = other DNA
actttcatgaccaacagcatggttagagctcacatagatgccagcgctgcaaaaaacgcacaaacagcagccacatcacc

SEQ ID NO: 169546 - DNA, 80 bp, synthetic construct
  source 1..80: mol_type = other DNA
cttcagcaggttcccagaggagtttgggtatcagtcaggaatgccagagaaagagtggaaggctaaactgagagcaagag

SEQ ID NO: 169547 - DNA, 80 bp, synthetic construct
  source 1..80: mol_type = other DNA
aagtcaatcaacccgcacaattaccagtgatcagcaccgcacgcatttattttaagccaaagcacattcgggcctgggtc

SEQ ID NO: 169548 - DNA, 80 bp, synthetic construct
  source 1..80: mol_type = other DNA
tggaaagaggagtacgaggcctgtagaatatgggacagaccccccagaggcaacctaagagatacccctttctacccctg

SEQ ID NO: 169549 - DNA, 80 bp, synthetic construct
  source 1..80: mol_type = other DNA
cgctgagacgcgcgctgccggcgccccccgcgccggagcctaacccggagcagccatggcgtggagctggtggtggcaga

SEQ ID NO: 169550 - DNA, 80 bp, synthetic construct
  source 1..80: mol_type = other DNA
taaacaaatacagctgcgcctcttaccatcctggcatgctcatgcagcgaaaacacaaggtgctaatacccagctacgac

SEQ ID NO: 169551 - DNA, 80 bp, synthetic construct
  source 1..80: mol_type = other DNA
tgaattgtgatggtacccttctgggcaatattacaatctacccacatcagtttattaatttgagaagtaataattctgcc

SEQ ID NO: 169552 - DNA, 80 bp, synthetic construct
  source 1..80: mol_type = other DNA
aatttccattcaagatccgaatctacagtggagaattttatgggacgtgctgcatgtgttttcatggaccagtacaagat

SEQ ID NO: 169553 - DNA, 80 bp, synthetic construct
  source 1..80: mol_type = other DNA
cctaccccacctacctggacggggaaagagccaaaggtgaccttatttttaaccaaaccgagcaaaacctgttagagctg

SEQ ID NO: 169554 - DNA, 80 bp, synthetic construct
  source 1..80: mol_type = other DNA
tttccactggaggcggtcagtgcgcatgcgtcggtaaaattccactggatgtgcaccgtgcgcatgcgccggtatttttc

SEQ ID NO: 169555 - DNA, 80 bp, synthetic construct
  source 1..80: mol_type = other DNA
cgagtccgtagaagggtcctcgtccagcaagaagaggaggtggtaagcggttcaccttcaggggtaagtaacctgacctc

SEQ ID NO: 169556 - DNA, 80 bp, synthetic construct
  source 1..80: mol_type = other DNA
gaaaaactaggtgtattgaagcagcaagcatgaatgacacagtttatttccgaatggtattcgggaacctgtacagcact

SEQ ID NO: 169557 - DNA, 80 bp, synthetic construct
  source 1..80: mol_type = other DNA
tttctactgttcatgatggagggccctaacggattttcgagttcgttggctggcctctcttcatcacgctcttcactgcg

SEQ ID NO: 169558 - DNA, 80 bp, synthetic construct
  source 1..80: mol_type = other DNA
ggtgcagatacacacacaacctcctttcctagacacagaactaacagggcccagcatacacccaggcatgatgattctta

SEQ ID NO: 169559 - DNA, 80 bp, synthetic construct
  source 1..80: mol_type = other DNA
gtctccggactgcggaggaagcgggcaaacgtgtaggaggtcatctcctccatgggatcctcgagctcatccacgtcggc

SEQ ID NO: 169560 - DNA, 80 bp, synthetic construct
  source 1..80: mol_type = other DNA
ctgttgatgccgaccgttccgaccgtcccacaaccggggttgttccaaacttataatgttaaactccaagcagaacacac

SEQ ID NO: 169561 - DNA, 80 bp, synthetic construct
  source 1..80: mol_type = other DNA
tttggacaccagaatcaagcagtctatgttgctggttacaaaatagttaattaccatctagctagtgctgaagatttcag

SEQ ID NO: 169562 - DNA, 80 bp, synthetic construct
  source 1..80: mol_type = other DNA
acatcccaggtaaggttaagaatctgctagaaatcatacaggtggatacattaattccaatgaataatatacatgccaaa

SEQ ID NO: 169563 - DNA, 80 bp, synthetic construct
  source 1..80: mol_type = other DNA
acccagtcgcgaagcacgtcggcgctgtactggcactcaaagatgccctgaaagtcgctcatgacccgcagaaaagtttc

SEQ ID NO: 169564 - DNA, 80 bp, synthetic construct
  source 1..80: mol_type = other DNA
gacttggagaacgagctacatggtctgtgtgtggatcttctggtgtgcgtccttttattagctctgctgctgttggagct

SEQ ID NO: 169565 - DNA, 80 bp, synthetic construct
  source 1..80: mol_type = other DNA
gctttaaaactaggccaaagggcagaaagacagttaagataaaggtccgcccacctaaactatttcagcacaagtggtat

SEQ ID NO: 169566 - DNA, 80 bp, synthetic construct
  source 1..80: mol_type = other DNA
ttgttgggttcatacccttgtcatctacagtttattcaactttagtgtatctgttatatctcaatagtaagagatggggg

SEQ ID NO: 169567 - DNA, 80 bp, synthetic construct
  source 1..80: mol_type = other DNA
gaataatttcagcaatggtaataataattaggaattcttcagaccctcaaacaattgtagccacactcacattgataggg

SEQ ID NO: 169568 - DNA, 80 bp, synthetic construct
  source 1..80: mol_type = other DNA
aacgccagtaaattccatcaaggtgcattactggtagccattgtacctgaatttgttctcggttcagagagcaccgagca

SEQ ID NO: 169569 - DNA, 80 bp, synthetic construct
  source 1..80: mol_type = other DNA
tctacacttacgggtgtacacccgccagagtttccatcccatacgttggaattgcaaatgcttactctcacttttatgat

SEQ ID NO: 169570 - DNA, 80 bp, synthetic construct
  source 1..80: mol_type = other DNA
cggtgcaattagaggagagggcaacaacgcaaggctgttgttttatttgggttacaagagctgcggcggtcgatgggttc

SEQ ID NO: 169571 - DNA, 80 bp, synthetic construct
  source 1..80: mol_type = other DNA
ccacaacacacatactctgacaatggctacgccagtcagtggaccacccccagcacagacgcctacgaataccacttagg

SEQ ID NO: 169572 - DNA, 80 bp, synthetic construct
  source 1..80: mol_type = other DNA
ccatggacccagagaaatttaccaaacccattgctgaagtaatgaccaacccagccttaatgagccccagtattgaagct

SEQ ID NO: 169573 - DNA, 80 bp, synthetic construct
  source 1..80: mol_type = other DNA
aatcctaggaactatttatgctttgtataaattaatgtgtttgacacaaggtgcttattctggaacacccacaccagtaa

SEQ ID NO: 169574 - DNA, 80 bp, synthetic construct
  source 1..80: mol_type = other DNA
gttaaactcctactagcctacacaccacctggtattagagagcctactacaagaagagaagcaatgttgggcactcatgt

SEQ ID NO: 169575 - DNA, 80 bp, synthetic construct
  source 1..80: mol_type = other DNA
tgcataacgttccaggtgttgcgagacttttattacacacaaatgtcagttacacccacaacaaccacttccctaaatga

SEQ ID NO: 169576 - DNA, 80 bp, synthetic construct
  source 1..80: mol_type = other DNA
cagagacggtgttgcgccagtcgctgcgcctgctgctgggaacctggtcctcctttgccagcgagcagtacgagtgcctg

SEQ ID NO: 169577 - DNA, 80 bp, synthetic construct
  source 1..80: mol_type = other DNA
tggctgattctgacacaccatctaccacacatgggcatgatgccaagggttatttcaagtggtctgcaactactaaccca

SEQ ID NO: 169578 - DNA, 80 bp, synthetic construct
  source 1..80: mol_type = other DNA
gcagcttttggagcaggtttcagtactgagatctctggcaggatacaggaactgcaggagaccgtccagaatgttatcac

SEQ ID NO: 169579 - DNA, 80 bp, synthetic construct
  source 1..80: mol_type = other DNA
acagcactccccagccagaaaaattcgggggaggcatgagcacagtaacattcagcctatttgtactatatgaccagtgg

SEQ ID NO: 169580 - DNA, 80 bp, synthetic construct
  source 1..80: mol_type = other DNA
aacacttaaacttttaatagcatacacacctccaggtatagcaaaacccaagagcaggaaagaggcgatgctgggaaccc

SEQ ID NO: 169581 - DNA, 80 bp, synthetic construct
  source 1..80: mol_type = other DNA
aaggatccattctggtcacatgttctgcatgcccagacatggcggtccgtatgctaagggatacccccatgattacccaa

SEQ ID NO: 169582 - DNA, 80 bp, synthetic construct
  source 1..80: mol_type = other DNA
tggcgcttcgaggaggccgtaaatatggcgctggtggcctgcgaggccgtgtcaccttacgatcgctttcgcctaattga

SEQ ID NO: 169583 - DNA, 80 bp, synthetic construct
  source 1..80: mol_type = other DNA
acagccaacaccacccttaagttactattagcttacacaccacctggaataaagaagccagaaaacaggaaacaagccat

SEQ ID NO: 169584 - DNA, 80 bp, synthetic construct
  source 1..80: mol_type = other DNA
aaaagagagacctcataaataacaggaccaaagacataagtaaacttagagaagcaattgataaatatggggttgattta

SEQ ID NO: 169585 - DNA, 80 bp, synthetic construct
  source 1..80: mol_type = other DNA
tcagacccaggcagtacaatgcagatggaagtcaaaaccaaaagtatacagaactacaaactgactggacaactcatatt

SEQ ID NO: 169586 - DNA, 80 bp, synthetic construct
  source 1..80: mol_type = other DNA
ataacaggtagtgtttttgtcttaagggattaaataaaagtctaaaactaacaatcacacatgtgcatttacaacacaac

SEQ ID NO: 169587 - DNA, 80 bp, synthetic construct
  source 1..80: mol_type = other DNA
ggtcaagcacttctgtttccccggtatgcgaagaataagctttaacaaaggctgaagcttcaattatcgttatccgcatg

SEQ ID NO: 169588 - DNA, 80 bp, synthetic construct
  source 1..80: mol_type = other DNA
gagttcccgaccgcagacgagaccgtggcagtcggaaagcgaagaagaatccagccaagaacaagcaccccaggaagaaa

SEQ ID NO: 169589 - DNA, 80 bp, synthetic construct
  source 1..80: mol_type = other DNA
cctactggcaggtcagatggaggcccgaaatgttatttcaagagacagtaatggcagacatagtgcagaccgggcccttt

SEQ ID NO: 169590 - DNA, 80 bp, synthetic construct
  source 1..80: mol_type = other DNA
aagacctgctcgccgctttcgacctcgccgaagagtaaggaggaggagggggaggtggactcgcagatacagacgctgga

SEQ ID NO: 169591 - DNA, 80 bp, synthetic construct
  source 1..80: mol_type = other DNA
aactatggaatctcattgacaaacgacatgggaaccttgtgctttcgggcactagacgggactgaggtaagtgatatcaa

SEQ ID NO: 169592 - DNA, 80 bp, synthetic construct
  source 1..80: mol_type = other DNA
tatgactaccacaaaactgactctgagaatattctttgacgaacacttacgcttcttaaactactggactgtaagcaacg

SEQ ID NO: 169593 - DNA, 80 bp, synthetic construct
  source 1..80: mol_type = other DNA
ccgtagagacatccctcagcgcggtgaaaccccgtccccagcgtcgtgccgcgaacaaatcccgcgggacgccacgcaca

SEQ ID NO: 169594 - DNA, 80 bp, synthetic construct
  source 1..80: mol_type = other DNA
tttggcttcgacctccattttcggcccttgcgggcacccgtaggcgcattatagtgacgtcacggcagccatcttgactg

SEQ ID NO: 169595 - DNA, 80 bp, synthetic construct
  source 1..80: mol_type = other DNA
tactaccagtttttagacaacactgcagatgctactagagaccaagaaagacataagaaatggatagaaatgtatcatac

SEQ ID NO: 169596 - DNA, 80 bp, synthetic construct
  source 1..80: mol_type = other DNA
aaaagctaccagacaagggattcgtgttttatgactccctttttggagacggcaaaatgtctgacggacgcggacaggtg

SEQ ID NO: 169597 - DNA, 80 bp, synthetic construct
  source 1..80: mol_type = other DNA
gtcccgagcttctcccgctgggcccagtctcacgccagcgagctcgatccccgggagattcgcgacagagttacaccagc

SEQ ID NO: 169598 - DNA, 80 bp, synthetic construct
  source 1..80: mol_type = other DNA
gatgcaactccataaacctgtgatagattcagaccatgttgtattcaatgagagatggttgattcatggtggaatgcctt

SEQ ID NO: 169599 - DNA, 80 bp, synthetic construct
  source 1..80: mol_type = other DNA
tttggggatgggttcaccagctccattagagaaactctagtatctgcctgtgatgtgtcagataagcttactggaaaaat

SEQ ID NO: 169600 - DNA, 80 bp, synthetic construct
  source 1..80: mol_type = other DNA
tatttttttttcgacgtctttttaataaaaaataccgtatgttggatgacaccgttagcgaatcggaatttattgtacgg

SEQ ID NO: 169601 - DNA, 80 bp, synthetic construct
  source 1..80: mol_type = other DNA
gattctatgtaattaaaaactccatatatcaagacgcctttgataacctggcagacacagaacatacaaaccaaagaaaa

SEQ ID NO: 169602 - DNA, 80 bp, synthetic construct
  source 1..80: mol_type = other DNA
gaggtaactttcgtcattactagttcacaagaccagtccacatcgctgagtcaagacacccctgtgttgacgcatcaagt

SEQ ID NO: 169603 - DNA, 80 bp, synthetic construct
  source 1..80: mol_type = other DNA
atgatggttactctactgtgccactcaaaactaacaacaccgatgcaggggcagcctattatggcgccgtgtcaatcaat

SEQ ID NO: 169604 - DNA, 80 bp, synthetic construct
  source 1..80: mol_type = other DNA
cataacaaactatcagactttgtgttgcattattggattgaacacagcaaaatgggtgcacaggtgtcaacacaaaagac

SEQ ID NO: 169605 - DNA, 80 bp, synthetic construct
  source 1..80: mol_type = other DNA
tagccaggcatggtggcgggcgccactgctagagatttgcgcccgaacagggacttgaaagcgaaagagaaaggactctg

SEQ ID NO: 169606 - DNA, 80 bp, synthetic construct
  source 1..80: mol_type = other DNA
ttgagaggcagtggtatgagtgtgtttggcgcagccacgctgcttgctgtggctgtggtgattttattaatcatattaat

SEQ ID NO: 169607 - DNA, 80 bp, synthetic construct
  source 1..80: mol_type = other DNA
tagaccctgggtttagtgaggtgctcaatcgcaccttgctgggtgagatgctcaattattacgcacattggtcaggcagc

SEQ ID NO: 169608 - DNA, 80 bp, synthetic construct
  source 1..80: mol_type = other DNA
aattaatacatggaatagagtaggaaagaatgtatatttgcctccaagggaaggagatctcacttgtaattccacagtga

SEQ ID NO: 169609 - DNA, 80 bp, synthetic construct
  source 1..80: mol_type = other DNA
tatctatgatagcaaatttagtcagtataattggcattgtatatgtgatatataaattgttttgcagtttccaaggaccc

SEQ ID NO: 169610 - DNA, 80 bp, synthetic construct
  source 1..80: mol_type = other DNA
ttagaatagttaacgatcatgatgtgcatacaactcttgttaagattagagtcttccacagagccaaacacattagagct

SEQ ID NO: 169611 - DNA, 80 bp, synthetic construct
  source 1..80: mol_type = other DNA
ccaggtggacggccgcgcgcggaaaaggggaagcgctcggcgcgactcgtccctaggggaccgcggtggaagtaacggcc

SEQ ID NO: 169612 - DNA, 80 bp, synthetic construct
  source 1..80: mol_type = other DNA
cccccaaatgccatcagactcaaacgcttctttgagtaaaaaaccccaagacttaactaaagaaaaaacaagtaactcta

SEQ ID NO: 169613 - DNA, 80 bp, synthetic construct
  source 1..80: mol_type = other DNA
cccaagcaaaacaaaattgcagcccagtgtattttatgatattttccctggctctaaacaaccagctgttctatctgaaa

SEQ ID NO: 169614 - DNA, 80 bp, synthetic construct
  source 1..80: mol_type = other DNA
cccacctggggctacgtattctatgactccctgtttggccagggaaaaatgccagacggcacctctcaaataagcagatt

SEQ ID NO: 169615 - DNA, 80 bp, synthetic construct
  source 1..80: mol_type = other DNA
caggttctgcagtggggtgtgatcctgagactttttggtcaaagatccctgtgatgctagatggtgattgcataatggcc

SEQ ID NO: 169616 - DNA, 80 bp, synthetic construct
  source 1..80: mol_type = other DNA
atcgttacctgtaatgatttgaattatacaattcataagagatgcgatcgtagctacgaagtaatcaacgtaactggaca

SEQ ID NO: 169617 - DNA, 80 bp, synthetic construct
  source 1..80: mol_type = other DNA
tttcgttttctctggtggtctcgagctccttctgttttttcgcgactgtctcaaactctggaaggggggcaatgctggtg

SEQ ID NO: 169618 - DNA, 80 bp, synthetic construct
  source 1..80: mol_type = other DNA
tttgttaagtcaggttacaaaaagaaggacttgatttgcttagaacccttttctgtctccccaatgttggaaaaactagt

SEQ ID NO: 169619 - DNA, 80 bp, synthetic construct
  source 1..80: mol_type = other DNA
ccggttggctcagtcaccgaacagggtatgctcaatcttgctggaaaggctactaacagaaccttaatgtataacttccc

SEQ ID NO: 169620 - DNA, 80 bp, synthetic construct
  source 1..80: mol_type = other DNA
acaaagcttcatcttcctcttctggcaactctggcaactcttctgggtcccgctactccaagtggtgggaacctgctgct

SEQ ID NO: 169621 - DNA, 80 bp, synthetic construct
  source 1..80: mol_type = other DNA
catgcatgcttctttttgcggctgtggtgacctcgttgggcatcttactagcattgctgctcgctttcctgctgccggac

SEQ ID NO: 169622 - DNA, 80 bp, synthetic construct
  source 1..80: mol_type = other DNA
agacactaccaatgatgatgtaaaagtcttcatcaagccaaaacacacgtccgcatggtgccccagaccacccagagcgg

SEQ ID NO: 169623 - DNA, 80 bp, synthetic construct
  source 1..80: mol_type = other DNA
tattgtcacttcactggttggaagagccattgcagaaagagagaacacatctgtttactcccttccaccagaccctgcac

SEQ ID NO: 169624 - DNA, 80 bp, synthetic construct
  source 1..80: mol_type = other DNA
aaggttctacagaagccccgtctgtgactttatagtacactacaacctaatacctccactaaaaatgaaccagttcacaa

SEQ ID NO: 169625 - DNA, 80 bp, synthetic construct
  source 1..80: mol_type = other DNA
cttagaaagaaggaaaagatttctgccgggaagactcgtgttatcgaggctagcagtgtaaatgatactgtcttattcag

SEQ ID NO: 169626 - DNA, 80 bp, synthetic construct
  source 1..80: mol_type = other DNA
ctggtggaggagactctggacgagacgccgcagagctgcccgaagacgacctcgatggactgctcgccgccctagacgac

SEQ ID NO: 169627 - DNA, 80 bp, synthetic construct
  source 1..80: mol_type = other DNA
gtggtctcacacgcttggtatccaatagaggaaacgtgttactacccaaaacacatacaatacaatatactcctgggtga

SEQ ID NO: 169628 - DNA, 80 bp, synthetic construct
  source 1..80: mol_type = other DNA
cttgcgctggggacgggggtgggggggttgtttgaggcaaagacaggggttaagttcaggacggggactgcgccggcggg

SEQ ID NO: 169629 - DNA, 80 bp, synthetic construct
  source 1..80: mol_type = other DNA
tcagcttgtgtagaccgagcattttctaatcctaagttcgcagtagaagcatgcaatgtgatgctaaaggagaattttcc

SEQ ID NO: 169630 - DNA, 80 bp, synthetic construct
  source 1..80: mol_type = other DNA
tgtagatagtgtcaaggagcagataaatgccataaatccaataaataatataagcaagaaaatagtaaaatggcttctca

SEQ ID NO: 169631 - DNA, 80 bp, synthetic construct
  source 1..80: mol_type = other DNA
aagtagccgtcgaccattattcggctcagctgtacaccttagacattaatccagcaccactcacactcgaacaggcagca

SEQ ID NO: 169632 - DNA, 80 bp, synthetic construct
  source 1..80: mol_type = other DNA
gtcttctacctctccctagccctccgccccctccaaggactcgggcccagtttctaactttttccccttccctccctcgt

SEQ ID NO: 169633 - DNA, 80 bp, synthetic construct
  source 1..80: mol_type = other DNA
atgaactaaccacaaaattacaggtcttaaagaaaaacctagacgacatgtgtcccctttacgctgtagaaaataaaaga

SEQ ID NO: 169634 - DNA, 80 bp, synthetic construct
  source 1..80: mol_type = other DNA
gatgtgttggcttactgccacgattctccagatcttgttatgcaactccataaacctgtgattgactctgatcacgttgt

SEQ ID NO: 169635 - DNA, 80 bp, synthetic construct
  source 1..80: mol_type = other DNA
tttttcaacttggatgaggaaaactaacgggcatgcactggggttgttccaaattgaggtcttaaacaggctaacttata

SEQ ID NO: 169636 - DNA, 80 bp, synthetic construct
  source 1..80: mol_type = other DNA
ttaaacaatcttggctttccaggggagttaatgagtaagctatgcaatactactcatatctacaaggatgacatctatag

SEQ ID NO: 169637 - DNA, 80 bp, synthetic construct
  source 1..80: mol_type = other DNA
gctagtaaatttcatcaagggacattagtagtagctgctataccagaacatcaattagcttttattgggaaaggtaatgt

SEQ ID NO: 169638 - DNA, 80 bp, synthetic construct
  source 1..80: mol_type = other DNA
cgtggcgccgcagaaggagactacggccccgaagatctagacgcacttttcgacgcactcgacgaagagtaaggaggcga

SEQ ID NO: 169639 - DNA, 80 bp, synthetic construct
  source 1..80: mol_type = other DNA
atgacatagcagagccttacaaactagacaaatacagctgtcccaactatcaccccggcaaactgatacaggccaaacac

SEQ ID NO: 169640 - DNA, 80 bp, synthetic construct
  source 1..80: mol_type = other DNA
actcgcggcgtagctcgccgtcgctatgcggctcgtcgccgtgtggcgcggcctggccggctgtctgcgcccagatctgt

SEQ ID NO: 169641 - DNA, 80 bp, synthetic construct
  source 1..80: mol_type = other DNA
tatagaggtggggcatgcgggggtggtgtcgggcccgcgcattcctggaaaaagtggagtggtcgtggccttgcccctcg

SEQ ID NO: 169642 - DNA, 80 bp, synthetic construct
  source 1..80: mol_type = other DNA
aattacttccttaatttcagatctatcaccactagtatcattagtatgtgcaaccctcaaaaaccctctctcacttagga

SEQ ID NO: 169643 - DNA, 80 bp, synthetic construct
  source 1..80: mol_type = other DNA
ttgagtggatgaaatctatgttaccacaagcccaactcaaaataaagtaccttagtgagcttaagaaactcaaccttttg

SEQ ID NO: 169644 - DNA, 80 bp, synthetic construct
  source 1..80: mol_type = other DNA
gccgatcacaaacagcgtgacgatgacctgccatcgacggcgattatggccggctagacccgtgacgcagctgcagaggc

SEQ ID NO: 169645 - DNA, 80 bp, synthetic construct
  source 1..80: mol_type = other DNA
cccggacccggcccggaggctggtggccctcctgcgaagggaagatggggcacctaaggacccccctctgggaccgtttg

SEQ ID NO: 169646 - DNA, 80 bp, synthetic construct
  source 1..80: mol_type = other DNA
gaatcattctttgggaggtcagcatgtgtggccataattgggttatctaaccaaaaacccaccagtgacaatgcagccaa

SEQ ID NO: 169647 - DNA, 80 bp, synthetic construct
  source 1..80: mol_type = other DNA
tgaagcctaagcatgtgaaagcctgggttcccaggcccccgaggctttgcgactatgaaaaatcaggtaacaccaatttc

SEQ ID NO: 169648 - DNA, 80 bp, synthetic construct
  source 1..80: mol_type = other DNA
gagtcagggaaaggggagagtgatagtggactgagattggttaaaaaaggcatcgaagagaatacagtctctgttgggat

SEQ ID NO: 169649 - DNA, 80 bp, synthetic construct
  source 1..80: mol_type = other DNA
caggaatgtactgtagcatctttttatcctcaggaagatcaaacccagaagtaaaaggcagctacacagacatatcatac

SEQ ID NO: 169650 - DNA, 80 bp, synthetic construct
  source 1..80: mol_type = other DNA
tggctgctgcatttggttttcagccggggccgccgccgagtggtggtcctagggagaggctcacgccaccagtagtccgc

SEQ ID NO: 169651 - DNA, 80 bp, synthetic construct
  source 1..80: mol_type = other DNA
agctcaattaacgacattggatatggatccacaaccaattagcctagaagatagtgtgtatggaattgagggtctggaag

SEQ ID NO: 169652 - DNA, 80 bp, synthetic construct
  source 1..80: mol_type = other DNA
gtcatatgggatgtgggattgcaatctagctgcgttttgtgcataccatggatcagtcagacccactatagactggtaga

SEQ ID NO: 169653 - DNA, 80 bp, synthetic construct
  source 1..80: mol_type = other DNA
attgaggatgattgtactgaggattgcaaacagacaatttctccagacgaattgggtctgacatctgcacaagacgatgg

SEQ ID NO: 169654 - DNA, 80 bp, synthetic construct
  source 1..80: mol_type = other DNA
accagacctcatcacggtatggcacaattgtaacaaatgatatgggtaccttatgttctagaattgtcacagataaacac

SEQ ID NO: 169655 - DNA, 80 bp, synthetic construct
  source 1..80: mol_type = other DNA
caaatcctcacaacaattcactatatggaggctcagtttatcaaacaaaatcagatgttaataacccaaataaaagaatg

SEQ ID NO: 169656 - DNA, 80 bp, synthetic construct
  source 1..80: mol_type = other DNA
cctgttctgcggtagcatgatggcaacaggcaaattgatactaacctattctccccctggggcatctcctccgaaaaaca

SEQ ID NO: 169657 - DNA, 80 bp, synthetic construct
  source 1..80: mol_type = other DNA
gttctttccatacaggcaacaacccagtatttggaatgtgttcatataaacccacaaaagacactctagaagcagcaaac

SEQ ID NO: 169658 - DNA, 80 bp, synthetic construct
  source 1..80: mol_type = other DNA
gaccataaatatcagagagatggcacaattaaggaggaagtgtgaaatgtttacgtacatgcggtttgacatcgagatga

SEQ ID NO: 169659 - DNA, 80 bp, synthetic construct
  source 1..80: mol_type = other DNA
aatagtatggaagcatacaggatacctgtgacagggggtgaccagttgcacacacaagtctttggatttcaaatgcagcc

SEQ ID NO: 169660 - DNA, 80 bp, synthetic construct
  source 1..80: mol_type = other DNA
ttttgacaactgatgacttacaatcaccatcagcattaccctggtaccaccctactaaagagattttcataccagggcaa

SEQ ID NO: 169661 - DNA, 80 bp, synthetic construct
  source 1..80: mol_type = other DNA
gcaagcgccgcgtcgcgcaaaactcccgcagccaacaaacaccgtgggacgacacgcagcggcagtgcgcacacagcgcc

SEQ ID NO: 169662 - DNA, 80 bp, synthetic construct
  source 1..80: mol_type = other DNA
aaggttgtagtacataatcttttctaatccaactatgttggagtggtggacagcgcaccataactctatcagtgagatac

SEQ ID NO: 169663 - DNA, 80 bp, synthetic construct
  source 1..80: mol_type = other DNA
caccaagacgcagagcaacctgcacataaacccccgtgtgcttggccttgcataaataaagtgtacatgtttccccccga

SEQ ID NO: 169664 - DNA, 80 bp, synthetic construct
  source 1..80: mol_type = other DNA
gtgtttcatttgtgacctttcatgatttgtttaaacaaattttcttaaaatttctgaggtttgtttatttcttttatcag

SEQ ID NO: 169665 - DNA, 80 bp, synthetic construct
  source 1..80: mol_type = other DNA
cgggaggactcggagccactgatgtcggatccggcacggtctcccgaagaggaggagtaaacaacacacggctaagagga

SEQ ID NO: 169666 - DNA, 80 bp, synthetic construct
  source 1..80: mol_type = other DNA
gtggaagtgacatttgtgataactagctctcaagatcaatcaaccagtgtggcacaggacgcgcctgtgttaacccacca

SEQ ID NO: 169667 - DNA, 80 bp, synthetic construct
  source 1..80: mol_type = other DNA
tgatggcagattcaacgaccccatcagaaaatcatggggttgatgcaaaaggatacttcaaatggtcttctgctactacc

SEQ ID NO: 169668 - DNA, 80 bp, synthetic construct
  source 1..80: mol_type = other DNA
agatctgtgaaaaaatggaaaaagagggccaactagaagaggcacctccaactaatccttataatacccccacatttgca

SEQ ID NO: 169669 - DNA, 80 bp, synthetic construct
  source 1..80: mol_type = other DNA
tcccgaccagatacttcttctaatagattctacaccttagctagtaaggaatgggattacaattctaagggctggtggtg

SEQ ID NO: 169670 - DNA, 80 bp, synthetic construct
  source 1..80: mol_type = other DNA
ctacgcaggaggcggctaatatcgtgttggggtacggagagtggcctgattactgtccagacactgatgctacggctgtc

SEQ ID NO: 169671 - DNA, 80 bp, synthetic construct
  source 1..80: mol_type = other DNA
aatacaaattcacatttaactggggcggtaatcctattttggaacagattgttagagaccccagcactcagcccacctac

SEQ ID NO: 169672 - DNA, 80 bp, synthetic construct
  source 1..80: mol_type = other DNA
ggtaaatcattgactacctccttgattggcagagctattgcagatagttgtggctcctctgtgtactcactacccccaga

SEQ ID NO: 169673 - DNA, 80 bp, synthetic construct
  source 1..80: mol_type = other DNA
agctatgtttctcggcaggattcacagaaagaaaaggaaagtgctactgtcctcactgcaccctccaccgaaaactaggc

SEQ ID NO: 169674 - DNA, 80 bp, synthetic construct
  source 1..80: mol_type = other DNA
aacagtaccttctgacaatgtggaaactagaaagacctatatgcattatgatggtgcagaaactagtgtggagagctttt

SEQ ID NO: 169675 - DNA, 80 bp, synthetic construct
  source 1..80: mol_type = other DNA
tgtggatctggccacattgaatacacatggcgtatttggccagcaatctggggctatatacgtgggcaattacaggttgg

SEQ ID NO: 169676 - DNA, 80 bp, synthetic construct
  source 1..80: mol_type = other DNA
agttagatacagaggctgcaccatgacattttatagacacccagaggtggacttcatagtaaaattcaacagaaaacctc

SEQ ID NO: 169677 - DNA, 80 bp, synthetic construct
  source 1..80: mol_type = other DNA
accagtcatgtcgagcatgagctcctctccaaattgattgatgagttaaaggtcaaggccaactcagaccccgaggctga

SEQ ID NO: 169678 - DNA, 80 bp, synthetic construct
  source 1..80: mol_type = other DNA
gtaagactgttgagagataccacgcacattagtcaaagttccctaattgcaacaacacagggtattgacgacgtcatcga

SEQ ID NO: 169679 - DNA, 80 bp, synthetic construct
  source 1..80: mol_type = other DNA
cacccccaggttttatagtggacttactatctagctccaaggatcccaaagttataaattactgtgtagagcaaggttgg

SEQ ID NO: 169680 - DNA, 80 bp, synthetic construct
  source 1..80: mol_type = other DNA
ggaacatgaaaaatatcatagcaatataaaagagctgatccataaatttggaataccccaactagtagcaagacagatag

SEQ ID NO: 169681 - DNA, 80 bp, synthetic construct
  source 1..80: mol_type = other DNA
tagtgttagtgttgtgctgtaaataagtgtccagcgcaccactagtcaccaggtgtcaccggaggctacttgcctcagtg

SEQ ID NO: 169682 - DNA, 80 bp, synthetic construct
  source 1..80: mol_type = other DNA
ctccaatccaagtgtgttctatcagcccaaaagtggttttccccgtttcaccatacccttcatgggtttaggatcagcct

SEQ ID NO: 169683 - DNA, 80 bp, synthetic construct
  source 1..80: mol_type = other DNA
acacggtacaattgcgccggaagttagagtttttcacatattcccgctttgacatggaatttacttttgtggtgacagcc

SEQ ID NO: 169684 - DNA, 80 bp, synthetic construct
  source 1..80: mol_type = other DNA
ggttctgaaaaaccaaattacttcttaaacttcagggcaatggatgttgacattttcactgttagtcacacaaaagttga

SEQ ID NO: 169685 - DNA, 80 bp, synthetic construct
  source 1..80: mol_type = other DNA
agacctcaaaacagctgttatgtctaaatacaaaggaaatgtccatattgaaatgagtgagaatatccacatagctgtgg

SEQ ID NO: 169686 - DNA, 80 bp, synthetic construct
  source 1..80: mol_type = other DNA
aaacccaaacagaacttttgaatcaccaacagacaaatttgccagcaacttaacaacatggctaggtgcaaacaacgcaa

SEQ ID NO: 169687 - DNA, 80 bp, synthetic construct
  source 1..80: mol_type = other DNA
tgaaattcaagaatcagaatattacccaaaacatatccagtataatatattgataggtgagggaccatgcgaaccaggag

SEQ ID NO: 169688 - DNA, 80 bp, synthetic construct
  source 1..80: mol_type = other DNA
agacacaatcgaaaaagttgtgggggatgctctcgccatctcaatgccaaaagtggctgacacaaaaccctctggtccag

SEQ ID NO: 169689 - DNA, 80 bp, synthetic construct
  source 1..80: mol_type = other DNA
cagcggcggccgcggcggccacggcggcgctggccgagcccacacccgccggcagtcctccgctacccatgacgccgccg

SEQ ID NO: 169690 - DNA, 80 bp, synthetic construct
  source 1..80: mol_type = other DNA
atgcagaaacagtaggccttgtgtgtgtcatctgcccttacactaaaccccctatgtataacaaagagaatccaatgatg

SEQ ID NO: 169691 - DNA, 80 bp, synthetic construct
  source 1..80: mol_type = other DNA
atgcaccgcatccatccatttcggcagcagcgcgttcgacgatgtcgtacgagtcgcggatgatgttaccccgccagcac

SEQ ID NO: 169692 - DNA, 80 bp, synthetic construct
  source 1..80: mol_type = other DNA
gcgacatatcgtcgactatcgcgacagaaaaaataccgttcgtagagaatgccgtgttgaaggaacgcgcttttattgag

SEQ ID NO: 169693 - DNA, 80 bp, synthetic construct
  source 1..80: mol_type = other DNA
catgtggggggaaatggaaaggttggttatggggcagccttacttaggagatactttgcagaagcccaaggtgaaataat

SEQ ID NO: 169694 - DNA, 80 bp, synthetic construct
  source 1..80: mol_type = other DNA
cggcctttattcacattcttgcccgcctgatgaatgctcatccggaattccgtatggcaatgaaagacggtgagctggtg

SEQ ID NO: 169695 - DNA, 80 bp, synthetic construct
  source 1..80: mol_type = other DNA
aaaactctacaagcactgttacagcagactctattatctccattttagtaaaaaacatgaagtcgtactatcaaaaattt

SEQ ID NO: 169696 - DNA, 80 bp, synthetic construct
  source 1..80: mol_type = other DNA
aaatgactctatactagaggagaaaagggccaaggttcttatagtagacttgcccctgtggcaggtcctgtttgggtaca

SEQ ID NO: 169697 - DNA, 80 bp, synthetic construct
  source 1..80: mol_type = other DNA
aaaaatagggatacttggggaactatacagtgcttaccagacaatgatgattatcaggagatacctttaaatgtgacaga

SEQ ID NO: 169698 - DNA, 80 bp, synthetic construct
  source 1..80: mol_type = other DNA
atgactggtatgagatacaagagagtgaatattatccaaaacacatccaatacaatctattaataggtgagggaccatgt

SEQ ID NO: 169699 - DNA, 80 bp, synthetic construct
  source 1..80: mol_type = other DNA
gggtccaaggaacctgctgcactcagcactagagaccacagactggaagtagatttagacactgcagtattctccaagta

SEQ ID NO: 169700 - DNA, 80 bp, synthetic construct
  source 1..80: mol_type = other DNA
ttatcttccccctccccaattgtaacttagaaggttatcaatacgaccaataggtggtagttagccaaactaccaaaggt

SEQ ID NO: 169701 - DNA, 80 bp, synthetic construct
  source 1..80: mol_type = other DNA
cagtctactatatctcttgttgtaccatgggtgagtgccagccacttcaggttaactgcagataataaatactccatggc

SEQ ID NO: 169702 - DNA, 80 bp, synthetic construct
  source 1..80: mol_type = other DNA
tcaactttcacacaagatcagagtcaacgatagagaacttcatgtgtagagctgcatgcgtatacattgctcgctacggt

SEQ ID NO: 169703 - DNA, 80 bp, synthetic construct
  source 1..80: mol_type = other DNA
tggagagactgagggttgagatttcagtacaaacagacatggatgcacttcttttcaacatcccactagacattcaacta

SEQ ID NO: 169704 - DNA, 80 bp, synthetic construct
  source 1..80: mol_type = other DNA
tattcagaatcatttggagcaggccaaatgccagacaaaaacccctacgtaccaattacatggagaggcaaatggtaccc

SEQ ID NO: 169705 - DNA, 80 bp, synthetic construct
  source 1..80: mol_type = other DNA
tggaacagggcccagttggcaagttgtaccaaccaactgaagggattacatgcactgccccgcgggaaatacgtcctacc

SEQ ID NO: 169706 - DNA, 80 bp, synthetic construct
  source 1..80: mol_type = other DNA
gaaggtcaaaacaaactaagaacaggaaacaacagcatttatggccagccaaattatgcacctaactatgaaaagttaga

SEQ ID NO: 169707 - DNA, 80 bp, synthetic construct
  source 1..80: mol_type = other DNA
attacaactggagacaagaaccctagcaaattagtcagacttgagacacatgaatggaccccatcatgggctagagggca

SEQ ID NO: 169708 - DNA, 80 bp, synthetic construct
  source 1..80: mol_type = other DNA
ttttgtgcgtcccctggattagtcagtcacactacagaatggtgcagcacgacccatacactagtgctggttacataaca

SEQ ID NO: 169709 - DNA, 80 bp, synthetic construct
  source 1..80: mol_type = other DNA
gtaccacagcttaaatacaacacaggatcattctatacaaagcaaaacccagtatttggcatgtgtaaatacgcaccctc

SEQ ID NO: 169710 - DNA, 80 bp, synthetic construct
  source 1..80: mol_type = other DNA
agaccatgtcaggtcactatgcatgttagcatggcactcaggtcaaaaagaatatgatgagttcttgagtaaaattagaa

SEQ ID NO: 169711 - DNA, 80 bp, synthetic construct
  source 1..80: mol_type = other DNA
tgaatggtgtaatgcagcaaaagggcttgaatggataggacacaaaattagcaagttcattgaatggttaaaagacaaat

SEQ ID NO: 169712 - DNA, 80 bp, synthetic construct
  source 1..80: mol_type = other DNA
cagggtttggtatcagattatgttaatcagcttggtgcagcatttggtgacggtttttccagtaacatcaaagatcatct

SEQ ID NO: 169713 - DNA, 80 bp, synthetic construct
  source 1..80: mol_type = other DNA
caccgcggggtcactggatcctcacaggccgcacccagctcttcttccgttgccccagtagcatctctgtctggtgacct

SEQ ID NO: 169714 - DNA, 80 bp, synthetic construct
  source 1..80: mol_type = other DNA
ttccaatatcagaaacattcatgagaggagacatgccacacaaactgccctacataccagtaaagtggtggtttaagtgg

SEQ ID NO: 169715 - DNA, 80 bp, synthetic construct
  source 1..80: mol_type = other DNA
tttgtcccatccactggagctggtgttggatccattctcgcaacttgtagtgcttgtccagatatgtctgttagattact

SEQ ID NO: 169716 - DNA, 80 bp, synthetic construct
  source 1..80: mol_type = other DNA
tttttggcccggatgataacaagtgagagtgatatctattctttgccacctgaccccaaatactttgatggatatgatca

SEQ ID NO: 169717 - DNA, 80 bp, synthetic construct
  source 1..80: mol_type = other DNA
gtccctctttaacgtcaacgatatttacgaactgttgtactttttagtgttgggttttcttccgagcgtggcggtgttgt

SEQ ID NO: 169718 - DNA, 80 bp, synthetic construct
  source 1..80: mol_type = other DNA
acatcaattattttaaagatgctgcttcgaatggagcgtctaaattggattttacacaggaccctagcaaattcacagat

SEQ ID NO: 169719 - DNA, 80 bp, synthetic construct
  source 1..80: mol_type = other DNA
tagtgttagatacttataaaaacattgatctggacaaactaaagattgtggcatatggggatgatgttgtggcatcttat

SEQ ID NO: 169720 - DNA, 80 bp, synthetic construct
  source 1..80: mol_type = other DNA
agcaggcaactacccggcaccagcattgcacaggacatgccaccgttaacacaccagataatgtatatacctcctggtgg

SEQ ID NO: 169721 - DNA, 80 bp, synthetic construct
  source 1..80: mol_type = other DNA
agacgacagataagaaaaaactgtttagtgtgtgggagatcaattacacagatactgtacaactcagaagaaagctggag

SEQ ID NO: 169722 - DNA, 80 bp, synthetic construct
  source 1..80: mol_type = other DNA
gtctattccaagttgaagtgttaaacagactcacctacaacagttctagtcctagtgaggtttactgcatagtacaaggg

SEQ ID NO: 169723 - DNA, 80 bp, synthetic construct
  source 1..80: mol_type = other DNA
acttccttccgcttttttaaaaaaaggcgcgaaaaaaccgccgcggggtgcgggtttgcccgccccccccccgcgcatgc

SEQ ID NO: 169724 - DNA, 80 bp, synthetic construct
  source 1..80: mol_type = other DNA
gcccgagtacttgagggatagtgaagctaacccggtggaccaaccaacagagcctgatgttgccgcatgcagattttaca

SEQ ID NO: 169725 - DNA, 80 bp, synthetic construct
  source 1..80: mol_type = other DNA
ctaatctagataataaaggaatgctgttcaccagtaactttgttctggcctccacaaattctaacactttgagccctcca

SEQ ID NO: 169726 - DNA, 80 bp, synthetic construct
  source 1..80: mol_type = other DNA
gcagcgagagctccgagtccagctcaagcacctgttccagcaactcctcaaaacccaggcagggctacacctcaaccccc

SEQ ID NO: 169727 - DNA, 80 bp, synthetic construct
  source 1..80: mol_type = other DNA
aagacgggggcgacgcagacggtacacccgtagacgaaagagacgcattaagcccaaaaactttaaaaacaaactagtac

SEQ ID NO: 169728 - DNA, 80 bp, synthetic construct
  source 1..80: mol_type = other DNA
atggaagcaattgcacaagagggtactaaatatggcttgacaattacacctgcagataaatctgagacttttaccaagcc

SEQ ID NO: 169729 - DNA, 80 bp, synthetic construct
  source 1..80: mol_type = other DNA
gcctgttcgcgcatcactaggaaccagttggcggggttgcgcagtgctacggtggttccttggtggcgctgcacgtaggt

SEQ ID NO: 169730 - DNA, 80 bp, synthetic construct
  source 1..80: mol_type = other DNA
actgtaacatgacttggttcctcaattgggtggagaacaggacgagccaaaaacagcgcaactatgcgccatgccatata

SEQ ID NO: 169731 - DNA, 80 bp, synthetic construct
  source 1..80: mol_type = other DNA
taagtctctaatggcctacaccccaccgggtggtaagctgccaacttccagaaaggaggcaatgcttggtgttcacgtca

SEQ ID NO: 169732 - DNA, 80 bp, synthetic construct
  source 1..80: mol_type = other DNA
tatctaactcccttacagaaggagagcgcgcaaaagaattcacctccgggaacgcgaccaaggagaatggaaatgtccag

SEQ ID NO: 169733 - DNA, 80 bp, synthetic construct
  source 1..80: mol_type = other DNA
taaagaataggggctgttctgataggggcaccgctgaggcgagccgcgtgtgcgtgtggtttgtggagtccccgtcccca

SEQ ID NO: 169734 - DNA, 80 bp, synthetic construct
  source 1..80: mol_type = other DNA
ggatggtcagcagtgagcggtaaaacagctgggtgaagatggggcaggcgggctgcgcaaaggggttgcacgagtactgc

SEQ ID NO: 169735 - DNA, 80 bp, synthetic construct
  source 1..80: mol_type = other DNA
aatctcttctcaacttttcatgcaaacccaggaatcctgactggttctgcggtaggttgcaacccagatattttctggtc

SEQ ID NO: 169736 - DNA, 80 bp, synthetic construct
  source 1..80: mol_type = other DNA
ggcctggccccccgagcaggtccgtcccctgccacgtacctaatagtagtccacagtagtcggccttggttgtaatttta

SEQ ID NO: 169737 - DNA, 80 bp, synthetic construct
  source 1..80: mol_type = other DNA
ggctggaaagccgtgctgggcctcaacgcggcttgtgccgtgtacgatcaccggctggctttcgacgtcattctgccctg

SEQ ID NO: 169738 - DNA, 80 bp, synthetic construct
  source 1..80: mol_type = other DNA
taagtataggataccactaacccaaaaccatcaggatgatcaaatttttggcttcgcccttttcttaggaggttcagtat

SEQ ID NO: 169739 - DNA, 80 bp, synthetic construct
  source 1..80: mol_type = other DNA
tccgcccctcttcgataagagtaaccccaagatgggctatgtattctatgatgccaagtttggcaatggcaaatggatag

SEQ ID NO: 169740 - DNA, 80 bp, synthetic construct
  source 1..80: mol_type = other DNA
agtcccttacacacacagctacgtaactaactacaagattgctggaaaagaacctgaaattttcttaaaaccaagaatga

SEQ ID NO: 169741 - DNA, 80 bp, synthetic construct
  source 1..80: mol_type = other DNA
tatttaacactatgctgaacaacataattataagggctttagtacttcagacatacaaaggggttgatttggacaagcta

SEQ ID NO: 169742 - DNA, 80 bp, synthetic construct
  source 1..80: mol_type = other DNA
aagaaatgttgtcccttaatttgtgggaaagcaattcacctgatggacaagaacactagacaaagatacaccattgatga

SEQ ID NO: 169743 - DNA, 80 bp, synthetic construct
  source 1..80: mol_type = other DNA
cctgatgagtcggtcttttacaaccgtgaaatagaagaactagacatagctgactcaggaacatttctagttgctatagc

SEQ ID NO: 169744 - DNA, 80 bp, synthetic construct
  source 1..80: mol_type = other DNA
gatgttttcggggcggcgccggcgaggacggaggtttttgggcgtgctgggcgccggcggcgtcccacagtgtttgttcg

SEQ ID NO: 169745 - DNA, 80 bp, synthetic construct
  source 1..80: mol_type = other DNA
ggtcatacgttttagggtgctcgacctgggccgcggccaccggcatatgctctatacccgcccctccagggtggccagga

SEQ ID NO: 169746 - DNA, 80 bp, synthetic construct
  source 1..80: mol_type = other DNA
aaaaaaatacatagacaatcaaacatcaacagaatcatggaattcatacttaaatactactaaatttacaacgtcaatac

SEQ ID NO: 169747 - DNA, 80 bp, synthetic construct
  source 1..80: mol_type = other DNA
cactgtgtagctcctagaaactgtagggccccacttttccactccgtcatgaaggatcgcaataaactacttttgtgtat

SEQ ID NO: 169748 - DNA, 80 bp, synthetic construct
  source 1..80: mol_type = other DNA
cttccccaaaacttacttccgcaacttgggaacagtactacaaagacttcttaaacaaagccatacctgtaaataacgac

SEQ ID NO: 169749 - DNA, 80 bp, synthetic construct
  source 1..80: mol_type = other DNA
gggggccccgaatcaagcatacatcatagcattaggagcagcccagaaaaatttcaccctcagactgtgtaaagacactg

SEQ ID NO: 169750 - DNA, 80 bp, synthetic construct
  source 1..80: mol_type = other DNA
caagtaatgtacgtgccacccgggggcccaatacccacatcgtatgtagactatagctggcaaacgtcaaccaaccccag

SEQ ID NO: 169751 - DNA, 80 bp, synthetic construct
  source 1..80: mol_type = other DNA
cacgacatagtcacctgtgggcccttcgcctaccgggacgatgagaaaaacgcccagctagtggcgggctataccttcag

SEQ ID NO: 169752 - DNA, 80 bp, synthetic construct
  source 1..80: mol_type = other DNA
gctcggcctcgctcggaacgacgactcagggctgggatccgccgccattgcgtcgtcccagcagggcgcgccggcgccag

SEQ ID NO: 169753 - DNA, 80 bp, synthetic construct
  source 1..80: mol_type = other DNA
ccttgtggatacactcacaaacccagcactcatgtcaccatctgttgaagcatgtggatattctgataggctcaagcaaa

SEQ ID NO: 169754 - DNA, 80 bp, synthetic construct
  source 1..80: mol_type = other DNA
caatcactgaaaaattgttgaaaaccctgataaaaattatttcaacgttggtgatcatcagtagaaactatgaagacacc

SEQ ID NO: 169755 - DNA, 80 bp, synthetic construct
  source 1..80: mol_type = other DNA
tgggcacgacgcggtgaacgtggcgcgtggatgccggccgagacatttacgtgtcccaaggataaacgtccctggtagac

SEQ ID NO: 169756 - DNA, 80 bp, synthetic construct
  source 1..80: mol_type = other DNA
ttaggagaaacattaggcaagtccaaaccgatcaggggcactttacaatgttaggagtgcgagaccacttggctgtgctc

SEQ ID NO: 169757 - DNA, 80 bp, synthetic construct
  source 1..80: mol_type = other DNA
tacgtaccaacaactccagtaccattataacaccctacatcaattgccagccgatggacaacatgctaaagcataataat

SEQ ID NO: 169758 - DNA, 80 bp, synthetic construct
  source 1..80: mol_type = other DNA
ccaggtgtttctcttccagcccgagggtcctcggcccatcctcggccgcgaggcctggaaggacgagttcgagacctgta

SEQ ID NO: 169759 - DNA, 80 bp, synthetic construct
  source 1..80: mol_type = other DNA
tagccactctgggaggctctggccaagcccggggttgtcattctcatagcacatacagatgggcagggagatgtcctgca

SEQ ID NO: 169760 - DNA, 80 bp, synthetic construct
  source 1..80: mol_type = other DNA
aaggcctgggtctctcgagggggttctggggagacactcaactcgccactgctggaggagttcgtcgggctcaactccgc

SEQ ID NO: 169761 - DNA, 80 bp, synthetic construct
  source 1..80: mol_type = other DNA
attgaaggtgctcaaaccgctactcacgcgtccaccgcgactgggcacggcggaaccgctgtcacgcgtcaacgacagca

SEQ ID NO: 169762 - DNA, 80 bp, synthetic construct
  source 1..80: mol_type = other DNA
atcagaaagcaggaaacgtcaactttgagccaacaggcgtgacggagtcccgtactgaaattacggcaatgcaaaccacc

SEQ ID NO: 169763 - DNA, 80 bp, synthetic construct
  source 1..80: mol_type = other DNA
atacacataccaggtcaaataactaatgttttgcatatggctatggtacactcttttatacccctgaataatataagtac

SEQ ID NO: 169764 - DNA, 80 bp, synthetic construct
  source 1..80: mol_type = other DNA
cgcgccgtgccgtcgtaagctcatcggcgggatggagtttgccgaggtgacgggcgtgagtctggaccgcatcgccgtca

SEQ ID NO: 169765 - DNA, 80 bp, synthetic construct
  source 1..80: mol_type = other DNA
aaaacaatgtcgtggcgaccgccgttgcattctatccaaggcagagaagatcaatggtatgcaggcatctttcatacgca

SEQ ID NO: 169766 - DNA, 80 bp, synthetic construct
  source 1..80: mol_type = other DNA
ccggacacctcagaccccccctccacccgaaacgcttgcgcgtttcggaccttcggcgtcggggtggtgtacagtgccga

SEQ ID NO: 169767 - DNA, 80 bp, synthetic construct
  source 1..80: mol_type = other DNA
ccctctcaccactcctggcatgctcatgaagagcaaatataaagcggtgcacttccgaatggctgagttttccacgcccg

SEQ ID NO: 169768 - DNA, 80 bp, synthetic construct
  source 1..80: mol_type = other DNA
aactagaactgagtttgtaaataataaaagcacaaactataattggtatacatacaaagccagcacattaaaacagaaat

SEQ ID NO: 169769 - DNA, 80 bp, synthetic construct
  source 1..80: mol_type = other DNA
gccagagaccgcgagcacctccccgctgccctcttcgatgatgcgccggtacgcggccgccagggcccgggtctctgcga

SEQ ID NO: 169770 - DNA, 80 bp, synthetic construct
  source 1..80: mol_type = other DNA
gaactttgctggtggtcatgataccagaacatcaattggcaagtgcacacactggcaacgtaacggctggttataatttc

SEQ ID NO: 169771 - DNA, 80 bp, synthetic construct
  source 1..80: mol_type = other DNA
tggacatgtacagggttcctgtcaccaccagtgcagacacaagtgatcctatactatgcttaagcttgtcaccagcctct

SEQ ID NO: 169772 - DNA, 80 bp, synthetic construct
  source 1..80: mol_type = other DNA
tcgaccaacttgagaatagaagaatttgttgtgaagtcctgtctcttatcgtcaatgataagaaggattcaggagccccg

SEQ ID NO: 169773 - DNA, 80 bp, synthetic construct
  source 1..80: mol_type = other DNA
ccattttcgcatgtttaacagcgatgcaaagtctataaatgcaaatgtggggtatgtgacctgttttatgcagacaaatc

SEQ ID NO: 169774 - DNA, 80 bp, synthetic construct
  source 1..80: mol_type = other DNA
tcaacacagcaaaatgggggcgcaggtgtcaacacaaaaaaccggggcccacgagactggcttgagtgctagtggcggtt

SEQ ID NO: 169775 - DNA, 80 bp, synthetic construct
  source 1..80: mol_type = other DNA
gtgggtgatgttgtatcatatggtaatattttgcttagtgggaatcagactgctagaatgcttaaatataactatccaac

SEQ ID NO: 169776 - DNA, 80 bp, synthetic construct
  source 1..80: mol_type = other DNA
gtgagtttaatggattgagaaatatcaccctaccccggttacaggggctacctgtaatgaacactcctggtagcaaccaa

SEQ ID NO: 169777 - DNA, 80 bp, synthetic construct
  source 1..80: mol_type = other DNA
tgcgttgggaaaaatgacaaggaggaagcccacggggtttatgtttctggatacttgtcgcaataaacgcacttgcctat

SEQ ID NO: 169778 - DNA, 80 bp, synthetic construct
  source 1..80: mol_type = other DNA
acatattaaagcttggtgtcctcgagccccacgtgcagtagattatactcacaaaaacagtcctaattaccacacaccag

SEQ ID NO: 169779 - DNA, 80 bp, synthetic construct
  source 1..80: mol_type = other DNA
tgcacccagcacaggcctctccatgggatgacgtccacggagagacccttatctggcagtttgactccctcctggcatat

SEQ ID NO: 169780 - DNA, 80 bp, synthetic construct
  source 1..80: mol_type = other DNA
gtaaggttaaaggtcaccatctacctcacctactaaaatggtggtcaacatcttccgggtcaaaggtcacacatacgtca

SEQ ID NO: 169781 - DNA, 80 bp, synthetic construct
  source 1..80: mol_type = other DNA
ttacaaaggcataggcattaatgcactcacaaagcatactgaaattcaaacaaaattattccaacaaggcaactactacc

SEQ ID NO: 169782 - DNA, 80 bp, synthetic construct
  source 1..80: mol_type = other DNA
attgtggcatatggagatgatgtgattgcatcttacccagaagagcttgacccagctgagatttctaaatctggtgttaa

SEQ ID NO: 169783 - DNA, 80 bp, synthetic construct
  source 1..80: mol_type = other DNA
ccttactaagggtgaagcagcacataaatttgaaccaaccaaaaccacaggtgagcatacagtgcaatcgatagtatgca

SEQ ID NO: 169784 - DNA, 80 bp, synthetic construct
  source 1..80: mol_type = other DNA
gattacccagattgtagtttagctctttctgcaaatcaacctgagaccacaataatcaatgttggtgatgtggtttcata

SEQ ID NO: 169785 - DNA, 80 bp, synthetic construct
  source 1..80: mol_type = other DNA
ccgttatgtgggaccgcgacctgatggttgtagaaagtagggcccaaggaattgacaccatagctaggtgctcttgtagg

SEQ ID NO: 169786 - DNA, 80 bp, synthetic construct
  source 1..80: mol_type = other DNA
ttaaaccactataataacaatttgtttaacaaaattgaactatataatacttttcaaacaatagctcagcttaaagaaac

SEQ ID NO: 169787 - DNA, 80 bp, synthetic construct
  source 1..80: mol_type = other DNA
gaaaactttggactggggcgacttcccggtggcaatcctaatccccctaccagaatgagactgcactggtaccccatgat

SEQ ID NO: 169788 - DNA, 80 bp, synthetic construct
  source 1..80: mol_type = other DNA
ggacggcggccagacgcggaaaaagaggaagtacccgcgtcgcgaggacccgcggagaagacgaagcgcgcgccgccgcg

SEQ ID NO: 169789 - DNA, 80 bp, synthetic construct
  source 1..80: mol_type = other DNA
aagaaggccatgtcccccgtggacgggtctctttgacacgagcgcggcacgccgttgccacgagcatggatcacgcgctc

SEQ ID NO: 169790 - DNA, 80 bp, synthetic construct
  source 1..80: mol_type = other DNA
acaacgttagggcagtaaggaatgtaggacccagtgatatgtatgtccatgtaggaaacctaatatatagaaatctccac

SEQ ID NO: 169791 - DNA, 80 bp, synthetic construct
  source 1..80: mol_type = other DNA
caatgttgggcacacacataatttgggacattggacttcagtcgagctgtgtcttgtgtgtaccgtggataagccaaacg

SEQ ID NO: 169792 - DNA, 80 bp, synthetic construct
  source 1..80: mol_type = other DNA
catttgcagatgatggcacatggagagtgaacttggattttcctacgcaaggtcatgggactttaactagacttttcacc

SEQ ID NO: 169793 - DNA, 80 bp, synthetic construct
  source 1..80: mol_type = other DNA
tgatggacaaattaagcaactccaaacacatttacaaaaatgccttctacacaactgaaggaggtatgccttctgggatt

SEQ ID NO: 169794 - DNA, 80 bp, synthetic construct
  source 1..80: mol_type = other DNA
tgataagcaaaggaccgtacgggggaggcatgactaccacgtgactcccgcaggccaaccacagtctacgtcgtccactt

SEQ ID NO: 169795 - DNA, 80 bp, synthetic construct
  source 1..80: mol_type = other DNA
acggctccccttacccatccgggcatgctaatgagatcaaaatttaaagtattaattcctagctttgctactaggcccaa

SEQ ID NO: 169796 - DNA, 80 bp, synthetic construct
  source 1..80: mol_type = other DNA
taatcgtaaaacccaggaacggcaccgacaactatactatcccagtatgccccaaatcatcgaattcagaaaatgacgat

SEQ ID NO: 169797 - DNA, 80 bp, synthetic construct
  source 1..80: mol_type = other DNA
ccctaccatatacatgcagcaagcagtgttagaagacattagcagatcagggcccttttcaatgaaagaaaacataccca

SEQ ID NO: 169798 - DNA, 80 bp, synthetic construct
  source 1..80: mol_type = other DNA
ttcttagcaaatcagacaccaggttagaggagcctgtggagtgtctcattaagaaatcagcttccaagtacagggtcaat

SEQ ID NO: 169799 - DNA, 80 bp, synthetic construct
  source 1..80: mol_type = other DNA
gaagcaccccatacttagaatatcacggaggcctctacagctccatatggttatcagcaggccgctcctactttgaaaca

SEQ ID NO: 169800 - DNA, 80 bp, synthetic construct
  source 1..80: mol_type = other DNA
aatggtacaccactcctagagggcatggacatgaagcaatcccctggctacccatggtcggctaaggggaggaccagacg

SEQ ID NO: 169801 - DNA, 80 bp, synthetic construct
  source 1..80: mol_type = other DNA
catgcctttatggacaatactatttggatacacagactggtgcaaaaaagacctaaaccactgggacatgccaaacaact

SEQ ID NO: 169802 - DNA, 80 bp, synthetic construct
  source 1..80: mol_type = other DNA
ttgtcccattggattacaacaattcagcgtccaatgtaccaataaccgtcacaatagcacccatgtttgcggagtacaat

SEQ ID NO: 169803 - DNA, 80 bp, synthetic construct
  source 1..80: mol_type = other DNA
cagagggcatagatgctaggggttatttcaagtgggcagccagcaaagctcctcaacaagtcatacataggaacttgata

SEQ ID NO: 169804 - DNA, 80 bp, synthetic construct
  source 1..80: mol_type = other DNA
taaaagtaaactgcaccccagtgtgttttacaatgtatttgaaggaaataaacaaccagctgtactaagagatagtgatc

SEQ ID NO: 169805 - DNA, 80 bp, synthetic construct
  source 1..80: mol_type = other DNA
ttaatctctcgatagaacatgagaggcagccgtcccgtcttatgcttgatcaaccccgtctgaccgtcgaacatgacgcc

SEQ ID NO: 169806 - DNA, 80 bp, synthetic construct
  source 1..80: mol_type = other DNA
catgattgatagcacaataagggaaactatgagtgcagcgacttccagggatgcccttccaaacactgaatctagcggac

SEQ ID NO: 169807 - DNA, 80 bp, synthetic construct
  source 1..80: mol_type = other DNA
tggaaaatactaaacaaaacaaatgacataacttcagactatggcaagccacagggcgacgaagcaaagtactttaatta

SEQ ID NO: 169808 - DNA, 80 bp, synthetic construct
  source 1..80: mol_type = other DNA
cctcgcgtcacggtgctttccgagtggactcgtgagccccccgtagcgcacgagcgagcaggcgagcggtgttggtgcgc

SEQ ID NO: 169809 - DNA, 80 bp, synthetic construct
  source 1..80: mol_type = other DNA
gcgcaggtttcatcacagaaggttggtgcacatgaaaactcgaatagagcatatggtgggtctactattaactacaccac

SEQ ID NO: 169810 - DNA, 80 bp, synthetic construct
  source 1..80: mol_type = other DNA
cagcaggcggaacttgaggcatttgcaatggccttgcaggactcaggtccaaaagtcaatatcatagtggattcccagta

SEQ ID NO: 169811 - DNA, 80 bp, synthetic construct
  source 1..80: mol_type = other DNA
aatggtacccacaaactgaattctgtgaagtaacactactaacgatacatgccacagcatgtgacctgcggtttccgttc

SEQ ID NO: 169812 - DNA, 80 bp, synthetic construct
  source 1..80: mol_type = other DNA
ctgacaaaaatgataccactcccacagttgcggatacgagccccactggaccagcaaactcaatgcaaatacctgcactc

SEQ ID NO: 169813 - DNA, 80 bp, synthetic construct
  source 1..80: mol_type = other DNA
ctcgaagctgcccaaggcgccacaataaactacaccaacataaactattacaaagatgcagcctccaattcagctaatag

SEQ ID NO: 169814 - DNA, 80 bp, synthetic construct
  source 1..80: mol_type = other DNA
gggaggttccagcgaccacgaacctgaactacggacagtgccctaacaacaagatgggcactttctgcattcgcatggta

SEQ ID NO: 169815 - DNA, 80 bp, synthetic construct
  source 1..80: mol_type = other DNA
ctttggcatgggcaaaactcccgagggctactctcaagtacccaggttctgggcccagagatggagagtatactttaaaa

SEQ ID NO: 169816 - DNA, 80 bp, synthetic construct
  source 1..80: mol_type = other DNA
gttggcctggcattcaggagaagaggaatacaaaaacttcacagagaaaataagatcaaccagtatcggcaagtgtctat

SEQ ID NO: 169817 - DNA, 80 bp, synthetic construct
  source 1..80: mol_type = other DNA
accttggattccattattaaaccccaatattaagcacgttattagtaccccccccccccaccaaggaatgtgactggacc

SEQ ID NO: 169818 - DNA, 80 bp, synthetic construct
  source 1..80: mol_type = other DNA
caacgtcacccctcgttccccgctgcaaaagccacccgcgtgcgcagcgcgaaagcaccgccgtccctcagtgcggtccc

SEQ ID NO: 169819 - DNA, 80 bp, synthetic construct
  source 1..80: mol_type = other DNA
ggacatttgcgacattacactgtttaacctcaatgccgttgcggctgacttgcggtttccgttcggctcaccacaaactg

SEQ ID NO: 169820 - DNA, 80 bp, synthetic construct
  source 1..80: mol_type = other DNA
tgcccccctgcacccagtacctgcccctcttggccacgcaccccgggccaggccaccttagacccggccaagccccatcc

SEQ ID NO: 169821 - DNA, 80 bp, synthetic construct
  source 1..80: mol_type = other DNA
caaatgggactggcgacggggcttctttaataaaaaagctctcaaaagaatgcttgaaaaatcagatgatgctaaccaat

SEQ ID NO: 169822 - DNA, 80 bp, synthetic construct
  source 1..80: mol_type = other DNA
gaaagctcaatttcagaggaagaaaagtcgctattatcaagcgaagaagtcccgaaagagaaagtacagcgacagctcaa

SEQ ID NO: 169823 - DNA, 80 bp, synthetic construct
  source 1..80: mol_type = other DNA
acacacccaggtgagaatggaagaaatgttgggcaattaagaacagaatatttagataaacagccaagtgatgacaattg

SEQ ID NO: 169824 - DNA, 80 bp, synthetic construct
  source 1..80: mol_type = other DNA
ccttgcagctgtcacaaccaccacgaccagctctccccccagccgaacaatcggtgccaaacaccaaccagagtacccca

SEQ ID NO: 169825 - DNA, 80 bp, synthetic construct
  source 1..80: mol_type = other DNA
ggacagcattacctatataccagataccgtcaagcctgacgtgacaaaccacggagtatttggacagcaatccggggcta

SEQ ID NO: 169826 - DNA, 80 bp, synthetic construct
  source 1..80: mol_type = other DNA
ccagggtgtgatttctgactacttcacacaactgggaaatgcttttggggaaggattcactacaaatatccaaaatcact

SEQ ID NO: 169827 - DNA, 80 bp, synthetic construct
  source 1..80: mol_type = other DNA
cattatgcacattagagccgctaaagcatatagtaaatctggaaagctgaatgttagtcaagctatgtcgactatggcta

SEQ ID NO: 169828 - DNA, 80 bp, synthetic construct
  source 1..80: mol_type = other DNA
tgactcaacttcttcggagccgcgcgctacgccttcggctgcgcgcggcacctcagacccccgctcgtgctgacagtgtc

SEQ ID NO: 169829 - DNA, 80 bp, synthetic construct
  source 1..80: mol_type = other DNA
aaacagtgtggaagggaacactgacaacacaagtatatacactgttacattaaccagggaaaccagtttggcacaagaga

SEQ ID NO: 169830 - DNA, 80 bp, synthetic construct
  source 1..80: mol_type = other DNA
atagctttacccacccaggcgagcgtggtattgaccttgacactccagagaaaaatggtggaccaatgaaagaccctgtt

SEQ ID NO: 169831 - DNA, 80 bp, synthetic construct
  source 1..80: mol_type = other DNA
atatgggaccttggattgcaatcttcgtgcactctcgttgccccatggatgtccagtacattctatcgcagaacaaaaga

SEQ ID NO: 169832 - DNA, 80 bp, synthetic construct
  source 1..80: mol_type = other DNA
aacacagtgacgctcttcacagtgggacctggggccgtagaagagggcccacatccaagggagtgggtcttcaggcacca

SEQ ID NO: 169833 - DNA, 80 bp, synthetic construct
  source 1..80: mol_type = other DNA
agagtcgtggctgtggcgcagcgcgttctgtacggcgcgtttcaccgctttctgcatggccgctaccacgtcgggcgtga

SEQ ID NO: 169834 - DNA, 80 bp, synthetic construct
  source 1..80: mol_type = other DNA
caagacttatatgactcaatgctaaaaggcaaccaattttacacaaaagcaggcaaaaaccttataacaacatttactcc

SEQ ID NO: 169835 - DNA, 80 bp, synthetic construct
  source 1..80: mol_type = other DNA
cgcctacgatggagaagacctcgacgccctgttcgccgccgtcgccgaagacgcagagtaaggagacggaggtgggggaa

SEQ ID NO: 169836 - DNA, 80 bp, synthetic construct
  source 1..80: mol_type = other DNA
atcttggaccatctgatatctatgtacatactggaaaccttatatacaggaacttgcatttgtgtgaaccagaaaacttg

SEQ ID NO: 169837 - DNA, 80 bp, synthetic construct
  source 1..80: mol_type = other DNA
gactcatatgctccgccgtgacatccacgcacggactctcgccacacgaggtcaggcccatgtctaagttcaggttccac

SEQ ID NO: 169838 - DNA, 80 bp, synthetic construct
  source 1..80: mol_type = other DNA
ggtgaggaggtgtatgaggactttcgctcaaaaatcaggtcaacacctattgggcgatctttgtatacacccccttactc

SEQ ID NO: 169839 - DNA, 80 bp, synthetic construct
  source 1..80: mol_type = other DNA
tgctcggcctccgccgccttccccaccggcgctgccccggatgttgctggggttctcgagggctgggtggtgcttggaca

SEQ ID NO: 169840 - DNA, 80 bp, synthetic construct
  source 1..80: mol_type = other DNA
ctactacccctggatgccccctcctaaaccaaagttctctgtaaccttcaaactgggcttcaaataaacaaggccgtggg

SEQ ID NO: 169841 - DNA, 80 bp, synthetic construct
  source 1..80: mol_type = other DNA
gctttggctacggtggtgtgtggggagatgcagacggtggtgtgcgaagtgttgaccaccgtcacgccggccgcggtacc

SEQ ID NO: 169842 - DNA, 80 bp, synthetic construct
  source 1..80: mol_type = other DNA
ggcggtggcgcaggcggtatagaaaatggaggcgacgcaagggcaaacggacgcacagaaaaaaaataattataaaacag

SEQ ID NO: 169843 - DNA, 80 bp, synthetic construct
  source 1..80: mol_type = other DNA
gctggctggtgttcacgttgctggggttgctggattttccgggatggcggctcgtctcactcgcaagcgggttgacgaag

SEQ ID NO: 169844 - DNA, 80 bp, synthetic construct
  source 1..80: mol_type = other DNA
ttaactgggggggcgacatgatgtttccacaggttatcaaaaacccctgccccgacagtggactggctcccagttccggt

SEQ ID NO: 169845 - DNA, 80 bp, synthetic construct
  source 1..80: mol_type = other DNA
tcttatggttacatcattggtgtaatcatgggtgcacaggtcagcaaacagaatgttggatcacatgaaaactctgtatc

SEQ ID NO: 169846 - DNA, 80 bp, synthetic construct
  source 1..80: mol_type = other DNA
gtgactcaacactcatatgttactcatcagatttagtcatataccgtacaaacgccagaggtaatgactacattccaaca

SEQ ID NO: 169847 - DNA, 80 bp, synthetic construct
  source 1..80: mol_type = other DNA
aacacaggaaggagccaacgtggtggtagcgtatggtgagtggcctaactatttagaggatgaccaagctaccgcagagg

SEQ ID NO: 169848 - DNA, 80 bp, synthetic construct
  source 1..80: mol_type = other DNA
ggttttctgatagggtccggtctatcacacttggtaattctactatcacaacccaagagtgcgcaaatgtagtcgtgggt

SEQ ID NO: 169849 - DNA, 80 bp, synthetic construct
  source 1..80: mol_type = other DNA
accgtgccgtagtgcgcgtagccgacacaatgccaagcggccccagcaattcagaaagcatcccagcgcttactgctgct

SEQ ID NO: 169850 - DNA, 80 bp, synthetic construct
  source 1..80: mol_type = other DNA
cactagtagtacactcaaatagtttcattaacaccatattggaagttggacctgtaacaatggcaggacttattaatcta

SEQ ID NO: 169851 - DNA, 80 bp, synthetic construct
  source 1..80: mol_type = other DNA
cagataatatccaagcagaaattaaaagatctcaacttgtcaccagttaacactccaaccaagacaaagctgcacccgag

SEQ ID NO: 169852 - DNA, 80 bp, synthetic construct
  source 1..80: mol_type = other DNA
attaaacccaaacacatatccacatggtgcccacgaccaccacgagccacacaatatgttcataagtacagcccaaacta

SEQ ID NO: 169853 - DNA, 80 bp, synthetic construct
  source 1..80: mol_type = other DNA
cgcgcactcccggctctgccagcggcaccctccacccccactactagccaaccatggcgtggtggggcagatggagaagg

SEQ ID NO: 169854 - DNA, 80 bp, synthetic construct
  source 1..80: mol_type = other DNA
cactgaagggcagagttcacggcgggcacctcccagagggagcccaccagcccgtacctggccacggccagggcctcgta

SEQ ID NO: 169855 - DNA, 80 bp, synthetic construct
  source 1..80: mol_type = other DNA
aacttgagataacagtagttaaattagacaggaatgaaaaatttagagacatacgaaaatacatcccagagaaggaagat

SEQ ID NO: 169856 - DNA, 80 bp, synthetic construct
  source 1..80: mol_type = other DNA
atagtgacctgcggaccgtggcagtacagagacgataacaaaaacgctcagctagtggccaagtactactttcggttcaa

SEQ ID NO: 169857 - DNA, 80 bp, synthetic construct
  source 1..80: mol_type = other DNA
ttgcggcgtggacggtggtgaggacggggacaggggcatttcgcggcgaggacgaggagttgcgggatggcgagctgttg

SEQ ID NO: 169858 - DNA, 80 bp, synthetic construct
  source 1..80: mol_type = other DNA
cagagagaaatactggacaacattaacagccacaaatgacctacacagccactatggcaaggcacaatctcaggaatttg

SEQ ID NO: 169859 - DNA, 80 bp, synthetic construct
  source 1..80: mol_type = other DNA
cttacaccacatacaaaaatgcaaacccgggcgaggctggaggtgagtttgttgacaaattcacggctgcaactgaagct

SEQ ID NO: 169860 - DNA, 80 bp, synthetic construct
  source 1..80: mol_type = other DNA
gatttctcagtgaggctattaaaggataccccatttatagagcaaaatgcagccctacagaatgatccagagcaagctat

SEQ ID NO: 169861 - DNA, 80 bp, synthetic construct
  source 1..80: mol_type = other DNA
tcccgagcccgaattgccccttgactgcggtgtgtaaactcacctccgcgcgtcccgagggcgggtgccggaggtgagtt

SEQ ID NO: 169862 - DNA, 80 bp, synthetic construct
  source 1..80: mol_type = other DNA
agaaaatgcttaataaggggcataatccctctggtactgtgcgggcacgagacttggaacagaaactatgccatgcgcag

SEQ ID NO: 169863 - DNA, 80 bp, synthetic construct
  source 1..80: mol_type = other DNA
acttcaccatccctaattcactttccgacctcatcaaggtaccaaatttccgccacatagcttcgagtggcttctgtaaa

SEQ ID NO: 169864 - DNA, 80 bp, synthetic construct
  source 1..80: mol_type = other DNA
gacaccctgtctcaaatctcagagggtcagggttcaacagaacctgtaaacaacgaggttccattcatcgatttgaccac

SEQ ID NO: 169865 - DNA, 80 bp, synthetic construct
  source 1..80: mol_type = other DNA
aaggcaacatggtgtggatagactgggtatctaagtctgactcagtatactcaaaaacacagagcaaatgcctaatagag

SEQ ID NO: 169866 - DNA, 80 bp, synthetic construct
  source 1..80: mol_type = other DNA
tacacactccccactggcgacagtggtgtagcctgcgtggcgccctacctgggtctcctgacccaggattccacttacaa

SEQ ID NO: 169867 - DNA, 80 bp, synthetic construct
  source 1..80: mol_type = other DNA
attcacggaacacctggtactggtaagtccatagcaacagggcttataggtagagcaattgctaagcaagcaaacactag

SEQ ID NO: 169868 - DNA, 80 bp, synthetic construct
  source 1..80: mol_type = other DNA
gatgcagttgctggggcgacgcagcaagtcccaataacagtaacaatagcaccaatgtgttgtgagttcaatggtcttag

SEQ ID NO: 169869 - DNA, 80 bp, synthetic construct
  source 1..80: mol_type = other DNA
acggaaagaaaaggtacatgctgaaacatgttgtgtgggcagcgaacgaattggatagatttggattagcagagagcctg

SEQ ID NO: 169870 - DNA, 80 bp, synthetic construct
  source 1..80: mol_type = other DNA
gctcgtggacgtggtcaaaagacaacaagaactgttgcggctgaccgtctgggggacgaaaaacctccaggcaagagtca

SEQ ID NO: 169871 - DNA, 80 bp, synthetic construct
  source 1..80: mol_type = other DNA
ccgccaatcagagtctatgtcgtgcacttcctgggcatggtctacattctaatataaagcggtgtacttccgaatggctg

SEQ ID NO: 169872 - DNA, 80 bp, synthetic construct
  source 1..80: mol_type = other DNA
cctggtaccagaccagcattgttgtaccaccagaaacacccacagaatgtactatactgtgttttgtgtctgcctgcaat

SEQ ID NO: 169873 - DNA, 80 bp, synthetic construct
  source 1..80: mol_type = other DNA
cagtctcaccttaccccccagtttgtcagaatgcccaccaaaaacccagacaatactgcaaacaacaaagctacagaatt

SEQ ID NO: 169874 - DNA, 80 bp, synthetic construct
  source 1..80: mol_type = other DNA
cgggcacgcgcagcggcctccgcaccacggtggggaagtaacactcacggttgggctggcacaatgaccacaccgtctcc

SEQ ID NO: 169875 - DNA, 80 bp, synthetic construct
  source 1..80: mol_type = other DNA
agcacaaattatcatgttaagaaaccaggtgatgacactggtttgctgatacagaagcactttattaaacccaggggtga

SEQ ID NO: 169876 - DNA, 80 bp, synthetic construct
  source 1..80: mol_type = other DNA
caaaagaagcaggacagaacagaattaattagtaaaatagttcaaaatgccaaaaatgtgttaagaaaagtaaaccaaga

SEQ ID NO: 169877 - DNA, 80 bp, synthetic construct
  source 1..80: mol_type = other DNA
aaaactcacaggacatgtttggggagttagcattggcgtcgggaaacacagctctggcagttataaccgcaccagctaac

SEQ ID NO: 169878 - DNA, 80 bp, synthetic construct
  source 1..80: mol_type = other DNA
atattatggtctacgattggccagcaagcaagggttgccggtgctatgtacaccggggagtaaccaattcctgacatcag

SEQ ID NO: 169879 - DNA, 80 bp, synthetic construct
  source 1..80: mol_type = other DNA
ggcgccaagtatttcaatagccacttggtgaatgtgaacgataaaactctgttacacgccctcacagcagatcttcaagt

SEQ ID NO: 169880 - DNA, 80 bp, synthetic construct
  source 1..80: mol_type = other DNA
cctttgggcaccccacggggtgctccccctggacacttatgtttcaagcagctcacctatggtcactcaggcacggtcgc

SEQ ID NO: 169881 - DNA, 80 bp, synthetic construct
  source 1..80: mol_type = other DNA
tatggttccagtacaccaacaaagcagacacacagtttgtatctggggcctgcaaatgtgttctagaaggcataccccta

SEQ ID NO: 169882 - DNA, 80 bp, synthetic construct
  source 1..80: mol_type = other DNA
gaaatgttaaggatcttgggtacccaaccatacacactccaaataaaaccaaattacaccctagtgtttttcatgatgta

SEQ ID NO: 169883 - DNA, 80 bp, synthetic construct
  source 1..80: mol_type = other DNA
aatacaatggactgcgtttagctggccatcaaggactaccagtaatgtgtacccctggtagtaaccagttcttaacatct

SEQ ID NO: 169884 - DNA, 80 bp, synthetic construct
  source 1..80: mol_type = other DNA
ggccaacattggtaactgcatggaagcgctgtttcagggaccagtacaatataaagatttaaagatagatatcaaaacca

SEQ ID NO: 169885 - DNA, 80 bp, synthetic construct
  source 1..80: mol_type = other DNA
agcaacagaatacactcacaaagatagcactaattacaacagaagagtgtaccccgattctgctgatagcacactcacca

SEQ ID NO: 169886 - DNA, 80 bp, synthetic construct
  source 1..80: mol_type = other DNA
actgtatgcttcaatggagaaacacctcctagtatttgattatacaaattatgatgggagtctgcatccagtatggtttc

SEQ ID NO: 169887 - DNA, 80 bp, synthetic construct
  source 1..80: mol_type = other DNA
actgtaccaggactttctgagacacatgaacttctttacatacagcaaccaggacctagagctagccagatactttgggg

SEQ ID NO: 169888 - DNA, 80 bp, synthetic construct
  source 1..80: mol_type = other DNA
aactcagatgacttggtgacagttactgccacactagcgctacttggttgtcatgactctccatgggccttcttaaaaca

SEQ ID NO: 169889 - DNA, 80 bp, synthetic construct
  source 1..80: mol_type = other DNA
tcgcaggtagtccccagtgacactatgcaaacaagacacgtcaataactttcacaccagatctgagtcatccatagagaa

SEQ ID NO: 169890 - DNA, 80 bp, synthetic construct
  source 1..80: mol_type = other DNA
tgatttttgataacactccacacacttaccatttgagaattgtactgttggcaagacagcaccattataatgggagccca

SEQ ID NO: 169891 - DNA, 80 bp, synthetic construct
  source 1..80: mol_type = other DNA
gcctacggaccagactggatggcaaggccttccacatggtccgcggaaatccagcaattcctgcgactcctgggcgccac

SEQ ID NO: 169892 - DNA, 80 bp, synthetic construct
  source 1..80: mol_type = other DNA
tgcaagtactaaatgacattagcaacagtggaccctacgcatacagagacgaacaccagagcacccaactgaccatggcc

SEQ ID NO: 169893 - DNA, 80 bp, synthetic construct
  source 1..80: mol_type = other DNA
gcagttcctcgttgcgctcgacgaacttctggtagacggccaggtgaggcatctgggtgctcttgtaggctgagagcttg

SEQ ID NO: 169894 - DNA, 80 bp, synthetic construct
  source 1..80: mol_type = other DNA
aatacatgtttgttccacccggggcccccaaaccagactccagagactctttggcttggcaaacggccacgaacccctca

SEQ ID NO: 169895 - DNA, 80 bp, synthetic construct
  source 1..80: mol_type = other DNA
ttccgcttttttgaaaaaaggcgccaaaaaacggctgcggcggtggcgcgcgcgctacgcgcgcgcgccccggtgtgcgg

SEQ ID NO: 169896 - DNA, 80 bp, synthetic construct
  source 1..80: mol_type = other DNA
cgttgcgtttgtctaaccattttgagaagaggtgatcgggcgataaacatactccatgtccaggcggcttccttccgtct

SEQ ID NO: 169897 - DNA, 80 bp, synthetic construct
  source 1..80: mol_type = other DNA
cccccccactcaagatgcgttccatagagaccaggactggttccgagccgtttactgcagccataagtgcttttgtgggt

SEQ ID NO: 169898 - DNA, 80 bp, synthetic construct
  source 1..80: mol_type = other DNA
acaatgaatactactcacctaaagatgcacagtggggagaccctattcacattatctcaagttcagagactacaagcaac

SEQ ID NO: 169899 - DNA, 80 bp, synthetic construct
  source 1..80: mol_type = other DNA
tggccgagcccgggtctgggaggtctggcgtggcgagcctgctgtctcaggagtggcctggctccgccgggtgtccctgg

SEQ ID NO: 169900 - DNA, 80 bp, synthetic construct
  source 1..80: mol_type = other DNA
tgtgtacatataactgagatacaaaacaagaggccagaagagattccttcagaaggaaaggctagaactcataaggaaca

SEQ ID NO: 169901 - DNA, 80 bp, synthetic construct
  source 1..80: mol_type = other DNA
gcgccaacgtggaccgcccagggtatgacgacctgctggaggccgtgctgaaatgcccaggtagggctagaagatccact

SEQ ID NO: 169902 - DNA, 80 bp, synthetic construct
  source 1..80: mol_type = other DNA
atctcattacatatttgtttgttcatcagttttcacaatgggagctcaagtttctactcagaagtctggctcacatgaga

SEQ ID NO: 169903 - DNA, 80 bp, synthetic construct
  source 1..80: mol_type = other DNA
tcttggtcggcgaactgcgagtagttaccgaggcgtgcataattcttttggagccaggtgtgggccgtgaggcccggaag

SEQ ID NO: 169904 - DNA, 80 bp, synthetic construct
  source 1..80: mol_type = other DNA
ctcgcgcgattcggacctgcggcctcgggaggttcggggactttactaaacagactccgaggtgccattggacactgagg

SEQ ID NO: 169905 - DNA, 80 bp, synthetic construct
  source 1..80: mol_type = other DNA
gtccatagctgcccctggtgcatgtctctcaggacctcaaaggcggggccagagactcccgagtatagccccctgggctt

SEQ ID NO: 169906 - DNA, 80 bp, synthetic construct
  source 1..80: mol_type = other DNA
cagcagtgtaaatgtgtcttaacaaacatacccctgtgggcggccttcaatggctacccagactttatagaacaagaact

SEQ ID NO: 169907 - DNA, 80 bp, synthetic construct
  source 1..80: mol_type = other DNA
atataaacaaaagtaatgggcagtcgtcaaatgcagcaccagcactggatgccgcagagaccggtcacactagtcaaaca

SEQ ID NO: 169908 - DNA, 80 bp, synthetic construct
  source 1..80: mol_type = other DNA
gtggggacggtggcgatgggccccgcggcgaaggtggagacggcgccgccgccgacggagactaccagccagaagatata

SEQ ID NO: 169909 - DNA, 80 bp, synthetic construct
  source 1..80: mol_type = other DNA
tcttgagctgccttatgtgtgcaagcagggagattcctggttaaagaagttcaccgaggcttgtaacgcagcaaagggat

SEQ ID NO: 169910 - DNA, 80 bp, synthetic construct
  source 1..80: mol_type = other DNA
cagattttaaactcagattgatgaaagatactcaaacaatatcacagactactgcactaacagagggtcttaatgatgaa

SEQ ID NO: 169911 - DNA, 80 bp, synthetic construct
  source 1..80: mol_type = other DNA
gtagtaccccacctgtagaaagcaccacaactccaagcacatccgcatctacaaccacaagtacagaaaaaggctacgag

SEQ ID NO: 169912 - DNA, 80 bp, synthetic construct
  source 1..80: mol_type = other DNA
cctgaaattgactttgtagctcagtatgacaacgtaccccccatgaaaatggacgagaacacggctcctaacactcaccc

SEQ ID NO: 169913 - DNA, 80 bp, synthetic construct
  source 1..80: mol_type = other DNA
accagcccacgcaaccggacgtggctacgtgcaggttttacaccttggactcagtgtcatggcagagcacttcagcaggt

SEQ ID NO: 169914 - DNA, 80 bp, synthetic construct
  source 1..80: mol_type = other DNA
cttccctgctgagcttgatctcctgaaatctatggtggtctgccgggcctacatcacagaacaccggacgacgatgcagt

SEQ ID NO: 169915 - DNA, 80 bp, synthetic construct
  source 1..80: mol_type = other DNA
gagggacaaaaataaatggagaatgttaatagatttcagagaactaaacagagtaactcaggatttcacagaggtgcaat

SEQ ID NO: 169916 - DNA, 80 bp, synthetic construct
  source 1..80: mol_type = other DNA
gcggtcagcgcggcttccttcctgcatccgttctgcccaccagaaagtgacaacatgtgtattacattccaagttttgaa

SEQ ID NO: 169917 - DNA, 80 bp, synthetic construct
  source 1..80: mol_type = other DNA
gtgaaggccacacacaccttagaaaagaacttggagtatacacagtattgtttaaattgcttaggtagcttaatacttat

SEQ ID NO: 169918 - DNA, 80 bp, synthetic construct
  source 1..80: mol_type = other DNA
atttcgccaatgaatcatccccggagattcccattaccctaaccatagctccaatgtgttgtgagttcaacggactgagg

SEQ ID NO: 169919 - DNA, 80 bp, synthetic construct
  source 1..80: mol_type = other DNA
gacaccacccacattgaacaaaaggcactgacacaaggcctgggacaagttcttgagagcatgatagacaacacggtccg

SEQ ID NO: 169920 - DNA, 80 bp, synthetic construct
  source 1..80: mol_type = other DNA
tcaagtgaattcaagaaattagattacagtaatgtgacttttcttaaaagaggattcaaacaagatgataaatattcatt

SEQ ID NO: 169921 - DNA, 80 bp, synthetic construct
  source 1..80: mol_type = other DNA
gtggacattgtagatgccatgaaacagaatgcacaaaacatgtataataaccacaaacaggccagctttcaagagtcaca

SEQ ID NO: 169922 - DNA, 80 bp, synthetic construct
  source 1..80: mol_type = other DNA
aggcacatagagccaaagatgccgcacacagcgcatggattctcattgtcatcatcattatcatagtcgtcattctgttt

SEQ ID NO: 169923 - DNA, 80 bp, synthetic construct
  source 1..80: mol_type = other DNA
ataaattgtgcaaaaccacacatatatacaaagaccaatgttacctggtagagggtggtatgccatctggtatttgtgga

SEQ ID NO: 169924 - DNA, 80 bp, synthetic construct
  source 1..80: mol_type = other DNA
gtctcaatccagtttggttcaaattacttagtaaagtgttaactgacttaggttttccaggtgacttggttaataaactg

SEQ ID NO: 169925 - DNA, 80 bp, synthetic construct
  source 1..80: mol_type = other DNA
gttaaaaggtgctacataatagggtacgaccccataatcgtgtgtggcattaacaggaccgcttttaactacaccacaca

SEQ ID NO: 169926 - DNA, 80 bp, synthetic construct
  source 1..80: mol_type = other DNA
aagggtaactgcactgtcagtgagaaccagtttataaacttagcagtagatcattactcagctcaattgtttatgttaga

SEQ ID NO: 169927 - DNA, 80 bp, synthetic construct
  source 1..80: mol_type = other DNA
ggccgattacgtgctgctgcagcctagcgaggacgtggagctgcgcgagctgcaggcgtttctggacgagaactttaagc

SEQ ID NO: 169928 - DNA, 80 bp, synthetic construct
  source 1..80: mol_type = other DNA
caagtattgtgaagaaaataaatggatgataccagctgattgtaagttagaaagagatttaaactatgccaatttagtta

SEQ ID NO: 169929 - DNA, 80 bp, synthetic construct
  source 1..80: mol_type = other DNA
gatatgtcacatgttggtaccaaactggattgatcgtaccgcctggggcgccaccatcgtgtaccatattgtgctttgcc

SEQ ID NO: 169930 - DNA, 80 bp, synthetic construct
  source 1..80: mol_type = other DNA
gtcgccgcgagcgcggtttgcatcacgatgatggaagccgcggccgctgccgccgcggcgtttcgtccggaggagcgtcc

SEQ ID NO: 169931 - DNA, 80 bp, synthetic construct
  source 1..80: mol_type = other DNA
gcaggaagaagaattaactttacactacaagaataaggtctttccaattgaacaaccatcagttacacaagtgactcttg

SEQ ID NO: 169932 - DNA, 80 bp, synthetic construct
  source 1..80: mol_type = other DNA
atagacttcggcctcgctttcaggccttccggactacaaaaatcgccattttagtgacgtcacggcagccattttaagta

SEQ ID NO: 169933 - DNA, 80 bp, synthetic construct
  source 1..80: mol_type = other DNA
ccaagcacagaagccgatcaaggaagatcgttcgcagctgttgattatctactgggttgtggcgttctcgctggcaacgc

SEQ ID NO: 169934 - DNA, 80 bp, synthetic construct
  source 1..80: mol_type = other DNA
ctagacagtgtgttcaaacacacattgttaggggaaatattgaattattacgcccactggtcaggtagcgtcaaactgac

SEQ ID NO: 169935 - DNA, 80 bp, synthetic construct
  source 1..80: mol_type = other DNA
gatcagaacaatttttaactacagatgacaatcagtctccttcagcactaccgtggtttcatccctccaaggaaatattc

SEQ ID NO: 169936 - DNA, 80 bp, synthetic construct
  source 1..80: mol_type = other DNA
gattaactttgtgaaaccaggagtaggctcagacccagaggtgacatacatgtggactaactgcagaggagaatttttct

SEQ ID NO: 169937 - DNA, 80 bp, synthetic construct
  source 1..80: mol_type = other DNA
gggcgggggttgcgccggggacgagaagtgtgcggggacgaccacgggggccttttgcggcggggacaggggtggtgtgc

SEQ ID NO: 169938 - DNA, 80 bp, synthetic construct
  source 1..80: mol_type = other DNA
ctgatgacaatggcccacaggaccctgacaacactgatgacaatggcccacatgacccgctgcctcataaccctagcgac

SEQ ID NO: 169939 - DNA, 80 bp, synthetic construct
  source 1..80: mol_type = other DNA
tgaatcagtaacgaaagtgagtggggccagactccgccgtagggcctttaacttccgggtgcgtatgggtgccgccattt

SEQ ID NO: 169940 - DNA, 80 bp, synthetic construct
  source 1..80: mol_type = other DNA
ggctccaatgcacttgaaagcaaagacacttggtacaagggcaacacatacaataacaccattaaagacctagcacaaaa

SEQ ID NO: 169941 - DNA, 80 bp, synthetic construct
  source 1..80: mol_type = other DNA
tggattcgctccattgactcaactcacgcctagtttgatatccatagtgttattgattagaaaaagcctaacataatggg

SEQ ID NO: 169942 - DNA, 80 bp, synthetic construct
  source 1..80: mol_type = other DNA
aatttgaactgtttacatatctaagatttgatatggaggtcacatttgttattaccagctcacaagatgatggcacacag

SEQ ID NO: 169943 - DNA, 80 bp, synthetic construct
  source 1..80: mol_type = other DNA
ggacctagtgacatgtatgtacatgttggaactttaatatacagaaatttacacctatttaattcagaagcacacgattc

SEQ ID NO: 169944 - DNA, 80 bp, synthetic construct
  source 1..80: mol_type = other DNA
tgcgcatgcgccggggatgccgcatggaaagcctatatataaggaggcgtgaaccaggtgccccggtgcgcatgcgcgga

SEQ ID NO: 169945 - DNA, 80 bp, synthetic construct
  source 1..80: mol_type = other DNA
ccgcttcctcttttccccggggactcaaagacacgcaagacagacgcgcgactgaaagagacgcaagacacacgcgcgtc

SEQ ID NO: 169946 - DNA, 80 bp, synthetic construct
  source 1..80: mol_type = other DNA
cggatgaaaggttatcttacactatgctaggagagatcctgaactattacacacattgggccgggtccataaagtatact

SEQ ID NO: 169947 - DNA, 80 bp, synthetic construct
  source 1..80: mol_type = other DNA
tatgggcgtaggcagcaccatggggaaaacaatgtccacatcattggactctaacttcacggtggcatgctctcgtccaa

SEQ ID NO: 169948 - DNA, 80 bp, synthetic construct
  source 1..80: mol_type = other DNA
ggacgactacaccaccgccggcttcgggggttccttcggcaccgagaccttctctctaagggtcctctttgaccagtatc

SEQ ID NO: 169949 - DNA, 80 bp, synthetic construct
  source 1..80: mol_type = other DNA
gtgcagacgcgacatgtcatacagcagcgtagcaggactgagtcaaccattgaatccttctttgcaaggggggcgtgtgt

SEQ ID NO: 169950 - DNA, 80 bp, synthetic construct
  source 1..80: mol_type = other DNA
cggcccctccggaggcccccgtactcctcagatccggcgcctacccgctctcccggctgctccccaagagcccggtgatc

SEQ ID NO: 169951 - DNA, 80 bp, synthetic construct
  source 1..80: mol_type = other DNA
aaattaatcttatcactgctgcagttgacattcaaagccactcctcctaacaaatccatgatgccagctgccacagtggt

SEQ ID NO: 169952 - DNA, 80 bp, synthetic construct
  source 1..80: mol_type = other DNA
aattcactgaatggtgtaatgcagctaaaggcttagaatggatagggtacaaaattagcaaattcattgactggttaaag

SEQ ID NO: 169953 - DNA, 80 bp, synthetic construct
  source 1..80: mol_type = other DNA
gttctgggccgaacgactcaccaccgctgatccgcaccctgcgagcactcccggcggcccccaccggtaatactcagaga

SEQ ID NO: 169954 - DNA, 80 bp, synthetic construct
  source 1..80: mol_type = other DNA
ttgttgtcccaattacaatatcaattagcccaatgtgtgctgaattttcaggtgcacgtgctaaaagccagggactacca

SEQ ID NO: 169955 - DNA, 80 bp, synthetic construct
  source 1..80: mol_type = other DNA
tatcctgtgcaggcggcccacaggggcatgtctgttatctcgcatttgcttttgttttttacaaaaatggtgccgtcttt

SEQ ID NO: 169956 - DNA, 80 bp, synthetic construct
  source 1..80: mol_type = other DNA
cctgggcatggtctacatcataatataagtagctgtacttccgaatggctgagttttccacgcccgtccgcagcgagaac

SEQ ID NO: 169957 - DNA, 80 bp, synthetic construct
  source 1..80: mol_type = other DNA
aaatgccggttgcccggtatgggggcccgtttattatggtaaggctcttcgggcaagatggagaggcaaacatacaggag

SEQ ID NO: 169958 - DNA, 80 bp, synthetic construct
  source 1..80: mol_type = other DNA
gatagcaacaaccaacaaatctgatttttcaagtacagtcctacaagattctagtgcattaaagagaagattcccataca

SEQ ID NO: 169959 - DNA, 80 bp, synthetic construct
  source 1..80: mol_type = other DNA
tcaatcctcccacgtggcctgtcacgtgacagctacgtcacggccgccattttagtttacaaaatggcggacttccttcc

SEQ ID NO: 169960 - DNA, 80 bp, synthetic construct
  source 1..80: mol_type = other DNA
gatatgaatgatattgacacagaaataactataatttggcttgatcagaatgaaaagtttagggatataagaagattcct

SEQ ID NO: 169961 - DNA, 80 bp, synthetic construct
  source 1..80: mol_type = other DNA
gactgtgcagatcaaaacacatatttagagacacatactatgaagttgaaggtggggtaccctcaggttgttcaggaact

SEQ ID NO: 169962 - DNA, 80 bp, synthetic construct
  source 1..80: mol_type = other DNA
cggaagagcccaaaacctgtttcggcgccgcccaggggccagtctccgggtcaggtcacggaccagggtcaacaggtggt

SEQ ID NO: 169963 - DNA, 80 bp, synthetic construct
  source 1..80: mol_type = other DNA
tgtgttgtgactactacaaatggaaaattcacaggattaggcatttatgacagggttttaatattgccaacacatgctga

SEQ ID NO: 169964 - DNA, 80 bp, synthetic construct
  source 1..80: mol_type = other DNA
gaagactttagccgcacatccagcatcttgttgcggtcgtggagggaagcagtcccataatcagtcaggaccagcctacc

SEQ ID NO: 169965 - DNA, 80 bp, synthetic construct
  source 1..80: mol_type = other DNA
tcttagggagagcagcattggtttgcatgcaaagcattgagtataataaccacgccactggtacctccactactcaaaag

SEQ ID NO: 169966 - DNA, 80 bp, synthetic construct
  source 1..80: mol_type = other DNA
accactcctgacacattttcctcagcaggttacatctcatgttggtatcaaacaaaccttgtggtcccaccaaatacacc

SEQ ID NO: 169967 - DNA, 80 bp, synthetic construct
  source 1..80: mol_type = other DNA
attatgcatataagggctgccaaagcttacagtaaggctggcaaacttaatgttagccaggctatgtccacaatgtcaac

SEQ ID NO: 169968 - DNA, 80 bp, synthetic construct
  source 1..80: mol_type = other DNA
catgatcacgcacttgcctagcacgataaggcgttcggggcaacaaatcacgtcgtccagcagttggtcgcgcagctccg

SEQ ID NO: 169969 - DNA, 80 bp, synthetic construct
  source 1..80: mol_type = other DNA
ccacagccaatgcatgtaaaccaacatgtatttggtcgtaacgggtaactgtgggacggaaccgactactttgggtgtcc

SEQ ID NO: 169970 - DNA, 80 bp, synthetic construct
  source 1..80: mol_type = other DNA
cttaaagacacagatatatctggagagagaaaatcaatactaaacaaaatacacccacaatctctaacaggatcaggcag

SEQ ID NO: 169971 - DNA, 80 bp, synthetic construct
  source 1..80: mol_type = other DNA
tcactgtcacaggacccacttttcaatttatggaagctaatgaatattttcctgctcggtaccaaacccatatgttacta

SEQ ID NO: 169972 - DNA, 80 bp, synthetic construct
  source 1..80: mol_type = other DNA
tccgggaatagtaactgggtctgcggtaggatgtgatccggaagtcttttggtcaactatacccttgatgttagatggag

SEQ ID NO: 169973 - DNA, 80 bp, synthetic construct
  source 1..80: mol_type = other DNA
actgcaagagacagtacagagcgtcatcacggaaaaactgctcaagaacttggtaaaaatagtgtctgcactggtaatag

SEQ ID NO: 169974 - DNA, 80 bp, synthetic construct
  source 1..80: mol_type = other DNA
ttattttggatgatctaaaccagaaccccaatggtgaagatataagtactttctgtcaaatggtgtcgtcggttgatttc

SEQ ID NO: 169975 - DNA, 80 bp, synthetic construct
  source 1..80: mol_type = other DNA
agtgatggagcaggtggcaactatacgcacttttggtttcggacaccagaacaaagccatatacgtggcaggatataaga

SEQ ID NO: 169976 - DNA, 80 bp, synthetic construct
  source 1..80: mol_type = other DNA
tatgtgaattgcaagtggacacaggcgtcccagctactgtaccaataaccatatccataagcccaatgtttgcagaattt

SEQ ID NO: 169977 - DNA, 80 bp, synthetic construct
  source 1..80: mol_type = other DNA
aatgtagaagatggtaaaacttatgatgaatctaaatttagaaaatggcaaattacactacaagaaatggctcaaattag

SEQ ID NO: 169978 - DNA, 80 bp, synthetic construct
  source 1..80: mol_type = other DNA
cttccccaaaactaacttcaacagattgggaaagttactaccgagagttcttaaacaaagccatacctgaaaataaagac

SEQ ID NO: 169979 - DNA, 80 bp, synthetic construct
  source 1..80: mol_type = other DNA
cgcgcaaaagcgcaacctaaaccaaaaccgaatcgcccgagacgaaaccgtcgtccagccgtggtccgcaaccctgggtc

SEQ ID NO: 169980 - DNA, 80 bp, synthetic construct
  source 1..80: mol_type = other DNA
aacaaggacttagagctgtccagatacctgggggcctccataatattctttaaacaccccacagtggactttgtagccag

SEQ ID NO: 169981 - DNA, 80 bp, synthetic construct
  source 1..80: mol_type = other DNA
agatctgatgaggcagaagaagcacagagcacccctgaaaggccgggcccttccaaacaaccatcagagcccgtggagcc

SEQ ID NO: 169982 - DNA, 80 bp, synthetic construct
  source 1..80: mol_type = other DNA
catcatcacacgcatgcgtgataaatcatccgccactgacaggtcatccaggtctatccgggctatctcatccggcacca

SEQ ID NO: 169983 - DNA, 80 bp, synthetic construct
  source 1..80: mol_type = other DNA
gtgttccactacctgcttgccggaggccatgatggccgcgcggtccacgcccagcaccttgctgtaggtgtaggcccgca

SEQ ID NO: 169984 - DNA, 80 bp, synthetic construct
  source 1..80: mol_type = other DNA
ccacgttccatgacccttacattttggactctggagtaccactaagtcaggctctaatatatcctcatcaatggattaat

SEQ ID NO: 169985 - DNA, 80 bp, synthetic construct
  source 1..80: mol_type = other DNA
agaaaacgggatataaaggtcaaaatattagtctgtttcctagtaatataccgtcatctcaatattatgctttttcatgg

SEQ ID NO: 169986 - DNA, 80 bp, synthetic construct
  source 1..80: mol_type = other DNA
taccagttcggagagggaaaaatgccaaacggagacatgtacgtaccctttaaagtgagaatgaagtggtacccctcaat

SEQ ID NO: 169987 - DNA, 80 bp, synthetic construct
  source 1..80: mol_type = other DNA
accctcctttctacccttactgcagaaacaccgcgcgctacgccttcggctgcgcgcggcacctcagacccccgctcgtg

SEQ ID NO: 169988 - DNA, 80 bp, synthetic construct
  source 1..80: mol_type = other DNA
atgtgtcgttggttgttataccaatatgccccctacgcaaatctggtaatgtctcccaaactttaccaattacaatctca

SEQ ID NO: 169989 - DNA, 80 bp, synthetic construct
  source 1..80: mol_type = other DNA
tgtatgttttaataggggtggtctctggcgcggcaggatgatggtcgaggacgtccaccagggccttgcagatgctcttg

SEQ ID NO: 169990 - DNA, 80 bp, synthetic construct
  source 1..80: mol_type = other DNA
acaaatgtgtggttctgtgttttgtatcagcctgcaatgacttctccgtgcgcatgctgcgcgacacgccatttattggt

SEQ ID NO: 169991 - DNA, 80 bp, synthetic construct
  source 1..80: mol_type = other DNA
accctcacgggggggccctcagcaccactacgtggtctcttaaggtgctgtatgacgagcacctcaaacaccacaacttc

SEQ ID NO: 169992 - DNA, 80 bp, synthetic construct
  source 1..80: mol_type = other DNA
tcagtgacatgacctacatgagcactcaccccgctctcatgctgctacagaaacacagaattgtagtacccagctttctt

SEQ ID NO: 169993 - DNA, 80 bp, synthetic construct
  source 1..80: mol_type = other DNA
cacgtgctgtggattacactcacaaatacaatcccaattaccatgtaccaattgaaggaggaagtgggaatctcaaagag

SEQ ID NO: 169994 - DNA, 80 bp, synthetic construct
  source 1..80: mol_type = other DNA
gactacaaaaaccgccatattagtgacgtcacaggcgccattttgagtaagcaggaagcgcacctgccgaatacaaaatg

SEQ ID NO: 169995 - DNA, 80 bp, synthetic construct
  source 1..80: mol_type = other DNA
gcctccaaacttggcctttcagtaactccccaggaatgtgaacaggccgtccttaaacaccaaggactgaaagatttcaa

SEQ ID NO: 169996 - DNA, 80 bp, synthetic construct
  source 1..80: mol_type = other DNA
cgggggtgggcggcacgatcatctgtcctaggtggtgactgcccaccggcagataggtaaagcggtgtgtggtaaaaacc

SEQ ID NO: 169997 - DNA, 80 bp, synthetic construct
  source 1..80: mol_type = other DNA
tccagtgaaatctgtatttcatggacagtacagctgattttatgtcgcccctgtacccgaacggtccgccttgtactata

SEQ ID NO: 169998 - DNA, 80 bp, synthetic construct
  source 1..80: mol_type = other DNA
ctcgtatgtcaataccctttatgagtgtgggcaacgcttactgcaacttctatgacggatggtcacacttctcacaatcc

SEQ ID NO: 169999 - DNA, 80 bp, synthetic construct
  source 1..80: mol_type = other DNA
cgccctccgcgttctcggcaccccggaggccccggcactccgcagataagaaacctgccagcgctcccggcaccccaggg

SEQ ID NO: 170000 - DNA, 80 bp, synthetic construct
  source 1..80: mol_type = other DNA
caggtagatttagaagaatcaattttctccaagtataagggaaataagcaaattgaaattacccagaatatgaaagttgc

SEQ ID NO: 170001 - DNA, 80 bp, synthetic construct
  source 1..80: mol_type = other DNA
cttagtcagatctataacaaaatactagaagaagacaaacgccgcagaaatgtggttgatgttatgattgctatctttca

SEQ ID NO: 170002 - DNA, 80 bp, synthetic construct
  source 1..80: mol_type = other DNA
gcacaccagggccggatttcatacctacatgtgattgcacagaagggtgttattactcacactctaaagacagatatttt

SEQ ID NO: 170003 - DNA, 80 bp, synthetic construct
  source 1..80: mol_type = other DNA
gagactcacgccgtcgatgcgtccgccgtgtttctcggcgtactgctgcacccagacgtggccgctaaagatggcgacgc

SEQ ID NO: 170004 - DNA, 80 bp, synthetic construct
  source 1..80: mol_type = other DNA
ttgattggatgaaatctatgctaccacaagcacaattgaaagtcaagtatcttagtgagttaaagaaattaaatctactg

SEQ ID NO: 170005 - DNA, 80 bp, synthetic construct
  source 1..80: mol_type = other DNA
gaactgggtcctacgcaatccagggtacgcattggttgcactggccatcggatggatgctaggcagtaacaacacacaga

SEQ ID NO: 170006 - DNA, 80 bp, synthetic construct
  source 1..80: mol_type = other DNA
ggcagaactgtaccgattggaattgggggattataaattggtagaaataacaccaattggcttcgcacctacatcacaaa

SEQ ID NO: 170007 - DNA, 80 bp, synthetic construct
  source 1..80: mol_type = other DNA
tcaacttggctacggggaagaagaacacaatggagatgtacagagtccaattgtctgacagtgccgaccgcaacaaacca

SEQ ID NO: 170008 - DNA, 80 bp, synthetic construct
  source 1..80: mol_type = other DNA
cccaggccaccagccccagttcagcaatccaccaaagacaagggtccccatagacctacgcgacctgtacttagaggccc

SEQ ID NO: 170009 - DNA, 80 bp, synthetic construct
  source 1..80: mol_type = other DNA
tagaattaactatattagtactagacaggaatgaaaagttcagagacataagagcattcatagcagatgatccagagggt

SEQ ID NO: 170010 - DNA, 80 bp, synthetic construct
  source 1..80: mol_type = other DNA
cacaccacctggagttgagaaacccaccagcagaactaaagcaatgttaggaacgcatctagtttgggatgtaggtttgc

SEQ ID NO: 170011 - DNA, 80 bp, synthetic construct
  source 1..80: mol_type = other DNA
cctgcttcagcgggacacgtgtttctagaatctcggagccaataactacctgcccctctaatctgtatgctgcatgaaaa

SEQ ID NO: 170012 - DNA, 80 bp, synthetic construct
  source 1..80: mol_type = other DNA
gaccgcagaggaagtaacggccgcccaggagagggggggggctcgcggcccccgggccacacacacgcacctcgaagccg

SEQ ID NO: 170013 - DNA, 80 bp, synthetic construct
  source 1..80: mol_type = other DNA
cgatcccgcgctgataatgcgcgaccgcctgcgtcgcctatgcttcgcgcgtcaccacgacaccttccttgaagtggtag

SEQ ID NO: 170014 - DNA, 80 bp, synthetic construct
  source 1..80: mol_type = other DNA
agacgatgcagggaatgcggccccggcggtagagtggggtgcgcagccaggcgttgaagaaccagtagcaaaagaccacg

SEQ ID NO: 170015 - DNA, 80 bp, synthetic construct
  source 1..80: mol_type = other DNA
tgagccatttgaagcataagaagtatcaagagccaactgataaccagaagtttgttgtgttggaagggtgagagctccag

SEQ ID NO: 170016 - DNA, 80 bp, synthetic construct
  source 1..80: mol_type = other DNA
caggttgcgggccaggatgccggcctgccagggcggccaggtgaacacggccggattgtggatttcgttgtcggaatcct

SEQ ID NO: 170017 - DNA, 80 bp, synthetic construct
  source 1..80: mol_type = other DNA
tagaaaaaaatatttaactgctacaaggtcagcactaccattgctacaaacagtaggagacgaactattagaataccaca

SEQ ID NO: 170018 - DNA, 80 bp, synthetic construct
  source 1..80: mol_type = other DNA
agaatcctgtatgacgaacacctcaggtttatgaactactggactgtcagtaacgaagacttagacctgtgtagatacct

SEQ ID NO: 170019 - DNA, 80 bp, synthetic construct
  source 1..80: mol_type = other DNA
taaacccaagcacatcagggtttgggtaccgcggccaccacgattgtgtccatacatcaagtctagcaatgtaaattttg

SEQ ID NO: 170020 - DNA, 80 bp, synthetic construct
  source 1..80: mol_type = other DNA
tgcttagagacactactcacataacccaggcagctctcccacaggggatagaggacatcatccagcaggtggctacaaat

SEQ ID NO: 170021 - DNA, 80 bp, synthetic construct
  source 1..80: mol_type = other DNA
ttaggtaggctcatctgcaaaccattcctgactggaacaacatctggcaggatagaagtatatatgagtctcaggtgccc

SEQ ID NO: 170022 - DNA, 80 bp, synthetic construct
  source 1..80: mol_type = other DNA
ctccagtcaacagtggtgttaaatattccatggacatctggagtgcaatataggtatacaaacccagatacatataccag

SEQ ID NO: 170023 - DNA, 80 bp, synthetic construct
  source 1..80: mol_type = other DNA
agaatactggtgagcatattcaggaccccgggccggggccttcaaccggcgtggcttctgagggattggtgcagaacgag

SEQ ID NO: 170024 - DNA, 80 bp, synthetic construct
  source 1..80: mol_type = other DNA
gcgctcgcgcttcgcgcgcgcgccggtggctgccgcccccccccgcgcatgcgcgcgaggcccccccccgcgcgtggctc

SEQ ID NO: 170025 - DNA, 80 bp, synthetic construct
  source 1..80: mol_type = other DNA
gttggcatacattggaggtgataacacccgggttaaatacaagcatacacatccaggtgaattgggccacaaaattggta

SEQ ID NO: 170026 - DNA, 80 bp, synthetic construct
  source 1..80: mol_type = other DNA
ctgctggtttagtggatgaaagtccatattgtcaccaacctcaaaatagcgcaacaatgaaattagcatacctagataga

SEQ ID NO: 170027 - DNA, 80 bp, synthetic construct
  source 1..80: mol_type = other DNA
agactattgcttcaatatcaagtgattccaaacacacacagcgtgtcccgactttatctgctagtgaaactggtgctaca

SEQ ID NO: 170028 - DNA, 80 bp, synthetic construct
  source 1..80: mol_type = other DNA
tatggggagatcccattcacataacaacagagcaaacgttaaataaagttaaagaaataattactaacaatgcaaaaaac

SEQ ID NO: 170029 - DNA, 80 bp, synthetic construct
  source 1..80: mol_type = other DNA
agaccacccacgactccccagccaccggtactaaggcccatgcccgcgctgcctgcccctgaggcatggcctggcgacgg

SEQ ID NO: 170030 - DNA, 80 bp, synthetic construct
  source 1..80: mol_type = other DNA
gcaacgcaagattgacgagatggacattcccaacgacgtgagcgagtcctttgagcgctacaaagagctcattcaggagc

SEQ ID NO: 170031 - DNA, 80 bp, synthetic construct
  source 1..80: mol_type = other DNA
tgacaagaaatgatcctaggcttaaagtggattttgaagaagcaattttctctaagtacgtgggcaacaagatcacagaa

SEQ ID NO: 170032 - DNA, 80 bp, synthetic construct
  source 1..80: mol_type = other DNA
caaagtggtgtgtacgggttcacaaccctcaacaacatggggcagctgttcatgcgtcatgtcaataagtccacagctca

SEQ ID NO: 170033 - DNA, 80 bp, synthetic construct
  source 1..80: mol_type = other DNA
tctcgcaatgttgctctcgaggggcacaaagtccatctcaggagtctctatgtcaaaggtggtctgatagtattggctcc

SEQ ID NO: 170034 - DNA, 80 bp, synthetic construct
  source 1..80: mol_type = other DNA
tgtggtggtaaactactatgtacacatggaaccatagggatggtgacggcaggtggagagaaccatgttgcattcataga

SEQ ID NO: 170035 - DNA, 80 bp, synthetic construct
  source 1..80: mol_type = other DNA
actctaaacatagtgacagatatataccaataactgttaaaccttatgactggtatgagatccaggaatcagactattac

SEQ ID NO: 170036 - DNA, 80 bp, synthetic construct
  source 1..80: mol_type = other DNA
ggggccatgaaagcctcctggcggccttcacgaatgccggatgcctctgccgacgggtgttctttcgcgaggttagggac

SEQ ID NO: 170037 - DNA, 80 bp, synthetic construct
  source 1..80: mol_type = other DNA
aaagacatgaagttaatataaccagtagaatataccataaagccaaacacatcagtgcttggtgtccacgacctccccga

SEQ ID NO: 170038 - DNA, 80 bp, synthetic construct
  source 1..80: mol_type = other DNA
aggtgagattaaaacaatcatggacatggcacgggtggactcattcatgccaataaacaacattcagaaccaaatacaag

SEQ ID NO: 170039 - DNA, 80 bp, synthetic construct
  source 1..80: mol_type = other DNA
tcctaccggggttccacccctcaaagaagattcatatacctggaatgataaccaacgtaatgcatatggccagggttgat

SEQ ID NO: 170040 - DNA, 80 bp, synthetic construct
  source 1..80: mol_type = other DNA
gttatagaagcaaatagtgtgaatgatactgtggtgttcaggagtgtgtttggtaatcttttttccacttttcacaaaaa

SEQ ID NO: 170041 - DNA, 80 bp, synthetic construct
  source 1..80: mol_type = other DNA
ttgatcttgagttaacctttgtaatttcagaaagattcttcacctcaacttcagctgctgcaagagattatgtataccag

SEQ ID NO: 170042 - DNA, 80 bp, synthetic construct
  source 1..80: mol_type = other DNA
aaacgggcgtgggcggtgatcagggagaacaattccccggggacacctgcacgagacccctgcgctctcaggaacttcgc

SEQ ID NO: 170043 - DNA, 80 bp, synthetic construct
  source 1..80: mol_type = other DNA
cagaacagacaagagacacaagtttttggtttcagactgtttttaggtgatggtgttttgaaaacaacactactgggtga

SEQ ID NO: 170044 - DNA, 80 bp, synthetic construct
  source 1..80: mol_type = other DNA
cggcctttgacaggcctccgcgcaccgacctaaacagaccccctcactacccctggctgcccaactcctacagggtctct

SEQ ID NO: 170045 - DNA, 80 bp, synthetic construct
  source 1..80: mol_type = other DNA
tacagcagccacatagatgactttacatataacaacgaggcctacggaggaggtctctgcacccacagatacaccctaag

SEQ ID NO: 170046 - DNA, 80 bp, synthetic construct
  source 1..80: mol_type = other DNA
aaataccggcggcccgcaaacctcccttagcccggtcccgcgaacaaataccgcgggacggcacgcacaggcagcgcgca

SEQ ID NO: 170047 - DNA, 80 bp, synthetic construct
  source 1..80: mol_type = other DNA
acggggggtgtgcggggacggtggccttttgcgacggagacagtggtggggttgtcggcgaagacgggaggtgtgcgggg

SEQ ID NO: 170048 - DNA, 80 bp, synthetic construct
  source 1..80: mol_type = other DNA
tggtcagatgtgggccctttgcccctaaagacatgacagcctccgtcacatgcatggcgaggtactcatccctgttaacc

SEQ ID NO: 170049 - DNA, 80 bp, synthetic construct
  source 1..80: mol_type = other DNA
attccaccgatggcaaacttagataataaaggcatgttgttcacaagtagctttgtcttagcctctacaaattctcagac

SEQ ID NO: 170050 - DNA, 80 bp, synthetic construct
  source 1..80: mol_type = other DNA
gtaacatgatttggatagactggctcactaaaggagacacagtatacgaccccaaaaaaagcaagtgcctactctcagac

SEQ ID NO: 170051 - DNA, 80 bp, synthetic construct
  source 1..80: mol_type = other DNA
gaatcatatcagcaatggtaataataattagaaactcctctgatccacaaacaattatagctacacttactttaattgga

SEQ ID NO: 170052 - DNA, 80 bp, synthetic construct
  source 1..80: mol_type = other DNA
taaagctttcccacattcttcagaggcttttcaaaatgaattaaccaccaaattacaagtacttaaaaagaatttagatg

SEQ ID NO: 170053 - DNA, 80 bp, synthetic construct
  source 1..80: mol_type = other DNA
gaacaaacacaacaggtaatgacgtgattcctacatgcaattgtacagaagcaacttactactgcaaacacaaagacaga

SEQ ID NO: 170054 - DNA, 80 bp, synthetic construct
  source 1..80: mol_type = other DNA
acctggctatatgaaaaatgcactcactatcaaacatttgccacagacactagactagctccagaaaaaacaacatcacc

SEQ ID NO: 170055 - DNA, 80 bp, synthetic construct
  source 1..80: mol_type = other DNA
ctttaaaaaacctcccacacctccccctgaacctgaaacataaaatgaatgcaattgttgttgttaacttgtttattgca

SEQ ID NO: 170056 - DNA, 80 bp, synthetic construct
  source 1..80: mol_type = other DNA
tgcctctggggccaaaagccaaggtttaacagaccctaatagattggtttatacctgaaacattgtggaacatattcagt

SEQ ID NO: 170057 - DNA, 80 bp, synthetic construct
  source 1..80: mol_type = other DNA
gttgctagtaatgctttacaattatctcaacccagacctagcaccaatcaacaatcactaccaaacacaagtagttctga

SEQ ID NO: 170058 - DNA, 80 bp, synthetic construct
  source 1..80: mol_type = other DNA
attttaagggctgtctctaggtgtactttgatgctggagtttttcgctgtgttgatgtgaataaatctactactactatt

SEQ ID NO: 170059 - DNA, 80 bp, synthetic construct
  source 1..80: mol_type = other DNA
gctaatccagacaacaacaccctccggaggctgccggctctgcccgcgcctccggagcctcccgcagagcaaccacggcg

SEQ ID NO: 170060 - DNA, 80 bp, synthetic construct
  source 1..80: mol_type = other DNA
gcccagacaacacacaatggtcttatagttgccatacctttgcagatggacaatacattatttagtaccactcttttagg

SEQ ID NO: 170061 - DNA, 80 bp, synthetic construct
  source 1..80: mol_type = other DNA
cttattatgaagttgaaggtggtgtaccctctggttgctcaggaactagtatatttaactcaatgattaataacataatt

SEQ ID NO: 170062 - DNA, 80 bp, synthetic construct
  source 1..80: mol_type = other DNA
agatgaaatcactcaacaagcagtcttacagggtgatggtattgaggatgccataactaatacagtgaatgccacaatag

SEQ ID NO: 170063 - DNA, 80 bp, synthetic construct
  source 1..80: mol_type = other DNA
cagaaggatgcataagtcacccacaactaaaaaaaccaaacccacaaataaacaaaccattagattcacaatactttgca

SEQ ID NO: 170064 - DNA, 80 bp, synthetic construct
  source 1..80: mol_type = other DNA
gttgctggcggttgtcgttgtcgtaccggcaaagacggtgagatccaatagtgactgctcgtcgaagggacagtacgcta

SEQ ID NO: 170065 - DNA, 80 bp, synthetic construct
  source 1..80: mol_type = other DNA
tgtaccaccattctatgggtagatcaggcatgttaatccatgtacagtgcaatgcaaccaaattccacagtggatgtctc

SEQ ID NO: 170066 - DNA, 80 bp, synthetic construct
  source 1..80: mol_type = other DNA
tcttcacatacagtagaaaaccaccttttaaagacagccagttaacaggtccctcactacatccaggaatgctaatgaac

SEQ ID NO: 170067 - DNA, 80 bp, synthetic construct
  source 1..80: mol_type = other DNA
aacttcgccagctaagagaatactactttaagtgggaaacacaacacacaggagtggcagtacctcctacatggaccacc

SEQ ID NO: 170068 - DNA, 80 bp, synthetic construct
  source 1..80: mol_type = other DNA
tttcaacatcttggtttgggcttaataatagagaaactggatatcctacttatattgactcacgaggtgtttcgcctcaa

SEQ ID NO: 170069 - DNA, 80 bp, synthetic construct
  source 1..80: mol_type = other DNA
atgcacttggtagatctggttacctaatacacgttcagtgtaatgcaagcaaatttcattcaggaaccctccttgtagtt

SEQ ID NO: 170070 - DNA, 80 bp, synthetic construct
  source 1..80: mol_type = other DNA
cctgccaactccaaagaaaaaaccacctcctgctatgagccagtgggtccctccggtgcacaacgtaaatggccgctgcc

SEQ ID NO: 170071 - DNA, 80 bp, synthetic construct
  source 1..80: mol_type = other DNA
ctggcagcaaagggaccgggtttgcggggtcctaccccgtaccttggagccttgttcagacacaccctgactcagcgtgg

SEQ ID NO: 170072 - DNA, 80 bp, synthetic construct
  source 1..80: mol_type = other DNA
actcgtgccgcgtggatgcgcgaagcttcattgctaactacatgctgccaaagaacctagaaatcaacaacaaaatatgg

SEQ ID NO: 170073 - DNA, 80 bp, synthetic construct
  source 1..80: mol_type = other DNA
ggcagcttcatggcaactggaaaattaattctgtgttatactcctccaggtgggtcatgcccaacaaccagagagaccgc

SEQ ID NO: 170074 - DNA, 80 bp, synthetic construct
  source 1..80: mol_type = other DNA
aattatgtcaagttgataccatgataccaatcaacaatactgcagcaaatgtaaccaatgaaagtatgtatgccatcagt

SEQ ID NO: 170075 - DNA, 80 bp, synthetic construct
  source 1..80: mol_type = other DNA
cgctcgatcgctcgtggcgggagccggaggtgagtttacacaccgcagtctaggagcaattcgggcacgggtctggccgg

SEQ ID NO: 170076 - DNA, 80 bp, synthetic construct
  source 1..80: mol_type = other DNA
tgggtaagccgttggccgctgacgatgagcatgatgatgaccgccgtagagcactgcaggaggaaactgctagatggaat

SEQ ID NO: 170077 - DNA, 80 bp, synthetic construct
  source 1..80: mol_type = other DNA
aacctgttgtcccaattacaatatcaattagcccaatgtgcgctgagttttcaggtgcacgtgcaaaaagtcagggattg

SEQ ID NO: 170078 - DNA, 80 bp, synthetic construct
  source 1..80: mol_type = other DNA
actatgtgccacaagagggcgatgttaagatcttccttaaagaaagggctagtttgaccacagcagggcccagtgacatg

SEQ ID NO: 170079 - DNA, 80 bp, synthetic construct
  source 1..80: mol_type = other DNA
tgtttgcacacacacagggtattgaagagaccattgacacggtcattagcaacgcattgcagttgtctcaacctaagcct

SEQ ID NO: 170080 - DNA, 80 bp, synthetic construct
  source 1..80: mol_type = other DNA
agaagaggacttgaccctgcactacaaaaataaggtattcccaattgagagcccatctgtgactcaagtcacactgggtg

SEQ ID NO: 170081 - DNA, 80 bp, synthetic construct
  source 1..80: mol_type = other DNA
tcctgggagtggcaatacgcctaatataagtagctacacttccgaatggctgagttttccacgcccgtccgcagcggtga

SEQ ID NO: 170082 - DNA, 80 bp, synthetic construct
  source 1..80: mol_type = other DNA
atcagtaattgtaattaggacgtacatttgtagaatatcaacactgcatatatgttggactccaaatctcaactttggaa

SEQ ID NO: 170083 - DNA, 80 bp, synthetic construct
  source 1..80: mol_type = other DNA
ctttctttggaagccaatcactcaaaggtataagagcactaatgaatgattgattataagcatcaagaaaggaggaacga

SEQ ID NO: 170084 - DNA, 80 bp, synthetic construct
  source 1..80: mol_type = other DNA
tggacggtgtcaccgcctcgctgctaggtgaccttcaccgtttccttttcggggtggaccttcggctgcccgtgcttcac

SEQ ID NO: 170085 - DNA, 80 bp, synthetic construct
  source 1..80: mol_type = other DNA
atataaagagtatgcaggcataggccataagcttaagggaactgagacctatatatctcgagatatgcagttcatgaccg

SEQ ID NO: 170086 - DNA, 80 bp, synthetic construct
  source 1..80: mol_type = other DNA
cgcgcacccgcgtcaagtacctatggacgaagcgctggccgccgcggcggccgcctcataccaggtgaatcctcaacacc

SEQ ID NO: 170087 - DNA, 80 bp, synthetic construct
  source 1..80: mol_type = other DNA
atatacaggaatggtctcacatgaaactagccacaaatgtaaccaaatttccaatgctttgtgtggatgtgggtagtgct

SEQ ID NO: 170088 - DNA, 80 bp, synthetic construct
  source 1..80: mol_type = other DNA
tcacatcaagaaggtaggcacccaagagctcaccgaaattcattacttgagttcgagagatgacatcaagtctgtgacta

SEQ ID NO: 170089 - DNA, 80 bp, synthetic construct
  source 1..80: mol_type = other DNA
ttaaacaaagaaagaggagtgagccagttgctataatgatacatggtcctccaggtactggaaaatcaataaccacaagc

SEQ ID NO: 170090 - DNA, 80 bp, synthetic construct
  source 1..80: mol_type = other DNA
ctgactgtgtcgtgctgtgctttgtgtctgcctgcaatgatttctctgtacggatgcttaaggataccccctttatagag

SEQ ID NO: 170091 - DNA, 80 bp, synthetic construct
  source 1..80: mol_type = other DNA
attatacagaatcagacgctaaaaaatttgtcagtgcagcagacagcaactacctgtttgtaacttaccacccagaaaac

SEQ ID NO: 170092 - DNA, 80 bp, synthetic construct
  source 1..80: mol_type = other DNA
gttacttgtcagatatggatgcaacttcagttgacaaacccacccaccctgaaacttcatcagacagattctatacactg

SEQ ID NO: 170093 - DNA, 80 bp, synthetic construct
  source 1..80: mol_type = other DNA
ggccgggccatgggcaaggctcttaaaaaagcatgtttcttggcagggcgtaccgaaagaaaaggacactgccactgcta

SEQ ID NO: 170094 - DNA, 80 bp, synthetic construct
  source 1..80: mol_type = other DNA
tattgaaaaatatttaataaaaaacatgagtacctatcaccaaaaatttacaacagatggcctaccggcatcttggaaag

SEQ ID NO: 170095 - DNA, 80 bp, synthetic construct
  source 1..80: mol_type = other DNA
acaatctattggagcgtgcttggatcgacaagttcatttaaataatgtagaaatctacctgagtaggagtaggattttac

SEQ ID NO: 170096 - DNA, 80 bp, synthetic construct
  source 1..80: mol_type = other DNA
tcagagtagttaatgatcatgatttgcataagacagtagtaaaaatcagagtgtatcatagagcaaaacacattcaaact

SEQ ID NO: 170097 - DNA, 80 bp, synthetic construct
  source 1..80: mol_type = other DNA
cccacagagatcataagcactcttcgtgtgtatttcaagccaaagcacgtgaaagcgtgggtacccagaccacccaggct

SEQ ID NO: 170098 - DNA, 80 bp, synthetic construct
  source 1..80: mol_type = other DNA
gctgatctacaggtcattagcaaatataaaacagcgaatggcttgttagatgtggccaaggccttacaaccctgcactaa

SEQ ID NO: 170099 - DNA, 80 bp, synthetic construct
  source 1..80: mol_type = other DNA
gtctagaatggattgcaaacaaaatttcaaaattgattgaatggataaaaaacaaggttttacctcaggctagagaaaaa

SEQ ID NO: 170100 - DNA, 80 bp, synthetic construct
  source 1..80: mol_type = other DNA
aggctcagcttgctggtatactagacaggcctatgcgtttctacccccaagacctcccattctacccgtggctaccaaaa

SEQ ID NO: 170101 - DNA, 80 bp, synthetic construct
  source 1..80: mol_type = other DNA
ggtgtggcggcgctgtttgcgacgggaacggggacggtggtgttgcgcagacaaggaaggtggcgtggaacttctgcagc

SEQ ID NO: 170102 - DNA, 80 bp, synthetic construct
  source 1..80: mol_type = other DNA
ccagagctggcgacgtcatccccgcgcgtaggcggggtgacggacgtgccggacttatcagtccacgaccattggctaca

SEQ ID NO: 170103 - DNA, 80 bp, synthetic construct
  source 1..80: mol_type = other DNA
acttaacaatatgacaaactactggaacaaaatgaatactgacacatacctacaacagtggaaaggcaacaaagcacact

SEQ ID NO: 170104 - DNA, 80 bp, synthetic construct
  source 1..80: mol_type = other DNA
ggcttgccagtaatgtgtactccaggcagtaatcaattcctgacctctgatgattttcaatccccatcagctatgcctca

SEQ ID NO: 170105 - DNA, 80 bp, synthetic construct
  source 1..80: mol_type = other DNA
aaaactaatacgcaacagtcaagctggcaaaactattgggccaaatctacagagcaatacagcggtactcctacaacgac

SEQ ID NO: 170106 - DNA, 80 bp, synthetic construct
  source 1..80: mol_type = other DNA
ctacttaagtgatcgtgaagccactgcggtggatcaaccgacacagcctgatgtggcgacatgccgcttctacacccttg

SEQ ID NO: 170107 - DNA, 80 bp, synthetic construct
  source 1..80: mol_type = other DNA
agagcagtggaggtactaattacgtcccggtaacgatcacagtcgcacccatggatgccgagtacaacggcttgcgtttg

SEQ ID NO: 170108 - DNA, 80 bp, synthetic construct
  source 1..80: mol_type = other DNA
aattttacaaaaatggattggaacaacatcacttttttgaaaaggtacttcaaaccagatccagatttcccattcttgat

SEQ ID NO: 170109 - DNA, 80 bp, synthetic construct
  source 1..80: mol_type = other DNA
cacaaacacacccacctcttcaaccggaggagggctgataaatgaaacttctccatgcatacgaaatgacagctgcacag

SEQ ID NO: 170110 - DNA, 80 bp, synthetic construct
  source 1..80: mol_type = other DNA
attacataccaaatgaaggtgaggtaacaacacaagtcaaacctagaaccaatgtttacactattacatctgctggccca

SEQ ID NO: 170111 - DNA, 80 bp, synthetic construct
  source 1..80: mol_type = other DNA
actttttagttcccagagaggatataaagaatgtgggtcccagtgacatgtttgtacacacccgtgatgccatcttcaga

SEQ ID NO: 170112 - DNA, 80 bp, synthetic construct
  source 1..80: mol_type = other DNA
tgatgggcacaatgtaccaggtaaacttccctttctctatgaacaggctgcgcggattcaggacgcttagcacgatgtcc

SEQ ID NO: 170113 - DNA, 80 bp, synthetic construct
  source 1..80: mol_type = other DNA
atggctggtgtaactttaaacccacagcctttaacacaaacttaataacaatacaaaatattagagacatgagatttgaa

SEQ ID NO: 170114 - DNA, 80 bp, synthetic construct
  source 1..80: mol_type = other DNA
ggaaaccaggaagtagaccatttagtaagtcagggcatcagacaagtacttttcctggagaaaatagagcctgcccaaga

SEQ ID NO: 170115 - DNA, 80 bp, synthetic construct
  source 1..80: mol_type = other DNA
tattggaagtagaaaatttcaatgcaacagaagctagcgacaagaggaagcaattcactgtgtggcctatcacatacact

SEQ ID NO: 170116 - DNA, 80 bp, synthetic construct
  source 1..80: mol_type = other DNA
acactcacgtcactaattacaaacatcatgaacgtgaggtcaaaacagcaattgaacccaggagagggatcaagacagtt

SEQ ID NO: 170117 - DNA, 80 bp, synthetic construct
  source 1..80: mol_type = other DNA
cgatacaatcccgcaggttcgccccgttgtatgctacagaagctaaaagaattcttaagctggaaaacaccatcaacaat

SEQ ID NO: 170118 - DNA, 80 bp, synthetic construct
  source 1..80: mol_type = other DNA
tgaaaaaagctatgtttcttggtagggcttggagaaagaaaagggcgctgtcactgcttggcgtgcgagctccacagaaa

SEQ ID NO: 170119 - DNA, 80 bp, synthetic construct
  source 1..80: mol_type = other DNA
gagaaaatcagatctggtaagactagaataatagaagcagcaagtgttaatgacactgtaaatttcagaatggtatatgg

SEQ ID NO: 170120 - DNA, 80 bp, synthetic construct
  source 1..80: mol_type = other DNA
ccagcgtaactcccgttaccggcgccggcgcccagcacgcccgaaaacaacgccggacaccgccgcgcttacttatgtcc

SEQ ID NO: 170121 - DNA, 80 bp, synthetic construct
  source 1..80: mol_type = other DNA
cagcctgtgatctaagaaatccctggctaagagagggagccctaagccccacagtaggcttttttgccttaaagcctgac

SEQ ID NO: 170122 - DNA, 80 bp, synthetic construct
  source 1..80: mol_type = other DNA
gcgcggccataatcgcgatctcggcgtctgcctctgcatggctgctgtgcaaatcgagggcctcatgcttgacaccctac

SEQ ID NO: 170123 - DNA, 80 bp, synthetic construct
  source 1..80: mol_type = other DNA
ccaggtcctgcaaatgcgtccttgaggacatgcccctctactgcatggcctacgggtacgcggacttcttagagcaggag

SEQ ID NO: 170124 - DNA, 80 bp, synthetic construct
  source 1..80: mol_type = other DNA
tggcaatggataactacaaattcaccccaattaacaaacacacagctaggaatgacacacccctggacaaatgctacaat

SEQ ID NO: 170125 - DNA, 80 bp, synthetic construct
  source 1..80: mol_type = other DNA
ctctactctaagatactctttaaaagtactatatgaagaacacttaagacacaataacttctggacttatagcaacaaag

SEQ ID NO: 170126 - DNA, 80 bp, synthetic construct
  source 1..80: mol_type = other DNA
agactggagaagtggcatagtctgataaaattcttaaagtttaaaacaaaagacctacagaaggcggtttatgttcctca

SEQ ID NO: 170127 - DNA, 80 bp, synthetic construct
  source 1..80: mol_type = other DNA
ccaccaattcgcatcacttaagaaagtagtagcaaccgcggcggcggcgaccggccggtcgtcgtctcctcgtcctcaaa

SEQ ID NO: 170128 - DNA, 80 bp, synthetic construct
  source 1..80: mol_type = other DNA
tttgagaacttgaggagaaattggcttgaactgttttaaatttgcagcttaaagctgaaccccaccagaaatctgtcgcg

SEQ ID NO: 170129 - DNA, 80 bp, synthetic construct
  source 1..80: mol_type = other DNA
atgtgcacgcgcccaccgcccctcaggaccacggagctgggcacgtccgtcaactgggccatctcgtgccccttgaggat

SEQ ID NO: 170130 - DNA, 80 bp, synthetic construct
  source 1..80: mol_type = other DNA
cagaggatcagtattttcagctttgctgactggaagggctgttttacagtgaaagaagacatagaatcctggatatatac

SEQ ID NO: 170131 - DNA, 80 bp, synthetic construct
  source 1..80: mol_type = other DNA
tgaggatttaattgaaactagacatgtggcaaaccaaaagttgcgctcagagtgcaccattgaatcattctttggacgca

SEQ ID NO: 170132 - DNA, 80 bp, synthetic construct
  source 1..80: mol_type = other DNA
gtgtacatgggagaatactacaccacgaacacagatgaaactaaaagatttgccaattggacaattaatgcaaggcgtat

SEQ ID NO: 170133 - DNA, 80 bp, synthetic construct
  source 1..80: mol_type = other DNA
tgcggctaatcctaaccctgcagccatcgcatgcaagccagtatgttggtggtcgtaatgagcaattgcgggatggaacc

SEQ ID NO: 170134 - DNA, 80 bp, synthetic construct
  source 1..80: mol_type = other DNA
taaagaataggggctgttttgatagggccaccgctgaagtgaggtgcgtgtgcgtgtggtttgtggtcgccgcgaacagc

SEQ ID NO: 170135 - DNA, 80 bp, synthetic construct
  source 1..80: mol_type = other DNA
ccacagatgggaatctgattgagactaggtgtgttgtaaactctaacggcacacgagaggcccacattgagcacttcttt

SEQ ID NO: 170136 - DNA, 80 bp, synthetic construct
  source 1..80: mol_type = other DNA
tccaagtgatcaatttgtacatacacaacatgccaagtacaccaacgctcacctgaccaacccgaatgagcacaccatcc

SEQ ID NO: 170137 - DNA, 80 bp, synthetic construct
  source 1..80: mol_type = other DNA
cagacgccgagtaccggcccgaagacctcgacgacctgttcgccgccatcgaaagagataccgagtaaggaggcgtcggt

SEQ ID NO: 170138 - DNA, 80 bp, synthetic construct
  source 1..80: mol_type = other DNA
aacaggctcagggattcgcacactcagatgcagatgctcaacaacagctgattgtagaggtgtctaaattaaaaagagga

SEQ ID NO: 170139 - DNA, 80 bp, synthetic construct
  source 1..80: mol_type = other DNA
gcaggcgacgcagccccaccactactctcaccaccagtctcagtctcagcagcatcatcaccgtccccagtcaccaccgc

SEQ ID NO: 170140 - DNA, 80 bp, synthetic construct
  source 1..80: mol_type = other DNA
aagagggaaaggtggcgatgtacgctctccctgccctgtgtgccctcactcccggaatgagaatggctggactggatgtc

SEQ ID NO: 170141 - DNA, 80 bp, synthetic construct
  source 1..80: mol_type = other DNA
gagtaccacaactacggctgcaagaggccggtcagtgtggcggcctacatggagccctggcacagccagattttcaagtt

SEQ ID NO: 170142 - DNA, 80 bp, synthetic construct
  source 1..80: mol_type = other DNA
tgtagtctgagaggctgagcttgtcccggcacacggcgtacatgtcgatggggatgaggccggtgatgcggaccttggtg

SEQ ID NO: 170143 - DNA, 80 bp, synthetic construct
  source 1..80: mol_type = other DNA
agacaatagtctcaaggtagatcactacattacaacccggcagactgttaaaacagctggtcctagtgatctgtatgtac

SEQ ID NO: 170144 - DNA, 80 bp, synthetic construct
  source 1..80: mol_type = other DNA
aggtttccaatgtgcagacatgattcagcaaatttgcactacacatcatatttttaaagatcaaatttatgttgtagaag

SEQ ID NO: 170145 - DNA, 80 bp, synthetic construct
  source 1..80: mol_type = other DNA
gtagtctacacccagtgtggtttcaagcacttgagcagcttttgaataaccttggcttccctggtgaacttgcttacaaa

SEQ ID NO: 170146 - DNA, 80 bp, synthetic construct
  source 1..80: mol_type = other DNA
cgatatactaccaaaacagatggtatcctagaataaagtttcagagtcaagtagtgcatgactttatactaacaggcccc

SEQ ID NO: 170147 - DNA, 80 bp, synthetic construct
  source 1..80: mol_type = other DNA
aaagagacagcaactatggctggtgtaactttaatcctaatcagtttaatgagaaccaaataacaatacaaaacattaga

SEQ ID NO: 170148 - DNA, 80 bp, synthetic construct
  source 1..80: mol_type = other DNA
tgcgttgtcaccgacatgcccctgtgggccctcctccactgctacaccgagtatgtgcaggaggagatgaacatagacac

SEQ ID NO: 170149 - DNA, 80 bp, synthetic construct
  source 1..80: mol_type = other DNA
gcaaccccgtggccgactacatgttcgcgcagagctccaaacagtacggcgatttacgtcgcttggaggtacacgacgct

SEQ ID NO: 170150 - DNA, 80 bp, synthetic construct
  source 1..80: mol_type = other DNA
ccggagatccagctccacctccagcgaaacatccgagaacagctgctcatcaagcagcagctccaactcctgttactcca

SEQ ID NO: 170151 - DNA, 80 bp, synthetic construct
  source 1..80: mol_type = other DNA
actgggatagacctcccagaacatactacacagatacacctacatacccctggatgcctaaggctccaccaccctttaag

SEQ ID NO: 170152 - DNA, 80 bp, synthetic construct
  source 1..80: mol_type = other DNA
tggacgggaaggtcaatactatggaaatgtaccagatcccactgaacgacaaccttagtactgagcccatattttgcctg

SEQ ID NO: 170153 - DNA, 80 bp, synthetic construct
  source 1..80: mol_type = other DNA
caggcgccttcggttctgcggtggctggccaagaactcccgctgtgcggggttcgtgcctactaccccccaaacaaatat

SEQ ID NO: 170154 - DNA, 80 bp, synthetic construct
  source 1..80: mol_type = other DNA
cactacgcccagtgatagtacagggaccaaacaccgagtttgctctatccttactcaggaaaaatatagttaccatcaca

SEQ ID NO: 170155 - DNA, 80 bp, synthetic construct
  source 1..80: mol_type = other DNA
ctccccctttccaccacgggccctactctccctctccctctcacagatgcagctcaggtgccactggaccctatccactg

SEQ ID NO: 170156 - DNA, 80 bp, synthetic construct
  source 1..80: mol_type = other DNA
tttggcagatgtgctaactaatccagcactcatgtctccatcagtggaggcttgtgggttttctgataggctcaagcaaa

SEQ ID NO: 170157 - DNA, 80 bp, synthetic construct
  source 1..80: mol_type = other DNA
ccttgcccattacagtgaccatagcaccagacaaatcagaattctcaggtgcaatgaagtcccaacaacaaggactcccc

SEQ ID NO: 170158 - DNA, 80 bp, synthetic construct
  source 1..80: mol_type = other DNA
cgtcacatgctggtatcaaaccagcgtggtcgcgccagccagtacacagaacaagtgctacatcatgtgcatggtgtcag

SEQ ID NO: 170159 - DNA, 80 bp, synthetic construct
  source 1..80: mol_type = other DNA
ttcaagcaatgaacaggcgcttctttcttgatttggacatagtagtacatgataattataaagattcacaaggaaaacta

SEQ ID NO: 170160 - DNA, 80 bp, synthetic construct
  source 1..80: mol_type = other DNA
gacacggagtgacgtcggggacgggggccttttgcggcagtgacgggggcctttcgcggcggggacaggggcctttcgaa

SEQ ID NO: 170161 - DNA, 80 bp, synthetic construct
  source 1..80: mol_type = other DNA
cacctgagaaaaccaagcttctccctagtgtattctatagtgtttttcctggagagaaagaaccagctgtgctcactcag

SEQ ID NO: 170162 - DNA, 80 bp, synthetic construct
  source 1..80: mol_type = other DNA
atgtatgatgcaggggcttctgctttagtacctattacagttaccatagcaccaatgtgttgtgagtttaatggattgag

SEQ ID NO: 170163 - DNA, 80 bp, synthetic construct
  source 1..80: mol_type = other DNA
attacaacttcactttaatggtcatcccatttgtccctcttgatgtgtcgggtggtacaccgtacgtgcccattacagtg

SEQ ID NO: 170164 - DNA, 80 bp, synthetic construct
  source 1..80: mol_type = other DNA
cctaagggtgtacagagacacctccgtagactatataatgacttttgacactatacctcccatgaaaatgaacgaactga

SEQ ID NO: 170165 - DNA, 80 bp, synthetic construct
  source 1..80: mol_type = other DNA
acgaacaaacaaacattagaacaatggctatacaaaactggatccctatatcacacctttcacacacaagaatacattaa

SEQ ID NO: 170166 - DNA, 80 bp, synthetic construct
  source 1..80: mol_type = other DNA
ggtacactaattgggaaataacaaccagacaagtggcacagctgaggcccgtgtatgtgccaccaggaggcccgatccct

SEQ ID NO: 170167 - DNA, 80 bp, synthetic construct
  source 1..80: mol_type = other DNA
ttgggtgaggttctcaactacttcgcaaattggtctggcagtatatccctgacttttatgtgtgtgtgtgactctttttc

SEQ ID NO: 170168 - DNA, 80 bp, synthetic construct
  source 1..80: mol_type = other DNA
ggtagggcaaatcaagggaaaatggacatttcaggtgttcaggctcctgtgggagctatcactaccattgaggatccagt

SEQ ID NO: 170169 - DNA, 80 bp, synthetic construct
  source 1..80: mol_type = other DNA
tttctgttgctttgcggcaggtgaagtaagaagagccatcagaggggaaaagttattgtcctgctgcaactatccccaag

SEQ ID NO: 170170 - DNA, 80 bp, synthetic construct
  source 1..80: mol_type = other DNA
gcacatgatagcgcggttcggtggtggcgaacggcgtttgtgggtgccgatacacatattcgcaccagagtaggccgttc

SEQ ID NO: 170171 - DNA, 80 bp, synthetic construct
  source 1..80: mol_type = other DNA
tggttattgagacttacaagaatatagatctagaccgcttgaaaatagtggcttatggtgatgatgtcattgcttcatac

SEQ ID NO: 170172 - DNA, 80 bp, synthetic construct
  source 1..80: mol_type = other DNA
cagaacagtatgtaccaataactatatctattagtccaatgtgctcggaattttcaggtgcacgtaacatggtacaggga

SEQ ID NO: 170173 - DNA, 80 bp, synthetic construct
  source 1..80: mol_type = other DNA
agagggttggaacagatccacctgcaccacagttcaaccaagatctattagcagtcgagttaccagaatctttgtaatga

SEQ ID NO: 170174 - DNA, 80 bp, synthetic construct
  source 1..80: mol_type = other DNA
gtgacaagaaccctagcaaacttattagactagatactacaacttggcaacatacttggcctaggcagcgcttaatcaat

SEQ ID NO: 170175 - DNA, 80 bp, synthetic construct
  source 1..80: mol_type = other DNA
tcaacagctcctgtctatcctacaggcccaccaagaaaaagaccaaaaagggacaccgacccgtacgactcgcagcaaga

SEQ ID NO: 170176 - DNA, 80 bp, synthetic construct
  source 1..80: mol_type = other DNA
gccataacaggggctcctgggatagatgcaattaatatggattcttctcctggatatccttatgttcaagaaaaattaac

SEQ ID NO: 170177 - DNA, 80 bp, synthetic construct
  source 1..80: mol_type = other DNA
gtgagtctgctggactccgaggaccaggtcgaccacctcaacatattcccccacgtgttctccgagaggatgatcctgta

SEQ ID NO: 170178 - DNA, 80 bp, synthetic construct
  source 1..80: mol_type = other DNA
aaatcaggcatactgggaagcacttacaaagcgcaacgaccaggcaacacaaataggacaggcccgcgccacacaatttg

SEQ ID NO: 170179 - DNA, 80 bp, synthetic construct
  source 1..80: mol_type = other DNA
ttaagaaaagggatttgattaataagcaaacaaaagatatcacaaaacttaagatggcaatggacaaatatggtgttgac

SEQ ID NO: 170180 - DNA, 80 bp, synthetic construct
  source 1..80: mol_type = other DNA
tctttatttatactgtatgaggaacatctgagacacatgaataactggagtagaagcaatgacaacctagaacttgccag

SEQ ID NO: 170181 - DNA, 80 bp, synthetic construct
  source 1..80: mol_type = other DNA
agtgacgtttgtgataactagcaggcaagacccaggtacaaatttggagcaagatatgcccgtcttgtcgcaccaaataa

SEQ ID NO: 170182 - DNA, 80 bp, synthetic construct
  source 1..80: mol_type = other DNA
taacccattttacatgtgtaatggtacactactaggtaatggtatgatataccctcatcagatgatcaacctccgcacca

SEQ ID NO: 170183 - DNA, 80 bp, synthetic construct
  source 1..80: mol_type = other DNA
gggtgcagtcgccagagttgcggacacaattagcagtggcccaacaaattctcaagcagtcccagcactcactgcagtgg

SEQ ID NO: 170184 - DNA, 80 bp, synthetic construct
  source 1..80: mol_type = other DNA
aggaaaagttagtatgtactatgtgacaattacaaagaagcctagtaatgacaggatcttggtactacccttggagatga

SEQ ID NO: 170185 - DNA, 80 bp, synthetic construct
  source 1..80: mol_type = other DNA
cagaaccatcctgttggcatatacagcagatttacaagttgatgcctgtacagcacaggggccagacaggatacctacat

SEQ ID NO: 170186 - DNA, 80 bp, synthetic construct
  source 1..80: mol_type = other DNA
cgctcaaagaagctatacacggcaaagaggccgttctcaaaaaactcgccgaacgagagccccagcacgtacaccttgtc

SEQ ID NO: 170187 - DNA, 80 bp, synthetic construct
  source 1..80: mol_type = other DNA
tgagaattacaatgaaactaatgtggccagaagtaaattgttcgccaaatggaatatcacttacacagacactgtacaac

SEQ ID NO: 170188 - DNA, 80 bp, synthetic construct
  source 1..80: mol_type = other DNA
ttgatggggtcgtcaacgcccaaggattgtccaatagtgaaactcccattgaatttgacagaacaagcacaacaccagag

SEQ ID NO: 170189 - DNA, 80 bp, synthetic construct
  source 1..80: mol_type = other DNA
gtctggttgcacgttctcaccatcagggacctccgacgccccccacggacgaccgtgcgccgcagaataccccagtgaga

SEQ ID NO: 170190 - DNA, 80 bp, synthetic construct
  source 1..80: mol_type = other DNA
gtcaggcgcagtttacactggaaattacaaaatactcaacaggcatttggcaactgatgaagattggaaaaacctggtct

SEQ ID NO: 170191 - DNA, 80 bp, synthetic construct
  source 1..80: mol_type = other DNA
tgatgtggatacagaagttacactgttatggttagaccaaaatgaaaaattccgagatatacgcaggtttattcctgagt

SEQ ID NO: 170192 - DNA, 80 bp, synthetic construct
  source 1..80: mol_type = other DNA
aattcataacaccaatggctaacttagaagacaaaggccgagcattcaccagtgattacgtcattgctagtactaacatg

SEQ ID NO: 170193 - DNA, 80 bp, synthetic construct
  source 1..80: mol_type = other DNA
acaaccagtgcacgcagacatcacaatgccgggtgtacaggctgcagatggacaagtgggtttacaattccgataagctc

SEQ ID NO: 170194 - DNA, 80 bp, synthetic construct
  source 1..80: mol_type = other DNA
tgctccaaagagagaagtacccagtgtacaacttagcatgaaatacaagttcacatttaactggggtggtaatcctattc

SEQ ID NO: 170195 - DNA, 80 bp, synthetic construct
  source 1..80: mol_type = other DNA
aatgatttctcagtcagactcttgaaagacacaccatttatcacgcagaagaacttctttcaaggcgacaaggcttctga

SEQ ID NO: 170196 - DNA, 80 bp, synthetic construct
  source 1..80: mol_type = other DNA
tgatagtggtgaaacaaggaccacttacatgcatttcactgggtcagaaacttctattgaaacctttttgggtagatcag

SEQ ID NO: 170197 - DNA, 80 bp, synthetic construct
  source 1..80: mol_type = other DNA
aggcatgtgatatcttggaactaccatacgtgtgtaagcagggagactcctggctgaagaagttcactgaggcctgtaat

SEQ ID NO: 170198 - DNA, 80 bp, synthetic construct
  source 1..80: mol_type = other DNA
cgtggttttttgggcgtactggggacggtgggtgtgcggagacggtggccttttgcggcagggacggagcgttgcggaga

SEQ ID NO: 170199 - DNA, 80 bp, synthetic construct
  source 1..80: mol_type = other DNA
gttgtgtcaagttgacagcatgattccaataaataatgttacagataaaatcaggagtgttgacatgtatacagtggtgc

SEQ ID NO: 170200 - DNA, 80 bp, synthetic construct
  source 1..80: mol_type = other DNA
cgatctgcccgtctactgcgtggtcaacaaccgcgcgtaccaggagctctgcgagctggccgacccgctgggcgactcgc

SEQ ID NO: 170201 - DNA, 80 bp, synthetic construct
  source 1..80: mol_type = other DNA
aaaggaaaaaccagggcaatcgaggctgccagtatgaatgacacagcatttttccggatgacatttgggaacttgtatgc

SEQ ID NO: 170202 - DNA, 80 bp, synthetic construct
  source 1..80: mol_type = other DNA
atacttgcagagtgcaagaagattcccttataccaagaacaggtgaaaggctatccaatggcagatgaaaaggcacaggg

SEQ ID NO: 170203 - DNA, 80 bp, synthetic construct
  source 1..80: mol_type = other DNA
ggaggtgtcttaaaaacaacactactaggtgaaatagcacagtattacactcattgggcaggttcaattagaatatcatt

SEQ ID NO: 170204 - DNA, 80 bp, synthetic construct
  source 1..80: mol_type = other DNA
cggcctattaccgtcggcgcgactctccgggcggtatggatgaaccaccgtccggatgggagcgttacgacggtggtcac

SEQ ID NO: 170205 - DNA, 80 bp, synthetic construct
  source 1..80: mol_type = other DNA
gaattttcgcagtctcttttccctcttcccttgttattcccatagaattacagtgaggttacacaggtggagattcagtt

SEQ ID NO: 170206 - DNA, 80 bp, synthetic construct
  source 1..80: mol_type = other DNA
atgctatagttcccattactatatcaataagtccaatgtttgccgaattctctggggcacgtgcaagaccggagaggcaa

SEQ ID NO: 170207 - DNA, 80 bp, synthetic construct
  source 1..80: mol_type = other DNA
ccttgcaccaccttccaggtactgcgcaagaactacaatacagttataggaacttccgtaaaagaccaagagtccacaca

SEQ ID NO: 170208 - DNA, 80 bp, synthetic construct
  source 1..80: mol_type = other DNA
ggctagtggacagcaatgatgtgaatttggaaatcacagtggttaacctagacaggaatgagaaattcagggacattcga

SEQ ID NO: 170209 - DNA, 80 bp, synthetic construct
  source 1..80: mol_type = other DNA
cgcgcggaccccgtcccctggcgcaacactcgttcccgtccccgcgccgcgaaaagctccgtacagaaacccgtggaaag

SEQ ID NO: 170210 - DNA, 80 bp, synthetic construct
  source 1..80: mol_type = other DNA
gagcagaagccgaagaagactcaggttcggagagcccgtcggtcacctcgtcacaagagagagaagccgaagtccaagaa

SEQ ID NO: 170211 - DNA, 80 bp, synthetic construct
  source 1..80: mol_type = other DNA
ttgcaacaaatgtaaccaaatttcccatgttttgtgcagatgtgggcaccgctataccatatggagaagtgaacttgagt

SEQ ID NO: 170212 - DNA, 80 bp, synthetic construct
  source 1..80: mol_type = other DNA
gacgcaggatatctgcaggatcaggtcagcctcgttggtggccgtggggaagccctcctcccccagacactcgatatcga

SEQ ID NO: 170213 - DNA, 80 bp, synthetic construct
  source 1..80: mol_type = other DNA
aaacattatacagagaagaaatatacaatttgattgggaaactaaatttactaaccaagcaacacacattaaccccacat

SEQ ID NO: 170214 - DNA, 80 bp, synthetic construct
  source 1..80: mol_type = other DNA
agactttcagaatcccagagtttatgggcaaagtgtgaacatctacgataatgcccctactccgggtaaattgagaaaat

SEQ ID NO: 170215 - DNA, 80 bp, synthetic construct
  source 1..80: mol_type = other DNA
ggataagcaaggatgaccacctccccgaaatgcaaaataccggtgcatttggacagcaatctggtgctatatatgtagca

SEQ ID NO: 170216 - DNA, 80 bp, synthetic construct
  source 1..80: mol_type = other DNA
catataatcacaacaagcaagggtgagtttaacctacttggagtgcatgataactgtgctgtggttcccacgcatgccga

SEQ ID NO: 170217 - DNA, 80 bp, synthetic construct
  source 1..80: mol_type = other DNA
ttagggcatccacgatgtagccgctcgcggggttcccctccccagtgatcatctcggataggggattcctgtccatgacc

SEQ ID NO: 170218 - DNA, 80 bp, synthetic construct
  source 1..80: mol_type = other DNA
aaaaccaccaaagacacaaataagctacaattaatgctggacacatacgggcttgatctgccgtatgttacttatctgaa

SEQ ID NO: 170219 - DNA, 80 bp, synthetic construct
  source 1..80: mol_type = other DNA
gcagcaccagcacagccacctccaggggtcatcaacgaccaacgcaaccctctaagactcaaggccagagccggggacag

SEQ ID NO: 170220 - DNA, 80 bp, synthetic construct
  source 1..80: mol_type = other DNA
cgcggccgccagtaccagtgaggcctagacaccccgcgggctcacccgcaggaggtgaaccaccgagagccctgccatgg

SEQ ID NO: 170221 - DNA, 80 bp, synthetic construct
  source 1..80: mol_type = other DNA
acagtaacacaacaggcagtagatgatgtgtggagactctttgaaacctccataaaaccatgtgtcaaactaaccccact

SEQ ID NO: 170222 - DNA, 80 bp, synthetic construct
  source 1..80: mol_type = other DNA
gacacacaaatagttgcgttactattcacagtggcattacctatacccgtaacgttgcacaaccactgatcaccattgtc

SEQ ID NO: 170223 - DNA, 80 bp, synthetic construct
  source 1..80: mol_type = other DNA
tccgtacgtaacatcacatgccagcccttggggggacccaaggacagacaacgtccctcgttacgatgaacgtaacgcgt

SEQ ID NO: 170224 - DNA, 80 bp, synthetic construct
  source 1..80: mol_type = other DNA
gtgcgattgctgagggataccacacacatcggccagacagctctggtcgctcgaacccagggcattgatgacgtcattga

SEQ ID NO: 170225 - DNA, 80 bp, synthetic construct
  source 1..80: mol_type = other DNA
gcgggccatggcgtggagctggtggtggcagagaaggcgacgctggcggcgacccctccggcgccgccgctggaggaggc

SEQ ID NO: 170226 - DNA, 80 bp, synthetic construct
  source 1..80: mol_type = other DNA
agcaacctcacagacacaccctactacccttacctgcctccccctccccaagagttccgtgtaacctttaagcttggctt

SEQ ID NO: 170227 - DNA, 80 bp, synthetic construct
  source 1..80: mol_type = other DNA
acctaccaaactggggaataagcacaaagtacacaaaagaagaaccatatccctttgaatactacacaggactatacagt

SEQ ID NO: 170228 - DNA, 80 bp, synthetic construct
  source 1..80: mol_type = other DNA
agcaacatgctctggatgcccagacatctccgtccggatgttgcgagacactcccatgatacaacaccctgagtcgactc

SEQ ID NO: 170229 - DNA, 80 bp, synthetic construct
  source 1..80: mol_type = other DNA
ctacgccactttcattgcgcagaagagcaaggcattacagactacatacatatgctaggtgaggcatttggtaatgggtt

SEQ ID NO: 170230 - DNA, 80 bp, synthetic construct
  source 1..80: mol_type = other DNA
gagacggggcatacatcacaggtagtcccaagtgataccatacaaaccagacacgtccacaattaccacagtagaactga

SEQ ID NO: 170231 - DNA, 80 bp, synthetic construct
  source 1..80: mol_type = other DNA
atcccttcctgcattgaactctccatctgctgaggaatgtgggtacagcgatagggttagatctatcactttgggtaact

SEQ ID NO: 170232 - DNA, 80 bp, synthetic construct
  source 1..80: mol_type = other DNA
acacagggaatcaccaaggagacaaaatatttgcattccaaatacaaccagggttggactcagtgtttaagaggacacta

SEQ ID NO: 170233 - DNA, 80 bp, synthetic construct
  source 1..80: mol_type = other DNA
ttcaaacaggcccctttgcatacagaggaaacttaaagtctgctaccctaacatgcaaatatgcctctaaatggctgtgg

SEQ ID NO: 170234 - DNA, 80 bp, synthetic construct
  source 1..80: mol_type = other DNA
aaaacatccagattgctgtggaacattattccgctcagttgtttatgttagatatcaatccagagcccatatccttagag

SEQ ID NO: 170235 - DNA, 80 bp, synthetic construct
  source 1..80: mol_type = other DNA
gcctcttctgctccaggcaccaggcccgcgcgaggtctcccagcatgcggttgatctggcggcgcagggaatcgtaggca

SEQ ID NO: 170236 - DNA, 80 bp, synthetic construct
  source 1..80: mol_type = other DNA
cactgaggactgttagagatgacaatagtcttgggtatttaatgtgtaagcccttcttgactggcacaaccactggaaaa

SEQ ID NO: 170237 - DNA, 80 bp, synthetic construct
  source 1..80: mol_type = other DNA
tttggttttcttttgttatggacattgttattagaacactaattcaattagaacactaattttgaaaattggacactgaa

SEQ ID NO: 170238 - DNA, 80 bp, synthetic construct
  source 1..80: mol_type = other DNA
tgccacataccctccagaatacacacaaagaaactacctaagtcatgactatggcatttacagcccatactttttaacac

SEQ ID NO: 170239 - DNA, 80 bp, synthetic construct
  source 1..80: mol_type = other DNA
aaacaagcaatgttaggtgttcacatcatatgggacctgggcctgcaatcatcttgcaccattgtggtgccatggatttc

SEQ ID NO: 170240 - DNA, 80 bp, synthetic construct
  source 1..80: mol_type = other DNA
accacatacaacccactaatggacaagggcaaaggcaacaaaatatggtttcaatatctgtctaaaaagggcacagacta

SEQ ID NO: 170241 - DNA, 80 bp, synthetic construct
  source 1..80: mol_type = other DNA
gtcatttcctcttagaaggtaatcccccatcttaacttccctttaaattgtgatgcaagccctgggttatttatagaatg

SEQ ID NO: 170242 - DNA, 80 bp, synthetic construct
  source 1..80: mol_type = other DNA
agctacacaaacttagacaatactactttaagtgggagactcagcatacaggagtggcggtcccacctacgtggaccacc

SEQ ID NO: 170243 - DNA, 80 bp, synthetic construct
  source 1..80: mol_type = other DNA
agagacgaaagctaatactgactcagtggaaccccaatattgtcagacgatgctctataaagggtataatccccctcaca

SEQ ID NO: 170244 - DNA, 80 bp, synthetic construct
  source 1..80: mol_type = other DNA
acaacacggggatagcatccaacacaaccgcatcccaggacatattaaatgaaaactcttcatgcataaaaaataacagc

SEQ ID NO: 170245 - DNA, 80 bp, synthetic construct
  source 1..80: mol_type = other DNA
ggcttaagaaaacaatactttgaatgggaaactacaaaagcaccacaggctacctcaaccaatggcatgcaccacacatg

SEQ ID NO: 170246 - DNA, 80 bp, synthetic construct
  source 1..80: mol_type = other DNA
ggcacctaaaccgagccatgacaattgttcaagccgtttcgtcctttgtggttgtttctggcatgttgtatgtcatctac

SEQ ID NO: 170247 - DNA, 80 bp, synthetic construct
  source 1..80: mol_type = other DNA
acattagtaagggtgagatcgcttccaagttcacaaccactacaacagcggaagagcacggcgtgcaagccgcggtatgg

SEQ ID NO: 170248 - DNA, 80 bp, synthetic construct
  source 1..80: mol_type = other DNA
ttaatttgtcttgaacccttttctgtttcacctatgcttgagaaacttgtacaagataagtttcataatctacttaaagg

SEQ ID NO: 170249 - DNA, 80 bp, synthetic construct
  source 1..80: mol_type = other DNA
acaaaaataagacactggtactggacacaactaacatcctggacacaaacagtacctcacataaacagcaccttcgccaa

SEQ ID NO: 170250 - DNA, 80 bp, synthetic construct
  source 1..80: mol_type = other DNA
gctcatgtcaccatcggtagaagcatgtgggttttccgataggctcaagcaaatcactatcggaaactccacaatcacca

SEQ ID NO: 170251 - DNA, 80 bp, synthetic construct
  source 1..80: mol_type = other DNA
tccgaacgtcatttcacaccccatgcggttacctacccgttacccgttcgcccttaccttcccgttgtcatacaccttta

SEQ ID NO: 170252 - DNA, 80 bp, synthetic construct
  source 1..80: mol_type = other DNA
accacaatgggagcacaggtctcatctcaaaaagttggagctcatgaaaacaccaatgtggccacaggtggatcaactgt

SEQ ID NO: 170253 - DNA, 80 bp, synthetic construct
  source 1..80: mol_type = other DNA
ttgcacgtagtttccaccaacggctgcggcccctcctcctcctcgtcccagtccacgccgcctcatctccacccgccgtc

SEQ ID NO: 170254 - DNA, 80 bp, synthetic construct
  source 1..80: mol_type = other DNA
gggtaagaaccctcacaccgctgataaagctggtcaaggtatttccgcctgggataaaaccctcaacatcctcatgtcac

SEQ ID NO: 170255 - DNA, 80 bp, synthetic construct
  source 1..80: mol_type = other DNA
tggcatgacccctaataacatgatgggtgatttctgtgcgcgcataatagggagtgggacaccacccacgtcattgacta

SEQ ID NO: 170256 - DNA, 80 bp, synthetic construct
  source 1..80: mol_type = other DNA
ttacaatacaaacaaaactgaactagaaaaatggctatacaacacaggcagtctataccacacttttcacacccaagaat

SEQ ID NO: 170257 - DNA, 80 bp, synthetic construct
  source 1..80: mol_type = other DNA
cccagaaggtacccgtaggtaacaagagacactatggatctgatttggggccaggtacctctatcttggtgacctggtta

SEQ ID NO: 170258 - DNA, 80 bp, synthetic construct
  source 1..80: mol_type = other DNA
atttggaacttcatgggctaacacccctgtctacacagatgatgagaaatgaatttagagtcagtacaacagaaaatgta

SEQ ID NO: 170259 - DNA, 80 bp, synthetic construct
  source 1..80: mol_type = other DNA
agacatgagggtcatgataataagtccttacacagaaccagcacttatagggtcaactccagagcaaggctttgttccag

SEQ ID NO: 170260 - DNA, 80 bp, synthetic construct
  source 1..80: mol_type = other DNA
caagtgaagcaaaaagaataaaaactttgtacatcaaatgtagtaatattattaaacagaagaaaaggtgtgaaccagta

SEQ ID NO: 170261 - DNA, 80 bp, synthetic construct
  source 1..80: mol_type = other DNA
ccttgtccgctgggccaggtcacagaccagcccctcatccctgaccctcgcgccccatcttggcccgtccctcttgtccc

SEQ ID NO: 170262 - DNA, 80 bp, synthetic construct
  source 1..80: mol_type = other DNA
tatgaaaatatatttaaggactatctatataaggaggcagccttttatcaacaagtactagtatcctcctacattaaaaa

SEQ ID NO: 170263 - DNA, 80 bp, synthetic construct
  source 1..80: mol_type = other DNA
acctgaggatatgattgaaactcgttacgtccaaacatcacagaccagagatgaaatgagtattgagagcttccttggta

SEQ ID NO: 170264 - DNA, 80 bp, synthetic construct
  source 1..80: mol_type = other DNA
cagataactcaaaaaaaatacctggctggaatgactacctaaaaactgtaggcacaacaaactcatttcaaacaggcaac

SEQ ID NO: 170265 - DNA, 80 bp, synthetic construct
  source 1..80: mol_type = other DNA
tccctatcaacaacacagcagacaaccttaggaaggtgaatatgtacaccatacagttatccagtcaaacacaaacagct

SEQ ID NO: 170266 - DNA, 80 bp, synthetic construct
  source 1..80: mol_type = other DNA
ataaagagaaactgtcatatagctaccacagacaggggggattttaacctcctcggtgtctatgataattgtgcagtgat

SEQ ID NO: 170267 - DNA, 80 bp, synthetic construct
  source 1..80: mol_type = other DNA
aaagactcagattcagcagtccaactcagaagactccagccctggatccactccagtcaagaaacaaaagacgaagagga

SEQ ID NO: 170268 - DNA, 80 bp, synthetic construct
  source 1..80: mol_type = other DNA
agaccaccccgcgcggtaccctaccgcggagaaggggtcgacttcaaatcagactccatcaccccgctgacagcggtaga

SEQ ID NO: 170269 - DNA, 80 bp, synthetic construct
  source 1..80: mol_type = other DNA
ccagtgttacattcattccccctatggctgatctcccagacaaaggtaaaccctttgattctagatttgttttgtgtagt

SEQ ID NO: 170270 - DNA, 80 bp, synthetic construct
  source 1..80: mol_type = other DNA
tgcacgatgttgtccatttgtttgcggtaaagcagtctcattcaaggatcgaaattcatgcaacaagtatactcttgcac

SEQ ID NO: 170271 - DNA, 80 bp, synthetic construct
  source 1..80: mol_type = other DNA
gggacggtggcatcggggaagagacgtgtgaggcgttcgagcgagtgatcgcgtcgcccgctactggaacagggtgtgta

SEQ ID NO: 170272 - DNA, 80 bp, synthetic construct
  source 1..80: mol_type = other DNA
actttaaacccactgatgtaacaacatcacgcacatcgatcacggaggtccccacccttaggccatcagtggtaaatacg

SEQ ID NO: 170273 - DNA, 80 bp, synthetic construct
  source 1..80: mol_type = other DNA
acccttcggtgcgggtttgtcccgccctcgggttcctcgcggaacccccccccccctttctctttctttctatccgccct

SEQ ID NO: 170274 - DNA, 80 bp, synthetic construct
  source 1..80: mol_type = other DNA
gaagacgagtaaggagacggagggcttggaggcgtgggcgacgaaagagacgaactttcagacgcagacgcagacgaaag

SEQ ID NO: 170275 - DNA, 80 bp, synthetic construct
  source 1..80: mol_type = other DNA
gagcctacgtcgtcaatttcctggggcggcgctacatcctaatataagtaactgcacttccgaatggctgagttttccac

SEQ ID NO: 170276 - DNA, 80 bp, synthetic construct
  source 1..80: mol_type = other DNA
ttcgcccgtcagcttcgaggtataacctacaacacggaagggaaggggggtacaaaacgtgaaattagacttttttttta

SEQ ID NO: 170277 - DNA, 80 bp, synthetic construct
  source 1..80: mol_type = other DNA
agttgaaccagaggacatgatagaaaccaggtatgtttacaatgacaacacaaatgctgagacaaccattgaaaactttc

SEQ ID NO: 170278 - DNA, 80 bp, synthetic construct
  source 1..80: mol_type = other DNA
cgacgatttccggcagtttctacacatatattcgcaagatgtggcgtgttacggtgaaaacctggcctatttccctaaag

SEQ ID NO: 170279 - DNA, 80 bp, synthetic construct
  source 1..80: mol_type = other DNA
aggccccgtcacgtgacggtcacgtgggtgctgcgtcacggccgccattttagttcacaaaatggccgacttccttccgc

SEQ ID NO: 170280 - DNA, 80 bp, synthetic construct
  source 1..80: mol_type = other DNA
gtgctccaaaacagcgtcaacaacagccacacagacacctacgtggagacgacacgggactttttattgacggagactca

SEQ ID NO: 170281 - DNA, 80 bp, synthetic construct
  source 1..80: mol_type = other DNA
gattattctaattatgatggtagtcttaatcctgtttggtttaaattacttgctggcattcttagtgatttaggtttccc

SEQ ID NO: 170282 - DNA, 80 bp, synthetic construct
  source 1..80: mol_type = other DNA
gttccaagtcaacaatgaattatggcaaagtgtaaaggcctgtgttaaatctaaatttagggagatttttggaattaatg

SEQ ID NO: 170283 - DNA, 80 bp, synthetic construct
  source 1..80: mol_type = other DNA
ttctttactacaggccttaaaaacccatacccaacaaaccccaatacaccttcagctccaaattcagtagctgcaacaca

SEQ ID NO: 170284 - DNA, 80 bp, synthetic construct
  source 1..80: mol_type = other DNA
atatgggatagtgttcacccttgttacaccgttttccatgagcaaactgaaacgttttcatcgctctggagtgaatacca

SEQ ID NO: 170285 - DNA, 80 bp, synthetic construct
  source 1..80: mol_type = other DNA
ttgaccaagcccaatgaacagaccatactcttagcaatctcatctgatcttcaagtggatagtgtagacactcctggacc

SEQ ID NO: 170286 - DNA, 80 bp, synthetic construct
  source 1..80: mol_type = other DNA
cgcccccccccgcgcatgcgcggggaccccccccccccgttctatatccaccgcgcatgcgcggccacgccctcgccgcc

SEQ ID NO: 170287 - DNA, 80 bp, synthetic construct
  source 1..80: mol_type = other DNA
attgctccagacaaatcagaattttccggagcacgccaatcagtagctgcgcaggggatacctaccaggatgcccagcgg

SEQ ID NO: 170288 - DNA, 80 bp, synthetic construct
  source 1..80: mol_type = other DNA
cttccgggtcaaaggtcatgcctacgtcataagtcacgtggggacggctgctgtaaacacggaagtagctgacccgcgtg

SEQ ID NO: 170289 - DNA, 80 bp, synthetic construct
  source 1..80: mol_type = other DNA
attgggttgtacactgcactcgttattttgataaatacatagtgcgttagtaactctcggtttgtctatataccattgaa

SEQ ID NO: 170290 - DNA, 80 bp, synthetic construct
  source 1..80: mol_type = other DNA
catcggatgcagcccggttaacgtgccggcacggcctgggtaaccaggtattttgtccacataaccgtgcgcaaaatgtt

SEQ ID NO: 170291 - DNA, 80 bp, synthetic construct
  source 1..80: mol_type = other DNA
acacccccgacacacccgacccacgcccgcggtacggaggacatcacagacgaagtctcagaggccgagaggggggggtg

SEQ ID NO: 170292 - DNA, 80 bp, synthetic construct
  source 1..80: mol_type = other DNA
ggctcagcacagtcagcttcagtctcaaagtactgtttgaccagaaccagaggggactcaacaggtggtcggcctccaac

SEQ ID NO: 170293 - DNA, 80 bp, synthetic construct
  source 1..80: mol_type = other DNA
tgggggcccccaagctgtttgaggacagatggtacccccaggtggacctctgtgacgtcacactggcagttgtaaccgca

SEQ ID NO: 170294 - DNA, 80 bp, synthetic construct
  source 1..80: mol_type = other DNA
cacaagactaacaaaactacaacagcaatggcagaaagtatatccacagctacctacacaacaacccacagagacaacac

SEQ ID NO: 170295 - DNA, 80 bp, synthetic construct
  source 1..80: mol_type = other DNA
gctgcagaagggaacaaatatggtttaacaattacaccagctgacaaatctgacaccttcaagaaactcgattatagcag

SEQ ID NO: 170296 - DNA, 80 bp, synthetic construct
  source 1..80: mol_type = other DNA
cagctccaacagctcgccagccaagtcctcaaagtccaagccgggcaaggcctacaccccctattatcttcccaagcata

SEQ ID NO: 170297 - DNA, 80 bp, synthetic construct
  source 1..80: mol_type = other DNA
aggattgtccaatagtgaaactcccatcgaatttgacaggacgagcacaacaccagaagtcggagtggtgcaaaaggcag

SEQ ID NO: 170298 - DNA, 80 bp, synthetic construct
  source 1..80: mol_type = other DNA
tgactcagtggcacccctctgtagtgagacgctgctttatcaggggcatagtccccattctaatatgcgggcacacaaaa

SEQ ID NO: 170299 - DNA, 80 bp, synthetic construct
  source 1..80: mol_type = other DNA
tcaaatggatccgggtttctccagcgtgctaaagcgcacactactgggagagatgttaaattactacgcccattggtcag

SEQ ID NO: 170300 - DNA, 80 bp, synthetic construct
  source 1..80: mol_type = other DNA
acgggccgtggaaaactcagccattcggaagtgcgccttcttataatggacatgcccctgtgggcggcctgcacaggata

SEQ ID NO: 170301 - DNA, 80 bp, synthetic construct
  source 1..80: mol_type = other DNA
gcgctggtcgtgcactgtatatccccccctatgacttgctcctccatgagtggtatgaaaaattttaagttgtttagata

SEQ ID NO: 170302 - DNA, 80 bp, synthetic construct
  source 1..80: mol_type = other DNA
atatcaaagaggattataacactcaaagttttactaagtggaaggttagttttcaagagatggcacaaattagaagaaaa

SEQ ID NO: 170303 - DNA, 80 bp, synthetic construct
  source 1..80: mol_type = other DNA
ctgacactaggaaagacatcaacaccgtaacatcaatacgaagtgggcgtcgaggcgacatgtctgcactaaacacccac

SEQ ID NO: 170304 - DNA, 80 bp, synthetic construct
  source 1..80: mol_type = other DNA
gatataagacaactggaacaaattgctgaagaacaaggtttaggggattacatcaccagtttgggaagagcattcggagt

SEQ ID NO: 170305 - DNA, 80 bp, synthetic construct
  source 1..80: mol_type = other DNA
tggtcagagtgcataacgaagaagggcttgaggaatacctcgttgtcttccgctccaaagaacaagaacgcaaccgtaaa

SEQ ID NO: 170306 - DNA, 80 bp, synthetic construct
  source 1..80: mol_type = other DNA
attccatattaatctcttattcatcagatttaatcatttaccgaacaaacacaaaaggtgatgattatattccaacatgt

SEQ ID NO: 170307 - DNA, 80 bp, synthetic construct
  source 1..80: mol_type = other DNA
gtcctatcactgtgtcacttaatgtggcataatggtagggatgtttacagtgagtttgagcggaagatacgcagtgttag

SEQ ID NO: 170308 - DNA, 80 bp, synthetic construct
  source 1..80: mol_type = other DNA
actccaggtacaccttgacgtactggtcacctatcacctgcatcttggttgcgcgcgtgttctccatggagcaaaccagc

SEQ ID NO: 170309 - DNA, 80 bp, synthetic construct
  source 1..80: mol_type = other DNA
tggagactatgacaacaactcatccgacacacaacaagcaaatattgccagcattaccactaaaatacctcaaaatgcca

SEQ ID NO: 170310 - DNA, 80 bp, synthetic construct
  source 1..80: mol_type = other DNA
ctaaaaatgacacccagttcagagacgtcccgggcagactcataatagcagacgtgcccctgtacgcagccctactgggc

SEQ ID NO: 170311 - DNA, 80 bp, synthetic construct
  source 1..80: mol_type = other DNA
agctttagccgtgtttgctgtaccagagtgtgtgttttcaggtaattcatcggaaaaaactaattacaccagctatgtta

SEQ ID NO: 170312 - DNA, 80 bp, synthetic construct
  source 1..80: mol_type = other DNA
aaacttcatacaatttagatccaaacatcgcacagagccagtatgtgttctcatacacggcacccctggatcaggtaaat

SEQ ID NO: 170313 - DNA, 80 bp, synthetic construct
  source 1..80: mol_type = other DNA
tgctcaagtttccagccaaaaggtaggggcacatgaaaacaccaatgtggccacgggaggttctacagttaactacacta

SEQ ID NO: 170314 - DNA, 80 bp, synthetic construct
  source 1..80: mol_type = other DNA
aacctgacgaacggagaggacacgtgcaaactgactcaagatgccgcagctgctgaaaaaggtaaagtccagacggcagt

SEQ ID NO: 170315 - DNA, 80 bp, synthetic construct
  source 1..80: mol_type = other DNA
atcatttgggacgttggccttcaatcaagttgtgtgttatgcgtgccctggatcagtcaaacccactatcgtctggtgga

SEQ ID NO: 170316 - DNA, 80 bp, synthetic construct
  source 1..80: mol_type = other DNA
caaagaaaacgggaaggtgcaaacagcagtgtgcaacgccgccatgggcgtcggtgtaggtaacttaacaatcttcccgc

SEQ ID NO: 170317 - DNA, 80 bp, synthetic construct
  source 1..80: mol_type = other DNA
taagtgtgaaagacatggtccaaatgcgcaggaaatgcgagctatttacctacctaaggtttgacatggaggtaactttt

SEQ ID NO: 170318 - DNA, 80 bp, synthetic construct
  source 1..80: mol_type = other DNA
ccaggagagccaacatagggaattgtatggaggcactatttcaaggcccgttgcagtacagagatttaaaaatagacata

SEQ ID NO: 170319 - DNA, 80 bp, synthetic construct
  source 1..80: mol_type = other DNA
taacacaactagtgagatctctaaagaactgacagggaacgagacaggaggtgagatcattaccaaggttgctgatgacg

SEQ ID NO: 170320 - DNA, 80 bp, synthetic construct
  source 1..80: mol_type = other DNA
taccctaattacaacgggtccaatattaagtgcaccgccgtaagtcgtcagtctataacaacactaggaaagtttgggca

SEQ ID NO: 170321 - DNA, 80 bp, synthetic construct
  source 1..80: mol_type = other DNA
ctgcgtaggaaactggaattcttcacatacctaagatttgaccttgaaatcaccttcgtaataactagtgcccaaatcac

SEQ ID NO: 170322 - DNA, 80 bp, synthetic construct
  source 1..80: mol_type = other DNA
cccggccccgccggcggccagaacgctcgaaaacccccgagaagcgcagcggcgaaacgacacgcaccggctgcgcgcgc

SEQ ID NO: 170323 - DNA, 80 bp, synthetic construct
  source 1..80: mol_type = other DNA
gacgtcaggagcctactgcgtcaaacgcggaagtaggccccgaacgtcactgtcacgtggtgcgtgcgtcacagccgcca

SEQ ID NO: 170324 - DNA, 80 bp, synthetic construct
  source 1..80: mol_type = other DNA
acaaatgggactggcgacggggcttctttaaagcgcgcagtcctcgcaagaagagaaagatcaagaagtccaagaggtcc

SEQ ID NO: 170325 - DNA, 80 bp, synthetic construct
  source 1..80: mol_type = other DNA
cgtgccaatgcttactgctgctgagaccgggcacacatctcaagcagtacccagtgacactatacagaccaggtgcgtag

SEQ ID NO: 170326 - DNA, 80 bp, synthetic construct
  source 1..80: mol_type = other DNA
acagggaccaagtcaagcaattccaatgatgttcaacaagcagtgcccaacgcttgcatgggtgtggcggttgggaactt

SEQ ID NO: 170327 - DNA, 80 bp, synthetic construct
  source 1..80: mol_type = other DNA
gcgcctggacgtaaatccagacctcatgtacgccaccgatccgcacgaccgcgacgaggtcgcgcgtacggacgagtgga

SEQ ID NO: 170328 - DNA, 80 bp, synthetic construct
  source 1..80: mol_type = other DNA
aatttgttcatgaatacctattcctattttagaggttctttaataatcaggctatcaatctatgctagtacttttaatag

SEQ ID NO: 170329 - DNA, 80 bp, synthetic construct
  source 1..80: mol_type = other DNA
aggtagaatacacgtcaggattccacgttactgttccagtactgttcagacgtatcttaacttccgtaaatccataaata

SEQ ID NO: 170330 - DNA, 80 bp, synthetic construct
  source 1..80: mol_type = other DNA
gtcctttccccgcgttgttgcccaaactcttttacgaacccgtgcgggactatatgacctacatgaatctggctgagctg

SEQ ID NO: 170331 - DNA, 80 bp, synthetic construct
  source 1..80: mol_type = other DNA
gatgacttatctaaaaagttcctaccattgtacccttcagaggctaaaagaatatcagtcctgtacaaaagaagccagac

SEQ ID NO: 170332 - DNA, 80 bp, synthetic construct
  source 1..80: mol_type = other DNA
gttttccacaccctcatttgaggccatgacacaaggtaagagggagatggggggaggtctcgagggcttctcttcacagc

SEQ ID NO: 170333 - DNA, 80 bp, synthetic construct
  source 1..80: mol_type = other DNA
cacgtctctgtaattacatgttcaaagcaaatgtggactttaaagcccaggctgtcaccgatcaacgtggtgaccataga

SEQ ID NO: 170334 - DNA, 80 bp, synthetic construct
  source 1..80: mol_type = other DNA
ataccaccaggtgcaccgaacccaaccaaatgggatgattatacatggcaaagtgcaactaaccccagtgtgttctttaa

SEQ ID NO: 170335 - DNA, 80 bp, synthetic construct
  source 1..80: mol_type = other DNA
tagccagcgtgccgtgtacgttactcactgcctgtttctacgtggctatgtttgccagtttgtgttttattacggagatt

SEQ ID NO: 170336 - DNA, 80 bp, synthetic construct
  source 1..80: mol_type = other DNA
ggcgaaaacaaatacttttttacaccagacggactatggggagaccccatatacatatacaataacggagtacaacaaca

SEQ ID NO: 170337 - DNA, 80 bp, synthetic construct
  source 1..80: mol_type = other DNA
ctctctatggagtagagtgcactggtaccccacagtattccaccagactgaagtacttgagtgcatagcacaaactggac

SEQ ID NO: 170338 - DNA, 80 bp, synthetic construct
  source 1..80: mol_type = other DNA
aacaggacgaatacactagtgcaggtaacgtgacctgctggtaccagacaggcatcgtggttcctgcaggtacgccaaca

SEQ ID NO: 170339 - DNA, 80 bp, synthetic construct
  source 1..80: mol_type = other DNA
ggaaacatagtatactgccagtggtgctcagaaaagacagcagatgtgtccacaaccaaaagcaaatgcataataaaaga

SEQ ID NO: 170340 - DNA, 80 bp, synthetic construct
  source 1..80: mol_type = other DNA
tgcagggagcaaggacagacttatgcagtctcttaaccatctattgactgctatggatacaactgatgcagatattgcaa

SEQ ID NO: 170341 - DNA, 80 bp, synthetic construct
  source 1..80: mol_type = other DNA
atttaccacctggagtttgtctacaagttcctggcctttaagctgaagaactgcaactacccttcctcgcccgtgtttgt

SEQ ID NO: 170342 - DNA, 80 bp, synthetic construct
  source 1..80: mol_type = other DNA
cagacgacggattagacgccctcgtcgccgcactcgacgaagaacagtaaggaggcgcaaacagtggaggcgggggcgac

SEQ ID NO: 170343 - DNA, 80 bp, synthetic construct
  source 1..80: mol_type = other DNA
atgattatcaggaagtagctttaaatgtgacagaggcttttgacgcatggaataatacagtaacagaacaagcaatagaa

SEQ ID NO: 170344 - DNA, 80 bp, synthetic construct
  source 1..80: mol_type = other DNA
tgactcccacaggccaaccagaaacctctacgtacacttcctgggctgggtctatgagagcatataactaagtgcacttc

SEQ ID NO: 170345 - DNA, 80 bp, synthetic construct
  source 1..80: mol_type = other DNA
acaccaagtacaaaacaaaggacacagacccatcagaaatgtactccagttggaaggttaccaccagacaagttgcacag

SEQ ID NO: 170346 - DNA, 80 bp, synthetic construct
  source 1..80: mol_type = other DNA
atatgtaaccagacccacaacagtacctcgtaaataaagacgcacacacctcacgcatatagtaccatcacaccgtgtgg

SEQ ID NO: 170347 - DNA, 80 bp, synthetic construct
  source 1..80: mol_type = other DNA
tgttgcagaaccgcaaaaacccgacgcgaaagaagcccaggagtccgcgcgccagaaagtgcgcctgccgcgtctcggga

SEQ ID NO: 170348 - DNA, 80 bp, synthetic construct
  source 1..80: mol_type = other DNA
acattgtacctccttttaaactaaacaaatacagctgcccatcattccacccaggtatgatgatgcagagacgcaaaaaa

SEQ ID NO: 170349 - DNA, 80 bp, synthetic construct
  source 1..80: mol_type = other DNA
ggatcttggcttacaatcaagtgcaacgatggtggccccgtggatctctaacagtgtataccgccgatgtgtcaaggatg

SEQ ID NO: 170350 - DNA, 80 bp, synthetic construct
  source 1..80: mol_type = other DNA
ttccccgagcccggtggaaagcctgctacagtacaaatcgaaaacccgaagctgctccacgaaggatacttcttccgcgc

SEQ ID NO: 170351 - DNA, 80 bp, synthetic construct
  source 1..80: mol_type = other DNA
cgtcatatgggacgtgggcctgcagtcctcctgtgtgctatgcatcccttggattagtcagactcattacagactagtgc

SEQ ID NO: 170352 - DNA, 80 bp, synthetic construct
  source 1..80: mol_type = other DNA
ataccgaagcagatgagcatcaccagaggcttcatgcctcctaccggaagaataaaaataactcatagggccgaacggtg

SEQ ID NO: 170353 - DNA, 80 bp, synthetic construct
  source 1..80: mol_type = other DNA
acttagaaccgacagtgagatcggctgtcccttccgctatacagaacacactgcagaatgtattggcagcggccacgaaa

SEQ ID NO: 170354 - DNA, 80 bp, synthetic construct
  source 1..80: mol_type = other DNA
aatagaccacctagaaaattcctcactgattttccctactaccctttctgcaaaaataattacaatgtaacctttcagct

SEQ ID NO: 170355 - DNA, 80 bp, synthetic construct
  source 1..80: mol_type = other DNA
acggggcatgtcctaataacatgatgggcacgttctcagtgcggactgtggggacctccaagtccaagtaccctttagtg

SEQ ID NO: 170356 - DNA, 80 bp, synthetic construct
  source 1..80: mol_type = other DNA
ccatggagacccgcttcaccgtgcgggcacagggtcttccagttcgtctacccagtggtggacagcagttcatgacaact

SEQ ID NO: 170357 - DNA, 80 bp, synthetic construct
  source 1..80: mol_type = other DNA
aggttcaatcaaattaacattcctgtgtgtgtgtgacagttttagcactggaaaattcctaatagcatacacccctccag

SEQ ID NO: 170358 - DNA, 80 bp, synthetic construct
  source 1..80: mol_type = other DNA
agcggggaggaaacaataggagaggccttcgagtggctcgagacaacagtcacacaaatcaacagggaggcagtaaatca

SEQ ID NO: 170359 - DNA, 80 bp, synthetic construct
  source 1..80: mol_type = other DNA
tcagagacttgactgacacaaacttagagatcaccatagtcaaattggatcgtaatcaaaagtttagagatatcagacat

SEQ ID NO: 170360 - DNA, 80 bp, synthetic construct
  source 1..80: mol_type = other DNA
tgatacaaacacgcagccggagcgagtcaactgttgagtcgttctttgctcggggggcttgtgtcacgatcatgtcagtg

SEQ ID NO: 170361 - DNA, 80 bp, synthetic construct
  source 1..80: mol_type = other DNA
ttcacggcctctggggtgaccggggccatcgggtttacttttcacacgtagacctgggaagtttgataggactgtaccag

SEQ ID NO: 170362 - DNA, 80 bp, synthetic construct
  source 1..80: mol_type = other DNA
taccagcgtagactcgattcacatgtcatcagcaaagccatcgaacacatggatgacatcaaagattctttctgggatga

SEQ ID NO: 170363 - DNA, 80 bp, synthetic construct
  source 1..80: mol_type = other DNA
cacaatgccgccggcatcgataggcagttctttgaagcctgctttcgatgccacagtagttgctgcggctgcggcaattt

SEQ ID NO: 170364 - DNA, 80 bp, synthetic construct
  source 1..80: mol_type = other DNA
aatcaatactcctaatacaaccaagttacatcctagtgtcttttacaatgttttcccaggtagtaaagagcctgcagtct

SEQ ID NO: 170365 - DNA, 80 bp, synthetic construct
  source 1..80: mol_type = other DNA
atatgggacattgggttgcagtcttcatgcactatggtggtaccttggatcagtaataccacatacagacaaaccatcaa

SEQ ID NO: 170366 - DNA, 80 bp, synthetic construct
  source 1..80: mol_type = other DNA
gttctatctttgtgtcatttaatgtggcacaatggacgggacgtgtacaaggagttcgagagaaagatacgcagcgtgag

SEQ ID NO: 170367 - DNA, 80 bp, synthetic construct
  source 1..80: mol_type = other DNA
agcgagatcaccaaggaggcgctgcgccccgcggccgacgtcgttgccaccaacaactcctccgtccaggctcacggagg

SEQ ID NO: 170368 - DNA, 80 bp, synthetic construct
  source 1..80: mol_type = other DNA
gctctaatagcctgtggacagacgccagaatagctctcagatgcccctacacagatccacctctaacaggatccacagat

SEQ ID NO: 170369 - DNA, 80 bp, synthetic construct
  source 1..80: mol_type = other DNA
gttgaggggccggactgtcctagtggtcggggaccaggccaacatacccgggaaagtggttgattggctgtcggacaacc

SEQ ID NO: 170370 - DNA, 80 bp, synthetic construct
  source 1..80: mol_type = other DNA
ctacgtcaccgatgacgtggggaggcgtgctgtaaaacccggaagcaggccccgcacgtcattgtcacgtggctgctacg

SEQ ID NO: 170371 - DNA, 80 bp, synthetic construct
  source 1..80: mol_type = other DNA
agaggtgtagtgctctgtcattccggtgaccttgcacgccagttttatcaccccttcccttttgtaacttagaagaatca

SEQ ID NO: 170372 - DNA, 80 bp, synthetic construct
  source 1..80: mol_type = other DNA
ctactgtacagggtcctagcttagactttgctctgtcactcttgcgacgcaatattagacaggtgcaaacggatcagggc

SEQ ID NO: 170373 - DNA, 80 bp, synthetic construct
  source 1..80: mol_type = other DNA
gagcgatcatacttcacacaagtccaaggtgaaatccagtggatgaggccatctagggagggtgggtacccaatcataaa

SEQ ID NO: 170374 - DNA, 80 bp, synthetic construct
  source 1..80: mol_type = other DNA
acaagcagtcaagcaaggcttcccagtagtgctcaacccaggttctaaccagttcctaaccactagtgacaggagtgccc

SEQ ID NO: 170375 - DNA, 80 bp, synthetic construct
  source 1..80: mol_type = other DNA
ggcacgcgatcgagagttgtttcccgaaagtttcattatatagtgcgacggagagcacgagctcccgcacgtgcatccac

SEQ ID NO: 170376 - DNA, 80 bp, synthetic construct
  source 1..80: mol_type = other DNA
ctctttcatcacgttcagcatgcgttcctcgacgccctccagggatcctggggaggagggagtcctagtgaggcttccaa

SEQ ID NO: 170377 - DNA, 80 bp, synthetic construct
  source 1..80: mol_type = other DNA
gttctgaaatccctaataccgatggattcttaaacacaacaccttctaacaacacttttagaactggaaacaacacaata

SEQ ID NO: 170378 - DNA, 80 bp, synthetic construct
  source 1..80: mol_type = other DNA
aatgaacatatgatagttatatacccctctctgtctgcttgtctctctttctatcattttctctgctaagatttggattt

SEQ ID NO: 170379 - DNA, 80 bp, synthetic construct
  source 1..80: mol_type = other DNA
aaaaaaacaagatagatcagagttaatagacaaaattgtaaacaatgctaaaaatgttttaacaaaaataaaccaagaac

SEQ ID NO: 170380 - DNA, 80 bp, synthetic construct
  source 1..80: mol_type = other DNA
aagttttgaattactattccaattggtctggttctattaaactcacattcttctgtgtttgtgacagctttagtactggc

SEQ ID NO: 170381 - DNA, 80 bp, synthetic construct
  source 1..80: mol_type = other DNA
tctcaattgtataaccacattagggaagaagacaggagaagaagtagtgcagctcaggcaatggaagccattttccaagg

SEQ ID NO: 170382 - DNA, 80 bp, synthetic construct
  source 1..80: mol_type = other DNA
cccttgcgtcaacttccagattctggggcaccagtacaaaaataaccttagtattagttccacatatgacgactctaaca

SEQ ID NO: 170383 - DNA, 80 bp, synthetic construct
  source 1..80: mol_type = other DNA
ccatttttggatacttcccagcattcaccactgctggaaacaacaattggaaaaccagaccctagatgacctagatgatg

SEQ ID NO: 170384 - DNA, 80 bp, synthetic construct
  source 1..80: mol_type = other DNA
cagttactttaataaacgtactgtttaaccacgttgcgtcgtgacgttgtttgtgggtgttgctaggcgggctggaaaga

SEQ ID NO: 170385 - DNA, 80 bp, synthetic construct
  source 1..80: mol_type = other DNA
agacttacaataatatgtccctacacacaacctcctcttgtaaaccaagacgacccagaaaaaggctttgtaccttatga

SEQ ID NO: 170386 - DNA, 80 bp, synthetic construct
  source 1..80: mol_type = other DNA
aaggcaaagcatattagtgcatggtgtccaagggccccaagagcagtgccttatcaacacactaagagcacaaacttagt

SEQ ID NO: 170387 - DNA, 80 bp, synthetic construct
  source 1..80: mol_type = other DNA
gtggcagaactgtatagattagagttgggggattataaattggtagaaataagaccaattggctttgctcccacaccagt

SEQ ID NO: 170388 - DNA, 80 bp, synthetic construct
  source 1..80: mol_type = other DNA
tttacaggcacccagacacagactttatagtgtacttcactaacaacccccccatgaagaccaaccagttctcggccccc

SEQ ID NO: 170389 - DNA, 80 bp, synthetic construct
  source 1..80: mol_type = other DNA
gggaattctcgggtcctctgatcacgccagtgcttcagaagacgggcagtctcctgattgcggtgcgttgcggggatggc

SEQ ID NO: 170390 - DNA, 80 bp, synthetic construct
  source 1..80: mol_type = other DNA
tttgaaaagggggtgggtgggcctcggccccctcaccctcttttccggtggtctggtcccggaccaccgttactccattc

SEQ ID NO: 170391 - DNA, 80 bp, synthetic construct
  source 1..80: mol_type = other DNA
tgctaatcctggagaagccggtggaaggttttcatcgacattcactccagacacacaagcaccaggtaaaaacaagtttg

SEQ ID NO: 170392 - DNA, 80 bp, synthetic construct
  source 1..80: mol_type = other DNA
ggcactggtagatcaggccggtactaatctagagatcacagtggtcaagttacagcgcaatgaaaagttcagggatatta

SEQ ID NO: 170393 - DNA, 80 bp, synthetic construct
  source 1..80: mol_type = other DNA
ggagtaccctaggcacaaaaggaggaccatggggtacaacctttaatacattttacacccaagaacacatacaagaaccc

SEQ ID NO: 170394 - DNA, 80 bp, synthetic construct
  source 1..80: mol_type = other DNA
gacacagactacattatacagtacaacagaaagaccccccttgggggcaacatactaacagcaccatcactacacccagg

SEQ ID NO: 170395 - DNA, 80 bp, synthetic construct
  source 1..80: mol_type = other DNA
tagatccttccctcttgtaggccccaaacagtggctgtttcccgagagaaagccagcccctgcccctacctcaggagact

SEQ ID NO: 170396 - DNA, 80 bp, synthetic construct
  source 1..80: mol_type = other DNA
gccattttaccaacccacgctaacccaggtgacaccattgtaattgcaggcaaagaggtcaaaattaatgatgcaaagag

SEQ ID NO: 170397 - DNA, 80 bp, synthetic construct
  source 1..80: mol_type = other DNA
tgattcagaatacacaatcatagcaacttcttcacaacctaatgatgcccagtattcaaacacactcacaatacaggcaa

SEQ ID NO: 170398 - DNA, 80 bp, synthetic construct
  source 1..80: mol_type = other DNA
tccatgactctatcttagtgtcttactcatctgatctagtcatttaccgcacaaatactataggtgatgactatatccca

SEQ ID NO: 170399 - DNA, 80 bp, synthetic construct
  source 1..80: mol_type = other DNA
atagagagcatctgagcaacggtgaagtggcgaatactttcaccggtaccaagtccggtaacaccaatgatgtacaacgg

SEQ ID NO: 170400 - DNA, 80 bp, synthetic construct
  source 1..80: mol_type = other DNA
cggtcttcatcagggacaaggggctggggactcaccaactcctggcccatccaatgccgcccccgtttgtagaaattcac

SEQ ID NO: 170401 - DNA, 80 bp, synthetic construct
  source 1..80: mol_type = other DNA
ccattccgggccgtgtgctgggtccccgaggggcgggggggtgttgttagcgtggtggtgaaatttgaggttgcgtgtgt

SEQ ID NO: 170402 - DNA, 80 bp, synthetic construct
  source 1..80: mol_type = other DNA
aaacccgtgttgtggtccctgctagcacaccaacgacaatgtcaatgctagcatttatcagcgcttgtccggatttcagt

SEQ ID NO: 170403 - DNA, 80 bp, synthetic construct
  source 1..80: mol_type = other DNA
tataatccacaaagtcagggagtagtagaagcaatgaaccatcatctaaaaaatcaaatagacagaatcagagaccaggc

SEQ ID NO: 170404 - DNA, 80 bp, synthetic construct
  source 1..80: mol_type = other DNA
cttgcttggtgtatcaaattggggatattttaatttctgtcggatcctatcttgggaatactgagtacaacactcagaat

SEQ ID NO: 170405 - DNA, 80 bp, synthetic construct
  source 1..80: mol_type = other DNA
tgtatctttagttattaatgtctgtgtgtttattcagaataactcatttataatataagacggaatattcatatacatta

SEQ ID NO: 170406 - DNA, 80 bp, synthetic construct
  source 1..80: mol_type = other DNA
tcagtggaaccccgccactgtaaagaaatgcgtggttaccggatacatccccctcctcatctgtggatcggggaccaccg

SEQ ID NO: 170407 - DNA, 80 bp, synthetic construct
  source 1..80: mol_type = other DNA
catgggcccgcaatgggcgttccacacctgggactggagacgaggactatttggtgcagacgctatcaaaagagtgtcac

SEQ ID NO: 170408 - DNA, 80 bp, synthetic construct
  source 1..80: mol_type = other DNA
actttgctcaaaccaaaatgccagacggaaacgggtacattcctgagttctatagatttaggtggtaccctagcggattc

SEQ ID NO: 170409 - DNA, 80 bp, synthetic construct
  source 1..80: mol_type = other DNA
gatggtaccccagactagtgtttcaacaacaggtgctacacgatatctacctcacagggccctttagttacaaagatgac

SEQ ID NO: 170410 - DNA, 80 bp, synthetic construct
  source 1..80: mol_type = other DNA
ctcacatccccacccaagtgatggaaacaagtgatgcagtgttagcggtaaacaccagcaaatacccgagcatgtatatt

SEQ ID NO: 170411 - DNA, 80 bp, synthetic construct
  source 1..80: mol_type = other DNA
ctcagaaagatgaaccaccgtccttaaaaccacggttggaggttgaattcttgaagagaaaaccagggtacttcccagag

SEQ ID NO: 170412 - DNA, 80 bp, synthetic construct
  source 1..80: mol_type = other DNA
gaacatcacatgtcaattcaatggatcttagtacgtcagctggctatagctttgtaaaatctggatataagaagaaagat

SEQ ID NO: 170413 - DNA, 80 bp, synthetic construct
  source 1..80: mol_type = other DNA
ctcttggcttaaaaaatttactgaaatgtgtaatgcagcaagaggtttagaatggatagggaacaagatttccaaattta

SEQ ID NO: 170414 - DNA, 80 bp, synthetic construct
  source 1..80: mol_type = other DNA
taccacatagaagtgaatacaggtaaccaccagggtgacaaaatatttgcctttcaaatacaacccggcctggactcagt

SEQ ID NO: 170415 - DNA, 80 bp, synthetic construct
  source 1..80: mol_type = other DNA
ctctttgtccctaaacctgaactgcagattgagattgatcggacacttgaaaacccagattatgtgtattccaccttcct

SEQ ID NO: 170416 - DNA, 80 bp, synthetic construct
  source 1..80: mol_type = other DNA
atccggtttctaccgtcgcactaaggcagaccacttcacccacggtggatatgtctctttgtggtatcagacagcttttg

SEQ ID NO: 170417 - DNA, 80 bp, synthetic construct
  source 1..80: mol_type = other DNA
gtacgctccaggacgtgtaccatctcgagagtgaggcacagctgttttcgtggacttttatacagtaaggacaaggaaag

SEQ ID NO: 170418 - DNA, 80 bp, synthetic construct
  source 1..80: mol_type = other DNA
gaatacaggagataaaagaaaaaggagtgggattgattggcgagtgccgagctttcctggattctataactagtacttta

SEQ ID NO: 170419 - DNA, 80 bp, synthetic construct
  source 1..80: mol_type = other DNA
agactaggcatgtaatcaattataaaactaggtccgaaagcaccctggagtcattctttggtaggtcagcatgtgttact

SEQ ID NO: 170420 - DNA, 80 bp, synthetic construct
  source 1..80: mol_type = other DNA
taacagattataatactcaaaaagcaggcaataataaaacatatgaacaaaacaaaaccactttagaggagtggctatac

SEQ ID NO: 170421 - DNA, 80 bp, synthetic construct
  source 1..80: mol_type = other DNA
accgaaaggatccgagggggctttccaaagccgacgtccctgattcccttcataaagctgttgaccggccctagaaagac

SEQ ID NO: 170422 - DNA, 80 bp, synthetic construct
  source 1..80: mol_type = other DNA
gacaggttgctcagcttagaagaaagatggagatgttcacgtacttgcgctttgatgtggaggtcacgtttgtgatcact

SEQ ID NO: 170423 - DNA, 80 bp, synthetic construct
  source 1..80: mol_type = other DNA
ccaactcagtaagattgatcttcaggctggtgccaatatgtgcaaagtcaacgcgctcttctatgacagcaccacccgtt

SEQ ID NO: 170424 - DNA, 80 bp, synthetic construct
  source 1..80: mol_type = other DNA
cttcagtgtgcggttgcttagagacaccacccatattagccagggcgccttaattgctacaactcaaggcatagaagagg

SEQ ID NO: 170425 - DNA, 80 bp, synthetic construct
  source 1..80: mol_type = other DNA
gggactttctcggcggcggtaggagcgacgctgacggcggctgaggaaacaatggacagcagaaggcaacaccacagcag

SEQ ID NO: 170426 - DNA, 80 bp, synthetic construct
  source 1..80: mol_type = other DNA
cctgtgtggtgtgtgaagggctgggtaaaggtgtctgccaattctcgcatgtcctcctttccccttgttttgaaatagaa

SEQ ID NO: 170427 - DNA, 80 bp, synthetic construct
  source 1..80: mol_type = other DNA
atcattctggtggcattaaaactagagaggggactgaaagcactaagaccatcagctacacggtgaaatcttgcaaaggt

SEQ ID NO: 170428 - DNA, 80 bp, synthetic construct
  source 1..80: mol_type = other DNA
ccgaagtacctttgtacgcctgttttatctcccttcccaatgtaatttagaagcttctaaatcaaggctcaataggtggg

SEQ ID NO: 170429 - DNA, 80 bp, synthetic construct
  source 1..80: mol_type = other DNA
cacaaactgacaacccttgcgtcaacttcctagttcttgcaggagtgtataacggcaaacttagcatagaacccacaaac

SEQ ID NO: 170430 - DNA, 80 bp, synthetic construct
  source 1..80: mol_type = other DNA
gccgtcccctggggactacacacgcaagacagacgcgcgtcttctttgcgacgtgcgcggcgcacgtcgcttttaatcgc

SEQ ID NO: 170431 - DNA, 80 bp, synthetic construct
  source 1..80: mol_type = other DNA
tgccttatatacgtgggtagcagagacaaactacaaaagactgcaggcctactacacacagacctacggaggctaccaga

SEQ ID NO: 170432 - DNA, 80 bp, synthetic construct
  source 1..80: mol_type = other DNA
cggtcatccatcacatatgtgcccgacactatacgtccagatgtgcgcaccaacggggctttcggacaacaatcggtggc

SEQ ID NO: 170433 - DNA, 80 bp, synthetic construct
  source 1..80: mol_type = other DNA
cactttgtttccccggttaaagctgatatgctccaacagggcaaaaacagctttggtcgttatccgcaaaacaactacgc

SEQ ID NO: 170434 - DNA, 80 bp, synthetic construct
  source 1..80: mol_type = other DNA
cgggcaaggctcttaaaaatgcacttttctaaaacaagcagaaagaaaaggaaactgctactgcaaactgtgccgcttgc

SEQ ID NO: 170435 - DNA, 80 bp, synthetic construct
  source 1..80: mol_type = other DNA
gggcctacacataaaccccctcttattggccccgcagtaaacaaagtatacctcttcccagagagagcccctaaacccca

SEQ ID NO: 170436 - DNA, 80 bp, synthetic construct
  source 1..80: mol_type = other DNA
tatcaggtccgaatccactgtagagaacttccttagtagggcagcatgtgcatacataattaagtataacacgcaagggg

SEQ ID NO: 170437 - DNA, 80 bp, synthetic construct
  source 1..80: mol_type = other DNA
aagagaagacgcaaggatgacgatggaagaagaggaggatgaagaaggggaagaaaaaggaggagacgatccgggccgtc

SEQ ID NO: 170438 - DNA, 80 bp, synthetic construct
  source 1..80: mol_type = other DNA
gtggtcctatcctaacactcaattagacttagccaggtacagggggtgccgctggtggttttacagagacccaaaagtag

SEQ ID NO: 170439 - DNA, 80 bp, synthetic construct
  source 1..80: mol_type = other DNA
tttatggtgctgcctccctaaatgactttggcattctggctgtaagggtggttaatgaccataacccaaccaaggtcacc

SEQ ID NO: 170440 - DNA, 80 bp, synthetic construct
  source 1..80: mol_type = other DNA
cgctacgtcagacgcgggcgacgcagacgaaagctagtactgactcagtggaacccccccatagtgagacgctgctatat

SEQ ID NO: 170441 - DNA, 80 bp, synthetic construct
  source 1..80: mol_type = other DNA
actgccaccatatctcgagtgcacgggcggacattggagcagcacctgatccgtgaaatcacccccatcgtgacgcatcg

SEQ ID NO: 170442 - DNA, 80 bp, synthetic construct
  source 1..80: mol_type = other DNA
ttgattggatgaaatccatgctaccacaagctcaacttaaaataaaatatttgagtgagttaaagaaattgaactttcta

SEQ ID NO: 170443 - DNA, 80 bp, synthetic construct
  source 1..80: mol_type = other DNA
tgtaggtggcagtgtgtctgcaggatacaattacacacaccctggtgagaaaggtagagatgttggaaaattaaatcgtg

SEQ ID NO: 170444 - DNA, 80 bp, synthetic construct
  source 1..80: mol_type = other DNA
ggttgccatttttcaagctgctaaaccacgagtggcagcaggcctaagaagctcctcagcaacatggagacctcgaaggg

SEQ ID NO: 170445 - DNA, 80 bp, synthetic construct
  source 1..80: mol_type = other DNA
tactctccaaaacaaacaaccgagaacaccgcgaataaatcctcaattaaacaaaaataagaacagcttgcaagatacaa

SEQ ID NO: 170446 - DNA, 80 bp, synthetic construct
  source 1..80: mol_type = other DNA
tgggtatcccaccatccgacccactgggtgtagtactctggtactttgtacctttgtacgcctgtttctccctacccccc

SEQ ID NO: 170447 - DNA, 80 bp, synthetic construct
  source 1..80: mol_type = other DNA
tgcatttcagatcaaggtcactgctggcaatgtgcaggataaaaacgcaatattttctttccagctaaacccaggcaata

SEQ ID NO: 170448 - DNA, 80 bp, synthetic construct
  source 1..80: mol_type = other DNA
tatatgctacccagctatagattagggtagcatatactacccagatatagattagggtagtatatgctatcctaatctat

SEQ ID NO: 170449 - DNA, 80 bp, synthetic construct
  source 1..80: mol_type = other DNA
ggactgcgcctggtgggacaccagggtttgccagttttgaacacaccggggagcaatcagtttctgacatcggatgatta

SEQ ID NO: 170450 - DNA, 80 bp, synthetic construct
  source 1..80: mol_type = other DNA
ttgactggtaaagctaaattcacaaaaacaaggttaactgatgattgggtgacagaggaggagtgtgagttagactactt

SEQ ID NO: 170451 - DNA, 80 bp, synthetic construct
  source 1..80: mol_type = other DNA
aggcaaggtacttgataatttgggatttcctggtgcactaatggacaaattaagcaagacaacacacatctacaaaacaa

SEQ ID NO: 170452 - DNA, 80 bp, synthetic construct
  source 1..80: mol_type = other DNA
ctgtttctaccagacagcgatagttgttcccagcagtacgcccaaaacaatgagtatgttatgctttgtcagtgcgtgta

SEQ ID NO: 170453 - DNA, 80 bp, synthetic construct
  source 1..80: mol_type = other DNA
atctgtctttagtggttattccgttggtgccactacacccaggttctagtggtatcaactctgttccaattactgtaaca

SEQ ID NO: 170454 - DNA, 80 bp, synthetic construct
  source 1..80: mol_type = other DNA
gatggatatgacaatcaagacatccatctaattgatgatttaggtcaaacaaggaaagaaaaagatattgagatgttgtg

SEQ ID NO: 170455 - DNA, 80 bp, synthetic construct
  source 1..80: mol_type = other DNA
agggtttcccctaatctccacaggcaccgcctcacccacggcatctgagaataccccaaagtacatgagagtcaggctgt

SEQ ID NO: 170456 - DNA, 80 bp, synthetic construct
  source 1..80: mol_type = other DNA
ccccaaaatgcccaaattaaataatgcagacagctcaaaagaccctgagaatctaactaaaagtaacgtacagagtacct

SEQ ID NO: 170457 - DNA, 80 bp, synthetic construct
  source 1..80: mol_type = other DNA
cgggtgtcccgacgttgtcgctcattttaatcatcttgcttctgtgcttcgcgccccgcaaaatccacccccacccggtc

SEQ ID NO: 170458 - DNA, 80 bp, synthetic construct
  source 1..80: mol_type = other DNA
ggttaagaaaagagacatacttaatcgaaccaccaaggatactacaaaactccagcgcatgttggacgagtttggactcg

SEQ ID NO: 170459 - DNA, 80 bp, synthetic construct
  source 1..80: mol_type = other DNA
acaatcattgctaatgtggtaagcattgcaggcatcatctgtgtgatatataaactgttttgttcattacagggcccata

SEQ ID NO: 170460 - DNA, 80 bp, synthetic construct
  source 1..80: mol_type = other DNA
caaggagggtagaagtatagcgggagatgggcgcgagatactccgtcttgtcagggaaaaaagcagatgaattagaaaaa

SEQ ID NO: 170461 - DNA, 80 bp, synthetic construct
  source 1..80: mol_type = other DNA
ccctcataatatgcggacagggacgctcctcctttaactatggcatccactcggacgactgtacccctcaacccagaccc

SEQ ID NO: 170462 - DNA, 80 bp, synthetic construct
  source 1..80: mol_type = other DNA
tgtttttgcttcacagtacacgcccggaaccaccacagaagaagcgcgtaagttctgtccaattgattacttgtttgggt

SEQ ID NO: 170463 - DNA, 80 bp, synthetic construct
  source 1..80: mol_type = other DNA
cccaccagcaataagagccctgccagcgctcccggcaccccagggtgactccggtaacagagcgccatggcctggggctg

SEQ ID NO: 170464 - DNA, 80 bp, synthetic construct
  source 1..80: mol_type = other DNA
tttacagtaaagcctgtaggtataaaaatatgatatatctcatcctgaggattcgagacaacatacttcaaataagtgcc

SEQ ID NO: 170465 - DNA, 80 bp, synthetic construct
  source 1..80: mol_type = other DNA
gacataaagtggtccacagacaactacaacgagtttaaaacaaagggagacagcaactatggctactgcacatataaacc

SEQ ID NO: 170466 - DNA, 80 bp, synthetic construct
  source 1..80: mol_type = other DNA
aaaaaaaacaatacaaaataacttcaccactgaagacaccagcgcaaatgagtcaaaacaatttaaaacaggcagaagca

SEQ ID NO: 170467 - DNA, 80 bp, synthetic construct
  source 1..80: mol_type = other DNA
caagtccacagagttcaagaaagtgacatggcaaaatgcaaccttcttgaaaagaggatttgaaccagatacaaaatacc

SEQ ID NO: 170468 - DNA, 80 bp, synthetic construct
  source 1..80: mol_type = other DNA
gggacaaataccaatgttccacctgccagtagagagagagacatgggaccaatggtggacagattactggcaagtgactt

SEQ ID NO: 170469 - DNA, 80 bp, synthetic construct
  source 1..80: mol_type = other DNA
ccggtagcaacttcctcggggtccggcgctacgcgcttcgcgctgcgccggacgcctcggacccccgctcgtgctgacac

SEQ ID NO: 170470 - DNA, 80 bp, synthetic construct
  source 1..80: mol_type = other DNA
ggtttctctcgtgctggtatcaaacatccctgattcttccaccagaaacgtcaggaaccgtctacttattagcctttgtt

SEQ ID NO: 170471 - DNA, 80 bp, synthetic construct
  source 1..80: mol_type = other DNA
cctgatataaagcggtgcacttccgagtggctgagttttccacgcccgtccgcagcgacatcgccacggaggagcgatcg

SEQ ID NO: 170472 - DNA, 80 bp, synthetic construct
  source 1..80: mol_type = other DNA
ttcgggttggttccccgtgtttttgaataccaaagttaacatttgcggctacctggcgcccattgcgctgatggcgtaca

SEQ ID NO: 170473 - DNA, 80 bp, synthetic construct
  source 1..80: mol_type = other DNA
cctctaaactacagatttcagtggtacccatgcatgtttcaccaacagaacttcatgaacgatatggtccaatgtggacc

SEQ ID NO: 170474 - DNA, 80 bp, synthetic construct
  source 1..80: mol_type = other DNA
ctcaagtatcaagacagaccactggttcacatgagaatgcaatcaccgcaaataatggaggcctaataaaatacttcaac

SEQ ID NO: 170475 - DNA, 80 bp, synthetic construct
  source 1..80: mol_type = other DNA
cagctgtaggatgtgacccagatactttttggtctgtaataccttgccttatggatggacaactgatggcttttgattac

SEQ ID NO: 170476 - DNA, 80 bp, synthetic construct
  source 1..80: mol_type = other DNA
agacaatgggtcggatcgccgtttgcccgaagcggctgtggcttctctggagacggccgtcagtactccattttttgaaa

SEQ ID NO: 170477 - DNA, 80 bp, synthetic construct
  source 1..80: mol_type = other DNA
ggtgccattaaataatttacacataaataaaaacaagattgggatgtatgcactaccacttacacgacagaatacaccag

SEQ ID NO: 170478 - DNA, 80 bp, synthetic construct
  source 1..80: mol_type = other DNA
ccgtcatgaaagatcgtaataagctactcatatgtattatccttattttcaccatgtgcctcatctgtctttattttaaa

SEQ ID NO: 170479 - DNA, 80 bp, synthetic construct
  source 1..80: mol_type = other DNA
gattccgcctccaaccccagtgtgtttttccaacctaagtcaggatttcctaggtttaccatcccattcactggattagc

SEQ ID NO: 170480 - DNA, 80 bp, synthetic construct
  source 1..80: mol_type = other DNA
tgcggagtttgtgacgtcacggcagccattttgtgcaaagcaccctgggtgttgcgtccaggtcaaaggtcaaaacccat

SEQ ID NO: 170481 - DNA, 80 bp, synthetic construct
  source 1..80: mol_type = other DNA
ccaagcactggaccccggggtcagggtgatggaggcaggcgcaaaaaaggagtgtggtttggaaagcatcgtggtcaagg

SEQ ID NO: 170482 - DNA, 80 bp, synthetic construct
  source 1..80: mol_type = other DNA
agactgttttaatcttaatcaacgtattctggactaaatataaggagactgttaatagaaagtacccggcttatacagta

SEQ ID NO: 170483 - DNA, 80 bp, synthetic construct
  source 1..80: mol_type = other DNA
gttgtgccttggatatcaaacactcacttcagaacacaggccactggtaattattatgattactattcaacaggggtcgt

SEQ ID NO: 170484 - DNA, 80 bp, synthetic construct
  source 1..80: mol_type = other DNA
tgtcacacaaatgcaaaaagagattaagcaacttcaatgttacaaaagggctcaaaggatagaaccagtctgtatactgc

SEQ ID NO: 170485 - DNA, 80 bp, synthetic construct
  source 1..80: mol_type = other DNA
acacatccaggagaatcaggtagaataatagcaaacaatgcagacaataacaccagacaacctagtgatgataattggct

SEQ ID NO: 170486 - DNA, 80 bp, synthetic construct
  source 1..80: mol_type = other DNA
tgatggcggccccagctgaagaaagagcacgtgtactcagtggtctcctgcggcctgagtcccgagataagcagctcttg

SEQ ID NO: 170487 - DNA, 80 bp, synthetic construct
  source 1..80: mol_type = other DNA
aacaaattacgacccacagtctaaaaaccctattaaaaccagagaaaccatatcaacatatgggttaggacctagatttg

SEQ ID NO: 170488 - DNA, 80 bp, synthetic construct
  source 1..80: mol_type = other DNA
atggctgcgcaaattcacagagtgttgtaatgcagcaaaaggacttgaatggatcagtatcaagattggcaagtttattg

SEQ ID NO: 170489 - DNA, 80 bp, synthetic construct
  source 1..80: mol_type = other DNA
ctagacatatacttagaaaaggaagagggaataattccagactggcagaactatactcatggaccaggagtaaggtatcc

SEQ ID NO: 170490 - DNA, 80 bp, synthetic construct
  source 1..80: mol_type = other DNA
acccataacttccaccagacctacaaaagacttttgggaatatagaataggcatgttctctccaatatttttaagtcctt

SEQ ID NO: 170491 - DNA, 80 bp, synthetic construct
  source 1..80: mol_type = other DNA
cctatccctggtaaatggaatgactatacgtggcagacgtcctctaacccgtcggtgttttacacctatggggcgccccc

SEQ ID NO: 170492 - DNA, 80 bp, synthetic construct
  source 1..80: mol_type = other DNA
ttaatgcgcgagacggcgttggacgcggcggctgaggtgctctcgtggtgcggcctgcccgacatcgtgggctcggccgg

SEQ ID NO: 170493 - DNA, 80 bp, synthetic construct
  source 1..80: mol_type = other DNA
ccattttgttttacaaaatggccgacttccttcctcttttttcaaaatggcgtaccagcggcggcgcgcgcgccgccgct

SEQ ID NO: 170494 - DNA, 80 bp, synthetic construct
  source 1..80: mol_type = other DNA
gctactgctacctgtgccaactccaaagaaaaaactacctatgaatcggtggtcccctccggcacacgatgcccgcggaa

SEQ ID NO: 170495 - DNA, 80 bp, synthetic construct
  source 1..80: mol_type = other DNA
ctactggggctggtggcgccgacggtggttccggccgagacgcaggagatggcgagcgtggaggacccgccgtcgcagac

SEQ ID NO: 170496 - DNA, 80 bp, synthetic construct
  source 1..80: mol_type = other DNA
gcaaaatccagttgaaaattatgtggatcaagtacttaatgaggttctagttgtaccaaatattaaagagagtcatccaa

SEQ ID NO: 170497 - DNA, 80 bp, synthetic construct
  source 1..80: mol_type = other DNA
aaaaaattcaagaatggttttggaaacaagaaactgacaaagaaaatttagttactggctcctatcaaacacctactaac

SEQ ID NO: 170498 - DNA, 80 bp, synthetic construct
  source 1..80: mol_type = other DNA
ttatgtaacaaaattgaaacagttggacctcttggaaaaccagataagtgcaatacaccaatcatgccccagccaagaac

SEQ ID NO: 170499 - DNA, 80 bp, synthetic construct
  source 1..80: mol_type = other DNA
agcacttctgtttccccggtacccttgtatacgcttcgcccgaggcgaaaaacgaggttatcgttatccgcaaggtgcct

SEQ ID NO: 170500 - DNA, 80 bp, synthetic construct
  source 1..80: mol_type = other DNA
ggcacacatcacaggttgaacccagcgacacaatgcagacacgacacgtgaagaactatcattcacggtccgaatccaca

SEQ ID NO: 170501 - DNA, 80 bp, synthetic construct
  source 1..80: mol_type = other DNA
agaacaaaaatcagtaactctaacagctaaatatactttcaaatttctgttcgggggaaaccccattctccaacagactg

SEQ ID NO: 170502 - DNA, 80 bp, synthetic construct
  source 1..80: mol_type = other DNA
caaatgctagaagcaaacaaatcatactttatagcagcaaaaaaaaacctaccaaactggagacccccagaaacaacata

SEQ ID NO: 170503 - DNA, 80 bp, synthetic construct
  source 1..80: mol_type = other DNA
gggctgcctccactgcaccaatgcaaactatacataggaatattatatacctcaggctttttccaaatattaacaacttt

SEQ ID NO: 170504 - DNA, 80 bp, synthetic construct
  source 1..80: mol_type = other DNA
agactccacccccctgttggcagctaggctgtctgccaccaggtcatgaccggggcccagtttgcgcttacggacatctt

SEQ ID NO: 170505 - DNA, 80 bp, synthetic construct
  source 1..80: mol_type = other DNA
ttagaagcaattgcatccagacgagcaggcgaccaacactccacgttggttcacgtcaagcacttctgtttccccggtat

SEQ ID NO: 170506 - DNA, 80 bp, synthetic construct
  source 1..80: mol_type = other DNA
cgtttatggtcagggaccaggaagccgcaagttgggacataaccatggggtacagagcctgttttaaatggtgcgggtcg

SEQ ID NO: 170507 - DNA, 80 bp, synthetic construct
  source 1..80: mol_type = other DNA
aaaactattacaacgtctttggcaactctgaactgtatgatgactcctcctataacgaaaaaattcaaccttttgaaaaa

SEQ ID NO: 170508 - DNA, 80 bp, synthetic construct
  source 1..80: mol_type = other DNA
accagcagcgccccctccctgcctcacgggaagagctgctggagctgggcccggagagcctagagaaaatcatcgccgac

SEQ ID NO: 170509 - DNA, 80 bp, synthetic construct
  source 1..80: mol_type = other DNA
tgatgatccaaattcaaaatatggttcagtggtcactaatgctatgggcacactgtgtgtgcgtgtagttacagagagac

SEQ ID NO: 170510 - DNA, 80 bp, synthetic construct
  source 1..80: mol_type = other DNA
attggtttaaaacctggaatgttgcggaagatacttagtacctgctgatctggtacccctttcccagccttgaggcggct

SEQ ID NO: 170511 - DNA, 80 bp, synthetic construct
  source 1..80: mol_type = other DNA
gaggcgcctgctgccgctgccctcctaccccggcgagggtccccaggctagatggcctgtggggatggagaaggcgctgg

SEQ ID NO: 170512 - DNA, 80 bp, synthetic construct
  source 1..80: mol_type = other DNA
ggcagcccgggcgattcgccgccgccgatacctttcgaggacgaaaacacgcccgagctgctgggccggctcaacgtgta

SEQ ID NO: 170513 - DNA, 80 bp, synthetic construct
  source 1..80: mol_type = other DNA
ccaagggtaaggaggcgccgcagaactcgcagacgtacctacagacgggggtggagacgcaggaggtacataagacggtg

SEQ ID NO: 170514 - DNA, 80 bp, synthetic construct
  source 1..80: mol_type = other DNA
ccgaatgcccagttaccattctgcgtagcattagcgtgttgcgcacgtacagcgagggcagagaccgcatgggagagtct

SEQ ID NO: 170515 - DNA, 80 bp, synthetic construct
  source 1..80: mol_type = other DNA
tttcacaattagggttgatattgcatcacaaccattagccactacacttataggtgaagtttccagctactacacacatt

SEQ ID NO: 170516 - DNA, 80 bp, synthetic construct
  source 1..80: mol_type = other DNA
tgacggccgcgtgagtgcagctccatggccgccgtcgctaggaaggtcacgttcgggcacgctgatgtatatatagatga

SEQ ID NO: 170517 - DNA, 80 bp, synthetic construct
  source 1..80: mol_type = other DNA
cacccaagtgtgtttttccatgtcttccctggagaaaaggaaccagctgccctaacccaaaaagaccccagactggagac

SEQ ID NO: 170518 - DNA, 80 bp, synthetic construct
  source 1..80: mol_type = other DNA
aactactcaaaaggtgactgggaaacagagtatcaggcctgcagagcttttgatagaccccctagaagtaacctaacaga

SEQ ID NO: 170519 - DNA, 80 bp, synthetic construct
  source 1..80: mol_type = other DNA
gaggcacgttaatgaacaaagcttgggcgtgtccaccagcacgctgcgggtgtacttcaaacccaagcatgtgcgtgcct

SEQ ID NO: 170520 - DNA, 80 bp, synthetic construct
  source 1..80: mol_type = other DNA
taaaaccaggaatggatggaccaaaaattagacagtggccgctatctaaagagaaaatagaagcacttaaagaaatttgt

SEQ ID NO: 170521 - DNA, 80 bp, synthetic construct
  source 1..80: mol_type = other DNA
tacctatgtaatggaactttgtttggcaatatccaaatatacccccatcagatgataaacctgagaacaaataattcagc

SEQ ID NO: 170522 - DNA, 80 bp, synthetic construct
  source 1..80: mol_type = other DNA
cttgcagtttaatacagcaaaatgggagcacaagtgtctactacgaggacagggtcacatgagaatggcaacatagcgac

SEQ ID NO: 170523 - DNA, 80 bp, synthetic construct
  source 1..80: mol_type = other DNA
ttcctgtggccccttcatgcccagagaccaggaagccgcaagttgggacataactgtaggctacaaagcaacttttaaat

SEQ ID NO: 170524 - DNA, 80 bp, synthetic construct
  source 1..80: mol_type = other DNA
taggaaacacgttatccacaggccataactcagtgtatggctttccatcatacaacccacaaaaagacaaacttagaaaa

SEQ ID NO: 170525 - DNA, 80 bp, synthetic construct
  source 1..80: mol_type = other DNA
ggtgacagaggacttactacacctcgagaagggggagacaccatgcaaagagacgacagaggacttgctgcgcctcagtt

SEQ ID NO: 170526 - DNA, 80 bp, synthetic construct
  source 1..80: mol_type = other DNA
aggagaaattgctagttactacacacactggaccggtagtcttcggtttagtttcatgttttgtggatctgcaagtgcaa

SEQ ID NO: 170527 - DNA, 80 bp, synthetic construct
  source 1..80: mol_type = other DNA
tggagaaatgcatccattcccctcttttgtgcaactaagaacagagatacttggggaaccatacagtgcttgccagacaa

SEQ ID NO: 170528 - DNA, 80 bp, synthetic construct
  source 1..80: mol_type = other DNA
ctgtgaatatgtattccattattttagataaacaaacaacatcagcaggggaagtttttgcaatcccagttgacatagct

SEQ ID NO: 170529 - DNA, 80 bp, synthetic construct
  source 1..80: mol_type = other DNA
cggcagaaggactccaaggagagcaaagaaaagcctacgatttactccaagccctcgaggcgagccaagaagggtcgtgg

SEQ ID NO: 170530 - DNA, 80 bp, synthetic construct
  source 1..80: mol_type = other DNA
ttgctttctgccataggggggaaagcatcgccttcagaattggctgctccgttggaacatttgaggcctactgtatccgt

SEQ ID NO: 170531 - DNA, 80 bp, synthetic construct
  source 1..80: mol_type = other DNA
tagtgtgaatgatacagtgactttcagaatggtatatggaaatttattctcaacctttcataaaaacccaggcataatta

SEQ ID NO: 170532 - DNA, 80 bp, synthetic construct
  source 1..80: mol_type = other DNA
ggccttccggactaccaaaatggcggattccgtgacgtcatggccgccattttaggctgttgccgggcgtttgacttccg

SEQ ID NO: 170533 - DNA, 80 bp, synthetic construct
  source 1..80: mol_type = other DNA
gatatggttccaatatcacagcaaattaagcacagacctcagagacagaggcatctactgcctcctagaagacatgcccc

SEQ ID NO: 170534 - DNA, 80 bp, synthetic construct
  source 1..80: mol_type = other DNA
aaatgcacatgtgactaattataaacctgccgatggagaggtcactactgccattagacacagagataatgttagaacca

SEQ ID NO: 170535 - DNA, 80 bp, synthetic construct
  source 1..80: mol_type = other DNA
cagtcaccactaacaatgagtggcagaaaaaattctttgataacagagactccctctttctgtttgccacttaccaccca

SEQ ID NO: 170536 - DNA, 80 bp, synthetic construct
  source 1..80: mol_type = other DNA
acggacacttacataattttacagaaaaccatacaaatacatcgtgttccccgaaattcatctgcataaacgaaactaaa

SEQ ID NO: 170537 - DNA, 80 bp, synthetic construct
  source 1..80: mol_type = other DNA
tggatagcatgttacggcacaacaatgtatcacttgttatcatacccatttgccctttacggcccccaaccacagggcag

SEQ ID NO: 170538 - DNA, 80 bp, synthetic construct
  source 1..80: mol_type = other DNA
aaaacatatactttaaaacaaaacaagaccctaacaaccaaacaatgagcagcacatacaactttgacacatacaaaaca

SEQ ID NO: 170539 - DNA, 80 bp, synthetic construct
  source 1..80: mol_type = other DNA
ttaaaaccaggaatggatggccccagattaaaacagtggcccctttcaaaagaaaaaatagaagccttgacagaaatctg

SEQ ID NO: 170540 - DNA, 80 bp, synthetic construct
  source 1..80: mol_type = other DNA
cagaaacccgtgcgcgcagcccggtgtggcacccgcctaccccgatagacagcgtcgcgacgtacaagttgttgacccac

SEQ ID NO: 170541 - DNA, 80 bp, synthetic construct
  source 1..80: mol_type = other DNA
tactagaggttaacaaccttaatacccaggccactgctgctcagttgatggagcgtctacttatcccagtccaagcccaa

SEQ ID NO: 170542 - DNA, 80 bp, synthetic construct
  source 1..80: mol_type = other DNA
cgggaaatacgtcctacccaggaacccgaaacagtgtttcccagaagctgtacaaatagaacgccctggaactgccccac

SEQ ID NO: 170543 - DNA, 80 bp, synthetic construct
  source 1..80: mol_type = other DNA
tctgattctgcggaatccttgtgcgcctgttttatatcccctttcccaatttgaaacatagaagtgatgcgcaccattga

SEQ ID NO: 170544 - DNA, 80 bp, synthetic construct
  source 1..80: mol_type = other DNA
ggagataggcgcatcatctgacataacaccagaaagcatgttggaaaccagatatgttgtaaattctagaactaatgaag

SEQ ID NO: 170545 - DNA, 80 bp, synthetic construct
  source 1..80: mol_type = other DNA
agtttactgaatcagctctcagacgtatgttactccaaccgatccctcgcccaacatttgctgagccaccaaagagacct

SEQ ID NO: 170546 - DNA, 80 bp, synthetic construct
  source 1..80: mol_type = other DNA
actacttctctaactggtcaggatccatcaagctcacattcttttgtgtatgtgacagtttcagcaccggcaagtttctg

SEQ ID NO: 170547 - DNA, 80 bp, synthetic construct
  source 1..80: mol_type = other DNA
tcgctctggcttggtgcgggtggtcaacctcacagatgggaggacagatactactgggtatgccacttgggacattgaca

SEQ ID NO: 170548 - DNA, 80 bp, synthetic construct
  source 1..80: mol_type = other DNA
tgggtggtcgcccaacgggccaggcattcctaagtgaggagttaaccaaaggggaggttgcatgtacctttacagcatca

SEQ ID NO: 170549 - DNA, 80 bp, synthetic construct
  source 1..80: mol_type = other DNA
caggagctccgggcggctcaggatcagggccaagacatagagatggtgtccggagaccccaaaaacgtccaagttgcatt

SEQ ID NO: 170550 - DNA, 80 bp, synthetic construct
  source 1..80: mol_type = other DNA
agactagagatgatataaagaacctgggacccagtgatatgtttgttcacaccaaagaagctatttacaagtgtgcacac

SEQ ID NO: 170551 - DNA, 80 bp, synthetic construct
  source 1..80: mol_type = other DNA
aatatgtttcaccaacaaaactttataaatagcatagtacagtgcgccccattcgcatatagaggtgaacaaaaatctgc

SEQ ID NO: 170552 - DNA, 80 bp, synthetic construct
  source 1..80: mol_type = other DNA
ctatgacataaatccacccatgaaaaacacagaactcagcagccccaacacacacccaggcatgctaatgcagcaaaaga

SEQ ID NO: 170553 - DNA, 80 bp, synthetic construct
  source 1..80: mol_type = other DNA
cgtcatgctcgataatgtgttttgtttccgcatgcaacgacttttccgttcggttactaaaggacaccccattcattgag

SEQ ID NO: 170554 - DNA, 80 bp, synthetic construct
  source 1..80: mol_type = other DNA
gtggttctgggaatcgcatcacgccgccactgaggaccctccgcgcgctcccggcagcccccaccactcctagaccaccg

SEQ ID NO: 170555 - DNA, 80 bp, synthetic construct
  source 1..80: mol_type = other DNA
ttagcataaccccacaatatcttccaaataactatctggccctaaagaaccacttaagtacaaactttaaaacaagaact

SEQ ID NO: 170556 - DNA, 80 bp, synthetic construct
  source 1..80: mol_type = other DNA
cagcagatccggcagcggacctgttagagaaatatttgcagcaggggagaaagcagagggagcagagggagagaccatac

SEQ ID NO: 170557 - DNA, 80 bp, synthetic construct
  source 1..80: mol_type = other DNA
aacaacacagaagccaacatcagaaataaaaatatgtacaccgtacaacttggtggtgaacctgaccctacaaccccggt

SEQ ID NO: 170558 - DNA, 80 bp, synthetic construct
  source 1..80: mol_type = other DNA
tatactctctccctccttcacctaagtattttgatggttacgatcagcagagcgtagtcataatggatgacataatgcaa

SEQ ID NO: 170559 - DNA, 80 bp, synthetic construct
  source 1..80: mol_type = other DNA
gaatacaacggtctgaggctggcgtatcagcaaggattaccagtattaaacacaccagggagtaaccaattcatgacttc

SEQ ID NO: 170560 - DNA, 80 bp, synthetic construct
  source 1..80: mol_type = other DNA
cttaaccctactgtgctgaccgaactagataacggtgcagtaggggtaaattctccgcattcggtgcggagaatttaccc

SEQ ID NO: 170561 - DNA, 80 bp, synthetic construct
  source 1..80: mol_type = other DNA
tttgcggcggggacgggcaccgcgctgagggacggcaacgaggacaggggcctctcgcagcgggaacgtggacgggagcc

SEQ ID NO: 170562 - DNA, 80 bp, synthetic construct
  source 1..80: mol_type = other DNA
accctgacaatgaaagaagaaatgtgatggcagccaagacaatagggaagataatatcagactcattgaaagatgacggt

SEQ ID NO: 170563 - DNA, 80 bp, synthetic construct
  source 1..80: mol_type = other DNA
atgcaacaagaatcagatgctctttacattcctacaggaccactcaagaggccgcgcagggataccaacgcccaagaccc

SEQ ID NO: 170564 - DNA, 80 bp, synthetic construct
  source 1..80: mol_type = other DNA
cctcatggacaaaggggtaggcaaccacgtatggtttcagtacaacacaaaggcagacactcaactcatagtaacaggtg

SEQ ID NO: 170565 - DNA, 80 bp, synthetic construct
  source 1..80: mol_type = other DNA
gcaaaccctcaccaactcgatcatgtggttgcgtggtggggagtttgaggaggtgttgcggtcactcgagactctggcct

SEQ ID NO: 170566 - DNA, 80 bp, synthetic construct
  source 1..80: mol_type = other DNA
gcatggtaaaagcacacatagatgctgcacaggcacaaaaccatcaacaagacacctcaggccctcaaagtgcaaaagat

SEQ ID NO: 170567 - DNA, 80 bp, synthetic construct
  source 1..80: mol_type = other DNA
tctcgccgctctcttctctcgtttaaacgagagaatagtagtagggtccagtctcaggccccctcactttgggtcttaga

SEQ ID NO: 170568 - DNA, 80 bp, synthetic construct
  source 1..80: mol_type = other DNA
gctagactactgtgttttgtatctgcatgtaaagatttctgcttacgcatggctcgggatacaaacctgcatatgcagag

SEQ ID NO: 170569 - DNA, 80 bp, synthetic construct
  source 1..80: mol_type = other DNA
gttcacacacaaggaataattaacaaaacacaaagaactgctgaatttacaacctcaaacaatacactaggaaataaaac

SEQ ID NO: 170570 - DNA, 80 bp, synthetic construct
  source 1..80: mol_type = other DNA
gaatggctgagttttccacgcccgtccgcagcggcagcaccacggagggtgatccccgcgtcccgagggcgggtgccgga

SEQ ID NO: 170571 - DNA, 80 bp, synthetic construct
  source 1..80: mol_type = other DNA
acacaattattccaattaacaatatatcctcaaacacaactagtgtcaacatgtactctctcgtgttgacgaaagatgat

SEQ ID NO: 170572 - DNA, 80 bp, synthetic construct
  source 1..80: mol_type = other DNA
gtatcacaaagcaaaacacattcgagcatggtgccccagagcaccaagagcagtgccctacacgcatgctcacgtcacca

SEQ ID NO: 170573 - DNA, 80 bp, synthetic construct
  source 1..80: mol_type = other DNA
tctggtccatccagcgcagacaagtcagtgggacgacccatggggggaaactctagtatggagatttaattctgcattgg

SEQ ID NO: 170574 - DNA, 80 bp, synthetic construct
  source 1..80: mol_type = other DNA
tggaacagacctgccagaacccaccacacagacacccccttctatccctgggccccccacaagttccatgtaagcttcaa

SEQ ID NO: 170575 - DNA, 80 bp, synthetic construct
  source 1..80: mol_type = other DNA
tatgacccctcagctaaagacacaaaagacaccagtactgcagacgcaggcaaaaacaaatataatacaaaaacaagtct

SEQ ID NO: 170576 - DNA, 80 bp, synthetic construct
  source 1..80: mol_type = other DNA
ctccctagtgtattctataatatcttccctggagagaaagaaccagctgtgctcactcagaaagatccaaggttagaagt

SEQ ID NO: 170577 - DNA, 80 bp, synthetic construct
  source 1..80: mol_type = other DNA
cggcccctcccaagactaggaaggacgcaatgcttggaacacacatcatatgggacctgggattgcaatctagctgtacc

SEQ ID NO: 170578 - DNA, 80 bp, synthetic construct
  source 1..80: mol_type = other DNA
aggcaaccgactctggagacacatactatggtttagtttcaattaatgattttggcaccttggctgtcagagtagtcaat

SEQ ID NO: 170579 - DNA, 80 bp, synthetic construct
  source 1..80: mol_type = other DNA
cgttggcgacgggggtggcgtgggtgtttgcggcgaggacgggtgtggcgtgtgtgtttgcggcgaggacggtgtgtttc

SEQ ID NO: 170580 - DNA, 80 bp, synthetic construct
  source 1..80: mol_type = other DNA
cgtgtatgtcgtgcacttcctgggccaggtctacgtgctgatataaggcggcgcacttccgaatggctgagttttctccg

SEQ ID NO: 170581 - DNA, 80 bp, synthetic construct
  source 1..80: mol_type = other DNA
tcccccaacaaagtgcaaaatgcggtatggaatgctggaatgggagtcggagtaggaaacctgacaatatacccacacca

SEQ ID NO: 170582 - DNA, 80 bp, synthetic construct
  source 1..80: mol_type = other DNA
tagctccagataaatctgagttttctgggaccagacagagccagaaccaaactcaagggattccagtgcggtcaccgagt

SEQ ID NO: 170583 - DNA, 80 bp, synthetic construct
  source 1..80: mol_type = other DNA
tattaggttgaacacatcaaaatgggtgcacaggtgtcgacacaaaagactggtgctcatgagaccagtttgagtgcaag

SEQ ID NO: 170584 - DNA, 80 bp, synthetic construct
  source 1..80: mol_type = other DNA
tggatatgatggtactgacgatgccaacataaactatggaatctcattaacaaatgacatgggaactttgtgtttccgtg

SEQ ID NO: 170585 - DNA, 80 bp, synthetic construct
  source 1..80: mol_type = other DNA
tcttagtgaaaatttttctaaaattggcaatgatattggaggcaatttattcacgaaggtggctgatgatgcgtcaaatg

SEQ ID NO: 170586 - DNA, 80 bp, synthetic construct
  source 1..80: mol_type = other DNA
ttcaacaggcaaatttcttttagcctacacacctccaggtggtgagcaccctacctccagaaaacaagcaatgctaggag

SEQ ID NO: 170587 - DNA, 80 bp, synthetic construct
  source 1..80: mol_type = other DNA
caaatactgggatagaccccccaggagcaaccttagggataaacccttctatccttgggccccccctgcaaacccttaca

SEQ ID NO: 170588 - DNA, 80 bp, synthetic construct
  source 1..80: mol_type = other DNA
caagcttagattatgatcaattatccaagattgggattgtaaaaggaccatcttacaattacaagataaaagggtcacca

SEQ ID NO: 170589 - DNA, 80 bp, synthetic construct
  source 1..80: mol_type = other DNA
aaccagaattatagaagctagtagcatcaatgatactgctcatttccgcatggtgttcggaaatttattttccactttcc

SEQ ID NO: 170590 - DNA, 80 bp, synthetic construct
  source 1..80: mol_type = other DNA
gacaactatgaactcctctcagcggcatatagtccctgccgcattattccgggtaaccagcaacccccttccggatcgca

SEQ ID NO: 170591 - DNA, 80 bp, synthetic construct
  source 1..80: mol_type = other DNA
gacctttctattcccagggaaatttggtctcgcctctctgaacgcattgtgagggatgggcttttcaattcacagtttat

SEQ ID NO: 170592 - DNA, 80 bp, synthetic construct
  source 1..80: mol_type = other DNA
ttttaagtaagcaggaagcggctcggcgtacacaaaatggcgtcggagcacttccggcttgcccaagatggcggccaaaa

SEQ ID NO: 170593 - DNA, 80 bp, synthetic construct
  source 1..80: mol_type = other DNA
tagtcctcaaagaaggccacgggggcatctgagtgattgaccagggtgtcgagcagatcacaaactcggcaggtgctggc

SEQ ID NO: 170594 - DNA, 80 bp, synthetic construct
  source 1..80: mol_type = other DNA
aggcaagaaaagaaaaacaggaagtgtgtagagcacaacttatctgccattttccagggtcttggtgatgatactacacc

SEQ ID NO: 170595 - DNA, 80 bp, synthetic construct
  source 1..80: mol_type = other DNA
tgtcactgtcccgggtgcacgctaaaccgaaagcacaacctgctatgagctttgtttttcctcgcagaaatgcctcccaa

SEQ ID NO: 170596 - DNA, 80 bp, synthetic construct
  source 1..80: mol_type = other DNA
taaaatctagaccaggaaaaaaacactatattaaaataagagtaggggcaccaaaaatgttcactgataaatggtacccc

SEQ ID NO: 170597 - DNA, 80 bp, synthetic construct
  source 1..80: mol_type = other DNA
actgggccaccgagtaccaaatagccaagtggccagaccgccctttgaggcactacccctcagacctccctcactacccg

SEQ ID NO: 170598 - DNA, 80 bp, synthetic construct
  source 1..80: mol_type = other DNA
gtgcggctgctgagagatactacacatattagccagaacgcgttgatagcaaccacacaaggtattgacgatgttatcga

SEQ ID NO: 170599 - DNA, 80 bp, synthetic construct
  source 1..80: mol_type = other DNA
ggtttttatagagtcgtcttaagcgcgtgcgcggcgggtggctcaacctcgatgctttttgggcgtcgaggcgatgcatg

SEQ ID NO: 170600 - DNA, 80 bp, synthetic construct
  source 1..80: mol_type = other DNA
gcacagtattcaatacatttagaacagaggaacacattaaagagccaccaataacggcatgcacaaatgcagacaacagt

SEQ ID NO: 170601 - DNA, 80 bp, synthetic construct
  source 1..80: mol_type = other DNA
cacccagataccatctcaccagtcacataaatacattgtttagtggaacacaacagatgcaaagcgcaaaagaaacaggc

SEQ ID NO: 170602 - DNA, 80 bp, synthetic construct
  source 1..80: mol_type = other DNA
agagcgcgggccggcaagcagaagagatcaaaccggctgtagacaaggcatggccaaggcttgaacgcttttggcagagc

SEQ ID NO: 170603 - DNA, 80 bp, synthetic construct
  source 1..80: mol_type = other DNA
atctgcatgcatagctaccatacacactaaattagtacatggagaggagggtgtttataatatgaaaggtaacaatctct

SEQ ID NO: 170604 - DNA, 80 bp, synthetic construct
  source 1..80: mol_type = other DNA
ttgaagttttgtgacggagcaacatcagctatacccatcacaatcacactcgcgccactaagttctgagttttgtggtct

SEQ ID NO: 170605 - DNA, 80 bp, synthetic construct
  source 1..80: mol_type = other DNA
tcgatggtacgaggcggttcgaggaagccacgatgctttttgtggctgtagtgatcctattcttcatctttctcgtctgg

SEQ ID NO: 170606 - DNA, 80 bp, synthetic construct
  source 1..80: mol_type = other DNA
caattaggcttgtttcaggtcgaagttttaaatcggctgacctataatagttccagcccaaataaagtccattgtatagt

SEQ ID NO: 170607 - DNA, 80 bp, synthetic construct
  source 1..80: mol_type = other DNA
aaggaggaggaattaaaattacacactttacaacttggacatcaattcccactttggctgctcagtttccatttaatgct

SEQ ID NO: 170608 - DNA, 80 bp, synthetic construct
  source 1..80: mol_type = other DNA
aaccaatactttacaacactaacacaagacaatgacctgcatagtaaatatggtaaagccaatgcagaagaattcgagta

SEQ ID NO: 170609 - DNA, 80 bp, synthetic construct
  source 1..80: mol_type = other DNA
ttcacagacaaatacaatccctccacagatgcgtccgatgggaggacctttgcagcagttgattacctattagggtgtgg

SEQ ID NO: 170610 - DNA, 80 bp, synthetic construct
  source 1..80: mol_type = other DNA
tcttaaaaacgatgcacccaccgctagcaatgccaaagacctattcgctacctggaagattagctacctgaatgcatatc

SEQ ID NO: 170611 - DNA, 80 bp, synthetic construct
  source 1..80: mol_type = other DNA
tccgggcaccccgcagataaggagagccagacctagtcccgcagcaccggagccacccgcggccctaccatggcatggtg

SEQ ID NO: 170612 - DNA, 80 bp, synthetic construct
  source 1..80: mol_type = other DNA
gcgcctcaggttcaccggccaaaagaccccgtatctggtcagaagagagtcagacggagacgatctcctcggaggaggac

SEQ ID NO: 170613 - DNA, 80 bp, synthetic construct
  source 1..80: mol_type = other DNA
cccagatggcctctggggagaccctatatacacatacaaaaactatggaacaggaacaacagcagttacagcacaaaccc

SEQ ID NO: 170614 - DNA, 80 bp, synthetic construct
  source 1..80: mol_type = other DNA
caaggtgataaacaatgcattacagctctcgcaaccaacccggccagtcacagcaccagacacacctagctcaagtgggg

SEQ ID NO: 170615 - DNA, 80 bp, synthetic construct
  source 1..80: mol_type = other DNA
ctcaaccttataacaccatattacaatagagacttggcagttgtggcgacaggagcacagggctcagaagtcattcccca

SEQ ID NO: 170616 - DNA, 80 bp, synthetic construct
  source 1..80: mol_type = other DNA
tgggaagcccagtagtgatgacatgacagactttaacaactgggtttcagggcaaggacaataccaaacatgcaccccct

SEQ ID NO: 170617 - DNA, 80 bp, synthetic construct
  source 1..80: mol_type = other DNA
gaccacaagtcaacatcatagtagactcacaatatgtcatgggaatagtagctggacagccaacagaaacagagtcaccg

SEQ ID NO: 170618 - DNA, 80 bp, synthetic construct
  source 1..80: mol_type = other DNA
agacctactcaaatcagtcagaaacccagatgttattagatactgtgaagaaaataaatggataataccctcagactgca

SEQ ID NO: 170619 - DNA, 80 bp, synthetic construct
  source 1..80: mol_type = other DNA
ctccgtcgtgtagccaagccgaggcccgcaaagtcttaggcgaggggaattgtccatagactttcaccgcacccttcagt

SEQ ID NO: 170620 - DNA, 80 bp, synthetic construct
  source 1..80: mol_type = other DNA
tagaaagacaaataaacacccttcatatgaatcaaataagtgataatgacagagaggtgttgttcaacaatgtgctgtgg

SEQ ID NO: 170621 - DNA, 80 bp, synthetic construct
  source 1..80: mol_type = other DNA
aaattagatatggcagttcttgccaaagagggagaaaaatatggcctaacaattactcctgctgataagtcaaacatttt

SEQ ID NO: 170622 - DNA, 80 bp, synthetic construct
  source 1..80: mol_type = other DNA
actctccaaatgtcgaagcttgtggctatagtgatagagtgcaacagatcacacttggtaattcgacaatcacaacccaa

SEQ ID NO: 170623 - DNA, 80 bp, synthetic construct
  source 1..80: mol_type = other DNA
tggtggaaattaccagactgtctcaaagatatggggatgttcggtcaaaacatgttctaccactacctaggacggtctgg

SEQ ID NO: 170624 - DNA, 80 bp, synthetic construct
  source 1..80: mol_type = other DNA
gagaaacaaggcttggttgacagtagtttctgctgtcactagtgcaataagtatattgctcttggtgactaagattttca

SEQ ID NO: 170625 - DNA, 80 bp, synthetic construct
  source 1..80: mol_type = other DNA
acacatataatgccaaagagaacaaagaaaacttaaaaaaattaagaaacgcctactttaaagaactaacctctcacgga

SEQ ID NO: 170626 - DNA, 80 bp, synthetic construct
  source 1..80: mol_type = other DNA
ctcctcgcaaagggaatcaagcacctcctcggagatgtcctccgactccgaaaaggagtccactgggacccggtccttac

SEQ ID NO: 170627 - DNA, 80 bp, synthetic construct
  source 1..80: mol_type = other DNA
ccccagcgtccggctgctctagatttagggccagagcagccccggttcccacaagatccatatgtgtattccggtggcca

SEQ ID NO: 170628 - DNA, 80 bp, synthetic construct
  source 1..80: mol_type = other DNA
tattgacttagacaagttgaagatgattgcttatggagatgatgtattggtctcatacccttatccactagatgctaggg

SEQ ID NO: 170629 - DNA, 80 bp, synthetic construct
  source 1..80: mol_type = other DNA
ctgccgctctttatcattgcgttcttctcccgcgagcccaccaaggatctggatgactcctttgattatctggtcgagag

SEQ ID NO: 170630 - DNA, 80 bp, synthetic construct
  source 1..80: mol_type = other DNA
acacctagtgataccatgcagactcgctatgtgaaaaattaccattcaagatctgagtccagcattgaaaacttccttag

SEQ ID NO: 170631 - DNA, 80 bp, synthetic construct
  source 1..80: mol_type = other DNA
tcagcacaattagctaccttagatattaacccacaacctatctctatagaagaaagtgtttttggcatggatggattaga

SEQ ID NO: 170632 - DNA, 80 bp, synthetic construct
  source 1..80: mol_type = other DNA
tccatcaggggcatagtgcccatggtaatatgcggacacaccagagccggtaggaactttgctattcacagcgaagactt

SEQ ID NO: 170633 - DNA, 80 bp, synthetic construct
  source 1..80: mol_type = other DNA
ggagggggagacccagacgcagacgctttaaaaagagacgtttcagacgcagacgcaaaaagcccaaaataattattaaa

SEQ ID NO: 170634 - DNA, 80 bp, synthetic construct
  source 1..80: mol_type = other DNA
tcactatcggtgactccactataacaacacaggacacactcaatactgttgttgcttatggggaatggccacagtatctt

SEQ ID NO: 170635 - DNA, 80 bp, synthetic construct
  source 1..80: mol_type = other DNA
acaatcctcaacccagaagcattagctagaagatttggatttgatctagatatctgcttgcatagcacctacactaagaa

SEQ ID NO: 170636 - DNA, 80 bp, synthetic construct
  source 1..80: mol_type = other DNA
acacgaagagccacggccaggtgggacgacggccagagacgcggaaaagacgcggaaaagaggaagtccccgggtggacg

SEQ ID NO: 170637 - DNA, 80 bp, synthetic construct
  source 1..80: mol_type = other DNA
tttccttttatactttatttcatctcatggtgacaacatatattgataagtgtatgttgtttaccatgggtgcacaagtg

SEQ ID NO: 170638 - DNA, 80 bp, synthetic construct
  source 1..80: mol_type = other DNA
agagcagtagaatacacacacaagtatagtaccaattaccactacaaagcagatgacaacacatccacactcacagatag

SEQ ID NO: 170639 - DNA, 80 bp, synthetic construct
  source 1..80: mol_type = other DNA
gacaattacaaggatgcccaaggtaaactcaatgtggcagctgcttttcgaccgtgtgatgtcaacacaaaaattggcaa

SEQ ID NO: 170640 - DNA, 80 bp, synthetic construct
  source 1..80: mol_type = other DNA
acgtggagggggatggggtcagttacaggaatagtatgtgttgcggtacagaccatcgtgtacggtatgagtatgtcatc

SEQ ID NO: 170641 - DNA, 80 bp, synthetic construct
  source 1..80: mol_type = other DNA
gactgttctttggggccttatgtggtgtttgccgctgaggtactcaggggcatttaggtttttcctcattcttaaataat

SEQ ID NO: 170642 - DNA, 80 bp, synthetic construct
  source 1..80: mol_type = other DNA
ggttctatagctcagcttctctcaaaagaatgcttcaaaaaccaacagatgatgaactctatcttaaaaaaccaaaattc

SEQ ID NO: 170643 - DNA, 80 bp, synthetic construct
  source 1..80: mol_type = other DNA
gcactgtgcgcagagctattaacaataccacgagcattgagtctgcagccaacacagtcccgagctcacatcggctggag

SEQ ID NO: 170644 - DNA, 80 bp, synthetic construct
  source 1..80: mol_type = other DNA
tagacaacattgtaagcagcgggcccttcgcataccacggctcacagccctcagcaactctcaccactaaatacaaattc

SEQ ID NO: 170645 - DNA, 80 bp, synthetic construct
  source 1..80: mol_type = other DNA
ctcagtgcgtttattaagagacacaccgttcatatctcaaaatgcacttctacagaatgatccggccactgccatcgtca

SEQ ID NO: 170646 - DNA, 80 bp, synthetic construct
  source 1..80: mol_type = other DNA
cgctccctcctctagcacccgatgtagaggagccggccctggaagccgaagtcgacctgatgctacaggaagccggagcc

SEQ ID NO: 170647 - DNA, 80 bp, synthetic construct
  source 1..80: mol_type = other DNA
gctgtatcttatatcaaacacaattttcctgatgctgttccctacatagatgagtacttaaatattgaaatgtcaacttt

SEQ ID NO: 170648 - DNA, 80 bp, synthetic construct
  source 1..80: mol_type = other DNA
aacttgaaatgttcacctattccagatttgacattgaactcactttcgtcattaccgagcgatttgcagccagtggaagc

SEQ ID NO: 170649 - DNA, 80 bp, synthetic construct
  source 1..80: mol_type = other DNA
gagtgaaggaaccagcagccctaagcaatggggattcacgactcgaggttgatctcagcacagctgtgttaagtaagtac

SEQ ID NO: 170650 - DNA, 80 bp, synthetic construct
  source 1..80: mol_type = other DNA
gtggcgtgaactcccaggaggtgcctgctttgacagctgtggaaacgggggcctccggccaagccgtgcctagtgatgtg

SEQ ID NO: 170651 - DNA, 80 bp, synthetic construct
  source 1..80: mol_type = other DNA
cagtgttagctactttagcactgttaggatgtcacgagtccccatgggcttttctgaagaataaagtgtgtaagtggctt

SEQ ID NO: 170652 - DNA, 80 bp, synthetic construct
  source 1..80: mol_type = other DNA
cctggcccatccaatgccgcccccgtttgtagaaattcacacacggcaacccctaacgtttcaccaatacatgaaccgga

SEQ ID NO: 170653 - DNA, 80 bp, synthetic construct
  source 1..80: mol_type = other DNA
gtgtatattttaaattattgggcccttcaataaattattataattctggtatcagtgaatatgatgtagtaggacagcgt

SEQ ID NO: 170654 - DNA, 80 bp, synthetic construct
  source 1..80: mol_type = other DNA
tacagtcacctttacactaaaggtactgtatgatcagcacctaagaaatatgaacaggtggtctgtgtcaaatgacatcc

SEQ ID NO: 170655 - DNA, 80 bp, synthetic construct
  source 1..80: mol_type = other DNA
tcagaaagcgaaggcatatataataaaaaaacagacagtaactatggataccactcttttcaagttaaaggcaaaagaca

SEQ ID NO: 170656 - DNA, 80 bp, synthetic construct
  source 1..80: mol_type = other DNA
agtggaatatacacacacacatgtcacaaattacaaaccacaagatggtgatgtaactacagttattccaactagagaaa

SEQ ID NO: 170657 - DNA, 80 bp, synthetic construct
  source 1..80: mol_type = other DNA
tggaccttctgggaccagtggtggcgtggaatcgctcagtccggacctggaaagagcaggcggaccgagccagagggacc

SEQ ID NO: 170658 - DNA, 80 bp, synthetic construct
  source 1..80: mol_type = other DNA
gcggttttcttttaagcgccgctgacttgtttcttctgttttttcgccccgtgtgctgttccgcccagacccgcaacaac

SEQ ID NO: 170659 - DNA, 80 bp, synthetic construct
  source 1..80: mol_type = other DNA
gcaggtaacgttgaagcacaacacaacactgccactccacatacaacgtggatcatacccctggttatcattataacaat

SEQ ID NO: 170660 - DNA, 80 bp, synthetic construct
  source 1..80: mol_type = other DNA
ccgctccctcgcgatccaacaagcggaaaagagaccccgaggaggatgaagaaggcgtggggctattcccgggtgaggat

SEQ ID NO: 170661 - DNA, 80 bp, synthetic construct
  source 1..80: mol_type = other DNA
ccagccaaaacaacacatccatcactataaatgaaacttctccgtgcacaaacgaaagcaaatgcccaggattgggagac

SEQ ID NO: 170662 - DNA, 80 bp, synthetic construct
  source 1..80: mol_type = other DNA
gttcaacaacgtcagatggttggcaattcaatcgcgtcgcttcgcaccactgtatgcagtggaagcaaagcgcattcaaa

SEQ ID NO: 170663 - DNA, 80 bp, synthetic construct
  source 1..80: mol_type = other DNA
cctttaaacaccttcaaatttcccgaagagcttctggggcgcgttgttgtgattgattcctctttgtgtgccgccagtca

SEQ ID NO: 170664 - DNA, 80 bp, synthetic construct
  source 1..80: mol_type = other DNA
tcttctggtaaacggggattgaggggcaagagctccaaagccaggctcgagaagtcatagtcatcctcggccacacggcc

SEQ ID NO: 170665 - DNA, 80 bp, synthetic construct
  source 1..80: mol_type = other DNA
cagttgagaattatgtggaagaagtccttaatgaggtcttggtagtacccaacatcaaagaaagccaccctagtacatca

SEQ ID NO: 170666 - DNA, 80 bp, synthetic construct
  source 1..80: mol_type = other DNA
acgatactaatatccacgttgtcagaaagctgcaaaccaacgtgtccttgtcaatgtctctgtaatgacaccaccacaac

SEQ ID NO: 170667 - DNA, 80 bp, synthetic construct
  source 1..80: mol_type = other DNA
tcagttaacacactgggctttcaatcagttaacacacctacaaaaacaaaactacaaccaagtgccttctatcacatttt

SEQ ID NO: 170668 - DNA, 80 bp, synthetic construct
  source 1..80: mol_type = other DNA
agcagtagcgttgtaggagagatgtagttttcctgtggaaaaaattaatgagttgtttattttgttagcaggttggcgag

SEQ ID NO: 170669 - DNA, 80 bp, synthetic construct
  source 1..80: mol_type = other DNA
ctgttaaagatgtattagagaaaggaataccgacactgcaatcacctacagttgaggcttgtggatattcagatagaatc

SEQ ID NO: 170670 - DNA, 80 bp, synthetic construct
  source 1..80: mol_type = other DNA
caacacacaaatgaccctaggagacgcagtctcagaccttaaatacaacacaggaaagttctatacaaagcagaacccag

SEQ ID NO: 170671 - DNA, 80 bp, synthetic construct
  source 1..80: mol_type = other DNA
cagaactactgtgttagattcacttcttattcaactaattaatcaaaaacagtacgaagacaaaacaacaatactacaat

SEQ ID NO: 170672 - DNA, 80 bp, synthetic construct
  source 1..80: mol_type = other DNA
tgactgctacgtcacggccgccattttagttcacaaaatggcggacttccttcctctttttccaaaataacggccctgcg

SEQ ID NO: 170673 - DNA, 80 bp, synthetic construct
  source 1..80: mol_type = other DNA
taacaaattgttataaggtagagaaattggggcaattggctagttttcaaaagaagggggattggaagcaactgtataaa

SEQ ID NO: 170674 - DNA, 80 bp, synthetic construct
  source 1..80: mol_type = other DNA
tactatgaagtcaaagtactcatctctacaaaaaatattatatacaacatgcacattttatcaaacaacacaagtgctag

SEQ ID NO: 170675 - DNA, 80 bp, synthetic construct
  source 1..80: mol_type = other DNA
tgatgctggtgccactaataaatatggttattcttcaatcaatgactttggaaccatcgctattcgcatagttaatgaac

SEQ ID NO: 170676 - DNA, 80 bp, synthetic construct
  source 1..80: mol_type = other DNA
ccttacgaacccctagtggagcaccaaacaccctgccgatcactgtttcaattgccccagacaaatccgagttttccggt

SEQ ID NO: 170677 - DNA, 80 bp, synthetic construct
  source 1..80: mol_type = other DNA
ctaattgctctgatgacaaaacgcaagaattggagaatgcaatctacaccatttgtgatattggtactgataatagtttt

SEQ ID NO: 170678 - DNA, 80 bp, synthetic construct
  source 1..80: mol_type = other DNA
ggggcaatatcgttacccgcttgactactacgggaaacctagtatcatcttcgattgatttgagagttgcgttcagcgcc

SEQ ID NO: 170679 - DNA, 80 bp, synthetic construct
  source 1..80: mol_type = other DNA
aataccagtaaggccacagaccagtagtggagagcaagtttttggattccaattacaaccgggccacgatagcgtgctaa

SEQ ID NO: 170680 - DNA, 80 bp, synthetic construct
  source 1..80: mol_type = other DNA
cgagatgttcacttacttgcgatttgatatggagattactgtggtcataactagttcccaagaccaatccacatcgcaga

SEQ ID NO: 170681 - DNA, 80 bp, synthetic construct
  source 1..80: mol_type = other DNA
ctactacgactacttagacaatactgcagacaccactagagaccatgaaagacagcagaaatggacaaacatgaaaatga

SEQ ID NO: 170682 - DNA, 80 bp, synthetic construct
  source 1..80: mol_type = other DNA
acacacacaccaatgcgaacgtgcggaccttttgggcagcagtccggggcggtgtatgtcggcaattacagagttgttaa

SEQ ID NO: 170683 - DNA, 80 bp, synthetic construct
  source 1..80: mol_type = other DNA
ttctccttaccatttttaagtgtggcatctgcttactacatgttttatgatggatataatgaggggggtacaaattatgg

SEQ ID NO: 170684 - DNA, 80 bp, synthetic construct
  source 1..80: mol_type = other DNA
aggcctgcaaggcctttgatagaccccccagaaatgaccttaccagacccccttgctacccctggatgcctccaactttc

SEQ ID NO: 170685 - DNA, 80 bp, synthetic construct
  source 1..80: mol_type = other DNA
agactactgactttatagtgagctggacaaaaaatccacccatgaagaccaatcaatacaccgcccccctcactcatcct

SEQ ID NO: 170686 - DNA, 80 bp, synthetic construct
  source 1..80: mol_type = other DNA
ccggctgtaaaggtcagaaaatcgcagcagggtccaaggttgtgctgtacatgggacctctttcccattagcaagaaccc

SEQ ID NO: 170687 - DNA, 80 bp, synthetic construct
  source 1..80: mol_type = other DNA
catctcaccagtggaacctgcgcgtaggtttagccgcactcgaggccctgatgctcgtctacacgctctgcgagaccgcc

SEQ ID NO: 170688 - DNA, 80 bp, synthetic construct
  source 1..80: mol_type = other DNA
ggggcgaccatgtatataaacaggacattgtacaagcaatgagaaccaatgcagaaaacatgtataagaaccacaaacag

SEQ ID NO: 170689 - DNA, 80 bp, synthetic construct
  source 1..80: mol_type = other DNA
attaggacctaggtatggtggtgtgtttaccagtaacatcaaaatcatgaactatcacttgatgactccagaagatcact

SEQ ID NO: 170690 - DNA, 80 bp, synthetic construct
  source 1..80: mol_type = other DNA
ttccggtagattcactcgagaagtacaagtcgttagcccgctttccatgggaccggcctacatcttccactacttcgaca

SEQ ID NO: 170691 - DNA, 80 bp, synthetic construct
  source 1..80: mol_type = other DNA
atactgaaacacagagggatgattttttgtcatcaaatggcgtgataactataccagctggggagcaaatgactttgtct

SEQ ID NO: 170692 - DNA, 80 bp, synthetic construct
  source 1..80: mol_type = other DNA
acccccgccgccactccgtagagcgctgcccgcacccccggcggccgctccggagccccagcaggagaacaacaacaata

SEQ ID NO: 170693 - DNA, 80 bp, synthetic construct
  source 1..80: mol_type = other DNA
acaggtatcaagacaaactaccggctcacatgagagtgctgttaatgccacgaatggtggtattataaaatatttcaata

SEQ ID NO: 170694 - DNA, 80 bp, synthetic construct
  source 1..80: mol_type = other DNA
acaggaccagtccactagcgtggcgcaagacgcacctgtgctcactcaccaaattatgtatattccaccaggcggcccgg

SEQ ID NO: 170695 - DNA, 80 bp, synthetic construct
  source 1..80: mol_type = other DNA
atgcaggattattggatacagctaaagcactacaagcatgtccagaatgtgcaaaaccaccctactataaacagtgttgc

SEQ ID NO: 170696 - DNA, 80 bp, synthetic construct
  source 1..80: mol_type = other DNA
acatgcaaaatgtggtagcggttatgtgggatcgcgatctcctggttgctgagagcaaagcgcagggcattgacaccatt

SEQ ID NO: 170697 - DNA, 80 bp, synthetic construct
  source 1..80: mol_type = other DNA
cagcattagcgctggagcaacaaacaagtacggttacaacaccattaatgactttgggaccgtggctgtgcgtattgtga

SEQ ID NO: 170698 - DNA, 80 bp, synthetic construct
  source 1..80: mol_type = other DNA
tggcttttgactataccaattttgatggcagcatccacccaatctggttcaaggcactaggtcgcgtacttgaccaatta

SEQ ID NO: 170699 - DNA, 80 bp, synthetic construct
  source 1..80: mol_type = other DNA
caatctccatgtgctttgccgtggtttcacccaactaaagaaatttccatacctggtgaagtcaaaaatttgattgaatt

SEQ ID NO: 170700 - DNA, 80 bp, synthetic construct
  source 1..80: mol_type = other DNA
attgtctagccggggatagtgaagcgaagaattcttacacctcctacaagaatgccaacccaggagaggctggtggtgag

SEQ ID NO: 170701 - DNA, 80 bp, synthetic construct
  source 1..80: mol_type = other DNA
cacccagagacagactttgtagttcagtatgacaatgttccccccatgaaaatggatgagtttacagcccctaacactca

SEQ ID NO: 170702 - DNA, 80 bp, synthetic construct
  source 1..80: mol_type = other DNA
tcggggcggggacggcgttgttttcgggcgtgctgaagacgtggggtgtgcgtggacgggcgttacgctggggacgggga

SEQ ID NO: 170703 - DNA, 80 bp, synthetic construct
  source 1..80: mol_type = other DNA
cggtggtcgatgctgatcacgttgtccttgttctcgaccacgtagtcgcgcgcgaaggtgtggcggcagcggaactcgac

SEQ ID NO: 170704 - DNA, 80 bp, synthetic construct
  source 1..80: mol_type = other DNA
gacctccaggggacttgactataagtgcattgcaatcctactgttgttcttcatacttactgtaacaattgttctcagtt

SEQ ID NO: 170705 - DNA, 80 bp, synthetic construct
  source 1..80: mol_type = other DNA
tttaaacgcttctaaagttgttcccattgggtgaggggagattaaaaccgactcttggggtcttcggtacctttgtacgc

SEQ ID NO: 170706 - DNA, 80 bp, synthetic construct
  source 1..80: mol_type = other DNA
cagagaaaacaccttctgctatgagctactggcgaccacctaccaggaatgtaccgggacaggagcagggctggtacgac

SEQ ID NO: 170707 - DNA, 80 bp, synthetic construct
  source 1..80: mol_type = other DNA
ctgaactcccctagcgctgaggaatgcgggtacagtgacagagttcgttccatgacgctcgggaattcgacgatcaccac

SEQ ID NO: 170708 - DNA, 80 bp, synthetic construct
  source 1..80: mol_type = other DNA
gacgccggcgcccctggggctggaggagacgtcgctggagacgactacgcacccggagacctagacgacttgttcgccgc

SEQ ID NO: 170709 - DNA, 80 bp, synthetic construct
  source 1..80: mol_type = other DNA
caaagttaaatgagtagggtacgaagcctttgtttgggtctgagtggtctattagcatgggctcagtgtatgggcatctt

SEQ ID NO: 170710 - DNA, 80 bp, synthetic construct
  source 1..80: mol_type = other DNA
acatgtccgatcaaggcattgtcactgaaatatcttctgttcaaccaatgtatattaataccaaatcccaaatacataaa

SEQ ID NO: 170711 - DNA, 80 bp, synthetic construct
  source 1..80: mol_type = other DNA
caatcccactaaagacataatgaacaaggcaaacacctggttttggcaaaacctacaacataaaaatgacttacattcca

SEQ ID NO: 170712 - DNA, 80 bp, synthetic construct
  source 1..80: mol_type = other DNA
tatttgcatcatggattatcaatgccaggcgtatggtacaaatgagacgtaagctcgagttgtttacatacgttagattc

SEQ ID NO: 170713 - DNA, 80 bp, synthetic construct
  source 1..80: mol_type = other DNA
tctacagaaagaaaaggcaagtgtcactgctacaactgcaccctccacagaaagctcggaggtttctaagtgctatgtgg

SEQ ID NO: 170714 - DNA, 80 bp, synthetic construct
  source 1..80: mol_type = other DNA
gtagacagcctagagacgtacaagtggttgacccgatcaaagtgggcccccggttcgtgttccactcctgggactggcgc

SEQ ID NO: 170715 - DNA, 80 bp, synthetic construct
  source 1..80: mol_type = other DNA
actacctcacacagtgggactcctcaaataacaatcatattaatgccacctatgctaatggcaaatatgatatatatgaa

SEQ ID NO: 170716 - DNA, 80 bp, synthetic construct
  source 1..80: mol_type = other DNA
gggtctacatcataatataaagatgtgcacttccgaatggctgagtttttcacgccattccgcagcggtggagcagcgca

SEQ ID NO: 170717 - DNA, 80 bp, synthetic construct
  source 1..80: mol_type = other DNA
gcaccaatgtgcgccgagtacaacgggttgcgcctgggtggtcaccaagggttgcccgttctgaatacaccaggtagtaa

SEQ ID NO: 170718 - DNA, 80 bp, synthetic construct
  source 1..80: mol_type = other DNA
ttggagatggattcacaaactccattagagacacactggtgggtgcttgtgatgtatcagataaattgactggaaagatc

SEQ ID NO: 170719 - DNA, 80 bp, synthetic construct
  source 1..80: mol_type = other DNA
tgcacgttgccatacttatgaatatcatagcaaccacggtaaacatgaggacaaaaactttaatttgattataaatccta

SEQ ID NO: 170720 - DNA, 80 bp, synthetic construct
  source 1..80: mol_type = other DNA
gcgaccctgttcgcgaggacgcagcgtgaagacgccgccggtcatctcccggtaatagggctggtccccgttgggtagcg

SEQ ID NO: 170721 - DNA, 80 bp, synthetic construct
  source 1..80: mol_type = other DNA
tgtggactatgacaactatgataccaaaaatttcttcaaatggcagataaatttacaagaaatggctcaaattagaagga

SEQ ID NO: 170722 - DNA, 80 bp, synthetic construct
  source 1..80: mol_type = other DNA
ggacaccacggtttaccacaggcgccgcaaacatctacctcgacgtcgcgctccgtgcggcccccagaggcccgccgaga

SEQ ID NO: 170723 - DNA, 80 bp, synthetic construct
  source 1..80: mol_type = other DNA
gggcggcatggccacccaaaaatttactctcagaatactgtacgatgactataagagatttatgaactactggacctcct

SEQ ID NO: 170724 - DNA, 80 bp, synthetic construct
  source 1..80: mol_type = other DNA
ctgtacagcaactgcagagacttaatatacaggagcttccagaccctccaccagctgacccagtggatcctcaggagaat

SEQ ID NO: 170725 - DNA, 80 bp, synthetic construct
  source 1..80: mol_type = other DNA
cctgtccctcggtttcggactcgctgatccccgaggaaacgggggtcacgcgtcctatgatgagtttggctcacattaac

SEQ ID NO: 170726 - DNA, 80 bp, synthetic construct
  source 1..80: mol_type = other DNA
cgtgctcaccgcactaattttaagattcaaaataaggatattaagacaggaattaaatccagaacaattattacgacagc

SEQ ID NO: 170727 - DNA, 80 bp, synthetic construct
  source 1..80: mol_type = other DNA
ggtatacaaggttgagggaggtatgccatcaggaatatctgggacttcagtgtttaacaccatgataaacaatattatac

SEQ ID NO: 170728 - DNA, 80 bp, synthetic construct
  source 1..80: mol_type = other DNA
cacctatgtgtactgagttcaatggtctacgtaatatcacagtgcctgcgactcaagggttaccgaccatgaatacgccc

SEQ ID NO: 170729 - DNA, 80 bp, synthetic construct
  source 1..80: mol_type = other DNA
acaggtatccagacagaatgttgggactcactctacacagaactctgtatctaatggatctagtttaaactacttcaaca

SEQ ID NO: 170730 - DNA, 80 bp, synthetic construct
  source 1..80: mol_type = other DNA
acatcacctagacgcccccattttcccttactagggggccctaaatatctgttcccagaacgcttgaaaccagtgtattc

SEQ ID NO: 170731 - DNA, 80 bp, synthetic construct
  source 1..80: mol_type = other DNA
ggatgtccataaccgcagacttacttaaatccaactatgagtccttctttcacttattagacactaaattttccagtcag

SEQ ID NO: 170732 - DNA, 80 bp, synthetic construct
  source 1..80: mol_type = other DNA
tcgtcgcgttcgctgatattagagatttgtatgtggaagaggaggccatggaacagggaatcactaattacatggaatct

SEQ ID NO: 170733 - DNA, 80 bp, synthetic construct
  source 1..80: mol_type = other DNA
gtgacgctcgccgtcactctggttggtaccgttctcccccttctctaccagttaacatttacctcaatgaccaatttgac

SEQ ID NO: 170734 - DNA, 80 bp, synthetic construct
  source 1..80: mol_type = other DNA
agaaaacgggatatgaaggtcaaagactatactttttcatggtataaagattcacttaaagcccttaacatgttatgtta

SEQ ID NO: 170735 - DNA, 80 bp, synthetic construct
  source 1..80: mol_type = other DNA
tggactgacggaagcgggttcgtacctgtagagtaccagtgcagatggagggtctgtctagccttccagcaacaagtact

SEQ ID NO: 170736 - DNA, 80 bp, synthetic construct
  source 1..80: mol_type = other DNA
gaactccaaccagagttattggcacttgctggtaagaaatatggcctgacaattacacccccagacaagtcagaaaaatt

SEQ ID NO: 170737 - DNA, 80 bp, synthetic construct
  source 1..80: mol_type = other DNA
tgagctctggccaaagaaatggaaactgcaaaaaatacagctaccagaaaaagaggtttggacagtaaatgacattcaga

SEQ ID NO: 170738 - DNA, 80 bp, synthetic construct
  source 1..80: mol_type = other DNA
ataggaagaaccaacttcccaaagacacccaataaggtcattgctactaggggtagtatcactacttatggaggaaactc

SEQ ID NO: 170739 - DNA, 80 bp, synthetic construct
  source 1..80: mol_type = other DNA
ggacagcgaccagccgtcagagacagaagccctctcggaggaagaagaagagggctcgatacaccagcagctccggcagc

SEQ ID NO: 170740 - DNA, 80 bp, synthetic construct
  source 1..80: mol_type = other DNA
cttctgggccgccatgtatggctactctgactttatagaaagcgagctaggccccttccaggacgcagagaccgtgggct

SEQ ID NO: 170741 - DNA, 80 bp, synthetic construct
  source 1..80: mol_type = other DNA
ctcggggccgtatcggagaagttgccgtgcacaagccaggcggccacgagtaccccgtgctggacgtaacattcggacac

SEQ ID NO: 170742 - DNA, 80 bp, synthetic construct
  source 1..80: mol_type = other DNA
gtcctcgctaaagatgaccccaggaccaaactcaatggccagcatgagaagatcctggaactctacactgattctgtcac

SEQ ID NO: 170743 - DNA, 80 bp, synthetic construct
  source 1..80: mol_type = other DNA
ccatggatatgtatagaatttcactaagcacagatggtagtacagaccccatattttgcttaaacctctcccccgcctcg

SEQ ID NO: 170744 - DNA, 80 bp, synthetic construct
  source 1..80: mol_type = other DNA
gggtagcagatacggtggcgagcggtcctagtaattcgaccagtatcccagcactcacagcagttgagacaggtcacacg

SEQ ID NO: 170745 - DNA, 80 bp, synthetic construct
  source 1..80: mol_type = other DNA
cagctcagacttccacttgcatacctccaatatgggatcggctggttccaagaagcaatccaagcagcgacgagggctgc

SEQ ID NO: 170746 - DNA, 80 bp, synthetic construct
  source 1..80: mol_type = other DNA
atcatcatgtcaccttgttgttccctggattagttcccatttcttcagaaggacgaagaaagatgattacacagaaggtg

SEQ ID NO: 170747 - DNA, 80 bp, synthetic construct
  source 1..80: mol_type = other DNA
acgcactggttgattacggggcacttaacctgaccaattacaacctggcccaccacctgacccccacgctctatctggag

SEQ ID NO: 170748 - DNA, 80 bp, synthetic construct
  source 1..80: mol_type = other DNA
cattatgctaatcaactcaagcagttagatatcaagactaccaagatgagtatggaggatgcttgttacggtacagagaa

SEQ ID NO: 170749 - DNA, 80 bp, synthetic construct
  source 1..80: mol_type = other DNA
agtcagacaggtgggctcaccctctggtgggcacaattcacgccagtaatttatattgcccaatgcttcgagcatactgc

SEQ ID NO: 170750 - DNA, 80 bp, synthetic construct
  source 1..80: mol_type = other DNA
tacaccagctgataaatctgcaactttcaagcctatcacatgggacagtgtcactttccttaaaagaggtttcaggcctg

SEQ ID NO: 170751 - DNA, 80 bp, synthetic construct
  source 1..80: mol_type = other DNA
catttgacatacgacgtgacctctttagcgacaagagtcttaaaagaatctcagaacaaccagagacttttgagtcttta

SEQ ID NO: 170752 - DNA, 80 bp, synthetic construct
  source 1..80: mol_type = other DNA
agcaagcagtggattgagcaaacaggatttctcaatggatccagaaaaattcaccaagcctattgcagagacattgacca

SEQ ID NO: 170753 - DNA, 80 bp, synthetic construct
  source 1..80: mol_type = other DNA
ttgatatgtttggagatacccatgtaccaaaccgtagaatgacccctgaggaatttgaacaagaattaattgttgctggt

SEQ ID NO: 170754 - DNA, 80 bp, synthetic construct
  source 1..80: mol_type = other DNA
aagcttgtaaagcatgggacagaccacccagaaatgaccttaaaaagccaccattttacccctggatgcctcctacacac

SEQ ID NO: 170755 - DNA, 80 bp, synthetic construct
  source 1..80: mol_type = other DNA
aggggattgtggtggtaagctactgtgtacacatggaaccatagggatggtgacggcaggtggagagagccatgttgcat

SEQ ID NO: 170756 - DNA, 80 bp, synthetic construct
  source 1..80: mol_type = other DNA
attcaacgggctcctactggaactcttttcactccatggagtaccttaatccaggcataacagatacgtacaacaataaa

SEQ ID NO: 170757 - DNA, 80 bp, synthetic construct
  source 1..80: mol_type = other DNA
gcaatgataccaactactcgggctttgcacctaattgccctaaagtagtagctgcttcatgcactaggatgatggaaacg

SEQ ID NO: 170758 - DNA, 80 bp, synthetic construct
  source 1..80: mol_type = other DNA
caagagacaagttagaatatgtcaataaattaaagcaattacaattaattgaaaaccagatgtctgtactacaccaatcg

SEQ ID NO: 170759 - DNA, 80 bp, synthetic construct
  source 1..80: mol_type = other DNA
ggcagcccccacctcccatagcaacaccaggcaaaaaacacagagcaactgcatcctagtcccgatttcccctctcaaaa

SEQ ID NO: 170760 - DNA, 80 bp, synthetic construct
  source 1..80: mol_type = other DNA
cagtcaagaagtgagagactactgtgagaagaaagggtggatcatcaaggtggataacaacatgaccatagagcgcaact

SEQ ID NO: 170761 - DNA, 80 bp, synthetic construct
  source 1..80: mol_type = other DNA
attcatgctgtgtgggcgggcatagtggtatcagtggcactcatagcactatatatgggtaaccgtcgtaggcccaggaa

SEQ ID NO: 170762 - DNA, 80 bp, synthetic construct
  source 1..80: mol_type = other DNA
cgacagaaatctcaaaacgcgtatttcggacaaacacacattttattattcactgcagcatatagcccattttagcgcgg

SEQ ID NO: 170763 - DNA, 80 bp, synthetic construct
  source 1..80: mol_type = other DNA
ttggagccatgatgaaatccggtatgtttttgacattatttgtgaatacaattatcaatatagttattgcaagtcgcgtg

SEQ ID NO: 170764 - DNA, 80 bp, synthetic construct
  source 1..80: mol_type = other DNA
tgtaacttatagaagcttgaacatacaggcgaataggaagccaacaaaccatgttggtaaacgccaagcacttctgtttc

SEQ ID NO: 170765 - DNA, 80 bp, synthetic construct
  source 1..80: mol_type = other DNA
tcatgaacgacatggcccaatgtggaccctttgcctatggtggagaagaaaagtcagtagtagtaactgctaaatataaa

SEQ ID NO: 170766 - DNA, 80 bp, synthetic construct
  source 1..80: mol_type = other DNA
atacaacaggaatagaagggagtaatgtcaccataaagggtaattctacgtgggactgtctttcagtcgcctggatacga

SEQ ID NO: 170767 - DNA, 80 bp, synthetic construct
  source 1..80: mol_type = other DNA
gcacttctgtttccccggctctagaggaatagaccttgcaaagggttgaagccacgaaagtcgttatccgcacacatact

SEQ ID NO: 170768 - DNA, 80 bp, synthetic construct
  source 1..80: mol_type = other DNA
agggccttccggactacaaaaatggccgttccgtgacgtcactagccgccattttgtgtcagcgcgggtgagggtcacgt

SEQ ID NO: 170769 - DNA, 80 bp, synthetic construct
  source 1..80: mol_type = other DNA
tacaattggtatacatacaaagcctcatcagttaaagaaaagcttaagaaaatgagacaagcctactttagacaattaac

SEQ ID NO: 170770 - DNA, 80 bp, synthetic construct
  source 1..80: mol_type = other DNA
cacaggtttacctaacccaaagcccaaggtccccacgttgcgtgcagccaaggtacaaggtccagcgtttgactatgcgg

SEQ ID NO: 170771 - DNA, 80 bp, synthetic construct
  source 1..80: mol_type = other DNA
acaatggtgccaacttcacttcacaagacgtgaaaatggcagcctggtggataggagtagaacagaccttcggagtacct

SEQ ID NO: 170772 - DNA, 80 bp, synthetic construct
  source 1..80: mol_type = other DNA
cacaaacgaaaaacatttgcatatacttccttgttcttgcatcaatctataacgacaaagtgagcattgccaaagatgaa

SEQ ID NO: 170773 - DNA, 80 bp, synthetic construct
  source 1..80: mol_type = other DNA
tgatgtcagatgctacaaccccttctactgggtcaggaacagacccccatggttactttgactggagctccagtagtaca

SEQ ID NO: 170774 - DNA, 80 bp, synthetic construct
  source 1..80: mol_type = other DNA
acgctgtgtaacatcgatgtgggagagagacttgatagtagtggaatctaaagcacagggtgttgatcaaattgccagat

SEQ ID NO: 170775 - DNA, 80 bp, synthetic construct
  source 1..80: mol_type = other DNA
acaaaacagttgtaccaataacactcatgtcagggttagtgtttcactcccagccaatcaataacagacccaggcaagca

SEQ ID NO: 170776 - DNA, 80 bp, synthetic construct
  source 1..80: mol_type = other DNA
tgctcttgggacacagcagcccaaaatgctcgtgtgaggtaaaagccacatccagcatgatgtgcgagatcttgcccggt

SEQ ID NO: 170777 - DNA, 80 bp, synthetic construct
  source 1..80: mol_type = other DNA
ggccacggccccgcggctttttgtgccggtgcggagccaatttagcttcccctccccttagcgggaggtctcgcggtgtg

SEQ ID NO: 170778 - DNA, 80 bp, synthetic construct
  source 1..80: mol_type = other DNA
tggtttcaggccgggtccccgcgctcccggcgccccgggagtagggggaccccctccgcctctccgtagagcgctgcccg

SEQ ID NO: 170779 - DNA, 80 bp, synthetic construct
  source 1..80: mol_type = other DNA
cccggcatcgagagaaactggtacgagagctgcttcagatcccatgctgctgtttgtggctgtggcgactttgttggcca

SEQ ID NO: 170780 - DNA, 80 bp, synthetic construct
  source 1..80: mol_type = other DNA
cccatggtcaccttcctcaaagatgaacttaggaaaaaagaaaaaattcacactggaaagacacgtgtcattgaagctag

SEQ ID NO: 170781 - DNA, 80 bp, synthetic construct
  source 1..80: mol_type = other DNA
ggtagtataaagctaacgttcctgttctgcgggaccgctctcgcaactggcaaactgttgctagcctattcaccacctgg

SEQ ID NO: 170782 - DNA, 80 bp, synthetic construct
  source 1..80: mol_type = other DNA
gcactcgcgaatcttgtttacctgggtctcgtggctaaaggaggactgaaaggcgtctgtctgggtgggagagcccacgc

SEQ ID NO: 170783 - DNA, 80 bp, synthetic construct
  source 1..80: mol_type = other DNA
agatttcagacaatacacagcatttaccttgccatcagtgaataatgcagaaccaggaaagagatacatttataaagtcc

SEQ ID NO: 170784 - DNA, 80 bp, synthetic construct
  source 1..80: mol_type = other DNA
atccactttgcctttctctccacagatctcacgtactgacggtgggagaatgttaatccatattggcagaacgaaaacgc

SEQ ID NO: 170785 - DNA, 80 bp, synthetic construct
  source 1..80: mol_type = other DNA
tttctagctagaatgattactaatgacagtgacatttattcattgcctcctgatcctaaatattttgatggttatgatca

SEQ ID NO: 170786 - DNA, 80 bp, synthetic construct
  source 1..80: mol_type = other DNA
cattataacgccacgtcggagcccctgcgcgccacaacgccgtccggcgcaacttctgtctcggcacggtacgataaaaa

SEQ ID NO: 170787 - DNA, 80 bp, synthetic construct
  source 1..80: mol_type = other DNA
atcaaggcacacttctaattgctatggttcctgaacatcaacttgccagtgctaactatggtaatgttacagctggatat

SEQ ID NO: 170788 - DNA, 80 bp, synthetic construct
  source 1..80: mol_type = other DNA
tatccgtcctcctgactcatttatcgctatctcgatgccccgctcacatgcaagagttaatcttcactctatctgacata

SEQ ID NO: 170789 - DNA, 80 bp, synthetic construct
  source 1..80: mol_type = other DNA
taccaaactggaattgttgtgccagctggaacacctacatcatgctcgataatgtgtttcgcttcggcatgcaatgactt

SEQ ID NO: 170790 - DNA, 80 bp, synthetic construct
  source 1..80: mol_type = other DNA
aatgtccgctgcttgctgggtctccttccgtccccgtgagcaatggtggggacggagattcgaaattgaatcttgccatc

SEQ ID NO: 170791 - DNA, 80 bp, synthetic construct
  source 1..80: mol_type = other DNA
tgaattctttcataacagttgctacagaccattatgctgcccaactctactctttagatataaatccacagcctatcaca

SEQ ID NO: 170792 - DNA, 80 bp, synthetic construct
  source 1..80: mol_type = other DNA
attatgagtgtggataactataatgagactctggctagcggccaaaaatccagcttgtttgccacctggaatgttaccta

SEQ ID NO: 170793 - DNA, 80 bp, synthetic construct
  source 1..80: mol_type = other DNA
agaagaacaagcaccccaagaaaagacagagaaaatactcgtcaagcagctccagcagcagaaactccaccagcgagtcc

SEQ ID NO: 170794 - DNA, 80 bp, synthetic construct
  source 1..80: mol_type = other DNA
ggctacccttgccttactaggctgcagtaagtcaccatggacatttctaaaggagaaaatctgtttgtggcttggaatta

SEQ ID NO: 170795 - DNA, 80 bp, synthetic construct
  source 1..80: mol_type = other DNA
ttgcattcacagacctcagaccataccgggacctaaatcaccatcaaggacctatttcaaattatctgacacagttaggc

SEQ ID NO: 170796 - DNA, 80 bp, synthetic construct
  source 1..80: mol_type = other DNA
gcagcgacataggaacaggagacacaaccacacccaagagcacaacgagcacacccaccccatcccaggatacaatagat

SEQ ID NO: 170797 - DNA, 80 bp, synthetic construct
  source 1..80: mol_type = other DNA
aattaatgatcaaaaggtggatactaatctcatatttcagcaggttatgctcttaggactatctgctatagaacaaaggt

SEQ ID NO: 170798 - DNA, 80 bp, synthetic construct
  source 1..80: mol_type = other DNA
ataatgatcccagacttgaagttaaactatcagaatctttattctctaagtataagggaaatgttgaaatgaaacctaca

SEQ ID NO: 170799 - DNA, 80 bp, synthetic construct
  source 1..80: mol_type = other DNA
aatgaacccagcagagaacatgacacctcagggtgcaatgccatctgcgccccctgcagatccagcagtggagatgttga

SEQ ID NO: 170800 - DNA, 80 bp, synthetic construct
  source 1..80: mol_type = other DNA
tcagcgtgtacataataccaactttgttccagcaacaggacaagtagagatacagatacctacaagagcagatcttacta

SEQ ID NO: 170801 - DNA, 80 bp, synthetic construct
  source 1..80: mol_type = other DNA
gtatgatatgcccctacacagaccctccactaatcagaacatcactagacaaaaagaaatgggggtacgtggcctatgac

SEQ ID NO: 170802 - DNA, 80 bp, synthetic construct
  source 1..80: mol_type = other DNA
aattgcaaggccgtgggagtttcacctgtcggtgtctgcttattaaggtcactaagcactccgagcgtcagcgaggagtg

SEQ ID NO: 170803 - DNA, 80 bp, synthetic construct
  source 1..80: mol_type = other DNA
ggggctaattgcctttttacaaattcccttctgtattgcaggtcctgctgccactgcttttccgtgcggaaagtcgccat

SEQ ID NO: 170804 - DNA, 80 bp, synthetic construct
  source 1..80: mol_type = other DNA
gtgcctcccccccccaaaatcgcaaacaggctatgttggggacacacgttatatgggatgtgggtttacaatctagctgt

SEQ ID NO: 170805 - DNA, 80 bp, synthetic construct
  source 1..80: mol_type = other DNA
acaagattcatcagggagataaaatcctaaaagtaggaaaatatgcaaaggttaaaaacactcacaccaatggagtaaga

SEQ ID NO: 170806 - DNA, 80 bp, synthetic construct
  source 1..80: mol_type = other DNA
aatccatagccgtatagggcaagcacttctgttaccccggatgtgtgaatagacttctcacgaggttgaagctgaagcat

SEQ ID NO: 170807 - DNA, 80 bp, synthetic construct
  source 1..80: mol_type = other DNA
aacctgcagccagtgcacacagaacagagtgaaactgggccggaaagagtaattgcaggaggggaccaacaactcagggt

SEQ ID NO: 170808 - DNA, 80 bp, synthetic construct
  source 1..80: mol_type = other DNA
gcgggatgttcaagggaccgctggtcggtttctgactgcccgaggataacaggccgctgaaaacgctggaaacaccgcca

SEQ ID NO: 170809 - DNA, 80 bp, synthetic construct
  source 1..80: mol_type = other DNA
tttcaaaaaaaagcggaagtgccgccgcggcggcgggtggcggcgcgctgcgcgcgccgcccagtagggagcgccatgcg

SEQ ID NO: 170810 - DNA, 80 bp, synthetic construct
  source 1..80: mol_type = other DNA
catgtcagggttggggtaggggattttgtgggtggagtcagcgaggtgcatgataccatagagcagcgagtagccgagcg

SEQ ID NO: 170811 - DNA, 80 bp, synthetic construct
  source 1..80: mol_type = other DNA
cgcgtggcttgtcacgtgagtgcacgtcacggcggccattttgaatcacaaaatggcggacttccttcctcttttttaaa

SEQ ID NO: 170812 - DNA, 80 bp, synthetic construct
  source 1..80: mol_type = other DNA
tactggacttgctccaacaaggacctagaactagtgagatacttttacaccacagtaaccttctacagacaccccactca

SEQ ID NO: 170813 - DNA, 80 bp, synthetic construct
  source 1..80: mol_type = other DNA
cagtgaaagcaaaacaatttatctacttgtttgttgaattcactctattgaccacccacttcccgctttgaattcaccca

SEQ ID NO: 170814 - DNA, 80 bp, synthetic construct
  source 1..80: mol_type = other DNA
gacacggtaacttctggacttacagcaacaaggacttggaactgactagatacctgggggcgactctgactttctatagg

SEQ ID NO: 170815 - DNA, 80 bp, synthetic construct
  source 1..80: mol_type = other DNA
ataaagatttaaatactctagaaaacatcacaacaacagaatttaaaaatgcaataacaaatgcaaaaataattccctac

SEQ ID NO: 170816 - DNA, 80 bp, synthetic construct
  source 1..80: mol_type = other DNA
aggtgctgtgagtagcaaaattctgcaaggccactaggcgcgctggctccagcgtcagccggttgcccatctcgaatgtg

SEQ ID NO: 170817 - DNA, 80 bp, synthetic construct
  source 1..80: mol_type = other DNA
ttcctgcagactatgttgaggaaggaggttaacagtcagctgagtctgggagacccgctgtttccagagttggccgaaga

SEQ ID NO: 170818 - DNA, 80 bp, synthetic construct
  source 1..80: mol_type = other DNA
aacacacaacagcatggataccccggccacccagagccacacagtatttgcacaagtttagtactaattacaataaacca

SEQ ID NO: 170819 - DNA, 80 bp, synthetic construct
  source 1..80: mol_type = other DNA
agtacaactccgcagaaaacttgaattcttcacttactctagattcgacttggaaatgacttttgttataactgaaaggt

SEQ ID NO: 170820 - DNA, 80 bp, synthetic construct
  source 1..80: mol_type = other DNA
gggtcccaaattccaggaaaagacacatacctaaaaacagtaggtacaaaccaaagcttacaaacaggcaataatagcat

SEQ ID NO: 170821 - DNA, 80 bp, synthetic construct
  source 1..80: mol_type = other DNA
cacctactttagaggttcacttatactgagaatgtcagtctatgccagtaccttcaatagaggccgactaagaatgggct

SEQ ID NO: 170822 - DNA, 80 bp, synthetic construct
  source 1..80: mol_type = other DNA
tcagacattaaaaaagtatctctgggtatgaaataccgttttaagtggatctggggtggaaaccccgttcgccaacaggt

SEQ ID NO: 170823 - DNA, 80 bp, synthetic construct
  source 1..80: mol_type = other DNA
catggttgctcgacacagtgacctgggagcaatcccagaccactggctggaaccttgcaggccctaatggcatgcaatgg

SEQ ID NO: 170824 - DNA, 80 bp, synthetic construct
  source 1..80: mol_type = other DNA
tacacgggaaaaccctgctccagcagatactcgccgatttttctggccatggtccagttgctgatagacacacactgcaa

SEQ ID NO: 170825 - DNA, 80 bp, synthetic construct
  source 1..80: mol_type = other DNA
gcaaagctatacagtggttagagaggaacaaagagcacgtttgtgctattttggattatgcttctgatattattgtagag

SEQ ID NO: 170826 - DNA, 80 bp, synthetic construct
  source 1..80: mol_type = other DNA
atggcatttgtcccaacaaccttatggggaccttctgtgtcagaatacttggatcagactccttgaaagaagctttgact

SEQ ID NO: 170827 - DNA, 80 bp, synthetic construct
  source 1..80: mol_type = other DNA
tccagatgctcaaagattgagcgtgacttcaactatgcacaatactgcattaactgtgtgggtagcatcatcttgattct

SEQ ID NO: 170828 - DNA, 80 bp, synthetic construct
  source 1..80: mol_type = other DNA
aacgatcggggcctctgcggctagcctgcggtttccgttctgctcaccacaaactgacaacatttgcatatacttcctcg

SEQ ID NO: 170829 - DNA, 80 bp, synthetic construct
  source 1..80: mol_type = other DNA
ccagaatcctggagggcatgaagagggaatccaaccccccggccatggggaagtattttatcaggatgtgtaaaaagtcc

SEQ ID NO: 170830 - DNA, 80 bp, synthetic construct
  source 1..80: mol_type = other DNA
ttccaccctacaaaggagatatttataccaggaaaagtaaataacctctcggagatttgtcaagtggattcaatgatacc

SEQ ID NO: 170831 - DNA, 80 bp, synthetic construct
  source 1..80: mol_type = other DNA
cgagcgttgcaaaaaatatgccgcgcagtagtcgaaagccgtactgagcgtgcgaagcgggtagggtgccgaacgacgga

SEQ ID NO: 170832 - DNA, 80 bp, synthetic construct
  source 1..80: mol_type = other DNA
aaagcaccctctctcgccgcaaccgtccacgcaggtctccgccaacttgagaaacagaaatggtcactcgtcatcatcga

SEQ ID NO: 170833 - DNA, 80 bp, synthetic construct
  source 1..80: mol_type = other DNA
ctgaatcttccactgagatacccattacactgaccattgctcccatgtgctgcgaattcaatggtttacgcaacatcact

SEQ ID NO: 170834 - DNA, 80 bp, synthetic construct
  source 1..80: mol_type = other DNA
agcttttgactacaccaattatgatggcagtctacacccagtttggtttgaagcactaggaagggtcttagataaattag

SEQ ID NO: 170835 - DNA, 80 bp, synthetic construct
  source 1..80: mol_type = other DNA
caacgacgagggagaggaggacgacgacgagctccgtcacagcgacccggcgccgcttcacgagtccaagaagccccgca

SEQ ID NO: 170836 - DNA, 80 bp, synthetic construct
  source 1..80: mol_type = other DNA
aagcctcgcaacttccccatggcccagatgcctcagagggtgacaccatctgcacccccgatggacacagcaatgggcat

SEQ ID NO: 170837 - DNA, 80 bp, synthetic construct
  source 1..80: mol_type = other DNA
aagtacaatccctattactatttctattagccccatgtttgctgaattttcaggtgcacgtgcaaaaagtcaaggattac

SEQ ID NO: 170838 - DNA, 80 bp, synthetic construct
  source 1..80: mol_type = other DNA
atatagaggctgactcccagcgaggtgggcactttgcgctcgcgtgatagccaaatgatgtgtttattgtaaaaagccag

SEQ ID NO: 170839 - DNA, 80 bp, synthetic construct
  source 1..80: mol_type = other DNA
agctacacagggctaccaaacctgacattacaagcaatgtttgtaccaactggtgccccaaaacccaccactcaggattc

SEQ ID NO: 170840 - DNA, 80 bp, synthetic construct
  source 1..80: mol_type = other DNA
ctcgtttaaacaaagcctcctctgatgctctgtggcacctcaaggtgaatatagctgcccatcgacgtatcgctggaaac

SEQ ID NO: 170841 - DNA, 80 bp, synthetic construct
  source 1..80: mol_type = other DNA
acgaggcagctcctcctccgaaaactccgagagcagcagtgtctccagctcaacctccgacacctcgccatccaactcgc

SEQ ID NO: 170842 - DNA, 80 bp, synthetic construct
  source 1..80: mol_type = other DNA
aagaataagaccatgccgttataacaaatcgttgtcgtaagcataattagatctgtgtgtatgttgcgtaaagtgtgtga

SEQ ID NO: 170843 - DNA, 80 bp, synthetic construct
  source 1..80: mol_type = other DNA
acacaatacatggacaatatggaaaaccaacatacaacagtgtagattaccacctaggaaaatacagtcctatattttta

SEQ ID NO: 170844 - DNA, 80 bp, synthetic construct
  source 1..80: mol_type = other DNA
catatagtatgggcagtgaacgaattggacagatatggattagcagagagcctgttggagtcaaaagaaggatgtcacaa

SEQ ID NO: 170845 - DNA, 80 bp, synthetic construct
  source 1..80: mol_type = other DNA
tactagcaccatcacagaaaaattgttaaaaacgcttgtcaagatagtctccactttggtaataattagcagaaactatg

SEQ ID NO: 170846 - DNA, 80 bp, synthetic construct
  source 1..80: mol_type = other DNA
tcaactcagcagtatattcactgcctccagatccaaaacactttgatgggtaccaacaacaggaagttgtgattatggat

SEQ ID NO: 170847 - DNA, 80 bp, synthetic construct
  source 1..80: mol_type = other DNA
atgggagctcaagttaccagacagcaaaccggtacccacgagaatgccaacatcgccacaaatggatctcatatcacata

SEQ ID NO: 170848 - DNA, 80 bp, synthetic construct
  source 1..80: mol_type = other DNA
cgggcgaatcaacgagtgtctgcacggcgtgctgacgggtgatgtagagcgacgctgtcacccgcaccgagaagcggcta

SEQ ID NO: 170849 - DNA, 80 bp, synthetic construct
  source 1..80: mol_type = other DNA
caacccaatgttaatagacagattgtgtaaatccaagcatatattcaaaaatacatactatgaagttgaaggaggtgttc

SEQ ID NO: 170850 - DNA, 80 bp, synthetic construct
  source 1..80: mol_type = other DNA
tggcacaatggagaggaaaaatacaatgacttcattcaaaaggtgcggtctacatcggttggaagagccctgtatctccc

SEQ ID NO: 170851 - DNA, 80 bp, synthetic construct
  source 1..80: mol_type = other DNA
aagaaagctaagaatgtgaactttgatgttgaagctgtcactgcagagcgagcaagcttaataaccacaggcctacaagg

SEQ ID NO: 170852 - DNA, 80 bp, synthetic construct
  source 1..80: mol_type = other DNA
agaaatgggtttattcgggcaaaacatgtattatcatgcagtaggtagatcaggatacattatacatgtgcagtgtaatg

SEQ ID NO: 170853 - DNA, 80 bp, synthetic construct
  source 1..80: mol_type = other DNA
agtgcatgataatttcaaggactcacagggcaaacttaatgtagcagcagccttccaaccatgcgatgtggacaacaaga

SEQ ID NO: 170854 - DNA, 80 bp, synthetic construct
  source 1..80: mol_type = other DNA
attagcactacttggatgttctggttcaccgtggcgctacctaaaagacaaggtctgcaagtggttaggtattgatccac

SEQ ID NO: 170855 - DNA, 80 bp, synthetic construct
  source 1..80: mol_type = other DNA
gaaagaaagaaccagcagcacttagcaacagggacccacgcctggaagttgatttgaaagagtcagtgcttgcaaaatac

SEQ ID NO: 170856 - DNA, 80 bp, synthetic construct
  source 1..80: mol_type = other DNA
ccctcgacgaagaagagtaaggagacgcagacgatggaggagggggcgacccagacgcagactgtacaggtttaagagac

SEQ ID NO: 170857 - DNA, 80 bp, synthetic construct
  source 1..80: mol_type = other DNA
accgtcattaccatttccgccctcccggcaaccacagttctttctacctccgtcatcgtagctccatactccgtttgact

SEQ ID NO: 170858 - DNA, 80 bp, synthetic construct
  source 1..80: mol_type = other DNA
ggacccagaggtgatgctactagtgaaacgagcagcgatgaggataccggtagacagggttcggatgtggagctagagtc

SEQ ID NO: 170859 - DNA, 80 bp, synthetic construct
  source 1..80: mol_type = other DNA
agacgcgggcgacgcacatactacagacgcagactcaaaaagagacgcaaaaagagaaaaaagcttccactaactcagtg

SEQ ID NO: 170860 - DNA, 80 bp, synthetic construct
  source 1..80: mol_type = other DNA
acgacgaacacctcagattccttaacttctggactgttagcaacgaggacttggacttgtgtagatacctaggagccacc

SEQ ID NO: 170861 - DNA, 80 bp, synthetic construct
  source 1..80: mol_type = other DNA
cgtcgcagacaaacaacgtgtagccgcgcggatagggcagatccaggtggcgaccgcgctggcggcgcataaaatcgtct

SEQ ID NO: 170862 - DNA, 80 bp, synthetic construct
  source 1..80: mol_type = other DNA
cttagtattctaagcacagaaagtgaaaacaataaaacacactatgaaaaagctctttttaaaaacatagcatactacaa

SEQ ID NO: 170863 - DNA, 80 bp, synthetic construct
  source 1..80: mol_type = other DNA
gactggtgcacaaaaaatgactcacaatggacagacagacaatctgtagtacccatagtagacataccgctgtgggccgc

SEQ ID NO: 170864 - DNA, 80 bp, synthetic construct
  source 1..80: mol_type = other DNA
aaaaatcctgacaatactgcaaacgacaaggctcaaacgtttaatcactgggttgacaacacatttaaaacaggcaagtt

SEQ ID NO: 170865 - DNA, 80 bp, synthetic construct
  source 1..80: mol_type = other DNA
taaaaccgtagaaagcgttacacgttactttgagtgccatctgttccttatcgagcagcatacggcgcacggggtcttga

SEQ ID NO: 170866 - DNA, 80 bp, synthetic construct
  source 1..80: mol_type = other DNA
cggccagggactgaacaactgccgagtttgcgatctgggcagggaataggacgaggccaaagatctccgccgagcggtat

SEQ ID NO: 170867 - DNA, 80 bp, synthetic construct
  source 1..80: mol_type = other DNA
cgtacagaggagaaggagtggatctgaaacaagggactgtggcaccactgaccccagtgaccagtataaccacatatggg

SEQ ID NO: 170868 - DNA, 80 bp, synthetic construct
  source 1..80: mol_type = other DNA
acgtgcaactgccaaaagccttttgggataagaattcaaaaccagcctatgggcaatctagatattttgccgcagtcaga

SEQ ID NO: 170869 - DNA, 80 bp, synthetic construct
  source 1..80: mol_type = other DNA
tttttaccacccaccccaactttactatcttctttacttcacaagtaacatagaagcatgtacatgacgcccaataggat

SEQ ID NO: 170870 - DNA, 80 bp, synthetic construct
  source 1..80: mol_type = other DNA
tttgcgtggcaaacctcaacaaacccgagcattttctggactgaagggaatgcgccaccccgcttgtcaataccctttat

SEQ ID NO: 170871 - DNA, 80 bp, synthetic construct
  source 1..80: mol_type = other DNA
ctacccaaattatgacggacagaacatacacccagcatctcataaccggtcaactattactacaactgggaaatttggac

SEQ ID NO: 170872 - DNA, 80 bp, synthetic construct
  source 1..80: mol_type = other DNA
actcaaaatattagcttatggagatgatatcttgttttcttatccttatgatttagatatgaaagaacttgcagatgaag

SEQ ID NO: 170873 - DNA, 80 bp, synthetic construct
  source 1..80: mol_type = other DNA
gggttccctcttatccccggtgccagtagtgtgctgaataggacactcctgggtgagatccttaattattatacacattg

SEQ ID NO: 170874 - DNA, 80 bp, synthetic construct
  source 1..80: mol_type = other DNA
ggggagaccatgtatatacaaaagaaatagtaaaccttatgaaacagaatgcagaagaaatgtataagagccacaagcag

SEQ ID NO: 170875 - DNA, 80 bp, synthetic construct
  source 1..80: mol_type = other DNA
aataaagcctggctaacagtagtatctgccgtcactagtgcgataagcatattacttctggtgactaagatcttcaaaag

SEQ ID NO: 170876 - DNA, 80 bp, synthetic construct
  source 1..80: mol_type = other DNA
actcctccgcacatcaatgacacttgcaacatgacagggccgctattcgccattcgaaccaccgaagccgtactcaacac

SEQ ID NO: 170877 - DNA, 80 bp, synthetic construct
  source 1..80: mol_type = other DNA
gtacagaataggagccttctcaccaatattccttagcccatacagaacaagcccaatagaaaactggcctatggcataca

SEQ ID NO: 170878 - DNA, 80 bp, synthetic construct
  source 1..80: mol_type = other DNA
ttagaatttatttcaagccaaagcatatcaaagcatgggtgcccagaccaccacgcttgtgcaagtacctgaagtcaggc

SEQ ID NO: 170879 - DNA, 80 bp, synthetic construct
  source 1..80: mol_type = other DNA
gtagctacagacagatatgatagttggatgatttccattagggacatggtacaactaagacggaagtgtgaaatgttcac

SEQ ID NO: 170880 - DNA, 80 bp, synthetic construct
  source 1..80: mol_type = other DNA
cgtcataagtcacgtggtggggacccgctgtaacccggaagtaggccccgtcacgtgatttgtcacgtgtgtacacgtca

SEQ ID NO: 170881 - DNA, 80 bp, synthetic construct
  source 1..80: mol_type = other DNA
tagatttctgcagaagattgaagcagttagatatcctagaaaggcagattaccacaatgcacatctcaaatcccactcag

SEQ ID NO: 170882 - DNA, 80 bp, synthetic construct
  source 1..80: mol_type = other DNA
ctcaggtcatcagaaacccgtgcaaagacaaccaagtatccggtccccgtcgacagcctagggatgtacaagtcgttgac

SEQ ID NO: 170883 - DNA, 80 bp, synthetic construct
  source 1..80: mol_type = other DNA
tcgtgtccttggattactcttcagatgcctctacatatgtacccatcaccgtcacggttgcgccaatgtgtgcagagtat

SEQ ID NO: 170884 - DNA, 80 bp, synthetic construct
  source 1..80: mol_type = other DNA
taagggtctcctttaaacttaacttccaataaaatttcaaggccgtgggagtttcacttgtcggtgtctgcttcttaagg

SEQ ID NO: 170885 - DNA, 80 bp, synthetic construct
  source 1..80: mol_type = other DNA
tacttttactgggagacggtgcagtccgtagccacctccacattccacacacaacacgtcccacagcacggcacgaagcc

SEQ ID NO: 170886 - DNA, 80 bp, synthetic construct
  source 1..80: mol_type = other DNA
tatcatagctacatgttctgcatgccctgacttgtctgtacgcatgatgcgtgatacaccaatgatcaaacaacctgaaa

SEQ ID NO: 170887 - DNA, 80 bp, synthetic construct
  source 1..80: mol_type = other DNA
agttctaacaactgctttttgaaagtcagcagtctgtggggagaccacgtatatgacaaagagaagttaatacaggcatg

SEQ ID NO: 170888 - DNA, 80 bp, synthetic construct
  source 1..80: mol_type = other DNA
cggaagtagctgactcacgtgacttgtcacgtgacgtgtgacgcgcagcggccattttagtttacaaaatggcggacttc

SEQ ID NO: 170889 - DNA, 80 bp, synthetic construct
  source 1..80: mol_type = other DNA
caccaggtggtaagctgccaacttccagaaaggaggcaatgcttggtgttcatgttatctgggatttgggtctacagtca

SEQ ID NO: 170890 - DNA, 80 bp, synthetic construct
  source 1..80: mol_type = other DNA
attgcaatagtctcaacaccctttgctatatcattaaattgaactcagcaaaatgggcgcacaagtgtcaactcaaaagg

SEQ ID NO: 170891 - DNA, 80 bp, synthetic construct
  source 1..80: mol_type = other DNA
cggagactgggccacagagtacctagcttgcaaaatctttgacaggccccctagaacccacctcaccgaccctcctttct

SEQ ID NO: 170892 - DNA, 80 bp, synthetic construct
  source 1..80: mol_type = other DNA
gggctgtgacccagacacattttggtcagtaatcccatgcttattggatggagaattgattgcatttgattactcaaatt

SEQ ID NO: 170893 - DNA, 80 bp, synthetic construct
  source 1..80: mol_type = other DNA
ggaaacgccaacccccgcatatcggttccattcgttggtattggtgcagcgtactcccacttctatgatggtttttccgt

SEQ ID NO: 170894 - DNA, 80 bp, synthetic construct
  source 1..80: mol_type = other DNA
attgccaaagtggttgatgctgccttaagcacttcgatgcccacggtccagaacaccgccagtagtggtccggtccattc

SEQ ID NO: 170895 - DNA, 80 bp, synthetic construct
  source 1..80: mol_type = other DNA
ctctgccggcggggaacacaaatcacacgcacacgcagctcgcctatttaacctccacccactacaacacacacatgccg

SEQ ID NO: 170896 - DNA, 80 bp, synthetic construct
  source 1..80: mol_type = other DNA
ctgcagatatcatatgttttgtgtctggttgcaaggatttctgtttgaggatggctagagacacaaacctacattcccaa

SEQ ID NO: 170897 - DNA, 80 bp, synthetic construct
  source 1..80: mol_type = other DNA
aagaagcccctctcctcgaagaacaagcacaccaaaaagaaaaagaggagctactcctcaagcagccccagcagcaaaga

SEQ ID NO: 170898 - DNA, 80 bp, synthetic construct
  source 1..80: mol_type = other DNA
cgagtatgctgttagcaccctcaggacaccccccctctttctaccctcagaataccagcgagaagacggcgctgcagaaa

SEQ ID NO: 170899 - DNA, 80 bp, synthetic construct
  source 1..80: mol_type = other DNA
tgcggaacgtgcctggaggccagaccttcggcacagctgtggccggacaggagctcccgctcctgggtgtggaaatcact

SEQ ID NO: 170900 - DNA, 80 bp, synthetic construct
  source 1..80: mol_type = other DNA
ccccgtctccaccaccgccccggccccgcaacatcccccggccccagcgtaacccccgtcctcgccgcaaacacctcggg

SEQ ID NO: 170901 - DNA, 80 bp, synthetic construct
  source 1..80: mol_type = other DNA
ggaagaaaaccaaagcaacatgtacacaaaaagagcacttcacacattcttaggcagtcaatatctaaactttaaatcag

SEQ ID NO: 170902 - DNA, 80 bp, synthetic construct
  source 1..80: mol_type = other DNA
tctgttttccccgcgttttccgatagaatagctgcctggatctgcgcccggtcccctttctgcgaaaacacccgggccgt

SEQ ID NO: 170903 - DNA, 80 bp, synthetic construct
  source 1..80: mol_type = other DNA
gtgctcaaaccgtgggcgacagttgaagaagtagctctccttgaacctctttttaaggctccggcaccactgcaagaatt

SEQ ID NO: 170904 - DNA, 80 bp, synthetic construct
  source 1..80: mol_type = other DNA
acatcagaaaagagatactcctccgctccagtgaggaacagaagaggtgtgttcgtgctaggattcttgggttttctcac

SEQ ID NO: 170905 - DNA, 80 bp, synthetic construct
  source 1..80: mol_type = other DNA
ggacacaattcttattgatggtgttgagacaaaaattctgaaacagacaattatcacagatgagaatgatgtggatacag

SEQ ID NO: 170906 - DNA, 80 bp, synthetic construct
  source 1..80: mol_type = other DNA
ccttagcaacacatcccagatatactggcacaaatgatacaaaaaagataaatctagtggccccagaaggaggggacccg

SEQ ID NO: 170907 - DNA, 80 bp, synthetic construct
  source 1..80: mol_type = other DNA
agggcaagcccggctcgcacgcagacattggctgggcgtggtttactgaccacgtaatttcattgctctctgagcggtta

SEQ ID NO: 170908 - DNA, 80 bp, synthetic construct
  source 1..80: mol_type = other DNA
tccttccgtccccgtgagcaatggtggggacggagattcgaaattgaatcttgccatccgtcatacgactcaggtctttg

SEQ ID NO: 170909 - DNA, 80 bp, synthetic construct
  source 1..80: mol_type = other DNA
atatgcaaacagcttaaacactgataatgcagctaataccaagccaacatcaatagatcctatagtagacatactagttt

SEQ ID NO: 170910 - DNA, 80 bp, synthetic construct
  source 1..80: mol_type = other DNA
aattacaatgtaacctttatgctaaactatcaataaacacgccagcttcactgttctaggccgtgggactttcacttgtc

SEQ ID NO: 170911 - DNA, 80 bp, synthetic construct
  source 1..80: mol_type = other DNA
gtaagacttcaaaaaattcaaaatgaatttgcagctgtgtacccacagctgcctacacagaggcccacagactccacact

SEQ ID NO: 170912 - DNA, 80 bp, synthetic construct
  source 1..80: mol_type = other DNA
acaatgcagggatgggcgtagctgccggtaatttaaccatattcccacatcaatggatcaacctgcgcacgaataatagt

SEQ ID NO: 170913 - DNA, 80 bp, synthetic construct
  source 1..80: mol_type = other DNA
atgtgcatgtgggaaatctcatatacaggaatctacacttgtttaattcagaagccaatgattcagtgttgatatcatac

SEQ ID NO: 170914 - DNA, 80 bp, synthetic construct
  source 1..80: mol_type = other DNA
attcactaatgagggacaatggagagtgccattgttattcctaagacaaggccatgggtccttatcactcctatttgctt

SEQ ID NO: 170915 - DNA, 80 bp, synthetic construct
  source 1..80: mol_type = other DNA
aggagacgacggatacaaatatgctacacaaatgagacagtggtactggacccaattaacaactttaacagccacagtac

SEQ ID NO: 170916 - DNA, 80 bp, synthetic construct
  source 1..80: mol_type = other DNA
atcctagtgtgttttatgatgtattcccgggtgagaaagaacccgctgtcttaacccagaaagatcctagactagaaact

SEQ ID NO: 170917 - DNA, 80 bp, synthetic construct
  source 1..80: mol_type = other DNA
ccattcggtgaaccaattttcttacaaagatgataaacaagatgccagccagtgttagcagaatcagcaggacgagcagc

SEQ ID NO: 170918 - DNA, 80 bp, synthetic construct
  source 1..80: mol_type = other DNA
tcttaatgacactgtacagttcagaatggtttttggaaatctcttttcaacctttcataagaatccaggaactattactg

SEQ ID NO: 170919 - DNA, 80 bp, synthetic construct
  source 1..80: mol_type = other DNA
taggcaatgcaaagtgttgccctttaatatgtgggaaagcagtagttttcggagacagaaacactggagatcacctctca

SEQ ID NO: 170920 - DNA, 80 bp, synthetic construct
  source 1..80: mol_type = other DNA
gtggttgatagaaatcctgagacagataagagaagaagctttaaagcattttgaccctcgcttgctaactgctcttggca

SEQ ID NO: 170921 - DNA, 80 bp, synthetic construct
  source 1..80: mol_type = other DNA
ggattgtttctgccatggtgataataataagaaatagttcagatccacaaacagtcatagccacactcacactaattgga

SEQ ID NO: 170922 - DNA, 80 bp, synthetic construct
  source 1..80: mol_type = other DNA
attggtggatccatacgctattgaaaattaaagatatggtcctaagtgtctttaaacccagtattgagagtaaggctgta

SEQ ID NO: 170923 - DNA, 80 bp, synthetic construct
  source 1..80: mol_type = other DNA
gcaagcgccgcgtcgcgcaaaactcccgcagccaacaaacaccggccgcagacaaggaccgtggaaactccctcagcccg

SEQ ID NO: 170924 - DNA, 80 bp, synthetic construct
  source 1..80: mol_type = other DNA
tataccaacgctcacgggtgctgaatccggacacccctctcaattaccacccagtgactctatgcaaacgcgccacgtgt

SEQ ID NO: 170925 - DNA, 80 bp, synthetic construct
  source 1..80: mol_type = other DNA
acggagccatcttcctcttcctgaccaacatgacctttcaaaacgtctttgccacgataaatgtaagtcttgtttagaat

SEQ ID NO: 170926 - DNA, 80 bp, synthetic construct
  source 1..80: mol_type = other DNA
tgggtatggtactaacacagctaggattcccaggagacctcatgagcaaattgtgtaaaaccacacacatatataaagat

SEQ ID NO: 170927 - DNA, 80 bp, synthetic construct
  source 1..80: mol_type = other DNA
aatacagtaacagaacaagcagtagacgatgtctggagtctctttgagacatcaataaaaccatgtgtcaaactaacacc

SEQ ID NO: 170928 - DNA, 80 bp, synthetic construct
  source 1..80: mol_type = other DNA
atgggagcggtcacatcaaattgattatgtagaactaccaaaagcattttgggaaagtcaaaagatgccagcatttgggc

SEQ ID NO: 170929 - DNA, 80 bp, synthetic construct
  source 1..80: mol_type = other DNA
gcagcgcctcggggcgatgcgacggcgatgaacttagagcaactcatcaacgtccttggtctgctcgtctggattgccgc

SEQ ID NO: 170930 - DNA, 80 bp, synthetic construct
  source 1..80: mol_type = other DNA
ttgatcttaattttaggtacactgtatgcactatacaaactcatgtgcattgctcagggaccatattcaggaaatgcaca

SEQ ID NO: 170931 - DNA, 80 bp, synthetic construct
  source 1..80: mol_type = other DNA
attatttgtatcgctcaggtttttgtttgcacgtgcagtgcaatgccagcaaattccatcaaggcgcccttttagtggct

SEQ ID NO: 170932 - DNA, 80 bp, synthetic construct
  source 1..80: mol_type = other DNA
gatcaggctgcattgctatcattaagacagaattgaaccatgaagaagggaagtacaatgcagaaggtcaaaatttctca

SEQ ID NO: 170933 - DNA, 80 bp, synthetic construct
  source 1..80: mol_type = other DNA
tgtgcatggcggtcattccactgattgaaacgagggaaggaagacattcggccgcgtatttgcccatgggcgagcggtgc

SEQ ID NO: 170934 - DNA, 80 bp, synthetic construct
  source 1..80: mol_type = other DNA
gtgtgttatacaaaattggacaagtgctaggaatacatgtaggtggaaatggtagagatgggttttcagctatgctactt

SEQ ID NO: 170935 - DNA, 80 bp, synthetic construct
  source 1..80: mol_type = other DNA
tgtagtatacttgtattccggtacatttatactacagttttatgatcccccaccctaaatgtaacttagaagcatgtaca

SEQ ID NO: 170936 - DNA, 80 bp, synthetic construct
  source 1..80: mol_type = other DNA
tacggacaatggcccacatacttaaatgctaaagatgccaacccggtagatcaacccaccgaaccagacgttgcagcatg

SEQ ID NO: 170937 - DNA, 80 bp, synthetic construct
  source 1..80: mol_type = other DNA
agacccggcagtgaaaaattggatgacacaaacactgctaattcagaacgccaacccagattgcaagttagtacttaagg

SEQ ID NO: 170938 - DNA, 80 bp, synthetic construct
  source 1..80: mol_type = other DNA
cgtattgattcttgatagaaatgaaaagttcagggatattagaaatttcatatcagaagacattgaaggcatggaagcca

SEQ ID NO: 170939 - DNA, 80 bp, synthetic construct
  source 1..80: mol_type = other DNA
accatcaaaggtcaagcacttctgtttccccggtcaacgttgatatgctccaacagggcaaaaacaaccacgatcgttac

SEQ ID NO: 170940 - DNA, 80 bp, synthetic construct
  source 1..80: mol_type = other DNA
ttatcctattatttgtgggaagcccacaactatttggattgagggtggcccttattacccaagtagatatcaggttggtg

SEQ ID NO: 170941 - DNA, 80 bp, synthetic construct
  source 1..80: mol_type = other DNA
gagatgttcacatacctacgcttcgacgttgaggtcacgtttgttataaccagcaaacaggatcagggcatcaagttaaa

SEQ ID NO: 170942 - DNA, 80 bp, synthetic construct
  source 1..80: mol_type = other DNA
gtagagtaaggaggcggaggtgggcgcgtagacggtggcgacgcagacggtacgccaccagacgaaagagacgttatagg

SEQ ID NO: 170943 - DNA, 80 bp, synthetic construct
  source 1..80: mol_type = other DNA
ccccggttggcttggatatgcttcacccgaggcaaaaaccgaaccaatcgttatccgcaaagtgcctacgagaagcctag

SEQ ID NO: 170944 - DNA, 80 bp, synthetic construct
  source 1..80: mol_type = other DNA
actctttaaattcaatactagcttatggagagtggcccacctatctatcagatatagatgcaacatcagtggataaacca

SEQ ID NO: 170945 - DNA, 80 bp, synthetic construct
  source 1..80: mol_type = other DNA
tgtactctctttgcctcctcatgtggcacaatggggagaagacctataggcactttgttgacaaaatcagaacaactgaa

SEQ ID NO: 170946 - DNA, 80 bp, synthetic construct
  source 1..80: mol_type = other DNA
gaagacgttggagacgacgttggagacagcttgtggccttggccgatagcctacatacatttcctgatccgccagctgat

SEQ ID NO: 170947 - DNA, 80 bp, synthetic construct
  source 1..80: mol_type = other DNA
atgatttaagttaaattatcaaaaggcctcagggatgttcatcttgttaattagttgtctaggaatcgagtcacctataa

SEQ ID NO: 170948 - DNA, 80 bp, synthetic construct
  source 1..80: mol_type = other DNA
ccactacggccacgtccacaacctcccgcacaggtaagtgcttttccatttttagccccagccccgcctctataagttct

SEQ ID NO: 170949 - DNA, 80 bp, synthetic construct
  source 1..80: mol_type = other DNA
gaaacaacagtgtctttggattctgcaactacaatccagacaaatcaaaactacatgaaataagaaaatggtactttaaa

SEQ ID NO: 170950 - DNA, 80 bp, synthetic construct
  source 1..80: mol_type = other DNA
aaaatggcagcctggtggatagggatagaacaaacattcggagtgccctataatccagaaagtcagggagtagtagaagc

SEQ ID NO: 170951 - DNA, 80 bp, synthetic construct
  source 1..80: mol_type = other DNA
gcttatagttgggcgagttagtcttggccatgcatacggggtacatgtcgataaccaccgaacccgcaatatacaccttg

SEQ ID NO: 170952 - DNA, 80 bp, synthetic construct
  source 1..80: mol_type = other DNA
agactatcaccagaattttttggcctatacaaagaaattatttataacccctatgatgacaaaggcaaaggaaacagaat

SEQ ID NO: 170953 - DNA, 80 bp, synthetic construct
  source 1..80: mol_type = other DNA
gccaacctcagacccagacaatactgtgcagatggcacccttaacagtaaatacactgaactacaaaatacatggacctc

SEQ ID NO: 170954 - DNA, 80 bp, synthetic construct
  source 1..80: mol_type = other DNA
ttcctctcagatggaaggtccaatgtagagttcttcactgcctacagagacatagtctacaatcccctgctagacaaggc

SEQ ID NO: 170955 - DNA, 80 bp, synthetic construct
  source 1..80: mol_type = other DNA
ataacacagggttaatgcaaataatgtatgtgccaccaggcgctaaagcaccaaccacccacagtgacaataaatgggat

SEQ ID NO: 170956 - DNA, 80 bp, synthetic construct
  source 1..80: mol_type = other DNA
ctcaatgtttgtgcatgtgggcaacttaatatatagaaaccttcatcttttcaattctgatctggatgattccattcttg

SEQ ID NO: 170957 - DNA, 80 bp, synthetic construct
  source 1..80: mol_type = other DNA
tttcttggtagatcaggatgtatacatgtctcaacaatagaagcagaccagacacatgataagaaatttgataaatggga

SEQ ID NO: 170958 - DNA, 80 bp, synthetic construct
  source 1..80: mol_type = other DNA
acaccacgcttcttcccccgaccagcccggccccgtccaccagctccgtcgccgccgctaccttgtgcagtccgcaacga

SEQ ID NO: 170959 - DNA, 80 bp, synthetic construct
  source 1..80: mol_type = other DNA
taaacccacaaggcagcaaccaaactctctgtaatgatgcctggtatctaggcaaagtgtatacaaatgacattcaaact

SEQ ID NO: 170960 - DNA, 80 bp, synthetic construct
  source 1..80: mol_type = other DNA
tagcgagtcatgcagatgggatatatgggataagtaccaccaatgatatgggaagcttgtgtttcagaaccccaaacaac

SEQ ID NO: 170961 - DNA, 80 bp, synthetic construct
  source 1..80: mol_type = other DNA
ccagtggaccttagccataatcccagttgtccctctcaacaccagtggtggaacaaccatggtaccaattactgtctcta

SEQ ID NO: 170962 - DNA, 80 bp, synthetic construct
  source 1..80: mol_type = other DNA
ccctccctcttatactcaacagatccctatccgcaaggaccggggacagccagccaacgaagaaacagaagaaggaggtg

SEQ ID NO: 170963 - DNA, 80 bp, synthetic construct
  source 1..80: mol_type = other DNA
ggctccatggatctccaatactgtctacagaagatgtgtcaaagacgatttcacagaagggggttacatcacatgctttt

SEQ ID NO: 170964 - DNA, 80 bp, synthetic construct
  source 1..80: mol_type = other DNA
gtttctagaaactatgccacacactcagacgatactaactatccaggaccctttgggggaggcatgaccacagacaaatt

SEQ ID NO: 170965 - DNA, 80 bp, synthetic construct
  source 1..80: mol_type = other DNA
cttcaatgtcaactattataaggatgcggcaagctccggtttgtccaaacaggatttttctcaagacccgtccaagttca

SEQ ID NO: 170966 - DNA, 80 bp, synthetic construct
  source 1..80: mol_type = other DNA
atacagcgatccctagtgaagccacacccattacgtgtagccatatccgcttacgtatacagccacacccctaggtacgc

SEQ ID NO: 170967 - DNA, 80 bp, synthetic construct
  source 1..80: mol_type = other DNA
cgcgccgcgaggcgtagcgcgtgagcaggtcgcgcagctcgcgcacgcgattctcccaggtctggttgagcgtgcgcagg

SEQ ID NO: 170968 - DNA, 80 bp, synthetic construct
  source 1..80: mol_type = other DNA
gtgctgatgtgccatccagcagaaaacaggcaatgcttgggacccacatcatctgggacattgggctacaatctagttgt

SEQ ID NO: 170969 - DNA, 80 bp, synthetic construct
  source 1..80: mol_type = other DNA
aaaagggcagtggggagtggcaggatctcattgttgcattacccctccagatggataatactatattctccacaacccta

SEQ ID NO: 170970 - DNA, 80 bp, synthetic construct
  source 1..80: mol_type = other DNA
cctgcacatgttggggcctctgttgagattggcgtcggggcccatggtaatgaggaggatgataatcagcaggagtacca

SEQ ID NO: 170971 - DNA, 80 bp, synthetic construct
  source 1..80: mol_type = other DNA
gccagaatcatggtcaggtgtccctacaccgagccccaactagtaggggccacagaagacgtgggcttctgcctcctcag

SEQ ID NO: 170972 - DNA, 80 bp, synthetic construct
  source 1..80: mol_type = other DNA
gcagcgccttcagcagcatctccagatagagcgtcagcagcgaactctgcgtacgattctgcgccaccacctccgggtag

SEQ ID NO: 170973 - DNA, 80 bp, synthetic construct
  source 1..80: mol_type = other DNA
gctccagaataatgacccagtggataccttcatacacagtgtacttgatgaagttgtagtggtcccagatacacaagctt

SEQ ID NO: 170974 - DNA, 80 bp, synthetic construct
  source 1..80: mol_type = other DNA
aggagtctacaataataacaaaaggagacaagctattctgtcacctaacaggaatattttcacctccatggctaaacata

SEQ ID NO: 170975 - DNA, 80 bp, synthetic construct
  source 1..80: mol_type = other DNA
gtatggttcgactggtgcacaaaacaagacactacatggaaagacacaccagcaagagtcccaattgtagatgtacccct

SEQ ID NO: 170976 - DNA, 80 bp, synthetic construct
  source 1..80: mol_type = other DNA
acgcagactacgaactagaaacaacgttaaccgcataacgtgattataaagtactaacgctatttaggataaattttgac

SEQ ID NO: 170977 - DNA, 80 bp, synthetic construct
  source 1..80: mol_type = other DNA
acataaaattagcgattactttcataatacatatatattgagtactaacttagccggacattggatactgattatacaat

SEQ ID NO: 170978 - DNA, 80 bp, synthetic construct
  source 1..80: mol_type = other DNA
gcgcgctcgtctccacgctcgagggctccgtctgcgtcaagacgggcctggtatacgaggctctctatccggtggcgcgt

SEQ ID NO: 170979 - DNA, 80 bp, synthetic construct
  source 1..80: mol_type = other DNA
actgcttggcgggcgacagcgatgtgaaaaattcatacactacctacaaaaacgccaacccaggtgaagctggcggtgag

SEQ ID NO: 170980 - DNA, 80 bp, synthetic construct
  source 1..80: mol_type = other DNA
tttgaaatgtttacttatgttagatttgatttggagatcacaatagtgaccaacaatgcaggcctaatgcaaattatgta

SEQ ID NO: 170981 - DNA, 80 bp, synthetic construct
  source 1..80: mol_type = other DNA
caaccacaacgagcccatcaacaccactaataaatgacacctctccatgcatacgtacaaacaactgctcaggactaggg

SEQ ID NO: 170982 - DNA, 80 bp, synthetic construct
  source 1..80: mol_type = other DNA
ccaggcagtggtagcgtactctgtagaaccctgctaggcgagatattaaactactatactcactggagcggtagcataaa

SEQ ID NO: 170983 - DNA, 80 bp, synthetic construct
  source 1..80: mol_type = other DNA
acctcacgccgcacggtccggcacaggtcatagatttcctccagcgaccagggggggcccttgatctttagatccaggtc

SEQ ID NO: 170984 - DNA, 80 bp, synthetic construct
  source 1..80: mol_type = other DNA
tccactttccatgccaacccaggaattctcactggatcagcagtaggctgtaacccagatgtcttctggtcacaactata

SEQ ID NO: 170985 - DNA, 80 bp, synthetic construct
  source 1..80: mol_type = other DNA
aaacctgcgatctactagaaattccatacacttttaaacaaggcgactcatggttgaagaaattcacagaagcctgtaat

SEQ ID NO: 170986 - DNA, 80 bp, synthetic construct
  source 1..80: mol_type = other DNA
agacatcttaaatcgggaaacacaagaaacagagaagatgaaattctatttagataaatatggaattgatttacctttag

SEQ ID NO: 170987 - DNA, 80 bp, synthetic construct
  source 1..80: mol_type = other DNA
tgtcaccttcctgaagcggaaattccgtcccgatgaccgctacaagtttcttatacaccctgtatatagtatggaggatg

SEQ ID NO: 170988 - DNA, 80 bp, synthetic construct
  source 1..80: mol_type = other DNA
ggcaaatttccccagttactcatgctgaggcctataagctgcattagctcgttaacttcatctctggataacagcctatc

SEQ ID NO: 170989 - DNA, 80 bp, synthetic construct
  source 1..80: mol_type = other DNA
ctccgttcacaatagacaaagacagcactcccagctatcacccaggcatgctcatgcagacaaagcacaaaatattagta

SEQ ID NO: 170990 - DNA, 80 bp, synthetic construct
  source 1..80: mol_type = other DNA
aaattctggatctttggaatctggcggggctccccagccacagcaccctgcgaacatttattcattataacggtggagag

SEQ ID NO: 170991 - DNA, 80 bp, synthetic construct
  source 1..80: mol_type = other DNA
gcctcgtccctagaggaccgcgggggaaacgacagacgaagtacggcacaacccgcgccgaggacacacgcagaggcgat

SEQ ID NO: 170992 - DNA, 80 bp, synthetic construct
  source 1..80: mol_type = other DNA
ctagtgggggttcctgccacaccaagagtaccactaagaacaatgacatataaattggcagtagacatgtcacattttat

SEQ ID NO: 170993 - DNA, 80 bp, synthetic construct
  source 1..80: mol_type = other DNA
acctccgccaggtgggacgagaaggggtcagcggctgtcattacaaagtagtgcctgtctgcaaaatggcagaggaagac

SEQ ID NO: 170994 - DNA, 80 bp, synthetic construct
  source 1..80: mol_type = other DNA
gttaatacatttcctgcatcaaacaagtaagtatggcataccttggcaatcaactgcttatcgctctcttatgcttaaat

SEQ ID NO: 170995 - DNA, 80 bp, synthetic construct
  source 1..80: mol_type = other DNA
ggttaaataatacctattgtaacaaaacatctaagatacaacaaccacacacctggtttccactggctgaaggcaactag

SEQ ID NO: 170996 - DNA, 80 bp, synthetic construct
  source 1..80: mol_type = other DNA
atagagatctgaagatagatatcaagtctacaccacccccagaatgcattaacgacttgctgcaggctgtggacagtcaa

SEQ ID NO: 170997 - DNA, 80 bp, synthetic construct
  source 1..80: mol_type = other DNA
ctggatgccccctccaaaacctaagttctctgtaacctttaagcttggcttcaaataaacaaggccgtgggagtttcact

SEQ ID NO: 170998 - DNA, 80 bp, synthetic construct
  source 1..80: mol_type = other DNA
cagcagtccgccgctcaagcgcgggtgacacaggcgctggctgagacgggcggcgcgcgtttcatcgaacacggccgcct

SEQ ID NO: 170999 - DNA, 80 bp, synthetic construct
  source 1..80: mol_type = other DNA
tggtgcccacgcccaccacgtgctgctgactatgtcgggcgatcagttgattataaccagaactctccagttatgattgc

SEQ ID NO: 171000 - DNA, 80 bp, synthetic construct
  source 1..80: mol_type = other DNA
cacccacagggcccactgggcgctagcacactggttctgcgggacttttgtgcgcctgttttataacccttccctaagca

SEQ ID NO: 171001 - DNA, 80 bp, synthetic construct
  source 1..80: mol_type = other DNA
caattacaacaagataaaggttgaagctaccaaagaattggagcagaagcactttctcaaaccaagacaggatatcagga

SEQ ID NO: 171002 - DNA, 80 bp, synthetic construct
  source 1..80: mol_type = other DNA
tcgcccgaagccattgacaggaggttctttcttgactgtgatgtgaagatcatgccagcatataatacaaacaatctctt

SEQ ID NO: 171003 - DNA, 80 bp, synthetic construct
  source 1..80: mol_type = other DNA
gatggcaagacaaccatgacaagtactggacagccagaaatgaccaaacatttagcgagtcaaaggccctaagccacaaa

SEQ ID NO: 171004 - DNA, 80 bp, synthetic construct
  source 1..80: mol_type = other DNA
accagttagcaaatgaaaattctactagggcagatgctggatacaattacacccatcctggcgagcgaggcagagaggtt

SEQ ID NO: 171005 - DNA, 80 bp, synthetic construct
  source 1..80: mol_type = other DNA
atgttcgcactcctatgcatttccttccctcccacttttatcccagtcccaacccaaaaccacacacaacacatagaatt

SEQ ID NO: 171006 - DNA, 80 bp, synthetic construct
  source 1..80: mol_type = other DNA
acccttcgccgcaaaactgagaccctgaaggaatgcaagaaaataccactatataaggagcaagtgagggcttttgcgtc

SEQ ID NO: 171007 - DNA, 80 bp, synthetic construct
  source 1..80: mol_type = other DNA
aaaggtaacacacaggtggaatggaatgataatattcagattgcagtagaccattactcagctcaactttatatgctaga

SEQ ID NO: 171008 - DNA, 80 bp, synthetic construct
  source 1..80: mol_type = other DNA
aaccccatctctcaccagattgtcagaaacccctgtaaagacggacaagggtatgcgcccggtagaaagcctcgttcaat

SEQ ID NO: 171009 - DNA, 80 bp, synthetic construct
  source 1..80: mol_type = other DNA
aacaaaaacaggtcagtgtggaggtgtgttatgcacaactggaaagatatttggaatacacgttggtggtaatggcaggc

SEQ ID NO: 171010 - DNA, 80 bp, synthetic construct
  source 1..80: mol_type = other DNA
tcgttaggtggtccatttcataccgccaggtggcccaactgcgcaggaaaatggaaatgttcacctacctgcgctacgat

SEQ ID NO: 171011 - DNA, 80 bp, synthetic construct
  source 1..80: mol_type = other DNA
gttagcccgctttccatgggaccggcgtacatcttccactacttcgacagcagaaggggattctttagtgaaaaagctct

SEQ ID NO: 171012 - DNA, 80 bp, synthetic construct
  source 1..80: mol_type = other DNA
cgatcctctgaggatcctgaggatcctgacactcctctggatttaagtttacatccagacgttgctgctcaaccagctcc

SEQ ID NO: 171013 - DNA, 80 bp, synthetic construct
  source 1..80: mol_type = other DNA
acaacctttccctcgtttttcactcccttttctaagtattgcttcagcatattacatgttttatgatggttatgatgggg

SEQ ID NO: 171014 - DNA, 80 bp, synthetic construct
  source 1..80: mol_type = other DNA
gctagtgaaaacaaaagagtgacaattattcagaaagaattacaacgtttgtctgcttaccagaaaacccacagacacga

SEQ ID NO: 171015 - DNA, 80 bp, synthetic construct
  source 1..80: mol_type = other DNA
ttgaattgtctactctaagaaaggagtagggcataagtgggagatgggcgcgagaaactccgtcttgtcagggaagaaaa

SEQ ID NO: 171016 - DNA, 80 bp, synthetic construct
  source 1..80: mol_type = other DNA
atcttcatccgcctctcctctcagtttccccgtctcctccccctcaactgccgtcaggtctccggggtccgccgtggttt

SEQ ID NO: 171017 - DNA, 80 bp, synthetic construct
  source 1..80: mol_type = other DNA
ctaaaaaaaaaaagaaattttcaaaattagactgggagaacgaggctcaaatagcagggtggttagacaggcctatgagg

SEQ ID NO: 171018 - DNA, 80 bp, synthetic construct
  source 1..80: mol_type = other DNA
acccccagacccagagaaaatgcgtggtcaggtggttcttgcccctgtttttctgcgggcagggagcctaccacagaaac

SEQ ID NO: 171019 - DNA, 80 bp, synthetic construct
  source 1..80: mol_type = other DNA
tgggcacactttgctttagaatagtaactgaggaacataccaacaaggtcaaagtcacaactagaatctatcataaggct

SEQ ID NO: 171020 - DNA, 80 bp, synthetic construct
  source 1..80: mol_type = other DNA
tactaggaaacacattccatggctcagatgaaacacttgaataccatgcaggcctatacagctctatctggctatcacca

SEQ ID NO: 171021 - DNA, 80 bp, synthetic construct
  source 1..80: mol_type = other DNA
ccatattcaacacctttaagactgaggagcacctaaagtgccctgcagccaaggaacttaaacaagcagaccctactgag

SEQ ID NO: 171022 - DNA, 80 bp, synthetic construct
  source 1..80: mol_type = other DNA
ctgaaattacaggcctatatacagatgttatatacaacccatacacagacaaaggaaaaggcaacatgatatgggtagac

SEQ ID NO: 171023 - DNA, 80 bp, synthetic construct
  source 1..80: mol_type = other DNA
acaggccagctgctccagggcgtctaccagcgtcagcgggatggcgccggcgcgaaaggcgaactggctgacaaagatct

SEQ ID NO: 171024 - DNA, 80 bp, synthetic construct
  source 1..80: mol_type = other DNA
tagtctggctgcacgttttaattttcaaggaggtccgccgccacccggagggccgcggccggaggatccgccggctctga

SEQ ID NO: 171025 - DNA, 80 bp, synthetic construct
  source 1..80: mol_type = other DNA
aaaccaagcgctacctccaccaggttgacgatgagcgtgcggaactgcaccgtacctttgagcttggggtgcagacgcga

SEQ ID NO: 171026 - DNA, 80 bp, synthetic construct
  source 1..80: mol_type = other DNA
tgtctgggtgttattccaggtgagacctcacacaaggacacgcccgagtcattgctccgggctatcgtgacgggtctcca

SEQ ID NO: 171027 - DNA, 80 bp, synthetic construct
  source 1..80: mol_type = other DNA
cagtagagaagtacacagaagcaatcctcaatgaagttcttgttgtaccgaacatcagtgctagcaatggatatacatca

SEQ ID NO: 171028 - DNA, 80 bp, synthetic construct
  source 1..80: mol_type = other DNA
tggaagggatgtattatagtgaaagaagacatagaatcctagacatatacttagaaaaggaagagggaataattccagac

SEQ ID NO: 171029 - DNA, 80 bp, synthetic construct
  source 1..80: mol_type = other DNA
gttgcggtggcttcaatgacaagctcagggcagcaagtgtttggatttcggctacaacctggctcaagttcggtgctaat

SEQ ID NO: 171030 - DNA, 80 bp, synthetic construct
  source 1..80: mol_type = other DNA
tatattaaaattggacggacaaattatagtaaaccagttgcaccagtcatcataaagagagaggcaattactcagtacgg

SEQ ID NO: 171031 - DNA, 80 bp, synthetic construct
  source 1..80: mol_type = other DNA
cagtcaggaatgccagagaaagagtggaaggctaaactgagagcaagaggaatacctacagagtagacaggaaataacag

SEQ ID NO: 171032 - DNA, 80 bp, synthetic construct
  source 1..80: mol_type = other DNA
caccaccgagagcgcccactcccatgtcaccacctgaggtgccgcccgttccccggcagaggcctcgggaggcgcccact

SEQ ID NO: 171033 - DNA, 80 bp, synthetic construct
  source 1..80: mol_type = other DNA
aggctgctaattcagtagtggcatatggcaggtggccatcttacttgagtgacagagaagccaacccagtggatcaacca

SEQ ID NO: 171034 - DNA, 80 bp, synthetic construct
  source 1..80: mol_type = other DNA
ttaaaaaattagaacaagaattaccttcaagaaaaggtaataaatgttttacacacttaacaggcatatttagcagcaca

SEQ ID NO: 171035 - DNA, 80 bp, synthetic construct
  source 1..80: mol_type = other DNA
gcgtgtgctgtggaggacggcgacggtggtaagagtgtgctgcggtgcggttgggacggcgaataaaagcggcgtgcggc

SEQ ID NO: 171036 - DNA, 80 bp, synthetic construct
  source 1..80: mol_type = other DNA
aggcctaaatacgtggtggggtgtgcttaggatcactttcatattctgcaacaacagccatacccggaagaggagctgcc

SEQ ID NO: 171037 - DNA, 80 bp, synthetic construct
  source 1..80: mol_type = other DNA
tacctttaataatgacaactcagactcaaagttaaaagaatttttaaataaagcatttccaacaacaggcacaaaaggaa

SEQ ID NO: 171038 - DNA, 80 bp, synthetic construct
  source 1..80: mol_type = other DNA
actaagcactccgagcgccagcgaggagtgcgaccccttcccctggtgcaacgccctcggcggccgcgcgctacgccttc

SEQ ID NO: 171039 - DNA, 80 bp, synthetic construct
  source 1..80: mol_type = other DNA
caatgtaacgcaactaagtttcatagtggctgtctccttgttgttgttattccagaacatcaattggcatctcacaaagg

SEQ ID NO: 171040 - DNA, 80 bp, synthetic construct
  source 1..80: mol_type = other DNA
ctcctttggtatctggtactatcggctcaagcgggggttgtacacgcaaccacggtggaaacgagtgtaccatctggcgc

SEQ ID NO: 171041 - DNA, 80 bp, synthetic construct
  source 1..80: mol_type = other DNA
acaagtgagcaagcagaatgttggttcacacgagaacactgtctcagccagtaatggttcggttatcaaatacttcaaca

SEQ ID NO: 171042 - DNA, 80 bp, synthetic construct
  source 1..80: mol_type = other DNA
aaggaggatcaggcagggagcagaaatcgccctcctgtgagggacagcagtatcggcagggagattacatgaacacccca

SEQ ID NO: 171043 - DNA, 80 bp, synthetic construct
  source 1..80: mol_type = other DNA
gtcctaataacatgatgggtacttttgcagtgcgggtcgttagcagagtggcgagccaactcaagttgcaaaccagggtg

SEQ ID NO: 171044 - DNA, 80 bp, synthetic construct
  source 1..80: mol_type = other DNA
tctatggaaaagcatctgttggtgtttgactataccaattatgatggaagtttgcatccagtgtggtttcaagcactgga

SEQ ID NO: 171045 - DNA, 80 bp, synthetic construct
  source 1..80: mol_type = other DNA
gacatgatagacaaatatggtatagatctgccatacgtcacatacttgaaagatgaattgagaacaccagagaaaatcaa

SEQ ID NO: 171046 - DNA, 80 bp, synthetic construct
  source 1..80: mol_type = other DNA
ttggccatccagtgtctaacagagcaataatttatctttttgttggattcgtcccacttaacttcagagcacttgcaacg

SEQ ID NO: 171047 - DNA, 80 bp, synthetic construct
  source 1..80: mol_type = other DNA
ggtctctgcgtcgtacaggagcgtgcgggagcacagcctccaagctgcccccgtcaagcgcgagatgtcctccgagaggg

SEQ ID NO: 171048 - DNA, 80 bp, synthetic construct
  source 1..80: mol_type = other DNA
gggcagtcccatatcagaattccacagttgactttgcccagaacgccaccgctatggggcaagtggcatcaatcagaaca

SEQ ID NO: 171049 - DNA, 80 bp, synthetic construct
  source 1..80: mol_type = other DNA
atgatgttattgtttcatatccctttcctttggacccggaaaagattgcacagcaaggagtcatatatggtttaaccatc

SEQ ID NO: 171050 - DNA, 80 bp, synthetic construct
  source 1..80: mol_type = other DNA
tcaaaatgatgtacaaaatgtggtgcacaacgcagcaatgggggttggagtgggcaacctgacaatattcccccatcagt

SEQ ID NO: 171051 - DNA, 80 bp, synthetic construct
  source 1..80: mol_type = other DNA
tcacctgacccgccgccacggcctggtggagaactagaaggaggccgtggagacgctggaggagaaggcgctggggccta

SEQ ID NO: 171052 - DNA, 80 bp, synthetic construct
  source 1..80: mol_type = other DNA
tccccctcttgtacccgcccttcaagctccttgcccaagtaacgttagaagtttgaacattggtacaataggaagcatca

SEQ ID NO: 171053 - DNA, 80 bp, synthetic construct
  source 1..80: mol_type = other DNA
aagatgaccctaacagaagaggtacaatggactgaattggcagaggcagaattccaggaaaacaaaatcatcctagaaca

SEQ ID NO: 171054 - DNA, 80 bp, synthetic construct
  source 1..80: mol_type = other DNA
tgaaccactaaattcacagaagactaatgccacacaatttatacccgagaatgatagtgtaagcaagaagactttgtctg

SEQ ID NO: 171055 - DNA, 80 bp, synthetic construct
  source 1..80: mol_type = other DNA
tgccactatggatggcaacatttggcctagtagactggtgcaaaaaagaaacaggcaactggggaatacctgcatgggct

SEQ ID NO: 171056 - DNA, 80 bp, synthetic construct
  source 1..80: mol_type = other DNA
tattcagcacaaccatttacaccagacggaggaaactcaccaacatacatatatacaatacaaagaggagaaccaccaat

SEQ ID NO: 171057 - DNA, 80 bp, synthetic construct
  source 1..80: mol_type = other DNA
acatccagtacaacatcttattaggggaaggcccatgtgagcctggtgattgtggtggcaaattgctgtgtaagcatggt

SEQ ID NO: 171058 - DNA, 80 bp, synthetic construct
  source 1..80: mol_type = other DNA
gaacaaaaactatgcaactcagataaggcaatggtactggactcaacttacatcactgacagccacagtaccacacatag

SEQ ID NO: 171059 - DNA, 80 bp, synthetic construct
  source 1..80: mol_type = other DNA
cggggccgcagaggccggggccgcagaggccggggccgcagaggccggagacgacggcgtggagttggtctttgcaggac

SEQ ID NO: 171060 - DNA, 80 bp, synthetic construct
  source 1..80: mol_type = other DNA
tgctagacgccatcgcgctcgccgcagagtaaggaggcgaagggggaggtggaggagacgatacagacgctggcgcagac

SEQ ID NO: 171061 - DNA, 80 bp, synthetic construct
  source 1..80: mol_type = other DNA
cccgtccgcagcggtgaagccacggaggagaatcagcgcgtcccgagggcgggtgccgaaggtgagtttacacaccgcag

SEQ ID NO: 171062 - DNA, 80 bp, synthetic construct
  source 1..80: mol_type = other DNA
gaaagctgatttacaaggagatgaagcacgcaccacaaaggatacagtggccaacactacaccaagtggccctgcgaact

SEQ ID NO: 171063 - DNA, 80 bp, synthetic construct
  source 1..80: mol_type = other DNA
ccccggttaaaattgatatgctctaacagggcaaaaacaattttgatcgttatccgcaaggcaactacgcaaagcctagt

SEQ ID NO: 171064 - DNA, 80 bp, synthetic construct
  source 1..80: mol_type = other DNA
acacatacgatgcaaaaaagaacaaacataagttaaaagcattaagacaagcctactttaagcagctaacctctgaaggg

SEQ ID NO: 171065 - DNA, 80 bp, synthetic construct
  source 1..80: mol_type = other DNA
aaatttttgatacatccagtgtacaagatggaggatatctatgaatcaattagatggacaaaggacccaaaaaacacaca

SEQ ID NO: 171066 - DNA, 80 bp, synthetic construct
  source 1..80: mol_type = other DNA
ccttagatataaatccagaaccgttatcacttgaacaggctgtgtatggcattgagcacctggaaccattagatctaact

SEQ ID NO: 171067 - DNA, 80 bp, synthetic construct
  source 1..80: mol_type = other DNA
gcagttattcccacacacgcaaattgtggagagatggtgttgattgatggtgtccaaactaaagtgctcaaacaacaaat

SEQ ID NO: 171068 - DNA, 80 bp, synthetic construct
  source 1..80: mol_type = other DNA
ggtccattaaagtgagaatcagacccccaaaacttatgctaaacaagtggtactttacaaaagacatctgcagcatgggc

SEQ ID NO: 171069 - DNA, 80 bp, synthetic construct
  source 1..80: mol_type = other DNA
ccgctgagaataccaggggaagtcaacaacattatggagatagccgaggtcgactcagtggtgcctatcaacaacctccc

SEQ ID NO: 171070 - DNA, 80 bp, synthetic construct
  source 1..80: mol_type = other DNA
tcagtgctgaggttgccaacaaagtgacagaaattgcagccagtgtgcagaacgtaatcacagacaaacttctaaagaac

SEQ ID NO: 171071 - DNA, 80 bp, synthetic construct
  source 1..80: mol_type = other DNA
caaattaatcacataaaactttaaatcctatctaacaattcacatttggatagcttcattttgaggactttaaacctatt

SEQ ID NO: 171072 - DNA, 80 bp, synthetic construct
  source 1..80: mol_type = other DNA
caggggaagtacattccttattagagttatgtagggtggagactatcttggaggtgaacaacaccacagaggcgacagga

SEQ ID NO: 171073 - DNA, 80 bp, synthetic construct
  source 1..80: mol_type = other DNA
tggttttacctcgataacaccctacacaccaaccattttgagaattgtactactgataagacagcaccatcacaatggga

SEQ ID NO: 171074 - DNA, 80 bp, synthetic construct
  source 1..80: mol_type = other DNA
ctgcgcatgacacccgcagacaagggggaaagcttcgatgaagtcacttgggagaccgcaacattcctgaagaggttctt

SEQ ID NO: 171075 - DNA, 80 bp, synthetic construct
  source 1..80: mol_type = other DNA
atagcagacatatacaaatcctcagtgtattctcttccaccagatcctaagcattttgatggttatcaacaacaggctgt

SEQ ID NO: 171076 - DNA, 80 bp, synthetic construct
  source 1..80: mol_type = other DNA
catcaaaaacccgtgcgactcctcaggactggcacccaccgactccggtagattcaagcgggacgtacaagttgttagcc

SEQ ID NO: 171077 - DNA, 80 bp, synthetic construct
  source 1..80: mol_type = other DNA
tctctgcaacacttgcctattaaatacatttacaaactacaatgggagctcaagtgtctacacaaaagtctggatcacat

SEQ ID NO: 171078 - DNA, 80 bp, synthetic construct
  source 1..80: mol_type = other DNA
caaacgcttgtacgaaaaacctctcgactatgatgagtatcctaaaaaaccaaagagacctagaatctttcctccaacaa

SEQ ID NO: 171079 - DNA, 80 bp, synthetic construct
  source 1..80: mol_type = other DNA
cacgatgctttttgtggttgcgacgatcctcttgcccatcttactaatctgctaccaagcagacaaacttctcgtcagag

SEQ ID NO: 171080 - DNA, 80 bp, synthetic construct
  source 1..80: mol_type = other DNA
ctacccatatgttaaaaaccaatacaatgtctactttgaccttaaatttgaataaacagcagcttcaaacttgcaaggcc

SEQ ID NO: 171081 - DNA, 80 bp, synthetic construct
  source 1..80: mol_type = other DNA
agtcactaacaatactggcttgatgcagatcatgttcacaccacctggtatcaaggcaccagaagacaaaaatggaaagg

SEQ ID NO: 171082 - DNA, 80 bp, synthetic construct
  source 1..80: mol_type = other DNA
ctggatccagtttggtttgatgcactcaaaatagtactagatgatctaggatttgatggagaattgacaaggaaattgaa

SEQ ID NO: 171083 - DNA, 80 bp, synthetic construct
  source 1..80: mol_type = other DNA
cacatcaaggtggcagtctcacattactcagcacaattgacaacgttggacatatgtccaaatcctatttctttagaaga

SEQ ID NO: 171084 - DNA, 80 bp, synthetic construct
  source 1..80: mol_type = other DNA
aataccggccttaacagccgtggagacgggtcatacatcccaggttattccgagtgacaccatgcaaacaccccacgtga

SEQ ID NO: 171085 - DNA, 80 bp, synthetic construct
  source 1..80: mol_type = other DNA
tggctgagttttccacgcccgtccgcagcgagatcgcgacgtaggagcgatcgagcgtcccgagggcgggtgccggaggt

SEQ ID NO: 171086 - DNA, 80 bp, synthetic construct
  source 1..80: mol_type = other DNA
aaaaaagttaaagtacacataaaacctcctgtcttatttgaagacaaatggtacacccagcaggacctgtgcgacgttaa

SEQ ID NO: 171087 - DNA, 80 bp, synthetic construct
  source 1..80: mol_type = other DNA
ccggatggtgtttggtaatttatacagttccttccacaagaatcccggaatactcacaggatctgccgtgggttgtgatc

SEQ ID NO: 171088 - DNA, 80 bp, synthetic construct
  source 1..80: mol_type = other DNA
tgccatactacaggagcacaccaacaagacaaaaataaccaactctctggaagtcttgttccagggtcctacctataaag

SEQ ID NO: 171089 - DNA, 80 bp, synthetic construct
  source 1..80: mol_type = other DNA
aatgctttttcaagagactgtaatggcagacatagttcagaccggaccctttagctacaaagacgaacttaaaaacagca

SEQ ID NO: 171090 - DNA, 80 bp, synthetic construct
  source 1..80: mol_type = other DNA
caatccatgtatgatcaaaacattagcatattaccagaccaaaaatcagaaagagaaaaactacttactcagataacaga

SEQ ID NO: 171091 - DNA, 80 bp, synthetic construct
  source 1..80: mol_type = other DNA
ggtgcaggatatcgggggtcctgcccatgatactgtgcggtgcgggtaggtctagctttaactacggactgcacagcgat

SEQ ID NO: 171092 - DNA, 80 bp, synthetic construct
  source 1..80: mol_type = other DNA
aaacaaaccaatcaggaccttctacgtgcacttcctagagcgtgtctacgaggtctatataagcaacagcggtgacgaat

SEQ ID NO: 171093 - DNA, 80 bp, synthetic construct
  source 1..80: mol_type = other DNA
ttagtctgaggtgtcccaatttcttcttccccgtaccagcgcctaaaccaactggcacgagggctatatctttccatgat

SEQ ID NO: 171094 - DNA, 80 bp, synthetic construct
  source 1..80: mol_type = other DNA
tataggttaattgattcagacagcattaatctagagcttacagtgttaacactagatagaaatgagaagtttagggatat

SEQ ID NO: 171095 - DNA, 80 bp, synthetic construct
  source 1..80: mol_type = other DNA
gaagcagagacactgactttatagtcacttataacattaagcctccaatgaaaatgaacgagactacctctcccaacgcc

SEQ ID NO: 171096 - DNA, 80 bp, synthetic construct
  source 1..80: mol_type = other DNA
atataaacccagaacccataaccatcaatcaagcaatttatggtatggataatctagaacctttagacttaacaactagt

SEQ ID NO: 171097 - DNA, 80 bp, synthetic construct
  source 1..80: mol_type = other DNA
atgacagttgggttataaacaccaggcaagtagcacaattaagaagaaagctagagttctttacctatgttagattcgac

SEQ ID NO: 171098 - DNA, 80 bp, synthetic construct
  source 1..80: mol_type = other DNA
accacttaccttggggagatcagtagttactttacacactggactggtagtctacggtttagttttatgttttgtggttc

SEQ ID NO: 171099 - DNA, 80 bp, synthetic construct
  source 1..80: mol_type = other DNA
cattttccagggcttgggtgatgaacaaacaccaggtttcataattgatctgcttagtgcttcaaaggaccccagagtga

SEQ ID NO: 171100 - DNA, 80 bp, synthetic construct
  source 1..80: mol_type = other DNA
agctcttgaaaacattggtaaaaattatttccacgttagtgatcatcagtagaaattatgaggatataactacagttcta

SEQ ID NO: 171101 - DNA, 80 bp, synthetic construct
  source 1..80: mol_type = other DNA
tacacaccaatctaaatgcaatcttccaaggattaggatcagatgacactccaggctttatagtggatctattgtcagca

SEQ ID NO: 171102 - DNA, 80 bp, synthetic construct
  source 1..80: mol_type = other DNA
gcggcaccacaaaatggccgtcaattgcttccggggtcagaggttaccgctacgtcataagtcacgtgacagggaggagc

SEQ ID NO: 171103 - DNA, 80 bp, synthetic construct
  source 1..80: mol_type = other DNA
tgcttacggcgagaacaagacatacaaataacgtggaggaggatggggtcagttacaggaatagtatgtgttgcggtaca

SEQ ID NO: 171104 - DNA, 80 bp, synthetic construct
  source 1..80: mol_type = other DNA
tccccatgaagtacaagttcagattcacatggggcggcaatatggtctcccaacagacaatcagaaacccctgcaagact

SEQ ID NO: 171105 - DNA, 80 bp, synthetic construct
  source 1..80: mol_type = other DNA
gaacgtagcgagcgtagctggcggctgtcatggtgacggctcgggaaaacatatccttcaggttgggtacaaagtagttg

SEQ ID NO: 171106 - DNA, 80 bp, synthetic construct
  source 1..80: mol_type = other DNA
ttgacaagtcaacgcaagaacacaatggacatgtatagagtcgagttgagcgacacggctcactctgacacgccgatctt

SEQ ID NO: 171107 - DNA, 80 bp, synthetic construct
  source 1..80: mol_type = other DNA
ttctacacttttgataatggatgtaacctcttcatcagtgttgtcaccttcctgcaaggcactcatgcagtgtcttatgg

SEQ ID NO: 171108 - DNA, 80 bp, synthetic construct
  source 1..80: mol_type = other DNA
ccgtcataacaaccattctaacacatcacacagcagacgcactacatggactttagtattaatctgtatagcctgcattc

SEQ ID NO: 171109 - DNA, 80 bp, synthetic construct
  source 1..80: mol_type = other DNA
tctaaacagattgacctataacagttctagcccaaactctgtacactgtattatccaaggtagattgggggaagatgcta

SEQ ID NO: 171110 - DNA, 80 bp, synthetic construct
  source 1..80: mol_type = other DNA
ctggccgtcgtcccccctcctgggagttgctcttcgtgtgtccccagggacccgcgctgccgtcgtcccctggggacgtc

SEQ ID NO: 171111 - DNA, 80 bp, synthetic construct
  source 1..80: mol_type = other DNA
ttatgcagatagtagtaatgttgacatttttatagaatcaagaagaagtttactaacagctggaccaagcgacatgtatg

SEQ ID NO: 171112 - DNA, 80 bp, synthetic construct
  source 1..80: mol_type = other DNA
gtggctactcctcatctatgtttttaagcccccacagataccagctacaatttaaaacagcttactttgactgcacttac

SEQ ID NO: 171113 - DNA, 80 bp, synthetic construct
  source 1..80: mol_type = other DNA
actatgctccggccccagtgggcacccaccaccatgcagccaccaccgagggcgcccactcccatgccgccacctcaggg

SEQ ID NO: 171114 - DNA, 80 bp, synthetic construct
  source 1..80: mol_type = other DNA
gggcggaagggcaccgtgggaaaatagttccaggtgacagcagcagtgtgtgaagattgtcacagctgctggtttggaga

SEQ ID NO: 171115 - DNA, 80 bp, synthetic construct
  source 1..80: mol_type = other DNA
ctcatgttgtctgggatgttggtttacaatccacaatatctatgattgttccctgggttagcgcaagtcattttagatac

SEQ ID NO: 171116 - DNA, 80 bp, synthetic construct
  source 1..80: mol_type = other DNA
caaaacagctagattcacaaaaattaaaaaagaataccaaacagtataccctacactcacaacacaaacaccacaaaatg

SEQ ID NO: 171117 - DNA, 80 bp, synthetic construct
  source 1..80: mol_type = other DNA
gtcacttcttgtgataccagttgtaccaattactgccaacactggatcaccacccagtatacctgttactgtgacaatag

SEQ ID NO: 171118 - DNA, 80 bp, synthetic construct
  source 1..80: mol_type = other DNA
gtggtcccgcgtcgcttcctagggacctgtaagcaaaactctgcaaagatgctggctcatctgaagcaggttaccaggat

SEQ ID NO: 171119 - DNA, 80 bp, synthetic construct
  source 1..80: mol_type = other DNA
aatcacaccttgttgactccaccaactgtatcatcactaccagccatgacaaggaggttttactttgatttagacatcca

SEQ ID NO: 171120 - DNA, 80 bp, synthetic construct
  source 1..80: mol_type = other DNA
agagctaggcataagcgcagagatacacaactttggcatagtttgcgttcagtgcccatacacctttccacccatgttcg

SEQ ID NO: 171121 - DNA, 80 bp, synthetic construct
  source 1..80: mol_type = other DNA
ttagaaagatggatgtttaccgagtacaagtgtcatcacaaacaagtcagggttcacaagtgttcggcttttccttgcaa

SEQ ID NO: 171122 - DNA, 80 bp, synthetic construct
  source 1..80: mol_type = other DNA
tgtttttcctttatatttgcttatggtgacaatatatttaatacatatattgacaccatgggcgctcaggtatctagaca

SEQ ID NO: 171123 - DNA, 80 bp, synthetic construct
  source 1..80: mol_type = other DNA
gctataaatgaagtgataccaaccgcagacaattcatccggcggagatatcttgacaaaagttgctgatgatgcctcaaa

SEQ ID NO: 171124 - DNA, 80 bp, synthetic construct
  source 1..80: mol_type = other DNA
cttgcgctcggtggttacgagttcttcgtcggagtccgatccgctggtccagacgtcgtcgtcgccctgggcggcaccct

SEQ ID NO: 171125 - DNA, 80 bp, synthetic construct
  source 1..80: mol_type = other DNA
gggctgggtctatcaaatttacattcctgttctgcgggagcatgatggccaccggcaagatacttattagttactctcca

SEQ ID NO: 171126 - DNA, 80 bp, synthetic construct
  source 1..80: mol_type = other DNA
ctcacaaaaaccaacagcacatatgaacccccaaaaagcaaatacttaatagaaaacttgcaactatgggcagcagtatc

SEQ ID NO: 171127 - DNA, 80 bp, synthetic construct
  source 1..80: mol_type = other DNA
cgcatcctaacttcctacttcaggcaaaaagaagggtactggtttacagctttaaaaccagacccgggggtcgcaaaaaa

SEQ ID NO: 171128 - DNA, 80 bp, synthetic construct
  source 1..80: mol_type = other DNA
ttccgtggattagtcagacacactaccgcctagtgcaacaggatgagtacactagtgccggcaatgttacttgctggtat

SEQ ID NO: 171129 - DNA, 80 bp, synthetic construct
  source 1..80: mol_type = other DNA
cgtgccacgttcttgcgtccttcatctcttcgtgacggataagcgctttctgaatcgcgagctgggcgaccgtctctacc

SEQ ID NO: 171130 - DNA, 80 bp, synthetic construct
  source 1..80: mol_type = other DNA
gtggtagtgcaacaaaatgacagaccccagagagaccgtaccaccaggaaacagtggcgaagagactatcgaagaggcct

SEQ ID NO: 171131 - DNA, 80 bp, synthetic construct
  source 1..80: mol_type = other DNA
tacgatcaaaagctgttatacaaggattgcctacagttctgacaccaggctcagagcagtttttgactacagatgataga

SEQ ID NO: 171132 - DNA, 80 bp, synthetic construct
  source 1..80: mol_type = other DNA
gacgtataagttcaaaggtcatcctcgccggaacctacacaaaatggaggtcaacttcttccgggtgaaaggtcacgcct

SEQ ID NO: 171133 - DNA, 80 bp, synthetic construct
  source 1..80: mol_type = other DNA
acaaaaccaaactacaccctagtgttttctacaatgttttccctggtagcaaagaacctgctgctctcaatgataatgat

SEQ ID NO: 171134 - DNA, 80 bp, synthetic construct
  source 1..80: mol_type = other DNA
aagtttacagaatgtgaaaaatgtgatttttgggatgatgtgtacaaaaaacatatggctaatgtgtatcatgaacctcc

SEQ ID NO: 171135 - DNA, 80 bp, synthetic construct
  source 1..80: mol_type = other DNA
aaaaggaaattcaaaccagacactaaataccccttcctcattcatccaatctattcaatggatgatgtctgtgaatcaat

SEQ ID NO: 171136 - DNA, 80 bp, synthetic construct
  source 1..80: mol_type = other DNA
cctccgaacaaaatcaaaactttaatctgcaaatacatcctagaaacaacacaaacgggacacacgtgaatccctgggta

SEQ ID NO: 171137 - DNA, 80 bp, synthetic construct
  source 1..80: mol_type = other DNA
catcgacgtgaacccgcacaaccccagcgagatcgtgcgcgccgcgctgtgcgattacagcctcagcgagccctatccgg

SEQ ID NO: 171138 - DNA, 80 bp, synthetic construct
  source 1..80: mol_type = other DNA
aaattgcacaggttgataccctggttccaataaataatgcaaagaatgtcagcggtctggatatgtacagggttccactc

SEQ ID NO: 171139 - DNA, 80 bp, synthetic construct
  source 1..80: mol_type = other DNA
tcagacaaaaatacagcctacaataccagtgactttcccactaaaccaccaaaggcagagttcactacatggaaaaacaa

SEQ ID NO: 171140 - DNA, 80 bp, synthetic construct
  source 1..80: mol_type = other DNA
tctgttgatgcgagccgttccgaccgccccacttccgaggtactcgaaactttaaaatgttgaactcaaaacaaaacact

SEQ ID NO: 171141 - DNA, 80 bp, synthetic construct
  source 1..80: mol_type = other DNA
ggggggaccatgtatataagaacagtattgtagaagcaatgagacagaatgcagaaaacatgtataagaatcacaaacag

SEQ ID NO: 171142 - DNA, 80 bp, synthetic construct
  source 1..80: mol_type = other DNA
cccggcgccacccttgagtttggtctccatcagcgccagcgtggtggtgctgaggatcggtagcgcttcctgcgtcagac

SEQ ID NO: 171143 - DNA, 80 bp, synthetic construct
  source 1..80: mol_type = other DNA
atcatcccgctaaaatgatgatggcaaaaaacaagatattaattcccagctatgacactagaccaaagggcagacaaaaa

SEQ ID NO: 171144 - DNA, 80 bp, synthetic construct
  source 1..80: mol_type = other DNA
ttttacaccacaggaaatgccccaccaagagtctcggtgccattcatgggaattagtggtgcctattcacatttttacga

SEQ ID NO: 171145 - DNA, 80 bp, synthetic construct
  source 1..80: mol_type = other DNA
atcattaactaccacttagcaaccccagaagactacaggcattgtgtaaagagtatgtgggaacgagacctaatggttgt

SEQ ID NO: 171146 - DNA, 80 bp, synthetic construct
  source 1..80: mol_type = other DNA
atgaatgtagacattttcactgtttcccataccaaggtagacaacctatttggaagagcttggttttaccaggaacacac

SEQ ID NO: 171147 - DNA, 80 bp, synthetic construct
  source 1..80: mol_type = other DNA
ttaatactactaatttgacacaacacccttctgctccaacaatgccatttacccctgatttttcaaatgtagatgttttc

SEQ ID NO: 171148 - DNA, 80 bp, synthetic construct
  source 1..80: mol_type = other DNA
atagtgtagaaaccagaacaacactgatgcattatgttggttcagaaacaacattggaaaacttcttgggtagagcagca

SEQ ID NO: 171149 - DNA, 80 bp, synthetic construct
  source 1..80: mol_type = other DNA
ccataaataaatcttacttaagtgaaggtgataccgccaaagagttctcagaagctcccgtttccacatcgcacggggtg

SEQ ID NO: 171150 - DNA, 80 bp, synthetic construct
  source 1..80: mol_type = other DNA
acacatcctggcgagactggtagacgaattggtggtgtgaatgaaccaacttcgaaacatccaagtgatgataactggct

SEQ ID NO: 171151 - DNA, 80 bp, synthetic construct
  source 1..80: mol_type = other DNA
gaaccacaagctatatcaaacacaggtaaaacatatggacttaccataaccccagcagataagggagagagctttgtgcc

SEQ ID NO: 171152 - DNA, 80 bp, synthetic construct
  source 1..80: mol_type = other DNA
gggcgggagcggggggcggcgcgggagcctgcacgccgttagagggtcgaatgacagggggacggagacagagaggcggg

SEQ ID NO: 171153 - DNA, 80 bp, synthetic construct
  source 1..80: mol_type = other DNA
gcgcatgctacgtgacaccccatttatcggacagacagcgttattacaaggtgatacagatgtggccatcaacaatgcgg

SEQ ID NO: 171154 - DNA, 80 bp, synthetic construct
  source 1..80: mol_type = other DNA
cataactacttatgggtttggtcaccagagcaaagctgtctacgtcgctgggtataaaatttgcaattatcaccttgcca

SEQ ID NO: 171155 - DNA, 80 bp, synthetic construct
  source 1..80: mol_type = other DNA
ctccgggattcccggagtccctcttgggagtccatggtgaggggacttgatacctcaccgccgtttgcctaggctatagg

SEQ ID NO: 171156 - DNA, 80 bp, synthetic construct
  source 1..80: mol_type = other DNA
gtataagagacagtaactactcgcacttccgaatggctgagttttccacgcccgtccgcagcgctgcagccacggaggga

SEQ ID NO: 171157 - DNA, 80 bp, synthetic construct
  source 1..80: mol_type = other DNA
gaaggcaatcaaatgagaaacacccataaagagcaagggttgttcaatgattggaaaataaatttatccagtttggtgca

SEQ ID NO: 171158 - DNA, 80 bp, synthetic construct
  source 1..80: mol_type = other DNA
tgggtttacttctttgacaccacatactttaagtctcattagaagtgtgttgttgatacggcattattatcacaatgggt

SEQ ID NO: 171159 - DNA, 80 bp, synthetic construct
  source 1..80: mol_type = other DNA
cccccttttatctatccagccgtaaacagggcctacatgttcccagacagagccccaaaaccgtctcccaccccgggaga

SEQ ID NO: 171160 - DNA, 80 bp, synthetic construct
  source 1..80: mol_type = other DNA
ggatgaataaatctcaacagaaattttcaccaactcactttccaactgagccaattcggcctccaaaggttttaaatctt

SEQ ID NO: 171161 - DNA, 80 bp, synthetic construct
  source 1..80: mol_type = other DNA
ctgcaggaggtggtggcttcgtctgctttgcagatatcagaggtctggacatgttccgagcagaatatcaaggaatatct

SEQ ID NO: 171162 - DNA, 80 bp, synthetic construct
  source 1..80: mol_type = other DNA
gggcgcccaggccgtcccggtggcctctgagttcggagacatgacggcggtggctatcaaaaggcgcgtatgagaaaccg

SEQ ID NO: 171163 - DNA, 80 bp, synthetic construct
  source 1..80: mol_type = other DNA
ggcctacgtgtgctagcagtgagtcctccggcctctgaatgcggctaatcctaaccccatagccatcacacacaatccag

SEQ ID NO: 171164 - DNA, 80 bp, synthetic construct
  source 1..80: mol_type = other DNA
tagatggtaaagtggtgaaggtgcttaaacaacaaattctgacaaacatggatgatgttgacacagaaataactctcatt

SEQ ID NO: 171165 - DNA, 80 bp, synthetic construct
  source 1..80: mol_type = other DNA
ttccttgaacgtattcgaacctgcccagtgggtagacgcatacaacttccaccatattccagcttatacagacaatggac

SEQ ID NO: 171166 - DNA, 80 bp, synthetic construct
  source 1..80: mol_type = other DNA
ggatatagcgaccgggtgcggagcatcactttaggaaactccactataacaacccaggagtgtgccaacgtggtggtggc

SEQ ID NO: 171167 - DNA, 80 bp, synthetic construct
  source 1..80: mol_type = other DNA
gagccagccatggcgtggtggtggtggagacgatggcgccggtggcccagacgccgctggaggacccgtcgccgacgccg

SEQ ID NO: 171168 - DNA, 80 bp, synthetic construct
  source 1..80: mol_type = other DNA
tggtctctcatgcctggtacccaatagaggagacatgttactacccaaaacacatacagtacaacatactcctgggtgaa

SEQ ID NO: 171169 - DNA, 80 bp, synthetic construct
  source 1..80: mol_type = other DNA
ctcactaatatcttggctgtcaacaaaaggcagcaacaactttcaaactggaaacagcacccagtttggccacaacagct

SEQ ID NO: 171170 - DNA, 80 bp, synthetic construct
  source 1..80: mol_type = other DNA
gaagccctattttctaagtataagggaaataatgaatgcactataaataatcatgttaaggtggctatctctcattactc

SEQ ID NO: 171171 - DNA, 80 bp, synthetic construct
  source 1..80: mol_type = other DNA
gggtgacggcggccgcgcgcggaaaagaggaagcgcgcggcgcgactcgtccctgaggaccgcgggaggaatcacggcaa

SEQ ID NO: 171172 - DNA, 80 bp, synthetic construct
  source 1..80: mol_type = other DNA
gataattagctctaaatctgtagataaatgtggtctacctagcattcatacaccaagtaaaaccaaattacagcctagtg

SEQ ID NO: 171173 - DNA, 80 bp, synthetic construct
  source 1..80: mol_type = other DNA
aaaccaagcccaaaggtaaaagatccattaaattttttgtaaagcctccaaaactaatgataaacaagtggtactttgct

SEQ ID NO: 171174 - DNA, 80 bp, synthetic construct
  source 1..80: mol_type = other DNA
tcaaattgccagatgttcgtgcgtatctggtgtttactactgtcaatctcgccagaagcactacccgatcactgtgacca

SEQ ID NO: 171175 - DNA, 80 bp, synthetic construct
  source 1..80: mol_type = other DNA
tgcacaagttgatacactaatacctttaaataatacaaccaacacaactggcttaggaatgtatagaatcccgcttgtgc

SEQ ID NO: 171176 - DNA, 80 bp, synthetic construct
  source 1..80: mol_type = other DNA
atttaactgacccactttgtatagaggatgacacagaaaactgcaagcaagatatttcaccaaatgaacttggcttaacg

SEQ ID NO: 171177 - DNA, 80 bp, synthetic construct
  source 1..80: mol_type = other DNA
cacaggccaaaacacgcaagtaagtagccaccggttggacactggtaaagtcccagcactccaagccgctgaaattggag

SEQ ID NO: 171178 - DNA, 80 bp, synthetic construct
  source 1..80: mol_type = other DNA
agctgtgtagcaggccgcgctccagcagctgcggcagcgagtcggcggcgcgcaccacaaagttctcacggctgatctcg

SEQ ID NO: 171179 - DNA, 80 bp, synthetic construct
  source 1..80: mol_type = other DNA
taacataataataagaacaatagtgcttgagacttatagatcaatagatttagacaaactaaaaatagttgcttatggtg

SEQ ID NO: 171180 - DNA, 80 bp, synthetic construct
  source 1..80: mol_type = other DNA
caaaaatgataaactcagcagacgagtcagagggctttgtcccaatagggtacaactttgcaaaaggatatatgccagac

SEQ ID NO: 171181 - DNA, 80 bp, synthetic construct
  source 1..80: mol_type = other DNA
ggaaaccaatggatttggccatccttaaatgtaaactaccattcaggttcaaaaagaagcatgctctctataccaacaaa

SEQ ID NO: 171182 - DNA, 80 bp, synthetic construct
  source 1..80: mol_type = other DNA
aaacacgctactttcggttataaaaacaccgtcgccctatttctgggcgtgtgtacactgatgactcacctacgcttttt

SEQ ID NO: 171183 - DNA, 80 bp, synthetic construct
  source 1..80: mol_type = other DNA
tttgtggaacacactctactagaggtccttgtagttcctgacaccaaaccctctggcccacaacacactactaaacccac

SEQ ID NO: 171184 - DNA, 80 bp, synthetic construct
  source 1..80: mol_type = other DNA
gcatcatacccatttgaattagactcagagaaaattgcacaacaaggaactaagtatggtttaactattacaccaccaga

SEQ ID NO: 171185 - DNA, 80 bp, synthetic construct
  source 1..80: mol_type = other DNA
agccaaatgataggggaaataacaacccagatgagaaccctttttatctgtgtaatggcactctctttggaaatatcact

SEQ ID NO: 171186 - DNA, 80 bp, synthetic construct
  source 1..80: mol_type = other DNA
acgatatgggtacattatgtgtccgtattgtaactgaacaacagatgcataaggtcaaaataactagcagaatatttcac

SEQ ID NO: 171187 - DNA, 80 bp, synthetic construct
  source 1..80: mol_type = other DNA
atactactttgaatgggaaacatacaaaaaagcctcaataccaccagaccacctcacaccctcagtaaactggtacgagt

SEQ ID NO: 171188 - DNA, 80 bp, synthetic construct
  source 1..80: mol_type = other DNA
gggaggtccaggtatgggagtgggccaatatttgcaaggcctgacctataacctcatctttgttccaggccagcgcaatt

SEQ ID NO: 171189 - DNA, 80 bp, synthetic construct
  source 1..80: mol_type = other DNA
ggaagttagaaattactgtgagaagaagggatggattgtgaatgtcaacagtgaggttcagctggaacgcaatctgaaca

SEQ ID NO: 171190 - DNA, 80 bp, synthetic construct
  source 1..80: mol_type = other DNA
ggtgttcatctgagtaacaagaccctggtctgttaggacccttcccgctttgggaatccaaagcgggaaaatccctagca

SEQ ID NO: 171191 - DNA, 80 bp, synthetic construct
  source 1..80: mol_type = other DNA
gaaactgactcttaagatctggcagccccagaatatcagaaagtgtaagatcaggggtctcctgcccctgctcatctgcg

SEQ ID NO: 171192 - DNA, 80 bp, synthetic construct
  source 1..80: mol_type = other DNA
gcgcagtgtaggatgggtagatggggtcaaactctgacttggaaaagaggtacttgaagcggcacttaatctcataaatg

SEQ ID NO: 171193 - DNA, 80 bp, synthetic construct
  source 1..80: mol_type = other DNA
atacatccccataaaatggagaggtaaatggtatccaaacatactacaccaacaacaagtattagaagacatttctagat

SEQ ID NO: 171194 - DNA, 80 bp, synthetic construct
  source 1..80: mol_type = other DNA
aactagacatgtgatacaaaccagatcacgaagcgaaagtaccatagagtctttcttcgcacgtggggcttgcgtcacga

SEQ ID NO: 171195 - DNA, 80 bp, synthetic construct
  source 1..80: mol_type = other DNA
tgacaataaaaaactagacccctacggaggaggggtcagcactatgatgtttactctacaaggactatttgaggagtacc

SEQ ID NO: 171196 - DNA, 80 bp, synthetic construct
  source 1..80: mol_type = other DNA
cgaaggcaactagcaataagataggtgggttgagacgcttaaagtgtgtagtacatttacttttccaacctgtgctttgc

SEQ ID NO: 171197 - DNA, 80 bp, synthetic construct
  source 1..80: mol_type = other DNA
ccagatcgctagatgctcatgtgtgaccggtgtctattattgcctctcacgcaataaacattatccgatcaccatcacca

SEQ ID NO: 171198 - DNA, 80 bp, synthetic construct
  source 1..80: mol_type = other DNA
aactacaaccaaactactaggaacacaattcacaggagggtccccctacctagaataccacgggggcctgtactcctcaa

SEQ ID NO: 171199 - DNA, 80 bp, synthetic construct
  source 1..80: mol_type = other DNA
ttgccaatgcatactcccatttttatgatggcttcgcaaaggtgccgattgagggtgagacctcggatccgggtgatgca

SEQ ID NO: 171200 - DNA, 80 bp, synthetic construct
  source 1..80: mol_type = other DNA
cattaattactatagggactcagccagtaatgcagcttccaaacaagatttctcccaggacccatccaaattcacggagc

SEQ ID NO: 171201 - DNA, 80 bp, synthetic construct
  source 1..80: mol_type = other DNA
tcatgattccaccaaggcctacccctccttcccctctgccacctgcaacactaacggtgccaccaaggcctacccgtcct

SEQ ID NO: 171202 - DNA, 80 bp, synthetic construct
  source 1..80: mol_type = other DNA
gaagcgaacccgcagatccagaagcacctccgaaagcagctcctcagacagcagcagctcggggagcagctcagactgct

SEQ ID NO: 171203 - DNA, 80 bp, synthetic construct
  source 1..80: mol_type = other DNA
acacatcccaagatcaatactttaacactctagatgggtactggggagaccccatatatgtacacacacaaaatataaaa

SEQ ID NO: 171204 - DNA, 80 bp, synthetic construct
  source 1..80: mol_type = other DNA
gggtcgggaattttgctaaacagactccgagttgctcttggacacaggggctgtgaatcagtaacgaaagtgagtggtgc

SEQ ID NO: 171205 - DNA, 80 bp, synthetic construct
  source 1..80: mol_type = other DNA
tcccacagtccaggcccccaaggctaccgtgctaattacctcctcatgtccacccccaccctgtgttactgtcgcctgat

SEQ ID NO: 171206 - DNA, 80 bp, synthetic construct
  source 1..80: mol_type = other DNA
tggacctacacccgatacgctttacccccaagctaattaaaattattagaagttaggactacggtgtcacaatgggagct

SEQ ID NO: 171207 - DNA, 80 bp, synthetic construct
  source 1..80: mol_type = other DNA
acatgtactatgactgcataggaattaattccactttaacaaccaagtatgaaaacttatttaataaactatattccaaa

SEQ ID NO: 171208 - DNA, 80 bp, synthetic construct
  source 1..80: mol_type = other DNA
caattacttccatgaccacctatgggtttgggcaccaaagtaaagctgtgtatgttgcaggttacaaaatttgcaattac

SEQ ID NO: 171209 - DNA, 80 bp, synthetic construct
  source 1..80: mol_type = other DNA
tgacctgttgcagtcagtagacagccaggaagtcagagactattgtgagaggaaaggttggatagtgaaagtcaacagtg

SEQ ID NO: 171210 - DNA, 80 bp, synthetic construct
  source 1..80: mol_type = other DNA
ttatagagacccgctatgtcataaacaaccacactaacaatgaggcactaatagaaaactttcttggtaggtcgtcctta

SEQ ID NO: 171211 - DNA, 80 bp, synthetic construct
  source 1..80: mol_type = other DNA
gacgcaaacgggggcgacgcacttttaagagacgcagacgcaggcgaccgtactttaaacccaaaaaaaaactagttctg

SEQ ID NO: 171212 - DNA, 80 bp, synthetic construct
  source 1..80: mol_type = other DNA
ccatagcggacggccacatccaggcattgcctgaaataggccctgaggtcattatatatgtttaacagggagcagagggg

SEQ ID NO: 171213 - DNA, 80 bp, synthetic construct
  source 1..80: mol_type = other DNA
tcttacaggaccaccaaagagatcaaaattggaggtccccgcgcttgcaagcgccgactcctatttcagggaaacaaagt

SEQ ID NO: 171214 - DNA, 80 bp, synthetic construct
  source 1..80: mol_type = other DNA
taaacactgcaaaataacaggatggatgcccctaataatctgtggctcaggcagcactcagatgaactttataactcaca

SEQ ID NO: 171215 - DNA, 80 bp, synthetic construct
  source 1..80: mol_type = other DNA
tggtatgaccgaaagggcagaagaagaaggactccaaagaaaactaagactcatccgtcttctgcatcagacaagtgagt

SEQ ID NO: 171216 - DNA, 80 bp, synthetic construct
  source 1..80: mol_type = other DNA
ccaacacgcttgacatcctacctgaaaagacactaaccacctatggtttcggacatcagaacaagggagtgttcgtggcg

SEQ ID NO: 171217 - DNA, 80 bp, synthetic construct
  source 1..80: mol_type = other DNA
cactgcaattatcccagcccagacccagcacatcccagcagagtttacccaacaccactagttcagaaccagtgcactca

SEQ ID NO: 171218 - DNA, 80 bp, synthetic construct
  source 1..80: mol_type = other DNA
gctcattaaactcctccagcgggcactcttcctccacttcagagggggttgccaacactcaaggattggacaaccgggtg

SEQ ID NO: 171219 - DNA, 80 bp, synthetic construct
  source 1..80: mol_type = other DNA
tgatttgtcacgtggtgtgcacgtcatcgccgccatttttgtagtccggaaggcctagaaccgagcccgaagcctatggc

SEQ ID NO: 171220 - DNA, 80 bp, synthetic construct
  source 1..80: mol_type = other DNA
gaacacaaacaaatagtgacaatgcagtactcacccaccaaatcatgtacgtgccaccagggggtccaatacccacgtct

SEQ ID NO: 171221 - DNA, 80 bp, synthetic construct
  source 1..80: mol_type = other DNA
gaccagatcatcaccacgtccatccgcggccttacgtgcgacccgcgtatgttcttgcgccttacgcatcccgagctctg

SEQ ID NO: 171222 - DNA, 80 bp, synthetic construct
  source 1..80: mol_type = other DNA
tgctggtcgcgcactgtatattcctccatttgaagtgctcagacatgagtggtatgataaattttaaatagatatagaga

SEQ ID NO: 171223 - DNA, 80 bp, synthetic construct
  source 1..80: mol_type = other DNA
acacaatttgtgatattggttcagataatagttttgaaataacaataccatatacattctcaacatggatgaggaaaacc

SEQ ID NO: 171224 - DNA, 80 bp, synthetic construct
  source 1..80: mol_type = other DNA
tgttcgccgccgcggcagaagacgatatgtgagtagatggccgcgccgccgatacaggcgcagacgcagacgaaccagac

SEQ ID NO: 171225 - DNA, 80 bp, synthetic construct
  source 1..80: mol_type = other DNA
actcaactcagaattcagtgtctggcggatctagccttaattactttaacatcaattactttaaagatgcagcatctagc

SEQ ID NO: 171226 - DNA, 80 bp, synthetic construct
  source 1..80: mol_type = other DNA
ctcaatgtcacaatggccgacttgcggtttccgttctgctcaccacaaactgacaacacttgcgtcagtttccaggtgct

SEQ ID NO: 171227 - DNA, 80 bp, synthetic construct
  source 1..80: mol_type = other DNA
cgaggtgtaagcatcaggttaatctaagacagtcacctattttcctgaccctcctgaggcacatccgccgacgtctgggc

SEQ ID NO: 171228 - DNA, 80 bp, synthetic construct
  source 1..80: mol_type = other DNA
ccgcggcttcccaagaacatgacccacagttttgtgatgtacaagcacacctttaaggagcccgcttgcaccgtcagcac

SEQ ID NO: 171229 - DNA, 80 bp, synthetic construct
  source 1..80: mol_type = other DNA
tgatatgtggcaaggccattagtcttgtagatcgttctaccaatgttaggtacagtttagatcaattagtcacagcaatc

SEQ ID NO: 171230 - DNA, 80 bp, synthetic construct
  source 1..80: mol_type = other DNA
acaacccacagttcaggccagcatacatagacatcacctacaatccctttaatgacaaaggcactggaaacatggtatgg

SEQ ID NO: 171231 - DNA, 80 bp, synthetic construct
  source 1..80: mol_type = other DNA
gtgtggatttaaatatgtacacaagcgtaattaacgagtcacagaccccctgttccagattctgaccggctgcaagcgct

SEQ ID NO: 171232 - DNA, 80 bp, synthetic construct
  source 1..80: mol_type = other DNA
cttgcaggagtgtataacggcaaacttagcatagaacccacaaacgtagaatcacaatataattcactactttcagctat

SEQ ID NO: 171233 - DNA, 80 bp, synthetic construct
  source 1..80: mol_type = other DNA
cgtccaaagacggagggtcccaatgtcttggcagtggtttccgagaggcgcgccgagatacggctggtgagtccacgcgg

SEQ ID NO: 171234 - DNA, 80 bp, synthetic construct
  source 1..80: mol_type = other DNA
attgcccaggacgccaaatctggcccccactcggcgttcctgaatcaggccctcagaaactacactcttgccctctccaa

SEQ ID NO: 171235 - DNA, 80 bp, synthetic construct
  source 1..80: mol_type = other DNA
tggatccactcctctgactgcacatacacccgatctgattaggattgttatactgataaggcactattatcgcaatgggt

SEQ ID NO: 171236 - DNA, 80 bp, synthetic construct
  source 1..80: mol_type = other DNA
caagaaaatttctcttttggaggaacaagccaacggtttcagctcagctagttcagaagatcagcaggcactgatcattg

SEQ ID NO: 171237 - DNA, 80 bp, synthetic construct
  source 1..80: mol_type = other DNA
ccggagagacgttcgagctgcaggtacatcggcgctccccgcttcgccaccccgcgcccgccccagtttatactctccga

SEQ ID NO: 171238 - DNA, 80 bp, synthetic construct
  source 1..80: mol_type = other DNA
tggacatgtacagggttcctgtcaccaccagtgcaaacactgatgttcctatactgtgtctaagcttatcaccagcttct

SEQ ID NO: 171239 - DNA, 80 bp, synthetic construct
  source 1..80: mol_type = other DNA
caagctcgtcaacaccaattgcttaacattgagttaccaagaggtttttgggatgaaaatagaaagccagcttttggcca

SEQ ID NO: 171240 - DNA, 80 bp, synthetic construct
  source 1..80: mol_type = other DNA
gaagacggtggcgacgccgcccgtggggccgctggcgccgccgaaggcgcgtatggagaagaagacctagaactgctgtt

SEQ ID NO: 171241 - DNA, 80 bp, synthetic construct
  source 1..80: mol_type = other DNA
gaagtttttacactggcaacaacagcacatttggttgctgcacatacaaacccagtaaccatataggccaacaagcaaat

SEQ ID NO: 171242 - DNA, 80 bp, synthetic construct
  source 1..80: mol_type = other DNA
gaaacccctgcaaggacgagcagctatcacccggcccccgtagacgacctagagacgtacaagtggttgacccgcaatcc

SEQ ID NO: 171243 - DNA, 80 bp, synthetic construct
  source 1..80: mol_type = other DNA
gaccaagcccgccatgcacgtgcggctatgtctaatgaactgaggggtttcagacccaacgccactcaatctttggcggt

SEQ ID NO: 171244 - DNA, 80 bp, synthetic construct
  source 1..80: mol_type = other DNA
acatcaactacttcaaagatgcagcatcaagtggagcgtcaagattggatttttcacaagaccctagcaaatttactgat

SEQ ID NO: 171245 - DNA, 80 bp, synthetic construct
  source 1..80: mol_type = other DNA
accttcctaaaaaggggttttaaaacagatgacaagtacacatttcttgtgcaccccttgtatccagagaaagaggtgtg

SEQ ID NO: 171246 - DNA, 80 bp, synthetic construct
  source 1..80: mol_type = other DNA
attgccccctcaagtggaacaaacagtgtatatgcttggctttgttagcgcatgtccagattttaaattaagactcatga

SEQ ID NO: 171247 - DNA, 80 bp, synthetic construct
  source 1..80: mol_type = other DNA
gattttgttccaaaaaccgtgctcaaagctatactaccaatagtagctccggcaaacagtttggtccaatccgacaaaaa

SEQ ID NO: 171248 - DNA, 80 bp, synthetic construct
  source 1..80: mol_type = other DNA
acggtcacggttgctcccatgtgctgtgaattcaatgggctcagagcgcagacgaaccctgctttacaagggctgcctgt

SEQ ID NO: 171249 - DNA, 80 bp, synthetic construct
  source 1..80: mol_type = other DNA
actcaaaatgatttaattagagttgaacccattggcatttggatccagggcgaacctggacagggtaaatcctttttaac

SEQ ID NO: 171250 - DNA, 80 bp, synthetic construct
  source 1..80: mol_type = other DNA
ataccacaagagaagtgcccagagacaacacctatggcatctccccaactaatgatatggggacattgtgtttccgatca

SEQ ID NO: 171251 - DNA, 80 bp, synthetic construct
  source 1..80: mol_type = other DNA
catatgagacaataggacgcacaaactaccctaaaaagagtgaaattgtcccagtgattaagaagagagacaccataaca

SEQ ID NO: 171252 - DNA, 80 bp, synthetic construct
  source 1..80: mol_type = other DNA
cgaccgcagttacgaggtgatcaacgtaacaggatacgttggtagcaacataactctaaaaaaatgcaatcagactgaga

SEQ ID NO: 171253 - DNA, 80 bp, synthetic construct
  source 1..80: mol_type = other DNA
cttggtacggtgtatgctttatacagattgatgtgcataacccaaggaccctacacaggtctacctcaacccatcacaaa

SEQ ID NO: 171254 - DNA, 80 bp, synthetic construct
  source 1..80: mol_type = other DNA
cataagacgcaggaggggacgcaaaaagaaactgactctgactatgtggaatcccaacatagtaaggagatgtaacataa

SEQ ID NO: 171255 - DNA, 80 bp, synthetic construct
  source 1..80: mol_type = other DNA
agatgataaaagatttgttgaaacaagcaaaaaacatgacagtagcatcaaagagaattgaaccggtggctgttatgttc

SEQ ID NO: 171256 - DNA, 80 bp, synthetic construct
  source 1..80: mol_type = other DNA
tgatcctgatgtcttctggtcacaactgtatgcttcaatggagaaacacctcctggtatttgattatacaaattatgatg

SEQ ID NO: 171257 - DNA, 80 bp, synthetic construct
  source 1..80: mol_type = other DNA
tactaggggagatacttaattactatgcacactggagtggtagtattaaattgaccttcgtgttttgtgggtccgccatg

SEQ ID NO: 171258 - DNA, 80 bp, synthetic construct
  source 1..80: mol_type = other DNA
gtggtctgtccacctttatgtggaccctacaaggactgtttgaagaatacgagaaacacagaaacagatggtcctcaagc

SEQ ID NO: 171259 - DNA, 80 bp, synthetic construct
  source 1..80: mol_type = other DNA
tttaatagacccgcgagaagcaaccttaaagatacaccctactacccctacgtaaaaaaccagtacaatgtgtactttga

SEQ ID NO: 171260 - DNA, 80 bp, synthetic construct
  source 1..80: mol_type = other DNA
gttgactggaaggttagctcaaagggatggtggtggaaattacctgatgcactcagagaaatgggtgtattcggccagaa

SEQ ID NO: 171261 - DNA, 80 bp, synthetic construct
  source 1..80: mol_type = other DNA
atcttcgcattgctctccgcgttagttccaacaacgcggctgctggtgctctctgtatcgcctacatcccagtgggtgct

SEQ ID NO: 171262 - DNA, 80 bp, synthetic construct
  source 1..80: mol_type = other DNA
gcgagcccatatcgccgccatcattgtaatcagcaatgtgttgaggtactgcacgatgaatctgtctagtgacaccagcc

SEQ ID NO: 171263 - DNA, 80 bp, synthetic construct
  source 1..80: mol_type = other DNA
tggcgaggaagcaaagaagaactgttctgtcagatagctcttacgctcagcgcaagaagaaatatccaccgtgggaaaaa

SEQ ID NO: 171264 - DNA, 80 bp, synthetic construct
  source 1..80: mol_type = other DNA
cacgcccagtgcactgatacagtcaacatcgatggcaggatggttaaggtacttaaacagcagatactgactgatggcaa

SEQ ID NO: 171265 - DNA, 80 bp, synthetic construct
  source 1..80: mol_type = other DNA
tggtcgtaccccaatactcagctggacctagccaggtacctgggggtcaccttctacttctacagagaccaaaaaacaga

SEQ ID NO: 171266 - DNA, 80 bp, synthetic construct
  source 1..80: mol_type = other DNA
tatagcaactactaacaaatcagacttctcaagtacagtcttacaagattctggtgctttaaaaagaaggttcccataca

SEQ ID NO: 171267 - DNA, 80 bp, synthetic construct
  source 1..80: mol_type = other DNA
cagtggccagaatatcagcttatctcccgttaacaaattgtcagtcaaagacgatgcttttcaatggtatatagacaaac

SEQ ID NO: 171268 - DNA, 80 bp, synthetic construct
  source 1..80: mol_type = other DNA
gcttgtgggacgggcgccgtcactcgttcgtcttcgtcgtccttagtggtgtcgtcctcctcggcgtcaggctcagacga

SEQ ID NO: 171269 - DNA, 80 bp, synthetic construct
  source 1..80: mol_type = other DNA
agttataccagaagccaaagataaggttgaattcattaccaagcttaaacaattgggaatgcttgagaatcaaattaata

SEQ ID NO: 171270 - DNA, 80 bp, synthetic construct
  source 1..80: mol_type = other DNA
ccccgaatgtcatcttaatagtcctattgtgacagggaaaatcgttcaagtagtcagatttagtgatattccatgtaacc

SEQ ID NO: 171271 - DNA, 80 bp, synthetic construct
  source 1..80: mol_type = other DNA
ctgttttatacacccttaccctacgtaatatagaagcaaaacaacaaggtcaatagagagcccagtgagccaactgggtc

SEQ ID NO: 171272 - DNA, 80 bp, synthetic construct
  source 1..80: mol_type = other DNA
tccaaaggtgtaccaatacctacctccccaacaccggcttctcattggctctcggagtcggtgccctcgctgttgtcgca

SEQ ID NO: 171273 - DNA, 80 bp, synthetic construct
  source 1..80: mol_type = other DNA
ataccaattggatatggaggcaattgcaaatgaaggtactaaatatggattaacaataacacctacagatcggaagagcc

SEQ ID NO: 171274 - DNA, 80 bp, synthetic construct
  source 1..80: mol_type = other DNA
gacccactctttaattgcaatggtactctactaggaaatttgactatctttccacaccaattgatcaatttaagaaccaa

SEQ ID NO: 171275 - DNA, 80 bp, synthetic construct
  source 1..80: mol_type = other DNA
gacatacacccatattcagcatctcactgagtcctgcatctgacaaaagactccaatatactatgttgggggagattctt

SEQ ID NO: 171276 - DNA, 80 bp, synthetic construct
  source 1..80: mol_type = other DNA
ccaggaatggccataatgagaagaaacagaaaactaattcccagctttaaaacaaaaccaaagggacgcagctacataaa

SEQ ID NO: 171277 - DNA, 80 bp, synthetic construct
  source 1..80: mol_type = other DNA
ctttagaggatcatttgtaataagattaactgtctattctagcacattcaaccgaggtaggctaagaatgggcttctttc

SEQ ID NO: 171278 - DNA, 80 bp, synthetic construct
  source 1..80: mol_type = other DNA
aggccgaatagtagacaagggtcagcagggtcctcaagcatcacccttattagtatgggccgtcccaaatccaaagatca

SEQ ID NO: 171279 - DNA, 80 bp, synthetic construct
  source 1..80: mol_type = other DNA
agtgatcctagattggaggttgattttaataaagctttgttctccaaatacaagggaaataatgaatgtgttatgaatga

SEQ ID NO: 171280 - DNA, 80 bp, synthetic construct
  source 1..80: mol_type = other DNA
ttataggtcccaacagatacaacttacagtttcaaacagcatatgtagacaccacatataatcccctcatggacaaagga

SEQ ID NO: 171281 - DNA, 80 bp, synthetic construct
  source 1..80: mol_type = other DNA
gattatgcaactctaaacacatcttctcttctcaatattacgaggtagaaggtggaatgccatcaggttgtgcgggaacc

SEQ ID NO: 171282 - DNA, 80 bp, synthetic construct
  source 1..80: mol_type = other DNA
ggtgtgtaaaagatgattacacggcaggcggttacataacatgtttttatcagaccaaaattgtcgtgccactgcaaaca

SEQ ID NO: 171283 - DNA, 80 bp, synthetic construct
  source 1..80: mol_type = other DNA
ttagtagcttcacagaacaacgcctcagagtccattttctccataagcctaagtccagcagctgataggagattggcata

SEQ ID NO: 171284 - DNA, 80 bp, synthetic construct
  source 1..80: mol_type = other DNA
cagctttacctgcacccacaggcccagacacccaagtgagcagtcatcgcttagacactggaaaagtaccagcacttcaa

SEQ ID NO: 171285 - DNA, 80 bp, synthetic construct
  source 1..80: mol_type = other DNA
gcactctaattgtggcaatgatcccagaacatcagttagctagtgcaagacatggaaatcttaccgctggttacaacttc

SEQ ID NO: 171286 - DNA, 80 bp, synthetic construct
  source 1..80: mol_type = other DNA
cgaagcctgtcagctacagcgccgcaacctcctgctatgacctcctgggtgccccctacgcagcatgtctctgcccgcga

SEQ ID NO: 171287 - DNA, 80 bp, synthetic construct
  source 1..80: mol_type = other DNA
ttccaccaggtatagatgccccaaagaaccaaaatgacaaaagatgggatggagcctccaatcccagtgtcttttaccaa

SEQ ID NO: 171288 - DNA, 80 bp, synthetic construct
  source 1..80: mol_type = other DNA
gctcgccgcaacgacgtggacttttggttactgcgcttccagcccggtgaaaacgaagtaaggccgcacgccggggtgat

SEQ ID NO: 171289 - DNA, 80 bp, synthetic construct
  source 1..80: mol_type = other DNA
agagaacttcctcagtcggtctgcctgtgtgtatatcgaggaatattttaccaaagatcaagacaacgccaacagataca

SEQ ID NO: 171290 - DNA, 80 bp, synthetic construct
  source 1..80: mol_type = other DNA
atgcagatgcacggtgctgttggggtgatagaggctgctaccgttgagcaagcagtgttcgtgttcctgaagcagcacgc

SEQ ID NO: 171291 - DNA, 80 bp, synthetic construct
  source 1..80: mol_type = other DNA
gatccccacacacgctgagtgtgacaaggaaatacttatagatggaatccctaccaaaattcttaaacaacaaataataa

SEQ ID NO: 171292 - DNA, 80 bp, synthetic construct
  source 1..80: mol_type = other DNA
gacaaggtggtcttacagttaaaggatcttctaaatcagctggggttctctaccccagatgagaagttccagaaagaccc

SEQ ID NO: 171293 - DNA, 80 bp, synthetic construct
  source 1..80: mol_type = other DNA
tttggtccaaaagctatcaaacgaatgtcaacaaaacagattacttctgaattttttacaggacctccaaaaaaatcaaa

SEQ ID NO: 171294 - DNA, 80 bp, synthetic construct
  source 1..80: mol_type = other DNA
gattgcgctggttaactgcagaaggaatgcgctttgacatgatgggttttctgcgcgggctggattgcggtaagaacggt

SEQ ID NO: 171295 - DNA, 80 bp, synthetic construct
  source 1..80: mol_type = other DNA
ataggtgaaacacttccagatgatgttttttctgttggccaggatggccacggtggggggcctggcctccttaggtttgg

SEQ ID NO: 171296 - DNA, 80 bp, synthetic construct
  source 1..80: mol_type = other DNA
gtatgtccttacacatatccaagactatacctagaaaccaatccttacaatggctatgtaatgtactcgcaagcctttgg

SEQ ID NO: 171297 - DNA, 80 bp, synthetic construct
  source 1..80: mol_type = other DNA
aaacgcacttatggccgccgtcgaagaagacgaacagtaaggaggcgccgcggtagacgactgaggaggagtgggtggac

SEQ ID NO: 171298 - DNA, 80 bp, synthetic construct
  source 1..80: mol_type = other DNA
caaaaacatccgagtcaaaggtcacgcctacgtcacaagtcacgtggggagggttggcgtataacccggaagtcaatcct

SEQ ID NO: 171299 - DNA, 80 bp, synthetic construct
  source 1..80: mol_type = other DNA
gagcctggtggagcgtatcaatctaaaccggggagacagaagtgcttgaccgttaatgacttggatagccatctcctaca

SEQ ID NO: 171300 - DNA, 80 bp, synthetic construct
  source 1..80: mol_type = other DNA
cttctgaagatgctctaacctatggtatatcagcaaccaataatatgggcacactatgttttagggctcttgaggatgaa

SEQ ID NO: 171301 - DNA, 80 bp, synthetic construct
  source 1..80: mol_type = other DNA
ccggtcacagggccttccggactacaaaaatggccgttccgtgacgtcacgaccgccattttgagggagccacgctgctg

SEQ ID NO: 171302 - DNA, 80 bp, synthetic construct
  source 1..80: mol_type = other DNA
accaactaaaaacacactggtcagcagtaacaacacagccaaacaaaggaccactaggaactgtatttaatacattttat

SEQ ID NO: 171303 - DNA, 80 bp, synthetic construct
  source 1..80: mol_type = other DNA
cgcctcgagcgtgtccataaagtccccgaaggtgccggtatagccacagatggactttttggtcttgcagttgaccgaca

SEQ ID NO: 171304 - DNA, 80 bp, synthetic construct
  source 1..80: mol_type = other DNA
cccaccaaactgcccactgggcgtagtgctctcatattccggtatgcttgcacgccagttttattccccctttccccatt

SEQ ID NO: 171305 - DNA, 80 bp, synthetic construct
  source 1..80: mol_type = other DNA
atacctacgatgccaaaactaatgcatcacaattaaagcaactaagaaatgcatactttaaacaattaacctctgaaggc

SEQ ID NO: 171306 - DNA, 80 bp, synthetic construct
  source 1..80: mol_type = other DNA
tatgcttgctcacctccttcgtctggctggtcgctacgagcatcaacagaacccagggccttctcccggggcaccgccac

SEQ ID NO: 171307 - DNA, 80 bp, synthetic construct
  source 1..80: mol_type = other DNA
acagaagaattatcacttaaggaagctctgtacggaacagatggtttagagccaattgacattaacaccagtgctggtta

SEQ ID NO: 171308 - DNA, 80 bp, synthetic construct
  source 1..80: mol_type = other DNA
ctaagacaaaatataataagtcaagattagctaagaagattttatccatgtcaaccaaatataagtggactagaagtaaa

SEQ ID NO: 171309 - DNA, 80 bp, synthetic construct
  source 1..80: mol_type = other DNA
ggctgactttcgacatccattctgctcaccacaaacgaacaccccgaccacaaccttccaggcgttgaaagacatctatt

SEQ ID NO: 171310 - DNA, 80 bp, synthetic construct
  source 1..80: mol_type = other DNA
ttttagagagctaaacaaagtaacccaagatttcacagaaatccagttaggaattccacacccagcaggattagccaaaa

SEQ ID NO: 171311 - DNA, 80 bp, synthetic construct
  source 1..80: mol_type = other DNA
taccacgaccccccagagcaacccaatacaccagtaaattcagtgttaactacaacattgcaaaacccaacagtggtggc

SEQ ID NO: 171312 - DNA, 80 bp, synthetic construct
  source 1..80: mol_type = other DNA
atgcattccagatcaaggtcaccgctgggaacgtgcaagataaaagtgcgatattctccttccaactaaatccaggcaac

SEQ ID NO: 171313 - DNA, 80 bp, synthetic construct
  source 1..80: mol_type = other DNA
cctcaggtcactactggcaaacattcatcacaaactccatggttaaagaacatgtagactctaaacaagcaaataatact

SEQ ID NO: 171314 - DNA, 80 bp, synthetic construct
  source 1..80: mol_type = other DNA
tttcaacgctataaacaccttcttgtattgacgtcatatgtatgattacatgcactgatacaaacaatgtttgacgctac

SEQ ID NO: 171315 - DNA, 80 bp, synthetic construct
  source 1..80: mol_type = other DNA
gcctgttttactcaccctaccccattgtaacctagaagccaatcaaatatggtcattaggtggcccagtgcgccaactgg

SEQ ID NO: 171316 - DNA, 80 bp, synthetic construct
  source 1..80: mol_type = other DNA
cagacggcgtgccgtcaggagacggcgactcgggacgccaactgacgacgccgccaccactcgtaaaacccgctacacac

SEQ ID NO: 171317 - DNA, 80 bp, synthetic construct
  source 1..80: mol_type = other DNA
tttgtcaaaagtggatataaaaagaaagatttaatttgtttggaaccattctcagttagtcctatgttagaaaaccttgt

SEQ ID NO: 171318 - DNA, 80 bp, synthetic construct
  source 1..80: mol_type = other DNA
atgtggatcgagaaagcggccgatataacgtgggaacagaacgcagaaatcacaggaaccagccctagacttgatgttga

SEQ ID NO: 171319 - DNA, 80 bp, synthetic construct
  source 1..80: mol_type = other DNA
cagtttaaaaagagacgctacagacgtaggcgaaagagacagaaaataatcataaaacaatggcaaccagccatggtcag

SEQ ID NO: 171320 - DNA, 80 bp, synthetic construct
  source 1..80: mol_type = other DNA
aaaaatgtcagttaccaagaagccaaagaacttaatcacaaaactggcttctacagctcaatatttctctcccgagagag

SEQ ID NO: 171321 - DNA, 80 bp, synthetic construct
  source 1..80: mol_type = other DNA
ctctgaactttaatatgagctacttatatgatgaatatgtaaaacacagaaatacatggagcagaagcaacgtagaccta

SEQ ID NO: 171322 - DNA, 80 bp, synthetic construct
  source 1..80: mol_type = other DNA
ggaccgacgcgtttcaaatcaaggtcactgccgggaatgtgcaagataagaatgccatattctccttccaattaaaccca

SEQ ID NO: 171323 - DNA, 80 bp, synthetic construct
  source 1..80: mol_type = other DNA
aagaatcagtacccaaaatgatttgattagagttgaaccaattggtgtttggatacagggtgaaccaggacaagggaaat

SEQ ID NO: 171324 - DNA, 80 bp, synthetic construct
  source 1..80: mol_type = other DNA
gttaaacaacatgggcaaattgtacgcgcgtcacgtgaacaaagatacaccataccagatgtctagtacaatccgggtgt

SEQ ID NO: 171325 - DNA, 80 bp, synthetic construct
  source 1..80: mol_type = other DNA
cactaccgcctggtacaacaagatgagtacaccagtgccggtaacgtcacatgctggtatcaaacaggcatagtggtccc

SEQ ID NO: 171326 - DNA, 80 bp, synthetic construct
  source 1..80: mol_type = other DNA
ggtgcaccagttcccaagaaacgtgatgactacacgtggcaatcagggacaaatgcctctgtattttggcaggaagggca

SEQ ID NO: 171327 - DNA, 80 bp, synthetic construct
  source 1..80: mol_type = other DNA
acttttccaactggtcaggatcaatcaaattaacattcttctgtgtctgtgatagcttcagtactggtaagtttttaata

SEQ ID NO: 171328 - DNA, 80 bp, synthetic construct
  source 1..80: mol_type = other DNA
caaaatttccaaactagagatgaaatgagtattgagagtttcctaggtagatctggatgtatacacatttcaacacttga

SEQ ID NO: 171329 - DNA, 80 bp, synthetic construct
  source 1..80: mol_type = other DNA
taatgaaaaaaaatgacaaaacctggggctatgtaatctatggctacaactttgcaaacggaaacatgccgtggttacag

SEQ ID NO: 171330 - DNA, 80 bp, synthetic construct
  source 1..80: mol_type = other DNA
tgcgagtgctcaagcaatgcatcttaactgacacaaacgatgttgacacagaaataactttgttgtggttagaccaaaat

SEQ ID NO: 171331 - DNA, 80 bp, synthetic construct
  source 1..80: mol_type = other DNA
cgcttactctgctattcctcaccaaaagtccaaacccaaatcccaaaaacccgtccccacccgccacatccagcggcagg

SEQ ID NO: 171332 - DNA, 80 bp, synthetic construct
  source 1..80: mol_type = other DNA
cttaggaaatttcaatgtgctgaagaacaagggttatctgattatgtagaacaccttggtcaagtctttggtgttggttt

SEQ ID NO: 171333 - DNA, 80 bp, synthetic construct
  source 1..80: mol_type = other DNA
tagagcgcggcaccaccggacggatgcagtccagaacgcggttgggatcttggtgaaagaatttgaacgtggctacggcc

SEQ ID NO: 171334 - DNA, 80 bp, synthetic construct
  source 1..80: mol_type = other DNA
gccagcgcaggtgaggaaagggcgcgttctcgcccttgaggctgacggttcccaggccgagaacgcgcattccgaaagcg

SEQ ID NO: 171335 - DNA, 80 bp, synthetic construct
  source 1..80: mol_type = other DNA
gcactctgggcgtctttttgataccagagtacgtaatggcatgcaacactgaaaccaaaacatcatatgtgtcttacgtg

SEQ ID NO: 171336 - DNA, 80 bp, synthetic construct
  source 1..80: mol_type = other DNA
gagacacccaagaccacgaaactgtgggcatagtagtggtcatctgtccttacactagaccccaactgtttgtaaaggac

SEQ ID NO: 171337 - DNA, 80 bp, synthetic construct
  source 1..80: mol_type = other DNA
agggaaataatgactgtgtgatgaatgaccacatcaaagttgctgtctcccactactcagcacaactccttacactagac

SEQ ID NO: 171338 - DNA, 80 bp, synthetic construct
  source 1..80: mol_type = other DNA
cagcggtatggtgcgcctccaagaccgccggcgcccggggctcccagaccaccgataagacgccacctggcccttccagc

SEQ ID NO: 171339 - DNA, 80 bp, synthetic construct
  source 1..80: mol_type = other DNA
aggcatgcaataacaaatgttactgtaaacagtgctgctaccactgtcagctgtgttttttaaataaggggctcgggata

SEQ ID NO: 171340 - DNA, 80 bp, synthetic construct
  source 1..80: mol_type = other DNA
tactaagctggaacagaaaccctccatttacagaaactgttatttcagctcctatgctacacccagctattctaatgaac

SEQ ID NO: 171341 - DNA, 80 bp, synthetic construct
  source 1..80: mol_type = other DNA
agagtggtaaacaggcacctagccactagtgaggattggcaggggtgtgtgtgggaggattataacagggatctcctcgt

SEQ ID NO: 171342 - DNA, 80 bp, synthetic construct
  source 1..80: mol_type = other DNA
atatatttggcacacatacacttagtcagcaccaagcaattggtttgattggaacaatattattgacagcaggtttaatg

SEQ ID NO: 171343 - DNA, 80 bp, synthetic construct
  source 1..80: mol_type = other DNA
gccagactgacgctgaaacggacgttgtccgtaaactggagctccacggtgtgatggcgatcgcagcgatccaaacggag

SEQ ID NO: 171344 - DNA, 80 bp, synthetic construct
  source 1..80: mol_type = other DNA
tcagggactaacggcatttactccacaaaaacagacagtaactatggataccactcatttcaagtaaaaacaaaaaaaca

SEQ ID NO: 171345 - DNA, 80 bp, synthetic construct
  source 1..80: mol_type = other DNA
gccctctaaaaaacactatgtaaaagttagagtaggggccccaagactctttcaggacaagtggtacccccagagcgagc

SEQ ID NO: 171346 - DNA, 80 bp, synthetic construct
  source 1..80: mol_type = other DNA
cgagaagggggggcaccccccttcggcgtgcgcggtcacgcgcacagggcgcagccctggttaaaaacaaggtttataaa

SEQ ID NO: 171347 - DNA, 80 bp, synthetic construct
  source 1..80: mol_type = other DNA
agttgcgatgtgttgtgcttcgcatctgcttgtaacgacttctcagtgcgcttactaagagacacaccattcatggcgca

SEQ ID NO: 171348 - DNA, 80 bp, synthetic construct
  source 1..80: mol_type = other DNA
tgtcctaggaacttccgtattagaccaacggacaacttacagtacacaaataactaaatttgaaacctggctatatcaac

SEQ ID NO: 171349 - DNA, 80 bp, synthetic construct
  source 1..80: mol_type = other DNA
cgaggttcaagagccgcaggtcacttatccagcgggacaaggagaactgaacaggaggtcacaggaggagaacgaggaag

SEQ ID NO: 171350 - DNA, 80 bp, synthetic construct
  source 1..80: mol_type = other DNA
cgtgacattccaagttctctcttctgtgtacaacaacttcctctctattacacaccaagacctcttagacaccagtgatc

SEQ ID NO: 171351 - DNA, 80 bp, synthetic construct
  source 1..80: mol_type = other DNA
cacctactttaggggttcactggtgttgagaatgtcagtctatgccagcactttcaaccgaggccggctgcgcatggggt

SEQ ID NO: 171352 - DNA, 80 bp, synthetic construct
  source 1..80: mol_type = other DNA
cacaagtaaatccacgtcccatgcaggttagtatatatcacatacatgtcaacagacttaccgagttctgccaggacatc

SEQ ID NO: 171353 - DNA, 80 bp, synthetic construct
  source 1..80: mol_type = other DNA
tgatggaaacacagacctctacatggtttggcttcaatggtacaagggcagaaaacaggacatatatctattggcatggt

SEQ ID NO: 171354 - DNA, 80 bp, synthetic construct
  source 1..80: mol_type = other DNA
caatgctaggtactcacattatttgggacatcgggttacaatccagttgtgtgctgtgcgtaccatggatcagccaaacg

SEQ ID NO: 171355 - DNA, 80 bp, synthetic construct
  source 1..80: mol_type = other DNA
accacggagcattcggtcaacaatccggtgctgtatacgtaggcaactatagggtagttaacagacatttggcaacctac

SEQ ID NO: 171356 - DNA, 80 bp, synthetic construct
  source 1..80: mol_type = other DNA
agatactggaaactataaaacacaatttgtgtcaaacttatctacaaaagtaggtactgactggggaaaaagactaaaca

SEQ ID NO: 171357 - DNA, 80 bp, synthetic construct
  source 1..80: mol_type = other DNA
tgtatgtgagacatgtaaatggcccctcaccacttccagtaaccagcactgtgagagtgtacttcaagcccaagcacgtg

SEQ ID NO: 171358 - DNA, 80 bp, synthetic construct
  source 1..80: mol_type = other DNA
tcgtgtatccttcaaactcggcttccaataaagtttctaggccgtggaactctcactggtcggtgtctacctcttaaggt

SEQ ID NO: 171359 - DNA, 80 bp, synthetic construct
  source 1..80: mol_type = other DNA
tgcggcgcgcacggcgaaaagcagacgcgtgtctgagtctgtttaattccccggggaacagaaaaagtgcccagaggacg

SEQ ID NO: 171360 - DNA, 80 bp, synthetic construct
  source 1..80: mol_type = other DNA
tggaggcggattttccagacagtcccctgcttcctaaatttcaagagctgaaccagaataatctccccaatgatgttttt

SEQ ID NO: 171361 - DNA, 80 bp, synthetic construct
  source 1..80: mol_type = other DNA
gcgccaaaaaaccgtcggcgtgagggccgcgcgctgcgcgcgcggcccccgggaggaggcattgcctctccgccccgcgc

SEQ ID NO: 171362 - DNA, 80 bp, synthetic construct
  source 1..80: mol_type = other DNA
ggtgaaattagtggaagaaaagaaatttggagcagaagtagtgccaggatttcaggcattatcagaaggctgcacaccct

SEQ ID NO: 171363 - DNA, 80 bp, synthetic construct
  source 1..80: mol_type = other DNA
aacattggaactggtacctctgcttatacatcattgaatgtactggctagatttactgatttggaacttcatggattgac

SEQ ID NO: 171364 - DNA, 80 bp, synthetic construct
  source 1..80: mol_type = other DNA
tgctgctggaactgctgtcaccgcagtcggcgctttgggcaccgggcttcaggggcatggtcgggctcgggagactttcg

SEQ ID NO: 171365 - DNA, 80 bp, synthetic construct
  source 1..80: mol_type = other DNA
tggcccaagagatctttgctattaaagtagacattgcctcacaacctttggcaaacaccatgcttggagaaattgcaagt

SEQ ID NO: 171366 - DNA, 80 bp, synthetic construct
  source 1..80: mol_type = other DNA
tgcaacaggctggtcagttaacccagatagcggagacggagatgtaatataccaggaaactacattagaaaccaaatgga

SEQ ID NO: 171367 - DNA, 80 bp, synthetic construct
  source 1..80: mol_type = other DNA
aagaccctccccacctccaccaccggcctgctaaacctcctctcccgctggcaggatggcgctctctgggcacgtcttga

SEQ ID NO: 171368 - DNA, 80 bp, synthetic construct
  source 1..80: mol_type = other DNA
ggatccattgtggctacttgcagtgcatgcccagacatgtccgccagaatgctcagagatagcccaatgatgcaacagag

SEQ ID NO: 171369 - DNA, 80 bp, synthetic construct
  source 1..80: mol_type = other DNA
tatagttgtgtcactccaagttctgcaatccatgttcaacgactgcctgagtgtacttcctactaactttgtagaaacaa

SEQ ID NO: 171370 - DNA, 80 bp, synthetic construct
  source 1..80: mol_type = other DNA
gagaaacacaaagtagggcttggtcataaccatacgctgaaagagcgccgtcaccgcctcccgctcggcctgccgacaca

SEQ ID NO: 171371 - DNA, 80 bp, synthetic construct
  source 1..80: mol_type = other DNA
cagatgtccaggggtccccgagggcgaggcccagccccctcccgcccctgtacactgccccggtccccccagaagccacc

SEQ ID NO: 171372 - DNA, 80 bp, synthetic construct
  source 1..80: mol_type = other DNA
tagattggataaagagtatgttaccacaagctcaattgaaggttgattatctgactaagctaaaacaacttaatctctta

SEQ ID NO: 171373 - DNA, 80 bp, synthetic construct
  source 1..80: mol_type = other DNA
gtccccagcggcgaaagctgtggaccgccatccgccaaccaagtccacgacaactattcgcatcattttgacacttatgc

SEQ ID NO: 171374 - DNA, 80 bp, synthetic construct
  source 1..80: mol_type = other DNA
agaaagcgctggttagacatgttctaatctggttaaaacaatgatatagacatttaatttgtgtagaattagaagtttat

SEQ ID NO: 171375 - DNA, 80 bp, synthetic construct
  source 1..80: mol_type = other DNA
aaaattgtgggtggattcgtgcggatgtccagagtgcctacaatgtcttaagggattgaaggcaattaagcccggccttt

SEQ ID NO: 171376 - DNA, 80 bp, synthetic construct
  source 1..80: mol_type = other DNA
agatggacagccacttactagtagtgaattaacgtgggaccaaagtgcatttaacagctttaaaacaaaagcagacagca

SEQ ID NO: 171377 - DNA, 80 bp, synthetic construct
  source 1..80: mol_type = other DNA
tcaacaccaaccacctacacggagctcgaagaccgtcaccctacatttgaagaacacaaacaagctaccaatttgcaata

SEQ ID NO: 171378 - DNA, 80 bp, synthetic construct
  source 1..80: mol_type = other DNA
tacaccaggttttataatagacctcttaagtgcctctaaagatccaaaagtcattgaattctgtgaaaaagaaggatgga

SEQ ID NO: 171379 - DNA, 80 bp, synthetic construct
  source 1..80: mol_type = other DNA
gtcgctcggctcgatgcctggccatatcagggaagtcaggaacgccttctggtggggcagcgtacctgcggcgtcacagc

SEQ ID NO: 171380 - DNA, 80 bp, synthetic construct
  source 1..80: mol_type = other DNA
acaaaatggccgacttccttcctctttttcaaaaattaaccgtcggcggcggcgcgcgcgctgccacgtgataagtgacg

SEQ ID NO: 171381 - DNA, 80 bp, synthetic construct
  source 1..80: mol_type = other DNA
aaggaacgggccagggagacactggcgaaggcccctaggcgcacttatggcacacctaggccgccagttcagaaaccaag

SEQ ID NO: 171382 - DNA, 80 bp, synthetic construct
  source 1..80: mol_type = other DNA
tttacaacttgattcttcaggaagacaagaggcgcacccatgttgtggatgttatgactgctatatttcaagggccaatt

SEQ ID NO: 171383 - DNA, 80 bp, synthetic construct
  source 1..80: mol_type = other DNA
catgggcgcacaagtgtctaggcaaagtgtcgggagtcatgaaacaatgatccacgctggaacaggagctgtagtaaaat

SEQ ID NO: 171384 - DNA, 80 bp, synthetic construct
  source 1..80: mol_type = other DNA
aagtacacacttgcttatgcaccaattagccagcggatcaacacccggcaacgggtgcccctggggccaaaagccaaggt

SEQ ID NO: 171385 - DNA, 80 bp, synthetic construct
  source 1..80: mol_type = other DNA
ttggctttcaacccggtccgtcgtcgcgtggtaattctgggtcgcgcggcacaccagcagtagtaagaggccttagagca

SEQ ID NO: 171386 - DNA, 80 bp, synthetic construct
  source 1..80: mol_type = other DNA
gttgtccaagcgactaccacagtcaacacaaccaatttaacacagcatccatctgccccaacactgcccttcacaccaga

SEQ ID NO: 171387 - DNA, 80 bp, synthetic construct
  source 1..80: mol_type = other DNA
ccaatttgtttttcccatcaccggctccaaaagaaaagacttcaagggctataagtactaacccgtttgaggaccaaagt

SEQ ID NO: 171388 - DNA, 80 bp, synthetic construct
  source 1..80: mol_type = other DNA
cagatttacatgtccacacagggaatttagtgtatagaaatttacacttatgtgacccagaaaacctaaatgattcagta

SEQ ID NO: 171389 - DNA, 80 bp, synthetic construct
  source 1..80: mol_type = other DNA
tacaattccccacagcgtactttgactgcacttacaaccccttaaatgaccatggaaaaggaaacctcatgtggtttcaa

SEQ ID NO: 171390 - DNA, 80 bp, synthetic construct
  source 1..80: mol_type = other DNA
aaacaggatctcttattatttcaccaggcagtactaaacctattaagaagatctacccagcatttatgcttggtacgtct

SEQ ID NO: 171391 - DNA, 80 bp, synthetic construct
  source 1..80: mol_type = other DNA
agtaggtagaatacctaactttaatcctgacggatccaaaaacactgaagcaagcgaatggcaaagatactggtcaaata

SEQ ID NO: 171392 - DNA, 80 bp, synthetic construct
  source 1..80: mol_type = other DNA
gacgttgtttcagattttcacgcaacaatgcgagatggtgaccgaggggtacacgcaaccgcagctccccaccggagagc

SEQ ID NO: 171393 - DNA, 80 bp, synthetic construct
  source 1..80: mol_type = other DNA
tgacggtgatagtgcgggaactcggtcacgtagcgtttaatgtcgtcgctcaacgccgcgcagatggtggggtttgagta

SEQ ID NO: 171394 - DNA, 80 bp, synthetic construct
  source 1..80: mol_type = other DNA
aaataataccatggataacctacagagtatggatgcataccgtataccagttcagtgtttcaacaaacaaggtggacagg

SEQ ID NO: 171395 - DNA, 80 bp, synthetic construct
  source 1..80: mol_type = other DNA
ccaattgcgcaggaagcttgagatgttcacctattccagatttgatattgagctcacctttgtcatcaccgagcggtttg

SEQ ID NO: 171396 - DNA, 80 bp, synthetic construct
  source 1..80: mol_type = other DNA
cagggcacacctcacaagttgtgccaggtgacaccatccagaccaggcatgtggtaaatttccactctcgttccgaatct

SEQ ID NO: 171397 - DNA, 80 bp, synthetic construct
  source 1..80: mol_type = other DNA
cttttgaacacagcaaaatgggagtccatgtgtcaacaaccaaaaccgggtctcatgcaaatggaaacatatcgacaggg

SEQ ID NO: 171398 - DNA, 80 bp, synthetic construct
  source 1..80: mol_type = other DNA
agcactaccctatgtttcaatagggcgcaccaactatgacaggccaaacataaaaccagttattgaaaagagaactagta

SEQ ID NO: 171399 - DNA, 80 bp, synthetic construct
  source 1..80: mol_type = other DNA
ccaatcgactgcctaactgtagcacggtaactacaacagcgggtcaagacgctgaattgcacggtccggcaccgttaagc

SEQ ID NO: 171400 - DNA, 80 bp, synthetic construct
  source 1..80: mol_type = other DNA
caaccatggactaacgccactataaaacaatatgaatatcacttaggtatgtttagtcctatattcataggacctaccag

SEQ ID NO: 171401 - DNA, 80 bp, synthetic construct
  source 1..80: mol_type = other DNA
agaatttcatgagccgatctgcgtgtgtatattatactaagtacaagacaaaagatacggacccaacagagatgtacgcc

SEQ ID NO: 171402 - DNA, 80 bp, synthetic construct
  source 1..80: mol_type = other DNA
gaaggcgtgcccgaacccgggtttcatgctcgtctgcaccccagtggacaaggcagtagaggacacccaccaccaggcgg

SEQ ID NO: 171403 - DNA, 80 bp, synthetic construct
  source 1..80: mol_type = other DNA
ggcagacgaggacgcaagtcctccagcagcaggtcctccagtcgcagctccagcagcagcaggagctcggggagcagctc

SEQ ID NO: 171404 - DNA, 80 bp, synthetic construct
  source 1..80: mol_type = other DNA
ttaaggatcagatttatgtagttgagggaggaatgccatcaggttgctcaggcactagtatttttaattcaatgattaat

SEQ ID NO: 171405 - DNA, 80 bp, synthetic construct
  source 1..80: mol_type = other DNA
ctgttgacaaaactattgactatgacactggacacttcaaaaaatggcagataacacttcaagaaatggcacaaattaga

SEQ ID NO: 171406 - DNA, 80 bp, synthetic construct
  source 1..80: mol_type = other DNA
gagtccacaatagagtccttcttcgcgcgtggtgcatgtgtgacaatcatgacagtggaaaattttaacgcgactgaggc

SEQ ID NO: 171407 - DNA, 80 bp, synthetic construct
  source 1..80: mol_type = other DNA
tgggtttagttagaggctgaacccacactctattttgaactccacttcctgggcatggtctacgtcctcatataagtaag

SEQ ID NO: 171408 - DNA, 80 bp, synthetic construct
  source 1..80: mol_type = other DNA
gtaggtgatctgggtgggaacaacccagatcccctacatggtgttgtacactattatcacggtaattttgtacgccagtt

SEQ ID NO: 171409 - DNA, 80 bp, synthetic construct
  source 1..80: mol_type = other DNA
ttccaccaccaactaaaaaacaaggcacaggcacaacagcacaatactcaccagacagtcaagacggagatgtcatatac

SEQ ID NO: 171410 - DNA, 80 bp, synthetic construct
  source 1..80: mol_type = other DNA
aagccctatgtcgagtccagccaagaagaaacagagacagaagcagaagcccaagaagagacgcagacgctaccgcaagc

SEQ ID NO: 171411 - DNA, 80 bp, synthetic construct
  source 1..80: mol_type = other DNA
cgctgtggccgagtggcagaatcaccagagcccagaggaggccccggccgccgtgtcatttagaaaccttgcctacgggc

SEQ ID NO: 171412 - DNA, 80 bp, synthetic construct
  source 1..80: mol_type = other DNA
tgcggtaaatcacttgtcactacggttatagccagaggtctggctactgaaggagacatatattctctaccacccaatcc

SEQ ID NO: 171413 - DNA, 80 bp, synthetic construct
  source 1..80: mol_type = other DNA
ccccctgctgtttcttctcccgttgcatgatagaatggccatagggtgggtcctgagaggaggcttgtgtgtcctggtgc

SEQ ID NO: 171414 - DNA, 80 bp, synthetic construct
  source 1..80: mol_type = other DNA
tacacctgcgagctgtaataagaccaatgtccccacacaatactcatacagcagaacaaacagtctctggggagactttg

SEQ ID NO: 171415 - DNA, 80 bp, synthetic construct
  source 1..80: mol_type = other DNA
caaaattctgtgtaaaattcagccttggctttaaataaatggcaatttcactgtacaaggccgtgggactttcacttgtc

SEQ ID NO: 171416 - DNA, 80 bp, synthetic construct
  source 1..80: mol_type = other DNA
cttccccctggtgcaacgccctcggcggccgcgcgctacgccttcggctgcgcgcggcacctcggacccccgctcgtgct

SEQ ID NO: 171417 - DNA, 80 bp, synthetic construct
  source 1..80: mol_type = other DNA
ggaagagttgtcaaatgaagtgttgcctcctccccgtaaaattaagggtgtattttcacaagcaaaaatctcattgttct

SEQ ID NO: 171418 - DNA, 80 bp, synthetic construct
  source 1..80: mol_type = other DNA
gatcaaactcagataggggcaataatcagccagatgagaatcttttcttcaactgtaatggtacactcctaggaaacttg

SEQ ID NO: 171419 - DNA, 80 bp, synthetic construct
  source 1..80: mol_type = other DNA
acaaacaacacagggttaatgcaaattatgtatgtacctccaggaattgtccctccagacagtactgatcatggaaattg

SEQ ID NO: 171420 - DNA, 80 bp, synthetic construct
  source 1..80: mol_type = other DNA
atgttcattacatactcaattgcttggggagtctcatcctcatactagggactatctatgtgttgtacaagttaatgtgt

SEQ ID NO: 171421 - DNA, 80 bp, synthetic construct
  source 1..80: mol_type = other DNA
ctgataaaggagtaggcaacctactatggatagaccccttaaacaaaacagacaacctatacaaaccaccacaaagcaag

SEQ ID NO: 171422 - DNA, 80 bp, synthetic construct
  source 1..80: mol_type = other DNA
cttatggaaacttattttcaacctttcacaagaacccaggtatcataacaggatctgcagtgggatgtgacccagaaaca

SEQ ID NO: 171423 - DNA, 80 bp, synthetic construct
  source 1..80: mol_type = other DNA
tactggaaataactcaatatatggcttcccctcatacaaagcagacaaagaaaagctacacaaaattttaaactggtttt

SEQ ID NO: 171424 - DNA, 80 bp, synthetic construct
  source 1..80: mol_type = other DNA
gctgcgcggccagccgggaaccgctcaactcggccatgcgcgggccgatctcggcgaacaccgcccccgcttcgacgctc

SEQ ID NO: 171425 - DNA, 80 bp, synthetic construct
  source 1..80: mol_type = other DNA
ggatcccttctttaactgcaatggaaccctgttaggtaatctcaccatatttccacatcaactaattaatctgagaacaa

SEQ ID NO: 171426 - DNA, 80 bp, synthetic construct
  source 1..80: mol_type = other DNA
ttccaaccagcagccaagacctataaaaactcaaacacaacaacttcaactggaaaacagtatgcagactacaccagcct

SEQ ID NO: 171427 - DNA, 80 bp, synthetic construct
  source 1..80: mol_type = other DNA
acaaagacaaaatggatgaaattagaaaatggtactttacacaagaaacaacagacaatgcagtacatggccaatacgga

SEQ ID NO: 171428 - DNA, 80 bp, synthetic construct
  source 1..80: mol_type = other DNA
aaaccttccatgctaatccaggaatactcacaggctcagctgtgggttgtaatccagacactttttggtctcaaatgtat

SEQ ID NO: 171429 - DNA, 80 bp, synthetic construct
  source 1..80: mol_type = other DNA
ttctaccctaatttaagcattttaccaaatgaagtcagtcaacaattcgacttctttttaaactctgctcacccaccaag

SEQ ID NO: 171430 - DNA, 80 bp, synthetic construct
  source 1..80: mol_type = other DNA
tgcatagtcagggacctaccgctctgggccctcctctactgctacaccgagtatgtgcaggaggagatgaacatagacgc

SEQ ID NO: 171431 - DNA, 80 bp, synthetic construct
  source 1..80: mol_type = other DNA
tgatgatgttgtccccgttgcagtggaattgtcccggttaatcaccacggtgaacaccacggccaagaaaatgatcccta

SEQ ID NO: 171432 - DNA, 80 bp, synthetic construct
  source 1..80: mol_type = other DNA
atgtgcctgccagtaggaagcaggcaatgcttgggacccacataatttgggacatagggttgcagtctagttgcgttttg

SEQ ID NO: 171433 - DNA, 80 bp, synthetic construct
  source 1..80: mol_type = other DNA
aaggagggttgagtataacaccccaaaccaatgtgaatcatgatacacaacaaactaatgagtataggtgcaaacactat

SEQ ID NO: 171434 - DNA, 80 bp, synthetic construct
  source 1..80: mol_type = other DNA
atgtacgtcagggctccacgttacagttccatttccattaacaggaattttaacctgcgtaaatccataaataccgtggt

SEQ ID NO: 171435 - DNA, 80 bp, synthetic construct
  source 1..80: mol_type = other DNA
cggatttaccccattggcatcgcacacgagtgacctaatcagaatagtgttgttgataaggtactactatcacaatggga

SEQ ID NO: 171436 - DNA, 80 bp, synthetic construct
  source 1..80: mol_type = other DNA
aggagcaaacaaatatttctttactcctgacggcttatggggagatccaatttattattacacaggcaacggaacacaat

SEQ ID NO: 171437 - DNA, 80 bp, synthetic construct
  source 1..80: mol_type = other DNA
acgctacccagactgtccataagttcccccaggccgtccacgaattgatttcttccgtttgacactgcattgtccaaatc

SEQ ID NO: 171438 - DNA, 80 bp, synthetic construct
  source 1..80: mol_type = other DNA
gtgggggggggggagcatctttgctattcacgcgtactgcgatacagcttattgtgtattggtgcgagtattacgacacg

SEQ ID NO: 171439 - DNA, 80 bp, synthetic construct
  source 1..80: mol_type = other DNA
cagtgacggtaaaaaggaaaactactatttaaccgtgttatcaggaactgcaacatcgtctcctatacctgataaatgta

SEQ ID NO: 171440 - DNA, 80 bp, synthetic construct
  source 1..80: mol_type = other DNA
cgctgcccgaaaacgttgacgcagatactgtagccgtgttctgtggccccgaagaaacgcaacacgttccccgaaggcac

SEQ ID NO: 171441 - DNA, 80 bp, synthetic construct
  source 1..80: mol_type = other DNA
gatagtaaacatgatctccacagaacaagaaatacaattccaaaattcacaaaacaaaaattttaaaaattttcgggtct

SEQ ID NO: 171442 - DNA, 80 bp, synthetic construct
  source 1..80: mol_type = other DNA
ggcagcagagggagagttccgagagcccgaaaaaggctcatattcagaggaagaaaggtcgcaagcctctgcagaagagc

SEQ ID NO: 171443 - DNA, 80 bp, synthetic construct
  source 1..80: mol_type = other DNA
atttgaaaactttcataatgggagctcaagtcactagacaacaaactggcacacacgaaaatgccaatgttgccacaaat

SEQ ID NO: 171444 - DNA, 80 bp, synthetic construct
  source 1..80: mol_type = other DNA
ctaacaccacctactatctccatacccgaagccataaataggcgattcttcctggacacagagattaagattctacaggg

SEQ ID NO: 171445 - DNA, 80 bp, synthetic construct
  source 1..80: mol_type = other DNA
ggcctcgctcagtacaagttgttagcccgctcacaatggggcccgaatatgtcttccactcgtgggactggcgacgaggg

SEQ ID NO: 171446 - DNA, 80 bp, synthetic construct
  source 1..80: mol_type = other DNA
accttgaatcttcagtcaattcagagcacattttctcagtggactcaaattgtgaaaccattgctaaagacatttttgga

SEQ ID NO: 171447 - DNA, 80 bp, synthetic construct
  source 1..80: mol_type = other DNA
agggaggctgttgtggtgctggttggggaaggagctccagggaatctttgggccatggccttggtgaggttcccggagac

SEQ ID NO: 171448 - DNA, 80 bp, synthetic construct
  source 1..80: mol_type = other DNA
aactgtatatcctcagtgccatacattgtacccatggctcatttggaggaaaaaggtaaattttatactagcaagttagt

SEQ ID NO: 171449 - DNA, 80 bp, synthetic construct
  source 1..80: mol_type = other DNA
attaagaaaaaggacaagaacaaatggaggatgctaatagattttagagaactaaacagggtgactcaagatttcacaga

SEQ ID NO: 171450 - DNA, 80 bp, synthetic construct
  source 1..80: mol_type = other DNA
ttcctccaactccaaaaaacaaaagcccatttacatttaaacccactatttttcccccaagagaacatgtaaacatattc

SEQ ID NO: 171451 - DNA, 80 bp, synthetic construct
  source 1..80: mol_type = other DNA
cagtcagggttaccagaggaagagtggaaggctagactgaaagcaaggggaatacccacagactagacaggaaacagcag

SEQ ID NO: 171452 - DNA, 80 bp, synthetic construct
  source 1..80: mol_type = other DNA
atgaaactctccaaccaaaatggaacaacatgacatggcagcagtgggaagcacaggtcaactacttggatgcaaatata

SEQ ID NO: 171453 - DNA, 80 bp, synthetic construct
  source 1..80: mol_type = other DNA
tggaattctgggccatgccctcgacttccaggagccgtgttagctcatgaatttcaccgtcagccgcagcggctaggttc

SEQ ID NO: 171454 - DNA, 80 bp, synthetic construct
  source 1..80: mol_type = other DNA
aaatctatgagactgaagggggcatgccatctggtatatgtggtacatcaattttcaatactatgatcaacaacatcata

SEQ ID NO: 171455 - DNA, 80 bp, synthetic construct
  source 1..80: mol_type = other DNA
tgtaactttcaaacttggctttaaataaaaattcaaggccttaaactgttcacttgtcggtgtctacctgtaaaggtcac

SEQ ID NO: 171456 - DNA, 80 bp, synthetic construct
  source 1..80: mol_type = other DNA
aacctggagcactaataacagaaaccacataaataccacatacgcaagtgctaaatactccatatatgaataccactgtg

SEQ ID NO: 171457 - DNA, 80 bp, synthetic construct
  source 1..80: mol_type = other DNA
ctgcagataaatcaagccagtttgcaaaaattgactggactaatgccactttcttgaagagaggcttcaaggttgatgag

SEQ ID NO: 171458 - DNA, 80 bp, synthetic construct
  source 1..80: mol_type = other DNA
cagcattttctgcgcccggggagatcattcggtggcatccctgaaggagaccctccataaatgcccgtgggatctgctgg

SEQ ID NO: 171459 - DNA, 80 bp, synthetic construct
  source 1..80: mol_type = other DNA
ttatatatagaaatttacatatctttaattcagaaatgcatgattgtatcttaatatattattcatgtgatttagtcatc

SEQ ID NO: 171460 - DNA, 80 bp, synthetic construct
  source 1..80: mol_type = other DNA
ccccaaaaagagagttctgcccagtggattatctcctgggatgtggggtgttactgggaaatgcctttgtatacccacat

SEQ ID NO: 171461 - DNA, 80 bp, synthetic construct
  source 1..80: mol_type = other DNA
gatactgtactttttagaagtgtgtatggaaaccttttctctgcttttcataaaaacccaggcatagttactggttctgc

SEQ ID NO: 171462 - DNA, 80 bp, synthetic construct
  source 1..80: mol_type = other DNA
agctgctgaaactgggcatacgtcacaagcagtgcccagtgacaccattcaaacaaggtgtgtgctgaatcaacacaagc

SEQ ID NO: 171463 - DNA, 80 bp, synthetic construct
  source 1..80: mol_type = other DNA
gttctctatacccctccttactcactattgtacagacaatggatagatcaattcatataaacaagtataatataatacaa

SEQ ID NO: 171464 - DNA, 80 bp, synthetic construct
  source 1..80: mol_type = other DNA
ccaaaaaatggagagagaaggacagctagaggaagctgcccccaacaacccatataacactcccacttttgcaattagga

SEQ ID NO: 171465 - DNA, 80 bp, synthetic construct
  source 1..80: mol_type = other DNA
ttagccgatccgcctgcgtgtacattgaagaatatttcaccaaggaccaggatagtgccaacagatacatgtcatggact

SEQ ID NO: 171466 - DNA, 80 bp, synthetic construct
  source 1..80: mol_type = other DNA
tactcaaacaccttagaaaacattctgtacacacgagcctcctactggaactcgttccacgccactgaatacctaaaccc

SEQ ID NO: 171467 - DNA, 80 bp, synthetic construct
  source 1..80: mol_type = other DNA
tgtgtctgcttggctttataagtgcttgtccagacttcaaactcagacttatgaaagacacccaatcaatataccaagac

SEQ ID NO: 171468 - DNA, 80 bp, synthetic construct
  source 1..80: mol_type = other DNA
gttataactacacacacccaggagagcttggtagaactgtggggcagagaagatctgaggtgaataataaacaacctagt

SEQ ID NO: 171469 - DNA, 80 bp, synthetic construct
  source 1..80: mol_type = other DNA
gcacaatggggcgatcgttgccaacacaacagctagcggaccttctaattcggaaagcataccggcacttactgcggctg

SEQ ID NO: 171470 - DNA, 80 bp, synthetic construct
  source 1..80: mol_type = other DNA
tgtgtaccatggattagccaaaccaactacaggtatgtcactagtgatgcctacactgatgcgggttatatcacttgctg

SEQ ID NO: 171471 - DNA, 80 bp, synthetic construct
  source 1..80: mol_type = other DNA
cgtgctcttctataccgcccactacacctcgcgcggcgcgctctacctctatcggcaaaacctgcagcggctcaacgaaa

SEQ ID NO: 171472 - DNA, 80 bp, synthetic construct
  source 1..80: mol_type = other DNA
agccgggaactctggaccccgggaggacaccaaccctcagcagcccaccaccgagggccaccaccgcggaaagaaactgg

SEQ ID NO: 171473 - DNA, 80 bp, synthetic construct
  source 1..80: mol_type = other DNA
tattaaaataagagtaggggcacctaaaatgttcacggataagtggtacccccaaacagacctctgtgacatggtgcttc

SEQ ID NO: 171474 - DNA, 80 bp, synthetic construct
  source 1..80: mol_type = other DNA
catagaacacagtgataagaaaaagttgtttagtgtgtgggaaattaactacacagatacagtgcaactcaggagaaagt

SEQ ID NO: 171475 - DNA, 80 bp, synthetic construct
  source 1..80: mol_type = other DNA
cccaggtgactcgattgtaatcgatggcaaggaagttgaaattctggatgcagaagcgttagaagatcaatcaggagtga

SEQ ID NO: 171476 - DNA, 80 bp, synthetic construct
  source 1..80: mol_type = other DNA
tgagatgcccaaattttttcttccctatacctgcacccaaaccagtgaacacccgttctgctggtttagtggatgaaagt

SEQ ID NO: 171477 - DNA, 80 bp, synthetic construct
  source 1..80: mol_type = other DNA
aaagagctattaaataacatgggattctctactccagaagaaaagttccaaaaagaccctccattcaaatggatggggta

SEQ ID NO: 171478 - DNA, 80 bp, synthetic construct
  source 1..80: mol_type = other DNA
attggatcaaggcaaaggcgtgcgacctattagaaatcccctacgtcatgaaacaaggagatagttggttaaagaagttc

SEQ ID NO: 171479 - DNA, 80 bp, synthetic construct
  source 1..80: mol_type = other DNA
ttcgagtcacagtatacgcctggaaccactacagatgaagcgcgaaagttctgcccaatagattacctatttgggtcagg

SEQ ID NO: 171480 - DNA, 80 bp, synthetic construct
  source 1..80: mol_type = other DNA
cgccccccacggacgagcgcccgccggcgtctaccccagtgaggcgcctgctgccgctgccctcctaccccggcgagggt

SEQ ID NO: 171481 - DNA, 80 bp, synthetic construct
  source 1..80: mol_type = other DNA
ttatatgaatcagggtcattgggcctgcggggaactgagccagtaggatattaggcaagggtgacacagtgcccatgcat

SEQ ID NO: 171482 - DNA, 80 bp, synthetic construct
  source 1..80: mol_type = other DNA
acctgctgcgcatctaaaggaaaaacataacaatcttgtgaaccagaaagatacccagagcaaaagcaataaagtacagg

SEQ ID NO: 171483 - DNA, 80 bp, synthetic construct
  source 1..80: mol_type = other DNA
tgggtaacgcgaagtgctgccccctcatatgtggaaaggctgttctctttagagataggaatacaggagagcatttgtca

SEQ ID NO: 171484 - DNA, 80 bp, synthetic construct
  source 1..80: mol_type = other DNA
acgcaaaagacttgtactgactcagtggcagcccgcagtgcgcagaaggtgtaaaattatagggtacctacccatagtgt

SEQ ID NO: 171485 - DNA, 80 bp, synthetic construct
  source 1..80: mol_type = other DNA
gctacacagcaggggaggtaagaagagccatcagaggagaacagttattatcctgctgcaacttcccatcggctcataaa

SEQ ID NO: 171486 - DNA, 80 bp, synthetic construct
  source 1..80: mol_type = other DNA
agcaatagattttataccttggaatcagttcagtggaaggcctccagcagaggttggtggtggaagctaccagatgcact

SEQ ID NO: 171487 - DNA, 80 bp, synthetic construct
  source 1..80: mol_type = other DNA
ggatcatttcagctgtcactataataatcagaaacagtgcagatccacatacaatagtagccacactagctctattgggc

SEQ ID NO: 171488 - DNA, 80 bp, synthetic construct
  source 1..80: mol_type = other DNA
ggaatttgtgggaccagcatattcaacaccatgatcaacaacataataatcagaactttaatcctggaaacatacaaagg

SEQ ID NO: 171489 - DNA, 80 bp, synthetic construct
  source 1..80: mol_type = other DNA
gacccccgagaagcaagcttacagacacccctttctacccctactgcaaaaatcaatacaatgtaacctttcagcttaac

SEQ ID NO: 171490 - DNA, 80 bp, synthetic construct
  source 1..80: mol_type = other DNA
ccttttcctagccagaggtggctggttaaacaatacctattgtaacaaaacatctaagacacaacaaccgcacacctggt

SEQ ID NO: 171491 - DNA, 80 bp, synthetic construct
  source 1..80: mol_type = other DNA
atctaaaaacagctgttctgtccaaatacaaaggaaatgtggaaattgaaatgagtgagaatatgcagattgctgtagaa

SEQ ID NO: 171492 - DNA, 80 bp, synthetic construct
  source 1..80: mol_type = other DNA
ggatacatacccgaggagtacagatttaaatggtacatttgcatgttccaccagcaaggctggatgaatgacatagtgca

SEQ ID NO: 171493 - DNA, 80 bp, synthetic construct
  source 1..80: mol_type = other DNA
tggcgagggtggactctttcatgcccattaacaatataccaaccgaggaaggtaaggtgagtatgtacaacattaccgtc

SEQ ID NO: 171494 - DNA, 80 bp, synthetic construct
  source 1..80: mol_type = other DNA
tttagaaacaaattatacttcactaatggaccaactgaaaaacaaatttggaacccccaaagggaccccaataacaaatg

SEQ ID NO: 171495 - DNA, 80 bp, synthetic construct
  source 1..80: mol_type = other DNA
aagcaatgccagcacccacaggtcagaacacccaggtgagtagccaccaattagacactggaagggttccagcgcttcaa

SEQ ID NO: 171496 - DNA, 80 bp, synthetic construct
  source 1..80: mol_type = other DNA
caacagattatcaaaaacccgtgcaaaaaagaagaatctacattcacctatcccagtagagagcctcgccagttacaagt

SEQ ID NO: 171497 - DNA, 80 bp, synthetic construct
  source 1..80: mol_type = other DNA
tggatatgtcaagggcagtcgagatgtgcaaaccagacggttgtgcccccaccaattacaaaagatgctgcccattgatc

SEQ ID NO: 171498 - DNA, 80 bp, synthetic construct
  source 1..80: mol_type = other DNA
tgttcttagtgacaaagaccctagattggaagtggattttaatacagcactcttttctaaatataaaggtaatactaatt

SEQ ID NO: 171499 - DNA, 80 bp, synthetic construct
  source 1..80: mol_type = other DNA
ccagcccaacctccctggtcccgccgcaaaagggccccgttcccgcacccccccgtccccgtggccagcagcttccccgt

SEQ ID NO: 171500 - DNA, 80 bp, synthetic construct
  source 1..80: mol_type = other DNA
tcgtcacgtgacctgacgtcacagccgccattttgtgctgtccgccatcttgtgacttccttccgctttttgtaaaaaaa

SEQ ID NO: 171501 - DNA, 80 bp, synthetic construct
  source 1..80: mol_type = other DNA
gcacaagtatcatcacaaaaggttggagcacatgaaaacactaatgttgctactggtggctccactgttaattataccac

SEQ ID NO: 171502 - DNA, 80 bp, synthetic construct
  source 1..80: mol_type = other DNA
gccggcgagacgagcttgacgggcgctcgcacaaaacagcagagggagacggcgcagccagtgtttttaaagataaaaca

SEQ ID NO: 171503 - DNA, 80 bp, synthetic construct
  source 1..80: mol_type = other DNA
tggtattttggtgagcacactttcaacaatggagatgtctggagaaccccactcacatttccaaagaaagggcatggcat

SEQ ID NO: 171504 - DNA, 80 bp, synthetic construct
  source 1..80: mol_type = other DNA
aaaggaaaccagggccgggatgtgaggcctcagggccccatcctgatcaaagagggcctcgctgaccccggatatgacat

SEQ ID NO: 171505 - DNA, 80 bp, synthetic construct
  source 1..80: mol_type = other DNA
cttctacgtcctcatcttcctccaggtcaaccaggagacagaggcccgtctctacccaagccctcatctcctccgtttta

SEQ ID NO: 171506 - DNA, 80 bp, synthetic construct
  source 1..80: mol_type = other DNA
ttcttgtttttctttaatactgcttatggtgacattatatattgatatagtgtcatcatgggtgcacaggtttccagaca

SEQ ID NO: 171507 - DNA, 80 bp, synthetic construct
  source 1..80: mol_type = other DNA
acctgaaagggatcttgctatcgtgagtacaggtgctcacggttcagaaactgttccgcaatgcaattgtatgtcaggag

SEQ ID NO: 171508 - DNA, 80 bp, synthetic construct
  source 1..80: mol_type = other DNA
acaatttgatggagatcgctgaggtagactcggttgtccctgtcaacaacaccaccacgcacatggaaggaactgatgca

SEQ ID NO: 171509 - DNA, 80 bp, synthetic construct
  source 1..80: mol_type = other DNA
acacatacaatgcaaaagaaaacaaagagaacctaaaacaattaagacaagcctactttaaacagctaacctctgaaggg

SEQ ID NO: 171510 - DNA, 80 bp, synthetic construct
  source 1..80: mol_type = other DNA
tttgagaatggggttcttccctaattgtaacgtagatgaaacttcagagattgacaatgctatatacacaatttgtgaca

SEQ ID NO: 171511 - DNA, 80 bp, synthetic construct
  source 1..80: mol_type = other DNA
ggcagaaatggtccatggcagtccactatgctgggccagctgtgcgggtattatactcaatggtctggctcactggaggt

SEQ ID NO: 171512 - DNA, 80 bp, synthetic construct
  source 1..80: mol_type = other DNA
acagggtcagatctttgactctagggaattcaactatcacaacgcaggaaagtgccaacgtagtagttggttacggtaga

SEQ ID NO: 171513 - DNA, 80 bp, synthetic construct
  source 1..80: mol_type = other DNA
aagtcaggattgccagagaaagagtggaaggcaaaactgaaagcaagagggataccatatagtgaataacaggaacaacc

SEQ ID NO: 171514 - DNA, 80 bp, synthetic construct
  source 1..80: mol_type = other DNA
caatgacacacttcaaaacgttattatcttctgtctatacgtcggtcagtttttggcctacgttcgcgcttgtctgaatc

SEQ ID NO: 171515 - DNA, 80 bp, synthetic construct
  source 1..80: mol_type = other DNA
aaacagcttcgttgcatgggatataaatttccaggagcacgctcaggtcaggaagaagtttgaaatgtttacttatgtta

SEQ ID NO: 171516 - DNA, 80 bp, synthetic construct
  source 1..80: mol_type = other DNA
taaaatcacctttgtattttgtggatctgccatgacaactgggaagttcctcctttcgtacgctccaccgggtgccggta

SEQ ID NO: 171517 - DNA, 80 bp, synthetic construct
  source 1..80: mol_type = other DNA
agtatttttaatactatgataaacaatgtgattataagaactctagtcctagatgcatacaaacacatagatttagacaa

SEQ ID NO: 171518 - DNA, 80 bp, synthetic construct
  source 1..80: mol_type = other DNA
aagatagagaaaagcaagttagcactttcattaagcctagaactgacttgagggaaattagaacatttggacctagtgac

SEQ ID NO: 171519 - DNA, 80 bp, synthetic construct
  source 1..80: mol_type = other DNA
agatattattcagcaagtagcttcgaatgcattgcaactgtctcaacccactagaccagcactaccacctgcggagcaaa

SEQ ID NO: 171520 - DNA, 80 bp, synthetic construct
  source 1..80: mol_type = other DNA
tttggcaacggcaagtggattgacggacgcgggcacatagaaccctactggctgtgcagatggaggccagagatgctttt

SEQ ID NO: 171521 - DNA, 80 bp, synthetic construct
  source 1..80: mol_type = other DNA
cgacacccctgcaacggacagacctcctcaggcaatagagtgcctcgctcagtacaagcagttgacccgaaatacgtctc

SEQ ID NO: 171522 - DNA, 80 bp, synthetic construct
  source 1..80: mol_type = other DNA
ggtattgatgacgttatagacaaggttattaccaatgcactgcagttatcgcaaccaactagacctgtgaacgaggcagc

SEQ ID NO: 171523 - DNA, 80 bp, synthetic construct
  source 1..80: mol_type = other DNA
cgcgacgcggcgcttgcggcgtgttgcgcccggcgctatgtgcgtttcggcagtccggcacgcgttgtcccacggtcttt

SEQ ID NO: 171524 - DNA, 80 bp, synthetic construct
  source 1..80: mol_type = other DNA
gcctgttttaatcccccccccccctgacgtaatttagaagaatgaactatatggtcaatagatagctcggtgaaccagct

SEQ ID NO: 171525 - DNA, 80 bp, synthetic construct
  source 1..80: mol_type = other DNA
ttggctaaactttgatggcacactattaggaaacctacttatattcccacatcaattcataaatttgcgcagtaacaact

SEQ ID NO: 171526 - DNA, 80 bp, synthetic construct
  source 1..80: mol_type = other DNA
gtgggacctcagacgcggcctatttggcagacaagctattaagagagtgtcagcaaaaccaacagctgatgagattttgt

SEQ ID NO: 171527 - DNA, 80 bp, synthetic construct
  source 1..80: mol_type = other DNA
ttgtgcagtatgaagactataatggaaagaaaaactttaacacatggaaaataaacttgcaagagatggcacaaattaga

SEQ ID NO: 171528 - DNA, 80 bp, synthetic construct
  source 1..80: mol_type = other DNA
atttacaggagggtcagagtacctagaataccatggaggcctgtacagctccatatggctatcagcaggccgatcctact

SEQ ID NO: 171529 - DNA, 80 bp, synthetic construct
  source 1..80: mol_type = other DNA
ccctatgagctagatcctagtgagatatccaagagagcccagcactatggcttgaccataactccaccagataagggaga

SEQ ID NO: 171530 - DNA, 80 bp, synthetic construct
  source 1..80: mol_type = other DNA
ggtgttgttccttatggcgagataaacttgagtggaaatcccacatgcagacttatgaaatatgactaccctaccaaacc

SEQ ID NO: 171531 - DNA, 80 bp, synthetic construct
  source 1..80: mol_type = other DNA
catcacctccaaggcccagttatccattagtaggcccaaaacaatatctgttccaggaacgcttgccacaggtgtggtct

SEQ ID NO: 171532 - DNA, 80 bp, synthetic construct
  source 1..80: mol_type = other DNA
cacgttggttttgtgactgccgcggtgacggtgattataatttgcttactgatctactttaacgttccagcaaccctaag

SEQ ID NO: 171533 - DNA, 80 bp, synthetic construct
  source 1..80: mol_type = other DNA
ggcaccaaagccacaccagaaacagaacaacaagaccaaattaaaaactggctaacaaaagcctttcagcaagcaggata

SEQ ID NO: 171534 - DNA, 80 bp, synthetic construct
  source 1..80: mol_type = other DNA
gacctgctctccacagggaacactcagactttttcagaaaacactttttataaaaattttttaaagaaagccatgccaca

SEQ ID NO: 171535 - DNA, 80 bp, synthetic construct
  source 1..80: mol_type = other DNA
aactccctaaccaacatggggacattatatattcgacaggtcaatgggcctaacccagtaccaatcaccagcacagtacg

SEQ ID NO: 171536 - DNA, 80 bp, synthetic construct
  source 1..80: mol_type = other DNA
accacatacacgtgatgtaagtttagccagtttattgttacaccaatgccccgaaagtctccccctgtccctttgggtct

SEQ ID NO: 171537 - DNA, 80 bp, synthetic construct
  source 1..80: mol_type = other DNA
ttatatagtgggctttgaccccataataatatgtggactgaacaggacttcttttaactctacctcacacgctgacgacc

SEQ ID NO: 171538 - DNA, 80 bp, synthetic construct
  source 1..80: mol_type = other DNA
ggcctcgggggggtcgggagctttattaaacagactccgagtcgctcttggactctgaggtgtcgtacagcaacgaaagt

SEQ ID NO: 171539 - DNA, 80 bp, synthetic construct
  source 1..80: mol_type = other DNA
ggtaacccgacaactaggttacttaagtatgattatcccacaaaaccaggtcaatgtggtggtgtcatcttgaacacagg

SEQ ID NO: 171540 - DNA, 80 bp, synthetic construct
  source 1..80: mol_type = other DNA
ttctacccagaggttcccaaggtgccccctcaattttctgtaagttttaaacttggctggaaataaaaatgcaaggcctt

SEQ ID NO: 171541 - DNA, 80 bp, synthetic construct
  source 1..80: mol_type = other DNA
caatttcacactaatgatcatcccgtttgctaagctagaatacgtctctggtgcttcgagcgtggtgccaatcacagtga

SEQ ID NO: 171542 - DNA, 80 bp, synthetic construct
  source 1..80: mol_type = other DNA
aaactgtgtaacaccactcacatatacaaggaccagatatacatggtagaaggcggaatgccatctggtatatgtggcac

SEQ ID NO: 171543 - DNA, 80 bp, synthetic construct
  source 1..80: mol_type = other DNA
atggttagattcgttttagacaactctaattgaaacccaagttatagtcactttcacttgggtttcaattagagttgtct

SEQ ID NO: 171544 - DNA, 80 bp, synthetic construct
  source 1..80: mol_type = other DNA
accatttaggaaaatacagtgctatatttttaagtccctacagaacaaacactcagtttgacacagcataccaagatgta

SEQ ID NO: 171545 - DNA, 80 bp, synthetic construct
  source 1..80: mol_type = other DNA
gagcgtcttgcacactccgtagagcagctgcttgcgcagcacgcacgggtcgcgcagcacctggtgcatgctctggccgc

SEQ ID NO: 171546 - DNA, 80 bp, synthetic construct
  source 1..80: mol_type = other DNA
tacctgattctcccaccaacgttgagcgccacttgaatagagctgtcttgattatgcagtctgtagccaccgtggtagca

SEQ ID NO: 171547 - DNA, 80 bp, synthetic construct
  source 1..80: mol_type = other DNA
attgcaggcgaaaatgtccaccaaagggtaactgtgagtttcccacatgttttacattatcgctgatttctagaacgaca

SEQ ID NO: 171548 - DNA, 80 bp, synthetic construct
  source 1..80: mol_type = other DNA
ttgactggaaatgaaactggtggtgaaataattactaaagttgctgatgatgcttctaatcttttaggaccaaacagtta

SEQ ID NO: 171549 - DNA, 80 bp, synthetic construct
  source 1..80: mol_type = other DNA
atctctctggctgtaagcggcatcgagatggacgagaatgggctcaaggccctgctggacaaacaggctggcgacagcct

SEQ ID NO: 171550 - DNA, 80 bp, synthetic construct
  source 1..80: mol_type = other DNA
accaacaactaggaaagaggccatgctgggtacccatgtaatttgggatatcggattacaatccagcgtgacattggtcg

SEQ ID NO: 171551 - DNA, 80 bp, synthetic construct
  source 1..80: mol_type = other DNA
ttggaaatgctcgctgttgtccatttatctgtggtaaagctgtcaatttcagagatcgtaatacctgtcaaacttacact

SEQ ID NO: 171552 - DNA, 80 bp, synthetic construct
  source 1..80: mol_type = other DNA
aaaatcaacctgcaggagatggcccagatcagaaggaagaatgaactattcacatatctcagattcgattcagagattac

SEQ ID NO: 171553 - DNA, 80 bp, synthetic construct
  source 1..80: mol_type = other DNA
ggccgaagccagtgaaatgtttactacactgtcatcagaatatatgatgtatattatttcctccaaactcctcaccatag

SEQ ID NO: 171554 - DNA, 80 bp, synthetic construct
  source 1..80: mol_type = other DNA
ctactttgaatgggaaactgcacaatctacaaaccatacttttaatgtacaacacgtaccccacgcaggcacaaaaccta

SEQ ID NO: 171555 - DNA, 80 bp, synthetic construct
  source 1..80: mol_type = other DNA
aagtttgagtgggggtgagactgcaaggaaatttagtgcaatcgcatccaacggaacccatacggttcaaagcatagtga

SEQ ID NO: 171556 - DNA, 80 bp, synthetic construct
  source 1..80: mol_type = other DNA
tttttgtaaaaaggcgccaaaaaacggccgcggcgagggcgcgcgcgctacgcgcgcgcgccccggggcgcgtggttgcc

SEQ ID NO: 171557 - DNA, 80 bp, synthetic construct
  source 1..80: mol_type = other DNA
catccaaccattttgataaatggtgatcgggattcaaacatgcacgtctaccattgggaggcaccaaataatgttgatgt

SEQ ID NO: 171558 - DNA, 80 bp, synthetic construct
  source 1..80: mol_type = other DNA
acatgaagactgttggacctagtgatctatatgtacatgtgggtaatttaatatatagaaatttacatttattcaattct

SEQ ID NO: 171559 - DNA, 80 bp, synthetic construct
  source 1..80: mol_type = other DNA
caagagacgctgtttaacaacattcgctggttggctataaaggctcgaaagtttgcacccttgtacgccagtgaagcgcg

SEQ ID NO: 171560 - DNA, 80 bp, synthetic construct
  source 1..80: mol_type = other DNA
ccagcaggcaatgctacaaatactttatacacaggagtaggcgcaaacaatgcaaacaaagagaactccataactattgc

SEQ ID NO: 171561 - DNA, 80 bp, synthetic construct
  source 1..80: mol_type = other DNA
gacctctgtgatgttcctcttctaaccgtccatgcaaccgcagcggatctgcaatatccgttcggctcaccactaacgaa

SEQ ID NO: 171562 - DNA, 80 bp, synthetic construct
  source 1..80: mol_type = other DNA
aatcacaatatgttggcaccacctacaattacttcattaccagctatgaatagaagattcttttttgacctagacattgt

SEQ ID NO: 171563 - DNA, 80 bp, synthetic construct
  source 1..80: mol_type = other DNA
gctgctctggccggttgaaggcttccacggcccgctgctgaggattgcgcataacaaaggtggcaacatcctggtgcatg

SEQ ID NO: 171564 - DNA, 80 bp, synthetic construct
  source 1..80: mol_type = other DNA
taacaataaacacttacaaaaactggggaaactggtggaaatatgacttttatgccaccaaggcagacagcctatatggc

SEQ ID NO: 171565 - DNA, 80 bp, synthetic construct
  source 1..80: mol_type = other DNA
gcaatacaacagttattcaagagtcatgtgacaaacattattgggacagcttaaggtttaggtattgtgctcccccagga

SEQ ID NO: 171566 - DNA, 80 bp, synthetic construct
  source 1..80: mol_type = other DNA
gtttatcttccgggttagagttcaccgctacgtcataagtcacgtggggacggctgctgtaaacccggaagtagctgacc

SEQ ID NO: 171567 - DNA, 80 bp, synthetic construct
  source 1..80: mol_type = other DNA
tctacagacacaacactacagactttatagtcagctggacaaaaaacccccctatgaaaactaaccaatacacggcccct

SEQ ID NO: 171568 - DNA, 80 bp, synthetic construct
  source 1..80: mol_type = other DNA
acaagcacaacaccagaggttggagtggtacaaaaggcagtgtacaacgcaggtatgggagttggtgttgggaatttaac

SEQ ID NO: 171569 - DNA, 80 bp, synthetic construct
  source 1..80: mol_type = other DNA
accatagttatcagaaacagttcagacttacccaccgttatggccactctagcattactgggatgtaatggatccccatg

SEQ ID NO: 171570 - DNA, 80 bp, synthetic construct
  source 1..80: mol_type = other DNA
taaatggttggtgcgtattattagtgctctgaccataatgattagaaactcatcagacacagcaacagtgttggccacac

SEQ ID NO: 171571 - DNA, 80 bp, synthetic construct
  source 1..80: mol_type = other DNA
acaccagtgccttcatgcacccaggactcatgatgcagagaaaaaagagaatactaatcccctcctttgacacaaggccc

SEQ ID NO: 171572 - DNA, 80 bp, synthetic construct
  source 1..80: mol_type = other DNA
gcatagtgataccacctgatgtccctactaccagcaccatcctctgcttcgtgtcagcctgcaatgacttctcagtgaga

SEQ ID NO: 171573 - DNA, 80 bp, synthetic construct
  source 1..80: mol_type = other DNA
aagaagagggacattgtgaacaagactactagagatgtagttaaattgcaggaaatgttagatcgatatggtgttgattt

SEQ ID NO: 171574 - DNA, 80 bp, synthetic construct
  source 1..80: mol_type = other DNA
aactttcagtcgccatgtgcactgcctgagtttgatgtaacgccccctttacatataccaggtgaagtaaagaacatgat

SEQ ID NO: 171575 - DNA, 80 bp, synthetic construct
  source 1..80: mol_type = other DNA
caggccaaacaacaggagtaactcctacatggcaagaagtacaaaacacaaccaatttagatgcctcaggcacaaaccaa

SEQ ID NO: 171576 - DNA, 80 bp, synthetic construct
  source 1..80: mol_type = other DNA
tcacatgatagatactaccctattaaagttgaagcacatgactggtatagtatagaggaaacaatatactaccctaagca

SEQ ID NO: 171577 - DNA, 80 bp, synthetic construct
  source 1..80: mol_type = other DNA
gtcagggtctcttgagagtatgccgctgtggccaagcgaggccccaaattaaatagtgatgccaaagactgtaggtaggt

SEQ ID NO: 171578 - DNA, 80 bp, synthetic construct
  source 1..80: mol_type = other DNA
gtggcccacatatttgagagatgaagaggctacagcggaagatcaacccacacgctgttacgaagccacatgtcgctttt

SEQ ID NO: 171579 - DNA, 80 bp, synthetic construct
  source 1..80: mol_type = other DNA
gacgcaggagacgcagaaaactgactcttaagatgtggaatccatccacaattagagcatgtaacataaagggtgctata

SEQ ID NO: 171580 - DNA, 80 bp, synthetic construct
  source 1..80: mol_type = other DNA
gcaccacctaccgtcacacttcctgaagccatagaccgtagattctttttagattgtgatgttaaagttctctcaggatt

SEQ ID NO: 171581 - DNA, 80 bp, synthetic construct
  source 1..80: mol_type = other DNA
gttgcacttggatgaatggcactggctacgttaaaacctgtggagcgcccccgtgccagcttgggcctgtaggcaatagc

SEQ ID NO: 171582 - DNA, 80 bp, synthetic construct
  source 1..80: mol_type = other DNA
aacaccatatccagcactacaaatacattgaccgcatattctataactacgttaaacacctcgacttcatcttcaactct

SEQ ID NO: 171583 - DNA, 80 bp, synthetic construct
  source 1..80: mol_type = other DNA
tgcctggcctgcactctccaccgaagaaacggactagcatgagccactggttgcctcccctgcaaaatgtctcacagagg

SEQ ID NO: 171584 - DNA, 80 bp, synthetic construct
  source 1..80: mol_type = other DNA
acaagggtgttgggatgaatgattatgtgatgacagctgctaaacactatgctgcacagctctatccattagacatcaac

SEQ ID NO: 171585 - DNA, 80 bp, synthetic construct
  source 1..80: mol_type = other DNA
gacgtggtcacgccgcggacacgtcgattaggagacgaactggggcgacgccgctgctgtggcagcgaccgtcgtagcga

SEQ ID NO: 171586 - DNA, 80 bp, synthetic construct
  source 1..80: mol_type = other DNA
agacatcaatcgttttaagatatcttccttctgtttcttcagaatctctttacctcgataagatagcacggtatacggcc

SEQ ID NO: 171587 - DNA, 80 bp, synthetic construct
  source 1..80: mol_type = other DNA
atgttcctgtgactgtcacgatcgctccaatgtgtgccgagtacaacggcctgaggttggcgtaccagcaggggttgcca

SEQ ID NO: 171588 - DNA, 80 bp, synthetic construct
  source 1..80: mol_type = other DNA
ctacagagacaaacacacagactacatagtgcagtatgacatctcagctccattcagcatagacaaagacagcagtccca

SEQ ID NO: 171589 - DNA, 80 bp, synthetic construct
  source 1..80: mol_type = other DNA
tgttctcagccacaatcactgaggacagagggatagtggcgggtacaggggactctgggggtgacaccagagaatcagag

SEQ ID NO: 171590 - DNA, 80 bp, synthetic construct
  source 1..80: mol_type = other DNA
ctcaccctcgttattcccaatagcatagcggcaaggatctgtgtgagggagtccaagatgtccgtgtttctggctactgc

SEQ ID NO: 171591 - DNA, 80 bp, synthetic construct
  source 1..80: mol_type = other DNA
tactttttggatatacagactggtgtaaaaaggacactaataactgggacttaccactaaactacagactagtactaata

SEQ ID NO: 171592 - DNA, 80 bp, synthetic construct
  source 1..80: mol_type = other DNA
agacgcaaagcaatctccacataaatccccgcgtgcttggccatgcataaataaagtgtacatgtttccccccgagaaaa

SEQ ID NO: 171593 - DNA, 80 bp, synthetic construct
  source 1..80: mol_type = other DNA
cgccaaagccccccgtccccggtgccacccccgtccctcagcgtaaaagccccggctgaaacagcgcaaaagcccgcccg

SEQ ID NO: 171594 - DNA, 80 bp, synthetic construct
  source 1..80: mol_type = other DNA
taactggtggggaaatcctatcattgaacagattgttaaagacccctgcacccagtccacgttcgaaatacccggtaccg

SEQ ID NO: 171595 - DNA, 80 bp, synthetic construct
  source 1..80: mol_type = other DNA
atgtaaaaagattccactatacaaagagcaggttaaggcttttgccaccgcatcagaggaagcacaagatgaattgttag

SEQ ID NO: 171596 - DNA, 80 bp, synthetic construct
  source 1..80: mol_type = other DNA
cacagggagagatagtaaacaaatgcaaggtacaggatgtgggattgaagcccatcaacaccccagagcactcaaagttg

SEQ ID NO: 171597 - DNA, 80 bp, synthetic construct
  source 1..80: mol_type = other DNA
tttcctatgttctttgctgatgttgggtcagttaccccctacggtgaaattaacttgagtgggaaccccacttgtaggtt

SEQ ID NO: 171598 - DNA, 80 bp, synthetic construct
  source 1..80: mol_type = other DNA
ctgctggtaccagactaacattgtagtccctgctgatgcgcaaagttcatgttacatcatgtgcttcgtatcagcgtgta

SEQ ID NO: 171599 - DNA, 80 bp, synthetic construct
  source 1..80: mol_type = other DNA
ctttgatagcatggcagagaagcaacgctgagtttgagcagaatttggaaaacgctcagtggtttgcttttatgcatggc

SEQ ID NO: 171600 - DNA, 80 bp, synthetic construct
  source 1..80: mol_type = other DNA
acttagagccagctccaccaccccaccaatagtatctataactgttacaattgcaccatataagtctgagttctctggtg

SEQ ID NO: 171601 - DNA, 80 bp, synthetic construct
  source 1..80: mol_type = other DNA
attcctccaggaggccccatacccacgtcagtggacgattttagctggcagacatccacgaaccctagtgtgttctggac

SEQ ID NO: 171602 - DNA, 80 bp, synthetic construct
  source 1..80: mol_type = other DNA
catctactcacgcagtacacgtcccatttccaggcactaaacccactaaagacttttgggaatacagaataggaatgtac

SEQ ID NO: 171603 - DNA, 80 bp, synthetic construct
  source 1..80: mol_type = other DNA
gggccaggaacttctatcttggtgtcctggttaaaaaacgtctagtgggccaaacccgggtgggatccccggtttccttt

SEQ ID NO: 171604 - DNA, 80 bp, synthetic construct
  source 1..80: mol_type = other DNA
acggaccacgcgagtggcggcggtctagatgccgctgccgggagtggtcataacggcggtagtgatcgggtttctccctc

SEQ ID NO: 171605 - DNA, 80 bp, synthetic construct
  source 1..80: mol_type = other DNA
ttcaagaaaaggtaataaatgttttacacacttaacaggcatatttagcagcacatacctaaacactggcagaatagctc

SEQ ID NO: 171606 - DNA, 80 bp, synthetic construct
  source 1..80: mol_type = other DNA
gttacggcccggcggaaagaaaaaatacaagttaaaacatattgtgtgggcagcgaatgaattggacagattcggattgg

SEQ ID NO: 171607 - DNA, 80 bp, synthetic construct
  source 1..80: mol_type = other DNA
aaaccttacaaaaacattatccacaggtaacaactcaatatatggctttgcatcctacaacccaattaaagaaaaacttc

SEQ ID NO: 171608 - DNA, 80 bp, synthetic construct
  source 1..80: mol_type = other DNA
gacaagcccatctacccctggcttcctcgccccgaacccgaaataaaagtgagctttaagctcggtttcaaataaactag

SEQ ID NO: 171609 - DNA, 80 bp, synthetic construct
  source 1..80: mol_type = other DNA
cggcgcgccctttgcggccgccgccttacataggcaggcgaccaaacgcggaacccgaaataaaaacgttctacacagag

SEQ ID NO: 171610 - DNA, 80 bp, synthetic construct
  source 1..80: mol_type = other DNA
caagtcttaccgatcaccatttctattgctcccataaaatcagagttttcaggggctaggcaggccattaaacaaggttt

SEQ ID NO: 171611 - DNA, 80 bp, synthetic construct
  source 1..80: mol_type = other DNA
ccagtcaattcgaaagaagttcccgcgctaactgctgtagaaacaggtgccactagtcaggtagaaccttcagatgtgat

SEQ ID NO: 171612 - DNA, 80 bp, synthetic construct
  source 1..80: mol_type = other DNA
cccaagagagataccatctcaacatatggtttaggacccaggtttgggggtgtatgtactggtagtgtcaaagtgatgaa

SEQ ID NO: 171613 - DNA, 80 bp, synthetic construct
  source 1..80: mol_type = other DNA
ggtaagataggttggtagattaaggtcagacttttattaagtggccaatttatgggtttttattattgcaaagtgggggg

SEQ ID NO: 171614 - DNA, 80 bp, synthetic construct
  source 1..80: mol_type = other DNA
acatgtgccccttgtatgctgcggagaataagagagtgaccaatatgctcaaagaaattaaaacaatgacagcatacaag

SEQ ID NO: 171615 - DNA, 80 bp, synthetic construct
  source 1..80: mol_type = other DNA
gtgtcgaaccttaatactcacggtgcctttggacaacaatcgggagccgtgtatgtggggaattatagggtggtcaacag

SEQ ID NO: 171616 - DNA, 80 bp, synthetic construct
  source 1..80: mol_type = other DNA
cacccggagctagtgttccgaagaccagaaaggatgctatgctaggaacccacgtcatatgggatgtaggcctgcaatca

SEQ ID NO: 171617 - DNA, 80 bp, synthetic construct
  source 1..80: mol_type = other DNA
agcaggacccatacaccagtgcagggtacatcacttgctggtaccaaaccaacatcgttgttccccccggtgcaccaacc

SEQ ID NO: 171618 - DNA, 80 bp, synthetic construct
  source 1..80: mol_type = other DNA
caccacagtcacaacatttccaccagactttgctaacagaaactacctctcacacgactatggcatatttagcccctact

SEQ ID NO: 171619 - DNA, 80 bp, synthetic construct
  source 1..80: mol_type = other DNA
agttctcagacgtaggtggctggatttgttttgaatgatttatatatagagaatatatttgattagaatttgtactctat

SEQ ID NO: 171620 - DNA, 80 bp, synthetic construct
  source 1..80: mol_type = other DNA
agttttatgtgtgtgtgtgacagcttcagtacaggcaagttccttatagcatatacccccccaggaggaggtcacccaag

SEQ ID NO: 171621 - DNA, 80 bp, synthetic construct
  source 1..80: mol_type = other DNA
acgccagcccgagccgctaaggccgcatgcccctgccgcccaactgaacacgcatatcccgctcaactgcgttttgccac

SEQ ID NO: 171622 - DNA, 80 bp, synthetic construct
  source 1..80: mol_type = other DNA
gcaagaatatcaacaaacagctgcacaacacccaatttttacacactggacaggaatatttggacccccatttttagact

SEQ ID NO: 171623 - DNA, 80 bp, synthetic construct
  source 1..80: mol_type = other DNA
tccgtggagtagtggcgggtggaggatgaaacgctcttttccttcaccgctaccaccgcctcctcctcctcttccgtcgc

SEQ ID NO: 171624 - DNA, 80 bp, synthetic construct
  source 1..80: mol_type = other DNA
tcattggaggtgttgtttcagggtccagtatacaaggatttggagattgatgtttgtaatacaccacctccagaatgcat

SEQ ID NO: 171625 - DNA, 80 bp, synthetic construct
  source 1..80: mol_type = other DNA
cgggtgacgacgagccgctgcaagtccgtgtcggaaatcgcagcggcagtggcgccgtcgccaccgtacaggtgataggc

SEQ ID NO: 171626 - DNA, 80 bp, synthetic construct
  source 1..80: mol_type = other DNA
caccacaggtgtgtacttctgtgcctccaggaacaaacattaccctgtgagttttgagggaccaggtctcgtggaagttc

SEQ ID NO: 171627 - DNA, 80 bp, synthetic construct
  source 1..80: mol_type = other DNA
gctgtgcgtactccacaggcgccatcttccatgagctctacctggcgggtgccccgcggcgatgtctccgcccgcgagct

SEQ ID NO: 171628 - DNA, 80 bp, synthetic construct
  source 1..80: mol_type = other DNA
ccgccaccgggcgcgccccgccccgaggctccgcccgctctgaggcccgcgctgcccgcgctgccgccccccgagggccg

SEQ ID NO: 171629 - DNA, 80 bp, synthetic construct
  source 1..80: mol_type = other DNA
aattgagaagaaaattcgaacttttcacgtacatgcgttttgacatggagataacgttcgtcataacgagcaggcagtta

SEQ ID NO: 171630 - DNA, 80 bp, synthetic construct
  source 1..80: mol_type = other DNA
cggacacgcgctgacggaagggcgagcccagtagcagacgcgcgaactcgcccatggaggcgtgcgtggggatgatggtg

SEQ ID NO: 171631 - DNA, 80 bp, synthetic construct
  source 1..80: mol_type = other DNA
tccaggtgagatctacggacgagatgggtggtcagatatttgggttctccttacaaccaggagcatcaagtgtgctgcag

SEQ ID NO: 171632 - DNA, 80 bp, synthetic construct
  source 1..80: mol_type = other DNA
cccgactgtgttttaggagcttgtacatagcggtgcctatggtggcaggaatcatcacccggttgctgggggcctggatg

SEQ ID NO: 171633 - DNA, 80 bp, synthetic construct
  source 1..80: mol_type = other DNA
ttatcaccgcccacggcggcgtgggtatgcgccgctgtcctaccggctctcgtcccaccccgtcccggccccaccggcat

SEQ ID NO: 171634 - DNA, 80 bp, synthetic construct
  source 1..80: mol_type = other DNA
gcaacagaaccataacaactattggacagccagaaataatcaaacatttagcgaatcaaaggcactgagccacaaaacag

SEQ ID NO: 171635 - DNA, 80 bp, synthetic construct
  source 1..80: mol_type = other DNA
ttgctgcactgggtcaagataatgggcatgttgttttacagtacatgtatgtaccaccaggggcacctataccaaagact

SEQ ID NO: 171636 - DNA, 80 bp, synthetic construct
  source 1..80: mol_type = other DNA
caagtcagtgacccggcaaggctcggaccgaaaacaatttttcaccagtgggaccaaagacgtggactgtttacaaaaag

SEQ ID NO: 171637 - DNA, 80 bp, synthetic construct
  source 1..80: mol_type = other DNA
ggcaccctgttttcatcagattatgtattctgtagcactaaccagcatattctaacccctccaactatatcaacactacc

SEQ ID NO: 171638 - DNA, 80 bp, synthetic construct
  source 1..80: mol_type = other DNA
atcagtcaaactcactacaggctggttcagcaagatgaatatactagtgctgggtacgtcacgtgctggtaccaaactgg

SEQ ID NO: 171639 - DNA, 80 bp, synthetic construct
  source 1..80: mol_type = other DNA
agtgtacatgaaacccaaacacgttagggcatgggcacccagacccccacgtactatgccatacactaacatcttgaaca

SEQ ID NO: 171640 - DNA, 80 bp, synthetic construct
  source 1..80: mol_type = other DNA
cgagccacaaggcgtcactgaatccagggagaagatcacgttggatagagacacacatacgcctatgcgcacacatggtg

SEQ ID NO: 171641 - DNA, 80 bp, synthetic construct
  source 1..80: mol_type = other DNA
gcgcccgttaatcttgtgtcacttgtggtttctgcgactagcttcatacatccgtttagccaaccacaaacgaacaacat

SEQ ID NO: 171642 - DNA, 80 bp, synthetic construct
  source 1..80: mol_type = other DNA
cacacccagctcaagtggggtcaacagtcaggaagttccagcactaacagctgttgaaactggagcctcaggacaggcga

SEQ ID NO: 171643 - DNA, 80 bp, synthetic construct
  source 1..80: mol_type = other DNA
cagtcggcagcgttgggcgactcactctacggtgcagcgtctctgaacgactttggcattttggcagtgagggtggttaa

SEQ ID NO: 171644 - DNA, 80 bp, synthetic construct
  source 1..80: mol_type = other DNA
tggcagaagcagcctcagagactcctccagagaatgaggacccacagagagagccatgggaagagtgggtagaggacgtc

SEQ ID NO: 171645 - DNA, 80 bp, synthetic construct
  source 1..80: mol_type = other DNA
atgtgccaaagtctttcaagccatgtgacatagataacaaaattggaaatgcaaaatgttgccccttcatatgtggaaaa

SEQ ID NO: 171646 - DNA, 80 bp, synthetic construct
  source 1..80: mol_type = other DNA
gatgcaggagcatctaacaaatatggatactcatcagtcaatgatttcggcaccttagcaatcagaatagtaaatgagta

SEQ ID NO: 171647 - DNA, 80 bp, synthetic construct
  source 1..80: mol_type = other DNA
aggcaaacctccaatcaccagccaccttccaatgtagtctcttagagagtggctgctacgcattagcgagagatttgacc

SEQ ID NO: 171648 - DNA, 80 bp, synthetic construct
  source 1..80: mol_type = other DNA
agaacctttcgggggcggcatgtccacagtaactttcagcctgctggtactatacgaccagcacgagagacaccttaaca

SEQ ID NO: 171649 - DNA, 80 bp, synthetic construct
  source 1..80: mol_type = other DNA
ggtgctgtacgacgagcaccaaaagatgcacaacacctggggctatcccaacacccagctagacctggccagatacagga

SEQ ID NO: 171650 - DNA, 80 bp, synthetic construct
  source 1..80: mol_type = other DNA
agggggcgacctagacgcagactttatagacgaaagagacggtttaagagacgcagacgaaaagctaagataaaaataac

SEQ ID NO: 171651 - DNA, 80 bp, synthetic construct
  source 1..80: mol_type = other DNA
atatggaggttacaattgtcataacatcgtaccaaggacaaggcactgaccatagtcaagacgcccctgtgttcacacat

SEQ ID NO: 171652 - DNA, 80 bp, synthetic construct
  source 1..80: mol_type = other DNA
caacgggcaaattgctcctggcatattcaccacccggcgctgatgtaccggccagcagaaagcaagcaatgttgggaacc

SEQ ID NO: 171653 - DNA, 80 bp, synthetic construct
  source 1..80: mol_type = other DNA
aatccagtacaaatgcatcagtcttttggcaggttggtcaaacttatcctagattttctatacctttttcaagcatagct

SEQ ID NO: 171654 - DNA, 80 bp, synthetic construct
  source 1..80: mol_type = other DNA
gttcgctggacagcaaggagcatatactggattacccaataagaaacccaatgttcccactatcagaacggctaaggtcc

SEQ ID NO: 171655 - DNA, 80 bp, synthetic construct
  source 1..80: mol_type = other DNA
agttattgatacccagctgggacaccaaaccaaaaggcaggcccaaaattaccgttagaatcaggccccccaccctattt

SEQ ID NO: 171656 - DNA, 80 bp, synthetic construct
  source 1..80: mol_type = other DNA
cagacaaaaacccctacgtaccaattacatggagaggcaaatggtaccctcacatacttcatcaagaggcagttataaat

SEQ ID NO: 171657 - DNA, 80 bp, synthetic construct
  source 1..80: mol_type = other DNA
acaattgagaacttccttgcacgctcggcgtgtgtgtattttcttgaatacaagaccggcactaagactgattccaacgc

SEQ ID NO: 171658 - DNA, 80 bp, synthetic construct
  source 1..80: mol_type = other DNA
tctgctcaagcaaccattacctggcgagtatgctgttagcaccctcaggacacccctcctctttctaccctcagaatacc

SEQ ID NO: 171659 - DNA, 80 bp, synthetic construct
  source 1..80: mol_type = other DNA
aacactaccacacacatggaaggaactgatgcattccagattaaagtaaccgctggtaatgtacaagacacgggagcaat

SEQ ID NO: 171660 - DNA, 80 bp, synthetic construct
  source 1..80: mol_type = other DNA
tatcctcccccggtccccagtagggccgcctgcccccctgcacccagtacctgcccctcttggccacgcaccccgggcca

SEQ ID NO: 171661 - DNA, 80 bp, synthetic construct
  source 1..80: mol_type = other DNA
attctacgcgcagttcaacaaggacacagcggtgacctctccaaggagagagttttgcccagtggactatttgttgggat

SEQ ID NO: 171662 - DNA, 80 bp, synthetic construct
  source 1..80: mol_type = other DNA
aaagctacctcaccctcaggagaccaaaactccccagaatggacacaaactgacttgacaaactttaaaaagcaaacaga

SEQ ID NO: 171663 - DNA, 80 bp, synthetic construct
  source 1..80: mol_type = other DNA
atacacatgactcacgttatggcacaacagtaataaaccacatgggcaccttatgcatgagaatagttacaaaccagcaa

SEQ ID NO: 171664 - DNA, 80 bp, synthetic construct
  source 1..80: mol_type = other DNA
aaccaaccaaacggtctatttattaggttttattagtgcatgtccagatttcaaattgaggttaatgaaagatacatctt

SEQ ID NO: 171665 - DNA, 80 bp, synthetic construct
  source 1..80: mol_type = other DNA
cccaaacctcctcctaccagtcaagactgggcagaggagtacattgcttgcaaatactggggaagaccccccagaacctt

SEQ ID NO: 171666 - DNA, 80 bp, synthetic construct
  source 1..80: mol_type = other DNA
gacgcattagaacacaaaacaggttacttcagtccagcattattaagcccacaaagactaaacccacagataccaggcct

SEQ ID NO: 171667 - DNA, 80 bp, synthetic construct
  source 1..80: mol_type = other DNA
caattagcaagcgcaacatatggaaatgttgctgctggatataattacacacatccaggtgagcgtggcagagttattaa

SEQ ID NO: 171668 - DNA, 80 bp, synthetic construct
  source 1..80: mol_type = other DNA
tggcagcccgccaatgttagaaaatgcaaaataaggggtctgtttccaatagttatctgtggacacggcaagagtgccaa

SEQ ID NO: 171669 - DNA, 80 bp, synthetic construct
  source 1..80: mol_type = other DNA
ggtccaactcgccaagacccaggcgaatctccacgtaaaccccctgttatctttcccgcaatgaataaggtctttctgtt

SEQ ID NO: 171670 - DNA, 80 bp, synthetic construct
  source 1..80: mol_type = other DNA
cggaaggacattaatgatgtagggacgcttcgtcccgtaggttataccaaccatggggcattcgggcatcagtcaggtgc

SEQ ID NO: 171671 - DNA, 80 bp, synthetic construct
  source 1..80: mol_type = other DNA
cgaaccttgtacctcccaccatatgaatttctggagaggagatggattgacaagtttatttgaatatataaatatatata

SEQ ID NO: 171672 - DNA, 80 bp, synthetic construct
  source 1..80: mol_type = other DNA
tatacagccaactcagggcatgctaaaaactcagtctaccaaataatgtacataccccccggagcaccacgcccaaatgc

SEQ ID NO: 171673 - DNA, 80 bp, synthetic construct
  source 1..80: mol_type = other DNA
cagagaaaaaagagaatactaatcccctcctttgacacaaggcccaaaggcagaaggagagtaagggttaacattaaacc

SEQ ID NO: 171674 - DNA, 80 bp, synthetic construct
  source 1..80: mol_type = other DNA
tggcaaattgaatgcctcgatggcaactagtctgtgcaaggattgtcacaaaccctccaatttcaagaaatgttgtccct

SEQ ID NO: 171675 - DNA, 80 bp, synthetic construct
  source 1..80: mol_type = other DNA
tcacatgaagctggctaccaatgtgaccaagtttccaatgcactttgtggatgtgggccacactgttccatatggtgaaa

SEQ ID NO: 171676 - DNA, 80 bp, synthetic construct
  source 1..80: mol_type = other DNA
tcaccgtcacgagctttacaacgctaaactacattttgtcattgaacacggcaagatgggagcccaagtttcctcacaga

SEQ ID NO: 171677 - DNA, 80 bp, synthetic construct
  source 1..80: mol_type = other DNA
attgtcaactccagggtctaaccagtttcttactactgacaacttccagtcgccttgtgccataccagatttcgatgtga

SEQ ID NO: 171678 - DNA, 80 bp, synthetic construct
  source 1..80: mol_type = other DNA
ggaagagttggttactgtgcagcacttctcagaaagtattttgggacaacccaaggtgaaatcaaagtaatgagagatgt

SEQ ID NO: 171679 - DNA, 80 bp, synthetic construct
  source 1..80: mol_type = other DNA
ataacaacccaagatacactaaatagtgttgtagcatatggagagtggcctgagtacttgtctgacatagacgcctcatc

SEQ ID NO: 171680 - DNA, 80 bp, synthetic construct
  source 1..80: mol_type = other DNA
cctggtgagttggcatacaagttatgcaatacaactcatatatacaaagatgagatatatacagtaaaaggaggaatgcc

SEQ ID NO: 171681 - DNA, 80 bp, synthetic construct
  source 1..80: mol_type = other DNA
ttcattaatttaagaagcaataattcagcaacaatcattgttccatatgtgaacgcagtgccaatggactcaatgttaag

SEQ ID NO: 171682 - DNA, 80 bp, synthetic construct
  source 1..80: mol_type = other DNA
catccacatactctatatggctgaacaagggtactcaaacaaaccattaagaacagtgcgccatgagtcagcattgggtt

SEQ ID NO: 171683 - DNA, 80 bp, synthetic construct
  source 1..80: mol_type = other DNA
caaactaacgtcggtagtcgcgcacgtcgtttatcctcagcacaccgtccgatcacaacccgttttcccactcagtcgca

SEQ ID NO: 171684 - DNA, 80 bp, synthetic construct
  source 1..80: mol_type = other DNA
tgcacctgcagagaacaaaggcctgtggcagtacacatacacaaaactaatggccccttactattacaaaggcaacccaa

SEQ ID NO: 171685 - DNA, 80 bp, synthetic construct
  source 1..80: mol_type = other DNA
tggtggtgataacttagttgccttcaccgatttaaggccttactcatgcctgtcctcccaccaaggtatggtctcagact

SEQ ID NO: 171686 - DNA, 80 bp, synthetic construct
  source 1..80: mol_type = other DNA
gaaacagttagagttgattgaaaaccaaatgtctgtattgcaccagtcatgtccctcgcaagaacaacaggaagttctat

SEQ ID NO: 171687 - DNA, 80 bp, synthetic construct
  source 1..80: mol_type = other DNA
gtcttttcaacttaaagccccccaataaagtttcaaggccgtgggactttcacttgtcggtgtctgcttcttaaagtcac

SEQ ID NO: 171688 - DNA, 80 bp, synthetic construct
  source 1..80: mol_type = other DNA
acccaaggcagagcatactgctaatggcagacatgccactgtacatactattaaacgggtacattgactgggcaaaaaaa

SEQ ID NO: 171689 - DNA, 80 bp, synthetic construct
  source 1..80: mol_type = other DNA
cacccccagcgctggctccaggaggtggcagcgttggatgcagtcctccgcatcggtgcggacgcctcctcccaacgcgt

SEQ ID NO: 171690 - DNA, 80 bp, synthetic construct
  source 1..80: mol_type = other DNA
agccccagaaactggagacatatccacaaactgctacaaaaaactagacagcgcctggggagacactatatggaaccaaa

SEQ ID NO: 171691 - DNA, 80 bp, synthetic construct
  source 1..80: mol_type = other DNA
aaaatatatagacatccatcctgtgacttttttgtaagatataacagaaaaccaccctttacagatagccaaataactgt

SEQ ID NO: 171692 - DNA, 80 bp, synthetic construct
  source 1..80: mol_type = other DNA
tggaattgctcccaccctcaattttcgcttgccttcttcccttgttaacctgatagcatagcctctaggtttccttgtag

SEQ ID NO: 171693 - DNA, 80 bp, synthetic construct
  source 1..80: mol_type = other DNA
agcagctttgcatgacaaagatccaagacttgatgtagggctcaaagaggcagtgatgtcaaagtataagggtaacaaaa

SEQ ID NO: 171694 - DNA, 80 bp, synthetic construct
  source 1..80: mol_type = other DNA
gtaacatctttatttcaaacagcgtagttgacatgttcggagaccccattcctcaccaggctacaagccaagactggcag

SEQ ID NO: 171695 - DNA, 80 bp, synthetic construct
  source 1..80: mol_type = other DNA
gttgcaagtggcccgtcaaactcagagagcataccagcactgactgcggcagaaacgggtcacacctcacaggtaatccc

SEQ ID NO: 171696 - DNA, 80 bp, synthetic construct
  source 1..80: mol_type = other DNA
ggcatttgcacctgaagcctccaccacgataccaatcacagtgacaatagcaccaatgttcacagagttcaatggcctaa

SEQ ID NO: 171697 - DNA, 80 bp, synthetic construct
  source 1..80: mol_type = other DNA
aggaagtggctggactccttctagaattagagtacaatttgaaaaccataattggcttaaccctaccgcatgaccgagta

SEQ ID NO: 171698 - DNA, 80 bp, synthetic construct
  source 1..80: mol_type = other DNA
tgatatctgtgacactacactactgaacatgaacgttgtgctatgcaacttgcggtttccgttctgctcaccacaaacga

SEQ ID NO: 171699 - DNA, 80 bp, synthetic construct
  source 1..80: mol_type = other DNA
gcagaaagcagtgttcatacattttaagagagggtgcacttgcctggggggagggcatgggccaggagtgtggagaccag

SEQ ID NO: 171700 - DNA, 80 bp, synthetic construct
  source 1..80: mol_type = other DNA
ataactataaagatgcacaagggaaactagatgtatctaaggcttttcaaccctgtgatgtcaataccaaaattggaaat

SEQ ID NO: 171701 - DNA, 80 bp, synthetic construct
  source 1..80: mol_type = other DNA
tgttcttctggttcatttcctatgattgtttggctgctgaccgacgcgtcaggatgtgcagggcatgcggggaatcagga

SEQ ID NO: 171702 - DNA, 80 bp, synthetic construct
  source 1..80: mol_type = other DNA
cctagaggacaagggtagggcttttaccagtgattatgtgattgccagcactaatatgacagttcttactccaccaaccg

SEQ ID NO: 171703 - DNA, 80 bp, synthetic construct
  source 1..80: mol_type = other DNA
ttgtgatccttccatttgtaccccttcaatatgaaggcggtgcttccacagcaatccccataacagtcacggttgctccc

SEQ ID NO: 171704 - DNA, 80 bp, synthetic construct
  source 1..80: mol_type = other DNA
attatagtcaatataaacaagaggccacaaagtttaacacagcacaaaataagaagtacagtaacatttccagcttatgg

SEQ ID NO: 171705 - DNA, 80 bp, synthetic construct
  source 1..80: mol_type = other DNA
caatcaggaacaaatgcatctgtgttttggcaagaagggcaaccatatcctagatttacaattccctttatgagtattgc

SEQ ID NO: 171706 - DNA, 80 bp, synthetic construct
  source 1..80: mol_type = other DNA
ccacacttctgtaccatggaggtatacaaatgacacacctgcttgggacaacatgacatggcaacaatgggaaaaccaga

SEQ ID NO: 171707 - DNA, 80 bp, synthetic construct
  source 1..80: mol_type = other DNA
gaattccacacctactcgtgtttgtgattttatttcatattccatgagagagacctcgcatatttgcagagggtcactga

SEQ ID NO: 171708 - DNA, 80 bp, synthetic construct
  source 1..80: mol_type = other DNA
agccacctggaggacagaatagccaggggaggctttggagggggccacagcaccatgaggttctcactaaaggtgttcta

SEQ ID NO: 171709 - DNA, 80 bp, synthetic construct
  source 1..80: mol_type = other DNA
gacagaagtgggggaggggggaacggtggaaatcagggacaccacaacctactgtgttatcgacgccttagcgtcacatt

SEQ ID NO: 171710 - DNA, 80 bp, synthetic construct
  source 1..80: mol_type = other DNA
cgtaccgaggtggtggagtggatttgaaaagtgggtctattacaccgttgactccagtgagcagcattacaacctatgga

SEQ ID NO: 171711 - DNA, 80 bp, synthetic construct
  source 1..80: mol_type = other DNA
aaagcatgtttctcggtaaattatacagaaagaaaaggaaactgctactgcgcgctgtgcgtactgcatcgaaagcattt

SEQ ID NO: 171712 - DNA, 80 bp, synthetic construct
  source 1..80: mol_type = other DNA
ttcgttcggcgttcaggccttaatactagctacatcttacctgtcggcggcctgtctgggggctccggtaccttacccgt

SEQ ID NO: 171713 - DNA, 80 bp, synthetic construct
  source 1..80: mol_type = other DNA
aactggataaaattgctgctggtaaaaccagatgtattgaagcatgtgaggttgattattgcattgtttacaggatgata

SEQ ID NO: 171714 - DNA, 80 bp, synthetic construct
  source 1..80: mol_type = other DNA
ccttcccaaaaactcttctttcccctgtcccttctgccagtacgacgagcagaacgaagtcctctccccggagtctctct

SEQ ID NO: 171715 - DNA, 80 bp, synthetic construct
  source 1..80: mol_type = other DNA
acatcccagagagtgaagatgattacccagaatgttgtttggcattagttgctaatcagaccgagcccacaattctagaa

SEQ ID NO: 171716 - DNA, 80 bp, synthetic construct
  source 1..80: mol_type = other DNA
gaattgtacttataaccccttatacaaaacctatgctgtataacaaagacaaacccacctggggatatgtaccttatgac

SEQ ID NO: 171717 - DNA, 80 bp, synthetic construct
  source 1..80: mol_type = other DNA
atacagaaccaagtggtacccctacatgttaaaccaagaggcagtaatggaagacataagcagatcagggccatttgcac

SEQ ID NO: 171718 - DNA, 80 bp, synthetic construct
  source 1..80: mol_type = other DNA
atccccgggagtgtatccccggcccaactcgatccgagagaccgactcattgctaggaacgctgcaggtgagattcactc

SEQ ID NO: 171719 - DNA, 80 bp, synthetic construct
  source 1..80: mol_type = other DNA
ggggtaggtggatctaccagcccagggctcgcgtatttcgccgccacgctgcttcaccgatatccaataaacccatcccc

SEQ ID NO: 171720 - DNA, 80 bp, synthetic construct
  source 1..80: mol_type = other DNA
tgtttctatgatggctattcacatgataatgaagatactccttatggcataacagtcttgaaccacatgggtagcattgc

SEQ ID NO: 171721 - DNA, 80 bp, synthetic construct
  source 1..80: mol_type = other DNA
ttccaacccaccttcactccatctagcgaggatggaaagaaaaacaccttcgcacccgttgactggttactcgggtgtgg

SEQ ID NO: 171722 - DNA, 80 bp, synthetic construct
  source 1..80: mol_type = other DNA
tgcgcagttagtcactcttgatattgatccagcaaacatgtccttggaggatagtgtgtttggaactgatggtcttgaag

SEQ ID NO: 171723 - DNA, 80 bp, synthetic construct
  source 1..80: mol_type = other DNA
aacacgttcctcgacaagtacgtgggtctggccatcggaggagttcatggggccagggactctgccctggcaggccgtgc

SEQ ID NO: 171724 - DNA, 80 bp, synthetic construct
  source 1..80: mol_type = other DNA
tcaccggagacacgtccgccgggagaaccccggtagcggcgggccatggcgtggagctggtggtggcagagaaggcgacg

SEQ ID NO: 171725 - DNA, 80 bp, synthetic construct
  source 1..80: mol_type = other DNA
aattgccacaaccaataagtctgatttttccagcactgttctccaggattctggagcattgaagaggagatttccttaca

SEQ ID NO: 171726 - DNA, 80 bp, synthetic construct
  source 1..80: mol_type = other DNA
tgcctggtctccgctagtcgaaggcgccttgcaataagacgagtggaacaaagacgcttaaagcatagtgaaaatataca

SEQ ID NO: 171727 - DNA, 80 bp, synthetic construct
  source 1..80: mol_type = other DNA
agcaaaataccgatttaccttcttatttgggggcaaccccgctcccacacaggccatcaaagacccgtgcaaacaacccg

SEQ ID NO: 171728 - DNA, 80 bp, synthetic construct
  source 1..80: mol_type = other DNA
tggttaaagaaattcacagaatggtgcaatgcagcaaagggattagaatgggttggtgtaaaaataagcaaatttatcga

SEQ ID NO: 171729 - DNA, 80 bp, synthetic construct
  source 1..80: mol_type = other DNA
ttcaaatgtcaactatagaaggtgtgccaaggacgatttctcggaaggtggatacatcactgctttttaccaaactgcca

SEQ ID NO: 171730 - DNA, 80 bp, synthetic construct
  source 1..80: mol_type = other DNA
ccccggtttactttgatatgctccaacagggcaaaaacaaagtcaatcgttacccgcaagatgcctacgcaacgcctagt

SEQ ID NO: 171731 - DNA, 80 bp, synthetic construct
  source 1..80: mol_type = other DNA
ggtataattatacacatcctggtgaacgaggaagacaggttggtgacgcacgtgatcctatcaccgcagtgcacccaagt

SEQ ID NO: 171732 - DNA, 80 bp, synthetic construct
  source 1..80: mol_type = other DNA
ccaagtgacaccatacagaccaggcatgtcgtgaattatcattcaaggtccgaatctaccattgagaattttctgtgtag

SEQ ID NO: 171733 - DNA, 80 bp, synthetic construct
  source 1..80: mol_type = other DNA
tatttggcatgtgtaaatacgcacccagtaaagaaattcgggctcgggactggccgggctatgggcaaggctcttaaagc

SEQ ID NO: 171734 - DNA, 80 bp, synthetic construct
  source 1..80: mol_type = other DNA
aagacaaccaagtatccggtccccgtcgacagcctagggatgtacaagtcgttgacccgcaacgcatcacgccgccgtgg

SEQ ID NO: 171735 - DNA, 80 bp, synthetic construct
  source 1..80: mol_type = other DNA
aaaatcactggatataccaccgttgatatatcccaatggcatcgtaaagaacattttgaggcatttcagtcagttgctca

SEQ ID NO: 171736 - DNA, 80 bp, synthetic construct
  source 1..80: mol_type = other DNA
ctcactgcatgaattttaaaagaaggggaggaataggggatatgacccctgcagaaagaatagtcaacatgataactaca

SEQ ID NO: 171737 - DNA, 80 bp, synthetic construct
  source 1..80: mol_type = other DNA
ggtccctaaaggtgctgtttgacgagcaccagaaacacagaaacaggtggggctaccccaacacccagctagaccttgcc

SEQ ID NO: 171738 - DNA, 80 bp, synthetic construct
  source 1..80: mol_type = other DNA
atacaacaatgatggaaaattgctcagatttggatgttgttttcactacctgtcccaaagatgagttaagacctctggac

SEQ ID NO: 171739 - DNA, 80 bp, synthetic construct
  source 1..80: mol_type = other DNA
atcactcccccagataaaacagatcatttctccaagatgacctgggataatgtgaccttccttaaacgtaaatttaaacc

SEQ ID NO: 171740 - DNA, 80 bp, synthetic construct
  source 1..80: mol_type = other DNA
cggtggtgacgggagccttttgcggccccaggacgggctgcgggacgcgggtgaagggaccagtggtgacgggcacgcgc

SEQ ID NO: 171741 - DNA, 80 bp, synthetic construct
  source 1..80: mol_type = other DNA
actttgtgccacaggaaggaattagtgctatcagaacaaaaattaaaattagaggagatataaaagagatcagcaattat

SEQ ID NO: 171742 - DNA, 80 bp, synthetic construct
  source 1..80: mol_type = other DNA
gtccacaccactaaaccttcagctttaaacgcaatggaagtgggagttactccagacgtgcgacctgagaacttgatcga

SEQ ID NO: 171743 - DNA, 80 bp, synthetic construct
  source 1..80: mol_type = other DNA
accacaccaactgcaccattaggcacagccccgacaattgaaggtaattcaattatagcgagtactgccagtacttttac

SEQ ID NO: 171744 - DNA, 80 bp, synthetic construct
  source 1..80: mol_type = other DNA
ccgtgacctatagaggacctggagtggacctactatctaatgcagtaacacccttatcaaaacatgacctgaccacatac

SEQ ID NO: 171745 - DNA, 80 bp, synthetic construct
  source 1..80: mol_type = other DNA
tcactggcaacaacagcacatttggctgctgcacatacaatcccacgaaagacataggtaaaaacgccaacaactggttt

SEQ ID NO: 171746 - DNA, 80 bp, synthetic construct
  source 1..80: mol_type = other DNA
cccagtttaactttgtgactcatgaggacgacataccacctccaaaggcctcctttggaggaaactttactaacctcacc

SEQ ID NO: 171747 - DNA, 80 bp, synthetic construct
  source 1..80: mol_type = other DNA
tttgggacttggggctacagtcatcatgcactatcgtggtgccatggatgagtggcactttccacaggcggactaaggca

SEQ ID NO: 171748 - DNA, 80 bp, synthetic construct
  source 1..80: mol_type = other DNA
cccatgcagagacgaaggactggaaccctcctaccccagtagactccgtagggacgtacaaattgttgacccacgcaccg

SEQ ID NO: 171749 - DNA, 80 bp, synthetic construct
  source 1..80: mol_type = other DNA
gtcgaaaaagtctctttccaagcagaaagagaacaaaaaccgtgggaggacagcgaccagccgtcagagacagaagccct

SEQ ID NO: 171750 - DNA, 80 bp, synthetic construct
  source 1..80: mol_type = other DNA
cccctaaatattttgatgggtacgatcaacagagtgtggttataatggatgacataatgcaaaatccaaatggtgaagac

SEQ ID NO: 171751 - DNA, 80 bp, synthetic construct
  source 1..80: mol_type = other DNA
tctccaaaattgacgaaataaaaaaggcagcagaagcatactggactaacttaacacaaaaccacccacaggccacaaac

SEQ ID NO: 171752 - DNA, 80 bp, synthetic construct
  source 1..80: mol_type = other DNA
tagtagcatatggtgaatggccccactacctctctgatgatgaggccacagcagaggatcaaccaacccagcccgacgtt

SEQ ID NO: 171753 - DNA, 80 bp, synthetic construct
  source 1..80: mol_type = other DNA
atacttccacgtcgattacacccacaagcttaatatctactacacaactgacatctacgttacaaaccaccgaaatgtct

SEQ ID NO: 171754 - DNA, 80 bp, synthetic construct
  source 1..80: mol_type = other DNA
gttgtgtgggatgtgggcctgcaatctactgtttcaatggttgttccctgggttagtgctagccacttcagaaatactac

SEQ ID NO: 171755 - DNA, 80 bp, synthetic construct
  source 1..80: mol_type = other DNA
agttggagataacagtccttaaactagataggaatgagaaatttagagacatcagaaaatatataccaaatagtgaagat

SEQ ID NO: 171756 - DNA, 80 bp, synthetic construct
  source 1..80: mol_type = other DNA
agtgtccatatacagtgccacagctatacatacaaacacaaaaagacagaggctacataccatacagcaacaactttggc

SEQ ID NO: 171757 - DNA, 80 bp, synthetic construct
  source 1..80: mol_type = other DNA
atgacaatgcacattcagtacttaacttctcacaagaactaacaaataagtaccacacatatagaaacaaatgctacgaa

SEQ ID NO: 171758 - DNA, 80 bp, synthetic construct
  source 1..80: mol_type = other DNA
aaggtatacgctatactgaataaattggggttaaaagagaaagataagataaaatctaataacggtcaagacgaagataa

SEQ ID NO: 171759 - DNA, 80 bp, synthetic construct
  source 1..80: mol_type = other DNA
ctgggtcaatcaaacttacattcttttgtgtttgtgacagcttcagtactggtaagttcttgatagcatacacccctcca

SEQ ID NO: 171760 - DNA, 80 bp, synthetic construct
  source 1..80: mol_type = other DNA
gcactgtatacgccctatatagattaatgtgcctaacccaaggcccatattctggagctccccaacctattccaaagaag

SEQ ID NO: 171761 - DNA, 80 bp, synthetic construct
  source 1..80: mol_type = other DNA
gcatgggtcccaagaccgccgagactatgtgcgtatgaaaaatctagtaatgtgaactttaaacctacagatgtgaccac

SEQ ID NO: 171762 - DNA, 80 bp, synthetic construct
  source 1..80: mol_type = other DNA
acatttttggcacacacaccttaagtcagcaccaagccattggtttggtgggtacaattcttttgactgctggtttaatg

SEQ ID NO: 171763 - DNA, 80 bp, synthetic construct
  source 1..80: mol_type = other DNA
cacaggctgttggccattaaaaagtcctggcccgaatgacgacgagacagagcccgaggcgaagaaaaaggcgcccgtca

SEQ ID NO: 171764 - DNA, 80 bp, synthetic construct
  source 1..80: mol_type = other DNA
agcgagggtttgtagttcgaagtggcatcagacacctcatggggttccgagaacttaattgggggacaaaagtgtacaaa

SEQ ID NO: 171765 - DNA, 80 bp, synthetic construct
  source 1..80: mol_type = other DNA
gctccaagcgccgtagccggcccgcctgccgatcgcgacgtcgtggaccatcgaacagagactcacgcgtacgagacccc

SEQ ID NO: 171766 - DNA, 80 bp, synthetic construct
  source 1..80: mol_type = other DNA
ccaattcccacgtagccactcacgttggttggacagccaccgtggtgataattatctgcgttttaacttacgttaacgtt

SEQ ID NO: 171767 - DNA, 80 bp, synthetic construct
  source 1..80: mol_type = other DNA
agtaagataccacagtgttaaatttaccttctttagacaccctaaagtagactttatagtaaagtttaacaggaaccctc

SEQ ID NO: 171768 - DNA, 80 bp, synthetic construct
  source 1..80: mol_type = other DNA
atcagatcttgatgctacttcagtggataaacccacacatcctgaaacttcttctgacagattttacactcttgccagtg

SEQ ID NO: 171769 - DNA, 80 bp, synthetic construct
  source 1..80: mol_type = other DNA
ggaatcaagaaaagatcaatattgaataaagagactaaggacactgctaaaatggaggaatgtttaagcaagtatggcat

SEQ ID NO: 171770 - DNA, 80 bp, synthetic construct
  source 1..80: mol_type = other DNA
acctgatacatactcaaaagctggatacattactagctggtatcagacaaactttgtagtacctccatgcactccaaaaa

SEQ ID NO: 171771 - DNA, 80 bp, synthetic construct
  source 1..80: mol_type = other DNA
gagggctgggaagatgagtttgtaacatgcaaacactgggataggccagctagaacatactacacagacagacccactta

SEQ ID NO: 171772 - DNA, 80 bp, synthetic construct
  source 1..80: mol_type = other DNA
ggttcaaaggtcaccatcagccacacctactcaaaatggagggcaatttcttccgggtcaaaggtcacagtcgccatatt

SEQ ID NO: 171773 - DNA, 80 bp, synthetic construct
  source 1..80: mol_type = other DNA
tggatttacacctttaacaccgcttactcttagctttattagaattgcattactaattcgacattattaccataatgggt

SEQ ID NO: 171774 - DNA, 80 bp, synthetic construct
  source 1..80: mol_type = other DNA
tacacatcaatagggcgcacaaattatcctaagaatacagaaccagtaattaagaagaggaaaggtgacattaaatccta

SEQ ID NO: 171775 - DNA, 80 bp, synthetic construct
  source 1..80: mol_type = other DNA
acccacaagaaagatgaagagggacaaccaggctagagtatgacgaccgcttttcctttgtttgacggttacatgtgcgg

SEQ ID NO: 171776 - DNA, 80 bp, synthetic construct
  source 1..80: mol_type = other DNA
actttgatggaactcttctgggaaatttattaatctttcctcatcaatttattaaccttaggagtaacaattctgcaaca

SEQ ID NO: 171777 - DNA, 80 bp, synthetic construct
  source 1..80: mol_type = other DNA
gtaaacccatggatttagctatccttaagtgtaagttaccttttaggtttaagaagaattccaagtactacaccaacaaa

SEQ ID NO: 171778 - DNA, 80 bp, synthetic construct
  source 1..80: mol_type = other DNA
ttaaaaaaagttggagggtttttccccccccggggttccctgggaggccagtccccgggcacccggaggcccttttatcc

SEQ ID NO: 171779 - DNA, 80 bp, synthetic construct
  source 1..80: mol_type = other DNA
ctagggcagaaaatagaacttatatatattggcatggtagagataataggactataattagcttaaataagtactataat

SEQ ID NO: 171780 - DNA, 80 bp, synthetic construct
  source 1..80: mol_type = other DNA
atgggcgcagcgtcgctgacgctgacagctcagtctcggactttactggctgggatagtgcagcaacagcagcagctgtt

SEQ ID NO: 171781 - DNA, 80 bp, synthetic construct
  source 1..80: mol_type = other DNA
atgcagttagtgaaacaattcagaatccaaacaatgctattggtggtgatttattgactaaagttgctgatgatgcttct

SEQ ID NO: 171782 - DNA, 80 bp, synthetic construct
  source 1..80: mol_type = other DNA
gagatacgtaggagtgagattcaaggcctacagacaccccacaacagactatataatctcctacagcaaaacctcaccct

SEQ ID NO: 171783 - DNA, 80 bp, synthetic construct
  source 1..80: mol_type = other DNA
ccacatttttgaaaagaggattccgtgtggatgagagatacagtttccttgtgcacccggttttcccagaaaaggagatc

SEQ ID NO: 171784 - DNA, 80 bp, synthetic construct
  source 1..80: mol_type = other DNA
aggacctatactagaagggccagacgcaggagacgaaagagactagtactcactcagtggcatccagccgtcagacgcaa

SEQ ID NO: 171785 - DNA, 80 bp, synthetic construct
  source 1..80: mol_type = other DNA
agtttatcatagagctaaacacattagagcatggatacccagagctcctagagttttagagtacctacacattggtagaa

SEQ ID NO: 171786 - DNA, 80 bp, synthetic construct
  source 1..80: mol_type = other DNA
cccccacccagaatgttcgttgacaagtggtatgcacagaacgacctttgtgaagtaaatcttgtgtcatttgtggttag

SEQ ID NO: 171787 - DNA, 80 bp, synthetic construct
  source 1..80: mol_type = other DNA
cgtcccaggacattgcaaatgctgtagttgggtatggagtctggcctacttatttagattcaaaggatgcctcagctata

SEQ ID NO: 171788 - DNA, 80 bp, synthetic construct
  source 1..80: mol_type = other DNA
tgattcctgaacaggttatcagaaacccttgtaaagcagaaggagcaggatcaggctacacctaccccgatagactgcct

SEQ ID NO: 171789 - DNA, 80 bp, synthetic construct
  source 1..80: mol_type = other DNA
cggtcccgcgagtccccgtccccaacgtaacccccgtccccgcacacccccgccagcgcccgtccccaacggcaccaccg

SEQ ID NO: 171790 - DNA, 80 bp, synthetic construct
  source 1..80: mol_type = other DNA
gaagcgcgaggacgcgcttctgaaacagatgcgttccgaatatggaaacgcacctgtattcggatctggcgtttgaagcg

SEQ ID NO: 171791 - DNA, 80 bp, synthetic construct
  source 1..80: mol_type = other DNA
gggtttttgggccgtgagcgcggcggcgccggtaacgggagttacgctggcgacagggacggtggtttttgggcgtactg

SEQ ID NO: 171792 - DNA, 80 bp, synthetic construct
  source 1..80: mol_type = other DNA
ggtgaacagcaacgtaagtgagtggggccagacttcgccataaggcctttatcttcttgccatttgtcagtaacttaaat

SEQ ID NO: 171793 - DNA, 80 bp, synthetic construct
  source 1..80: mol_type = other DNA
caacgaaagaaagatattctagataggtgtaagaaaatatctctgttagaggaacaagtcaatggattcagctcagcaga

SEQ ID NO: 171794 - DNA, 80 bp, synthetic construct
  source 1..80: mol_type = other DNA
ttcatggttgaagaaatttactgaggcatgcaatgcagcaagaggtcttgaatggataggaaacaaaatatccaagttca

SEQ ID NO: 171795 - DNA, 80 bp, synthetic construct
  source 1..80: mol_type = other DNA
accacacaataacaaaccaaacacaaacatttttgactactacacaggcatgtactgtagcatatttctgtcctcgggaa

SEQ ID NO: 171796 - DNA, 80 bp, synthetic construct
  source 1..80: mol_type = other DNA
cctactcagataatggaaaccacagatgcagtgttagcagtaaacactagtaaattcccaaacatgtacatcccagttgg

SEQ ID NO: 171797 - DNA, 80 bp, synthetic construct
  source 1..80: mol_type = other DNA
aataattgttttaacacaggcaacagcacccaatttggatacaacagctacaaaccaatatcacaaaacatacaaaaagc

SEQ ID NO: 171798 - DNA, 80 bp, synthetic construct
  source 1..80: mol_type = other DNA
agtcaaagatgtattagagaaagggattcccactttacaatctcctacagtagaagcatgtggctactcagatagaatta

SEQ ID NO: 171799 - DNA, 80 bp, synthetic construct
  source 1..80: mol_type = other DNA
gaatgttgccaaggctttattaccatgtactgattgcccaaaaccagaattctacaagcagtgttgtcctctaacctgtg

SEQ ID NO: 171800 - DNA, 80 bp, synthetic construct
  source 1..80: mol_type = other DNA
gcatagtccccattctaatatgcgggcacacaaaatggaacagtaactacgccctacatagcgaggactacacagaagag

SEQ ID NO: 171801 - DNA, 80 bp, synthetic construct
  source 1..80: mol_type = other DNA
cacaggtatctagacagactaccggatcacatgagagtgcagtcactgctacaaatggaggaataatcaaatatttcaat

SEQ ID NO: 171802 - DNA, 80 bp, synthetic construct
  source 1..80: mol_type = other DNA
tgggtgacagtgtgtaccaattggattctgatgacatctttaagactgctctaactggaaaagctaagttcactaaggcg

SEQ ID NO: 171803 - DNA, 80 bp, synthetic construct
  source 1..80: mol_type = other DNA
atccagagacatccacagatcgcttttacacattggctagtgtggattggacacaatcttcaaaaggatggtggtggaaa

SEQ ID NO: 171804 - DNA, 80 bp, synthetic construct
  source 1..80: mol_type = other DNA
tatagttttacaattcatgtatgtacctccaggagccccagtcccaacaaaacgtgaagattatacatggcaatcaggaa

SEQ ID NO: 171805 - DNA, 80 bp, synthetic construct
  source 1..80: mol_type = other DNA
atagtgtactttacaaacaatcctcccatgaagaccaaccagttctccgcgcccctgacgacccccggcatgctcatgcg

SEQ ID NO: 171806 - DNA, 80 bp, synthetic construct
  source 1..80: mol_type = other DNA
ggaccccaactttttggagatgagagagtttgtcaccagcctggccagcttcctgagtggtcagtacaagcacaagcccg

SEQ ID NO: 171807 - DNA, 80 bp, synthetic construct
  source 1..80: mol_type = other DNA
cgctcacagtgcctaatggagcagttccctcactcccaataacagtcacaatagcacctatgtgcactgaattttctggg

SEQ ID NO: 171808 - DNA, 80 bp, synthetic construct
  source 1..80: mol_type = other DNA
tgttctaaaaacaacactaataggtgagttgtgtcagtattttacacattgggcaggttcattgcgcctatcctttatgt

SEQ ID NO: 171809 - DNA, 80 bp, synthetic construct
  source 1..80: mol_type = other DNA
aacattactccgctcagctatttatgctggatatcaacccagaaccaataacatcggagcaagcagtgtatggtatgcag

SEQ ID NO: 171810 - DNA, 80 bp, synthetic construct
  source 1..80: mol_type = other DNA
gcccaggtttcatctcaaaaagttggagctcacgaaaattcaaacagagcttatggtgggtccaccatcaattacactac

SEQ ID NO: 171811 - DNA, 80 bp, synthetic construct
  source 1..80: mol_type = other DNA
tcacaagcctcgcaaacggagcaggaaagcgagcaagaggagacgaacctccaacaaacactcaaaaagcagctcctcga

SEQ ID NO: 171812 - DNA, 80 bp, synthetic construct
  source 1..80: mol_type = other DNA
tggcgacgcaggcgctggggcgcccgccgatggaggcgaaggaggaggcgccgccgaccagtatggagacgccgacctag

SEQ ID NO: 171813 - DNA, 80 bp, synthetic construct
  source 1..80: mol_type = other DNA
cctttcttaaagatgagcttagaaagaaagaaaaaataagggacgggaaaactagagttatagaagccaatagtgtgaat

SEQ ID NO: 171814 - DNA, 80 bp, synthetic construct
  source 1..80: mol_type = other DNA
ctgcaggacccagtgacatgtttgtacacaccaaagaggccatctacagatgcgcccacttgaccacaccatctgaaaag

SEQ ID NO: 171815 - DNA, 80 bp, synthetic construct
  source 1..80: mol_type = other DNA
taggtgcttgtgatgtatcagacaaattaactggaaagattattaagtggacaattaggctaataagtgctctatcaatt

SEQ ID NO: 171816 - DNA, 80 bp, synthetic construct
  source 1..80: mol_type = other DNA
ccatagcccccttgtgttccgaatttgcgggtttgagacaggctataaaacagggcctcccagttgaaatgaagcccggc

SEQ ID NO: 171817 - DNA, 80 bp, synthetic construct
  source 1..80: mol_type = other DNA
ccgtgttcaacacctttaaaactgaagagcaccttaagtgccctccagcaaaaaactgtaaacaaacggaccccacacaa

SEQ ID NO: 171818 - DNA, 80 bp, synthetic construct
  source 1..80: mol_type = other DNA
aaccgccatattggtgacgtcacggccgccattttaagtaagcatggcgggcggtgatgtcaaatgttaaaggtcacagc

SEQ ID NO: 171819 - DNA, 80 bp, synthetic construct
  source 1..80: mol_type = other DNA
tgaacagcctagtaacaacatacaaaaccctgtggaggacttcatcgatgagactctcaaagaggtgttagttgtcccaa

SEQ ID NO: 171820 - DNA, 80 bp, synthetic construct
  source 1..80: mol_type = other DNA
tgaaacatccgttcggctcaccactaactgacactccttgcgtaagcttccaggtcctaggagacctctacaacgagtgt

SEQ ID NO: 171821 - DNA, 80 bp, synthetic construct
  source 1..80: mol_type = other DNA
cctccgggtgaaggtaagtaccttcaccaaaacttgtagccagaaagggcttgtctatcctacctttagacaggtagaag

SEQ ID NO: 171822 - DNA, 80 bp, synthetic construct
  source 1..80: mol_type = other DNA
tactgtgaggaaaatggattaatagggaaagccaaatgtacaattgaaagaaatattgaccacctacagtacacactcaa

SEQ ID NO: 171823 - DNA, 80 bp, synthetic construct
  source 1..80: mol_type = other DNA
gagcaaagaaagccagcatatggtcaagctaagtattttgctgctgttcggtgcgggtttcattttcaagtgcaggtcaa

SEQ ID NO: 171824 - DNA, 80 bp, synthetic construct
  source 1..80: mol_type = other DNA
tgcttatattataatgtaaaccactcccaggaagtgaatcacgtagactgtggtttacattataatataagcaagtgcac

SEQ ID NO: 171825 - DNA, 80 bp, synthetic construct
  source 1..80: mol_type = other DNA
taaactaccaagacaactatgataaaacttacaaaacatttaaaacaaaaatgacagacaatctaaacttaatacaaaaa

SEQ ID NO: 171826 - DNA, 80 bp, synthetic construct
  source 1..80: mol_type = other DNA
ccatagagaatttcttaagcagatcggcatgcgtgtacatgggagaatactacaccacaaacacagatgaaaccaaaaga

SEQ ID NO: 171827 - DNA, 80 bp, synthetic construct
  source 1..80: mol_type = other DNA
aattacagacaaaggagtaggcaacaaaatctggtgcgaccccttaacaaaaaacacctttgactatgacccagtaaaaa

SEQ ID NO: 171828 - DNA, 80 bp, synthetic construct
  source 1..80: mol_type = other DNA
acacctcagcatagctaagtggacctcagacagtaatataacttctaaaatagaagaatttttaggtcaagcatttccaa

SEQ ID NO: 171829 - DNA, 80 bp, synthetic construct
  source 1..80: mol_type = other DNA
gcccaaaattaccgttagaatcaggccccccaccctatttgaggacaagtggtatacgcaacaggatctgtgtgaagtaa

SEQ ID NO: 171830 - DNA, 80 bp, synthetic construct
  source 1..80: mol_type = other DNA
tcaggagttgccataatagtgtaagcaacactgtgtatagactctttcaagaattggcaagaatcccaaatagaattagc

SEQ ID NO: 171831 - DNA, 80 bp, synthetic construct
  source 1..80: mol_type = other DNA
aggaggggggacaaggtcgcatctctcttgtctccaagacctatctcttacctaaaggggtcgtctggcggtcccgtgat

SEQ ID NO: 171832 - DNA, 80 bp, synthetic construct
  source 1..80: mol_type = other DNA
acgggacaaggctgagggagtgttgcgagacataagtaagcgcggcgcactgccggtgcgcggcgtcccgcggtgttttt

SEQ ID NO: 171833 - DNA, 80 bp, synthetic construct
  source 1..80: mol_type = other DNA
aaactttctacagccgccctcatcgagcagcaagaaggagactgcatttcaggggaaggaaaatcgccgtcctcacaaga

SEQ ID NO: 171834 - DNA, 80 bp, synthetic construct
  source 1..80: mol_type = other DNA
aaaatttgagctattcacatatgctagatttgactcagagattacaattgtaccttgtgttgctggacagggtggcgaca

SEQ ID NO: 171835 - DNA, 80 bp, synthetic construct
  source 1..80: mol_type = other DNA
acactgaagttaccctcttgtggctagatcagaatgaaaaatttcgtgatatacgtaggttcatcccagaatacatccaa

SEQ ID NO: 171836 - DNA, 80 bp, synthetic construct
  source 1..80: mol_type = other DNA
tggacaaaactcccgcagccctgtccagccctcagtcctattccgcgaatcggcgcgctgacggtggcaaaacctccctc

SEQ ID NO: 171837 - DNA, 80 bp, synthetic construct
  source 1..80: mol_type = other DNA
ccaaagggcagctcctcaattaaagtaagaataacacccccaaagctaatgatagacaagtggtacccacaaactgaact

SEQ ID NO: 171838 - DNA, 80 bp, synthetic construct
  source 1..80: mol_type = other DNA
gtctgcagcaaataccgctcctagttcacatcgcctggaaactggccgtgttccggcattacaggctgcagaaacaggtg

SEQ ID NO: 171839 - DNA, 80 bp, synthetic construct
  source 1..80: mol_type = other DNA
atggctatgcagactttatagaggcagagctaggcatctctgccgagatccacaatgtaggcatagtagtagtgcagtgc

SEQ ID NO: 171840 - DNA, 80 bp, synthetic construct
  source 1..80: mol_type = other DNA
ggcaaaaccaaatcgatggaggcttatcaaattgcagtgggtacaggcaacactgacaagagcaagcccatctttagctt

SEQ ID NO: 171841 - DNA, 80 bp, synthetic construct
  source 1..80: mol_type = other DNA
tccggttgaaaatgcctataagagagagatccactttctccggggctgccaactgcttcacactagcttttgtggttgtg

SEQ ID NO: 171842 - DNA, 80 bp, synthetic construct
  source 1..80: mol_type = other DNA
attatcccaacccacgctgatccagggaaggaagttcaaattgatggtattaccacaaaagtagaagactcatatgattt

SEQ ID NO: 171843 - DNA, 80 bp, synthetic construct
  source 1..80: mol_type = other DNA
gactttctaaccactaaagtattgtctaaggtggttaaaatgatatcagcccttgtaatcatctgcagaaaccatgatga

SEQ ID NO: 171844 - DNA, 80 bp, synthetic construct
  source 1..80: mol_type = other DNA
taaaagtgctgactgaaaccaccaatcaacaggcagagctagaagcaataaaaatggctttagaagactcaggagacaaa

SEQ ID NO: 171845 - DNA, 80 bp, synthetic construct
  source 1..80: mol_type = other DNA
agtagcaacgtgaacttcgacccaaaacctgtgacagaggtcaggtctagcatcatcaccaccggagcttttgggcaaca

SEQ ID NO: 171846 - DNA, 80 bp, synthetic construct
  source 1..80: mol_type = other DNA
gactgtcttgaaatggttctcagaaagataggttttgaatcagctgatcttataaagagaatatcaactactcatcacat

SEQ ID NO: 171847 - DNA, 80 bp, synthetic construct
  source 1..80: mol_type = other DNA
cagacattgcagatagcggtgcagcttattatggcgctgtgtccataaatgattttggattattggcagtgagagtggta

SEQ ID NO: 171848 - DNA, 80 bp, synthetic construct
  source 1..80: mol_type = other DNA
gtctgaaaaaccagaagatgatgaatactcttttcaattaccaaaaaaacctagactattccctcctacagaccgagaag

SEQ ID NO: 171849 - DNA, 80 bp, synthetic construct
  source 1..80: mol_type = other DNA
ttttctaacccatgatattcatggggtggcagatggcgtgccataattctactagagtccctttcccagccttgaggtgg

SEQ ID NO: 171850 - DNA, 80 bp, synthetic construct
  source 1..80: mol_type = other DNA
agaacattttcatgtgctaccgcacgctggagcatgccaagatctgccagctcctgaacacggcccctctcaaggccatc

SEQ ID NO: 171851 - DNA, 80 bp, synthetic construct
  source 1..80: mol_type = other DNA
actctactagtagataagtggtactttcagcacgacatttgcgacatgaccttacttaacataaatgccgttgcggctga

SEQ ID NO: 171852 - DNA, 80 bp, synthetic construct
  source 1..80: mol_type = other DNA
ccccaggcaacacccagttcttgacatctgatgacttccagtcaccatgcgccatgccccagttcgatgtgacacctgag

SEQ ID NO: 171853 - DNA, 80 bp, synthetic construct
  source 1..80: mol_type = other DNA
gcaacagtccggagccgtgtatgtgggcaactataggctggtaaataggcatctagcaacacacaacgattggcgaaatt

SEQ ID NO: 171854 - DNA, 80 bp, synthetic construct
  source 1..80: mol_type = other DNA
ggttcggtggaaacacctcggggtcttattaaggtgactagttacaaaggtgaggagaagatcggatcttacgctgtact

SEQ ID NO: 171855 - DNA, 80 bp, synthetic construct
  source 1..80: mol_type = other DNA
cagccctggtgattattaccagaaattatgaggataccacgacagtacttgccaccctggcgcttttaggctgcgacatc

SEQ ID NO: 171856 - DNA, 80 bp, synthetic construct
  source 1..80: mol_type = other DNA
gacagaacagacctaacattacgcaactaaatggtaaattgtactacatacaaataaacatgaatttgatcactatagta

SEQ ID NO: 171857 - DNA, 80 bp, synthetic construct
  source 1..80: mol_type = other DNA
gaaggccatggttctttatcattattgttcgcatacttcactggggaactaaatatacatgttctgtttttgtcagacaa

SEQ ID NO: 171858 - DNA, 80 bp, synthetic construct
  source 1..80: mol_type = other DNA
atgcctggaggtgctcagcaaataccagctagatggagactcaggtggtaccccatgttttttaaccaacaagaagtact

SEQ ID NO: 171859 - DNA, 80 bp, synthetic construct
  source 1..80: mol_type = other DNA
gttggatggaaccacaatgggtgtccggtgtggggtgggaccaatttgggtgtccgtgcgttgtggaccaactactttgg

SEQ ID NO: 171860 - DNA, 80 bp, synthetic construct
  source 1..80: mol_type = other DNA
tgggagtggccgttgggaatctgaccatcttcccacaccaatggatcaacctgcgcactaacaacagtgcgacgatcgtc

SEQ ID NO: 171861 - DNA, 80 bp, synthetic construct
  source 1..80: mol_type = other DNA
ggatcaaaccaattcctcacatcagatgatttccagtcgccatgtgccttacccaatttcgatgtgacccctccaatcca

SEQ ID NO: 171862 - DNA, 80 bp, synthetic construct
  source 1..80: mol_type = other DNA
tgcagtaaaaaaggcaataaatatgacaatacaagtaaatgccttttagaagacatgccactatggatggtcacctttgg

SEQ ID NO: 171863 - DNA, 80 bp, synthetic construct
  source 1..80: mol_type = other DNA
accggtctgtagccatacctttgctttcgacaggcatatttgcaggaggcaaggaccggctcatgcagtcggtgaatcac

SEQ ID NO: 171864 - DNA, 80 bp, synthetic construct
  source 1..80: mol_type = other DNA
gctaaacacatcaaagcatggtgcccacgaccacctagggctgttgaatacacacacacacatgtcacaaattacaagaa

SEQ ID NO: 171865 - DNA, 80 bp, synthetic construct
  source 1..80: mol_type = other DNA
gcatgcttacgaggaagaggccatggagcagggcattacaaattatattgagtcactcggtgctgcgttcggtagtgggt

SEQ ID NO: 171866 - DNA, 80 bp, synthetic construct
  source 1..80: mol_type = other DNA
cggcggccattttgtttcacaaaatggcggacttccttcctctttttcaaaaattaaccgtcggcggcggcgcgcgcgct

SEQ ID NO: 171867 - DNA, 80 bp, synthetic construct
  source 1..80: mol_type = other DNA
gctacaacagatagaggagacttcaacctgttaggagtgtatgataactgtgcagtgatacccacacatgcccaaccaga

SEQ ID NO: 171868 - DNA, 80 bp, synthetic construct
  source 1..80: mol_type = other DNA
aacatgtgaataagactaaaatatcaaattcattggaggttcttttccaaggacctacctacaaagacctaaatattaat

SEQ ID NO: 171869 - DNA, 80 bp, synthetic construct
  source 1..80: mol_type = other DNA
ataaatactgaacatatgcccagtatggttgagccagttggagatgtcgctcagtatgggtttttggaccataggggtaa

SEQ ID NO: 171870 - DNA, 80 bp, synthetic construct
  source 1..80: mol_type = other DNA
cactacctgtcccaaggatgaattaagacctctagataaagtattggaatccaaaactagggctattgattcttgtcctc

SEQ ID NO: 171871 - DNA, 80 bp, synthetic construct
  source 1..80: mol_type = other DNA
tagtatatctggtatcatttatgttatttacaaacttttctgcacactacaaggaccctactctggtgagcccaagccaa

SEQ ID NO: 171872 - DNA, 80 bp, synthetic construct
  source 1..80: mol_type = other DNA
gccagttcgtcttctgccggtcaatcgttatcattggacccaagcaaattcacaaaaccggtcaaagacctaatgttaaa

SEQ ID NO: 171873 - DNA, 80 bp, synthetic construct
  source 1..80: mol_type = other DNA
ctaacgcattacaattgtcccagccaacaagaccggcactcccaccagccgagcagagtgtccccaacactaaccaaaca

SEQ ID NO: 171874 - DNA, 80 bp, synthetic construct
  source 1..80: mol_type = other DNA
aggcgaaaaacgaggtcgtcgttacccgcaaagtgcctacgaaaagcctagtaacactttgaaaacctatggttggtcgc

SEQ ID NO: 171875 - DNA, 80 bp, synthetic construct
  source 1..80: mol_type = other DNA
actatagcccagattctagcactaagctaccaatcacgatcacaattgcccctatgtgctgtgaattcaatggtctgaga

SEQ ID NO: 171876 - DNA, 80 bp, synthetic construct
  source 1..80: mol_type = other DNA
cacaccattcatatcccaggataataagctgcaaggggatgtggaagaagccattgagagggcacgttgtacagttgctg

SEQ ID NO: 171877 - DNA, 80 bp, synthetic construct
  source 1..80: mol_type = other DNA
tctagacacagaaatcacagccgctagcatacacccaggcatactagccctagacaaaagagcaagatggatacctagct

SEQ ID NO: 171878 - DNA, 80 bp, synthetic construct
  source 1..80: mol_type = other DNA
ggccggctagcctgtgctcttctcccggcgttatcatggtagaataacagagattatgagcctgaatgatgctcgggtag

SEQ ID NO: 171879 - DNA, 80 bp, synthetic construct
  source 1..80: mol_type = other DNA
tgtggggtgtaatccagatgtgttttggtcacaaatgcatgctatgttagatggagaactcattgcttttgattacacca

SEQ ID NO: 171880 - DNA, 80 bp, synthetic construct
  source 1..80: mol_type = other DNA
gctcacgaggggcaggtaccaagtttacagtttctagccttaagagttgtacaagaaggaaaaaatggatcccagggaga

SEQ ID NO: 171881 - DNA, 80 bp, synthetic construct
  source 1..80: mol_type = other DNA
ccatgctacacccaggcatgcttatgcagagaaaaaagaagatattattacccagctttacaaccagacctaggggcaga

SEQ ID NO: 171882 - DNA, 80 bp, synthetic construct
  source 1..80: mol_type = other DNA
tactctggtattatgtacctttgtacgcctgtttcttccctacaaccccttcctaaaactcccacccatgaaacgttaga

SEQ ID NO: 171883 - DNA, 80 bp, synthetic construct
  source 1..80: mol_type = other DNA
cttgattatgctgcccaggcatctgagtatgtgccagtgacagtcacgatcgccccaatgtgtgctgagtataacggcct

SEQ ID NO: 171884 - DNA, 80 bp, synthetic construct
  source 1..80: mol_type = other DNA
tcacagtgaccatagccccaatgtttactgaatttactggaattagatccaagactatcgttccaaatgctacccctcag

SEQ ID NO: 171885 - DNA, 80 bp, synthetic construct
  source 1..80: mol_type = other DNA
tttatgttttaaaaccctcactatataatggctacatgtccaatctagcagacaatgaccaccaacaacaaagacaacaa

SEQ ID NO: 171886 - DNA, 80 bp, synthetic construct
  source 1..80: mol_type = other DNA
cccggccccccccccgaagtccgtcacaaaccacgtgattcccgcaggccaatcacccgctactacgtacacttcctggg

SEQ ID NO: 171887 - DNA, 80 bp, synthetic construct
  source 1..80: mol_type = other DNA
atagaaggagcagtgacccaaacgaccaatagggtgttaagtggaccgattcagccaatgacagcagcaaacacccagcc

SEQ ID NO: 171888 - DNA, 80 bp, synthetic construct
  source 1..80: mol_type = other DNA
ctcgctgagcttgagtccagcctccgatgagagattgtctcgcactctgctaggtgagatattgaactattacacccatt

SEQ ID NO: 171889 - DNA, 80 bp, synthetic construct
  source 1..80: mol_type = other DNA
aacactactataaatgccaagtacaaattcagattcaaatggggcggtaatatgatttatcagcagaccatcaaaaatcc

SEQ ID NO: 171890 - DNA, 80 bp, synthetic construct
  source 1..80: mol_type = other DNA
gagtgcactactccaaggggacgtggtggaggcaactgagaacgcggttgccagggtagcagacacaattagcagtggtc

SEQ ID NO: 171891 - DNA, 80 bp, synthetic construct
  source 1..80: mol_type = other DNA
tactgttcacgtctgattacgtgttggcttccaccaactcgcacacaataacaccacccactgtttctcacagcgatgcc

SEQ ID NO: 171892 - DNA, 80 bp, synthetic construct
  source 1..80: mol_type = other DNA
tgccccagcccttccgtgtctccttcaaactcggcttccaataaacaatttctaggccgttgactgttcacttgtcggtg

SEQ ID NO: 171893 - DNA, 80 bp, synthetic construct
  source 1..80: mol_type = other DNA
acatgcgtcacgtaaatgatgggagtccaggtcctatcgtgagcaccgtacgcatttacttcaaacctaaacacgtgaaa

SEQ ID NO: 171894 - DNA, 80 bp, synthetic construct
  source 1..80: mol_type = other DNA
acgttgaacgcggtagatgttctttcccctcgcgatcaagttcgttggtcatacggtccaggcgggcaaggctacatgtt

SEQ ID NO: 171895 - DNA, 80 bp, synthetic construct
  source 1..80: mol_type = other DNA
tccctttttacaccccggacttatgatgttacaaaaaaaaaaaatactaatacctagctttcaaacaaaaccagggggca

SEQ ID NO: 171896 - DNA, 80 bp, synthetic construct
  source 1..80: mol_type = other DNA
caagtgaggacttcagaaggtgcgtgagaagtatgtgggaacgcgacatcatggttgtggagtcaaaagcacagggcacg

SEQ ID NO: 171897 - DNA, 80 bp, synthetic construct
  source 1..80: mol_type = other DNA
ccattccgggccgcgtgctgggtccccgaggggcgggggggtttttttagcgtggaggtagtagttgcgtgtgctgcggt

SEQ ID NO: 171898 - DNA, 80 bp, synthetic construct
  source 1..80: mol_type = other DNA
gcctgagcccatcccccaccccagcaccccggggtgacgtggcaccccgcgtgccttactgacttgtcacctttgcacat

SEQ ID NO: 171899 - DNA, 80 bp, synthetic construct
  source 1..80: mol_type = other DNA
gcgctgcgctcgcgcgccgcggggctgccgcccccccccgcgcatgcgcgcggggcccgcccccgctggaggctccgccc

SEQ ID NO: 171900 - DNA, 80 bp, synthetic construct
  source 1..80: mol_type = other DNA
ctgcacgttctaaccatcagggacctccacgcccgtccgcagcgagatcgcgacggaggagcgatcgagcgtcccgaggg

SEQ ID NO: 171901 - DNA, 80 bp, synthetic construct
  source 1..80: mol_type = other DNA
cagaaatccacaactttggcatagtgtgctttcgctgtccctacacttttcccccctgttatagcaagtccacacctgac

SEQ ID NO: 171902 - DNA, 80 bp, synthetic construct
  source 1..80: mol_type = other DNA
ttgcccaaaatggcgggcaagctcctccgggtcaaaggtcagcaactacgtcacaagtcacgtggtgagggttggcgtat

SEQ ID NO: 171903 - DNA, 80 bp, synthetic construct
  source 1..80: mol_type = other DNA
tgagtgaggccagacttcgccatagggcctttaacttggggtcgtctgtcggtggcttccgggtccgcctgggcgccgcc

SEQ ID NO: 171904 - DNA, 80 bp, synthetic construct
  source 1..80: mol_type = other DNA
cacccttgagggcgcaagagagctcgttaaggtcctgcaacgagccctcttcgtgcactccagagcaggatgcggtcgct

SEQ ID NO: 171905 - DNA, 80 bp, synthetic construct
  source 1..80: mol_type = other DNA
ccttgagccccaccatccgctgccaccctctttgagccccaccgtccgctgccaccctctttgagccccttcttaccgat

SEQ ID NO: 171906 - DNA, 80 bp, synthetic construct
  source 1..80: mol_type = other DNA
ggaccgaacccgtatgtttactattgcatggacagcccgggtgtggcaaatctctactaacaacagtcttagccagaggc

SEQ ID NO: 171907 - DNA, 80 bp, synthetic construct
  source 1..80: mol_type = other DNA
atacaaatagttctgagccagtgcactcccaagaagtgcctgctcttacagcagtggagacaggagccaccagcagtgtt

SEQ ID NO: 171908 - DNA, 80 bp, synthetic construct
  source 1..80: mol_type = other DNA
attgaagtttacttgagcctgagatgtccaaacttcttcttccctctcccagcccctaaagtgacgacaagccgttcatt

SEQ ID NO: 171909 - DNA, 80 bp, synthetic construct
  source 1..80: mol_type = other DNA
cggacgcaggggatggatgcccccggacctgacggtccaggagagggaggatgcctggtggaccagcttctgcgctagcc

SEQ ID NO: 171910 - DNA, 80 bp, synthetic construct
  source 1..80: mol_type = other DNA
atgacaaaaagaataggcaaatgtagaaacctagacaatgactggatattagtactaagaacacaatactttagtgacaa

SEQ ID NO: 171911 - DNA, 80 bp, synthetic construct
  source 1..80: mol_type = other DNA
ttggtcaggctcccttgtatggcacaccaccccccaaggactgcccgctcacctacatgactagcatcaagcaaactaat

SEQ ID NO: 171912 - DNA, 80 bp, synthetic construct
  source 1..80: mol_type = other DNA
atcagcagcttggtcataataaccaggaactatgaagactccaccacagtgctcgctacattagctttgctagggtgtga

SEQ ID NO: 171913 - DNA, 80 bp, synthetic construct
  source 1..80: mol_type = other DNA
tcaaggccgtgggactttcacttgtcggtgtctacctctaaaggtcactaagcactccgagcgccagcgaggagagcgac

SEQ ID NO: 171914 - DNA, 80 bp, synthetic construct
  source 1..80: mol_type = other DNA
gaacaggcacacatcaggaagaagtttgaaatgtttacatacctccgctttgatatggaggttactatagttacaaataa

SEQ ID NO: 171915 - DNA, 80 bp, synthetic construct
  source 1..80: mol_type = other DNA
cggacgccatccggtccaacctggacctggccaaacagcttctcactctctcgcatgctgccaactctgtcacccacatc

SEQ ID NO: 171916 - DNA, 80 bp, synthetic construct
  source 1..80: mol_type = other DNA
ggagctcccgttcccaccggtagggggacattccagtggcagacagcaacaaacccatcggtgatatcaaaaatgactga

SEQ ID NO: 171917 - DNA, 80 bp, synthetic construct
  source 1..80: mol_type = other DNA
ccacgtacgtgatagacaagtatgtctagcgtgagcggcgtgcgcacgccgcgcgaacgacgctcggccttgcgctccct

SEQ ID NO: 171918 - DNA, 80 bp, synthetic construct
  source 1..80: mol_type = other DNA
cacgccgtcttgaacgcggggcccgggaagaggttcttctccccggcgcgctcgggccggcgaggccgacgcggtttata

SEQ ID NO: 171919 - DNA, 80 bp, synthetic construct
  source 1..80: mol_type = other DNA
ttgtctactgttctaaacaagaggtctctgtatcaggtatgtctctgtgctcaggaatgtccagagcagcatgttaatac

SEQ ID NO: 171920 - DNA, 80 bp, synthetic construct
  source 1..80: mol_type = other DNA
gaaaggtatgtggatgaggtcttgaatgaggtgcttgtggttccaaacatcaaccagagtaacccttcaacatccaattc

SEQ ID NO: 171921 - DNA, 80 bp, synthetic construct
  source 1..80: mol_type = other DNA
cagtggccaacgaagtcaacgcggcagccctctcatcgggtgaaacggccaagtatttcgcaaaaactggtgccacggga

SEQ ID NO: 171922 - DNA, 80 bp, synthetic construct
  source 1..80: mol_type = other DNA
tgaactttgacgcgaccgcagtcaccgatacacgggaaactataaacactgtccctgtgtcgaaccatggcggcaatcgc

SEQ ID NO: 171923 - DNA, 80 bp, synthetic construct
  source 1..80: mol_type = other DNA
ctggtcacacatcacaagtggaaccctgcgatacgatgcagactcggcatgtgaagaactaccactcccggtctgaatca

SEQ ID NO: 171924 - DNA, 80 bp, synthetic construct
  source 1..80: mol_type = other DNA
gccattctagtcacttgcagtgggtgtcctgatctatctgtaagaatgttaagagatacaccaatgatgaagcaaaccaa

SEQ ID NO: 171925 - DNA, 80 bp, synthetic construct
  source 1..80: mol_type = other DNA
gaacccaaaccagttgttgacaatgatgaacacatggagtttggggctttcactaatctaccacatgtacttatgaatct

SEQ ID NO: 171926 - DNA, 80 bp, synthetic construct
  source 1..80: mol_type = other DNA
ggcaccactgttagaaactacaatgtacacagccaagactatgtacaatatgacagctatggaggtggaatgaccaccac

SEQ ID NO: 171927 - DNA, 80 bp, synthetic construct
  source 1..80: mol_type = other DNA
gcagcgctgcggcagcactgctgtcgacgcgtcgggcgatccctttcgctcagacagctacggcctgttgggcaacagcg

SEQ ID NO: 171928 - DNA, 80 bp, synthetic construct
  source 1..80: mol_type = other DNA
gaaaaaaacccgggtgcgggaggagacgggtcgtcctttggtcgttcgcggacggcgtacatgccgcgtgggtcagtcga

SEQ ID NO: 171929 - DNA, 80 bp, synthetic construct
  source 1..80: mol_type = other DNA
aaacccggggctcggccagccgagccgaccggccccgcgccgggcgcctcctcggagccagccgcccagagccccccggg

SEQ ID NO: 171930 - DNA, 80 bp, synthetic construct
  source 1..80: mol_type = other DNA
attataaaaaacctgatcaggaagatgttacaattttcattgaacgtagacaagacccaaaattcattacaacaggacca

SEQ ID NO: 171931 - DNA, 80 bp, synthetic construct
  source 1..80: mol_type = other DNA
tgttttcgcccgtgctgggcgccggcgctggtaacgggagttacgctggggacggtggtttttggccgtactggtgagtg

SEQ ID NO: 171932 - DNA, 80 bp, synthetic construct
  source 1..80: mol_type = other DNA
aagaacaaaccactccggcaaaagaggtatttgccataccagtggatgtagcttcacaacctttggccacaacactgata

SEQ ID NO: 171933 - DNA, 80 bp, synthetic construct
  source 1..80: mol_type = other DNA
ttaaaactgaatcatggttgttcccaccatgattgtctactggacgttgtactcttgtattccggtacacttgtacgcca

SEQ ID NO: 171934 - DNA, 80 bp, synthetic construct
  source 1..80: mol_type = other DNA
gcccctggtgacccaggcaaacctgacaaataaggccccccaggaaagacccccgggtggcatcggcgtggtgtcgggcc

SEQ ID NO: 171935 - DNA, 80 bp, synthetic construct
  source 1..80: mol_type = other DNA
ccttcgtgacccaaaccgcattctaccagaatgacgtgcagaacgctgtggagcggtcgatcgtccgtgttgccgataca

SEQ ID NO: 171936 - DNA, 80 bp, synthetic construct
  source 1..80: mol_type = other DNA
aacataattagaagcacgacacacagtccaataggaggcggttaatccacaatcgtcacggacaagcacttctgtttccc

SEQ ID NO: 171937 - DNA, 80 bp, synthetic construct
  source 1..80: mol_type = other DNA
agcctcccgacgcagacggaaacagaagcagaagcccaagaagaagaagcccaccaagaagagacggaggagggactcca

SEQ ID NO: 171938 - DNA, 80 bp, synthetic construct
  source 1..80: mol_type = other DNA
tgtttagactgcaataagacctctctcactatatacaacgtaactaccgaacacgctggaaaatacgttttgcaacgtta

SEQ ID NO: 171939 - DNA, 80 bp, synthetic construct
  source 1..80: mol_type = other DNA
gagcaagacttgggatagttcatctaaaggatggtggtggaagcttccagatgcacttaaagacatgggtatatttggtg

SEQ ID NO: 171940 - DNA, 80 bp, synthetic construct
  source 1..80: mol_type = other DNA
caaatttgttcttcccttccccggcacctaaacagaaagcttctagatcaattaccagcaattcttttgaggatgaaagt

SEQ ID NO: 171941 - DNA, 80 bp, synthetic construct
  source 1..80: mol_type = other DNA
atcttagaactaataattccagcacaattattagcccttacattaattgccagccaatggacaacatgctaaagcacaat

SEQ ID NO: 171942 - DNA, 80 bp, synthetic construct
  source 1..80: mol_type = other DNA
gttactcctcagttactccccacccggagcaaaagcaccaactaccagaaaagatgcgatgctagggactcacataattt

SEQ ID NO: 171943 - DNA, 80 bp, synthetic construct
  source 1..80: mol_type = other DNA
aggccaatcagagtgtatgtcgtacacttcctgggcatggtttacgtgataatataaagcggcgcacttccgaatggctg

SEQ ID NO: 171944 - DNA, 80 bp, synthetic construct
  source 1..80: mol_type = other DNA
acgcaggcatggggtatggggcccctgacacaaccgtcgaaaaaatatttaacactctatataccacagccacctactgg

SEQ ID NO: 171945 - DNA, 80 bp, synthetic construct
  source 1..80: mol_type = other DNA
taaacacggaagtagctgacccacgtgatttgtcacgtggtgtttacgtcatcgccgccattttaaatcacaaaatggcc

SEQ ID NO: 171946 - DNA, 80 bp, synthetic construct
  source 1..80: mol_type = other DNA
aagccctccaagcggcgatgcgggctgcgggagagactcttgcaagcgcgggtggagaattatgggcaactctgggaagg

SEQ ID NO: 171947 - DNA, 80 bp, synthetic construct
  source 1..80: mol_type = other DNA
cagggacacgggactttgacccggcttttcacttactattctggtgagcttaacgtgcatgtactgtatctcagtgacaa

SEQ ID NO: 171948 - DNA, 80 bp, synthetic construct
  source 1..80: mol_type = other DNA
atagaaatgtgtcaagtagatactttaattcccattaataacacacaagcaaatttaaagaaaatcaacatatatacaat

SEQ ID NO: 171949 - DNA, 80 bp, synthetic construct
  source 1..80: mol_type = other DNA
acagacaaccccatacatggcagttacttaaaacctacattaaactctgtagattaccatttaggaaaatacagtgctat

SEQ ID NO: 171950 - DNA, 80 bp, synthetic construct
  source 1..80: mol_type = other DNA
gaggcaacggtggagacagatcctggccttggcagatagaatatatacatttcctgatccgccagctgatccgcctcttg

SEQ ID NO: 171951 - DNA, 80 bp, synthetic construct
  source 1..80: mol_type = other DNA
tttagaagtcaacaacctcaatgaaaatgaagccaatccaatgcagcgccttgtgataccggtcaaagtgcaaacttcca

SEQ ID NO: 171952 - DNA, 80 bp, synthetic construct
  source 1..80: mol_type = other DNA
tacttagggacaccactcacattactcaggacgcgctagcccaggggattgaggatttgattcaacaggttgcttctaat

SEQ ID NO: 171953 - DNA, 80 bp, synthetic construct
  source 1..80: mol_type = other DNA
gcgtcgagccttcacccgaatgtgtctgcgggccacggtggcctctccgcccataacatcccggtcgagccggctggcat

SEQ ID NO: 171954 - DNA, 80 bp, synthetic construct
  source 1..80: mol_type = other DNA
tccatccaaaacaaaattgcaacccagtgttttctatgatgttttccccggttcaaaagaaccagctgtgttgtctgaaa

SEQ ID NO: 171955 - DNA, 80 bp, synthetic construct
  source 1..80: mol_type = other DNA
tttctgtggctgccgaagcagatggcgactttgtttagggacagaccctgggccttggctatggtcatggccagctttga

SEQ ID NO: 171956 - DNA, 80 bp, synthetic construct
  source 1..80: mol_type = other DNA
caaatcaaaacagtacatctgggtagaatactacacctaccaccctactcatacctaaggtctaggtggttagataattt

SEQ ID NO: 171957 - DNA, 80 bp, synthetic construct
  source 1..80: mol_type = other DNA
atgacatcatagataatgttgtgactaatgcactgaaagtatccatgccacaggttcaagatacacaatctagtggacca

SEQ ID NO: 171958 - DNA, 80 bp, synthetic construct
  source 1..80: mol_type = other DNA
tgagttgactacagaagacacgccacacgtcttcacttcagactcgatcacaggaaagaaggtgcaagcagctgtgtgca

SEQ ID NO: 171959 - DNA, 80 bp, synthetic construct
  source 1..80: mol_type = other DNA
gaactttagtagtagctgctataccagaacaccaactggcttacattgggtcaggaaatgtgagtgtagggtataggcat

SEQ ID NO: 171960 - DNA, 80 bp, synthetic construct
  source 1..80: mol_type = other DNA
aaagctaaacatatcaaggcttggtgccctagagcacctagagcagtttcatatcagcacatatataatcccaactttaa

SEQ ID NO: 171961 - DNA, 80 bp, synthetic construct
  source 1..80: mol_type = other DNA
ctgaggcgaaagtttgagttgtttacctacatgcggttcgacatggaggttacatttgtcattaccagtagacaattgcc

SEQ ID NO: 171962 - DNA, 80 bp, synthetic construct
  source 1..80: mol_type = other DNA
caaaacccaacactgactatgaccctacaaaatgccgctacgtactaaaagacatacccctatgggccatggcccacgga

SEQ ID NO: 171963 - DNA, 80 bp, synthetic construct
  source 1..80: mol_type = other DNA
ggggccggagctctggtgatacgttacctttgtgcgcctgttttatttccctaccccggaacaatctagaagcaacgcgc

SEQ ID NO: 171964 - DNA, 80 bp, synthetic construct
  source 1..80: mol_type = other DNA
gttaaaacaattggatgttttggagaggcaaatttccactatgcatgtttctaaccccacacaggagaaaagagaacaat

SEQ ID NO: 171965 - DNA, 80 bp, synthetic construct
  source 1..80: mol_type = other DNA
ctttgacccccttataatatgtggcattaacagaacaatatttaactacactacacactctgaagactttacttttaaca

SEQ ID NO: 171966 - DNA, 80 bp, synthetic construct
  source 1..80: mol_type = other DNA
ttccggactacaaaaaccgccatatttgtgacgtcacggccgccattttaagtaagcatggcgggcggtggtgtcaaatg

SEQ ID NO: 171967 - DNA, 80 bp, synthetic construct
  source 1..80: mol_type = other DNA
acaaccgcatcctgcccaccgcctccgacgccatggtggccttcatcaatcagacgtccaacatcatgaaaaatagaaac

SEQ ID NO: 171968 - DNA, 80 bp, synthetic construct
  source 1..80: mol_type = other DNA
actccggactattgttagtgataaccgtaaccgataataagggagcattcaaatacataaaaccccaatcccaatttata

SEQ ID NO: 171969 - DNA, 80 bp, synthetic construct
  source 1..80: mol_type = other DNA
acagactttatagcccagtatgacattgctgaaccttttgcattagacaaatacagcagtcccagctatcatccagctaa

SEQ ID NO: 171970 - DNA, 80 bp, synthetic construct
  source 1..80: mol_type = other DNA
gtgtaggcggtggaggctaccagactctatgtgataagtcaatgacagttttgggaagtgatgagtctttggttaccagt

SEQ ID NO: 171971 - DNA, 80 bp, synthetic construct
  source 1..80: mol_type = other DNA
actccaggtaacattaataaaatggaagcataccctatcccactcactcagggcgcccctgtaaaggaccaagcaatatt

SEQ ID NO: 171972 - DNA, 80 bp, synthetic construct
  source 1..80: mol_type = other DNA
gcaaacagaagatactagtaaagagctttaaaacaaaacccagaggcaaggccacagtgaaagttaccattaagcccccc

SEQ ID NO: 171973 - DNA, 80 bp, synthetic construct
  source 1..80: mol_type = other DNA
ctggtgggggtgggtttgtgtgttttgcagatatcagaatgttagacatgctccatgcacactaccagggtatcccagac

SEQ ID NO: 171974 - DNA, 80 bp, synthetic construct
  source 1..80: mol_type = other DNA
tcactaccgcaaggaccagcttaaacgacgtcccgacccccaaccacagcagcagcgtgcacttgcgcttagggaataca

SEQ ID NO: 171975 - DNA, 80 bp, synthetic construct
  source 1..80: mol_type = other DNA
cccaagcaaatttacagaacctgtcatggacatcatggttaaatcgctcccagcgttgaattcacccaacgcagaagaat

SEQ ID NO: 171976 - DNA, 80 bp, synthetic construct
  source 1..80: mol_type = other DNA
catgttctgtggcagttttatggccacaggcaaggtcattttatgctacacaccaccaggaggctcatgcccaacagata

SEQ ID NO: 171977 - DNA, 80 bp, synthetic construct
  source 1..80: mol_type = other DNA
taccaccatctcacccaccatcgccactactacttctgccccctccaaagcaatcagactcaatgaaacgactctatgtg

SEQ ID NO: 171978 - DNA, 80 bp, synthetic construct
  source 1..80: mol_type = other DNA
aaaatcccaaacataacaacatatttaacagctacaccaacaacacagtcatttaaaactggaaacaacagtatatatgg

SEQ ID NO: 171979 - DNA, 80 bp, synthetic construct
  source 1..80: mol_type = other DNA
cgcccggaaacaccgccgtcgccgccccgaaaagcgaagcgccgcgcaaaagccaacccccgagcgcccgcaacaccccg

SEQ ID NO: 171980 - DNA, 80 bp, synthetic construct
  source 1..80: mol_type = other DNA
ttgttacaaatgttgttgactcatatgacttacataacaaagatgggattaagcttgaaatcacagttatcaaactagac

SEQ ID NO: 171981 - DNA, 80 bp, synthetic construct
  source 1..80: mol_type = other DNA
cacatccaggtgaacagggtattgatttaggtactaatggtgaaagaactggacctgctaaggatgcggtctataacatg

SEQ ID NO: 171982 - DNA, 80 bp, synthetic construct
  source 1..80: mol_type = other DNA
ggtagagcaaaccaagggaaaatggatatttcgggtgtccaagctcctgtaggagctattactaccattgaagatccagt

SEQ ID NO: 171983 - DNA, 80 bp, synthetic construct
  source 1..80: mol_type = other DNA
aatgtaacatttaagcttggttttaaataaacaaggccgtgggagtttcacttgtcggtgtctacctcttaaggtcacta

SEQ ID NO: 171984 - DNA, 80 bp, synthetic construct
  source 1..80: mol_type = other DNA
gtaaggagccagttggcgccgaaagttggcactcaggtcttcgatccctaaaacgttatatattgcatccagcaggtgag

SEQ ID NO: 171985 - DNA, 80 bp, synthetic construct
  source 1..80: mol_type = other DNA
tcataaggctaaacatgtaaaagcttggtgcccaaggccccctagagcagttgaatacatacacacacatgttacaaact

SEQ ID NO: 171986 - DNA, 80 bp, synthetic construct
  source 1..80: mol_type = other DNA
cctcacactcaaataaagtgcagcttcaaacttgcaaggccgtgggagtttcactggtcggtgtctacctctaaaggtca

SEQ ID NO: 171987 - DNA, 80 bp, synthetic construct
  source 1..80: mol_type = other DNA
acatcaattatttcaaggatgcagcctcttcaggagcatctagacttgatttttcgcaagacccaagtaaatttactgat

SEQ ID NO: 171988 - DNA, 80 bp, synthetic construct
  source 1..80: mol_type = other DNA
gggtgtctgctgagaaaggttaccgtttcaaaagagaccgcaagaccaacaaggtatatttctcttggctttccgacacc

SEQ ID NO: 171989 - DNA, 80 bp, synthetic construct
  source 1..80: mol_type = other DNA
tacagacggggttggcaacgcagggtgtatctgagacgcaggagacgcaggagacgaaagagacttgtactgactcagtg

SEQ ID NO: 171990 - DNA, 80 bp, synthetic construct
  source 1..80: mol_type = other DNA
acttttcacacttttggggtacacaggcgtgccaccgcagataataagcgctggatacacggtacacagtcctggccagc

SEQ ID NO: 171991 - DNA, 80 bp, synthetic construct
  source 1..80: mol_type = other DNA
ttttctcctcggcagccacagagattctagataacgatttggtcaaattcatagtgaaaatactcgtcagaattctctgt

SEQ ID NO: 171992 - DNA, 80 bp, synthetic construct
  source 1..80: mol_type = other DNA
ggaaaagagaaaatacctgtttaacaatgtgatgtggttggagcagatgtcacaaaaatttgcccctctctatgctacag

SEQ ID NO: 171993 - DNA, 80 bp, synthetic construct
  source 1..80: mol_type = other DNA
gtacggttgctcagagacaccacacacataagtcaaagtgccttgatcgcatcaacacagggcattgatgacgtcattga

SEQ ID NO: 171994 - DNA, 80 bp, synthetic construct
  source 1..80: mol_type = other DNA
ggaagggttccggcaactgtcgcaaatatagcagcggcgacaggtgtggcgcccaaaagtcgcgtgtctgagtggacgtg

SEQ ID NO: 171995 - DNA, 80 bp, synthetic construct
  source 1..80: mol_type = other DNA
aagatatgattacccaaccaaaactggacaatgtggtggagtcctatgttcaacaggcaaaatttatggagtacatgttg

SEQ ID NO: 171996 - DNA, 80 bp, synthetic construct
  source 1..80: mol_type = other DNA
cgcatactggcgcctctttccgctgggcctcctgccgcggggcctcacatagtgacgcctccttccgcccggcctcgtag

SEQ ID NO: 171997 - DNA, 80 bp, synthetic construct
  source 1..80: mol_type = other DNA
cttgtacacagacataatttacaacccactaatagacaaaggaataggtaatcatgtatggatagattactgcagcaaaa

SEQ ID NO: 171998 - DNA, 80 bp, synthetic construct
  source 1..80: mol_type = other DNA
agtaatgctagtgtattcttttcaatctctgaccccccagccagaatgaccataccttttatgtgtattaattcagcata

SEQ ID NO: 171999 - DNA, 80 bp, synthetic construct
  source 1..80: mol_type = other DNA
tctctacggcgcttctgcgcgacgcgctgggaaccgggctgcgggttttcgggcgtgctggccgccgacggggacggtgc

SEQ ID NO: 172000 - DNA, 80 bp, synthetic construct
  source 1..80: mol_type = other DNA
tactttaagcctaagcacatcagagtctgggtgccgcgaccaccgcgcttgtgtccctacatcaagtccaacaacgttaa

SEQ ID NO: 172001 - DNA, 80 bp, synthetic construct
  source 1..80: mol_type = other DNA
ccccccaggccgtgttggtacagccacatgtcccccctctacgcccgacagcacccaccattttgtcacctctgtcacga

SEQ ID NO: 172002 - DNA, 80 bp, synthetic construct
  source 1..80: mol_type = other DNA
tcactgaagcatgtaatgccgccaaggggttagaatggatcagcaacaaaatatctaaatttattgactggctgaagaac

SEQ ID NO: 172003 - DNA, 80 bp, synthetic construct
  source 1..80: mol_type = other DNA
gtattggtcgtcttcttcccctgcagagtaattgcagtggaccccggaggccacactgcaatttctcagcgtcacattgc

SEQ ID NO: 172004 - DNA, 80 bp, synthetic construct
  source 1..80: mol_type = other DNA
gccgcggcaaccgatacaattcgaaaatgaatttgccctcttgatagatggtgcgttcgaaccactcgcagcgcggcaaa

SEQ ID NO: 172005 - DNA, 80 bp, synthetic construct
  source 1..80: mol_type = other DNA
gtaagcttaatttaaggtgtgcactcaagccatgtagtgaagggaaagttggaaatgctagatgctgtccattaatatgt

SEQ ID NO: 172006 - DNA, 80 bp, synthetic construct
  source 1..80: mol_type = other DNA
agaactacggggccttcgtcgagcatgccggagcggcttatgtgtataattacaggatactcaataggcacttagccacg

SEQ ID NO: 172007 - DNA, 80 bp, synthetic construct
  source 1..80: mol_type = other DNA
aacatcagaaaggcaagaaaggcatactggactgccttagagaaacgtaatgacctatctgttaacatagcacaggcaaa

SEQ ID NO: 172008 - DNA, 80 bp, synthetic construct
  source 1..80: mol_type = other DNA
tggggtggaccggcggcgcgaaaagacagggagatggacagtgtcacggtgttttgttatgattaggacatggagaccgg

SEQ ID NO: 172009 - DNA, 80 bp, synthetic construct
  source 1..80: mol_type = other DNA
tagagtggattctttcatgccaattaacaatattacagaccagaagatagatgtacctatctatagtaggacagtaactg

SEQ ID NO: 172010 - DNA, 80 bp, synthetic construct
  source 1..80: mol_type = other DNA
gatagatggtaaaggacatataccactctactggctacaaagatggagacccgctctaatgttccaaactgacgttttta

SEQ ID NO: 172011 - DNA, 80 bp, synthetic construct
  source 1..80: mol_type = other DNA
ttcaggtaacccctcacacacaaaattaaagccacccacattacggcaggtggtagttcagggcccaaatacagaatttg

SEQ ID NO: 172012 - DNA, 80 bp, synthetic construct
  source 1..80: mol_type = other DNA
caaaaagaatacctatatcatcaccctaacaatgtcaccacagatcttataactaaaaacacactcacacatgactgggg

SEQ ID NO: 172013 - DNA, 80 bp, synthetic construct
  source 1..80: mol_type = other DNA
tacacagaaaacaccttccatgagctggagcagacccactcacgatgccgcgggcatcgaacgcaggtggtatgactgcg

SEQ ID NO: 172014 - DNA, 80 bp, synthetic construct
  source 1..80: mol_type = other DNA
gcaactagccaagtgactccagaagatttaattgagacaaggcatgtgattaacaacaggctgagatcggaatgcacaat

SEQ ID NO: 172015 - DNA, 80 bp, synthetic construct
  source 1..80: mol_type = other DNA
ttcaataaacatggtggttgcccagatccgtgaggaattgtcaggcaggaaaagtgtacagctaaacctaaataacatct

SEQ ID NO: 172016 - DNA, 80 bp, synthetic construct
  source 1..80: mol_type = other DNA
cctggtattagaaaacctgagaacaggagagaagcaatgttaggtacgcatgttgtatgggatgtgggcttacaatccac

SEQ ID NO: 172017 - DNA, 80 bp, synthetic construct
  source 1..80: mol_type = other DNA
gcaccctggatttcaaatgtcaattatagaaggtgtgccaaggacgatttttcggaaggtggatacatcactgcttttta

SEQ ID NO: 172018 - DNA, 80 bp, synthetic construct
  source 1..80: mol_type = other DNA
tgacccagtagcgggagggattccacaggcagactcttgtggatcaggttattgaccacatacaggtgctcatcgtacgt

SEQ ID NO: 172019 - DNA, 80 bp, synthetic construct
  source 1..80: mol_type = other DNA
accttattcacagacaaatggtactttcagagagacctctgtaaagttcctcttgtaacggtttccgcttctgcggcgag

SEQ ID NO: 172020 - DNA, 80 bp, synthetic construct
  source 1..80: mol_type = other DNA
gggggggcggaggccggggccgcggagaccggggccgcagaggccggcgccgcagaggccgggggcgcagaggccggggc

SEQ ID NO: 172021 - DNA, 80 bp, synthetic construct
  source 1..80: mol_type = other DNA
ctatacagattgatgtgtataacccaaggaccctatacaggtctacctcaacccattacaaagaaaccagagctcaggag

SEQ ID NO: 172022 - DNA, 80 bp, synthetic construct
  source 1..80: mol_type = other DNA
tttttcaacaggcatcgtgtccaaaaaaccccgattcgacacaccccaccacgggcagctatcaaaccaagaagaagacg

SEQ ID NO: 172023 - DNA, 80 bp, synthetic construct
  source 1..80: mol_type = other DNA
aggatactccatgcgcacgcgcagacaactgctcaggattgggagaggaagaaacgatcaattgccagttcaatatgaca

SEQ ID NO: 172024 - DNA, 80 bp, synthetic construct
  source 1..80: mol_type = other DNA
gtcaattttattctcagtagtaacataccgatgttactttactttataatctatcttgaaaggatttatcagattaggga

SEQ ID NO: 172025 - DNA, 80 bp, synthetic construct
  source 1..80: mol_type = other DNA
tccctacatactcagagtcaaattaccactactcaaaagccagctaaacaaggcacaagtccattccctaataaggacca

SEQ ID NO: 172026 - DNA, 80 bp, synthetic construct
  source 1..80: mol_type = other DNA
agtcgtcggcgtcttcctcgggcgaagcgccagagcaacaggtccccgcttggaagaccgtgcgggccttctcgcgggcc

SEQ ID NO: 172027 - DNA, 80 bp, synthetic construct
  source 1..80: mol_type = other DNA
gcagcccggccgaggcctgcgacgcggtgctgaccggctcggccacgctgataaagttgtcctgggctgccccgggccca

SEQ ID NO: 172028 - DNA, 80 bp, synthetic construct
  source 1..80: mol_type = other DNA
tcactatccctacctacctaccacctgcaaagtcacctttcgtctcggcttcaaaccctaactcaaataaaactctgttt

SEQ ID NO: 172029 - DNA, 80 bp, synthetic construct
  source 1..80: mol_type = other DNA
accaaaaacggttttccacttagttgtcaacggatctttcctatgcgtaatggtaaaattactaccagtcgtcgctttta

SEQ ID NO: 172030 - DNA, 80 bp, synthetic construct
  source 1..80: mol_type = other DNA
ataggtacttccctatacacctggaagctcatgactggtatgagatacaagaaacatgctactatcccaagcatatacag

SEQ ID NO: 172031 - DNA, 80 bp, synthetic construct
  source 1..80: mol_type = other DNA
ctcagacctacctacagtgttagccaccttggcactgcttgggtgtagctcatccccatggtccttcctcaaggataaaa

SEQ ID NO: 172032 - DNA, 80 bp, synthetic construct
  source 1..80: mol_type = other DNA
ttatgccgttcatgcaataatacagagttgcatctatacgatctcaacaccacaaactccggtagatatagcagacgttg

SEQ ID NO: 172033 - DNA, 80 bp, synthetic construct
  source 1..80: mol_type = other DNA
ggtgtgagacaatcaaggctaagattcgagagaacggctgcgacgctgcctttactccctactccgtcctccagcgtggt

SEQ ID NO: 172034 - DNA, 80 bp, synthetic construct
  source 1..80: mol_type = other DNA
cacgggggcaactccttatgtaccgatcaccgtcacggtggcccccatgtgctctgagtataacgggctgcgacttgcat

SEQ ID NO: 172035 - DNA, 80 bp, synthetic construct
  source 1..80: mol_type = other DNA
taatcaaaattttagttaggatcttgtgttacatggtgttgtattgccataaaccaaatattctcaccactgcttgtcta

SEQ ID NO: 172036 - DNA, 80 bp, synthetic construct
  source 1..80: mol_type = other DNA
tctcccagtgcattgccatggtttcattcaacaaaagaaatatttatcccaggtcaagtgcataatttatcagagctatg

SEQ ID NO: 172037 - DNA, 80 bp, synthetic construct
  source 1..80: mol_type = other DNA
tgtcctagacctcccagagctgttacatataaccatatatacaacccaaactatgttagagaaggagtaacaccagaaac

SEQ ID NO: 172038 - DNA, 80 bp, synthetic construct
  source 1..80: mol_type = other DNA
gcgcccctggcagagaggtggcagcgggccaattcgtagagccaccaagtggcatcagcctcaaggatggctgtggcctc

SEQ ID NO: 172039 - DNA, 80 bp, synthetic construct
  source 1..80: mol_type = other DNA
gccacggacaagcacttctgtttccccgggtgtgtgaatagactccaacagggttgaagctgtagcactcgttatccgca

SEQ ID NO: 172040 - DNA, 80 bp, synthetic construct
  source 1..80: mol_type = other DNA
ccatatttaacacctttaagactgaagagcacctaaagtgccctgcagctaaagatcagaaacaagctgaccctactaac

SEQ ID NO: 172041 - DNA, 80 bp, synthetic construct
  source 1..80: mol_type = other DNA
ccaagtccacggaccgctcggtctccgagttctcaccgtcaattacgccatgttggcggcgtaaccggtgccgagaacgc

SEQ ID NO: 172042 - DNA, 80 bp, synthetic construct
  source 1..80: mol_type = other DNA
aaatcttattaaccgtcacgtgtatgaatatcactctgatttatcgtaaatatgtaaaattaactcaaccgtttcttaat

SEQ ID NO: 172043 - DNA, 80 bp, synthetic construct
  source 1..80: mol_type = other DNA
acaggtcgtccggaatccctgctccacctccagcacctccgcgggccatcgaggacctcgcagcgtacaagtcgttgacc

SEQ ID NO: 172044 - DNA, 80 bp, synthetic construct
  source 1..80: mol_type = other DNA
atggtcgatggcctgagtacctgaaagacaatgaggccactgctgaagatcaaccaacccagcctgatgtagcaacatgt

SEQ ID NO: 172045 - DNA, 80 bp, synthetic construct
  source 1..80: mol_type = other DNA
agaaccaataatacggctacaatagtaaccccatacataaactcagtcccaatggattcaatgaccagacacaataactt

SEQ ID NO: 172046 - DNA, 80 bp, synthetic construct
  source 1..80: mol_type = other DNA
atcgaatccaaatcacgtgttaatgcatctattcagtgggtacacggtaattatactaatcctcaagccgtgaacgtttg

SEQ ID NO: 172047 - DNA, 80 bp, synthetic construct
  source 1..80: mol_type = other DNA
gtggaggagggcttataagaggtggcgcagacgcaggtggcgacgcagacacaaaaagagacttgtactgactcagtggc

SEQ ID NO: 172048 - DNA, 80 bp, synthetic construct
  source 1..80: mol_type = other DNA
acagtgggcatgtagtattgcaattcatgtatgtgcctcctggagcacccgtccctgtaaaacgtgatgactacacatgg

SEQ ID NO: 172049 - DNA, 80 bp, synthetic construct
  source 1..80: mol_type = other DNA
ctagaagagaacagaattatcctagaccaggaacaggaaggacactattaccaagaagagaaagaattggaggcaacgat

SEQ ID NO: 172050 - DNA, 80 bp, synthetic construct
  source 1..80: mol_type = other DNA
tacacgacaatgtcttagaaatcatacattacttcttattaatttgacaactcaccatagcggaatttactactttgagt

SEQ ID NO: 172051 - DNA, 80 bp, synthetic construct
  source 1..80: mol_type = other DNA
agacacgggccttttgcggcagggacggggcgtacggtggccttttcgcggcgaggacgggagactcttgcgacggtgac

SEQ ID NO: 172052 - DNA, 80 bp, synthetic construct
  source 1..80: mol_type = other DNA
caagagcaaacaacttgccatgagcgattggataccaccaacacaagatgtacccaccagagaagaaacctggttccgtt

SEQ ID NO: 172053 - DNA, 80 bp, synthetic construct
  source 1..80: mol_type = other DNA
agttttgtaccgtgcctggattgacaagttcatttaagtggtaagaataaatgcatatagaatattatctgtttaggaat

SEQ ID NO: 172054 - DNA, 80 bp, synthetic construct
  source 1..80: mol_type = other DNA
cctgaaagataaggtttgcaggtggttaggtatcgatccaccaccaagtagacagggtgattcatggctcaagaagttta

SEQ ID NO: 172055 - DNA, 80 bp, synthetic construct
  source 1..80: mol_type = other DNA
accattttgaaccctgaagcactagccaggagatttggttttgacttagatatttgcctacatagtacatacactaaaaa

SEQ ID NO: 172056 - DNA, 80 bp, synthetic construct
  source 1..80: mol_type = other DNA
ttaagcaaaagaaaagatgtgaaccagttgcagttgtgattcatggtgagcctggcacaggaaaatcaatgaccactaat

SEQ ID NO: 172057 - DNA, 80 bp, synthetic construct
  source 1..80: mol_type = other DNA
tcctataggagaacaaattacaaataacacaactaacccaaccacatggaacgcatcaagtactatttatgaaattgaag

SEQ ID NO: 172058 - DNA, 80 bp, synthetic construct
  source 1..80: mol_type = other DNA
atagactcccgcaggccaaccagagtctatgtcgtgcacttcctgggcatggtctacgtgatcatataaagcggtgcact

SEQ ID NO: 172059 - DNA, 80 bp, synthetic construct
  source 1..80: mol_type = other DNA
gcggagcaaattcgaggtccccgcagacaccctcgcagaaggctcctcttcactggaaagaaaacacctcacctggtccg

SEQ ID NO: 172060 - DNA, 80 bp, synthetic construct
  source 1..80: mol_type = other DNA
caaccttagcactgaacccatcttttgcctatcactatcaccagcgtctgataggcgattgagtcacaccatgctgggag

SEQ ID NO: 172061 - DNA, 80 bp, synthetic construct
  source 1..80: mol_type = other DNA
ttgtaccaagtgtctcggctactagttgcattattgcctgaactgttaagtgcagttgtgttttgtacgttagtccaact

SEQ ID NO: 172062 - DNA, 80 bp, synthetic construct
  source 1..80: mol_type = other DNA
agacgctttagacgcaggagacgaaaagcaaaacttataataaaactgtggcaacctgcagtaattaaaagatgcagaat

SEQ ID NO: 172063 - DNA, 80 bp, synthetic construct
  source 1..80: mol_type = other DNA
ctaggtgaaaagttcatgaacggggacacagaccctattaagaacttcataccgttaaagtattggtacagatggtatcc

SEQ ID NO: 172064 - DNA, 80 bp, synthetic construct
  source 1..80: mol_type = other DNA
cgtgaccgctacgtcacggcggccattttgttttacaaaatggcggacttccttccgcttttttaaaaataacggcctgg

SEQ ID NO: 172065 - DNA, 80 bp, synthetic construct
  source 1..80: mol_type = other DNA
ctccgcgaaagaggcagatggtacgtgatgctcagataccagactgacgtactccacgacatagcgacgtgcggaccgtg

SEQ ID NO: 172066 - DNA, 80 bp, synthetic construct
  source 1..80: mol_type = other DNA
cactcgcgcatgcattcgcgcacggcacggcgctgcgaaacccacttgttgagcagttccgaaagcaccgagacgcgcac

SEQ ID NO: 172067 - DNA, 80 bp, synthetic construct
  source 1..80: mol_type = other DNA
gattcccatgaacaacacacacacaacagatgttatggatgaatatcgcattccactcacagtaggcagagtaaatgatc

SEQ ID NO: 172068 - DNA, 80 bp, synthetic construct
  source 1..80: mol_type = other DNA
gcctgccagaaagttccacacagacatacccttctacccaggcattcccaaacccccagaccaatttaaggtctccttta

SEQ ID NO: 172069 - DNA, 80 bp, synthetic construct
  source 1..80: mol_type = other DNA
atacgggacggacggcttggaaccaattgacatcaacaccagcgccggttacccgtatgtaagcttggggataaagaaaa

SEQ ID NO: 172070 - DNA, 80 bp, synthetic construct
  source 1..80: mol_type = other DNA
gcggcggctttggtgagtagggacatgccggcggagccgtctcgacagcgagtcggataaagcgcgctgcgcgaaagctt

SEQ ID NO: 172071 - DNA, 80 bp, synthetic construct
  source 1..80: mol_type = other DNA
ttgccatatttggagtgtcaaacaaagccccagctgcagggaatgagaaagacctgtttaccacctggaggataagttat

SEQ ID NO: 172072 - DNA, 80 bp, synthetic construct
  source 1..80: mol_type = other DNA
agctatgtaaatacatcaaaatttacaactgcttcaaaaaccattacaacctcagcagaaggcccatactatactttcgc

SEQ ID NO: 172073 - DNA, 80 bp, synthetic construct
  source 1..80: mol_type = other DNA
atgacgagcgtgagagccccgttgttaccgcttcgacgtctttgtccggtcaggatcagtgcccgggacagtccggcttg

SEQ ID NO: 172074 - DNA, 80 bp, synthetic construct
  source 1..80: mol_type = other DNA
aacttcactctagacagttcagggtttttcagatggaatatcaatttccaggagcaagcgcagatcagaaagaagctgga

SEQ ID NO: 172075 - DNA, 80 bp, synthetic construct
  source 1..80: mol_type = other DNA
gcggaagaaaccacgtgcggcggcacgcaatccaccgtactcaccaatgcgaccaacaccaccaactgcggcggagccgt

SEQ ID NO: 172076 - DNA, 80 bp, synthetic construct
  source 1..80: mol_type = other DNA
atgggacctaggattacaatcaacatgttccattgtggtcccatggatatctcagggttactatcgccacaccaaggctg

SEQ ID NO: 172077 - DNA, 80 bp, synthetic construct
  source 1..80: mol_type = other DNA
attcatctgatttagggctattagaagtgtatgtgtggacccctttgtcaatccccaatggttctgcaacacaagttgat

SEQ ID NO: 172078 - DNA, 80 bp, synthetic construct
  source 1..80: mol_type = other DNA
cactacaattgtcccaacccagacccagcacatcccaacagagtctgcctaacaccgctagctcagaaccagtgcattca

SEQ ID NO: 172079 - DNA, 80 bp, synthetic construct
  source 1..80: mol_type = other DNA
ttttcacagacaagtacaaccccacgacagaagccgccaatggaagaacatttgcagcggttgattacctactaggttgt

SEQ ID NO: 172080 - DNA, 80 bp, synthetic construct
  source 1..80: mol_type = other DNA
caccagatatatcttcatctggatatataacctgttggtatcaaactggattagtgatcccacctgaaactccccccaca

SEQ ID NO: 172081 - DNA, 80 bp, synthetic construct
  source 1..80: mol_type = other DNA
aagcatataatcaaggagagttcatgaacactccttggaaaaacccagctcaaaagaaggaaagaaagcaatataggcag

SEQ ID NO: 172082 - DNA, 80 bp, synthetic construct
  source 1..80: mol_type = other DNA
gtggtacaccgtggttccggtcaccttgtacgcctgtttgctatcccaccccaactttctttcattcttcacttccagta

SEQ ID NO: 172083 - DNA, 80 bp, synthetic construct
  source 1..80: mol_type = other DNA
tctacaaaagtgtgaaggatgtgctgcaccaccctattataaacaatgttgtccaatgttgtgtggcaaggcagtggtgc

SEQ ID NO: 172084 - DNA, 80 bp, synthetic construct
  source 1..80: mol_type = other DNA
taccaaacagatttcgtgactaccacaacagcaggacagggtgctatactagttacttgtagtgggtgcccggatatctc

SEQ ID NO: 172085 - DNA, 80 bp, synthetic construct
  source 1..80: mol_type = other DNA
attcaaaaatagaacgtgattttaactatgcccagtattgtataaattgtgtaggtagtattgtccttattcttggaaca

SEQ ID NO: 172086 - DNA, 80 bp, synthetic construct
  source 1..80: mol_type = other DNA
cctagaatcttacaagtcagcgacccgacgcaactcggaccgaaaaccatattccacctctgggaccagaggcgtggact

SEQ ID NO: 172087 - DNA, 80 bp, synthetic construct
  source 1..80: mol_type = other DNA
ccacatcaggctttccaggcactgtatttaacacatttaaaacacaagaacacatagttgaaccaaaagcagaaactctc

SEQ ID NO: 172088 - DNA, 80 bp, synthetic construct
  source 1..80: mol_type = other DNA
gagcgctgccagccccagcggcaccggaacccaaccccggtgagccatggcgtggagctggtggtggcagagatggagac

SEQ ID NO: 172089 - DNA, 80 bp, synthetic construct
  source 1..80: mol_type = other DNA
gcagagcacacatgccctccggagaatcctacatacctatgtactacagatttagatggtacatctgcctatttcaccaa

SEQ ID NO: 172090 - DNA, 80 bp, synthetic construct
  source 1..80: mol_type = other DNA
aaagacaggaccaactaatgcaagaagtctttgccattagagttgatgtggcatcacaacctctagcaacaacattaatt

SEQ ID NO: 172091 - DNA, 80 bp, synthetic construct
  source 1..80: mol_type = other DNA
cgcacgtcatatgggattttggcctttcagtcttcagtcacattagttataccatggataagcaacacccactacagagc

SEQ ID NO: 172092 - DNA, 80 bp, synthetic construct
  source 1..80: mol_type = other DNA
tggagctgtgccaagttgagacgattttggaagtcaataatactactgacactcacggtatgtctaggatgcttatacct

SEQ ID NO: 172093 - DNA, 80 bp, synthetic construct
  source 1..80: mol_type = other DNA
ccgaagctcagtttagagttccctcacacacaccttggggagaagaaaaccaaaacaaaaccagctggcaacaaacatgg

SEQ ID NO: 172094 - DNA, 80 bp, synthetic construct
  source 1..80: mol_type = other DNA
atagcttctataaatagtaattccaaacatacacagcaagtcccaaccctatcagcaagtgaaacaggtgcaaccctgca

SEQ ID NO: 172095 - DNA, 80 bp, synthetic construct
  source 1..80: mol_type = other DNA
gcacctgttttctatccacccgtcctacagcccatacaagttatgtggcaagtgggttcctcaaaggccgtggccgcctc

SEQ ID NO: 172096 - DNA, 80 bp, synthetic construct
  source 1..80: mol_type = other DNA
ccagacggcgtgggtgtggaacaggcctgttagaacctaccacacagacacccccttctacccctggatacccaaacccc

SEQ ID NO: 172097 - DNA, 80 bp, synthetic construct
  source 1..80: mol_type = other DNA
aaggtggcaacagatcctggccctggcagatagagtacattcatttcctgatccgccagttgattcgcctcttgacttgg

SEQ ID NO: 172098 - DNA, 80 bp, synthetic construct
  source 1..80: mol_type = other DNA
gctatgtcgtacacttcctgggtggagtctacgtcctcatataagtaagtgcacttccgaatggctgagttttccacgcc

SEQ ID NO: 172099 - DNA, 80 bp, synthetic construct
  source 1..80: mol_type = other DNA
gcaggcacaaaaagaaactggtgctcaggcagtggcagcccgcctttatcagaaaatgttttataataggctacatgcct

SEQ ID NO: 172100 - DNA, 80 bp, synthetic construct
  source 1..80: mol_type = other DNA
cggaggaagtacactccttgttggagctgtgcagggtggagactattttggaggtgaataacactacggatgccacaggg

SEQ ID NO: 172101 - DNA, 80 bp, synthetic construct
  source 1..80: mol_type = other DNA
aagaccgggccacagcaatgctgggcacgcatgttatctgggattttgggttacaatcatctgttacccttgtgatacca

SEQ ID NO: 172102 - DNA, 80 bp, synthetic construct
  source 1..80: mol_type = other DNA
catgctgcctcttgtggctgtggtaattttgttgctcatctgcttctactggctgatcgctatggctttcctggggggcc

SEQ ID NO: 172103 - DNA, 80 bp, synthetic construct
  source 1..80: mol_type = other DNA
ctggttgcatacacatatcacatttagaagtgaaatacacaggttacaatgaacagggtaacaatttcaacacgtggcag

SEQ ID NO: 172104 - DNA, 80 bp, synthetic construct
  source 1..80: mol_type = other DNA
ctccgccaccaccttcccggaggagaaggggagcgtgtgttgtatatgacgatgatatcatagaggtgattgatgttgaa

SEQ ID NO: 172105 - DNA, 80 bp, synthetic construct
  source 1..80: mol_type = other DNA
aaacccaaccagaaaatttgataaaaaaaccgaaaactcagaagacattaaacaaaaacagtggctaggtaaaaacaata

SEQ ID NO: 172106 - DNA, 80 bp, synthetic construct
  source 1..80: mol_type = other DNA
caggagattccgtctacgtggcggcgcgtgttgttacccacttcgatcagcaacgtgttatcggcaggatgatgcgagaa

SEQ ID NO: 172107 - DNA, 80 bp, synthetic construct
  source 1..80: mol_type = other DNA
aatacctaaactacagaacaggaatatacagtgccatattcctttcagcaggcagactgtcaccagactttccaggacta

SEQ ID NO: 172108 - DNA, 80 bp, synthetic construct
  source 1..80: mol_type = other DNA
tagagagccaaataaaatatggtgatatcttagtagaaggcaaagtcctcataagatgcccatacaccaaacctccccta

SEQ ID NO: 172109 - DNA, 80 bp, synthetic construct
  source 1..80: mol_type = other DNA
tgtcaaatgacacgtggacaatgcgtacagcgaaaaaaagacgcgaagacaacggggggggggagtactggctacagcaa

SEQ ID NO: 172110 - DNA, 80 bp, synthetic construct
  source 1..80: mol_type = other DNA
atagcatggccgccagagttccaatagaggagctccgagagttccgccacctccgggggcactgtcgagaagacgttgta

SEQ ID NO: 172111 - DNA, 80 bp, synthetic construct
  source 1..80: mol_type = other DNA
ttattgagtttacaactctaacccatcactcactacaacccattttattgtgtcactatccagacagtggtatcatcatg

SEQ ID NO: 172112 - DNA, 80 bp, synthetic construct
  source 1..80: mol_type = other DNA
tattcaatgcatcgaagatttgcaacaatgtggatttaatccaattaggtacacctcagagattaaggatcttcttctta

SEQ ID NO: 172113 - DNA, 80 bp, synthetic construct
  source 1..80: mol_type = other DNA
tccaatgccacagatgaaaacatgatcgagactcgctgtgtggtcaatagaaatggggtgttagaaaccaccatcaacca

SEQ ID NO: 172114 - DNA, 80 bp, synthetic construct
  source 1..80: mol_type = other DNA
tctgggagacaccccatttagattgtgttagcgattccgttcaacaaaacaataggaatgcttcgcttaatgcatttaag

SEQ ID NO: 172115 - DNA, 80 bp, synthetic construct
  source 1..80: mol_type = other DNA
gacacaacactacagactttatagtcagctggacaaagaacccccctatgaaaaccaaccagtacactgcccctctcacg

SEQ ID NO: 172116 - DNA, 80 bp, synthetic construct
  source 1..80: mol_type = other DNA
tctactttttgcggctgctctgacgttgttaggcatttctgtgtccttgcttctcgccttgctacaaatccttccgtgat

SEQ ID NO: 172117 - DNA, 80 bp, synthetic construct
  source 1..80: mol_type = other DNA
tttaccaaaagcaaatactaacagatttccaaacaaatgcccaaaactatttcagcgcaagagcaggaaccaccattaca

SEQ ID NO: 172118 - DNA, 80 bp, synthetic construct
  source 1..80: mol_type = other DNA
ggccatcaatagaaggttcttcttagacacagaaatcaaaatcttacagggatacagcacacatgcagggcttttgaatg

SEQ ID NO: 172119 - DNA, 80 bp, synthetic construct
  source 1..80: mol_type = other DNA
acattctaatcttgaacactagaaaatgggtgcacaagtttcagcacaaaagtccgggacacacgagacaggaaatatag

SEQ ID NO: 172120 - DNA, 80 bp, synthetic construct
  source 1..80: mol_type = other DNA
caaggcgccctattagtggtagcaatcccagaacaccaaaggggggcgcacaacactaacactagcccaggtttcgatga

SEQ ID NO: 172121 - DNA, 80 bp, synthetic construct
  source 1..80: mol_type = other DNA
gaaaagttaccgatacagctccagctcagacagcagctcagacaacaacagcagctccgagtccacttgcagcaagtctt

SEQ ID NO: 172122 - DNA, 80 bp, synthetic construct
  source 1..80: mol_type = other DNA
tgtctgggagaggttctgtgcggccacggttgtggctcccgtgaccaggcagtccatcgtgtggtggaggcagctaacgc

SEQ ID NO: 172123 - DNA, 80 bp, synthetic construct
  source 1..80: mol_type = other DNA
aatttaagcagaccgcacttgagaaacatgtgaaaattatcggcaatgcgatacaggtctgagtcctcgatcttgtgtag

SEQ ID NO: 172124 - DNA, 80 bp, synthetic construct
  source 1..80: mol_type = other DNA
ggggggccgggggttgcgctggggacggagggcttttgcgctggagacggggtgttgattacgggggggacttccggggc

SEQ ID NO: 172125 - DNA, 80 bp, synthetic construct
  source 1..80: mol_type = other DNA
gcatatggagtttggccacaatacttatcagatgctgatgcaaatgccatagataaaccatcacacccagacacctcttc

SEQ ID NO: 172126 - DNA, 80 bp, synthetic construct
  source 1..80: mol_type = other DNA
attacacttcaaacaccggacacgccaggaaccaagtgtaccaaatcatgtacataccaccaggtgcccccagaccaaat

SEQ ID NO: 172127 - DNA, 80 bp, synthetic construct
  source 1..80: mol_type = other DNA
taatgcatataagggctgctaaggcttacagcaaagctggtaagctaaatgtcagccaagctatgtctactatggccact

SEQ ID NO: 172128 - DNA, 80 bp, synthetic construct
  source 1..80: mol_type = other DNA
ttgcatacacaggtctttgggttccagatgcagccgggcttaaatagtgtgttcaaacgcacattgctgggagagatttt

SEQ ID NO: 172129 - DNA, 80 bp, synthetic construct
  source 1..80: mol_type = other DNA
accccctctatgtcttcgcaggtgcccagcgtcagcaggatgcgcctatagcgcccggcctcctcccctgtcgaccagag

SEQ ID NO: 172130 - DNA, 80 bp, synthetic construct
  source 1..80: mol_type = other DNA
tcagcacaaccacctggtccctaaaagtgctgtgggacgagcaccaaaaattccagaacagatggtcctacccaaacaca

SEQ ID NO: 172131 - DNA, 80 bp, synthetic construct
  source 1..80: mol_type = other DNA
acttctcattggcagtgattcttgtgtgtccgttaaaatacaatacgggggccaccccatcgataccaatcacgatcaca

SEQ ID NO: 172132 - DNA, 80 bp, synthetic construct
  source 1..80: mol_type = other DNA
acctgcagggcgaggccatgaacgccgccaacctgtgcgccgaggtgctgcagccctcgaggaagtctgtggccacctgc

SEQ ID NO: 172133 - DNA, 80 bp, synthetic construct
  source 1..80: mol_type = other DNA
caccaccgcggaaagaaactggtgcaggcctctgcgtccggagtggctcagtctaaggagcccaccacccccaaggccaa

SEQ ID NO: 172134 - DNA, 80 bp, synthetic construct
  source 1..80: mol_type = other DNA
caagatgtgcgaattaggcaactaccatcagactacaccacgcggcaacatatgttttgagtgcaacgacacttctctga

SEQ ID NO: 172135 - DNA, 80 bp, synthetic construct
  source 1..80: mol_type = other DNA
gtgtggtttcaataccacacaaaaacagacaacaagtttaagaaaccagagtgccactgggaaataaaagacctgcccct

SEQ ID NO: 172136 - DNA, 80 bp, synthetic construct
  source 1..80: mol_type = other DNA
attaaatttagaacagatgtcaaacagatcacaacagttggtccatctgacctttatgtacatactggagaccttatata

SEQ ID NO: 172137 - DNA, 80 bp, synthetic construct
  source 1..80: mol_type = other DNA
gtggacggcgatggcaaggtgctgcaccttaacaagggctggctctgcgctaccattatgcagcacggcgaggcttcggc

SEQ ID NO: 172138 - DNA, 80 bp, synthetic construct
  source 1..80: mol_type = other DNA
ccaatgatgtttttcgggaggctcaaagaagttacctggtatttctgacatcccagttctgctacgaagagtacgtgcag

SEQ ID NO: 172139 - DNA, 80 bp, synthetic construct
  source 1..80: mol_type = other DNA
ccaatggatagtatgttacggcataataatgtgtcattagttatcataccagtgtgccctttgcgtacatctggtaatgc

SEQ ID NO: 172140 - DNA, 80 bp, synthetic construct
  source 1..80: mol_type = other DNA
aggaagtccccaggtggacggcggccgcgcgcggaaaagaggaagtccccaggcggacggccgcgcgcggaaaagaggaa

SEQ ID NO: 172141 - DNA, 80 bp, synthetic construct
  source 1..80: mol_type = other DNA
gagcgtttgatgagcacgtcggccagacgcgtagccaagaggtagcgctggcgcatgaaacgataatcttggccgctcat

SEQ ID NO: 172142 - DNA, 80 bp, synthetic construct
  source 1..80: mol_type = other DNA
gagctgttcctcggtggcgggcttaaagccttcggcctccaggcgccaggcctgcacctccttctgtctgagctgatcgt

SEQ ID NO: 172143 - DNA, 80 bp, synthetic construct
  source 1..80: mol_type = other DNA
ctgctagactctcaccagcgcttggccggtgctgggcagagtggctccacgcttgcttgcttacaaagacctcttaataa

SEQ ID NO: 172144 - DNA, 80 bp, synthetic construct
  source 1..80: mol_type = other DNA
gatcaatgatatctaatgtaatgagttaaagccatatttaatcatagatcatagatcatagttttaagtcatagatttaa

SEQ ID NO: 172145 - DNA, 80 bp, synthetic construct
  source 1..80: mol_type = other DNA
cacctttatgggcagcaaccccgatcaccggtggaaatacgtcttcagcacgtcgcaatcgcgtaccaaacacatcacgc

SEQ ID NO: 172146 - DNA, 80 bp, synthetic construct
  source 1..80: mol_type = other DNA
aaacagtacaactgcaaataatgataacacaagtatatatactgtgaccttagaaaaacaaactgacttagcacaagaag

SEQ ID NO: 172147 - DNA, 80 bp, synthetic construct
  source 1..80: mol_type = other DNA
agccagatgaagatccattctttaactgtaatggaacattactaggcaaccttacgatatttccacatcagttgattaac

SEQ ID NO: 172148 - DNA, 80 bp, synthetic construct
  source 1..80: mol_type = other DNA
ctgtggcgacctccggcccacaatgtctctggccgggagagaaatttctttgaggcttgctacagagcccactgttcttt

SEQ ID NO: 172149 - DNA, 80 bp, synthetic construct
  source 1..80: mol_type = other DNA
aattggcttcgcacctacatcacaaaaaagatattcctctactccagtgaggaataagagaggtgtgattgtgctagggt

SEQ ID NO: 172150 - DNA, 80 bp, synthetic construct
  source 1..80: mol_type = other DNA
gctttaggttgacggtgatgttaactccgtcgcggtctacatacacgcgcgtcagcccatcttttgtcatcttgaccgcg

SEQ ID NO: 172151 - DNA, 80 bp, synthetic construct
  source 1..80: mol_type = other DNA
agcatagcctctaggtttccttgtaggtctgtttgggtttgttggttcacgtggtgctaacttgaattttttggttttct

SEQ ID NO: 172152 - DNA, 80 bp, synthetic construct
  source 1..80: mol_type = other DNA
ccacgaaccacctcgagagcccgaagctgtttccttcaagcctccgccaccaccttcccggaggagaaggggagcgtgtg

SEQ ID NO: 172153 - DNA, 80 bp, synthetic construct
  source 1..80: mol_type = other DNA
cgggctgagggagctttgcggcgtactgtggccggcgctttgtgcgcgctgccggtgcgtgtcgtgccacggtacttgtc

SEQ ID NO: 172154 - DNA, 80 bp, synthetic construct
  source 1..80: mol_type = other DNA
acatggatgatatcttaatagctagtgacaggacagacttagaacatgacaaagtggttctgcagctaaaggaacttcta

SEQ ID NO: 172155 - DNA, 80 bp, synthetic construct
  source 1..80: mol_type = other DNA
atattataccagattgtgattgtgtggaagggtgttactactgtaaatctcaagatagatattttcctattaagactaca

SEQ ID NO: 172156 - DNA, 80 bp, synthetic construct
  source 1..80: mol_type = other DNA
ggggacgggggtggggacggagacacgtggtgacgtcggagacggagcgttgcggagacgaaggcgttgcggtgcgtcgc

SEQ ID NO: 172157 - DNA, 80 bp, synthetic construct
  source 1..80: mol_type = other DNA
cttccaggagccaacatctacaatacatacatagtagttgttatatgcccttacaccaaacctcaactactaaacaaaac

SEQ ID NO: 172158 - DNA, 80 bp, synthetic construct
  source 1..80: mol_type = other DNA
aatatatacagaaagaaaaggaaagtgctactgtcactggtgccagtggacaagagcaaacaacctgccatgagcgactg

SEQ ID NO: 172159 - DNA, 80 bp, synthetic construct
  source 1..80: mol_type = other DNA
ctagaacattcctcacagacatgccattctataatcactgcaaaaccaattacaatgtaacctttatgctaaactataaa

SEQ ID NO: 172160 - DNA, 80 bp, synthetic construct
  source 1..80: mol_type = other DNA
ataaattactatagggattcagctagctcaggcttaaccaaacaagacttctcccaagatccttcaaaattcactcaacc

SEQ ID NO: 172161 - DNA, 80 bp, synthetic construct
  source 1..80: mol_type = other DNA
ttcgatgggactttccatcagggatgttacgtagccatcttttgcaatcaaaactacacctgccgcgttacacacggtaa

SEQ ID NO: 172162 - DNA, 80 bp, synthetic construct
  source 1..80: mol_type = other DNA
aaaccatccatctgttcagtggagttggctaggcatcttagatcccacatgtggcgtcgattggcacaagggcgattaat

SEQ ID NO: 172163 - DNA, 80 bp, synthetic construct
  source 1..80: mol_type = other DNA
ggaaaaggttacggagctaacaagtatggtcaccaacactattacagagaaactattgaaaacacttataaaaattgtct

SEQ ID NO: 172164 - DNA, 80 bp, synthetic construct
  source 1..80: mol_type = other DNA
cggttgactacaaacaggacaacactgtgatggagcaggtggcaaccatacgcacctttggcctcggacaccaaaataag

SEQ ID NO: 172165 - DNA, 80 bp, synthetic construct
  source 1..80: mol_type = other DNA
tggtagatcttactttgaaacaccaggagcatacacagatataaagtacaatccatttacagacagaggagaaggcaaca

SEQ ID NO: 172166 - DNA, 80 bp, synthetic construct
  source 1..80: mol_type = other DNA
cggccgtgcagcaagagttgcaacgcgcccgacagctgcaatccggtaacgtggacgacgcgctggactctttaaccgag

SEQ ID NO: 172167 - DNA, 80 bp, synthetic construct
  source 1..80: mol_type = other DNA
ccaatatgtccattagaatccttaccaagttcaactgtacctatcactatctcaattagtcctatgtgtgctgaattttc

SEQ ID NO: 172168 - DNA, 80 bp, synthetic construct
  source 1..80: mol_type = other DNA
gggccctatcactctcgaaggacctccacctgcagcaataaatgatttattaaaatcagttagaaccccagaggtaataa

SEQ ID NO: 172169 - DNA, 80 bp, synthetic construct
  source 1..80: mol_type = other DNA
ctagcactcatcgggtgtcatggcagcccttggacatggctcaaaagaaaggtctcaagtcttttagatatcccaatggc

SEQ ID NO: 172170 - DNA, 80 bp, synthetic construct
  source 1..80: mol_type = other DNA
ttacttttgtcataactacaacacagcaacagtccacagcccccaatcctgatacaccactgctgacgcaccagatcatg

SEQ ID NO: 172171 - DNA, 80 bp, synthetic construct
  source 1..80: mol_type = other DNA
caccccagagcccctcgggcccgcctccaggcgccctcctggtctccgctcccctcttagccccgttaaacccaaagaat

SEQ ID NO: 172172 - DNA, 80 bp, synthetic construct
  source 1..80: mol_type = other DNA
gaggggttgagtacatcggtcggccatcgtgaggccccggccgcgttaaagtagaactgcacgtttggcagattgtgccg

SEQ ID NO: 172173 - DNA, 80 bp, synthetic construct
  source 1..80: mol_type = other DNA
ccaagcataaaccaagtgttcatgttcccagagagggcacctaagcctcctcccaccaaggaggactgggaaacagaata

SEQ ID NO: 172174 - DNA, 80 bp, synthetic construct
  source 1..80: mol_type = other DNA
tcaagggttcgccatctacaaagctaatggtggtcaaattgatacctaacattgatagtgttaaaaactgtactcagaaa

SEQ ID NO: 172175 - DNA, 80 bp, synthetic construct
  source 1..80: mol_type = other DNA
gaagaagcaaggccaattatcctgtaaatgcaatagtacagcaactccaacatgagaactcaacgcgcaagaaggtaaaa

SEQ ID NO: 172176 - DNA, 80 bp, synthetic construct
  source 1..80: mol_type = other DNA
tattttttcaatacaacttaacccaggtggaaataatgtggttaatcgcaccctgttgggcgaggtcatcaattattacg

SEQ ID NO: 172177 - DNA, 80 bp, synthetic construct
  source 1..80: mol_type = other DNA
catctaaaacttcttatacattcaccagttcatcggtattaaccagcaacacctatacatcaatcgtgtctcctgttact

SEQ ID NO: 172178 - DNA, 80 bp, synthetic construct
  source 1..80: mol_type = other DNA
cttgctggtaccaaactggaattgttgtgccagctggaacacctacatcatgctcaataatgtgtttcgcttcggcatgc

SEQ ID NO: 172179 - DNA, 80 bp, synthetic construct
  source 1..80: mol_type = other DNA
actccacctacgtggtgttgtacactgttattacggtaactttgtatgccagttttgccacccttccccgtaacgtaact

SEQ ID NO: 172180 - DNA, 80 bp, synthetic construct
  source 1..80: mol_type = other DNA
acagactaggaccttaataaagaacgtcgggcccagtgaccagtacgttcatacaaaagatgccatctacacctgtgccc

SEQ ID NO: 172181 - DNA, 80 bp, synthetic construct
  source 1..80: mol_type = other DNA
cttagtaaatcagatactagactggaagagcctgtggagtgtttaatcaagaagtcagctgcaaaatacagggtcaacaa

SEQ ID NO: 172182 - DNA, 80 bp, synthetic construct
  source 1..80: mol_type = other DNA
aatccatgataagtcgcactctatggtgggtttgctatatgctggtcttagcagaagcacaaatccaacaatgggtcccc

SEQ ID NO: 172183 - DNA, 80 bp, synthetic construct
  source 1..80: mol_type = other DNA
agggagagcagcactggtgatgatgaaagattttgaatataaaaaccatgttaccagtacacaaaaagtacaacagaact

SEQ ID NO: 172184 - DNA, 80 bp, synthetic construct
  source 1..80: mol_type = other DNA
tcttaatagcatacaccccccctggtgctagcatcccagctaaccgcaccgacgcaatgcttggtacacacatcatatgg

SEQ ID NO: 172185 - DNA, 80 bp, synthetic construct
  source 1..80: mol_type = other DNA
aagctcttaaaagaatgcaacaacaacaagaatttgatgaatcttttacattcaaacctaagagacccaaactttctaca

SEQ ID NO: 172186 - DNA, 80 bp, synthetic construct
  source 1..80: mol_type = other DNA
aaagaggtgaagattaaagatgccaggcaacttgtggattcaaatgaagtaaacttggaaataaccgtagttgagctaga

SEQ ID NO: 172187 - DNA, 80 bp, synthetic construct
  source 1..80: mol_type = other DNA
gattccagtggctaacacaattaaattccaactcaaacacacaccacataaacaccacatacgcagcaggcaaaattaaa

SEQ ID NO: 172188 - DNA, 80 bp, synthetic construct
  source 1..80: mol_type = other DNA
tttaagtgaaacaggatttctgagggtggcgcacacttatgatagtgatacaaataggtctgatttcttttcttcaaatg

SEQ ID NO: 172189 - DNA, 80 bp, synthetic construct
  source 1..80: mol_type = other DNA
tccctcgttacccccatgtgtcggcatacagtgcgctgcatggaaaaacgcgtgatatatggcgtaccccttaacggtag

SEQ ID NO: 172190 - DNA, 80 bp, synthetic construct
  source 1..80: mol_type = other DNA
taaaaacccacgaaacatgcaagaacatgtcttatcactttgccatcttatgtggcacaatggtgaagataaatataacc

SEQ ID NO: 172191 - DNA, 80 bp, synthetic construct
  source 1..80: mol_type = other DNA
agaacttccaagcttgaaccctccccagtacatggtctctaccctctcaccaaggggcctgcggttctgtccaagtatga

SEQ ID NO: 172192 - DNA, 80 bp, synthetic construct
  source 1..80: mol_type = other DNA
aacctaccaatacagactactttgcaaaaagagacgcactgtggggagatgccatatactgcaacagtagaacaaaccaa

SEQ ID NO: 172193 - DNA, 80 bp, synthetic construct
  source 1..80: mol_type = other DNA
tttttagtcacgtgacctgctacgtcacggccgccattttagttcacaaaatggctgacttccttcctctttttcaaata

SEQ ID NO: 172194 - DNA, 80 bp, synthetic construct
  source 1..80: mol_type = other DNA
gacagcattaaaaaacagaatatctacacaatatgaagccactactggcaacactgaaccaaagcacgggtggatgggca

SEQ ID NO: 172195 - DNA, 80 bp, synthetic construct
  source 1..80: mol_type = other DNA
ccctcttaggcaacttaactatcttcccacaccaattcattaatcttagaagtaataattcagctactattatagtgcca

SEQ ID NO: 172196 - DNA, 80 bp, synthetic construct
  source 1..80: mol_type = other DNA
tgccgcttgcagagagcgaacggactaccatgagctggtccaggcctcaacaaagtgtctcagtactcgaacaaaactgg

SEQ ID NO: 172197 - DNA, 80 bp, synthetic construct
  source 1..80: mol_type = other DNA
gcagacacctggtacagaggtacagcatacaataacagcattacaaccattcctttaaaagcaagtcagttataccacac

SEQ ID NO: 172198 - DNA, 80 bp, synthetic construct
  source 1..80: mol_type = other DNA
aggttctcagtcacagacgttcccctgtgggccgcactgtttggatactatgatcaatgtaaaaaagaaagcaaggacgc

SEQ ID NO: 172199 - DNA, 80 bp, synthetic construct
  source 1..80: mol_type = other DNA
cccatcactattacggtcgctcctttgtgtgcggaattcgggggcttgaggcaggctgtattgcaaggaatccctatgga

SEQ ID NO: 172200 - DNA, 80 bp, synthetic construct
  source 1..80: mol_type = other DNA
tcacaaagttggatgggcttggtggacttgcagcagggtaatattcccattaacaaaagaagcacatttggaaatacaag

SEQ ID NO: 172201 - DNA, 80 bp, synthetic construct
  source 1..80: mol_type = other DNA
acaaacgctataacaccatgaccatcagcagtgtcctcctagccctgcttttatgcgctttgctattcgcgttcctgcac

SEQ ID NO: 172202 - DNA, 80 bp, synthetic construct
  source 1..80: mol_type = other DNA
aacctacctaactggaacccctctccatatggcactacgacaaacaaaccatatccatttgaatactacactggcatgta

SEQ ID NO: 172203 - DNA, 80 bp, synthetic construct
  source 1..80: mol_type = other DNA
gccccgcagacggcgggcgaggagctccagccccagcagcagctgcagctccaagtccagctcctccagcagcagcagct

SEQ ID NO: 172204 - DNA, 80 bp, synthetic construct
  source 1..80: mol_type = other DNA
gatatgattgaaacacgatatgtagtgaattccagaaccaatgatgaagcaacaattgaaaacttcctaggtagatcagc

SEQ ID NO: 172205 - DNA, 80 bp, synthetic construct
  source 1..80: mol_type = other DNA
aatatttggttcatagaaatgtggtgagattggagcaattcccaaacttaaatgtgtttatgaattcctattcctatttc

SEQ ID NO: 172206 - DNA, 80 bp, synthetic construct
  source 1..80: mol_type = other DNA
gccgcgactcgtccctggggaccgcgggggaagtcacggcggtggccagaacagacgacgaactacggcacaacccgcgt

SEQ ID NO: 172207 - DNA, 80 bp, synthetic construct
  source 1..80: mol_type = other DNA
cctctccccctttttaccctggcattccacctgcatggcaggttaaatttagcctaaaatttcaataaagtgcagtttca

SEQ ID NO: 172208 - DNA, 80 bp, synthetic construct
  source 1..80: mol_type = other DNA
ggaagtgctctggtagtttatatgccaaagccagttgtagaccatgaaacaaaaatggagtttggtgcatttactaattt

SEQ ID NO: 172209 - DNA, 80 bp, synthetic construct
  source 1..80: mol_type = other DNA
gatccggggaaattcactgaaccgctgaaggatgtgatggtaaaatccctccctgcgcttaactccccctctgctgaaga

SEQ ID NO: 172210 - DNA, 80 bp, synthetic construct
  source 1..80: mol_type = other DNA
accaagagcagctccgaatccgatcaggaatcaaacacctcttcgagcagctcctaaaaacccagcagggagtccacgta

SEQ ID NO: 172211 - DNA, 80 bp, synthetic construct
  source 1..80: mol_type = other DNA
aaaacaaaaccaaaacagggatgggtattctatgacaccctgtttggagatggcaagatgccctccggttcaggcctagt

SEQ ID NO: 172212 - DNA, 80 bp, synthetic construct
  source 1..80: mol_type = other DNA
cggacccggaacaaatgggaccccgctgggtgttccactcctttgactggcgaaggggctatcttagcgagggagctatc

SEQ ID NO: 172213 - DNA, 80 bp, synthetic construct
  source 1..80: mol_type = other DNA
aacaccaccaactcaaatgaaagaagcaaacaaagcctatgtaatagcagccaaaaaaaacttgccaaactggagaccac

SEQ ID NO: 172214 - DNA, 80 bp, synthetic construct
  source 1..80: mol_type = other DNA
aaggatatatttggtacacacaccctcagtcagcaccaagcgattggcttggtcgggacaatacttttgactgctggttt

SEQ ID NO: 172215 - DNA, 80 bp, synthetic construct
  source 1..80: mol_type = other DNA
tagtggtcagaatattagcttgctccctattagtaattcattgtctgaagatgacaactttgaatggcacgtggataccc

SEQ ID NO: 172216 - DNA, 80 bp, synthetic construct
  source 1..80: mol_type = other DNA
agtggatagatggcacggggcacgtccccctgtactggcagagcaggtggaggccagagatgctcttccaagagaacacc

SEQ ID NO: 172217 - DNA, 80 bp, synthetic construct
  source 1..80: mol_type = other DNA
tatgagtgtgtttggcgcagtcacgctgcttgctgtggctgtggtgattttgttggtcatattaatgatttggcgcatcg

SEQ ID NO: 172218 - DNA, 80 bp, synthetic construct
  source 1..80: mol_type = other DNA
aaaagactgtaaaagttaacataccaccccccaccctttttgtacataagtggtactttcagaaggacatatgtgaccta

SEQ ID NO: 172219 - DNA, 80 bp, synthetic construct
  source 1..80: mol_type = other DNA
agagacaccattaccggtgcgattattagattcggggtatccatatataacactagataaagatgatgttatcaactatt

SEQ ID NO: 172220 - DNA, 80 bp, synthetic construct
  source 1..80: mol_type = other DNA
gcgctggtgacggggtgttgattgcggcgtggacggggacgaggtgctgatcgcggcgtggacttgcgaggacggcagtt

SEQ ID NO: 172221 - DNA, 80 bp, synthetic construct
  source 1..80: mol_type = other DNA
ctgtgaataatagcctaaattatgatgagaatcactttgatcagtggcaaataaccatacaggagatggcacaaattaga

SEQ ID NO: 172222 - DNA, 80 bp, synthetic construct
  source 1..80: mol_type = other DNA
atgtcacgttgatgagcgggataatcatcagaactttgtcgagcctgtccacgcatttgtaggcggggagatgccacgca

SEQ ID NO: 172223 - DNA, 80 bp, synthetic construct
  source 1..80: mol_type = other DNA
cacacactttggcaacggaaagctaggcaacggactaggccagatacccagatactggcatcagagatggtaccccatct

SEQ ID NO: 172224 - DNA, 80 bp, synthetic construct
  source 1..80: mol_type = other DNA
taatttgcagatggttgccatcttgattggcctcatctttttgggccaacaactcacgcaagtgggcgtgatgaatatca

SEQ ID NO: 172225 - DNA, 80 bp, synthetic construct
  source 1..80: mol_type = other DNA
agaaactatgccacacacgcagacgactgcacctggccgggaccctttgggggcggcatggccacccaaaaatttactct

SEQ ID NO: 172226 - DNA, 80 bp, synthetic construct
  source 1..80: mol_type = other DNA
cactaacaacgacttaatcaggattgaacccattggcatttggattcagggtgaacctgggcaaggaaaatcctttctaa

SEQ ID NO: 172227 - DNA, 80 bp, synthetic construct
  source 1..80: mol_type = other DNA
aaatcttccaacagacaattaaaaatccgtgcaaagacgactctaccggaaccagtagacagcctagagaagtacaagtc

SEQ ID NO: 172228 - DNA, 80 bp, synthetic construct
  source 1..80: mol_type = other DNA
tctccgtccccagggctagcccccgcaaaacctccccaatctctagggccgagcacagggcggtggacagcagttggtat

SEQ ID NO: 172229 - DNA, 80 bp, synthetic construct
  source 1..80: mol_type = other DNA
gtgtttgccaagccaaagcatacaacagcatggattccaagacctcccagggctacccagtatacccacaaacacagcac

SEQ ID NO: 172230 - DNA, 80 bp, synthetic construct
  source 1..80: mol_type = other DNA
ctctcaaagaagtattagtagtcccaaatacacagccatcgggacccacacatacaaccaaaccaactgcacttggtgct

SEQ ID NO: 172231 - DNA, 80 bp, synthetic construct
  source 1..80: mol_type = other DNA
cctgccggcgatcctgggctttatgcttcagaaggatgccaagattatcttcatctcgtctgtgaactcggctgaccagg

SEQ ID NO: 172232 - DNA, 80 bp, synthetic construct
  source 1..80: mol_type = other DNA
aatggctagggatacagatttacatgttcaaacaactccaataacacaaaatccagtagaagaatatgttgatcaggttt

SEQ ID NO: 172233 - DNA, 80 bp, synthetic construct
  source 1..80: mol_type = other DNA
caacccagactgtaagctagtactaaaaggactagggatgaatcctaccttagaagaaatgctaaccgcctgtcagggag

SEQ ID NO: 172234 - DNA, 80 bp, synthetic construct
  source 1..80: mol_type = other DNA
caagtgagatttgataaaaacattaaaatgtctgtgtctttgaaagacgattacaatgtgggtgtcagagaagagaaggg

SEQ ID NO: 172235 - DNA, 80 bp, synthetic construct
  source 1..80: mol_type = other DNA
cgggttctcactggtgccacatgacaccattagcgctggagcaacaaacaagtatgggtacaacaccattagtgactttg

SEQ ID NO: 172236 - DNA, 80 bp, synthetic construct
  source 1..80: mol_type = other DNA
aaacaggatctggttccagtacggaaccaagcccactacacagttcgacgaaaagcaatgcaagtgcgtactcacagacc

SEQ ID NO: 172237 - DNA, 80 bp, synthetic construct
  source 1..80: mol_type = other DNA
tagcatatccaactggctaaatgacacagcaatagataataaaataactgcttttttacaacaagccttacccatgacag

SEQ ID NO: 172238 - DNA, 80 bp, synthetic construct
  source 1..80: mol_type = other DNA
gggtctccaacaagagacgcagacgctctcccagcagctccagcagcagctcaaggagcagcagctcatgggagtccaac

SEQ ID NO: 172239 - DNA, 80 bp, synthetic construct
  source 1..80: mol_type = other DNA
aagccgctgagatcggggcttcatccaatgcaagtgatgagagcatgattgaaacacggtgtgttctcaattcccatagc

SEQ ID NO: 172240 - DNA, 80 bp, synthetic construct
  source 1..80: mol_type = other DNA
cgaagtcaccctgggtcggagaatcgcagattgcgttgtggtagctctgcagccttccccccggtgttatattgtagaat

SEQ ID NO: 172241 - DNA, 80 bp, synthetic construct
  source 1..80: mol_type = other DNA
tacaaacggcaccttagtattctctccacaaacgactctaaaaatttagaacattataaaactgctctgtttcaaaaaac

SEQ ID NO: 172242 - DNA, 80 bp, synthetic construct
  source 1..80: mol_type = other DNA
ggtcacggttgccccaatgtgcgccgagtacaatggtctgagattagctacatcactccaaggattacccgtaatgaaca

SEQ ID NO: 172243 - DNA, 80 bp, synthetic construct
  source 1..80: mol_type = other DNA
cagaccgtcctccagaccttgagacgcaagtgcctcgggagtgacacggtctcaaaaataattccctagaataaactgag

SEQ ID NO: 172244 - DNA, 80 bp, synthetic construct
  source 1..80: mol_type = other DNA
gcgatagagctgccggcccttagaagactttagccgcacatccagcatcttgttgcggtcgtggagggaagcagtcccat

SEQ ID NO: 172245 - DNA, 80 bp, synthetic construct
  source 1..80: mol_type = other DNA
atcagtctccgtgtgcactgccctggtatcatccaactaaggaaattttcattcctggcgaggttaagaatttagttgga

SEQ ID NO: 172246 - DNA, 80 bp, synthetic construct
  source 1..80: mol_type = other DNA
agaccaggcaccaatcagttcctaacaacggaagatgatactgccgcacccatactcccaggtttctcccccaccccaag

SEQ ID NO: 172247 - DNA, 80 bp, synthetic construct
  source 1..80: mol_type = other DNA
tttatgttttaaaaccctcactatataatggagccatgtcaaacttagcagacacagaacatttaaaccaaagacaaacc

SEQ ID NO: 172248 - DNA, 80 bp, synthetic construct
  source 1..80: mol_type = other DNA
tagataactctaattaggacccaaaccccctagggggcacaaatagtttttagaggtaaattttggtcacttgggaaacc

SEQ ID NO: 172249 - DNA, 80 bp, synthetic construct
  source 1..80: mol_type = other DNA
gttcggttaaggagggcggccttgcgaacaatcattagtagctaccaacaagggcccccagatgccccccaccagtcacc

SEQ ID NO: 172250 - DNA, 80 bp, synthetic construct
  source 1..80: mol_type = other DNA
ttgaggagtgcggtttctcagacagagttcggtccattacacttggcaactccaccattaccacccaggagtgtgcgaat

SEQ ID NO: 172251 - DNA, 80 bp, synthetic construct
  source 1..80: mol_type = other DNA
caacactgctaaggcactacaaaggtgtgacgggtgctctactcctccacactacaagcagtgctgtcccatgttgtgtg

SEQ ID NO: 172252 - DNA, 80 bp, synthetic construct
  source 1..80: mol_type = other DNA
acgtgacctgacgtcacggccgccattttgtgctgtccgccattttgtgacttccttccgctttttcaaaaaaaaaaaga

SEQ ID NO: 172253 - DNA, 80 bp, synthetic construct
  source 1..80: mol_type = other DNA
aagttatataacacactctttaattctgactcagcaggccactactggcagacattcatgacaaactccctggtaaaagc

SEQ ID NO: 172254 - DNA, 80 bp, synthetic construct
  source 1..80: mol_type = other DNA
gcagagggacctgggaccatgaatatggctaatgtcttgagtacaacgggagctcagtcagttgcacttgttggagaaag

SEQ ID NO: 172255 - DNA, 80 bp, synthetic construct
  source 1..80: mol_type = other DNA
ataaacgctaggaggatggtgcaactgaggcgaaagtttgaactgttcacctacatgcggtttgacatggaaattacatt

SEQ ID NO: 172256 - DNA, 80 bp, synthetic construct
  source 1..80: mol_type = other DNA
gtgacgcagccgtccccacgtgactcgttccagcgaaccacgagtctacgtgattcacttcctgggcgtggtttacatcc

SEQ ID NO: 172257 - DNA, 80 bp, synthetic construct
  source 1..80: mol_type = other DNA
gtgctctaggggtgtttgcagttccagaaatgtgtttagctggtgatagcacaactcacatgttcacaaagtacgagaat

SEQ ID NO: 172258 - DNA, 80 bp, synthetic construct
  source 1..80: mol_type = other DNA
gcgggacagggctgagcgacttcttggcgccgtaagcgcgccgccgccagtgcgggacagggctgagcgacttcttggcg

SEQ ID NO: 172259 - DNA, 80 bp, synthetic construct
  source 1..80: mol_type = other DNA
cgcagggacgtacaagttgttaacccactcaccgtgggacctcaatggacgctccacccctttgacatgcgacggggact

SEQ ID NO: 172260 - DNA, 80 bp, synthetic construct
  source 1..80: mol_type = other DNA
atgcggatgagcagcgcgcccggctgcgcctcgaactctaccaggccctcgggcacgaagaaacgcgccgtgagcgcctg

SEQ ID NO: 172261 - DNA, 80 bp, synthetic construct
  source 1..80: mol_type = other DNA
aaagtatgttgatagtgttttaaacgaggtattagttgttcctaacattaatgaaagtcatcctagtacttcaaattcag

SEQ ID NO: 172262 - DNA, 80 bp, synthetic construct
  source 1..80: mol_type = other DNA
acttcacggaagggggttacattacttgtttttaccaaactcgcatcgtggtaccggctgcaacacccaccagtatgtca

SEQ ID NO: 172263 - DNA, 80 bp, synthetic construct
  source 1..80: mol_type = other DNA
gtggaaaactttgtggatgaaattttgaatgaagttttggtggttccagatatcaaacagagccaatcaacaacatcaaa

SEQ ID NO: 172264 - DNA, 80 bp, synthetic construct
  source 1..80: mol_type = other DNA
tgcaagttgatagcacagacattcaaggtccagattttattccaacttgtgattgtgtacaggcatgttattacgcaaaa

SEQ ID NO: 172265 - DNA, 80 bp, synthetic construct
  source 1..80: mol_type = other DNA
actaagttatagtccaccaggtgctaagccacccactactagaaaagaagcaatgttaggtacccacttgatatgggata

SEQ ID NO: 172266 - DNA, 80 bp, synthetic construct
  source 1..80: mol_type = other DNA
accctggagggtctgttcgaacagttcgagtaccacagaaacaggtggtccaggagcaaccacgacctggacatggccag

SEQ ID NO: 172267 - DNA, 80 bp, synthetic construct
  source 1..80: mol_type = other DNA
cttcatagacttgagaaattacagctcactcagtgaacatcaaggcattacagactatgtaacacaattaggaagtgcat

SEQ ID NO: 172268 - DNA, 80 bp, synthetic construct
  source 1..80: mol_type = other DNA
agctgctgacgcgcgtgcacaatcacatcctcaacggctttttgccggtagaggacctgaagcagatggaacgcgtcgtc

SEQ ID NO: 172269 - DNA, 80 bp, synthetic construct
  source 1..80: mol_type = other DNA
gccgttagatgtattgcgcgtatgcactggtacctgtccaaagcgccggtaattacattcttcctgtattacgcagcgag

SEQ ID NO: 172270 - DNA, 80 bp, synthetic construct
  source 1..80: mol_type = other DNA
tcatgtctgtggacaactataacgagacattaactgaaaagcaaaaatccactctattctccacttggaatatcacatac

SEQ ID NO: 172271 - DNA, 80 bp, synthetic construct
  source 1..80: mol_type = other DNA
gtagtgggcaaagtcaacacaatggaggcatacccaattccattaaaccaaggcacccctgccaaagaccaatccatatt

SEQ ID NO: 172272 - DNA, 80 bp, synthetic construct
  source 1..80: mol_type = other DNA
gaattcaatggatatgtacagggtgaaattatcagatagtggtgatcgcactaaaccaatcttgtgcttgtcgctttccc

SEQ ID NO: 172273 - DNA, 80 bp, synthetic construct
  source 1..80: mol_type = other DNA
atactaccgccagttattccactaatagcactgagacaaccacttcaacattcagtacaacaattatcagcaatagaagc

SEQ ID NO: 172274 - DNA, 80 bp, synthetic construct
  source 1..80: mol_type = other DNA
actaccatttggcttctgagttgtgctcagaatacttcctattggtactctggaaatgcctacaactatacagatgataa

SEQ ID NO: 172275 - DNA, 80 bp, synthetic construct
  source 1..80: mol_type = other DNA
gctgctagcatgaatgacacagctaacttcagaatggtgtttggaaacttgtattcagtgttccatagaaatccagggac

SEQ ID NO: 172276 - DNA, 80 bp, synthetic construct
  source 1..80: mol_type = other DNA
ttgaatcattcttaggcagggctgcgtgtgtcgctattattagtcttaaaaacgatgcacccactgctagcaacaccaaa

SEQ ID NO: 172277 - DNA, 80 bp, synthetic construct
  source 1..80: mol_type = other DNA
attgggcatctactgtggaaccacaaaatatggtccataggaatgtagtcaccctggaccaattccctaatttgaacttg

SEQ ID NO: 172278 - DNA, 80 bp, synthetic construct
  source 1..80: mol_type = other DNA
tttaaaagagtggaatattacagtggatgattatgatgggggcatcaacttggctatgaccacatcataatcatccactg

SEQ ID NO: 172279 - DNA, 80 bp, synthetic construct
  source 1..80: mol_type = other DNA
cgaccttatattttcacagagccagagtaccaagagcaagaaagaggcttcaattcgtgggaagaaagagagccgtcctc

SEQ ID NO: 172280 - DNA, 80 bp, synthetic construct
  source 1..80: mol_type = other DNA
gcatggatatcccaggtgaggtgcacaatttaatggagattgccgaggtggattcagtggttcccgtcaataacaccccc

SEQ ID NO: 172281 - DNA, 80 bp, synthetic construct
  source 1..80: mol_type = other DNA
gactagggaatctattaaaacagtaggacctagtgacctttttgtacacacagaacaggcaatctacagaaatgctcatc

SEQ ID NO: 172282 - DNA, 80 bp, synthetic construct
  source 1..80: mol_type = other DNA
aatcagtcaggaccagcctacccatgccccacatggtgtctgtgaaatccaccaggatgttgctggggctaatgtccgaa

SEQ ID NO: 172283 - DNA, 80 bp, synthetic construct
  source 1..80: mol_type = other DNA
cgtcacactcgcgtgaccacacccactccggatatacgtcatcctgtggaattccggacatacggtgacgtagcgagcgt

SEQ ID NO: 172284 - DNA, 80 bp, synthetic construct
  source 1..80: mol_type = other DNA
tcaccctcagtggaaatccaacatgcaggttgcttaaatatgattaccccacaaaacctgggcagtgtggaggtgtcgtt

SEQ ID NO: 172285 - DNA, 80 bp, synthetic construct
  source 1..80: mol_type = other DNA
ccaccccagcactccggggtgacgtggcaccccgcgtgccttactgacttgtcacctttgcacatttggtcagctgaccg

SEQ ID NO: 172286 - DNA, 80 bp, synthetic construct
  source 1..80: mol_type = other DNA
cgtcgggccttataccccgacttgctgagcttctcgaggagagtcccttttccagccctgaggcggctggtcaataagag

SEQ ID NO: 172287 - DNA, 80 bp, synthetic construct
  source 1..80: mol_type = other DNA
tctcagttatacaaccacatcaaggaagaagacaagaggagaagtagcgcggcacaagcaatggaggctatattccaagg

SEQ ID NO: 172288 - DNA, 80 bp, synthetic construct
  source 1..80: mol_type = other DNA
tggatttaccaaaatcaactacagaacactagccttaattcgaatcgtgttactgatcagattccaccatcacaatggga

SEQ ID NO: 172289 - DNA, 80 bp, synthetic construct
  source 1..80: mol_type = other DNA
cccgtaaggatgagcccccctctttaaaattgcggatggaggtggaattcctcaaaaggaaaccaggctacttcccagag

SEQ ID NO: 172290 - DNA, 80 bp, synthetic construct
  source 1..80: mol_type = other DNA
gcatgtatggatggtaacctgttagcctttgattacacaaattatgatgggagcttgcatccaatatggttcaaagcact

SEQ ID NO: 172291 - DNA, 80 bp, synthetic construct
  source 1..80: mol_type = other DNA
aaataagactagcccccccaactctatttgtagataagtggtactttcaaaaggacatatgtgacctgagtctgtttaac

SEQ ID NO: 172292 - DNA, 80 bp, synthetic construct
  source 1..80: mol_type = other DNA
aaacgacgcggaaaagaggaactccccagggggacggccgcgcgcggaaaagaggaagcgcgcggcgcgactcgtcccta

SEQ ID NO: 172293 - DNA, 80 bp, synthetic construct
  source 1..80: mol_type = other DNA
cttgtggtttatctctcaatggccctaccatttgtcaaaaattattaggatacgatgtgagtggtccgctagaaacaatc

SEQ ID NO: 172294 - DNA, 80 bp, synthetic construct
  source 1..80: mol_type = other DNA
ttggagaccccaaaccatacaacccttccagtaatgactggaaggaagagtatgaggcctgtaaatactgggacagaccc

SEQ ID NO: 172295 - DNA, 80 bp, synthetic construct
  source 1..80: mol_type = other DNA
ccagttctagaagatctcctgatatcccgggctgccattattcccttgagtgttatagcttcctcttaacttaagcaaga

SEQ ID NO: 172296 - DNA, 80 bp, synthetic construct
  source 1..80: mol_type = other DNA
taataactcagtggaaccctagcactgtaaagaaatgcgtggtccgcggatacatgcccctcctcatctgtggaacgggc

SEQ ID NO: 172297 - DNA, 80 bp, synthetic construct
  source 1..80: mol_type = other DNA
ggatgattcaacaccaggattcattgtggatctccttagtgcctccaaggacccgaaagtcatagagttttgtgagaaag

SEQ ID NO: 172298 - DNA, 80 bp, synthetic construct
  source 1..80: mol_type = other DNA
aatcaccgagaaattactcaaaacactaatcaaaataatctccacattagtgatcattagtagaaattatgaagatacca

SEQ ID NO: 172299 - DNA, 80 bp, synthetic construct
  source 1..80: mol_type = other DNA
gtcatctggtttttaccgtaggacaaaatcagatgagtacacacatgctggttatgtttccctatggtaccagacagatt

SEQ ID NO: 172300 - DNA, 80 bp, synthetic construct
  source 1..80: mol_type = other DNA
cagcagtctctccagctccacctcagacacctcgcggtccaactcgccaaaacccaagcgggcctccatgtaaacccgct

SEQ ID NO: 172301 - DNA, 80 bp, synthetic construct
  source 1..80: mol_type = other DNA
gacccagaaacattctggtcaaaaataccagtaatgttagatggtgagtgtataatggcatttgattacacaaactatga

SEQ ID NO: 172302 - DNA, 80 bp, synthetic construct
  source 1..80: mol_type = other DNA
acacttgtagcaccatggatttccaacaccgattatcggcgcagcaccaaagatgactttactgaaggcggttatatcac

SEQ ID NO: 172303 - DNA, 80 bp, synthetic construct
  source 1..80: mol_type = other DNA
acctgctagagcgtacttggattgataaattcatttgaatagcaatagtaatgtagaaatctacctgagtaggagtaggg

SEQ ID NO: 172304 - DNA, 80 bp, synthetic construct
  source 1..80: mol_type = other DNA
aagtcccaggtaccgtcactccagtttctggccttagtggtagtacaacaaaatgacagaccccagagagacagtaccac

SEQ ID NO: 172305 - DNA, 80 bp, synthetic construct
  source 1..80: mol_type = other DNA
gtgcgcacccgcacgaaggccgtctgataacacgtgtggcaacaagtacccccacaggcctcgcacagccccgcggcgca

SEQ ID NO: 172306 - DNA, 80 bp, synthetic construct
  source 1..80: mol_type = other DNA
gctaccaggtagagccccgagtggatccctggtagcactagcaggtgagcctgggtgttccctgttagactctcactggt

SEQ ID NO: 172307 - DNA, 80 bp, synthetic construct
  source 1..80: mol_type = other DNA
ccctactcaaaagaaactgccacattgctgaaaccacaagaggtgaattcaatcttttgggcatccattccaactgtgcc

SEQ ID NO: 172308 - DNA, 80 bp, synthetic construct
  source 1..80: mol_type = other DNA
gacgcgtgtctgtgtctgtgtgattccccggggagggacgacggtcagagaaaagacgcggaaaagaggaagtccccagg

SEQ ID NO: 172309 - DNA, 80 bp, synthetic construct
  source 1..80: mol_type = other DNA
gttttggttttcttttgctatggactttataattagaacactaatttgattaagacaattttggaatattggacatacca

SEQ ID NO: 172310 - DNA, 80 bp, synthetic construct
  source 1..80: mol_type = other DNA
ctgaatttagcgttttgaggagacgctggctagacatgttttaaacaaatttacgatatagacatttaatttgtgtagaa

SEQ ID NO: 172311 - DNA, 80 bp, synthetic construct
  source 1..80: mol_type = other DNA
cgagtcctccagccctggatcgactcctcccaggaggagcaggaagagtcgcaaagcgaccaagaagagacgacgctcaa

SEQ ID NO: 172312 - DNA, 80 bp, synthetic construct
  source 1..80: mol_type = other DNA
ctgcagagatcatgggtgctcaggtttcagctcagaacaatggcacacacgaaaataagaacaccgctaccggtggttct

SEQ ID NO: 172313 - DNA, 80 bp, synthetic construct
  source 1..80: mol_type = other DNA
atgatatgggcactttatgctccagaatagttacagataatcataagcatccaatagaggtaacaacaagaatataccat

SEQ ID NO: 172314 - DNA, 80 bp, synthetic construct
  source 1..80: mol_type = other DNA
atcactaccatgccaaatgatatctcgctcacaaccagagggcccggcttcgggggagcgtttgtaggttcatacaagat

SEQ ID NO: 172315 - DNA, 80 bp, synthetic construct
  source 1..80: mol_type = other DNA
acaaaagggtaactaacatgctcaaggacattaaaacgatgacagcatacaaaaagactcaccgcacggaaccagtatgt

SEQ ID NO: 172316 - DNA, 80 bp, synthetic construct
  source 1..80: mol_type = other DNA
gtggataagcaggacacagcagcaatccacagcaggcatacaaccgcacaccgaggttactccgttctacaggttacgac

SEQ ID NO: 172317 - DNA, 80 bp, synthetic construct
  source 1..80: mol_type = other DNA
acaacgatgcatccacatggcaagattactggtcaaagaaaaatgaaaactatgaaggccaagcataccctcaaagttca

SEQ ID NO: 172318 - DNA, 80 bp, synthetic construct
  source 1..80: mol_type = other DNA
gttggtagttccagacaccaaaccaagtggtcccatacacacaacaaaaccaaccgctttgtctgccatggaaattggtg

SEQ ID NO: 172319 - DNA, 80 bp, synthetic construct
  source 1..80: mol_type = other DNA
aaccggctactgtgtggttagtgacacattttgcaacggagacatgccgtttcttgcaccatatatcccaatcaactggt

SEQ ID NO: 172320 - DNA, 80 bp, synthetic construct
  source 1..80: mol_type = other DNA
agatacaagaaagtcagaatcaagcccccaaaactaatgctcaacaaatggtactttacaaaggacatctgtgacatggg

SEQ ID NO: 172321 - DNA, 80 bp, synthetic construct
  source 1..80: mol_type = other DNA
accacggggcttttgggcatcaatcaggggctgcgtatgttggaagctaccgtgtggtgaaccggcatctggcaacccat

SEQ ID NO: 172322 - DNA, 80 bp, synthetic construct
  source 1..80: mol_type = other DNA
gttttaagttccgcatacacaaacacactatctatactaccagatcaactagatgaaaatacatttaaagtatttttaac

SEQ ID NO: 172323 - DNA, 80 bp, synthetic construct
  source 1..80: mol_type = other DNA
gactggtggatacacaccctgttgaaaatcaaagatatggttttgagcgtgtttaaacccagcatggagagtaaggctat

SEQ ID NO: 172324 - DNA, 80 bp, synthetic construct
  source 1..80: mol_type = other DNA
ttggtgatggattcacaagttccatcagagacacactggtaaacgcctgtgacgtgtcagacaagttgacaggaaaaatt

SEQ ID NO: 172325 - DNA, 80 bp, synthetic construct
  source 1..80: mol_type = other DNA
aaaaagaaagtactcataccaagcttcagaacaaaacccaaaggtcgtagcactataaaagtcaaaatacacccccctaa

SEQ ID NO: 172326 - DNA, 80 bp, synthetic construct
  source 1..80: mol_type = other DNA
gcgcgcgcgcgccggcgggctgccgccccccccggagaaagggggaggccccccccgggggggggtttgcccaccggcct

SEQ ID NO: 172327 - DNA, 80 bp, synthetic construct
  source 1..80: mol_type = other DNA
caaaagagacttgatttggcttgatgataatggaatgtttctgggtctgcatcctaggctggctcaaagaattctattca

SEQ ID NO: 172328 - DNA, 80 bp, synthetic construct
  source 1..80: mol_type = other DNA
atgcgtatgcagggtacattctgggaatgcagcatttttattgtatcaataaactaagtctccatggaaccaacaccaga

SEQ ID NO: 172329 - DNA, 80 bp, synthetic construct
  source 1..80: mol_type = other DNA
gctgccggcgcgtatcaggagccgtcatcgctgatgtcgtcatcgccctgacaggcgcgtagatggctccgcgagatcac

SEQ ID NO: 172330 - DNA, 80 bp, synthetic construct
  source 1..80: mol_type = other DNA
ctgggcagagtgactccacgcttgcttgcttaaaaccctctcaataaagctgccagttagaagcaagctaagtgtgtgtt

SEQ ID NO: 172331 - DNA, 80 bp, synthetic construct
  source 1..80: mol_type = other DNA
gggtccctagaccgcctagacttagcccgtatgtgaaaagctcgaatgtgaacttcaaacctactgccgtgacaacagag

SEQ ID NO: 172332 - DNA, 80 bp, synthetic construct
  source 1..80: mol_type = other DNA
acgtgctgtcactgtgtcacttaatgtggcataatggtagggacgtgtataagcagtttgaggaccggatacgtagtgtc

SEQ ID NO: 172333 - DNA, 80 bp, synthetic construct
  source 1..80: mol_type = other DNA
ggtgttcgtctccgtaacccgcggcacgcaagcaacccccgtccccgtctccaccaccgccccggccccgcaacccccag

SEQ ID NO: 172334 - DNA, 80 bp, synthetic construct
  source 1..80: mol_type = other DNA
ttgactacagatgataggcaatcaccatcagcattaccaaattatgaagtcaccccactcattcatattcctggtagagt

SEQ ID NO: 172335 - DNA, 80 bp, synthetic construct
  source 1..80: mol_type = other DNA
attgtatccaacaatactggcctaatgcagataatgtactcaccaccaggtatagtagctccacaggatatagaagataa

SEQ ID NO: 172336 - DNA, 80 bp, synthetic construct
  source 1..80: mol_type = other DNA
cctggtgatatgacctggcgccccccagtacacaatgccgccggcatcgataggcagttctttgaagcctgctttcgatg

SEQ ID NO: 172337 - DNA, 80 bp, synthetic construct
  source 1..80: mol_type = other DNA
ggtgcctgtggcacccctcaagtatagtgccggcgccaccactgagatcccaattactatcacaatagcccctttaaatt

SEQ ID NO: 172338 - DNA, 80 bp, synthetic construct
  source 1..80: mol_type = other DNA
ctataataacctaaaccatatgggaaaattgtacatcagacacgtgaatgcaaacataaccggtctgacgagcacagtgc

SEQ ID NO: 172339 - DNA, 80 bp, synthetic construct
  source 1..80: mol_type = other DNA
ccgatggcacacccaataataataaacagcagtggactgacacatggtcaggcgaaaatggtatataccacaaaaaaaca

SEQ ID NO: 172340 - DNA, 80 bp, synthetic construct
  source 1..80: mol_type = other DNA
tggttgtggattcaccaatcaaataagtgaaagggttagtgaaatcgcttccatggttaatagtgtcatcacagaaaaat

SEQ ID NO: 172341 - DNA, 80 bp, synthetic construct
  source 1..80: mol_type = other DNA
aagcatactttaatcagttaaccagtgaaggaccacaaaacacaaacagcacagacggctatgcatcacagtggaccact

SEQ ID NO: 172342 - DNA, 80 bp, synthetic construct
  source 1..80: mol_type = other DNA
aattcccggtggcggtaacgtccctcgcagaatacaagtcatcaatccgaaattcctcgggcccaactacagtttcagat

SEQ ID NO: 172343 - DNA, 80 bp, synthetic construct
  source 1..80: mol_type = other DNA
ccttaataacatactattaaaaaacatgactacataccataacaaactgaaaaactttccacagtcataccaaggaaaca

SEQ ID NO: 172344 - DNA, 80 bp, synthetic construct
  source 1..80: mol_type = other DNA
gtgtttattcgcttcccccagacccctcccactttgacgggtataaacaacagggggttgtcattatggatgacttaaat

SEQ ID NO: 172345 - DNA, 80 bp, synthetic construct
  source 1..80: mol_type = other DNA
tcagaaaagcaaatccggatgtcattctcattcagtacatggatgatatcttaatagctagcgacaggacagatttagaa

SEQ ID NO: 172346 - DNA, 80 bp, synthetic construct
  source 1..80: mol_type = other DNA
actgtttgcatccctttcccttcacctaacatccctccccaagttatattttgcggtaacgttagaagaagtgaactcag

SEQ ID NO: 172347 - DNA, 80 bp, synthetic construct
  source 1..80: mol_type = other DNA
gtttcaaaacctgaattgatgtggattgtgtatagtacctgttgatctggtaacagtgtcaacactagttgtaaggccca

SEQ ID NO: 172348 - DNA, 80 bp, synthetic construct
  source 1..80: mol_type = other DNA
tggggatgtaaagaaattagctgaggtggttgcggagtcaatgtccaatacagacgatgatgagatcaaggaacagattt

SEQ ID NO: 172349 - DNA, 80 bp, synthetic construct
  source 1..80: mol_type = other DNA
atcatgtctgtggacaactacaacgagacactgagtggaagtcaaaaatccaccttgttttccacgtggaacatcacgta

SEQ ID NO: 172350 - DNA, 80 bp, synthetic construct
  source 1..80: mol_type = other DNA
tcagctcacaggtcctagtctacacccagcactgctgatgttacagaaaaaaagaaaaatagtacaaggttttaaaacta

SEQ ID NO: 172351 - DNA, 80 bp, synthetic construct
  source 1..80: mol_type = other DNA
gtcccaaaagtaggcacgctgccaataccccccccccacccaggaatgtgactggaccggttccgagtagccctagaagc

SEQ ID NO: 172352 - DNA, 80 bp, synthetic construct
  source 1..80: mol_type = other DNA
aattatccaacacagcaaagagatatggattgaccattacgccacctgataaatcaactgaattcagacccatgtcttgg

SEQ ID NO: 172353 - DNA, 80 bp, synthetic construct
  source 1..80: mol_type = other DNA
cgcagaaagaccaaccaccatcccttaaacctagaatggaggttgagtttttaaagcgcaaacctggttacttcccagag

SEQ ID NO: 172354 - DNA, 80 bp, synthetic construct
  source 1..80: mol_type = other DNA
gggggccagcagccgctggtccgccgggtgatcacgcagctggaaacggctgccacggaggcgcggccctacgtcaattg

SEQ ID NO: 172355 - DNA, 80 bp, synthetic construct
  source 1..80: mol_type = other DNA
aaaacagtagtgcaggatgaaagtcccatgggggggggggggcagacagtagtcgtttttgccgctggccgtacgctatg

SEQ ID NO: 172356 - DNA, 80 bp, synthetic construct
  source 1..80: mol_type = other DNA
tcctggtatcggtctgcgattccgactcgtccaacatcaatacaacctattaatttcccctcgtcaaaaataaggttatc

SEQ ID NO: 172357 - DNA, 80 bp, synthetic construct
  source 1..80: mol_type = other DNA
ttattttcctcgcttccgggctgtcatcattaaactgtgcaatggcgatagccttcgtcatttcatgaccagcgtttatg

SEQ ID NO: 172358 - DNA, 80 bp, synthetic construct
  source 1..80: mol_type = other DNA
cacgtaaggttaaaggtcaccatcttccgggctgtcaccaaatggcggacaatatcttccgggtcaaaggtcatgtctac

SEQ ID NO: 172359 - DNA, 80 bp, synthetic construct
  source 1..80: mol_type = other DNA
tgccatggccactggcaaatttttgctagcttactccccaccaggtgcgaatgcccccaggactcgtaaggacgcgatgc

SEQ ID NO: 172360 - DNA, 80 bp, synthetic construct
  source 1..80: mol_type = other DNA
atatggcatgatgtagaatggataaaatacggacctcctacacaccaactatgcaggattggaagttatcattcaacgtc

SEQ ID NO: 172361 - DNA, 80 bp, synthetic construct
  source 1..80: mol_type = other DNA
caagtacaaccacaacacagagcacaaccacagcagggaacatggtcacaatagatgagaactctccatgcattaacaat

SEQ ID NO: 172362 - DNA, 80 bp, synthetic construct
  source 1..80: mol_type = other DNA
ccaccatacaatctactggagcgttcttggatcgacaagttcatttagacaatgtagaaatctacctgagtaggagtagg

SEQ ID NO: 172363 - DNA, 80 bp, synthetic construct
  source 1..80: mol_type = other DNA
ctcatggttaaagaagtttactgaaatgtgtaatgcagctaggggtcttgagtggataggtaataagatatctaaattta

SEQ ID NO: 172364 - DNA, 80 bp, synthetic construct
  source 1..80: mol_type = other DNA
cactaaaggtctcacagtacataacgttacttttggcgattcaggaacatacacggaatacatctacgaatgtcatcttt

SEQ ID NO: 172365 - DNA, 80 bp, synthetic construct
  source 1..80: mol_type = other DNA
gtcttacacctgcaagcaacaaaggcgggtggcagtacacatacacaagactaatgtccccttactactataaaggcaac

SEQ ID NO: 172366 - DNA, 80 bp, synthetic construct
  source 1..80: mol_type = other DNA
ctatgctaacaccgggtctaacaatgaagtcaaaattaaaattgataactttgaaaactggctttataactccagtgtac

SEQ ID NO: 172367 - DNA, 80 bp, synthetic construct
  source 1..80: mol_type = other DNA
gagaaggacccgctataccaggtgactgtggtggtaagcttttgtgtagacatggtgtgataggcttactcactgcaggc

SEQ ID NO: 172368 - DNA, 80 bp, synthetic construct
  source 1..80: mol_type = other DNA
agttggctgcgatccagacatattctggagtaaaatccctgtgttactggatggacagctattcgcatttgattacactg

SEQ ID NO: 172369 - DNA, 80 bp, synthetic construct
  source 1..80: mol_type = other DNA
gtcaactctcctaataatggatgtgacttcatcatccgttttgtcaccctcatgtaaggcactcatgcagtgtttgatgg

SEQ ID NO: 172370 - DNA, 80 bp, synthetic construct
  source 1..80: mol_type = other DNA
actactcagtatgtgggcctcagcctgtgacctaaaaaacccgtggctcagagaaggggccctaagccccacagtaggct

SEQ ID NO: 172371 - DNA, 80 bp, synthetic construct
  source 1..80: mol_type = other DNA
gtcaacaatttatgaccactgaagatgagcaatcagccaacttattgccaggctttcatcccagcaagaagattcacata

SEQ ID NO: 172372 - DNA, 80 bp, synthetic construct
  source 1..80: mol_type = other DNA
gctcgtcagtttgttgtgtacgacctggcgtgtcaatgaatgggtcatggtggtgatgatcccgcgaatctcagccgttt

SEQ ID NO: 172373 - DNA, 80 bp, synthetic construct
  source 1..80: mol_type = other DNA
tgatgttactagtcttctcgcagttaactggcggataacgcacaagcaattcttgttccccggagctggatatagactgc

SEQ ID NO: 172374 - DNA, 80 bp, synthetic construct
  source 1..80: mol_type = other DNA
tccaccctgttaattatggatgttacatcttcttcagttctatccccttcttgtaaggctctaatgcagtgcctgatgga

SEQ ID NO: 172375 - DNA, 80 bp, synthetic construct
  source 1..80: mol_type = other DNA
ggaaagtatgttggcggtggtggttgctagatgcattgcgtgtttgtgttggtacttttgcaaaccgccgcacatggtgt

SEQ ID NO: 172376 - DNA, 80 bp, synthetic construct
  source 1..80: mol_type = other DNA
agtattgaaaactttcttagtagatcagcatgtgtgtacatcgacaattacactagcaatgatgtgagcaaagttgacaa

SEQ ID NO: 172377 - DNA, 80 bp, synthetic construct
  source 1..80: mol_type = other DNA
aatgccacaaagttccacagtggcatgctcttggttgctgttgtacccgagcaccagcttgcatacattggtggtacaaa

SEQ ID NO: 172378 - DNA, 80 bp, synthetic construct
  source 1..80: mol_type = other DNA
gaacagcctagtaatgacatacaaaacccagttgaggaattcattgatgagactctcaaagaggtgctggttgttccaaa

SEQ ID NO: 172379 - DNA, 80 bp, synthetic construct
  source 1..80: mol_type = other DNA
gagagcaaaaattggcaaagtgattcaaaaggatggtggtggaaacttccagatgccttgaaggacatgggcatttttgg

SEQ ID NO: 172380 - DNA, 80 bp, synthetic construct
  source 1..80: mol_type = other DNA
atgacccagttacaatcaacgccaaaattagagtgtacatgaaacccaaacacgtcagagtgtggtgcccaagaccacca

SEQ ID NO: 172381 - DNA, 80 bp, synthetic construct
  source 1..80: mol_type = other DNA
tttgttaatagttattcatattttagaggttcattagtcttgagattgagtgtttatgccagcacctttaatagaggtcg

SEQ ID NO: 172382 - DNA, 80 bp, synthetic construct
  source 1..80: mol_type = other DNA
ccacacaactactagaataccacctgggcatctacagccccatattcttacacccaggcaggtccaacatacagatgtgg

SEQ ID NO: 172383 - DNA, 80 bp, synthetic construct
  source 1..80: mol_type = other DNA
gttaagagcaactggtacttcatcctcaactttacccatcactgttactattgctccagataaatctgaattctcaggtg

SEQ ID NO: 172384 - DNA, 80 bp, synthetic construct
  source 1..80: mol_type = other DNA
agtcaccagcaatgaatacctcaatcacaaaacaggcctatttagccctatattcctatcaaacagcagactcagtccag

SEQ ID NO: 172385 - DNA, 80 bp, synthetic construct
  source 1..80: mol_type = other DNA
atgatactaccaacacatgctgatgtgggtaatactgttgacattgatggtatacaaacaaaggtttcagattcatatga

SEQ ID NO: 172386 - DNA, 80 bp, synthetic construct
  source 1..80: mol_type = other DNA
tcacaatcacggtcgcccccatggacgctgaatacaacggactgcggctagcgggacatcaaggtttaccaactatgaac

SEQ ID NO: 172387 - DNA, 80 bp, synthetic construct
  source 1..80: mol_type = other DNA
gagggtttcagaatgatgtaaagtaccctttccttacccacccaatctatccaatgaaggatgtctatgagtcaatcagg

SEQ ID NO: 172388 - DNA, 80 bp, synthetic construct
  source 1..80: mol_type = other DNA
agggtgcccagaacagacctaaaaaaaacccctttctatccctggatgccccccacacgtccattcaaagtgtcctttgc

SEQ ID NO: 172389 - DNA, 80 bp, synthetic construct
  source 1..80: mol_type = other DNA
actatgatggcagcttggaaccagtctggttcgacgccctaaaattagtactgaatgaactgggttttgatggggagttg

SEQ ID NO: 172390 - DNA, 80 bp, synthetic construct
  source 1..80: mol_type = other DNA
ctcgtctgtccacggcctcggcctccgccctcaggtaggccgcccgggccacacgggcgaagcggctcgtggggctcgcg

SEQ ID NO: 172391 - DNA, 80 bp, synthetic construct
  source 1..80: mol_type = other DNA
ggtaagagtattagagcaaaccaccaatcagaaagcagaattagaagcctttgcgatggcagtagcagactcaggtccaa

SEQ ID NO: 172392 - DNA, 80 bp, synthetic construct
  source 1..80: mol_type = other DNA
caaatacttccggggttaaaggtcagcctacgtcataagtcacgtggggaaggctgcgttacaacccggaagctgtactc

SEQ ID NO: 172393 - DNA, 80 bp, synthetic construct
  source 1..80: mol_type = other DNA
cacatagaacaggatagtgagttgcaaggcgacaagatagagaacacaccaacagttgcagatacacagccaagcggcgc

SEQ ID NO: 172394 - DNA, 80 bp, synthetic construct
  source 1..80: mol_type = other DNA
catcttgggggcaatcccgtgtccgaacaggttgtcgcagatccctgcaaccaacccacctatcaaatgcccggaaccgg

SEQ ID NO: 172395 - DNA, 80 bp, synthetic construct
  source 1..80: mol_type = other DNA
aacgtagctcaatcttcatgttctgtgtgatatcgaacaatgaattctgattcactgacggtgtcttgcaacatatggta

SEQ ID NO: 172396 - DNA, 80 bp, synthetic construct
  source 1..80: mol_type = other DNA
caacactggcgtgtattattgtgaatccagaaggaggtattatcctgtttccttcattggtccaactttccaatacatgg

SEQ ID NO: 172397 - DNA, 80 bp, synthetic construct
  source 1..80: mol_type = other DNA
cgatgtgttgtgagttcaatgggctccgcaatttgaccatccctgctgcgcaagggttaccagtaatgaacacacctggt

SEQ ID NO: 172398 - DNA, 80 bp, synthetic construct
  source 1..80: mol_type = other DNA
tcacggttacagtagccccgatgagcgcagagtacaatgggttgaggttgggtggacatcaggggttaccaactatgaac

SEQ ID NO: 172399 - DNA, 80 bp, synthetic construct
  source 1..80: mol_type = other DNA
atccgcgacgacgcgtagctgcactgggaagacacttcctcccaacggaccaagatctcatcgggccgttcggagaaacg

SEQ ID NO: 172400 - DNA, 80 bp, synthetic construct
  source 1..80: mol_type = other DNA
taggaaatgcccgctgttgtccattcatttgtggtaaagctgtagtttttagggatcgtaacacatgccagacttacact

SEQ ID NO: 172401 - DNA, 80 bp, synthetic construct
  source 1..80: mol_type = other DNA
tccctaaggacgaaaaccccaatgacacagactacaatagtttgaaacacacacaatacaattccactccatacttacaa

SEQ ID NO: 172402 - DNA, 80 bp, synthetic construct
  source 1..80: mol_type = other DNA
atgctaaacacgcagataggtactaccctgtgaatctagtagcacatgattggtatgagattcaagagtcccagtattac

SEQ ID NO: 172403 - DNA, 80 bp, synthetic construct
  source 1..80: mol_type = other DNA
gatctgtgtaacgttaatcttgtgtcacttgtggtcagcctagcttcctttcaacatccgttctgccgaccactaactga

SEQ ID NO: 172404 - DNA, 80 bp, synthetic construct
  source 1..80: mol_type = other DNA
acttttatgatggctttgcgcgggtgccattggaaggtgaaaacacggattctggtgatgcttattatggcttagtctcc

SEQ ID NO: 172405 - DNA, 80 bp, synthetic construct
  source 1..80: mol_type = other DNA
gggaaaattaagcatatcatacacttgtttgttggattcacccctctgattacacatactcttggcttgattaggattgt

SEQ ID NO: 172406 - DNA, 80 bp, synthetic construct
  source 1..80: mol_type = other DNA
agaaggcgctcaacaacgcggtcaagccggccagctgccaacccacggcgccataggtgtgcagcgccacgcggcaacag

SEQ ID NO: 172407 - DNA, 80 bp, synthetic construct
  source 1..80: mol_type = other DNA
gctcccggtcccatgccactggaaaaagggctggtacttgttcttaatggcgtaggtctgacctggaacaatcttggtga

SEQ ID NO: 172408 - DNA, 80 bp, synthetic construct
  source 1..80: mol_type = other DNA
tgcgggaaaaacatgagttccttaataggttgaaacagttacctctcttagaaagtcaagttgcaaccattgagcagagt

SEQ ID NO: 172409 - DNA, 80 bp, synthetic construct
  source 1..80: mol_type = other DNA
ctgtttggtaaaggcgctctcaaaagagtgtcagaaaaaccagactatgatgcagactattatgtccttccaaaaaaacc

SEQ ID NO: 172410 - DNA, 80 bp, synthetic construct
  source 1..80: mol_type = other DNA
aggccacatgcgtgtatgacttccgcaccatcccgtactgcatgttccacatgtacgcgctagacgtgtaatccactcgc

SEQ ID NO: 172411 - DNA, 80 bp, synthetic construct
  source 1..80: mol_type = other DNA
tgtcacagtaaggataggtattatccaatagagttcaagcaacatgactggtatgagatacaagaatctatttattaccc

SEQ ID NO: 172412 - DNA, 80 bp, synthetic construct
  source 1..80: mol_type = other DNA
ataatgtatacaaagacaccatagtagaagcatttgtaaacaacgccacaaacatgtatgaggcacgcaaacacaccaca

SEQ ID NO: 172413 - DNA, 80 bp, synthetic construct
  source 1..80: mol_type = other DNA
ttgagacagtagctcataatgctcttcagttatctcagcctaaaccttcacaaaaaccagcgatagccaatacagctgct

SEQ ID NO: 172414 - DNA, 80 bp, synthetic construct
  source 1..80: mol_type = other DNA
gatcgtaaagagatgaagacccgagtgcccaaagatcacaccctccgaagtgcagccccgaccatcgttcccgtttggga

SEQ ID NO: 172415 - DNA, 80 bp, synthetic construct
  source 1..80: mol_type = other DNA
cgcgacttacaagttgttgacccacacaccgtgggcccccaatgggcgctccacacctgggactggcgacgtggactctt

SEQ ID NO: 172416 - DNA, 80 bp, synthetic construct
  source 1..80: mol_type = other DNA
ttggctattattccagtagttcctcttaacactagtggtgggacaaccatggtgccaattacagtctcaatagcccctat

SEQ ID NO: 172417 - DNA, 80 bp, synthetic construct
  source 1..80: mol_type = other DNA
ctggtggtggaagttacctgatgctcttaagaacatgggcatatttggtgagaatatgttttaccactttctaggaagat

SEQ ID NO: 172418 - DNA, 80 bp, synthetic construct
  source 1..80: mol_type = other DNA
catatgtaaagattgtcaccccctctcaaacactctgagtccaccaaccatcttgaacccagatgcattagctagaaggt

SEQ ID NO: 172419 - DNA, 80 bp, synthetic construct
  source 1..80: mol_type = other DNA
gcggcggtgtgcgtggacgggagtgtgcgtggacggtggtgtgcgtggacggtggtgtgcggggacttgcgggcttttgc

SEQ ID NO: 172420 - DNA, 80 bp, synthetic construct
  source 1..80: mol_type = other DNA
ctttcctaacacataccctttctaggcaattacaaaaatcttgtaaattgaatggggtctacactaaccccactgccagt

SEQ ID NO: 172421 - DNA, 80 bp, synthetic construct
  source 1..80: mol_type = other DNA
agtcacggtctctgatgaggcacaggaggacgagactcattgcttggtacatccagcacaaactagcccatgggatgacc

SEQ ID NO: 172422 - DNA, 80 bp, synthetic construct
  source 1..80: mol_type = other DNA
taaatagtcaggaagtgccagcactcacagcggttgagactggcgcctcaggacaagctgtaccttcagatgtggttgaa

SEQ ID NO: 172423 - DNA, 80 bp, synthetic construct
  source 1..80: mol_type = other DNA
ggagaggcagggaggcgatgatctggcatgtgtgccgcaggtgtgtcaggaggtcgtcaaaatccatcaccgttggtagg

SEQ ID NO: 172424 - DNA, 80 bp, synthetic construct
  source 1..80: mol_type = other DNA
cagcctcccgcacaggtaagtgcttttccatttttagccccagccccgcctctataagttctaggcaaacctccaatcac

SEQ ID NO: 172425 - DNA, 80 bp, synthetic construct
  source 1..80: mol_type = other DNA
tggacatgtcaagagcggttgagatgtgcaaaccagacggctgtgcccccgtcaattacaaaagatgctgtccattgatt

SEQ ID NO: 172426 - DNA, 80 bp, synthetic construct
  source 1..80: mol_type = other DNA
tatggttagagaccaagaccgcaacagttgggacattacaatgggctacaaattctcatggagatgggggggctctcctc

SEQ ID NO: 172427 - DNA, 80 bp, synthetic construct
  source 1..80: mol_type = other DNA
aaaaaagatcccaaacctcaaaccacaaagccaaaggatgtactcaccaccaagcccacaggggagccaaccatcgacac

SEQ ID NO: 172428 - DNA, 80 bp, synthetic construct
  source 1..80: mol_type = other DNA
tgaaggggagtacaaaccacctgtcccggttagaagtagccctagagatattgtcacagtaggaccaagtgatatgtatg

SEQ ID NO: 172429 - DNA, 80 bp, synthetic construct
  source 1..80: mol_type = other DNA
ttacagacacatacaaccctagttcagaaacaacaggggcgcgtaagtttgcagctgtggattacctacttggatgcggg

SEQ ID NO: 172430 - DNA, 80 bp, synthetic construct
  source 1..80: mol_type = other DNA
ccccacaaagtgccgctatgtacttagagacatccccctgtgggccatggcccacggatacgcagactacatagactcac

SEQ ID NO: 172431 - DNA, 80 bp, synthetic construct
  source 1..80: mol_type = other DNA
attatagcatatggggatgatgtggttgcatcgtacccagacccactagatccaaaagaaattgcagaaactggtgcaaa

SEQ ID NO: 172432 - DNA, 80 bp, synthetic construct
  source 1..80: mol_type = other DNA
tcgtagcgtagttattattccgtagcagcaatgatggtacagtcaagcacatgctctatttcccgttaccccgatgatga

SEQ ID NO: 172433 - DNA, 80 bp, synthetic construct
  source 1..80: mol_type = other DNA
ttgaacatcagacccaacaaagcccgatgcccagttatgggtacgtagtcgttgttcagggccgtgcatggcagcagaca

SEQ ID NO: 172434 - DNA, 80 bp, synthetic construct
  source 1..80: mol_type = other DNA
cacttaacgacatgggtcaactgttcgtgagacatgtaaatgaagcgagtccaggtgccgtttccagtgtagtgagaatt

SEQ ID NO: 172435 - DNA, 80 bp, synthetic construct
  source 1..80: mol_type = other DNA
tggattcactccattaaactcttggacttatcatttaatacaagtagtgttattgataagaagtgttcaccacaatggga

SEQ ID NO: 172436 - DNA, 80 bp, synthetic construct
  source 1..80: mol_type = other DNA
ctccgtccagcatccaggtaaatcgtcctgaaactctgagaggtccacaagcacaaactgaaggtaggctagcgttcggg

SEQ ID NO: 172437 - DNA, 80 bp, synthetic construct
  source 1..80: mol_type = other DNA
agcggttggtctccgcgtatacggtgaccagccatctccccagcgtcgttttcgccgcgttaaaagcgtagaatgacagc

SEQ ID NO: 172438 - DNA, 80 bp, synthetic construct
  source 1..80: mol_type = other DNA
gaccagccgtgaggcagggcacacgcgggtcggcggcgatgatgtcccccgcgaaggggacaacaaaaacaagacaagag

SEQ ID NO: 172439 - DNA, 80 bp, synthetic construct
  source 1..80: mol_type = other DNA
aattgtgctacaccacccacatatacaaggatgcagtgtacacagtagaaggtggtgtgccatctgggatctgtggcaca

SEQ ID NO: 172440 - DNA, 80 bp, synthetic construct
  source 1..80: mol_type = other DNA
gaaccccagcaccataagaaggtgcattatcaagggaatgattcccatgataatatgcggacacactaccgcaggcagaa

SEQ ID NO: 172441 - DNA, 80 bp, synthetic construct
  source 1..80: mol_type = other DNA
tgatcagatggtaatgcagctaaaagacatgcttaacaagatagggtttagcacaccagaagaaaagtatcagaaagaat

SEQ ID NO: 172442 - DNA, 80 bp, synthetic construct
  source 1..80: mol_type = other DNA
ccatcgcacaccgtgtgctgcattcgccgtcgcctccacgagagaacatccgccacagcatgcgctgtcgccgtcgcgcc

SEQ ID NO: 172443 - DNA, 80 bp, synthetic construct
  source 1..80: mol_type = other DNA
gaaagattggaaatgctaaatgttgtcccttaatttgtgggaaagcactgcaatttagggatagaaatagtggtgattat

SEQ ID NO: 172444 - DNA, 80 bp, synthetic construct
  source 1..80: mol_type = other DNA
caggagacacatactatggactggtgtccattaatgactttggcgccttggccatcagagtggtgaatgagttcaatcca

SEQ ID NO: 172445 - DNA, 80 bp, synthetic construct
  source 1..80: mol_type = other DNA
caagtaaaccaactagccgcctagcttatccagtgcagcaaatagctggcaattattcccacctgccgctaagcccccga

SEQ ID NO: 172446 - DNA, 80 bp, synthetic construct
  source 1..80: mol_type = other DNA
agtataaatacacccatccaggagaatcagggataaacttggatgacacaccagaaacagggggggcatcacatgatcca

SEQ ID NO: 172447 - DNA, 80 bp, synthetic construct
  source 1..80: mol_type = other DNA
atattggtttactggatactggtaaggcattgaccccatgcaccacatgcccaaaaccaccctactacaagtcctgctgt

SEQ ID NO: 172448 - DNA, 80 bp, synthetic construct
  source 1..80: mol_type = other DNA
actggacttacagtaacaaagacctagaactagccctgtactatggcaccacaataaaattctacagagacccatacact

SEQ ID NO: 172449 - DNA, 80 bp, synthetic construct
  source 1..80: mol_type = other DNA
ctccctaatacgcaggcgcagtaggaggctccgccccctacaacccccggtggggtaaaccccccctaagcccgcccaac

SEQ ID NO: 172450 - DNA, 80 bp, synthetic construct
  source 1..80: mol_type = other DNA
aattacatagatcaggtacttaatgaagttttggtagtcccaaacatcaaagaaagcaatcctacaacctctaattcagc

SEQ ID NO: 172451 - DNA, 80 bp, synthetic construct
  source 1..80: mol_type = other DNA
ccggcctacgagcgcatcgtctccagcggctacctgtcggccctgcgctactatgacacctatctgtatgtggggcgcag

SEQ ID NO: 172452 - DNA, 80 bp, synthetic construct
  source 1..80: mol_type = other DNA
ttacaaacatgggagcgtgcacctggaagatgcagctggggtagatctttacatctttacagggcgcagcagccgccaga

SEQ ID NO: 172453 - DNA, 80 bp, synthetic construct
  source 1..80: mol_type = other DNA
acacctcacactgcgacgcaccattggcacgctggcgcgtgtggtgccccacctacactgcctcattaatcccatcctgt

SEQ ID NO: 172454 - DNA, 80 bp, synthetic construct
  source 1..80: mol_type = other DNA
ctgaaagccgagacacttggtacaaaggtaacacatacaaagacacaattactactttagcacagaaaaccagagaaaga

SEQ ID NO: 172455 - DNA, 80 bp, synthetic construct
  source 1..80: mol_type = other DNA
aggagatttcaatctgcttggtgtgtatgataattgtgcagtgatacccacacatgctcagccagaagacacaatcctga

SEQ ID NO: 172456 - DNA, 80 bp, synthetic construct
  source 1..80: mol_type = other DNA
gatgtagaaatgtttctaggcagatccgccctttggggcaaggtaacactcgaaagccaatatgccaaatgggaaattaa

SEQ ID NO: 172457 - DNA, 80 bp, synthetic construct
  source 1..80: mol_type = other DNA
aacatggatgcataccgtatcccagttcagtcgaacatggacacgggtggtcaggtgttcggttttccgctacaacctgg

SEQ ID NO: 172458 - DNA, 80 bp, synthetic construct
  source 1..80: mol_type = other DNA
tactggaaaacattacaagagaacaatgacttgcacagcaagtatggcaaggcccagtctgaagagtttgagtaccacct

SEQ ID NO: 172459 - DNA, 80 bp, synthetic construct
  source 1..80: mol_type = other DNA
gagtaggggcaccaagaatgttcactgataaatggtacccccaaacagatctttgtgacatggtgcttctaactgtctat

SEQ ID NO: 172460 - DNA, 80 bp, synthetic construct
  source 1..80: mol_type = other DNA
gggtttcaaatgcaaccagggttagacaatgtgttaaaacacaccctactaggggagatactaaattactatgcacattg

SEQ ID NO: 172461 - DNA, 80 bp, synthetic construct
  source 1..80: mol_type = other DNA
tgctacctcttcgcctctggaccctcccggcccagcgccgcgaggccgcccggcgctccgccgcctcccggcactccctt

SEQ ID NO: 172462 - DNA, 80 bp, synthetic construct
  source 1..80: mol_type = other DNA
ggatataacacactaaaccacatgggtcaattatacatgcgccatgtaaatggacgatcacctcttccaatgaccagcac

SEQ ID NO: 172463 - DNA, 80 bp, synthetic construct
  source 1..80: mol_type = other DNA
ccgccgcagacgactaccagccagaagacctagacgagctgttcgccgctatcgaaggagaagagtaaggaggcgccgcg

SEQ ID NO: 172464 - DNA, 80 bp, synthetic construct
  source 1..80: mol_type = other DNA
ttgtaaccaatgtacctaaattcccaatgctagacatagaaataggtgatgtcataccatatggggatataaacctaagt

SEQ ID NO: 172465 - DNA, 80 bp, synthetic construct
  source 1..80: mol_type = other DNA
gccacagaaggcaatttttctcatccccaaattaaaaaatggaaaacaaaaacactaggagacaaccaatacttccaacc

SEQ ID NO: 172466 - DNA, 80 bp, synthetic construct
  source 1..80: mol_type = other DNA
aggcacaatagatgcaaacaatgaacaacatgggtggaacaaagtacagaacacaactacactttccatagagggttcaa

SEQ ID NO: 172467 - DNA, 80 bp, synthetic construct
  source 1..80: mol_type = other DNA
acatacccaccaccatgggaacccaccacctcaaacacaggcagacagtacctagaacatgactgtggcatctacagtcc

SEQ ID NO: 172468 - DNA, 80 bp, synthetic construct
  source 1..80: mol_type = other DNA
aggcagataattaatacctggcataaggtagggcaatatgtatatttgcctcctagggaaggggagttgacctgcaactc

SEQ ID NO: 172469 - DNA, 80 bp, synthetic construct
  source 1..80: mol_type = other DNA
ccctctgaaccccccactgcaactcgctactgtaagttctccaaccccctcacccagttcaccatgttcaaattggctgt

SEQ ID NO: 172470 - DNA, 80 bp, synthetic construct
  source 1..80: mol_type = other DNA
tccgagcgctgttccaacaattacaacgggtccaacaaaacacacatatcgaccctacctttttgccaaggggtgcgggc

SEQ ID NO: 172471 - DNA, 80 bp, synthetic construct
  source 1..80: mol_type = other DNA
gcagcggtggcgatagcgggccggaggacaaaaagaaaaacgtcgggaataaaaccgcggaggaaaagaacggcggtgtg

SEQ ID NO: 172472 - DNA, 80 bp, synthetic construct
  source 1..80: mol_type = other DNA
aattacactgcatatgatgaaagtagggataatttcacaatctggaaaataaacataaaggaaatggcccaaatcaggag

SEQ ID NO: 172473 - DNA, 80 bp, synthetic construct
  source 1..80: mol_type = other DNA
aggacccatttccatgaataatccaccaccccctgcaattgtggacttgcttcaatcagtcagaacaccagaggttatta

SEQ ID NO: 172474 - DNA, 80 bp, synthetic construct
  source 1..80: mol_type = other DNA
ccaccagcaaaattttgtgttttgtgtcagcgtgtaatgacttttctgtgaggctgttgagagacactcctttcttaaca

SEQ ID NO: 172475 - DNA, 80 bp, synthetic construct
  source 1..80: mol_type = other DNA
ggtgaatgctgggaagtatctaaaaatggtagagattgggagacattaaagctaaaagatttagtgtctcccaatctcta

SEQ ID NO: 172476 - DNA, 80 bp, synthetic construct
  source 1..80: mol_type = other DNA
agcctgtagcataaggggcatgatagcactagtaatctgtggacatactcaggctggcagaaactatgctattcacagtg

SEQ ID NO: 172477 - DNA, 80 bp, synthetic construct
  source 1..80: mol_type = other DNA
tggctggacaaatgccacagtaaaagaatatgaataccacttaggaatgtttagtcctatatttataggacccaccagag

SEQ ID NO: 172478 - DNA, 80 bp, synthetic construct
  source 1..80: mol_type = other DNA
gcttgtaaaagacttatcaaactcacctacaggatttccagagggaaccacagttaccaaaacaagcatagagaaataca

SEQ ID NO: 172479 - DNA, 80 bp, synthetic construct
  source 1..80: mol_type = other DNA
tatgtaccacaacaggttatacataggaatgttgtcaaattaagccaattttcaaatttgaaaccatttgtcaatgcata

SEQ ID NO: 172480 - DNA, 80 bp, synthetic construct
  source 1..80: mol_type = other DNA
agcatatttaatacaatgattaataatgtaataattaggacactagttttggatgcttataaaaatattgatttagataa

SEQ ID NO: 172481 - DNA, 80 bp, synthetic construct
  source 1..80: mol_type = other DNA
aaatccaagtgtcttctaccagcctaagagcggatttccccgtttcaccatcccatttacaggtctgggctcagcatact

SEQ ID NO: 172482 - DNA, 80 bp, synthetic construct
  source 1..80: mol_type = other DNA
accgtggccatgctgcttattgtggctgtggcaattttattagtcaccttgttgctctgggtgatcagtttggtttcagg

SEQ ID NO: 172483 - DNA, 80 bp, synthetic construct
  source 1..80: mol_type = other DNA
agagctttggggggggcctatgtaccgctcagtacacccttaggatactattccaagaaaaactagcccagcacaacttc

SEQ ID NO: 172484 - DNA, 80 bp, synthetic construct
  source 1..80: mol_type = other DNA
agccaattaaagatgtgttaataaagacggctccaatgttaaattcccctaacattgaagcttgtggatacagtgacaga

SEQ ID NO: 172485 - DNA, 80 bp, synthetic construct
  source 1..80: mol_type = other DNA
cagagagcagggatgattatgcatggcagtctggcactaatgcatctattttctggcaacatgggcaagcatacccaaga

SEQ ID NO: 172486 - DNA, 80 bp, synthetic construct
  source 1..80: mol_type = other DNA
catcaggaccaataggcactgtatttaacacatttaaaacccaagaacacgtagtagaccccagatgggatactgtaaaa

SEQ ID NO: 172487 - DNA, 80 bp, synthetic construct
  source 1..80: mol_type = other DNA
atatcaccacgacgaggaaaaacctgaacgacgttcccacttcttcacacgccagagtgatcaacacaggggcattcgga

SEQ ID NO: 172488 - DNA, 80 bp, synthetic construct
  source 1..80: mol_type = other DNA
tcgttacccgcacttgtactgcgcggaaattagtagcacctttgccagcctcatggcgtttcgctcagcgtttcccccac

SEQ ID NO: 172489 - DNA, 80 bp, synthetic construct
  source 1..80: mol_type = other DNA
gacaaaatagttaaaggaccctacggagggggacacgccacttttagattctccctacaagtactgtgcgaggagcatct

SEQ ID NO: 172490 - DNA, 80 bp, synthetic construct
  source 1..80: mol_type = other DNA
ctgataagaacccagcagggagtgcacgtcaatcctatcctaacgtaggccccctgcagtggttgtttccagagagaaag

SEQ ID NO: 172491 - DNA, 80 bp, synthetic construct
  source 1..80: mol_type = other DNA
aagtcgtcaacgcccaaggattgtccagtagtgaaactcccgttgaatttgacagaacaagcacaacgccagaggctgga

SEQ ID NO: 172492 - DNA, 80 bp, synthetic construct
  source 1..80: mol_type = other DNA
ccaaggcgatctccaaaaagctggacaaaacctcctcctcctctgcccctactccctcttcagataccaaaaacccccaa

SEQ ID NO: 172493 - DNA, 80 bp, synthetic construct
  source 1..80: mol_type = other DNA
ggtcacgatgacggccaaaccggctatcatcaccaggatctcacttaccgcctcgggaaaaagagaaaatacggcgaaca

SEQ ID NO: 172494 - DNA, 80 bp, synthetic construct
  source 1..80: mol_type = other DNA
ccaatgtcacagacacttacaacaacaaaatatttagtaacacaaacacagcactaacagcttggctaagtgggaaaggc

SEQ ID NO: 172495 - DNA, 80 bp, synthetic construct
  source 1..80: mol_type = other DNA
gtgttgcgggcgctcgggggttggcggcgagtgtttctccggtgattgcgcggcgtttctccgcagcttttgcacggcgc

SEQ ID NO: 172496 - DNA, 80 bp, synthetic construct
  source 1..80: mol_type = other DNA
tcagcgagctcgtcgccagcgcgagcgctcggcgcccaaaccgcaggagctgcttttcggaccgcggaacgagagcggtc

SEQ ID NO: 172497 - DNA, 80 bp, synthetic construct
  source 1..80: mol_type = other DNA
gttcattgactggctaaaagctatgttgccacaaacacaattaaagctggaatacttaaaattgttgaaacagctacccc

SEQ ID NO: 172498 - DNA, 80 bp, synthetic construct
  source 1..80: mol_type = other DNA
ttctgtatagaggagagggagtggacatgatctcgagcgccattcaaccattaaccaaaattgattcaatcacgactttc

SEQ ID NO: 172499 - DNA, 80 bp, synthetic construct
  source 1..80: mol_type = other DNA
ccccattctccaacagactgttaaagacccgtgcaaacaaccagacttccacattcccggcaccggtggcgtccctccga

SEQ ID NO: 172500 - DNA, 80 bp, synthetic construct
  source 1..80: mol_type = other DNA
aaaagttatttaatgactggaagattaatctgtcaagtttagttcaattaaggagaaaattagatatgttcacatacgtt

SEQ ID NO: 172501 - DNA, 80 bp, synthetic construct
  source 1..80: mol_type = other DNA
tagcctcccagcctcttgctacaacattaattggtgaaatagctagttactacactcactggactggaagcttgagattc

SEQ ID NO: 172502 - DNA, 80 bp, synthetic construct
  source 1..80: mol_type = other DNA
cgtggtgcgggcccgcatagggaaaagccagggagagcgatgtgggcgaggatgggctcaggcggccccagacacgcaat

SEQ ID NO: 172503 - DNA, 80 bp, synthetic construct
  source 1..80: mol_type = other DNA
acgtttgtgataacaatttctcaagagcaagggactcaattatctcaagatacaccagtgctaacacaccaactcatgtt

SEQ ID NO: 172504 - DNA, 80 bp, synthetic construct
  source 1..80: mol_type = other DNA
aattaactactataactcagggattagtgagttggaagttgtagggcagagagagctaaggttgtaccctgcagaggctt

SEQ ID NO: 172505 - DNA, 80 bp, synthetic construct
  source 1..80: mol_type = other DNA
catcagcacagttaaacacatctcaaaagccaggcaaaaaagactcaacacaaattcctgaaacagactggcttcaaggt

SEQ ID NO: 172506 - DNA, 80 bp, synthetic construct
  source 1..80: mol_type = other DNA
taggtggaaaccacgtctctcatgtgcactgcaagccattaaaggacagagtggttcagctaaattttatgaaaagttta

SEQ ID NO: 172507 - DNA, 80 bp, synthetic construct
  source 1..80: mol_type = other DNA
aagcaaaacttataataaaactgtggcaacctgcagtaattaaaagatgcagaataaagggatacataccactgattata

SEQ ID NO: 172508 - DNA, 80 bp, synthetic construct
  source 1..80: mol_type = other DNA
tgacccacgtgatttgtcacgtggtgcgtacgtcacggcggccattttgaatcacaaaatggccgccgtgacgtacgcac

SEQ ID NO: 172509 - DNA, 80 bp, synthetic construct
  source 1..80: mol_type = other DNA
tccctatcaataacacaacacaaaacttgagaaagataaatatgtatactatacagttagaaaatcaaacagaaatggcc

SEQ ID NO: 172510 - DNA, 80 bp, synthetic construct
  source 1..80: mol_type = other DNA
cattactttgtaaaccactcctaaccggcacagcaagaggtaagatagaagtctatattagtttgagatgccctaacttg

SEQ ID NO: 172511 - DNA, 80 bp, synthetic construct
  source 1..80: mol_type = other DNA
aggcaaaaagaatcagagacttaaagaacaaaatagttaattacatgcaattcagaaataaacaaagaactgaaccagta

SEQ ID NO: 172512 - DNA, 80 bp, synthetic construct
  source 1..80: mol_type = other DNA
tcagcttactacatgttttatgatggttatgattcaaatgaacaaggcaacaccagatatgggattggtaccaccaatga

SEQ ID NO: 172513 - DNA, 80 bp, synthetic construct
  source 1..80: mol_type = other DNA
gtgttaagagtggcacactcaatgaccttgaacaaaagcacttcctgacccacagaccagacataacaactgcaggaccc

SEQ ID NO: 172514 - DNA, 80 bp, synthetic construct
  source 1..80: mol_type = other DNA
gcgttggcgatctcgcaacccaggccaccaagtgcacaacaaagcttaccagacaccaatcagtcattacccgttcactc

SEQ ID NO: 172515 - DNA, 80 bp, synthetic construct
  source 1..80: mol_type = other DNA
agaagaggatttgaccctgcattataaaaacaaggttttcccaatcgagagcccatctgtaacacaagttacattgggtg

SEQ ID NO: 172516 - DNA, 80 bp, synthetic construct
  source 1..80: mol_type = other DNA
aaggacgccgggccggctgggaggtgtgcaccccccgagcgtctggacgacgctggcgagccgggccggctcgccttctt

SEQ ID NO: 172517 - DNA, 80 bp, synthetic construct
  source 1..80: mol_type = other DNA
ggcgcgttgcggagccggggacagtggtgaggacggggcgtcgcgggatggcaggctgttgcgtggcggagacagtgttg

SEQ ID NO: 172518 - DNA, 80 bp, synthetic construct
  source 1..80: mol_type = other DNA
agatgagcttaggaagaaagacaaaattagagctggtaagactcgtgtcatcgaggctagtagtattaatgacactctgt

SEQ ID NO: 172519 - DNA, 80 bp, synthetic construct
  source 1..80: mol_type = other DNA
cagaccctgccgatcacaatatctattgcccccatcaagtcagaattctccggtgcaagacaatctacaaaacaaggact

SEQ ID NO: 172520 - DNA, 80 bp, synthetic construct
  source 1..80: mol_type = other DNA
cccttttccctttcctattccccttgttttgtttgtaaatattaattcctgcaggttcagggttcttaaatctgtttctc

SEQ ID NO: 172521 - DNA, 80 bp, synthetic construct
  source 1..80: mol_type = other DNA
aaccgttgatagcaaccacacagatatcaacgacattaagcacaaaaatcgaaactacgacgtgtataaataccaccaca

SEQ ID NO: 172522 - DNA, 80 bp, synthetic construct
  source 1..80: mol_type = other DNA
tattgaaccaaaacctttaacattggaacaggcagtgtatggtacaacaaaccttgaacctcttgatctaacaaccagtg

SEQ ID NO: 172523 - DNA, 80 bp, synthetic construct
  source 1..80: mol_type = other DNA
gcccttagactgggagaacgaggctcaaatcgctgggtggttagacaggcctatgaggctgtatcctggggacagcccct

SEQ ID NO: 172524 - DNA, 80 bp, synthetic construct
  source 1..80: mol_type = other DNA
cacggccgccattttgttttacaaaatggccgacttccttcctcttttttaaaaaaaggcgccaaaaaaccgtcggcgtg

SEQ ID NO: 172525 - DNA, 80 bp, synthetic construct
  source 1..80: mol_type = other DNA
ttatacaacacttttcaaactatagcccaactaaaagaaacaggcctagctactactgatggtacaaacggtaactggtg

SEQ ID NO: 172526 - DNA, 80 bp, synthetic construct
  source 1..80: mol_type = other DNA
cgctactttcaccgtgcacgttcgcgacgccacgctacatcgagtgctcatcgtggatttggtcgagcgcgtgctggcca

SEQ ID NO: 172527 - DNA, 80 bp, synthetic construct
  source 1..80: mol_type = other DNA
attcttgctagaatgctcacttcagaatcagacatctactcactgcccccatcgcctaagtattttgatgggtatgacca

SEQ ID NO: 172528 - DNA, 80 bp, synthetic construct
  source 1..80: mol_type = other DNA
caaactacaaacaaaatcccaaaaatcccattaagactagggattctatcagtacatatgggttgggacccagatttggt

SEQ ID NO: 172529 - DNA, 80 bp, synthetic construct
  source 1..80: mol_type = other DNA
accgctgctctgctcttgaaagagttgcaacattcaccatcccaacgaactctcgacccggcgatcttcttttcaccctg

SEQ ID NO: 172530 - DNA, 80 bp, synthetic construct
  source 1..80: mol_type = other DNA
cgggcgagctggcttggttggcatgttaacactcttgactgagggtgagcaaaatataggatacatcaattgggatatag

SEQ ID NO: 172531 - DNA, 80 bp, synthetic construct
  source 1..80: mol_type = other DNA
ctcatatcctgaggagcttgaccctgctgagattgctatctctggactaaagtacgggttaacaataacccctgcagata

SEQ ID NO: 172532 - DNA, 80 bp, synthetic construct
  source 1..80: mol_type = other DNA
tcaggacaacccgtcggtttacgtgctggaaagcaaaccgattggcacggcacaagcgcgattttggcggatacgatggc

SEQ ID NO: 172533 - DNA, 80 bp, synthetic construct
  source 1..80: mol_type = other DNA
agcgcaattaatgacgctggatattgactcaaatccaattcccttagaagatagtgtatttggaatagaaggattagaag

SEQ ID NO: 172534 - DNA, 80 bp, synthetic construct
  source 1..80: mol_type = other DNA
cacatgggactcctctaacactaatcatataaacagcacctatgcaaatgccacatactctatatatgaataccactgtg

SEQ ID NO: 172535 - DNA, 80 bp, synthetic construct
  source 1..80: mol_type = other DNA
tattacactaaatacaaaacaaaagacacagacccatcggagatgtactctagttggagggttaccaccagacaagtcgc

SEQ ID NO: 172536 - DNA, 80 bp, synthetic construct
  source 1..80: mol_type = other DNA
ctagacctggctagatacagaggatgcaccctaaaagtctacagacagccaaaagtagactttataatgacattcaacac

SEQ ID NO: 172537 - DNA, 80 bp, synthetic construct
  source 1..80: mol_type = other DNA
tactgttggatataaccacacccatccaggggaaacaggcagagtgattggtggtttcactaataataacagtagacaac

SEQ ID NO: 172538 - DNA, 80 bp, synthetic construct
  source 1..80: mol_type = other DNA
tggtttaagtgagggagaaaccgccaagaaattctcagctaccggcacaaacggagccaatacagtacaatcaattgtaa

SEQ ID NO: 172539 - DNA, 80 bp, synthetic construct
  source 1..80: mol_type = other DNA
tacccaccagtttcactcatataacaacaatgggagctcaggtatccacacagaagtctggatcacatgagaaccaaaat

SEQ ID NO: 172540 - DNA, 80 bp, synthetic construct
  source 1..80: mol_type = other DNA
gccacctcacaggaatattcagtccaccattcctaacatcaggcagaataagtccagaaatatttggcctatacaaagaa

SEQ ID NO: 172541 - DNA, 80 bp, synthetic construct
  source 1..80: mol_type = other DNA
catacctaaaagatgaactcagagcaccagagaaaattaaattgggaaaaaccaggtcaattgaagctgctagcatgaat

SEQ ID NO: 172542 - DNA, 80 bp, synthetic construct
  source 1..80: mol_type = other DNA
aattaaactgacacagtggcaaccagccaagacaaaacgctgctttatgataggttattttcctacagtaattcagggac

SEQ ID NO: 172543 - DNA, 80 bp, synthetic construct
  source 1..80: mol_type = other DNA
aaaccccgagtggatctcgggccagtcgaggttgcagaaaaagactctttccagagagaaagagaacaaaaaccgtggga

SEQ ID NO: 172544 - DNA, 80 bp, synthetic construct
  source 1..80: mol_type = other DNA
aaatgaaagatttaacaaaataaaaaaagaatatgaaactgtatatcccacactaacaacacaaacacctcaaaactact

SEQ ID NO: 172545 - DNA, 80 bp, synthetic construct
  source 1..80: mol_type = other DNA
ggtttggaccagttagcacctttgtatgcagtagagaacaagaaagttactgaaatgcaaaaagaactcaagcgattgag

SEQ ID NO: 172546 - DNA, 80 bp, synthetic construct
  source 1..80: mol_type = other DNA
cctcccaggaagtgcacaagtctacattgtgcacttcctgggaggagtctacatcataatataactagctgtacttccga

SEQ ID NO: 172547 - DNA, 80 bp, synthetic construct
  source 1..80: mol_type = other DNA
agtacgctagctggaccatcaccacgcgtaaggtggctcagctacgcaggaaacttgagatgttcacttatctaaggttt

SEQ ID NO: 172548 - DNA, 80 bp, synthetic construct
  source 1..80: mol_type = other DNA
ctggctgcggacgggcgtggtttacatcctaatataaagcgcagcacttccgaatggctgagttttccacgcccgtccgc

SEQ ID NO: 172549 - DNA, 80 bp, synthetic construct
  source 1..80: mol_type = other DNA
tacccggtgggaccgcacgctcctggggcaccggcagtagggtgcggcggtaaccctcccatccgtcgagcccgccaccc

SEQ ID NO: 172550 - DNA, 80 bp, synthetic construct
  source 1..80: mol_type = other DNA
caggagcgaatgcccccaaaactcgtaaagatgcaatgttaggtacacatgttatatgggacgtgggcctgcagtcctct

SEQ ID NO: 172551 - DNA, 80 bp, synthetic construct
  source 1..80: mol_type = other DNA
aactcgcaaggatgcaatgctaggcacacatgttatatgggatgtgggcctgcagtcctcttgtgtattatgcatcccct

SEQ ID NO: 172552 - DNA, 80 bp, synthetic construct
  source 1..80: mol_type = other DNA
atgggagctcaggtatcaacgcaaaaaacaggtgcgcacgaaactaggctgaatgccaacgggaactccatcatacacta

SEQ ID NO: 172553 - DNA, 80 bp, synthetic construct
  source 1..80: mol_type = other DNA
caacccggattagactcagtattcaagagaacactgctgggggaggtgcttaattattacgcgcactggtcagggagcat

SEQ ID NO: 172554 - DNA, 80 bp, synthetic construct
  source 1..80: mol_type = other DNA
ctatttgccacctatcacccagcaaacatcaaaaagacaattaaagcaatgagagacagaaactatcaacttcatacagg

SEQ ID NO: 172555 - DNA, 80 bp, synthetic construct
  source 1..80: mol_type = other DNA
agtacaacaacaggtcaactattgggaataccatcgaagctcttttccagggaccccctaaatttagaccgataaggatc

SEQ ID NO: 172556 - DNA, 80 bp, synthetic construct
  source 1..80: mol_type = other DNA
cccactggcagacaaaggcataggcaattgtgtatatacacagtggtgctcagaacagagctgtaaagtagatcagaaaa

SEQ ID NO: 172557 - DNA, 80 bp, synthetic construct
  source 1..80: mol_type = other DNA
cccccattaacacatcagataatgtacgtgccgccggggggtccaattcccacgggttatgaagactttgcctggcagac

SEQ ID NO: 172558 - DNA, 80 bp, synthetic construct
  source 1..80: mol_type = other DNA
cgtggtcacaaaaccaccaccctcggcaatatcagatctactaaaagcagtagacaatgatgaagtgagggagtattgca

SEQ ID NO: 172559 - DNA, 80 bp, synthetic construct
  source 1..80: mol_type = other DNA
caagactcccgcagcccggtcccgacaacagataccgtgggacgccggcgcgcttacgccccgcaaacctccccgaggcc

SEQ ID NO: 172560 - DNA, 80 bp, synthetic construct
  source 1..80: mol_type = other DNA
gaaaacgtcagcacaccgcttccaatttgctcgtcatctaataacacaaataatacaatatcaaaagaacctgaaacatt

SEQ ID NO: 172561 - DNA, 80 bp, synthetic construct
  source 1..80: mol_type = other DNA
tcaaccaccacaacactaggtaacaaagtaacagcactaaaggcaaatggttctttccatacaggcaacaacccagtatt

SEQ ID NO: 172562 - DNA, 80 bp, synthetic construct
  source 1..80: mol_type = other DNA
ttgtgtctcgatagtggtgatttcgtgtgcagcttccacctggctattttgtaaatcgaggaatacttgcctgacccctt

SEQ ID NO: 172563 - DNA, 80 bp, synthetic construct
  source 1..80: mol_type = other DNA
catggacaggtaaatacagaagtagggacatggcaaatggactgtacccacttagagggaaaagttgtcatcgtggcagt

SEQ ID NO: 172564 - DNA, 80 bp, synthetic construct
  source 1..80: mol_type = other DNA
ggtcgccgcctgttccgtgatgctacctagagggcgccgtcgaggcgactcttcctgttttcgccctgagggctaacggt

SEQ ID NO: 172565 - DNA, 80 bp, synthetic construct
  source 1..80: mol_type = other DNA
agagaatagtcaccccccctatatacaaacacaacctggcgctgatggctttgaactacaacacccgtacgtacttgatg

SEQ ID NO: 172566 - DNA, 80 bp, synthetic construct
  source 1..80: mol_type = other DNA
gattgaaacgagggaaggaagacattcggccgcgtatttgcccatgggcgagcggtgccactcccggtactctgcaaaga

SEQ ID NO: 172567 - DNA, 80 bp, synthetic construct
  source 1..80: mol_type = other DNA
gatggcagccaggcagcgtcttcaggacattcgacgtggacccttggttgtagagggaggtgttggttggcgacattggc

SEQ ID NO: 172568 - DNA, 80 bp, synthetic construct
  source 1..80: mol_type = other DNA
tttagctacaaggacgagagcaaaaactgtgtgcttactatgaaatacaaattcaaattcacctggggcggcaatatggt

SEQ ID NO: 172569 - DNA, 80 bp, synthetic construct
  source 1..80: mol_type = other DNA
cgaccagatcggattaaccggtccatgcacgtgtccgactacggctataacgaagcactggcagtctccccgttgacagg

SEQ ID NO: 172570 - DNA, 80 bp, synthetic construct
  source 1..80: mol_type = other DNA
ttctcctttcatcttgacccagggagtggctccgtcctgaagcacaccttgcttggtgaaatcctaaactactacgcaca

SEQ ID NO: 172571 - DNA, 80 bp, synthetic construct
  source 1..80: mol_type = other DNA
ccgctcctgcgacctggctttcggatcgcgctcacagacgcggtacctgtggacgcccgatccctccaggttgcgcagta

SEQ ID NO: 172572 - DNA, 80 bp, synthetic construct
  source 1..80: mol_type = other DNA
ggtaacagacgcaacccccatgacaaccttccaagtgatgacaattggcttaactttgatggtactttattaggcaatgc

SEQ ID NO: 172573 - DNA, 80 bp, synthetic construct
  source 1..80: mol_type = other DNA
agggaaggatggattaaacaatctagacactcaaagatagaacgtgacttcaattacgtgcagtactgcatcaactgtgt

SEQ ID NO: 172574 - DNA, 80 bp, synthetic construct
  source 1..80: mol_type = other DNA
taccggcccgaagacctcgaagacctcttcgccgccatcgaaggagacgagtaaggagacggaggtggcgggtgcggagg

SEQ ID NO: 172575 - DNA, 80 bp, synthetic construct
  source 1..80: mol_type = other DNA
agtactgtgagtataacaagtggataatcccagctgagtgtaaagttgagagagacttgaatattgctaacaccattatt

SEQ ID NO: 172576 - DNA, 80 bp, synthetic construct
  source 1..80: mol_type = other DNA
ctggtggcggattaccaacaacaagaaaggaggccatgttaggcactcatgttgtgtgggatttaggactacaatcttca

SEQ ID NO: 172577 - DNA, 80 bp, synthetic construct
  source 1..80: mol_type = other DNA
tatttgaggagtgggttaaacacagatgtacctggagcagatccaacaaggacctagaactagtaagatatctaggaggc

SEQ ID NO: 172578 - DNA, 80 bp, synthetic construct
  source 1..80: mol_type = other DNA
tcctgctttcgatgccactccggttgctgtggttgtggcaattttattgctcatctcaatctactggctgctcgctatgg

SEQ ID NO: 172579 - DNA, 80 bp, synthetic construct
  source 1..80: mol_type = other DNA
gtgcaccacgcttgtgtccatatctgtatgcaaggaatgtcaactttgacgtgcaaggagtgaccgaatctcggggcaag

SEQ ID NO: 172580 - DNA, 80 bp, synthetic construct
  source 1..80: mol_type = other DNA
agaccagagggcacccatggcgcggtgtcaaaagtattgtctgcgtacgctttccaggagccagccgcggtgctcaaggt

SEQ ID NO: 172581 - DNA, 80 bp, synthetic construct
  source 1..80: mol_type = other DNA
ttcgtttcgacgttcacaccggacaacagtgacaaaccaaagagggagttccaaccagtagattacttgttcgggtgtgg

SEQ ID NO: 172582 - DNA, 80 bp, synthetic construct
  source 1..80: mol_type = other DNA
gatttgacatccttctctcattccttcttagattcggcagaaaggaaatcaacttcaacgaacttacccaacacgaagcg

SEQ ID NO: 172583 - DNA, 80 bp, synthetic construct
  source 1..80: mol_type = other DNA
ttatccccattaacaacacaaataacaatttaagaaaggtaaacttatataccgtggagctaaccaatcaaccaatgcca

SEQ ID NO: 172584 - DNA, 80 bp, synthetic construct
  source 1..80: mol_type = other DNA
ctagagttaccaacagattatgtctttatcaacacaagcgccatatcgaatccgacacaaaatacatttcaaacattatg

SEQ ID NO: 172585 - DNA, 80 bp, synthetic construct
  source 1..80: mol_type = other DNA
acaccttagcattagtaaatggacctcagaatcaaatatagacaacaaaataactgaatttttaaaacaagcctttccaa

SEQ ID NO: 172586 - DNA, 80 bp, synthetic construct
  source 1..80: mol_type = other DNA
tatgtctattcccattctcagcgtaggcaacgcatacagtagtttctatgacgggtggtccaattttacacagaacggag

SEQ ID NO: 172587 - DNA, 80 bp, synthetic construct
  source 1..80: mol_type = other DNA
gtctgggtcgccctctcctccacaggccaaccatatgctatgtcgtgcacttcctggggtgtgtctacgtgataatataa

SEQ ID NO: 172588 - DNA, 80 bp, synthetic construct
  source 1..80: mol_type = other DNA
acagttactaaattgcatgctcacataaaggaagcaattgcagcaaatctataacctgtcacgatttgatgcatatataa

SEQ ID NO: 172589 - DNA, 80 bp, synthetic construct
  source 1..80: mol_type = other DNA
cacgttagatacaaccccctggcagacagaggcctgggaaacatgatctgggtagactggtgctcccgagaagggaacaa

SEQ ID NO: 172590 - DNA, 80 bp, synthetic construct
  source 1..80: mol_type = other DNA
gtttgctcatttctaaagtagaaggaaatttcaaaatccttggaatgcacatagctggtaatggggaaatgggtgttgcc

SEQ ID NO: 172591 - DNA, 80 bp, synthetic construct
  source 1..80: mol_type = other DNA
accatatgtgttaaagaactaccctaactatgatgggactaacatcgttccatgtgccaaagacagagatgacatcaaga

SEQ ID NO: 172592 - DNA, 80 bp, synthetic construct
  source 1..80: mol_type = other DNA
ttgggtgtccgtgtttcctttattttcttatatcttgcctatggtgacaatattaagtattaatattgctaccatgggcg

SEQ ID NO: 172593 - DNA, 80 bp, synthetic construct
  source 1..80: mol_type = other DNA
acagaaagaccccactcgggggcaacatactaacagcaccatcactacacccaggcagtcttatgctacaaaagtacagg

SEQ ID NO: 172594 - DNA, 80 bp, synthetic construct
  source 1..80: mol_type = other DNA
tccagacgagcaggcaaccaacactccacgttggttcacgtcaagcacttctgtttccccggtattagagtgttaggctt

SEQ ID NO: 172595 - DNA, 80 bp, synthetic construct
  source 1..80: mol_type = other DNA
ttacagagaaggcagagaccaactctggaaggggcccggtgagctattgtggaaaggggaaggagcagtcatcataaagg

SEQ ID NO: 172596 - DNA, 80 bp, synthetic construct
  source 1..80: mol_type = other DNA
tacttccctagaggagaaatatacaaaccttcaaaatactttatatagccaatgcacatactttgagactatccaagttt

SEQ ID NO: 172597 - DNA, 80 bp, synthetic construct
  source 1..80: mol_type = other DNA
ggcgtgctccaaacgggaatggtgggacgccaccgcggagggcgacaaagaggagtggtcgccgccgccgtagttaccgt

SEQ ID NO: 172598 - DNA, 80 bp, synthetic construct
  source 1..80: mol_type = other DNA
gccgcagaaagtccttcatggtggatgccagctcgtagacgcagtcgcgcaggtcatcgtagcagtagatgccgccgcgc

SEQ ID NO: 172599 - DNA, 80 bp, synthetic construct
  source 1..80: mol_type = other DNA
attgacaggttatggctacaaaggtcctgggcgggaggacgcgtgggagcgcgggtggtggtaatgttttccagatcaaa

SEQ ID NO: 172600 - DNA, 80 bp, synthetic construct
  source 1..80: mol_type = other DNA
agtcggaaatgccacctgctgtcctttgatttgtggtaaagccctaacctttagagacagaaacactaatgagtcatacg

SEQ ID NO: 172601 - DNA, 80 bp, synthetic construct
  source 1..80: mol_type = other DNA
accaaggggacatccacgtgcgggcccctgtagatggaatgatcctcgggttctcctcctccttcctccccctcctgatc

SEQ ID NO: 172602 - DNA, 80 bp, synthetic construct
  source 1..80: mol_type = other DNA
tacttcaaaccaaaacatgttaaggcgttgatcccgcgaccgccgcgattgtgcccttacatccacgccggggactttac

SEQ ID NO: 172603 - DNA, 80 bp, synthetic construct
  source 1..80: mol_type = other DNA
taaatgaccaataggcggtgattctccagatcactaatggtcaagcacttctgtctccccggtccgagaggatatgcttc

SEQ ID NO: 172604 - DNA, 80 bp, synthetic construct
  source 1..80: mol_type = other DNA
cctacagaggtgaaggagtggatttgaaacaagggagtgtgttaccattgactccagtgaacagcataactacatatgga

SEQ ID NO: 172605 - DNA, 80 bp, synthetic construct
  source 1..80: mol_type = other DNA
atgagaagctgagcaagggggaggttgcgatggagtttagcgcagtggactcaacagagggcgtgcaaaccgcagtacat

SEQ ID NO: 172606 - DNA, 80 bp, synthetic construct
  source 1..80: mol_type = other DNA
ctggtaaactacttatagcctactcaccgccaggagctagtgtcccaggaaacaggaaggatgctatgcttggcacacac

SEQ ID NO: 172607 - DNA, 80 bp, synthetic construct
  source 1..80: mol_type = other DNA
gccatggacctgacctgtcagaaggcagtgacgctaggcggcgccggcgcctggttgctgccgcgtcccgaaggctacac

SEQ ID NO: 172608 - DNA, 80 bp, synthetic construct
  source 1..80: mol_type = other DNA
tgtaattggatgtgcgttactaagtgcgtgtagcgtcagcttagtgttgtaagatttttttttgtgaggataattaaact

SEQ ID NO: 172609 - DNA, 80 bp, synthetic construct
  source 1..80: mol_type = other DNA
gaatacactcacaaagatagcactaattacaacagaagagtgtatcccgactctgctgatagcacaaagcattacataac

SEQ ID NO: 172610 - DNA, 80 bp, synthetic construct
  source 1..80: mol_type = other DNA
tacttacgttttgacatggaagtcacctttgtcataactagcaagatgggtgatggcactgccacaaaccaaatcccagt

SEQ ID NO: 172611 - DNA, 80 bp, synthetic construct
  source 1..80: mol_type = other DNA
ccatactttgtagtaggcttaaaaaacccatacccaagcaacaaaacagatggcctttgtacttcaggagagccacacaa

SEQ ID NO: 172612 - DNA, 80 bp, synthetic construct
  source 1..80: mol_type = other DNA
taaaagaaatagccttcttacttctataagaagctacatacctttttataatactacacaaacaatagctcaattaaaac

SEQ ID NO: 172613 - DNA, 80 bp, synthetic construct
  source 1..80: mol_type = other DNA
tccaagaaaagttccataaccttctaaaaggaaataatattaccacaattttcaatacatgcctaaaagatgaacttagg

SEQ ID NO: 172614 - DNA, 80 bp, synthetic construct
  source 1..80: mol_type = other DNA
aagctgttgccgccgcttgcggcgcaacctcctccaccaccgccgccgccggctcctccgcctcgggcgacggtggctcg

SEQ ID NO: 172615 - DNA, 80 bp, synthetic construct
  source 1..80: mol_type = other DNA
ttctgttttgtggcagcatgatggcaactgggaagttgatattaacatactccccaccaggtgccagtccacccaaaacc

SEQ ID NO: 172616 - DNA, 80 bp, synthetic construct
  source 1..80: mol_type = other DNA
ggagggcgctgccgccaccgccgtccccccgaccgccatgtcctggtgtggatggcgccgccgatggtggtggaagccac

SEQ ID NO: 172617 - DNA, 80 bp, synthetic construct
  source 1..80: mol_type = other DNA
gttgcgagaacagtacaacaaagtaataggcttccccatgaaaggggaagaggcctacaaggactttgaaaagtggctat

SEQ ID NO: 172618 - DNA, 80 bp, synthetic construct
  source 1..80: mol_type = other DNA
ggcgtgatcctgggcgcaatctttgccgatccccacaccttcactccttgttaggttgatagaatgtcggtaccacgcca

SEQ ID NO: 172619 - DNA, 80 bp, synthetic construct
  source 1..80: mol_type = other DNA
gaactgggcatctcagcagaaattcacaactttggcatagtgtgtgttcagtgtccctacaccttcccccccatgtatga

SEQ ID NO: 172620 - DNA, 80 bp, synthetic construct
  source 1..80: mol_type = other DNA
ttcaacacaagtggtacactcagcaagacctgtgttccgttagccttgtgcaatttaacctaaccgcagctgatttccaa

SEQ ID NO: 172621 - DNA, 80 bp, synthetic construct
  source 1..80: mol_type = other DNA
aggaaatctttgccattaaggtggacattgcatcacagcccttatcaaacactctacttggacaaattgctagttatttc

SEQ ID NO: 172622 - DNA, 80 bp, synthetic construct
  source 1..80: mol_type = other DNA
ttcacttgtcggtgtctacctctataagtcactaagcactccgagcgccagcgaggagtgcgaccctttcccctgactca

SEQ ID NO: 172623 - DNA, 80 bp, synthetic construct
  source 1..80: mol_type = other DNA
aatttctgtttcaaacagaccaatccagtactactacgtacacttcctggggcgtgtcttcccagtctatataagcaaca

SEQ ID NO: 172624 - DNA, 80 bp, synthetic construct
  source 1..80: mol_type = other DNA
aaacatactcacagcaccatcactacacccgggcaactgcatgctcagcaaaaaaaaaatactactacccagcttagaaa

SEQ ID NO: 172625 - DNA, 80 bp, synthetic construct
  source 1..80: mol_type = other DNA
gtggtaccaaactgatttcatcccatcagttaatgcaggcacgggcactattattgccacatgtagtgcctgtcctgata

SEQ ID NO: 172626 - DNA, 80 bp, synthetic construct
  source 1..80: mol_type = other DNA
ttgcggtgccgcgtctaccgcctccgccgtctgcgtgtcctcgctgggtggcagcggcgggactcgcgacggcccttctg

SEQ ID NO: 172627 - DNA, 80 bp, synthetic construct
  source 1..80: mol_type = other DNA
ggggacttgcgggcttttgcggcggagacagtagtgaggacggggagctttggcgctggggacggaagcctcccgcggca

SEQ ID NO: 172628 - DNA, 80 bp, synthetic construct
  source 1..80: mol_type = other DNA
ctacacgctctgcgagaccgccaacctggccgaggcggccacccggcgtctacacctatcgtccctgctcccccaggcaa

SEQ ID NO: 172629 - DNA, 80 bp, synthetic construct
  source 1..80: mol_type = other DNA
gtcaacactgtcaacgaaaccatcacaaaccccagcaatgctgctggtggtgacatgctcacaaaggttgctgatgatgc

SEQ ID NO: 172630 - DNA, 80 bp, synthetic construct
  source 1..80: mol_type = other DNA
gggaagcagcagtatgaagatttcattcagaaaatacgcaccaccccagttggtaaaagcctgtacttaccaccatatga

SEQ ID NO: 172631 - DNA, 80 bp, synthetic construct
  source 1..80: mol_type = other DNA
ggtgaatgctgggaagtatctaaaaatggtagagattgggaaactctaaaattacaagacttggtcaagaaaattactga

SEQ ID NO: 172632 - DNA, 80 bp, synthetic construct
  source 1..80: mol_type = other DNA
tcacagccatagcactttttgcggctgcactgacctccttgggcattttactcgcgttgctgctcgcttttctaacaccg

SEQ ID NO: 172633 - DNA, 80 bp, synthetic construct
  source 1..80: mol_type = other DNA
aaataaaacaaaaatttccagttcattagaggcattgttccaagggccagtgtataaagacctatctatagatataacaa

SEQ ID NO: 172634 - DNA, 80 bp, synthetic construct
  source 1..80: mol_type = other DNA
acgccctgttcgacgccgtcgagcaagagtaaggaggcgccggtgggggaggcgtagatacaggagaggatggagacgaa

SEQ ID NO: 172635 - DNA, 80 bp, synthetic construct
  source 1..80: mol_type = other DNA
ccttactatgtactatatgcaaaaaagggcagcgacacaacaacaaacttaataggtagtcagccaactaaatctacctt

SEQ ID NO: 172636 - DNA, 80 bp, synthetic construct
  source 1..80: mol_type = other DNA
aagtttatcaaaataaatatagcaacctaaacacacaagaggctcacactgcaagaaaatctgcatatgatgaactaaca

SEQ ID NO: 172637 - DNA, 80 bp, synthetic construct
  source 1..80: mol_type = other DNA
gctggagcgacgatccagggtttcctctccgcgagtgactccttcaacgtccgcctcatgcagaatcctgccctctcctc

SEQ ID NO: 172638 - DNA, 80 bp, synthetic construct
  source 1..80: mol_type = other DNA
aagaatcgacagatgctctccttcctccaacaggtccaaaacgcccaagaaccgaagtacccgtggccgaaccagacgcc

SEQ ID NO: 172639 - DNA, 80 bp, synthetic construct
  source 1..80: mol_type = other DNA
agaattaggcaaggatcatacgtgtccaccggccttttatactgagcgtttaggttttgtttatgtagcaagcacaaaag

SEQ ID NO: 172640 - DNA, 80 bp, synthetic construct
  source 1..80: mol_type = other DNA
ctgtcccctacttcggaccaggagttgactacaagggggatgcgctcacgccactgtcacgcaaagatttaacaacctat

SEQ ID NO: 172641 - DNA, 80 bp, synthetic construct
  source 1..80: mol_type = other DNA
cacaagaagtcagagattattgtgagaagaaagggtggttaattaatgtctctaatcaagtgcaactagagaggaacatc

SEQ ID NO: 172642 - DNA, 80 bp, synthetic construct
  source 1..80: mol_type = other DNA
acccttgtacgcagtggaggcaaagcggatctccaaactagagaatacaatgagcaattacatacagttcaagtccaaat

SEQ ID NO: 172643 - DNA, 80 bp, synthetic construct
  source 1..80: mol_type = other DNA
cgaaatttatcagttgttcgagtacactcggctcggagtatggttgatgtgcatcgtgggcacgtttctgaacgtgctgg

SEQ ID NO: 172644 - DNA, 80 bp, synthetic construct
  source 1..80: mol_type = other DNA
gcaggagacgaaagagacaaaaaattaagcttaaacagtggaatcccgcagtaactaaattctgcagaattattggatat

SEQ ID NO: 172645 - DNA, 80 bp, synthetic construct
  source 1..80: mol_type = other DNA
tcgacgaaaacgagtaaggagacgcagacgctggaggagggggcgacccagacgcagactgtttaaaaagagacgcttaa

SEQ ID NO: 172646 - DNA, 80 bp, synthetic construct
  source 1..80: mol_type = other DNA
gagggtggaatgccatctggtatatgtgggacatcaattttcaacaccatgatcaataatttgataatacgaacaattgt

SEQ ID NO: 172647 - DNA, 80 bp, synthetic construct
  source 1..80: mol_type = other DNA
caggaaaagaaaaacaggaagtgtgtggaacataatcttactgccatattccagggtctgggagatgatacaaccccagg

SEQ ID NO: 172648 - DNA, 80 bp, synthetic construct
  source 1..80: mol_type = other DNA
atttggaacccccaaagggaccccaataacaaatgaagagagactaggaactgtatttaacacctttaaaacacaagaac

SEQ ID NO: 172649 - DNA, 80 bp, synthetic construct
  source 1..80: mol_type = other DNA
aggaccagtgacaccgtccaaactaggcatgtcattcaaaccaggtccaggagtgagagcacggtggagtcattctttgc

SEQ ID NO: 172650 - DNA, 80 bp, synthetic construct
  source 1..80: mol_type = other DNA
tgtgacgtggtgtaaagttttgcctgaacctgtggtcgggcaggtacatgccaacaaccttctaagcacccgcgcttgtg

SEQ ID NO: 172651 - DNA, 80 bp, synthetic construct
  source 1..80: mol_type = other DNA
ttattttaaaccaaaacacataaaagcttgggtgccacgcccaccaagactatgtccctacatcaataaaggtgacgtga

SEQ ID NO: 172652 - DNA, 80 bp, synthetic construct
  source 1..80: mol_type = other DNA
ttcacagacaaatacaacccctccacagatgttgccacaggtagaacctttgcagcagttgactacttattaggatgtgg

SEQ ID NO: 172653 - DNA, 80 bp, synthetic construct
  source 1..80: mol_type = other DNA
aaagaatgggatgattacacttggcaaagtgcctccaatccaagtgtattcttcaatgtaggcaactcagcaagattcag

SEQ ID NO: 172654 - DNA, 80 bp, synthetic construct
  source 1..80: mol_type = other DNA
cactagcgctgcttggatgttctggatcaccatggcgctatttaaaagacaaagtctgcaagtggctgggtatcgatccg

SEQ ID NO: 172655 - DNA, 80 bp, synthetic construct
  source 1..80: mol_type = other DNA
ttcccaaaagaagaaaaaaggcggccgtccttctgttttggcacgatttgtgctggctgtttcgacgacttttctttcct

SEQ ID NO: 172656 - DNA, 80 bp, synthetic construct
  source 1..80: mol_type = other DNA
gtgtaagaaaatcccactatataaagagcaggttaaggcctttgccactgcatcagaggaagcacaggatgaattgatag

SEQ ID NO: 172657 - DNA, 80 bp, synthetic construct
  source 1..80: mol_type = other DNA
gttaccgaaaatacatccacagaagccattacaagttccgtaaaaagcacagatgtaagttctatttccaccacacctac

SEQ ID NO: 172658 - DNA, 80 bp, synthetic construct
  source 1..80: mol_type = other DNA
ttttcaacctgatctaatagatagattatgcaaatcaaaacatatttttaaaaatatatattatgaggttgaaggtggtg

SEQ ID NO: 172659 - DNA, 80 bp, synthetic construct
  source 1..80: mol_type = other DNA
caaacatacaaccctagtggagccactgaaaccataacttggtctcaacaggattttaacgactttaaaaaacatacaga

SEQ ID NO: 172660 - DNA, 80 bp, synthetic construct
  source 1..80: mol_type = other DNA
gggaaagcagggcttaccgaccatgctaacaccaggcagcaatcagttcctcacttccgatgatttccaatcaccatcgg

SEQ ID NO: 172661 - DNA, 80 bp, synthetic construct
  source 1..80: mol_type = other DNA
gaaactaccactcccgctccgagtcaacaatagagaacttccttagtcggtccgcctgtgtgtaccttgaggaatatttt

SEQ ID NO: 172662 - DNA, 80 bp, synthetic construct
  source 1..80: mol_type = other DNA
ccgagtaacgcgaaaagggcgagcgcagccagttgtggtactcgtgtgcgaaggctgtgggtagcgggaaaccaccgtcg

SEQ ID NO: 172663 - DNA, 80 bp, synthetic construct
  source 1..80: mol_type = other DNA
atacatgacctcctcgaggtatgcagggaatgagcggtccgtgagccggtcaacacgacattgcttccgtttcatgcctc

SEQ ID NO: 172664 - DNA, 80 bp, synthetic construct
  source 1..80: mol_type = other DNA
ggaggaacatgggaggagctggtggggaacgcccattaaatctctgtataaatgtacccgctttctgcattgtaaccagt

SEQ ID NO: 172665 - DNA, 80 bp, synthetic construct
  source 1..80: mol_type = other DNA
aaatgttcacttatctaagatttgacatggaaatcacaattgtgattaccagctcacaagaccaatctaccatctccaac

SEQ ID NO: 172666 - DNA, 80 bp, synthetic construct
  source 1..80: mol_type = other DNA
cctggatgcctccggcacccccaaaattctctgttagtttcaaactgggcttcagaccctaaataaacaaggccatacac

SEQ ID NO: 172667 - DNA, 80 bp, synthetic construct
  source 1..80: mol_type = other DNA
cggcggccatgaaggcgatcatgctgggcagccgaaatgacatggtcagtgtgaatagttggaacgtgtccatgctgaga

SEQ ID NO: 172668 - DNA, 80 bp, synthetic construct
  source 1..80: mol_type = other DNA
gtgattataaagtactaacgctatttaggataaattttgaccactgtgtagctcctagaaactgtagggccccacttttc

SEQ ID NO: 172669 - DNA, 80 bp, synthetic construct
  source 1..80: mol_type = other DNA
aaactaaagatggactatggggagacccaatattcttagcaggctcaggaacaacagacaactcaacaatagataaacta

SEQ ID NO: 172670 - DNA, 80 bp, synthetic construct
  source 1..80: mol_type = other DNA
gatggaggccatctcgtgatgcacctcaaaggttaccgcgtccaccctggcctcccggcggctaacatttggggtcccaa

SEQ ID NO: 172671 - DNA, 80 bp, synthetic construct
  source 1..80: mol_type = other DNA
ataacttagaacagaatattaggaatgtaaatatgtattcagtagtcctgaaccaagaaaccacaacagccaaggagatt

SEQ ID NO: 172672 - DNA, 80 bp, synthetic construct
  source 1..80: mol_type = other DNA
caacttgaacaaaaacaaaaagaagagctgcaagagctgtatggaacgccgagatgggcaccatacacaaaaccaatttc

SEQ ID NO: 172673 - DNA, 80 bp, synthetic construct
  source 1..80: mol_type = other DNA
gaaatattagaccactgcaagaagataccactgtaccaagaacaggttaagggattcccttatgccacacaagagtccca

SEQ ID NO: 172674 - DNA, 80 bp, synthetic construct
  source 1..80: mol_type = other DNA
gcttcaaaacaatccaacctccgctccccgctcctctgccattgcgtcccaatttgattcctggcacggaaagactgcaa

SEQ ID NO: 172675 - DNA, 80 bp, synthetic construct
  source 1..80: mol_type = other DNA
ttgctggaacagaaacactttcttaaacataggccggatatcaaaagtgctggtcccagtgacatgtatgtgcacacaag

SEQ ID NO: 172676 - DNA, 80 bp, synthetic construct
  source 1..80: mol_type = other DNA
caggtgagtcatgcaactccataaaccagtggttgactctgaccacgtggtcttcaatgagagatggattattcatggtg

SEQ ID NO: 172677 - DNA, 80 bp, synthetic construct
  source 1..80: mol_type = other DNA
acagacagaaacaacgaagaccagggctttgtaccctactctaaaaactttggcaacggaaaaatgcccggaggcaatgc

SEQ ID NO: 172678 - DNA, 80 bp, synthetic construct
  source 1..80: mol_type = other DNA
tattaattggtttagtgacaaaatcaaatccatgctaaattttgtggagagaaataaggcctggttgactgtagtctcag

SEQ ID NO: 172679 - DNA, 80 bp, synthetic construct
  source 1..80: mol_type = other DNA
gcacacactacattccattccaattcagaaacaagtggtaccccacactactaaaccaacagtcagtgctagaagacata

SEQ ID NO: 172680 - DNA, 80 bp, synthetic construct
  source 1..80: mol_type = other DNA
ggacgtcagtacaccggcattgcggtgcccttgtatgcctgttttatattccccccctgtaactctagaagaaaatgaac

SEQ ID NO: 172681 - DNA, 80 bp, synthetic construct
  source 1..80: mol_type = other DNA
ccttgccgcaagcgtccccgtcctgaacgtcacccccgttcccgccacaccccgtccgcgcaacaccccgtccccaacgt

SEQ ID NO: 172682 - DNA, 80 bp, synthetic construct
  source 1..80: mol_type = other DNA
ttgatgctagtctttcaccagtttggtttaagtgtctggaacaagtcttaaagaaaatagggtttcaatgttcagaacta

SEQ ID NO: 172683 - DNA, 80 bp, synthetic construct
  source 1..80: mol_type = other DNA
tccaaggcttgacgtgggacttaaagaggcagtaatgtcaaaatataaaggtaacaaaaactgccagatgaatgagtatg

SEQ ID NO: 172684 - DNA, 80 bp, synthetic construct
  source 1..80: mol_type = other DNA
atatagaagtagttgcgctgaaaaccgcggtacatcccgcagtcgtgattccgtagacgccagggcgtcggcgaccagat

SEQ ID NO: 172685 - DNA, 80 bp, synthetic construct
  source 1..80: mol_type = other DNA
aaacctgtccttgcggattaaccatttataacgtagttcgtgatggcgtgtagaggcccgtacacgctccacggtcccaa

SEQ ID NO: 172686 - DNA, 80 bp, synthetic construct
  source 1..80: mol_type = other DNA
agtaaaacaaaattgtaccctagtgtcttctatgatattttccctggtgagaaggaaccagcagctctgcacgacagaga

SEQ ID NO: 172687 - DNA, 80 bp, synthetic construct
  source 1..80: mol_type = other DNA
aaaatattgtgaggaaaataactggatagtcccagcccagtgcacaattgaaagggaattaaattattgcaacttagtgt

SEQ ID NO: 172688 - DNA, 80 bp, synthetic construct
  source 1..80: mol_type = other DNA
gacaccatgtttgacatctttcaaagtgctttcgggttggaagaaatgacgctggagaagctgcacatttttaagcaaaa

SEQ ID NO: 172689 - DNA, 80 bp, synthetic construct
  source 1..80: mol_type = other DNA
taccctacatagaaagacaatcaaatgatttgtggttcaagaaattcaatgacatgtgtaatgctgctaaaggccttgag

SEQ ID NO: 172690 - DNA, 80 bp, synthetic construct
  source 1..80: mol_type = other DNA
tttggttactgttacagcaacactggcactcttaggttgtgatggttccccttggaggtttttaaaaatgtatatatcca

SEQ ID NO: 172691 - DNA, 80 bp, synthetic construct
  source 1..80: mol_type = other DNA
ttaagacagtaatggacatggcaagagtggattcattcatgccaataaacaatattccctcacagatacagaaggtaggt

SEQ ID NO: 172692 - DNA, 80 bp, synthetic construct
  source 1..80: mol_type = other DNA
gactgcaccttcgttcgtggctgatcatgcctcggctctattggcctccctccagaagaaggcctccgacaccccctgtg

SEQ ID NO: 172693 - DNA, 80 bp, synthetic construct
  source 1..80: mol_type = other DNA
ttgggcatgtggtcatgcaatacatgtatgtcccacctggtgcacccacaccggagaaaaggagtgatttcacatggcaa

SEQ ID NO: 172694 - DNA, 80 bp, synthetic construct
  source 1..80: mol_type = other DNA
tggcgccctcggctcctcggccattcctgtgcaccccacgccggcctcggtccgactttttgagatcctgcagggaaagt

SEQ ID NO: 172695 - DNA, 80 bp, synthetic construct
  source 1..80: mol_type = other DNA
attatggggagactcagtttactatacagacagcagtcaaacaggctattcagcagagaaagatgtgtattcagcattta

SEQ ID NO: 172696 - DNA, 80 bp, synthetic construct
  source 1..80: mol_type = other DNA
gcaatttccggatacatctagtacagaaattcctattaccatcacaatagctccaatgtgctgtgagttcaacggactca

SEQ ID NO: 172697 - DNA, 80 bp, synthetic construct
  source 1..80: mol_type = other DNA
aacgagacttacaaaactacaatcacagtgggaaaaagtgtacccacaactagtcacacaaaaacccacagacacaacac

SEQ ID NO: 172698 - DNA, 80 bp, synthetic construct
  source 1..80: mol_type = other DNA
gcggaagtaggccccgccacgtgactcgtcacgtgggcgctgcgtcacggcggccattttgtatcacaaaatggcggact

SEQ ID NO: 172699 - DNA, 80 bp, synthetic construct
  source 1..80: mol_type = other DNA
gatgacataattccaacatgtgactgtacaataggtacatattactgtaaacataaagacagatattaccctgtggctgt

SEQ ID NO: 172700 - DNA, 80 bp, synthetic construct
  source 1..80: mol_type = other DNA
aagtttgactaccaaagaaataaagttatggtggaagttaatctcttatgtaccaatattcaataagactacataattaa

SEQ ID NO: 172701 - DNA, 80 bp, synthetic construct
  source 1..80: mol_type = other DNA
tccatgtgcgatacctgattttgatgtcactccccctatacacattccgggtgaggtcaagaacataatggagttagcag

SEQ ID NO: 172702 - DNA, 80 bp, synthetic construct
  source 1..80: mol_type = other DNA
tctggagtgcctttcgcgtgaagcatgccctgagacgtactcgagttaggacttaatcgctcctgtgccgctggatgagg

SEQ ID NO: 172703 - DNA, 80 bp, synthetic construct
  source 1..80: mol_type = other DNA
tctttggcccaaaagctattaaaagaatgcaacaacaaccaacagatgctgaacttcttccaccaggccgcaagaggagc

SEQ ID NO: 172704 - DNA, 80 bp, synthetic construct
  source 1..80: mol_type = other DNA
agggacatgggccaggaggatggagaccagggcctcctcctcctccccctccaggcttggcataaatggcagaaagacct

SEQ ID NO: 172705 - DNA, 80 bp, synthetic construct
  source 1..80: mol_type = other DNA
attaatatcctcaaatgcagactcagacactatactagtacacaaaacaaatgcaacacaaggaaatacatttagctact

SEQ ID NO: 172706 - DNA, 80 bp, synthetic construct
  source 1..80: mol_type = other DNA
caggaacagcagcaaccaccagggactatgtctatcaaataatgtatgtaccaccaggagctcccataccgaatgcttgg

SEQ ID NO: 172707 - DNA, 80 bp, synthetic construct
  source 1..80: mol_type = other DNA
tgtaccataccaacatacccactctactaactatgtgccacatgatggagaggtcacaactcaagtcaaaactagagctg

SEQ ID NO: 172708 - DNA, 80 bp, synthetic construct
  source 1..80: mol_type = other DNA
cgttccaagtctgagggcgttacccgcagcggcaaccagggcagcctggacgccggccggcaatggagcacgctccggtt

SEQ ID NO: 172709 - DNA, 80 bp, synthetic construct
  source 1..80: mol_type = other DNA
gcccagagcgcgtagctgtgctcggtgcgcaggtcgatgaacacctgcacggtctcttgcgggttgcggtgcgtgtagtt

SEQ ID NO: 172710 - DNA, 80 bp, synthetic construct
  source 1..80: mol_type = other DNA
aactggagcgatcgttatccgcaaggtgcctacgggaaacctagtagcactctttatttgatctggttggttgttcagcc

SEQ ID NO: 172711 - DNA, 80 bp, synthetic construct
  source 1..80: mol_type = other DNA
ggcgcattccgtgacgtcacagccgccattttaggtaaggcggaagtaggctgtcactttcacaaaatggcggcgacagc

SEQ ID NO: 172712 - DNA, 80 bp, synthetic construct
  source 1..80: mol_type = other DNA
ggacgttgtggaggagttcataacggatgcctccaacaacctggtggaccgcaaccgtctatttggccagcccggggaga

SEQ ID NO: 172713 - DNA, 80 bp, synthetic construct
  source 1..80: mol_type = other DNA
caggttttacagacacgaccgcacagactttatagtctcctttaccaacaatccccccatgaagaccaaccagtacactg

SEQ ID NO: 172714 - DNA, 80 bp, synthetic construct
  source 1..80: mol_type = other DNA
gagactggcaggacatcaaggactaccggttatgaatacaccaggaagtaaccaatttttaacgtccgatgattaccaat

SEQ ID NO: 172715 - DNA, 80 bp, synthetic construct
  source 1..80: mol_type = other DNA
tgataatgtgatattggtcctcccacttgaaatggataatacactcttctccaccactctgcttggtgaaatcctaaatt

SEQ ID NO: 172716 - DNA, 80 bp, synthetic construct
  source 1..80: mol_type = other DNA
ctagtgctgaagcatgcggatatagtgatagggtagcacagttaacagtcggtaattcaaccatcacaactcaagaagca

SEQ ID NO: 172717 - DNA, 80 bp, synthetic construct
  source 1..80: mol_type = other DNA
accaacgatgcctgattcctctagtaatcgcttttacacccttgagagtgtggagtgggaagaggggtcccgtggatggt

SEQ ID NO: 172718 - DNA, 80 bp, synthetic construct
  source 1..80: mol_type = other DNA
accttacctgtaattccactgttaccagtatcatagccaatattgattggacaaataataataggactaatattaccatg

SEQ ID NO: 172719 - DNA, 80 bp, synthetic construct
  source 1..80: mol_type = other DNA
ccaaaccaccagaaatcttttccacaaggcgacgctgcaatttttcgacgactttgacagggtggataccctccgcgatt

SEQ ID NO: 172720 - DNA, 80 bp, synthetic construct
  source 1..80: mol_type = other DNA
cagctatcagacgtctgttacagcaaccaatgcctagcccagatgttactcccggcaacaaaagacccttactgtttata

SEQ ID NO: 172721 - DNA, 80 bp, synthetic construct
  source 1..80: mol_type = other DNA
aggtgctagaccctggagttgaaccagtaccactcggttacaaagtcatggtctagtagttgtgaccctgcaaagctacg

SEQ ID NO: 172722 - DNA, 80 bp, synthetic construct
  source 1..80: mol_type = other DNA
caacaggctgtggttataatggatgacctaggccagaacccagatggtaaagacctcagcactttttgtcagatgatctc

SEQ ID NO: 172723 - DNA, 80 bp, synthetic construct
  source 1..80: mol_type = other DNA
tttaagtcaaggtgaacgagccatgaacttcaaagccgacactacaggggaagaaaactccgtgcaagctgcagtatgga

SEQ ID NO: 172724 - DNA, 80 bp, synthetic construct
  source 1..80: mol_type = other DNA
cgtggacttgcgggcttttgcggatacggggacgggagtggggacggagacacgaggtgacgtcggtgacgcggcgttgc

SEQ ID NO: 172725 - DNA, 80 bp, synthetic construct
  source 1..80: mol_type = other DNA
ggaagaatccaaagatgaaagagcatataatccaaccctccctgttgctaaaccaaagggcactttcccagtaactcaac

SEQ ID NO: 172726 - DNA, 80 bp, synthetic construct
  source 1..80: mol_type = other DNA
taacgcccatgggatcgagagaaatctctacgagtgcatgttccgcgcacatgctgctagctgtggctgtggtgatcttg

SEQ ID NO: 172727 - DNA, 80 bp, synthetic construct
  source 1..80: mol_type = other DNA
acttaggcgcaagtgtgaaatgttcacatacttgagatttgatatggaagtcacatttgttatcaccagtgaagggaaaa

SEQ ID NO: 172728 - DNA, 80 bp, synthetic construct
  source 1..80: mol_type = other DNA
aattaatgtaaaaaaaatataaacaggaaacagctgataccggttggaccgaagaatttggttctccatgttgtcttgga

SEQ ID NO: 172729 - DNA, 80 bp, synthetic construct
  source 1..80: mol_type = other DNA
aggcacaaagacagggtttatcaatgttagcaacgggaggtggacccagaggtgatgctactagtgaaacgagcagcgat

SEQ ID NO: 172730 - DNA, 80 bp, synthetic construct
  source 1..80: mol_type = other DNA
tagtaccagaacaccaactagcgtacattggtggtactaatgcaaatgttggatataaccacacccacccgggtgaaata

SEQ ID NO: 172731 - DNA, 80 bp, synthetic construct
  source 1..80: mol_type = other DNA
cgtcgaaggagaccagtaaggaggcgccggtgggggaggcgtagatacagacggtggtacagacgcaggacttggctcag

SEQ ID NO: 172732 - DNA, 80 bp, synthetic construct
  source 1..80: mol_type = other DNA
tgtgtcagtatgagaagcaaggtagcgtcgatttcaaagtccaaggtgtgactgatgcacgcacgtcgcttaccacaacg

SEQ ID NO: 172733 - DNA, 80 bp, synthetic construct
  source 1..80: mol_type = other DNA
gtgcacacacggcgtcatgggcctaattacagctggcggtgatggtgttgttgcctttgcagatattagagacttgtttg

SEQ ID NO: 172734 - DNA, 80 bp, synthetic construct
  source 1..80: mol_type = other DNA
aagagatttatagaaaacaaaactgcaacaaatggagacaatatatgggcaaactacatcaacaccgaaaaatttaacaa

SEQ ID NO: 172735 - DNA, 80 bp, synthetic construct
  source 1..80: mol_type = other DNA
gctgatgtgaagagtgttgtcaccgccctaaaccttatcaacggagaaaatgcacacacatttagcccaaatgaggtcac

SEQ ID NO: 172736 - DNA, 80 bp, synthetic construct
  source 1..80: mol_type = other DNA
gttgcacccttgtgttcagaatttgctggattacggcaagcggtaaagcagggagtaccagtagaaatgaagccaggaac

SEQ ID NO: 172737 - DNA, 80 bp, synthetic construct
  source 1..80: mol_type = other DNA
atttcatcacacatccgtttgattaattgactatacaatgggagctcaagtttccactcagaagtctggctcacatgaga

SEQ ID NO: 172738 - DNA, 80 bp, synthetic construct
  source 1..80: mol_type = other DNA
cgcagcgagggagccacggaggggatcccgaacgtcccgagggcgtgtgccggaggtgagtttacacaccgcagtcaagg

SEQ ID NO: 172739 - DNA, 80 bp, synthetic construct
  source 1..80: mol_type = other DNA
gttgaggatgggatttttccccaatgcaacagctgactccacttcaactttggacaatgccatatacaccatatgtgata

SEQ ID NO: 172740 - DNA, 80 bp, synthetic construct
  source 1..80: mol_type = other DNA
acgcatacatacagcacaaattaccacttcaaaactgtgcatgaagggaagaacatcttaaaggacaggcattttataat

SEQ ID NO: 172741 - DNA, 80 bp, synthetic construct
  source 1..80: mol_type = other DNA
cttctattacaaagccataggcattaacagctctttatcttcacaatactcagaactagaaacaatattatatgaaagaa

SEQ ID NO: 172742 - DNA, 80 bp, synthetic construct
  source 1..80: mol_type = other DNA
agacggcccttttacaaggcgatgtcgtagaggcaatcgaaggtgctgtctcccgcgtagcagacactatcagcagcggt

SEQ ID NO: 172743 - DNA, 80 bp, synthetic construct
  source 1..80: mol_type = other DNA
tggcaacagagatggtttgtaagactggctttccagctgcaagtaatgcatgacatagttatgtgcggcccctttagcta

SEQ ID NO: 172744 - DNA, 80 bp, synthetic construct
  source 1..80: mol_type = other DNA
cccaaatgcgcgctgcgggagtgctcttccagggctctgcttggtgccaacctcccccaaatgcgcgctgcgggagtgct

SEQ ID NO: 172745 - DNA, 80 bp, synthetic construct
  source 1..80: mol_type = other DNA
aagtttcttaggtagatctggctgtattcacatttccacaatcaccatgaagaaggaaaattataatgaacataattttg

SEQ ID NO: 172746 - DNA, 80 bp, synthetic construct
  source 1..80: mol_type = other DNA
atatccactcgtttcagcagggcctagtgatttgtgtgtgcacaccaaagatgccatatacacatgtgcgcatctcaccc

SEQ ID NO: 172747 - DNA, 80 bp, synthetic construct
  source 1..80: mol_type = other DNA
actcagaaagaaatgagaaccaaccagatgagaatccgtttttcaactgcaatggaacattgctgggaaacctcaccatc

SEQ ID NO: 172748 - DNA, 80 bp, synthetic construct
  source 1..80: mol_type = other DNA
cagtaaacattatgtgggatagagacctgttagttgttgaatccaaagcccaaggcacagactccattgccaggtgtaac

SEQ ID NO: 172749 - DNA, 80 bp, synthetic construct
  source 1..80: mol_type = other DNA
tgagtgggcgtatcagtaacgaaagtgagtggggccagacttcaccatagggcctttatcttcttgccattggtccgtat

SEQ ID NO: 172750 - DNA, 80 bp, synthetic construct
  source 1..80: mol_type = other DNA
tatccagcaacatttgggccagctaaacatgcttcatcgtcggtccgggctgccacgaccaagtgacagcaatgctgttt

SEQ ID NO: 172751 - DNA, 80 bp, synthetic construct
  source 1..80: mol_type = other DNA
caaacttggaagacaagggcagagcctttactagtgattatgttattgctagcaccaacataaccatgttgaccccaccc

SEQ ID NO: 172752 - DNA, 80 bp, synthetic construct
  source 1..80: mol_type = other DNA
tagcaaatgtcttatagaaaacatgcccctgtgggccgcagtatatggatacaaagagtactgcagcaaggtaacaggag

SEQ ID NO: 172753 - DNA, 80 bp, synthetic construct
  source 1..80: mol_type = other DNA
ccccctcagaagaggaagagacgacctccgtccgagagcagttgcagcagcagtaccgagagcaactcaaactcagacag

SEQ ID NO: 172754 - DNA, 80 bp, synthetic construct
  source 1..80: mol_type = other DNA
tgtgggcagcgaatgaattggacagattcggattggcagatagcctgttggagtcaaaagaaggttgcaagaaaattctt

SEQ ID NO: 172755 - DNA, 80 bp, synthetic construct
  source 1..80: mol_type = other DNA
tatgattttgctgtcgttgcttgtgatgttggacacctggagtggaaaacgacgtatgattcttagatgcgcatatggtg

SEQ ID NO: 172756 - DNA, 80 bp, synthetic construct
  source 1..80: mol_type = other DNA
gcatctggccacaaatgtcactaaatatcccatgttagatgtggaggttggagatgttgtcccatatggacaattgaacc

SEQ ID NO: 172757 - DNA, 80 bp, synthetic construct
  source 1..80: mol_type = other DNA
ggaaagatggatcgtgaaagaaacgaccgacaacctagtgatgatagctggctgaattttgatgggacgcttttaggaaa

SEQ ID NO: 172758 - DNA, 80 bp, synthetic construct
  source 1..80: mol_type = other DNA
ccagtaacttcgtactggcttctactaactctaatactttaagtcccccaaccattctgaatcccgaggcgttagttagg

SEQ ID NO: 172759 - DNA, 80 bp, synthetic construct
  source 1..80: mol_type = other DNA
aaaattaaaaaccgaagacggtgaattagaaccagccacaggcaattccagtaacaacgaggactttacaaagctatata

SEQ ID NO: 172760 - DNA, 80 bp, synthetic construct
  source 1..80: mol_type = other DNA
acaaccataatcgccaggggactcacccaagaggcacaggtatattcactaccacctgatcccaaatactttgacggtta

SEQ ID NO: 172761 - DNA, 80 bp, synthetic construct
  source 1..80: mol_type = other DNA
ttatgaaaggtgtcggaccagcagagcctggagattgtggaggtatcctgagatgtgtgcatggtccaattgggctcctg

SEQ ID NO: 172762 - DNA, 80 bp, synthetic construct
  source 1..80: mol_type = other DNA
gttagatgaataccagacagcaggcgtctggaataggccggtaagaacataccacacagacacccccttctatccctggg

SEQ ID NO: 172763 - DNA, 80 bp, synthetic construct
  source 1..80: mol_type = other DNA
aatccaaggtgaaaacacaagatttttatcagaggtactcagattgtctatcaaagttcaaaccaattatggccatttgt

SEQ ID NO: 172764 - DNA, 80 bp, synthetic construct
  source 1..80: mol_type = other DNA
tcaacatacaatttagagcagcctacatggatgtcacctacaacccaataaatgacaaaggccacctaaacagagtgtgg

SEQ ID NO: 172765 - DNA, 80 bp, synthetic construct
  source 1..80: mol_type = other DNA
cgcgtgggcatattcgaggagctgtgtaaagctgtggagtcccggtatgagacagtaggtaccgcagtgatcgtcatggc

SEQ ID NO: 172766 - DNA, 80 bp, synthetic construct
  source 1..80: mol_type = other DNA
tgtaaggaagcttttatcgtgcgtcctgtttttcatttgatgtatatgacacaattgaaacctatcgataggcgtatatc

SEQ ID NO: 172767 - DNA, 80 bp, synthetic construct
  source 1..80: mol_type = other DNA
cccggcgtttcctcctttcgaccgccttacggcaggcgggtctgcggacggcttcggcccacccgcgacaagtatgccgt

SEQ ID NO: 172768 - DNA, 80 bp, synthetic construct
  source 1..80: mol_type = other DNA
cagcacccgggagccggcctcgcgacgaagtctcgtcggatcgcttgcggcctcggcgctgggtaaataaggaaatggcc

SEQ ID NO: 172769 - DNA, 80 bp, synthetic construct
  source 1..80: mol_type = other DNA
gaattctatacaaaattgggcaagttttgggtatacatgttggtggtaatgggagagatggatttgcggctatgttactg

SEQ ID NO: 172770 - DNA, 80 bp, synthetic construct
  source 1..80: mol_type = other DNA
atcagtgttagaataaagccccccaaactgttcctgctgggtgtaccacttgtgcaggaacagtttggggggctttattc

SEQ ID NO: 172771 - DNA, 80 bp, synthetic construct
  source 1..80: mol_type = other DNA
actccctctctggagctcccaaaattgaaacctcagcaagatctgttgctggggaggcatgggtgacagctgtcatcctg

SEQ ID NO: 172772 - DNA, 80 bp, synthetic construct
  source 1..80: mol_type = other DNA
tgatagcatcctacccaaatagggatttggcaatagtttcaacaggaggacatggtgcagaaacaatacctcactgtaat

SEQ ID NO: 172773 - DNA, 80 bp, synthetic construct
  source 1..80: mol_type = other DNA
cgccatcccgcgactccctggccccgcaacgcgccgtccccactcccgtccccggccctgcaacgcgccgtccccaccac

SEQ ID NO: 172774 - DNA, 80 bp, synthetic construct
  source 1..80: mol_type = other DNA
aaactttaaaaagaacacagacagcaactatggctactgcacctactgcccttcaactaacaataaaaatacagtagaaa

SEQ ID NO: 172775 - DNA, 80 bp, synthetic construct
  source 1..80: mol_type = other DNA
tggtcggtgtctacctcttaaggtcactaagcactccgagcgtcagcgaggagtgcgaccctctaccctggtgcaacgcc

SEQ ID NO: 172776 - DNA, 80 bp, synthetic construct
  source 1..80: mol_type = other DNA
aggtgtccttctcgccacatgttctgggtgcccagatttgtccgtgcgcatgatgagagacactccaatgattaagcaac

SEQ ID NO: 172777 - DNA, 80 bp, synthetic construct
  source 1..80: mol_type = other DNA
gaaattgacactcttgtcccaatgaacgcgatagacaaagtagtaaataccatggaggcgtattcaattccaattcaagc

SEQ ID NO: 172778 - DNA, 80 bp, synthetic construct
  source 1..80: mol_type = other DNA
agctctacatcaacagcttatggaaccaccatattcaatgatatggggaaattgtgcttccgagcgctggaggacaccac

SEQ ID NO: 172779 - DNA, 80 bp, synthetic construct
  source 1..80: mol_type = other DNA
agttatgtggagtctctgggtgcagcgttcggatgcggatttaccaaccagataagtgaaagggtcacagagattgcctc

SEQ ID NO: 172780 - DNA, 80 bp, synthetic construct
  source 1..80: mol_type = other DNA
ggctggcgctgcgccgcctaaagtgtccgatccgcgcgggacgtcgctgagggacggtggctggtctgctggtgcgggta

SEQ ID NO: 172781 - DNA, 80 bp, synthetic construct
  source 1..80: mol_type = other DNA
tcgcggaggtcgattcagtggttccagttaacaacacagcggccaacttacagagcatggacgcctaccatatagaagtg

SEQ ID NO: 172782 - DNA, 80 bp, synthetic construct
  source 1..80: mol_type = other DNA
agttacaatacccgaggccatcaagagaaggttcttcattgatgctgacctagttgtgacatcaaaatacaggaacagcc

SEQ ID NO: 172783 - DNA, 80 bp, synthetic construct
  source 1..80: mol_type = other DNA
gcatatcaggaggagggatcgggtgatgacgcaggccccgcaaaacagtccgaaataaatttttagtatcgccccgtagt

SEQ ID NO: 172784 - DNA, 80 bp, synthetic construct
  source 1..80: mol_type = other DNA
tttagagtggatagccaacaaaatttcaaaactcatagaatgggtgaaaacaaagataattccccaggcaaaggagaaac

SEQ ID NO: 172785 - DNA, 80 bp, synthetic construct
  source 1..80: mol_type = other DNA
gtaatgcaaaatgctgcccatttatatgtggaaaagctgtagaatttaaagatagaaatacatgtgctgtattgtctttg

SEQ ID NO: 172786 - DNA, 80 bp, synthetic construct
  source 1..80: mol_type = other DNA
acatgatgtggttccagtacaacacaaaaccagacacccagttctcccccacctcatgcagagcagtgttagaagacaaa

SEQ ID NO: 172787 - DNA, 80 bp, synthetic construct
  source 1..80: mol_type = other DNA
ggcaccaatgcatccattttctggcatcatgtgcaaacttatcctagattttcattacctttccttaacattgcatcacc

SEQ ID NO: 172788 - DNA, 80 bp, synthetic construct
  source 1..80: mol_type = other DNA
acattttaatcggaaagggaccatgttcaccaggagattgtggtggtaagttgttatgtgtgcatggaaccataggaatg

SEQ ID NO: 172789 - DNA, 80 bp, synthetic construct
  source 1..80: mol_type = other DNA
atccagcaaatatgcactacccatcatatttttaaagaccaaatttatactgttgaaggaggaatgccatctggatgctc

SEQ ID NO: 172790 - DNA, 80 bp, synthetic construct
  source 1..80: mol_type = other DNA
cacctcaccacatgagccactggagaccaccgcttaacaatgtacctagacaagaaaggcagtggtttcaaactgtcctg

SEQ ID NO: 172791 - DNA, 80 bp, synthetic construct
  source 1..80: mol_type = other DNA
tcagaaacccctgcaaagcagacggacttgacgcaacttaccccagtagactccctcgcgacctacaaattgttgaccca

SEQ ID NO: 172792 - DNA, 80 bp, synthetic construct
  source 1..80: mol_type = other DNA
aggttacacttgcaaattataacaaggagaattttacagtgtgggctattaatctacaagaaatggctcaaattagaagg

SEQ ID NO: 172793 - DNA, 80 bp, synthetic construct
  source 1..80: mol_type = other DNA
tccagagagaatgccaaaacctgctccttctagaggagactgggaaacagaatatgcagcatgtagagcctttaacagac

SEQ ID NO: 172794 - DNA, 80 bp, synthetic construct
  source 1..80: mol_type = other DNA
ttgtaaccaatgtacccaagttccccatgcttgacatcgagattggtgatgttgtgccgtatggtgacatcaacctgagt

SEQ ID NO: 172795 - DNA, 80 bp, synthetic construct
  source 1..80: mol_type = other DNA
cagaaacagatacttaaaagcaacacaacaagcctttccagcttatgccactctacaatcacctctgtatgaataccacg

SEQ ID NO: 172796 - DNA, 80 bp, synthetic construct
  source 1..80: mol_type = other DNA
agctacgtggcaactgtggggagccagccaggttatcaaaggcacccggtctttccgcctctgtgggtatccaggcaggt

SEQ ID NO: 172797 - DNA, 80 bp, synthetic construct
  source 1..80: mol_type = other DNA
ggtgatgtggaggaggccatagatagagcagtcccaagagtggccgacacgatgtcgactggaccgcgtaacaccgaaag

SEQ ID NO: 172798 - DNA, 80 bp, synthetic construct
  source 1..80: mol_type = other DNA
cagaggacacccaccctccttacatacaaacacaacctggcgccgacggtttcgagctgcagcacccgtacgtgctcgat

SEQ ID NO: 172799 - DNA, 80 bp, synthetic construct
  source 1..80: mol_type = other DNA
gttggagacgtttgctcatatggcaacattctcctaagtggaacccaaacagctagaatgcttaagtataactatccaac

SEQ ID NO: 172800 - DNA, 80 bp, synthetic construct
  source 1..80: mol_type = other DNA
gtcgtacaacttcctcttttttaaaaaaaggcgccaaaaaaccgtcggcgcgggggccgcgcgctgcgcgcgcggccccc

SEQ ID NO: 172801 - DNA, 80 bp, synthetic construct
  source 1..80: mol_type = other DNA
ccttagtgttggatacctataaatatgtaaatttagataaattgaagatactagcatatggagatgatatcctgttttcc

SEQ ID NO: 172802 - DNA, 80 bp, synthetic construct
  source 1..80: mol_type = other DNA
agtggctacgacttctggccttggccgataaactacatacagctcctgatccacctgctgactcgtctcttgactgggct

SEQ ID NO: 172803 - DNA, 80 bp, synthetic construct
  source 1..80: mol_type = other DNA
acagtatgacatactgattggtgagggaccttcacaaccaggtgattgcggaggaaaactcttatgcaaacatggtgtta

SEQ ID NO: 172804 - DNA, 80 bp, synthetic construct
  source 1..80: mol_type = other DNA
cagaagatcacttaaatctaataacaccatacccaaacagagatttggctattgtctatactggggcacatggagctgag

SEQ ID NO: 172805 - DNA, 80 bp, synthetic construct
  source 1..80: mol_type = other DNA
caacctggaactaacgtgtgtcctcgccagcactcaggcggatggtaccaaccaagctgataacaattcagttttgactc

SEQ ID NO: 172806 - DNA, 80 bp, synthetic construct
  source 1..80: mol_type = other DNA
agaaccacggagcttttggccaacagtctggagcgatttacgtgggaaattacagggtagttaacagacacttagccaca

SEQ ID NO: 172807 - DNA, 80 bp, synthetic construct
  source 1..80: mol_type = other DNA
gccgtctctgagaggtggagaaagacgggcgtgggcgtaggggaggagctcgtggggggcggggggccctgcctgagcag

SEQ ID NO: 172808 - DNA, 80 bp, synthetic construct
  source 1..80: mol_type = other DNA
ggaaaagaaagtgtgtttaaaagaactttgctgggggaaatactcaattattacgcacactggtcagggagtatcaagct

SEQ ID NO: 172809 - DNA, 80 bp, synthetic construct
  source 1..80: mol_type = other DNA
ctcagaaagctcaaacgcagtagaccagcgaaaaagtaaatgcatactcagagacctgcccctatggtgcatgtgctatg

SEQ ID NO: 172810 - DNA, 80 bp, synthetic construct
  source 1..80: mol_type = other DNA
tatgtggcagcccccagtgcataatgtacccggcatcgagagaaactggtacgagagttgctatcgaccccatgctgctg

SEQ ID NO: 172811 - DNA, 80 bp, synthetic construct
  source 1..80: mol_type = other DNA
aggagagagaggacatactctgcaagcatctgacgttcgctcaaaccataacccagatgaagaccctttttatctgtgta

SEQ ID NO: 172812 - DNA, 80 bp, synthetic construct
  source 1..80: mol_type = other DNA
aagaaagtcgaaaacatggccttgatattctcacttggcgctgtcgggggtcttagccttcatgttagattcactgggaa

SEQ ID NO: 172813 - DNA, 80 bp, synthetic construct
  source 1..80: mol_type = other DNA
ccaaggtttgacagaccctttaggattggttcacacctgaattgttatggaagttactcagtacctaccgatttggtagt

SEQ ID NO: 172814 - DNA, 80 bp, synthetic construct
  source 1..80: mol_type = other DNA
aggaagctcttgagtggcgtctccaccagcttaaattgctcgggcgtgtcctggcaggcctccagtgccagttccagaca

SEQ ID NO: 172815 - DNA, 80 bp, synthetic construct
  source 1..80: mol_type = other DNA
cgtgaggccgtgctttagggaggttcaggtgaggcaaggctgtggggtaaccgtaggagaggcgtgtgaggcggctaaga

SEQ ID NO: 172816 - DNA, 80 bp, synthetic construct
  source 1..80: mol_type = other DNA
tcggtgtctgcttcttaaggtcactaagctctccgagcgaagcgaggagagcgaccctcccccctggggcaacgccctcg

SEQ ID NO: 172817 - DNA, 80 bp, synthetic construct
  source 1..80: mol_type = other DNA
cttatgggctaatatagatatggcgaatggctatgctacatggtcaatcacctaccagggaaatgcacagataaggaaga

SEQ ID NO: 172818 - DNA, 80 bp, synthetic construct
  source 1..80: mol_type = other DNA
caaggcataacagattatgttaaatcattaggtgatgcctttggggtagggtttgtagatcaaattaaagaacaaattaa

SEQ ID NO: 172819 - DNA, 80 bp, synthetic construct
  source 1..80: mol_type = other DNA
ttttctcttcccctcccggttacctccaacagatccatatccacaaggacggggaacagccagccagagaagaaacagaa

SEQ ID NO: 172820 - DNA, 80 bp, synthetic construct
  source 1..80: mol_type = other DNA
cgttcaataagtacggctacaacagcataaatgactttggaaccctggctgtgcgtgtggtgaatgagcatgacccaaca

SEQ ID NO: 172821 - DNA, 80 bp, synthetic construct
  source 1..80: mol_type = other DNA
agtacctcagatgatagacaccagcgatccccttagaggtttcatcccatacagctttaacttcggtaagggaaaaatgc

SEQ ID NO: 172822 - DNA, 80 bp, synthetic construct
  source 1..80: mol_type = other DNA
agagggttaatgcaggttatgtttgtacctccaggaattgatgcaccaacgctaaaagatggaaaagagtggaatactgc

SEQ ID NO: 172823 - DNA, 80 bp, synthetic construct
  source 1..80: mol_type = other DNA
caggatgtgacacagatagggcagggtcacgcgctctaccgtgtaattggagtagacgatggcctcttcggccccttgat

SEQ ID NO: 172824 - DNA, 80 bp, synthetic construct
  source 1..80: mol_type = other DNA
gggggctcgttcaggacgggggtgttgcgcagacggcagtgacctttgagacggggtgttgcggggacaggggtgtgcgg

SEQ ID NO: 172825 - DNA, 80 bp, synthetic construct
  source 1..80: mol_type = other DNA
tttcagacgcagacgcagacgaaagggtaggagacacagacccaaactcataataagacagtggcagccagagattgtca

SEQ ID NO: 172826 - DNA, 80 bp, synthetic construct
  source 1..80: mol_type = other DNA
cagtcacacctaaaaaactagatatgagagcgcctgacacaccacatagtatcgcggtcttatgctgttcaaacagattg

SEQ ID NO: 172827 - DNA, 80 bp, synthetic construct
  source 1..80: mol_type = other DNA
ctgataccatcagtgaggctgaaaccaaggcctttgagaagctggtgaagcaagccaaaaacaccgtagagaacatagtc

SEQ ID NO: 172828 - DNA, 80 bp, synthetic construct
  source 1..80: mol_type = other DNA
tagtaaaccaaatcattgaagacatgataaagaaagaagcagtctatgttgcatggatcccagcccataaaggcatagga

SEQ ID NO: 172829 - DNA, 80 bp, synthetic construct
  source 1..80: mol_type = other DNA
attattattcaaccatctataaaccaggtatacatgttcccagaaagggcccccaaagcagctcccacaagtgctgattg

SEQ ID NO: 172830 - DNA, 80 bp, synthetic construct
  source 1..80: mol_type = other DNA
aagagcaagtgccctatagtagacatgccactattcatagctttctatggctacatagactggtgcatcaaatgcacagg

SEQ ID NO: 172831 - DNA, 80 bp, synthetic construct
  source 1..80: mol_type = other DNA
ctagcccttcggggaagaagtcccccggcttggagctttccctcggtagggcgctgtaggcgtcgtacccaaacacctcc

SEQ ID NO: 172832 - DNA, 80 bp, synthetic construct
  source 1..80: mol_type = other DNA
ctttcgggcttcttccatgcgcttcatagcaactttaagggataacccaccctttcccaatttctctatatcaccagtag

SEQ ID NO: 172833 - DNA, 80 bp, synthetic construct
  source 1..80: mol_type = other DNA
cgtgccatgccctataaaaacaacacagtggatttcgatccaacagcccaagtaatgacaagagttgcagacatcagaac

SEQ ID NO: 172834 - DNA, 80 bp, synthetic construct
  source 1..80: mol_type = other DNA
cttacagagaacactaggcccctttcaagacgtagaaacggtgggcataatatgcttcatatgcccctacacagacccgc

SEQ ID NO: 172835 - DNA, 80 bp, synthetic construct
  source 1..80: mol_type = other DNA
tgtataaagtattaccacaagggtggaagggatcaccagccctgttccaggccacaatggctacggtactggaacccttc

SEQ ID NO: 172836 - DNA, 80 bp, synthetic construct
  source 1..80: mol_type = other DNA
cccagcaggcaaacacggaggccatgctctcaggtaacgggagatggaactccagcttactatacgagcacaggtggcga

SEQ ID NO: 172837 - DNA, 80 bp, synthetic construct
  source 1..80: mol_type = other DNA
tttcttggccatcttactcgcctggttgatcggtacggcactccgccgcgccctgggcctcccaccgacccgccacctcg

SEQ ID NO: 172838 - DNA, 80 bp, synthetic construct
  source 1..80: mol_type = other DNA
cagcccaggatgatggtccacttggtacggagaagccaaattatttcctaaacttcaaggccataaatgttgatattttt

SEQ ID NO: 172839 - DNA, 80 bp, synthetic construct
  source 1..80: mol_type = other DNA
ccttattcacccagtatatccaatgaaagatgtctatgaatcaattaggtggacaaaagatccgcgaaatacacaggatc

SEQ ID NO: 172840 - DNA, 80 bp, synthetic construct
  source 1..80: mol_type = other DNA
gttgaagaccttccaaaccctccaaccagctctccaaccactcaggctcctgtttgcgtacctccaatatgggatcggct

SEQ ID NO: 172841 - DNA, 80 bp, synthetic construct
  source 1..80: mol_type = other DNA
acatgtgaaagcatggtgtcccaggccacccagagctgtcccatataaatatgttgactttaataattatgcagctagtg

SEQ ID NO: 172842 - DNA, 80 bp, synthetic construct
  source 1..80: mol_type = other DNA
agatgaggctggaaataccccactggcgacagtgttctagcctgcgtggctgcctgcacaccctatgggtgtgaagccaa

SEQ ID NO: 172843 - DNA, 80 bp, synthetic construct
  source 1..80: mol_type = other DNA
tgccgtgccctcttgggcacgctggcgccaccacatgccctttccatcctcgtcaccccccaccaccgtcagggagtctt

SEQ ID NO: 172844 - DNA, 80 bp, synthetic construct
  source 1..80: mol_type = other DNA
tgaactcctcaacaaccaatttgggacaatgccgagcctaactttggcgtgcctcactaagcaggggcaagttgatctaa

SEQ ID NO: 172845 - DNA, 80 bp, synthetic construct
  source 1..80: mol_type = other DNA
caggtgagagaggacacacattgaaaatctctgatgaccgttcaaatcataacccagatgaggatcccttctacctatgt

SEQ ID NO: 172846 - DNA, 80 bp, synthetic construct
  source 1..80: mol_type = other DNA
agggctggctagttaatatttcaagtcaagtgcagttggaacgcaacatcaatagggccatgactatcctccaggccgtc

SEQ ID NO: 172847 - DNA, 80 bp, synthetic construct
  source 1..80: mol_type = other DNA
actggaggtgcccgccattgccgaagacgactccactttccaggaaagaaagtggagtccctggtcagaagagagccagt

SEQ ID NO: 172848 - DNA, 80 bp, synthetic construct
  source 1..80: mol_type = other DNA
aaatatagcaatttgtcatccctatggggagacgaaatatataaaaaagaaagcgtgtttaacgcatttgaagagaatgc

SEQ ID NO: 172849 - DNA, 80 bp, synthetic construct
  source 1..80: mol_type = other DNA
agaattctcaggtgccagagccaggccagttgcagcagcacaaggtttgccagtttatatgacacccggttcagggcagt

SEQ ID NO: 172850 - DNA, 80 bp, synthetic construct
  source 1..80: mol_type = other DNA
acaacggtttcattggcacatcaattaacataactgacgaccagtacaagtccctttttgagaactatctctataaagaa

SEQ ID NO: 172851 - DNA, 80 bp, synthetic construct
  source 1..80: mol_type = other DNA
agatagtgtctttggtatagagggactagaggcacttgatctcaacactagtgctggatttccttatgtttctatgggta

SEQ ID NO: 172852 - DNA, 80 bp, synthetic construct
  source 1..80: mol_type = other DNA
agatgaggctaagtaatccccactggcgacagtgacttagcctgcgtggctgcctgcacacctggagacaggtgtgaagc

SEQ ID NO: 172853 - DNA, 80 bp, synthetic construct
  source 1..80: mol_type = other DNA
caactaaattccatagtggatgcttaatgattgcagtggtacctgaacaccagattgcttatatagggggggataacacc

SEQ ID NO: 172854 - DNA, 80 bp, synthetic construct
  source 1..80: mol_type = other DNA
gtaccaacaggttcagaaaatttaaaaagtctttataataccgtctgcgtcatcttttgcctgcacgcagaagagaaagt

SEQ ID NO: 172855 - DNA, 80 bp, synthetic construct
  source 1..80: mol_type = other DNA
gagtcaacggggtttatattttgttctataccaacatggacgccgccaagtacattgagttctttaacactcttgctagc

SEQ ID NO: 172856 - DNA, 80 bp, synthetic construct
  source 1..80: mol_type = other DNA
aatactgtcgctccaggagcaaactgatgtcgtgagcttaaactagttcttgatgcagatgacgttttaagcacagaagt

SEQ ID NO: 172857 - DNA, 80 bp, synthetic construct
  source 1..80: mol_type = other DNA
attaaggagagtcactcaagcacatccaactcagcaccagcactagatgcagctgagaccggccatactagcagtgttca

SEQ ID NO: 172858 - DNA, 80 bp, synthetic construct
  source 1..80: mol_type = other DNA
acaccccacggtggactttatggtacagataaacactcagcctcctttcttagacacaagcctcaccgcggccagcatac

SEQ ID NO: 172859 - DNA, 80 bp, synthetic construct
  source 1..80: mol_type = other DNA
gggcagagcattcaccagtgattatgtaatagctagtacaaatatgactgtcctcacaccgcccactgtttcatcacccg

SEQ ID NO: 172860 - DNA, 80 bp, synthetic construct
  source 1..80: mol_type = other DNA
tcaagaggtacccgccctcactgcagttgaaactggtgctacgagcactgtagttccagctgacctcgtccaaactcgac

SEQ ID NO: 172861 - DNA, 80 bp, synthetic construct
  source 1..80: mol_type = other DNA
tggttccagagttaaaatacaacaatgccggcttccatacaggtaacaacccagtttttggcatgtgtaaatacaaacca

SEQ ID NO: 172862 - DNA, 80 bp, synthetic construct
  source 1..80: mol_type = other DNA
gacgactacaactggcaaacctccacgaacccaagtgttttttggacggaagggagcgcaccacccaggatgtccattcc

SEQ ID NO: 172863 - DNA, 80 bp, synthetic construct
  source 1..80: mol_type = other DNA
tggtccctatctccacccgccagtcctgtgtgtcagtttgcagggccatcctcgcgctcaggtggactggctaggcaccc

SEQ ID NO: 172864 - DNA, 80 bp, synthetic construct
  source 1..80: mol_type = other DNA
caatcatgcaattgaaggggatgaacaagggttgtcactgctagtacaaaagtgcacaacattcttttcatcagcagcca

SEQ ID NO: 172865 - DNA, 80 bp, synthetic construct
  source 1..80: mol_type = other DNA
agaggccaagactctgaaaggggtagtaaatttcatctggcatgctaaaacctcagccgacgtgtcttcccttccatgcc

SEQ ID NO: 172866 - DNA, 80 bp, synthetic construct
  source 1..80: mol_type = other DNA
gcaaatattccacacatgggacatcagacgcggactgcttagctcaaaaagtattaaaagagtgtcagaatactcagaca

SEQ ID NO: 172867 - DNA, 80 bp, synthetic construct
  source 1..80: mol_type = other DNA
aatggccgacttgcggtttccgttctgctcaccacaaactgacaatccttgcatcactttccaaaccctagccgcagctt

SEQ ID NO: 172868 - DNA, 80 bp, synthetic construct
  source 1..80: mol_type = other DNA
tcccaaaattccccatcctttacatttcctaccccgtaacataagaagctttcaaacagtacaataggaagcaccacatc

SEQ ID NO: 172869 - DNA, 80 bp, synthetic construct
  source 1..80: mol_type = other DNA
acacttggcaatcatctactaatccttctgtcttctacacaacaggtaacgccagcccaagaatgtctataccctttgtt

SEQ ID NO: 172870 - DNA, 80 bp, synthetic construct
  source 1..80: mol_type = other DNA
ctactccaacgaacagctagacctagccaggtacaggggctgcagatttaaattctttagagacgcgcacacagacttta

SEQ ID NO: 172871 - DNA, 80 bp, synthetic construct
  source 1..80: mol_type = other DNA
atctggggtaatctacgtgggcaattatagagtggtcaacaggcacctagctacccgcaccgactggaagaatctcgtgt

SEQ ID NO: 172872 - DNA, 80 bp, synthetic construct
  source 1..80: mol_type = other DNA
agatgacttatatgagtaccatggaggtatttactcctctatatttctgtctccaggcagatcttactttgaaactctag

SEQ ID NO: 172873 - DNA, 80 bp, synthetic construct
  source 1..80: mol_type = other DNA
agatccaaacaatcccagtgtgcacaggaagcctttagatggtatcttccagtctaatgctgatcaatcattgtactgct

SEQ ID NO: 172874 - DNA, 80 bp, synthetic construct
  source 1..80: mol_type = other DNA
gccgcaggaggataccgcgaagaagacctcgacgagctgttcgccgctatggaaagagacgagtaaggaggcgccggtgg

SEQ ID NO: 172875 - DNA, 80 bp, synthetic construct
  source 1..80: mol_type = other DNA
gatttagataaacttaaggtcatagcatatggagatgatctaattgtttcctacccctttgagttagacccagaggttct

SEQ ID NO: 172876 - DNA, 80 bp, synthetic construct
  source 1..80: mol_type = other DNA
gcacaaatgttaggtatagtatagatcaattagtcacagcaatcataactgaacatgcaaacaaaacaaaaatttctagc

SEQ ID NO: 172877 - DNA, 80 bp, synthetic construct
  source 1..80: mol_type = other DNA
tccctagaccacccaggctgtgccagtataagaatgcatctacagtgaacttctctcctacagacattactgataaaaga

SEQ ID NO: 172878 - DNA, 80 bp, synthetic construct
  source 1..80: mol_type = other DNA
ttttttagaaccatgcttccccaggcatcccgaatttgctcctccatccacggggactgagagccattactattgctgta

SEQ ID NO: 172879 - DNA, 80 bp, synthetic construct
  source 1..80: mol_type = other DNA
tccttattccacccgtcttattacaagttgtcttcgactggtggggatcaggatgcttaaagcatggtgtaaatattctt

SEQ ID NO: 172880 - DNA, 80 bp, synthetic construct
  source 1..80: mol_type = other DNA
acaagttaacatccaaagtagtgaagtggttgatacgtatcattagtgctttaacaattatgatacgcaacagcgcagac

SEQ ID NO: 172881 - DNA, 80 bp, synthetic construct
  source 1..80: mol_type = other DNA
tcactgcggtggagacgggtgctagtggacaagcagtccctgctgatgttatagaaactagaaaagtgatcaattacaaa

SEQ ID NO: 172882 - DNA, 80 bp, synthetic construct
  source 1..80: mol_type = other DNA
atggaacacagagaaagtagtacaagtaattactgacatagctactaaaaacatgacaaaacaacaagagtactacacaa

SEQ ID NO: 172883 - DNA, 80 bp, synthetic construct
  source 1..80: mol_type = other DNA
cacggtttcttcccatagcctgtctaactagccttcccgtgagagtttatgaacatgtatctcaccagaatgctagtttg

SEQ ID NO: 172884 - DNA, 80 bp, synthetic construct
  source 1..80: mol_type = other DNA
actatgttaagactgattcatcagacctagggcagcttaaagtttatgtgtggacaccactgtccattccaaatggtgca

SEQ ID NO: 172885 - DNA, 80 bp, synthetic construct
  source 1..80: mol_type = other DNA
gtcttaaactgtttgggcagcttactgattatattagggacaatatatgctttatataaattaatgtgtcttacccaagg

SEQ ID NO: 172886 - DNA, 80 bp, synthetic construct
  source 1..80: mol_type = other DNA
attgtagtgccatggatatcctcaaatttctatcgtagaacaaagtctgacagttatacagaggcaggttatgtgtcctt

SEQ ID NO: 172887 - DNA, 80 bp, synthetic construct
  source 1..80: mol_type = other DNA
ccacatttcatgatccttatatcctagactctggagtaccgctaagccaggctctaatatacccccaccaatggatcaat

SEQ ID NO: 172888 - DNA, 80 bp, synthetic construct
  source 1..80: mol_type = other DNA
aatgcctacgcaaagcctagtatcactctagaaggtgtgtggttggtcgctcagccgtgaacctgacggtagacctggca

SEQ ID NO: 172889 - DNA, 80 bp, synthetic construct
  source 1..80: mol_type = other DNA
tgcaatgacttttccgtccggctgctgaaagacacgccattcattgaacaaagtgcactactccagggtgatgtagtaga

SEQ ID NO: 172890 - DNA, 80 bp, synthetic construct
  source 1..80: mol_type = other DNA
actcaaccctccaactgtgttgaaccctgaagcattagcacgtagattcgggtttgacttagacatgtgcttacactcat

SEQ ID NO: 172891 - DNA, 80 bp, synthetic construct
  source 1..80: mol_type = other DNA
ggacctattagaaaggcagatcaataccatgcatgtttcaaaccccacacaagaaaagagagaacaattgtttaacaatg

SEQ ID NO: 172892 - DNA, 80 bp, synthetic construct
  source 1..80: mol_type = other DNA
agaagtggactctgtcgtcccagtgaacaatctagcagataaggttgaaaacataggggcgtatgggatcccagtgagcg

SEQ ID NO: 172893 - DNA, 80 bp, synthetic construct
  source 1..80: mol_type = other DNA
ggttgcgctgggggaggttacgttgaggacggggacagtttgagactcgtaggggaggttacgttgggaacggggacagt

SEQ ID NO: 172894 - DNA, 80 bp, synthetic construct
  source 1..80: mol_type = other DNA
atattccctcccacagagggacagctcgccagagagcaaaaggagcaagaagaaggctccgattcgcaggaagaaagcag

SEQ ID NO: 172895 - DNA, 80 bp, synthetic construct
  source 1..80: mol_type = other DNA
cacgtagatgtccctgtgataggaggtagcgcgtaggagcccgcagttggggtcgggcctcctgtgcagagccttgacat

SEQ ID NO: 172896 - DNA, 80 bp, synthetic construct
  source 1..80: mol_type = other DNA
ggaggaactcattctaaatattgacaagttaaagaaaggacttgatggtttggcaccactctacgctgtagaaaacaagg

SEQ ID NO: 172897 - DNA, 80 bp, synthetic construct
  source 1..80: mol_type = other DNA
ggtggtgatagtgcaatggagtttacagataaaccggtcgctgccggatcaaacaaactggtacaaagggtggtccacaa

SEQ ID NO: 172898 - DNA, 80 bp, synthetic construct
  source 1..80: mol_type = other DNA
tgccgcttgcaaagaaccaacggactaccatgagctggtccagaccctcacaaaatgttcctatttgtgaacaaaactgg

SEQ ID NO: 172899 - DNA, 80 bp, synthetic construct
  source 1..80: mol_type = other DNA
gtgttccgtgaagatgctgcgcccgtatgacagtcgcgtgaggtcgtagccgcggcacaggtcgtccacgcacgtgtaca

SEQ ID NO: 172900 - DNA, 80 bp, synthetic construct
  source 1..80: mol_type = other DNA
cggggggcagacgcagagtaaaagttaaaataagacccccggcccttttagaagacaagtggtacactcagcaagatcta

SEQ ID NO: 172901 - DNA, 80 bp, synthetic construct
  source 1..80: mol_type = other DNA
gcactagttggagaaagagcattttatgacccaagaacagcaggaagcaagagtagatttgatgatttagtaaaaatatc

SEQ ID NO: 172902 - DNA, 80 bp, synthetic construct
  source 1..80: mol_type = other DNA
acgaaaacagcataactgctaacaaaggctctattgttaaatactttaatatcaattattataaggatgcagcaagttct

SEQ ID NO: 172903 - DNA, 80 bp, synthetic construct
  source 1..80: mol_type = other DNA
tcataggcacttcctcaaaaaactctgaggacgtagagccctttgaaaactggctatataacacagcttcacactatcaa

SEQ ID NO: 172904 - DNA, 80 bp, synthetic construct
  source 1..80: mol_type = other DNA
cagttagcgacacgcaacccagcggccctagcaattcggaggggataccaatgttaacagcagtagagacgggtcataca

SEQ ID NO: 172905 - DNA, 80 bp, synthetic construct
  source 1..80: mol_type = other DNA
tcaccttccaagtattgcatgaggagtattacaacgtatttggcaactatggcctatttgataacgacccagatggcact

SEQ ID NO: 172906 - DNA, 80 bp, synthetic construct
  source 1..80: mol_type = other DNA
tatttaacgttttatacgaggaaaactcttactgggaatcaaacattactcccttttatgtaattaatgttaaaaaaggc

SEQ ID NO: 172907 - DNA, 80 bp, synthetic construct
  source 1..80: mol_type = other DNA
ctgtatcgatgtaacactagggactttctttgcgatgtagccatcaacacggcgtatgccccatagttcgcgtgatacga

SEQ ID NO: 172908 - DNA, 80 bp, synthetic construct
  source 1..80: mol_type = other DNA
gcccagattatcctcgctagtctgtgcaccctgcatgatgcccaaggtatcgccccggcctcccagtcccacattaaatg

SEQ ID NO: 172909 - DNA, 80 bp, synthetic construct
  source 1..80: mol_type = other DNA
ttcccaatacctgtttccagaaatgctgcccaaacgttacaccccccaagactgggagaccgagtaccaatgctgcaagg

SEQ ID NO: 172910 - DNA, 80 bp, synthetic construct
  source 1..80: mol_type = other DNA
aaacaaagatgaaatcacaagaattctaccaaaaatacacggattgcttgtccaaattcaaaccaatcatggccatctgt

SEQ ID NO: 172911 - DNA, 80 bp, synthetic construct
  source 1..80: mol_type = other DNA
cagaatacacaattttagccactgcttcacagccaaccagttctaaatattctagcagtttaacagtgcaagcaatgtat

SEQ ID NO: 172912 - DNA, 80 bp, synthetic construct
  source 1..80: mol_type = other DNA
ccattctatccctggatgcctagacaagccccccagttcagagtgtcctttaaacttggattcaaaccctaaataaaaag

SEQ ID NO: 172913 - DNA, 80 bp, synthetic construct
  source 1..80: mol_type = other DNA
caacggcaggttctgcaatgggcgcggcgtccttgacgttgtcggcccagtcccggactttattggctgggatagtgcag

SEQ ID NO: 172914 - DNA, 80 bp, synthetic construct
  source 1..80: mol_type = other DNA
agtcaaagatgttcttggaaaaggaattccaacactccaatctccaactgttgaggcatgtgggtattcagatagaataa

SEQ ID NO: 172915 - DNA, 80 bp, synthetic construct
  source 1..80: mol_type = other DNA
atgatgatctgatcacagtcactgctactttggctttgcttgggtgtgatggctcaccctggagattccttaaaatgtat

SEQ ID NO: 172916 - DNA, 80 bp, synthetic construct
  source 1..80: mol_type = other DNA
agacaagttgcccagttacgaagaaagttggaattctttacctacgttaggtttgacgtggaagtcacgtttgtcattac

SEQ ID NO: 172917 - DNA, 80 bp, synthetic construct
  source 1..80: mol_type = other DNA
aaagaggccaaagaaacatcgacagttccccaaagaagacgcaaacaactcaaaccactcagggctttattgtcccgggg

SEQ ID NO: 172918 - DNA, 80 bp, synthetic construct
  source 1..80: mol_type = other DNA
aaggggtccggatgttgttccatcgtgtgactgcatggagggatgttattactgtcacagtcaagaccgttacttcccag

SEQ ID NO: 172919 - DNA, 80 bp, synthetic construct
  source 1..80: mol_type = other DNA
tctagcaaagcacgctccaggacgtgtaccatctcgagagtgaggcacagctgttttcgtggacttttatacagtaagga

SEQ ID NO: 172920 - DNA, 80 bp, synthetic construct
  source 1..80: mol_type = other DNA
attaagtggactattagattaatcagtgctttgtctatcatagttagaaacagtacagacacccctacaatcatagccac

SEQ ID NO: 172921 - DNA, 80 bp, synthetic construct
  source 1..80: mol_type = other DNA
tgacctatggtgacaagtgtgcaattcacgtttgtcactatgggcgcccaagtatctaggcagagtgttggaagtcatga

SEQ ID NO: 172922 - DNA, 80 bp, synthetic construct
  source 1..80: mol_type = other DNA
aaggatgctatgcttggagttcatgtcatatgggatctaggtctacagtcgacgtgtacgattgctgtaccgtggatcgc

SEQ ID NO: 172923 - DNA, 80 bp, synthetic construct
  source 1..80: mol_type = other DNA
tgccgcacaaacacttgctgtacgcgccgcagttacgggttgtacaagcggaaagagattgcgtcttgtcgatggaacag

SEQ ID NO: 172924 - DNA, 80 bp, synthetic construct
  source 1..80: mol_type = other DNA
cgtccagacgggaagcgttgtcatgttagttcccgtaaaggtcgtgttttgtcttgttttgtttctcatgagtttaacag

SEQ ID NO: 172925 - DNA, 80 bp, synthetic construct
  source 1..80: mol_type = other DNA
cagggtctactttaaacccaaacacgtgaaggcttgggtaccgagggcacccaggctatgtcaatatgtaaatgcatcca

SEQ ID NO: 172926 - DNA, 80 bp, synthetic construct
  source 1..80: mol_type = other DNA
cactaacacacgactggggcatatacagcccctactacctaacgcccaccagaattagcctagactgggacacaccatgg

SEQ ID NO: 172927 - DNA, 80 bp, synthetic construct
  source 1..80: mol_type = other DNA
acattcccggagccggtggactccctcgtccgatacaagtcgttgacccgaaatacgtcaacgaaggctacacgttccac

SEQ ID NO: 172928 - DNA, 80 bp, synthetic construct
  source 1..80: mol_type = other DNA
ccaccccctctactagccgaccatggcgtggtgtggcagatggagaaggtggccgcggcgccggtggaggagatggcggc

SEQ ID NO: 172929 - DNA, 80 bp, synthetic construct
  source 1..80: mol_type = other DNA
ggaataaaacaaccttaccaataacaatcatgtcagggcaaaaattccattcgcagcgtatcctcaataccaagcccaaa

SEQ ID NO: 172930 - DNA, 80 bp, synthetic construct
  source 1..80: mol_type = other DNA
cacatcatctgggatataggattacaatctagctgtgttctgtgtatcccgtggatcagccagacgcattatcgattggt

SEQ ID NO: 172931 - DNA, 80 bp, synthetic construct
  source 1..80: mol_type = other DNA
tatggcttcaacactctcaataatatgggaaagttatactttaggcatgtgaatgacaaaacaatcagcccaattacaag

SEQ ID NO: 172932 - DNA, 80 bp, synthetic construct
  source 1..80: mol_type = other DNA
gttgaagattctagcttatggagatgatgtgatcttttcctataagtatcagcttgacatggaggcaattgctaaagaag

SEQ ID NO: 172933 - DNA, 80 bp, synthetic construct
  source 1..80: mol_type = other DNA
aatacagcagcccaatgatccatcctggtatgatgatgcagcaaaagagaaagctggtggtccccagtttccaaaccaga

SEQ ID NO: 172934 - DNA, 80 bp, synthetic construct
  source 1..80: mol_type = other DNA
ttgtggtggaatccgtagatgtcaacatggagcaatgggactcctcactgctggtggcaatggaatagtcccctttgccg

SEQ ID NO: 172935 - DNA, 80 bp, synthetic construct
  source 1..80: mol_type = other DNA
ctctctaatacgcaggcgcaaaaggaggctccgcccccttaaacccccaaggtggggtaaacccccccttaaacccgccc

SEQ ID NO: 172936 - DNA, 80 bp, synthetic construct
  source 1..80: mol_type = other DNA
cccattatcagtgtgggaaatgcgtacagcagcttttacgacggctggtcaaacttcacccaaaacggggtttatggttt

SEQ ID NO: 172937 - DNA, 80 bp, synthetic construct
  source 1..80: mol_type = other DNA
acacatggggatgaactgctagaatatcacacaggcatctacagctctatattcttatctgcaggcagaacatactttga

SEQ ID NO: 172938 - DNA, 80 bp, synthetic construct
  source 1..80: mol_type = other DNA
cgtagaaaaaaaattaaaataactcagtggaaccccgctgttactaaaaaatgtactgtaactgggtacctaccagttat

SEQ ID NO: 172939 - DNA, 80 bp, synthetic construct
  source 1..80: mol_type = other DNA
acgcttgtggatcttatgcccacacagccatcctctagtaagtttgtaaggcgtctgatgacgtgtgggaacttatcgga

SEQ ID NO: 172940 - DNA, 80 bp, synthetic construct
  source 1..80: mol_type = other DNA
cctgcagctcgcgcagcagcagcgactcggagagcaactccgattcctactccaccagatgctcaaaacccaagccaatc

SEQ ID NO: 172941 - DNA, 80 bp, synthetic construct
  source 1..80: mol_type = other DNA
aaaacaacattcctggctccagaaggtttagctggactttgtttcttgctggactgactttgagtctgttagttatatgt

SEQ ID NO: 172942 - DNA, 80 bp, synthetic construct
  source 1..80: mol_type = other DNA
attataaacataagaaatgcaaatttccactacttaaccacctgggacacaaacaataccaaccacattaacagcacata

SEQ ID NO: 172943 - DNA, 80 bp, synthetic construct
  source 1..80: mol_type = other DNA
ctcaccactaacgaacagcatctgttgcaacttccaggttcttaacagcaactatgacaacgccctgagcacccttatag

SEQ ID NO: 172944 - DNA, 80 bp, synthetic construct
  source 1..80: mol_type = other DNA
gcttaggaagagcttttggagtcgggttcacagatcagatatcagcaaaggtcacagaattacaagatgtagcaaaagat

SEQ ID NO: 172945 - DNA, 80 bp, synthetic construct
  source 1..80: mol_type = other DNA
aattccgtgttcacacaggacacggccagtgccgtctccaggaagcgaacatattggatggcgttcgtgtagaccccgag

SEQ ID NO: 172946 - DNA, 80 bp, synthetic construct
  source 1..80: mol_type = other DNA
tatgtcaagtagatacacttattccagtaaatagtatagaggccaatattaaaagcacaaacatgtacactgtcacttta

SEQ ID NO: 172947 - DNA, 80 bp, synthetic construct
  source 1..80: mol_type = other DNA
gaggagtgcgaccctcccccctggaacaacttcttcggagtccggcgctacgccttcggctgcgccggacacctcagacc

SEQ ID NO: 172948 - DNA, 80 bp, synthetic construct
  source 1..80: mol_type = other DNA
attccatatgacagtaacttcggctttcccacatacagagcccaaaaagactacattttagaaagaagacagtgcaactt

SEQ ID NO: 172949 - DNA, 80 bp, synthetic construct
  source 1..80: mol_type = other DNA
ggtggacttcatagtaaaattcaacagaaaacctccattcctagacacaatagtatcaggtccagccatgcacccaggca

SEQ ID NO: 172950 - DNA, 80 bp, synthetic construct
  source 1..80: mol_type = other DNA
agtatataaatcagtagctacatcaaccagcaatgcacaccacattgaccctgcacacacagcacccacaaaaaattggt

SEQ ID NO: 172951 - DNA, 80 bp, synthetic construct
  source 1..80: mol_type = other DNA
attttggttattttgactggtcagcaacatacacccctcagcaagtgattcatcgtaatgtggtcaaactgagtcagttt

SEQ ID NO: 172952 - DNA, 80 bp, synthetic construct
  source 1..80: mol_type = other DNA
tctgtcctgcaagtttctccctttatatgctagtgaagcaaagagaattaaaattttacacaatagatgcagtacaatca

SEQ ID NO: 172953 - DNA, 80 bp, synthetic construct
  source 1..80: mol_type = other DNA
gttgagtactgtaaaagtcaaaccacatatgggtaatgctatcatttctaatgggacccgctaaaatgtagtcttgagga

SEQ ID NO: 172954 - DNA, 80 bp, synthetic construct
  source 1..80: mol_type = other DNA
gacgtgctggtatcagactggaatcgtcgtaccagctgggacgcctacgtcatgctcaattatgtgctttgtatcagcat

SEQ ID NO: 172955 - DNA, 80 bp, synthetic construct
  source 1..80: mol_type = other DNA
ttttttattttatgcgtgttctcacctcttcatctttttaacaccggggtaactatcgtaagtcggtaggcgtcgatagc

SEQ ID NO: 172956 - DNA, 80 bp, synthetic construct
  source 1..80: mol_type = other DNA
atcaccttccaggtactagccgcagagtacaacaacttcctctctacaactttaggcactacaaatgaatccacttttat

SEQ ID NO: 172957 - DNA, 80 bp, synthetic construct
  source 1..80: mol_type = other DNA
ggaggcttttaccttgcccatcgcatacattaatttcgtggcaaaacgctttaaaacccttctcgttggcgacccgaagc

SEQ ID NO: 172958 - DNA, 80 bp, synthetic construct
  source 1..80: mol_type = other DNA
ccactctaccgataactgttacaatcgccccaaacaagtcagagttttcaggtgctatgcagaaacagcaggggttgccc

SEQ ID NO: 172959 - DNA, 80 bp, synthetic construct
  source 1..80: mol_type = other DNA
acaccaacaaaaagtaatagaggatatatgcgtctcagggccctttgctccaaagcaaaacgtccctagcgtacagctta

SEQ ID NO: 172960 - DNA, 80 bp, synthetic construct
  source 1..80: mol_type = other DNA
gagcaatttgacaggaagtgtgttaaggaaaacctacatgcaatcttccaagggttgggtagtgatgagacacctggctt

SEQ ID NO: 172961 - DNA, 80 bp, synthetic construct
  source 1..80: mol_type = other DNA
aggcaagaggctccccactggtaacagtgttcttgcctgcgtggctgcctgcacaccctaatgggtgtgaagccaataag

SEQ ID NO: 172962 - DNA, 80 bp, synthetic construct
  source 1..80: mol_type = other DNA
cctcctaagcacacttagaagctttgcacaatcacgaccagtagtgggcgtggcgcaccagccacgtcttggtcaagcac

SEQ ID NO: 172963 - DNA, 80 bp, synthetic construct
  source 1..80: mol_type = other DNA
acaactgggacgcccccttaaactacagaatactagtagtatgtccatacacatatccaaagctataccatgacaataac

SEQ ID NO: 172964 - DNA, 80 bp, synthetic construct
  source 1..80: mol_type = other DNA
aatgaattttgtagaaaaattagaagtgtgcccgtggggagggcattgacactacctgcatattctagtcttagacggaa

SEQ ID NO: 172965 - DNA, 80 bp, synthetic construct
  source 1..80: mol_type = other DNA
cccaggggaagttagtagtctgttggagttatgcaggattgagactatactagaagtcaacaacaccacgcgatctgtgg

SEQ ID NO: 172966 - DNA, 80 bp, synthetic construct
  source 1..80: mol_type = other DNA
tctacctctcaaaaacctgcagtattaaacagtaatcaaattcccaatgataactcatacttaagcacaacacctactgc

SEQ ID NO: 172967 - DNA, 80 bp, synthetic construct
  source 1..80: mol_type = other DNA
ttgagtggatgaaatcaatgctcccacaagcacaactcaaggtcaagtatctaaatgaacttaagagattgaacttatat

SEQ ID NO: 172968 - DNA, 80 bp, synthetic construct
  source 1..80: mol_type = other DNA
aacaggacggatgcccctcattatctgtggaaaggggtccacccagttcaactacatcacccacgcggacgacatcaccc

SEQ ID NO: 172969 - DNA, 80 bp, synthetic construct
  source 1..80: mol_type = other DNA
cacgtagctgtgactgcaaggggagagttcaacttacttggaattcatgataactgtgctgtgattcctacacatgccca

SEQ ID NO: 172970 - DNA, 80 bp, synthetic construct
  source 1..80: mol_type = other DNA
aacacacaaccctgatggctccacaggaggtgaaatatcaacactaactacttacaataactgggtatcaggagtaggac

SEQ ID NO: 172971 - DNA, 80 bp, synthetic construct
  source 1..80: mol_type = other DNA
gtggagcctggtatacggatacacagactactgcaaaaaagttacaggggacacagccatactactagactgcagagtag

SEQ ID NO: 172972 - DNA, 80 bp, synthetic construct
  source 1..80: mol_type = other DNA
ggtggctagggttgctgacacgattgctagcgggcccagcaattctaccagcattcccgcgctaactgcagttgaaaccg

SEQ ID NO: 172973 - DNA, 80 bp, synthetic construct
  source 1..80: mol_type = other DNA
tttcaaacagagcgtggtccctcccaaatctgtcacgtgcgctcacagccgctctcttttctaccgaggctcttagttgc

SEQ ID NO: 172974 - DNA, 80 bp, synthetic construct
  source 1..80: mol_type = other DNA
aagcttgacaaaattgctgctggcaagaccaggtgcattgaagcttgtgaggttgattactgcattgtttaccggatgat

SEQ ID NO: 172975 - DNA, 80 bp, synthetic construct
  source 1..80: mol_type = other DNA
aacagccgccgaaacacgatctgtcgctgggtcgcggtgggaaagcgcagacccatgacagccggaggctatatgaccgc

SEQ ID NO: 172976 - DNA, 80 bp, synthetic construct
  source 1..80: mol_type = other DNA
gagtaaactgtggacaaatgagtcaaaaggttggtggtggaagctgcctgatgctcttaaggacatgggtgtttttggac

SEQ ID NO: 172977 - DNA, 80 bp, synthetic construct
  source 1..80: mol_type = other DNA
ccagtaaaggatgttctagaaaaaggaatccccaccctacaatctcccacggttgaagcatgtggctattcggacaggat

SEQ ID NO: 172978 - DNA, 80 bp, synthetic construct
  source 1..80: mol_type = other DNA
atgttgtcgacggttgttagatgcattgcgtatctgtattagtagttttgcaagccgtggtgcgtgttattgtgacgtag

SEQ ID NO: 172979 - DNA, 80 bp, synthetic construct
  source 1..80: mol_type = other DNA
gtagctgatgatccgaataactacctgttttgccgggtcagaaaaaatggtgttgccgcgccatctgccaccagccagct

SEQ ID NO: 172980 - DNA, 80 bp, synthetic construct
  source 1..80: mol_type = other DNA
tttgaaaactggctatatggaaggagcagtcactaccaagcatttgcaacagaagcccacctaagacccagacagtttac

SEQ ID NO: 172981 - DNA, 80 bp, synthetic construct
  source 1..80: mol_type = other DNA
ctgatatgtctggaaacccgtcactctccgtaattcccacgaatccttaccaggaacaactatcaaataatccattaatt

SEQ ID NO: 172982 - DNA, 80 bp, synthetic construct
  source 1..80: mol_type = other DNA
gccgttcgtccgagccccctgacgatgtttcgagcccctccggtaacgtgctgctctcctccgaatccccctctcgcgtt

SEQ ID NO: 172983 - DNA, 80 bp, synthetic construct
  source 1..80: mol_type = other DNA
ctgaacacctggactcacaacatttatagtaaacaagttgacagcaactttggctatgcctcatataacttttcaggaga

SEQ ID NO: 172984 - DNA, 80 bp, synthetic construct
  source 1..80: mol_type = other DNA
taataattaaaccccccacactatatactgacaaatggtactttatgagagacttttgcaaggttcctctagcgtacttg

SEQ ID NO: 172985 - DNA, 80 bp, synthetic construct
  source 1..80: mol_type = other DNA
cctaaaagtcttgttagcatatacacccccagggattggcaaacctagaaatagaaaggaagcaatgttagggacacatg

SEQ ID NO: 172986 - DNA, 80 bp, synthetic construct
  source 1..80: mol_type = other DNA
gcacacacattatttgggatatcggtctgcaatccagtgctacaatggtagctccgtggatctccaatgtcaattacaga

SEQ ID NO: 172987 - DNA, 80 bp, synthetic construct
  source 1..80: mol_type = other DNA
atggtgatgttaagaagctggcagaggttgtagctgagtccatgtctaacactgatgacgaagagataaaagaccagatt

SEQ ID NO: 172988 - DNA, 80 bp, synthetic construct
  source 1..80: mol_type = other DNA
tggatttgctccattgactttactcacgcctggtttgatacccatagatttattgattaggaaaagctactataatgggt

SEQ ID NO: 172989 - DNA, 80 bp, synthetic construct
  source 1..80: mol_type = other DNA
cctccagcacgccgcggatcatcagggcctccatttcgaaatcggccgacacgctctgggccgcgccgctcctcgtctgc

SEQ ID NO: 172990 - DNA, 80 bp, synthetic construct
  source 1..80: mol_type = other DNA
ctgtcccatactttggcccaggagtcgactacaaaggagacgccctcacaccactatcacgcaaagacttaaccacctat

SEQ ID NO: 172991 - DNA, 80 bp, synthetic construct
  source 1..80: mol_type = other DNA
atatcacaaggccaagcatattaaagcatggtgtccaagggccccaagagcagtaccttacacacatacacactcaacaa

SEQ ID NO: 172992 - DNA, 80 bp, synthetic construct
  source 1..80: mol_type = other DNA
ggcgatattttgaccagagtcgcagatgatgcatctaatgtattagggcctaattgctatgccacgacatctgagccagc

SEQ ID NO: 172993 - DNA, 80 bp, synthetic construct
  source 1..80: mol_type = other DNA
acacaactgaatcacattacgggacagtcgtgaccaatgacatgggaacattatgctccagaatagttactgaacatcat

SEQ ID NO: 172994 - DNA, 80 bp, synthetic construct
  source 1..80: mol_type = other DNA
atagagcaactaacattaggtacagtgttgaccagttagtcacagctatcatcaatgattacaaaaacaaaatgaaaatc

SEQ ID NO: 172995 - DNA, 80 bp, synthetic construct
  source 1..80: mol_type = other DNA
gtacacagctgacacggcggttgtggccgtatagactttcatctggggcgtagaggcatcgctcagcacccagaggcact

SEQ ID NO: 172996 - DNA, 80 bp, synthetic construct
  source 1..80: mol_type = other DNA
tcacgtggacctccttgtgggagccgcggcactctgctcggccatgtacgtgggcgatctttgcggtggtatattcttac

SEQ ID NO: 172997 - DNA, 80 bp, synthetic construct
  source 1..80: mol_type = other DNA
aaaatggatgatacagtgtttgctacaactttattgggtgaagtattaaattatttctcaaattggtctggtagtatcac

SEQ ID NO: 172998 - DNA, 80 bp, synthetic construct
  source 1..80: mol_type = other DNA
aaacgccagaaaaagactcagattcagcactccaactccgaagactccagccgtggatccactccagtcaagaaacaaaa

SEQ ID NO: 172999 - DNA, 80 bp, synthetic construct
  source 1..80: mol_type = other DNA
gaaccagctgttctctcaaaaagtgacaatcgtctggaaacagattttgaaacagctttgttttcaaagtacaaaggtaa

SEQ ID NO: 173000 - DNA, 80 bp, synthetic construct
  source 1..80: mol_type = other DNA
ccacgggtgggagacggagtatcaggcctgcaaagcctttgacaggccccctagaaactacctgtcagacaaacccatct

SEQ ID NO: 173001 - DNA, 80 bp, synthetic construct
  source 1..80: mol_type = other DNA
gcccggtgatcgagcaccatggcctatgggtggtggcgcaggcgacgaaggcgcccgtggtggaggaggagatggcgccg

SEQ ID NO: 173002 - DNA, 80 bp, synthetic construct
  source 1..80: mol_type = other DNA
ttacacaccgcagtcaaggggcaattcgggctcgggactggccgggctatgggcaaggctcttagggtcatcgctcttaa

SEQ ID NO: 173003 - DNA, 80 bp, synthetic construct
  source 1..80: mol_type = other DNA
aactgatttcgtacctggtgttcagagcgggcaaggggccatactggtaacttgttcagcatgtcctgacatggcggtac

SEQ ID NO: 173004 - DNA, 80 bp, synthetic construct
  source 1..80: mol_type = other DNA
tttgctaatcatgagtcctccggcccctgaatgcggctaatccaaccccatgcttactgcgcagaaaccactgggggagt

SEQ ID NO: 173005 - DNA, 80 bp, synthetic construct
  source 1..80: mol_type = other DNA
ggacggagaggtaatgaatttgtcaatacttcctaagcagagaaagtccatcctcaacaagcccattggtgcagaggatg

SEQ ID NO: 173006 - DNA, 80 bp, synthetic construct
  source 1..80: mol_type = other DNA
cagtgcagctgagaaggaagctggaatttttcacatactcaagatttgatttggaaatgacttttgtgttgacagagagg

SEQ ID NO: 173007 - DNA, 80 bp, synthetic construct
  source 1..80: mol_type = other DNA
ttgtagcactggtagatggtatccatctggtcagtttcgtagctgtcaacggagaacttctcctcgtgccggttggtcac

SEQ ID NO: 173008 - DNA, 80 bp, synthetic construct
  source 1..80: mol_type = other DNA
tactttgttgagaaacaaggtcaagtaatagctaggcaaaaggtcagggaactaaacatgaaccctgttaataccccaac

SEQ ID NO: 173009 - DNA, 80 bp, synthetic construct
  source 1..80: mol_type = other DNA
taggcctatttcaactcagcataactggcctagaactcagcaacccatggctgcgttccggcaccaacagcccagtagta

SEQ ID NO: 173010 - DNA, 80 bp, synthetic construct
  source 1..80: mol_type = other DNA
ctgtcatccattatacgaatataaacttttacaaagatgctgcctcaaactcagccaataggcaggatttctcgcaagat

SEQ ID NO: 173011 - DNA, 80 bp, synthetic construct
  source 1..80: mol_type = other DNA
accctcttagttgcaatgataccagaacatcaattggcaagtgctaagaatggaaaagtaactgctggttataatctcac

SEQ ID NO: 173012 - DNA, 80 bp, synthetic construct
  source 1..80: mol_type = other DNA
gtaacgccacaaacagcaaagacacctggtacaaaggcaacacatacaatgaaaagataacacagctagcacaaaaaacc

SEQ ID NO: 173013 - DNA, 80 bp, synthetic construct
  source 1..80: mol_type = other DNA
ttgccccccccccgcgcatgcgcgcggggccccccccccgcgggaggctccgcccaccggccccgcgcccgaagtacgtc

SEQ ID NO: 173014 - DNA, 80 bp, synthetic construct
  source 1..80: mol_type = other DNA
cggcttcactgaaaccatctcagagaaagctagagaaatccaaaacatgttgttaggtgaggactctctattggaaaaac

SEQ ID NO: 173015 - DNA, 80 bp, synthetic construct
  source 1..80: mol_type = other DNA
cagaactatgccacccactctgatgacctggtggctaagggaccctacgggggaggcatgaccaccacaaaattcactct

SEQ ID NO: 173016 - DNA, 80 bp, synthetic construct
  source 1..80: mol_type = other DNA
gtcctggagttgattacaaggatggtacccttgcccccttaaccactaaggatctgaccacgtacgggtttgggcaccag

SEQ ID NO: 173017 - DNA, 80 bp, synthetic construct
  source 1..80: mol_type = other DNA
catgtcaaggtggccgtctcccattattcagcacagcttatgactcttgacattaacccagaacccatctctttagaaga

SEQ ID NO: 173018 - DNA, 80 bp, synthetic construct
  source 1..80: mol_type = other DNA
agcatctgcctcaaacaggactgcgaccaaagctggctcctcgagtacagcttactgtgcttcaagtgcagctacgcacc

SEQ ID NO: 173019 - DNA, 80 bp, synthetic construct
  source 1..80: mol_type = other DNA
ttccaaaagcaccacaacttttggacacgcagcaacaaagagctagacctagtgaggttctttggcagcacctggacatt

SEQ ID NO: 173020 - DNA, 80 bp, synthetic construct
  source 1..80: mol_type = other DNA
tgtcctaggaacttccgtattagaccaacggacaagttactcaacgcaaatagaaaactttgaaaagtggctatatcaaa

SEQ ID NO: 173021 - DNA, 80 bp, synthetic construct
  source 1..80: mol_type = other DNA
tgggtagggccattgctgagaaagagaacacatcaacatactctttgcctccagatccggcccactttgatggttacaaa

SEQ ID NO: 173022 - DNA, 80 bp, synthetic construct
  source 1..80: mol_type = other DNA
tatgttgggtactcacattatatgggattttgggcttcagtcatccattactctcgtggtaccatggatcagcaacacgc

SEQ ID NO: 173023 - DNA, 80 bp, synthetic construct
  source 1..80: mol_type = other DNA
ctagcttctcattcagaagctttgacatgcgacgtcaccagtttagctcgaagagtattaaaagaatcgcagaccaaccg

SEQ ID NO: 173024 - DNA, 80 bp, synthetic construct
  source 1..80: mol_type = other DNA
ggtgagaaagagcctgctgcactcagtgagaaagatccacgcttggaggttgatctcaagggagcagtcttagccaaata

SEQ ID NO: 173025 - DNA, 80 bp, synthetic construct
  source 1..80: mol_type = other DNA
gcctcaatggttggcagaactgcgatgtacagtctctcgtggctgtgtcgaatcattccctctatgacatctctttccgc

SEQ ID NO: 173026 - DNA, 80 bp, synthetic construct
  source 1..80: mol_type = other DNA
caccatccctattacaatttccattagtcctatgtgtgctgaattctctggagcaagagcaaacagccaggggttgccgg

SEQ ID NO: 173027 - DNA, 80 bp, synthetic construct
  source 1..80: mol_type = other DNA
agtaaggagacgcaggggagggtggcggcgctcctacagacggtggaagagacgcaggtggcgacgcagacacaaaaaga

SEQ ID NO: 173028 - DNA, 80 bp, synthetic construct
  source 1..80: mol_type = other DNA
caacctggcttggacaacgttttaaaacatacactgctaggagaaattttaaactattacgcacactggtccggaagcgt

SEQ ID NO: 173029 - DNA, 80 bp, synthetic construct
  source 1..80: mol_type = other DNA
tcccttattcagactatctgcaacacacatcacatctttaaagatgaaatatatacagttgaagggggcatgccctctgg

SEQ ID NO: 173030 - DNA, 80 bp, synthetic construct
  source 1..80: mol_type = other DNA
tatgataattataacactggagaaaataatattaacacatggcaaataaatatcaaagagatggcacaaattatgagaaa

SEQ ID NO: 173031 - DNA, 80 bp, synthetic construct
  source 1..80: mol_type = other DNA
ccaaacataaagcaactaacacagcttagagagtactacttctactgtgaaacagcacaaagtacagccacaaaaccctt

SEQ ID NO: 173032 - DNA, 80 bp, synthetic construct
  source 1..80: mol_type = other DNA
gagcctataataataccagcaagtccaatcccagacctcctttttccttctactaaaaaaaaaaagaaattttcaaaatt

SEQ ID NO: 173033 - DNA, 80 bp, synthetic construct
  source 1..80: mol_type = other DNA
tcagacgcgccatgtcatacaaacacggtcacgttctgagagtaccatagaatcattctttgcaagaggagcatgtgttg

SEQ ID NO: 173034 - DNA, 80 bp, synthetic construct
  source 1..80: mol_type = other DNA
tatcacagatggtaatgatgtagatacagaaattactatcatttggctagaaagaaatgaaaagtttagggatatcaggc

SEQ ID NO: 173035 - DNA, 80 bp, synthetic construct
  source 1..80: mol_type = other DNA
tggccgagatgttaacgcggtagatgcggcgcagacagcccacgatcttgggacgcagccacgccacgcggcctctggca

SEQ ID NO: 173036 - DNA, 80 bp, synthetic construct
  source 1..80: mol_type = other DNA
tttgagggctgctttcgattacacgctgcctgttgcgggtgcggcaattttatcactcatcttactatactggctgctcg

SEQ ID NO: 173037 - DNA, 80 bp, synthetic construct
  source 1..80: mol_type = other DNA
tgcaacgacttctctgtacgtttgttgagagacacgcccttcgcaactcaggatgctctataccaaaatgatccagcaca

SEQ ID NO: 173038 - DNA, 80 bp, synthetic construct
  source 1..80: mol_type = other DNA
tggacaagggcaaaggcaaccacgtgtggctagactggatcagcaaaggagactctatattagaagaaaagagggccaag

SEQ ID NO: 173039 - DNA, 80 bp, synthetic construct
  source 1..80: mol_type = other DNA
cttcaagtcccaatacatacaataaacacatgatggaaaccaccccccccattaagggcaataacaactacaattggcca

SEQ ID NO: 173040 - DNA, 80 bp, synthetic construct
  source 1..80: mol_type = other DNA
acggacgatggtcagaaaactttaccagtcacatagaggacaaggtagccaagggaccctttgggggcggacacagtacc

SEQ ID NO: 173041 - DNA, 80 bp, synthetic construct
  source 1..80: mol_type = other DNA
ccgtgtttcatgctaatccaggtgtacttacaggctctgcagtaggttgtaaccctgatgtgttctggtctcaaatgtat

SEQ ID NO: 173042 - DNA, 80 bp, synthetic construct
  source 1..80: mol_type = other DNA
cagggaagtttctcatagcatacactccaccaggaggtggcatacctgcaagcaggaaggatgctatgcttggtgtccat

SEQ ID NO: 173043 - DNA, 80 bp, synthetic construct
  source 1..80: mol_type = other DNA
cctctggtaaccacagaggccgtagccgcaagcctgcggtttccgatgtgctcaccacaaacggacaacatttgcatata

SEQ ID NO: 173044 - DNA, 80 bp, synthetic construct
  source 1..80: mol_type = other DNA
caaacaggttctcaagaacccgtgcaacagaggagaagaacttacaacttacccccatagagtcaaacgggacgtacaaa

SEQ ID NO: 173045 - DNA, 80 bp, synthetic construct
  source 1..80: mol_type = other DNA
ttcctcacaacaaaggtattatctaaggttgttaaaatgatatcagctcttgttattatctgtagaaatcatgatgatct

SEQ ID NO: 173046 - DNA, 80 bp, synthetic construct
  source 1..80: mol_type = other DNA
ttgagtcaatcagatggaccagggatccaaagaacacccaagatcatgtctactctctatgccttttgatgtggcacaat

SEQ ID NO: 173047 - DNA, 80 bp, synthetic construct
  source 1..80: mol_type = other DNA
ctgttacagagacataagctacaacccacttacagacaaaggtataggaaacatgatatggctagatgtaataacaaaat

SEQ ID NO: 173048 - DNA, 80 bp, synthetic construct
  source 1..80: mol_type = other DNA
gaccgagtaccaggcctgcgccgcctttaacaggcctccccgctcggacctcaccagaccccctcactacccctacttcc

SEQ ID NO: 173049 - DNA, 80 bp, synthetic construct
  source 1..80: mol_type = other DNA
tagtctcaagttatgtccctaaatttgcgttgtctgatgggttagtgtatgcaaattgcctcaatactatctgccgatgt

SEQ ID NO: 173050 - DNA, 80 bp, synthetic construct
  source 1..80: mol_type = other DNA
ataaggcctttatcttcttgccattggatagtgtcgggggttgccataggcttcgacctcagttttaggccttccggact

SEQ ID NO: 173051 - DNA, 80 bp, synthetic construct
  source 1..80: mol_type = other DNA
cactcggcttgataagctacgtggccgtttgcgccgaaaacacggttaccaccaactgtctcgtgaaaacagaaaatacc

SEQ ID NO: 173052 - DNA, 80 bp, synthetic construct
  source 1..80: mol_type = other DNA
gggtctggccaatttttaacaacagatgatagacaatcacccagtgcaatgccaaattatgaaccaaccccactaataca

SEQ ID NO: 173053 - DNA, 80 bp, synthetic construct
  source 1..80: mol_type = other DNA
ctacatcccaacgtgtgattgtactgatgccacatattattgtagacacaaagatagatattacccaatcaaagtgacaa

SEQ ID NO: 173054 - DNA, 80 bp, synthetic construct
  source 1..80: mol_type = other DNA
ggttccaagaagcagtccaagcagcagcggtggctacgggagagactcttgcgagcacagggaggaccttatgggaggct

SEQ ID NO: 173055 - DNA, 80 bp, synthetic construct
  source 1..80: mol_type = other DNA
ttcaggagttgccacaatagcattagcaatatagtttacaggttgtttcaagagctagcaaggataccatctagaattag

SEQ ID NO: 173056 - DNA, 80 bp, synthetic construct
  source 1..80: mol_type = other DNA
cccaacatgtcgtttgctcaagtacaattatccaacacaaccaggtcagtgcggtgctgtggtcgccaatgtaggtaaca

SEQ ID NO: 173057 - DNA, 80 bp, synthetic construct
  source 1..80: mol_type = other DNA
tttcacaaaccggtgtttatggtttcaacacactgaatgacatgggtagactttttattagacatgttaacgagcaaagc

SEQ ID NO: 173058 - DNA, 80 bp, synthetic construct
  source 1..80: mol_type = other DNA
ggatccattctacaattgtaatggtacactatttggtaacctcacaatcttccctcatcaaatcattaatttgaggacca

SEQ ID NO: 173059 - DNA, 80 bp, synthetic construct
  source 1..80: mol_type = other DNA
agacagcgaagcccaaaccgagacagaagccccctcggaggaagaagaaacgggctcggtacagcagcagctccaacagc

SEQ ID NO: 173060 - DNA, 80 bp, synthetic construct
  source 1..80: mol_type = other DNA
gatccctgtacagatgtaaataaaatgcttttatttaaaactggtcccaatgttcttcgggaatcatggggtgtggacgg

SEQ ID NO: 173061 - DNA, 80 bp, synthetic construct
  source 1..80: mol_type = other DNA
ggggacgtggtggaggcaattgagagcgcagttgctagggtagcagacacaattagcagtggtccaacgaactcccaagc

SEQ ID NO: 173062 - DNA, 80 bp, synthetic construct
  source 1..80: mol_type = other DNA
aaccactagacgactcaacatactttcacaccccagacggtttatggggagacccaatatacgtttacccagaacatgga

SEQ ID NO: 173063 - DNA, 80 bp, synthetic construct
  source 1..80: mol_type = other DNA
ggaccccaggagactgggccacagagtataccatgtgcagcatatttgatagaccacccagaaatgaccttactagcacc

SEQ ID NO: 173064 - DNA, 80 bp, synthetic construct
  source 1..80: mol_type = other DNA
actttgaacaggctcttttttcaaaatacgtggggaacacgcttcatgaacccgacgagtttgtcaaggaggcggcctta

SEQ ID NO: 173065 - DNA, 80 bp, synthetic construct
  source 1..80: mol_type = other DNA
aagcagcgcagcgtgtacaaaatggcggctgagcacttccggcttgcacaaaatggccgccaatttcttccgggttaaag

SEQ ID NO: 173066 - DNA, 80 bp, synthetic construct
  source 1..80: mol_type = other DNA
atatcataaggcaaagcatattcgagcatggtgtcctagagcaccaagggctgtgccttatacacatgctcacgtcacca

SEQ ID NO: 173067 - DNA, 80 bp, synthetic construct
  source 1..80: mol_type = other DNA
ttttacaccttggcaagtgtgacctgggatgagacctcaaagggatggtggtggaagttacctgattgcctcaaggatat

SEQ ID NO: 173068 - DNA, 80 bp, synthetic construct
  source 1..80: mol_type = other DNA
tcaaactcgggggagaacgtctccatatccgggagttgttggacgcggcgcttagccagggtccctatcctcctgactat

SEQ ID NO: 173069 - DNA, 80 bp, synthetic construct
  source 1..80: mol_type = other DNA
tatgacaccattggcatagttgacacacaagaaacttacaattcagttaataataaaagtgagtctgacacatacactaa

SEQ ID NO: 173070 - DNA, 80 bp, synthetic construct
  source 1..80: mol_type = other DNA
agcatgttatctacatggacatcacaaatatataacaagaaaacagacagcaactatgggtatgcctcctatgactttag

SEQ ID NO: 173071 - DNA, 80 bp, synthetic construct
  source 1..80: mol_type = other DNA
gctcgcgagcatatttatccacacctccttgacttgtcaacaatcgcctcgttttggccaccaaaataaaccttacgcca

SEQ ID NO: 173072 - DNA, 80 bp, synthetic construct
  source 1..80: mol_type = other DNA
acctggaatgcagggtgcgggcgtggtcccctggaccccagccccgccgatccctcccccagggcgtacccggcttgcct

SEQ ID NO: 173073 - DNA, 80 bp, synthetic construct
  source 1..80: mol_type = other DNA
atggtcacgagatacgtggaccagacagtggacatgacagggggaacaacaaccctgatgaggatccattatttaactgc

SEQ ID NO: 173074 - DNA, 80 bp, synthetic construct
  source 1..80: mol_type = other DNA
acccctgggtggatcttgagcttggcctgggcaatataggccatgggggacatcttgatgtgcatggcggtcattccact

SEQ ID NO: 173075 - DNA, 80 bp, synthetic construct
  source 1..80: mol_type = other DNA
acaacctcacgagcactacggggtgatatggcaactctctcaaatcaaagcccatatgaccaccaacctaacagacagct

SEQ ID NO: 173076 - DNA, 80 bp, synthetic construct
  source 1..80: mol_type = other DNA
gtgctgtgtattccctggattagtcagacacattaccggtatgtgacttctgatgagtactcagctggaggcttcatcac

SEQ ID NO: 173077 - DNA, 80 bp, synthetic construct
  source 1..80: mol_type = other DNA
tcagtaacgacatttcaggtgttgaaagagttctattacaacagcataggcgttggaaccgccccagaaaccacatatga

SEQ ID NO: 173078 - DNA, 80 bp, synthetic construct
  source 1..80: mol_type = other DNA
tgtaaagaaagaactcattaccgggttaggactgtccggcgagctaattgaaccaccttttcatgagttcgcctatgaaa

SEQ ID NO: 173079 - DNA, 80 bp, synthetic construct
  source 1..80: mol_type = other DNA
atagaggcagaagtcatcccacaggaatcaggaaggcaaacagcactcttcctattaaaactggccagtagatggccaat

SEQ ID NO: 173080 - DNA, 80 bp, synthetic construct
  source 1..80: mol_type = other DNA
caggggatcacagactacatcacacaattaggcaacgcttttggagatggttttacaaattcaataaaacaaacattgat

SEQ ID NO: 173081 - DNA, 80 bp, synthetic construct
  source 1..80: mol_type = other DNA
gaatttaacaaagggtgaggcagctcacaagtttgagccaaccaaaactaccggccaacacacagtgcagtcgattgtgt

SEQ ID NO: 173082 - DNA, 80 bp, synthetic construct
  source 1..80: mol_type = other DNA
tgactgccaggagctgccacccggtttaataattctgagtccgggcaccgtccctggcccccttggagtccagagtctgg

SEQ ID NO: 173083 - DNA, 80 bp, synthetic construct
  source 1..80: mol_type = other DNA
tgtggagtcttgtgcttagcatcggcgtgcaatgatttctctgtgagaatgttgagagacacaccttttatcgagcaaaa

SEQ ID NO: 173084 - DNA, 80 bp, synthetic construct
  source 1..80: mol_type = other DNA
ttcagcagaagggggagatgtttcggtgctttatgacaagacgcacccaggagaaaatggcattgacttaagtgtcacag

SEQ ID NO: 173085 - DNA, 80 bp, synthetic construct
  source 1..80: mol_type = other DNA
gggattgatgaggttattgataaagtgatcaacaacgcactacaactgtcacaacctacccgacccgccactgcatcgga

SEQ ID NO: 173086 - DNA, 80 bp, synthetic construct
  source 1..80: mol_type = other DNA
ccagcaactcaactagcatccctgcgttgaccgctgttgagacaggccacacatcacaggtggagcccagcgacacaatg

SEQ ID NO: 173087 - DNA, 80 bp, synthetic construct
  source 1..80: mol_type = other DNA
tagtactcagacagtggcaacctgacgttatcagacactgtaagataacaggacggatgcccctcattatctgtggaaag

SEQ ID NO: 173088 - DNA, 80 bp, synthetic construct
  source 1..80: mol_type = other DNA
ctgagggcactttagtgataaattcaaataacttcaaggataccatattggaagtgggtcagttaacctttgcaggctta

SEQ ID NO: 173089 - DNA, 80 bp, synthetic construct
  source 1..80: mol_type = other DNA
ccaacacaaagcaaatgcatgcttaaagacctgccactattcatactattctatggctacatagactgggtacaaaagag

SEQ ID NO: 173090 - DNA, 80 bp, synthetic construct
  source 1..80: mol_type = other DNA
gaagattaccttaaaagagatggcacaaatcagaaggaaatgtgaattgttcacatatttgagatttgattcagaaataa

SEQ ID NO: 173091 - DNA, 80 bp, synthetic construct
  source 1..80: mol_type = other DNA
gggctgcaaattcagattctacagacaccccacctgtgactttatagtacactacaacctggttccccctctaaagatga

SEQ ID NO: 173092 - DNA, 80 bp, synthetic construct
  source 1..80: mol_type = other DNA
gctatgagctggagcagacccgttcacaatgcgccgggaatcgagcgcaactggtacgagtcctgttacagatctcacgc

SEQ ID NO: 173093 - DNA, 80 bp, synthetic construct
  source 1..80: mol_type = other DNA
caattcgctgcatttgcaccaggaggcgctggaggccttggatcctccgccgccgcgcgtcgaggagaacgaccttgtca

SEQ ID NO: 173094 - DNA, 80 bp, synthetic construct
  source 1..80: mol_type = other DNA
atcactcttggtaactccaccattacaacacaagaagctgcaaacgcagtggtttgttatgctgagtggcctgaatatct

SEQ ID NO: 173095 - DNA, 80 bp, synthetic construct
  source 1..80: mol_type = other DNA
ttcctaaaaagacatttcaaaccagatagtgaatttccatttcttatacatccagtaatgccaatgtcagacatttatga

SEQ ID NO: 173096 - DNA, 80 bp, synthetic construct
  source 1..80: mol_type = other DNA
ccggactcaagagatcaacagtcccgggggcagagaaggggtgatgaaaacagaggctggatgcagcgcatcaggcgaag

SEQ ID NO: 173097 - DNA, 80 bp, synthetic construct
  source 1..80: mol_type = other DNA
atcaccctgatatggcttgatcagaatgaaaaattcagagacatccgcagatttttacctgaaacaatacaagaatggga

SEQ ID NO: 173098 - DNA, 80 bp, synthetic construct
  source 1..80: mol_type = other DNA
agtgcactattttgtgtttcatctcagcatgtaacgatttctcagtaagactcttaaaagacacacccttcatatcccaa

SEQ ID NO: 173099 - DNA, 80 bp, synthetic construct
  source 1..80: mol_type = other DNA
caggcccgagcctctccctcgcggagaggggcctcttcgagccctcaagtccagtcccaccgagacccgagtggcccgga

SEQ ID NO: 173100 - DNA, 80 bp, synthetic construct
  source 1..80: mol_type = other DNA
gcctctggggagactatatatacaaaaagaacgtagtagagaactttatattaaatgcaaacaactacttcaacgccaga

SEQ ID NO: 173101 - DNA, 80 bp, synthetic construct
  source 1..80: mol_type = other DNA
ggaaacctcatgctcatcccctctctctctgtcgactctgctatccccttcgacttccagctctcttgctgggtcgcctt

SEQ ID NO: 173102 - DNA, 80 bp, synthetic construct
  source 1..80: mol_type = other DNA
aatgacccaaacgagagggagactgttgcaaacacctcctcaagtggtcaagccagctcaacactaattccatcattgac

SEQ ID NO: 173103 - DNA, 80 bp, synthetic construct
  source 1..80: mol_type = other DNA
agtacgagacaaagagaaccgaggccgtgggagacgtccagcgaaagcgaagcagaagtccaagagcaagaggagcagga

SEQ ID NO: 173104 - DNA, 80 bp, synthetic construct
  source 1..80: mol_type = other DNA
actgaggatagtgaaatcaaaatctttgccaagccaaaacatacaacagcttggatcccacgaccacccagagctaccca

SEQ ID NO: 173105 - DNA, 80 bp, synthetic construct
  source 1..80: mol_type = other DNA
acatacccggtgccaatacgctccctcgagcaatacaagttatcgacccgaaagtcctcggcccaggttacagcttcagg

SEQ ID NO: 173106 - DNA, 80 bp, synthetic construct
  source 1..80: mol_type = other DNA
ggtcccactactcacagacgggggtgtatggttacaacaccttaaacgacatgggccaattatttgtcaggcacgtgaat

SEQ ID NO: 173107 - DNA, 80 bp, synthetic construct
  source 1..80: mol_type = other DNA
gcagcagctcaagctccagttgttcgagcagaagcaaatcaagtggcagctccaatacatgttcaaacaattagtaaaaa

SEQ ID NO: 173108 - DNA, 80 bp, synthetic construct
  source 1..80: mol_type = other DNA
gtgcacgacatacacttcctgggcggggtctacgtcataatataaagaagtgcacttccgaatggctgagttttccacgc

SEQ ID NO: 173109 - DNA, 80 bp, synthetic construct
  source 1..80: mol_type = other DNA
taggtgagatcctaaactacttcactcattggtctggctccattaaatttaccttcctattttgtggtagcgctatggca

SEQ ID NO: 173110 - DNA, 80 bp, synthetic construct
  source 1..80: mol_type = other DNA
gcaatcaggcaacatactacccagctttagccctaccaaactaatacacatcccaggccagataagaacaatcatggaca

SEQ ID NO: 173111 - DNA, 80 bp, synthetic construct
  source 1..80: mol_type = other DNA
ccgaggactttatgacgcgcgtggccgcgctggctcgcgacgagggtctgcgcgacattttgggtcagcggcacgccgcc

SEQ ID NO: 173112 - DNA, 80 bp, synthetic construct
  source 1..80: mol_type = other DNA
agattatgaaaattacaatgcaaaaacaaagaactttatgacatggcaaattaatttacaggaaatggcacagattagaa

SEQ ID NO: 173113 - DNA, 80 bp, synthetic construct
  source 1..80: mol_type = other DNA
gtttgtaatcatgggagcacaggtttcaagacaaaaagttggttcgcatgacaatgcaataaatgcttcttctggatctg

SEQ ID NO: 173114 - DNA, 80 bp, synthetic construct
  source 1..80: mol_type = other DNA
agtctaaagtcaagacccaggatttttaccaaaggtattctgattgtctagcaaaattcaaaccaattatggctatttgt

SEQ ID NO: 173115 - DNA, 80 bp, synthetic construct
  source 1..80: mol_type = other DNA
ctctatataagccggaggggtgacgaatggtagagttttttctggcccgtccgcggcgagagcgcgagcgaagcgagcga

SEQ ID NO: 173116 - DNA, 80 bp, synthetic construct
  source 1..80: mol_type = other DNA
gcaccaccttccaggtgttgcgcgacaagtataaccacatgataggcttcccctttaactataatccacaagattccagt

SEQ ID NO: 173117 - DNA, 80 bp, synthetic construct
  source 1..80: mol_type = other DNA
gttcgtacgcttcggcaccccagtggcgcgtgaagaaggccgccagacgaaacaagcggtgtccgtagagcgtgcctagg

SEQ ID NO: 173118 - DNA, 80 bp, synthetic construct
  source 1..80: mol_type = other DNA
ccctataccaagaacaggtgaaaggttatccaatggcagatgaaaaggcacagggtgaattatcagttgctattgataag

SEQ ID NO: 173119 - DNA, 80 bp, synthetic construct
  source 1..80: mol_type = other DNA
gaagggccccagggctgaccccggcaaacgtgacgcggggctccggcgtgaccagggctgaccccggcaaacgtgacccg

SEQ ID NO: 173120 - DNA, 80 bp, synthetic construct
  source 1..80: mol_type = other DNA
ttatagggggcgacgaagaaagagacagaccctagttataaaacaatggcaaccggacgttaacagactgtgcagaataa

SEQ ID NO: 173121 - DNA, 80 bp, synthetic construct
  source 1..80: mol_type = other DNA
gattaccctgattgtaacttggccctttccgccaaccagcctgaaactaccataatcaatgttggagatgtagtatcata

SEQ ID NO: 173122 - DNA, 80 bp, synthetic construct
  source 1..80: mol_type = other DNA
cggacggacaagacccccattcctatagacaccctagagatgtacaagttgcagacccgcttaccgtggggcctagatac

SEQ ID NO: 173123 - DNA, 80 bp, synthetic construct
  source 1..80: mol_type = other DNA
gataattaccactaaaaccacacttgaatgtaacttacccagcattcatacaccaagtaaaaccaagttacagcccagtg

SEQ ID NO: 173124 - DNA, 80 bp, synthetic construct
  source 1..80: mol_type = other DNA
agatatgggagtgtttggtcagaatatgtattatcactttcttggaagaagtggatatacagtgcatgtacaatgtaatt

SEQ ID NO: 173125 - DNA, 80 bp, synthetic construct
  source 1..80: mol_type = other DNA
cctaatagcttattcaccacctggtgcgggcgttcccacgactagaaaggaagctatgctaggcacacacatcatttggg

SEQ ID NO: 173126 - DNA, 80 bp, synthetic construct
  source 1..80: mol_type = other DNA
cgatgtccgaccatcgaggaggcggggctaactcggaaaccgacacgataggcagcgtggtcggctccgttggtgtgcgg

SEQ ID NO: 173127 - DNA, 80 bp, synthetic construct
  source 1..80: mol_type = other DNA
tgtaggaattgccaacgcctactcacatttttatgatggatatgcagtggtgccactcaaagattccacacaggattcag

SEQ ID NO: 173128 - DNA, 80 bp, synthetic construct
  source 1..80: mol_type = other DNA
aatagggtattgcagctgggtatatacctataggtatatagaacctagaggaagggaaccctatagtgtaatccctcccc

SEQ ID NO: 173129 - DNA, 80 bp, synthetic construct
  source 1..80: mol_type = other DNA
gtcctagcaaagatgctgggtaccctataattaatgcaccaaccaaaactaagctggagcctagcgcattctttgatgtg

SEQ ID NO: 173130 - DNA, 80 bp, synthetic construct
  source 1..80: mol_type = other DNA
tatcaatcacttttatctacctggaccaataaaatttatcctaaaaaaagagacagcaactttggatatgcatcctatga

SEQ ID NO: 173131 - DNA, 80 bp, synthetic construct
  source 1..80: mol_type = other DNA
atctacaaataataatcagacatatgccccttctggagaaaaagaagacatagtatggtctaactcagactttcaaaact

SEQ ID NO: 173132 - DNA, 80 bp, synthetic construct
  source 1..80: mol_type = other DNA
aatgacgctgtaatcacccatgaccatgagtcggccgcgatacgtagcacgccactgcgcgaacgcgtggatgtgcatgc

SEQ ID NO: 173133 - DNA, 80 bp, synthetic construct
  source 1..80: mol_type = other DNA
caaagcatcctactgccagcggaaaaacacctggtaacaggtgcctctggggccaaaagccaaggtttaacagacccttt

SEQ ID NO: 173134 - DNA, 80 bp, synthetic construct
  source 1..80: mol_type = other DNA
taccacttggctctcattcttatgggcacgttggagctgcctcccggcatctttccgttgccaaagttaaatgagtaggg

SEQ ID NO: 173135 - DNA, 80 bp, synthetic construct
  source 1..80: mol_type = other DNA
tgtgcgggtgctggtggctgggctcccctgggtagggtaaaggggcacgatgtgtgccggctacccggagagtttccagt

SEQ ID NO: 173136 - DNA, 80 bp, synthetic construct
  source 1..80: mol_type = other DNA
actggtatcatggtacccttgtgcgcctgttttatccacccttcccaaacgtaacttagaagctcaaccttaccggtcag

SEQ ID NO: 173137 - DNA, 80 bp, synthetic construct
  source 1..80: mol_type = other DNA
taagagtttcatatgcgagttcggaatcgtaaggtgtagccatgttagcatctctaaaacactgttatctttttccataa

SEQ ID NO: 173138 - DNA, 80 bp, synthetic construct
  source 1..80: mol_type = other DNA
aacatgcacacccgatcagaatcatccattgagaattttctagctcgatctgcgtgtgtttactatctcaactatcaaac

SEQ ID NO: 173139 - DNA, 80 bp, synthetic construct
  source 1..80: mol_type = other DNA
tacatgagattcgacattgagattaccatcgtcattacgagttatcaagaacagggaacgaatcttgatcaggatatgcc

SEQ ID NO: 173140 - DNA, 80 bp, synthetic construct
  source 1..80: mol_type = other DNA
gcagatgggcaggaaacaaaaggagagcagggaaagaccatacaaggaggtgacggaggatttgctgcacctcaattctc

SEQ ID NO: 173141 - DNA, 80 bp, synthetic construct
  source 1..80: mol_type = other DNA
acggggtctgacagttcacggggagaagaaacaagaaataacaaaaaaaaaaagaggacatggactcgccacggtttgtg

SEQ ID NO: 173142 - DNA, 80 bp, synthetic construct
  source 1..80: mol_type = other DNA
taagatttgattcagaggtgactatggtcccatgcattgctggacatggtagtgacataggccatatagttatgcaatac

SEQ ID NO: 173143 - DNA, 80 bp, synthetic construct
  source 1..80: mol_type = other DNA
ctcttcatcagtcgtgcccaagccaggaagaacaagaggtgctgttcaacaatataagatggcttgctataaaagctcgc

SEQ ID NO: 173144 - DNA, 80 bp, synthetic construct
  source 1..80: mol_type = other DNA
tttgtcccacgagaccagacgaaaccctcttgggaaattacccttggttacaaaatgaactggaaatggggtggctctcc

SEQ ID NO: 173145 - DNA, 80 bp, synthetic construct
  source 1..80: mol_type = other DNA
gtggcctgaatacttgccagataatgatgctagtgatgtaaacaagacttccaaacctgacacatctgtatgtagatttt

SEQ ID NO: 173146 - DNA, 80 bp, synthetic construct
  source 1..80: mol_type = other DNA
tcgcaccagccagcacgcaaaataaatgttacatcatgtgcatggtctctgcttgcaatgacttttctgtgcgactgcta

SEQ ID NO: 173147 - DNA, 80 bp, synthetic construct
  source 1..80: mol_type = other DNA
gagcatcttaatagcattcatcctcgctttctcggggctggggggccaccgccacctccgcctgccctaaggagagccct

SEQ ID NO: 173148 - DNA, 80 bp, synthetic construct
  source 1..80: mol_type = other DNA
acgggcctgacacccaagcgcttcatggaactcctcgacagagcgcctctgggccaggagtcggaacccgagatcacaga

SEQ ID NO: 173149 - DNA, 80 bp, synthetic construct
  source 1..80: mol_type = other DNA
tatggctaccctacaaccccctactatacaaacccctgaagcattggagcgcaggttctttttggatatggatgttaaag

SEQ ID NO: 173150 - DNA, 80 bp, synthetic construct
  source 1..80: mol_type = other DNA
ttatgaactcttacgccatgaatggtatgaaaagttttaaatgatatagaatatataaatgtttagtttatagattttat

SEQ ID NO: 173151 - DNA, 80 bp, synthetic construct
  source 1..80: mol_type = other DNA
aggatgagttaattggcagagcgaggatttctccaggggcagggtggaacatcaaggaaacagcatgtttgagcaaatct

SEQ ID NO: 173152 - DNA, 80 bp, synthetic construct
  source 1..80: mol_type = other DNA
gccctaacaacatgatggggacctttgctgtgagagtagtgagtagagtggctagccagctcaaactacagacacgagtg

SEQ ID NO: 173153 - DNA, 80 bp, synthetic construct
  source 1..80: mol_type = other DNA
actagacatgtggttaattacaaaacaaggtctgaaagcaccctggagtcgttctttggtaggtcagcttgtgttaccat

SEQ ID NO: 173154 - DNA, 80 bp, synthetic construct
  source 1..80: mol_type = other DNA
acctcctgcaacaggaccaggagaccaaatatactttcatacaccagatggactgtggggagactctatttactcaaaaa

SEQ ID NO: 173155 - DNA, 80 bp, synthetic construct
  source 1..80: mol_type = other DNA
cggatccgtgaccgccgggcgcgcgctgtcctaccacgttctcgaaaaccacgtggccacgcatgtgctacgcggattgc

SEQ ID NO: 173156 - DNA, 80 bp, synthetic construct
  source 1..80: mol_type = other DNA
tacctcagatttgacatggaggttacatttgttattacaagtaagcaagaccagggaacatcattatctcaagacatgcc

SEQ ID NO: 173157 - DNA, 80 bp, synthetic construct
  source 1..80: mol_type = other DNA
ttccagtcgccgtgcgctttaccaaattttgatgtaactcctcccatccacatcccaggtgaggttactaatatgatgga

SEQ ID NO: 173158 - DNA, 80 bp, synthetic construct
  source 1..80: mol_type = other DNA
tccaggaaaaatttcacaatctccttaaaggcaaccaaattacaacaatcttcaacacatgcctcaaagatgaacttagg

SEQ ID NO: 173159 - DNA, 80 bp, synthetic construct
  source 1..80: mol_type = other DNA
cggccggtggtaatggcttggtcgcgttctcagacatcagggacttgtatgcatatgaggatgaagcaatggagcaaggc

SEQ ID NO: 173160 - DNA, 80 bp, synthetic construct
  source 1..80: mol_type = other DNA
gcctcgcgtaggccccgagcagtggttgttccccgagagaaagccaaagccaggcccctcgtcccaagactgggcgatgg

SEQ ID NO: 173161 - DNA, 80 bp, synthetic construct
  source 1..80: mol_type = other DNA
gtgtgcatgttccaccagctagaggtcatggaagctatatgccaaagcggaccgtttgcatatcacagcgacgaaaaaaa

SEQ ID NO: 173162 - DNA, 80 bp, synthetic construct
  source 1..80: mol_type = other DNA
ggattatatctgctatggttataattattagaaattcatcagacccccaaactataatagctacactcacactaattgga

SEQ ID NO: 173163 - DNA, 80 bp, synthetic construct
  source 1..80: mol_type = other DNA
gagtggttccaaacatacccaaaaggctccagcactgactgcaaatgaaactggagcaacaatgcccactaccccatcag

SEQ ID NO: 173164 - DNA, 80 bp, synthetic construct
  source 1..80: mol_type = other DNA
gcctgcctgacactaaggccagtggcccagtgcattccaaagaagtgcccgcacttactgcggttgagactggagccacc

SEQ ID NO: 173165 - DNA, 80 bp, synthetic construct
  source 1..80: mol_type = other DNA
accagcatatacacaacccaaattacaaaacaagcaacggggttccagataatagagttaagcttagggaaacacttact

SEQ ID NO: 173166 - DNA, 80 bp, synthetic construct
  source 1..80: mol_type = other DNA
caaaccaactaatgaaatattacaaaaggccaacgagtggttctggcagaatctaatgcacgaaaacgacttacattcca

SEQ ID NO: 173167 - DNA, 80 bp, synthetic construct
  source 1..80: mol_type = other DNA
aaacaaagctgtctacgtggctggttacaagatctgcaattaccacctagcaacgcaggatgacatgaacaatgcagtcg

SEQ ID NO: 173168 - DNA, 80 bp, synthetic construct
  source 1..80: mol_type = other DNA
ggtaaatggctatgcagactttgcagagtctgaactaggctcagaagtgcttgctgtatatgtatgctgcataatatgtc

SEQ ID NO: 173169 - DNA, 80 bp, synthetic construct
  source 1..80: mol_type = other DNA
accaagtctacacccagcaaaccttattaacagcagaaagagaataatactacaaagttttaaaactaaaccaaaaggca

SEQ ID NO: 173170 - DNA, 80 bp, synthetic construct
  source 1..80: mol_type = other DNA
gagagggttatctatccttagaaagaagtatctgaaaccgacagacaacatcatcttttcagtcgggtctactatctacc

SEQ ID NO: 173171 - DNA, 80 bp, synthetic construct
  source 1..80: mol_type = other DNA
tcgcgccgtggccgaactcctggacctgacctaccagcggctcatctactgggcctgcacgctcatgccctacgtgttgt

SEQ ID NO: 173172 - DNA, 80 bp, synthetic construct
  source 1..80: mol_type = other DNA
ggatgattacccagattgtaatttggctctctccgctaatcaaccagagaccaccataattaacgtaggggatgtagtgt

SEQ ID NO: 173173 - DNA, 80 bp, synthetic construct
  source 1..80: mol_type = other DNA
gagttgaggagtcctgagaaaattaagatgggtaaaactagatcaatagaagcagccagcatgaatgacaccgtgcattt

SEQ ID NO: 173174 - DNA, 80 bp, synthetic construct
  source 1..80: mol_type = other DNA
ttacgggttgaccatcacaccagcagacaaaagcagtacattccaaaaagttacctgggatagtgtcacattcctcaaaa

SEQ ID NO: 173175 - DNA, 80 bp, synthetic construct
  source 1..80: mol_type = other DNA
tcatttcttaaagagaaaatatgtcaatggttggggatacctagacccccaactcgacagggggaatcctggctcaagaa

SEQ ID NO: 173176 - DNA, 80 bp, synthetic construct
  source 1..80: mol_type = other DNA
gaaagaaatttttgaatcaatcagatggactagggatccaaagaacacacaagaccacgtgtattcgttgtgtcttctga

SEQ ID NO: 173177 - DNA, 80 bp, synthetic construct
  source 1..80: mol_type = other DNA
aaagaagcaaatgcagcatactttacagcagcaaaacaaaacttaccaaattggagaccaccagaaacaacataccctgc

SEQ ID NO: 173178 - DNA, 80 bp, synthetic construct
  source 1..80: mol_type = other DNA
atcacacaccgtccacccaactgcactgggcgcccttgagattggagcatcatccacagcaacacctgaaaccactatag

SEQ ID NO: 173179 - DNA, 80 bp, synthetic construct
  source 1..80: mol_type = other DNA
gtccggtttaccgggtgtgagagtccaaaacccacggcggaaaaagtggatgcggcctagcggctgtcggtgttccaaat

SEQ ID NO: 173180 - DNA, 80 bp, synthetic construct
  source 1..80: mol_type = other DNA
tggatggaacggatatcattactacacaaacacatatgaaatactcaattatttacaccataaatagcaccaattatatt

SEQ ID NO: 173181 - DNA, 80 bp, synthetic construct
  source 1..80: mol_type = other DNA
ggagtgggtgtccaacaaaatctcaaaatttattgactggttgagggaaagaatcatcccacaagccagggacaagcttg

SEQ ID NO: 173182 - DNA, 80 bp, synthetic construct
  source 1..80: mol_type = other DNA
cgttgtttagccgtctcgaagagtatctgcactcgagaaagtagcgttgcgatttgcagtccgctccggtgtcgttcacc

SEQ ID NO: 173183 - DNA, 80 bp, synthetic construct
  source 1..80: mol_type = other DNA
ggaatttatgatagaatctgcgttgttccaacgcactctcaaccagaaaatgaagttctccttaatggatatagtattaa

SEQ ID NO: 173184 - DNA, 80 bp, synthetic construct
  source 1..80: mol_type = other DNA
actaccccagatatctacactttagcaggttatgtaacatgttggtaccagacaaatcttgttgtggcgccaaacacacc

SEQ ID NO: 173185 - DNA, 80 bp, synthetic construct
  source 1..80: mol_type = other DNA
agagggcaacattatctggttccagtacctcacaaaacccactacacagtttatagagacccaagccaaatgcaccatta

SEQ ID NO: 173186 - DNA, 80 bp, synthetic construct
  source 1..80: mol_type = other DNA
gtcaaccttaattgaacaaatggaagcttttattgaacctaaacctagtgttttcaagtgttttgccaataagattggtt

SEQ ID NO: 173187 - DNA, 80 bp, synthetic construct
  source 1..80: mol_type = other DNA
aatttaattttctatttggtggtaacccaactcctgaacagacgattaaggacccctgtcaacaacccaccttcgaaatg

SEQ ID NO: 173188 - DNA, 80 bp, synthetic construct
  source 1..80: mol_type = other DNA
attaaataacaatgaaaacacatataaccctagcggccatacagaaaagatgacatggacacaaagcaattactcgtcat

SEQ ID NO: 173189 - DNA, 80 bp, synthetic construct
  source 1..80: mol_type = other DNA
tgtccaccggccttttatactgagcgtttaggttttgtttatgtagcaagcacaaaaggcacacacgagtgatgcaaaag

SEQ ID NO: 173190 - DNA, 80 bp, synthetic construct
  source 1..80: mol_type = other DNA
atacctgagaccattgaagaatggcatcatattagattagtcacaaatgtaagtaagtttcccatgttctttgcggatgt

SEQ ID NO: 173191 - DNA, 80 bp, synthetic construct
  source 1..80: mol_type = other DNA
atattccactcttatttttaaattaatgtgtcccaattagaaacccaagcgcagaaattagttgagaggctagtgtttta

SEQ ID NO: 173192 - DNA, 80 bp, synthetic construct
  source 1..80: mol_type = other DNA
aaacccagcaggtagtacaaatcaaaaacaagacaaactatttaatgattggagaataaacttgtctagtcttgtacagt

SEQ ID NO: 173193 - DNA, 80 bp, synthetic construct
  source 1..80: mol_type = other DNA
ccccccccccgcgcatgcgtgggtccccccccccacgggaggctccgcccccccggcccgcccgccaaagtacgtcacta

SEQ ID NO: 173194 - DNA, 80 bp, synthetic construct
  source 1..80: mol_type = other DNA
gcgactcggagagcagctccagcagctctgggtccagctcgccaaaacccagagcaatacgcacctaaaccccctattat

SEQ ID NO: 173195 - DNA, 80 bp, synthetic construct
  source 1..80: mol_type = other DNA
gacatccgttctgctcaccactaactgccaacccttgtgtaactttccaagtgttgaaagacatgtacaatgctgtaata

SEQ ID NO: 173196 - DNA, 80 bp, synthetic construct
  source 1..80: mol_type = other DNA
ttcatcatagacttactaagtgcttctaaagatcctaaagtaattgagttttgtgagagggaaggatggataaaacagtc

SEQ ID NO: 173197 - DNA, 80 bp, synthetic construct
  source 1..80: mol_type = other DNA
aagattcataccagaaaatgtacaagagtggcaacatacacgactggcaaccaatgtccccaaatttccaatgtactttg

SEQ ID NO: 173198 - DNA, 80 bp, synthetic construct
  source 1..80: mol_type = other DNA
tcaaatcaaaaccaatgcaatgacacttggtactatggtaaaacttatacaaatcaaatagttcaggcagccaaaaaaat

SEQ ID NO: 173199 - DNA, 80 bp, synthetic construct
  source 1..80: mol_type = other DNA
tccagaacgccgtaaatattatgtggaatagggatttgatagttgtcgagtccagagctcaaggcacagactcaattgct

SEQ ID NO: 173200 - DNA, 80 bp, synthetic construct
  source 1..80: mol_type = other DNA
gcaggcaaatccagagatactacgtacacttcctggggtggagcttcgccgagatataagaccgtgcacttccgaatggc

SEQ ID NO: 173201 - DNA, 80 bp, synthetic construct
  source 1..80: mol_type = other DNA
taatgacagcaccatcactacacccaggaaacatgatgatatcaaagagaaaaatagtaatacccagtctagagaccaga

SEQ ID NO: 173202 - DNA, 80 bp, synthetic construct
  source 1..80: mol_type = other DNA
gcagtaaatatggattaaccattacaccagctgacaaatctgaaactttcaagaagcttgattacagtaatgttaccttt

SEQ ID NO: 173203 - DNA, 80 bp, synthetic construct
  source 1..80: mol_type = other DNA
taaatctgcaggaaatggcacaaattagaagaaagtttgaaatgtttacatataccagatttgattcagaaattactcta

SEQ ID NO: 173204 - DNA, 80 bp, synthetic construct
  source 1..80: mol_type = other DNA
atcgccacgtaatgacatgtgtttcgaatgcaacgagacatcccttacattgtataacctaaccacgaacaacgctggaa

SEQ ID NO: 173205 - DNA, 80 bp, synthetic construct
  source 1..80: mol_type = other DNA
gaaattgatggatattggactaccaactgctttctggaatgataatagaaaaccagcttatggacagtcacggtattttg

SEQ ID NO: 173206 - DNA, 80 bp, synthetic construct
  source 1..80: mol_type = other DNA
tggcctaaacagtgtttttaaacgcaccctattaggggaaatcctgaactattacgcgcattggtcagggagtgtcaagt

SEQ ID NO: 173207 - DNA, 80 bp, synthetic construct
  source 1..80: mol_type = other DNA
gaggaggcttgctcattgaccccgccccactcagcccgctcaaaatttggctatggagcggcagatgttcggagcttttc

SEQ ID NO: 173208 - DNA, 80 bp, synthetic construct
  source 1..80: mol_type = other DNA
atgagcaccatgatgttcaccctgcagggtctctacgaggagtacgaaaagcaccacaacagctggtccaggagcaacct

SEQ ID NO: 173209 - DNA, 80 bp, synthetic construct
  source 1..80: mol_type = other DNA
gaaccagtagctagtgaaactgcaacttcctcatttattgacagattcttaaagaaagccattcctgacactcctactag

SEQ ID NO: 173210 - DNA, 80 bp, synthetic construct
  source 1..80: mol_type = other DNA
cgccgcttcaggcgcagacgcagacgaagggggcgacccagatacagggggcgacgcaaaaagagacagactcttgttat

SEQ ID NO: 173211 - DNA, 80 bp, synthetic construct
  source 1..80: mol_type = other DNA
cacgccccttaccccgaagcaccttggcccccaccggcataaagctgggcaaaaagagtgggttaaaaccaaaggcgagt

SEQ ID NO: 173212 - DNA, 80 bp, synthetic construct
  source 1..80: mol_type = other DNA
gtctacctctaaaagtcaccaagcactccgagcgaagcgaggagtgcgaccctcctgcccggtagcaacttcctcggggt

SEQ ID NO: 173213 - DNA, 80 bp, synthetic construct
  source 1..80: mol_type = other DNA
gtaccgtgcgcagggctattaacagtgctacgagtgtcgaatctgcagccaacaccgtcccgagctcacatcgattggag

SEQ ID NO: 173214 - DNA, 80 bp, synthetic construct
  source 1..80: mol_type = other DNA
aaggtttttctgcacaattgaggaaacaatattttgtagaaaaacagggggcaatcgttaacaaaagaaatgttaaagag

SEQ ID NO: 173215 - DNA, 80 bp, synthetic construct
  source 1..80: mol_type = other DNA
ggcaattgagggcgcagttgctagagtggcggacacaattagtagtggcccaacaaactctcaagcagtcccagcactca

SEQ ID NO: 173216 - DNA, 80 bp, synthetic construct
  source 1..80: mol_type = other DNA
cagacaaagatagtggtccctgcctccacgccaactcaaatggacattcttgcatttgtatcagcgtgcaacgacttctc

SEQ ID NO: 173217 - DNA, 80 bp, synthetic construct
  source 1..80: mol_type = other DNA
attgttaccatttggtaccagaccaactttgtcgtaccgccagacaccccctctgcagctcacatcatagcccttggagc

SEQ ID NO: 173218 - DNA, 80 bp, synthetic construct
  source 1..80: mol_type = other DNA
gggtgtccgtgtttcctttatttcctactgaatgcttatggtgacaattgttttgatcagttgttgccattgctcgcatt

SEQ ID NO: 173219 - DNA, 80 bp, synthetic construct
  source 1..80: mol_type = other DNA
gtcgttcagactcgaagtaggagtgagtccaccgtagaatccttcttcgccagaggggcttgtgttaccatcatgtcagt

SEQ ID NO: 173220 - DNA, 80 bp, synthetic construct
  source 1..80: mol_type = other DNA
gcccggaagtcaatcctcccacgtggcctgtcacgtgacgtgtacgtcacagtcgccattttcttttacaaaatggccga

SEQ ID NO: 173221 - DNA, 80 bp, synthetic construct
  source 1..80: mol_type = other DNA
cgcctccccaatccaggtcctgaccgttctgtccgtcacttcccagatccgcgctttctctgtccttcctgtgcgacggt

SEQ ID NO: 173222 - DNA, 80 bp, synthetic construct
  source 1..80: mol_type = other DNA
aagagaccagggaacaagacagttctgccaataacactcatgtcagggttagtgtttcactctcagccaattaataaaag

SEQ ID NO: 173223 - DNA, 80 bp, synthetic construct
  source 1..80: mol_type = other DNA
atgaggctagtctgagtgggggtgagcatgccaaaacattttcaagtacaaagactaatggcaacaatacagtgcaagct

SEQ ID NO: 173224 - DNA, 80 bp, synthetic construct
  source 1..80: mol_type = other DNA
aatattgacagagtggtgacagctagtgctctaactagtggtgaaagagctagtacctttcaagcccaagccaacaccaa

SEQ ID NO: 173225 - DNA, 80 bp, synthetic construct
  source 1..80: mol_type = other DNA
aaagtcagggttttgtggaggtgttctgtataaggtgggtcaagtaattggcatacatgtgggtggtaatggaagacaag

SEQ ID NO: 173226 - DNA, 80 bp, synthetic construct
  source 1..80: mol_type = other DNA
ttcagcatcgcatacggctttccagtcccccccagcctgaggaacatctacgcggagctgcaccggagtctgccggagtt

SEQ ID NO: 173227 - DNA, 80 bp, synthetic construct
  source 1..80: mol_type = other DNA
gcctccgtgtcgtacggatcgacggccagcatgcaggaggcacgcccgcgcgggttgttggggatcttaaagtaattaac

SEQ ID NO: 173228 - DNA, 80 bp, synthetic construct
  source 1..80: mol_type = other DNA
aacttgaaataacagttataaaactggacagaaatgagaagtttagggacattagaaaatacatacctgaaacagaagat

SEQ ID NO: 173229 - DNA, 80 bp, synthetic construct
  source 1..80: mol_type = other DNA
attcccagtgatcgtgatcaatgaatttcaggctgacctgctcacattgcagacactcatgaggacatatatggatctag

SEQ ID NO: 173230 - DNA, 80 bp, synthetic construct
  source 1..80: mol_type = other DNA
atagttatacagaagcaggttatgtatccttgtggtaccaaactgatttcatcccttcagttaacgcaggcacaggtacc

SEQ ID NO: 173231 - DNA, 80 bp, synthetic construct
  source 1..80: mol_type = other DNA
gtagtgtgggatgtgggattacagtcaactatttcaatgattgtgccatgggttagcgctagccattttagaaacacaac

SEQ ID NO: 173232 - DNA, 80 bp, synthetic construct
  source 1..80: mol_type = other DNA
ctaaaagaaaaacttataccagctgtccaatcaaagaaacagactctcactgagtgcaagaagatccctctctaccaaga

SEQ ID NO: 173233 - DNA, 80 bp, synthetic construct
  source 1..80: mol_type = other DNA
atgatcacacgcaaccatcaaaaacatatgctcctccgcactaacctcgagcgcctcacccattccacaaaaaatatggc

SEQ ID NO: 173234 - DNA, 80 bp, synthetic construct
  source 1..80: mol_type = other DNA
aaattagaaacaaatacctaactgccaccagaacggcactgccagcactactaacactaggaaacgaacttctggaatat

SEQ ID NO: 173235 - DNA, 80 bp, synthetic construct
  source 1..80: mol_type = other DNA
gtacggtttcaacactctcaacaacatggggaagttatatttcagacatgtgaacgacaagacaattagcccaatcacaa

SEQ ID NO: 173236 - DNA, 80 bp, synthetic construct
  source 1..80: mol_type = other DNA
cataacatatttcaatgctaatccaggtgaggcaggcggcaagttttcaagcactttcgtaccaactgatgttgctggtg

SEQ ID NO: 173237 - DNA, 80 bp, synthetic construct
  source 1..80: mol_type = other DNA
cgtgtcgtcccacggtcgttgtcagcgggaacgaggcagggctgaggggatctttctgcgggtgtttgcgcggcgactgt

SEQ ID NO: 173238 - DNA, 80 bp, synthetic construct
  source 1..80: mol_type = other DNA
gtaactcagaaagaggcgacaatcaaccagatgaaaaccctttcttcaactgcaatggaactttactagggaatttaacc

SEQ ID NO: 173239 - DNA, 80 bp, synthetic construct
  source 1..80: mol_type = other DNA
cctatagaggagagggagtagatttgaaaagtgggtcaatcacaccgttaactccagtgaacagtataactacatatgga

SEQ ID NO: 173240 - DNA, 80 bp, synthetic construct
  source 1..80: mol_type = other DNA
tttgggggcggacacgcgaccaccaggtggtctcttaaggttctgtacgaggagaacctcagacacttgaacttttggac

SEQ ID NO: 173241 - DNA, 80 bp, synthetic construct
  source 1..80: mol_type = other DNA
ggcaagagacaccaacctacatactcaagttggagctataactcagaacccagttgaaaaatacactgaagcactactta

SEQ ID NO: 173242 - DNA, 80 bp, synthetic construct
  source 1..80: mol_type = other DNA
cattgacacagcgataaagaatgccttaagagtgtcccaaccaccctcgacccagtcaactgaagcaactagtggagtga

SEQ ID NO: 173243 - DNA, 80 bp, synthetic construct
  source 1..80: mol_type = other DNA
ctatgtgaggttaatctgttgcaactgtccgttactgcggctgactttcgccacccctagatttcaccagagagcaacac

SEQ ID NO: 173244 - DNA, 80 bp, synthetic construct
  source 1..80: mol_type = other DNA
caacaggcccgagaccttctgggccaccgggagtagaccccaacccccacatccgtagagccaggcctgccccggccgct

SEQ ID NO: 173245 - DNA, 80 bp, synthetic construct
  source 1..80: mol_type = other DNA
aagtaggggctatcactcaaaatcctgtggaaaaatatgttgatagtgtgttaaatgaagtactagttgttccaaataca

SEQ ID NO: 173246 - DNA, 80 bp, synthetic construct
  source 1..80: mol_type = other DNA
cattatgcacatcagagctgcaaaagcgtatagcaaagctggaaagctcaatgtgagccaagctatggccaccatgtcta

SEQ ID NO: 173247 - DNA, 80 bp, synthetic construct
  source 1..80: mol_type = other DNA
tggaattgactatattgattttagatagaaatgaaaagtttagagatataagagcattcatagcagatgacccagaggga

SEQ ID NO: 173248 - DNA, 80 bp, synthetic construct
  source 1..80: mol_type = other DNA
gaagttgaaatcaccacacgtatatatcacaaagctaaacacattaaagcatggtgtccaagagccccaagagcagtacc

SEQ ID NO: 173249 - DNA, 80 bp, synthetic construct
  source 1..80: mol_type = other DNA
agtggggccagacttcgccataaggcctttatcttcttgccattggatagtgaaggggtcgccatagacttcgacctcaa

SEQ ID NO: 173250 - DNA, 80 bp, synthetic construct
  source 1..80: mol_type = other DNA
catgaatttcaccgtcagccgcagcggctaggttcagccaggcacccacacccccagctaaggccagggctccttcggaa

SEQ ID NO: 173251 - DNA, 80 bp, synthetic construct
  source 1..80: mol_type = other DNA
acgggtgggagacggagttcgcggcctgcaaggccttcgaccgtcctcccagaaactacctttcagacaagcccatctac

SEQ ID NO: 173252 - DNA, 80 bp, synthetic construct
  source 1..80: mol_type = other DNA
ctggcttaactaccaaaacaattattctacaacccatacaaaatttgaatcaaaaaaaacagacaaattaaagttaatac

SEQ ID NO: 173253 - DNA, 80 bp, synthetic construct
  source 1..80: mol_type = other DNA
gtagagttttttctggcccgtccgcggcgagagcgcgagcgaagcgagcgatcgagcgacccgtgggcgtgagccggagg

SEQ ID NO: 173254 - DNA, 80 bp, synthetic construct
  source 1..80: mol_type = other DNA
gcccggcacagaatttgctggctagatgccagtgagcccccgggtacgctgtagaagctgttgaaggaggtctctatcca

SEQ ID NO: 173255 - DNA, 80 bp, synthetic construct
  source 1..80: mol_type = other DNA
tgctcagaggcagatgtaagctacaacaggactaaatccaagtgtctcttacaagacatgcccctgtttttcatgtgcta

SEQ ID NO: 173256 - DNA, 80 bp, synthetic construct
  source 1..80: mol_type = other DNA
gcatggtctcatgcccctgctttcgcctgcacatcccgtcctacatcaccatggacagtaacatccgagcaaccaccaac

SEQ ID NO: 173257 - DNA, 80 bp, synthetic construct
  source 1..80: mol_type = other DNA
atgcagtaatctcccccgctcgccttcggtccattcccagagtaaaacacgtacagtatactgttattgccaagaaatcg

SEQ ID NO: 173258 - DNA, 80 bp, synthetic construct
  source 1..80: mol_type = other DNA
atccacagcagggatacgtattttatgaccagttttttggcaacggcaagtggattgacggacgcgggcacatagaaccc

SEQ ID NO: 173259 - DNA, 80 bp, synthetic construct
  source 1..80: mol_type = other DNA
ggcctcccagatacaacctatcctctcctcctttctaccccaggtgcccttctacattctctgtaaaatttagccttggc

SEQ ID NO: 173260 - DNA, 80 bp, synthetic construct
  source 1..80: mol_type = other DNA
ataccaggcgccgtcgtgataatagtgatgaagaaaactattacgtgacagtgttaaccagagacacgacgacttcaact

SEQ ID NO: 173261 - DNA, 80 bp, synthetic construct
  source 1..80: mol_type = other DNA
ggcaacccacgcactactcataataatctcccaagtgatgacaattggctcaattttgatggtaccttgctaggtaatgc

SEQ ID NO: 173262 - DNA, 80 bp, synthetic construct
  source 1..80: mol_type = other DNA
ctttacacaactacagaaaaaccagctgcagaacttttccaaagttaatgcttttaccgtgcatgaatgccagggtcaaa

SEQ ID NO: 173263 - DNA, 80 bp, synthetic construct
  source 1..80: mol_type = other DNA
gctgctgaaattggggcatcgtcaaatactactgatgagagtatgattgaaacccgatgctttcttaattcacccttttc

SEQ ID NO: 173264 - DNA, 80 bp, synthetic construct
  source 1..80: mol_type = other DNA
gggtttcagttacaaccagggtccagctctgtattgatgaggactctgttgggggagatcttaaactactacacacactg

SEQ ID NO: 173265 - DNA, 80 bp, synthetic construct
  source 1..80: mol_type = other DNA
ctttctcaaatatacaaccaaattcttgaggaagataagagaaggagacaagtagttgatgtcatgtctgcaattttcca

SEQ ID NO: 173266 - DNA, 80 bp, synthetic construct
  source 1..80: mol_type = other DNA
ggtgtcatgtccagctgcaatagttcatctgtgaattactggtttcacaagacaatcggaaactttaagccatattaccc

SEQ ID NO: 173267 - DNA, 80 bp, synthetic construct
  source 1..80: mol_type = other DNA
tggtgttgaaactaaagtggtcaaacaacaggttattacagatggaaatgatgttgacacagaaatcacaattatttggt

SEQ ID NO: 173268 - DNA, 80 bp, synthetic construct
  source 1..80: mol_type = other DNA
aatatccatgattgctaatgttatcagtataatgggggttatatatattatatacaagttgttttgctcattacagggac

SEQ ID NO: 173269 - DNA, 80 bp, synthetic construct
  source 1..80: mol_type = other DNA
cgcaatatctacacaaatttagcaccaattacaataaaattaaagttgaagctactaaggaattagaacagaaacatttc

SEQ ID NO: 173270 - DNA, 80 bp, synthetic construct
  source 1..80: mol_type = other DNA
catgttaggtacacatattgtttgggatcttggactacaatctagtgtaaccctgataataccttggattagtggatccc

SEQ ID NO: 173271 - DNA, 80 bp, synthetic construct
  source 1..80: mol_type = other DNA
tggatttgtccctttaattcatcacactcttcatctaatttacattgtggttctaattagacagcagtatcacaatggga

SEQ ID NO: 173272 - DNA, 80 bp, synthetic construct
  source 1..80: mol_type = other DNA
ccaaaagcaactatgacttagaactggccagatacataggcttcacccttaaatgctacagacatgcaacagtagactat

SEQ ID NO: 173273 - DNA, 80 bp, synthetic construct
  source 1..80: mol_type = other DNA
agctgaagcaactggagatgttagaaaaccagattgccaccatccaccaatcgtgccccagtcaggaacaccaagagatc

SEQ ID NO: 173274 - DNA, 80 bp, synthetic construct
  source 1..80: mol_type = other DNA
ccccacactccctccagaaagtcccgagcggcccccgccgtccactctatcccgctggaggcaatggtcgccagggtttc

SEQ ID NO: 173275 - DNA, 80 bp, synthetic construct
  source 1..80: mol_type = other DNA
ccgaggcccagtttagagtacccgcgcactgtccagatggtacaacaaatacacaaaaaaacgactggactgacatgtgg

SEQ ID NO: 173276 - DNA, 80 bp, synthetic construct
  source 1..80: mol_type = other DNA
tatattatcaccgtgttatctcaacgtcattctaaatacacaaattcccacgtagccactcacgttagttggacagccgc

SEQ ID NO: 173277 - DNA, 80 bp, synthetic construct
  source 1..80: mol_type = other DNA
cagtacttttagaactggaaacaatacaatatatggccaaccaagctacagaccaaactataccaaactaactaagatta

SEQ ID NO: 173278 - DNA, 80 bp, synthetic construct
  source 1..80: mol_type = other DNA
atggagcgaccactgctattccaattaccattacagtggctcctatgtgttcagagttttccgggcttagacaggctgtc

SEQ ID NO: 173279 - DNA, 80 bp, synthetic construct
  source 1..80: mol_type = other DNA
agtcttgatagggtaaattttttgtcatcaaacggtgttatcaccataccagctggtgaacagatgacactttcagcccc

SEQ ID NO: 173280 - DNA, 80 bp, synthetic construct
  source 1..80: mol_type = other DNA
agttaggaattccacacccggcaggattagccaagaagagaagaattactgtgctagacgtaggggatgcttacttttcc

SEQ ID NO: 173281 - DNA, 80 bp, synthetic construct
  source 1..80: mol_type = other DNA
agagccagctgttttgagtgagagggatccacgtttacaaaccaacctcaaggaagcagtaatgtctaagtataaaggaa

SEQ ID NO: 173282 - DNA, 80 bp, synthetic construct
  source 1..80: mol_type = other DNA
agatcaagaagccctcaaagagatccaggaggcgccggtccagcagttcctcctccaacagtaccgacagcagcgaaaac

SEQ ID NO: 173283 - DNA, 80 bp, synthetic construct
  source 1..80: mol_type = other DNA
aggcgctgctgaacgcagcatttgccccaatcttggatccggaagacgtcttgctcaccctgcatctacacctggatccg

SEQ ID NO: 173284 - DNA, 80 bp, synthetic construct
  source 1..80: mol_type = other DNA
ggaaaagagggaacagttgtttaataatgtattatggttggaacagatgtcacaaaagttcgccccactgtatgcagctg

SEQ ID NO: 173285 - DNA, 80 bp, synthetic construct
  source 1..80: mol_type = other DNA
ccgcgtgttacttttctacgtccgtccgagacgtcgccgaggcggtgaaaaagtcctccagccgttgttacgccgacgcg

SEQ ID NO: 173286 - DNA, 80 bp, synthetic construct
  source 1..80: mol_type = other DNA
attaactgagacttgcaatggtatcactgataaactgacatccaaggtggtgaaatggctaatacgtattattagtgctc

SEQ ID NO: 173287 - DNA, 80 bp, synthetic construct
  source 1..80: mol_type = other DNA
tccagtacctcttgtgcaaattgtggtttctgcggcgagcctgctacatccgttctgctcaccacaaacgaacaaccctt

SEQ ID NO: 173288 - DNA, 80 bp, synthetic construct
  source 1..80: mol_type = other DNA
tgacttaaaaacaacagtactatccaaatacaaaggaaatgttcaaattgaaatgagtgaaaacatgcaaatcgctgtgg

SEQ ID NO: 173289 - DNA, 80 bp, synthetic construct
  source 1..80: mol_type = other DNA
taataaatgggtggaagaaacattcaaaacaggaaagttagtaaagtataactttccccagtatgctccttcaatagaca

SEQ ID NO: 173290 - DNA, 80 bp, synthetic construct
  source 1..80: mol_type = other DNA
tattggccctttcatctgacctccagattgacagcacagacactcctggccctgacaacatacccacttgtgactgcact

SEQ ID NO: 173291 - DNA, 80 bp, synthetic construct
  source 1..80: mol_type = other DNA
ttgaaggtgatgtcaaaattttcaaatcaggctggtatgttaaatactgctctagcactgcaaccatgtcgagattgtcc

SEQ ID NO: 173292 - DNA, 80 bp, synthetic construct
  source 1..80: mol_type = other DNA
cctttaaacttggctggaagtaaataaaatgctgtgttttactgtgctacgccgtgggagtttcacttgtcggtgtctac

SEQ ID NO: 173293 - DNA, 80 bp, synthetic construct
  source 1..80: mol_type = other DNA
cactactggtactaccggggtcaatagactattgattcctgtccgagcacagaacaatgtggatcaactttgtgcttcat

SEQ ID NO: 173294 - DNA, 80 bp, synthetic construct
  source 1..80: mol_type = other DNA
cctttagaacagaaggatgctattcacaccccaaattacataaaaaagctgtaacagctgctacagatacagaatacttt

SEQ ID NO: 173295 - DNA, 80 bp, synthetic construct
  source 1..80: mol_type = other DNA
accttaaatgcctgggtaaaattagtagaagagaagaagttcggggcagaagtagtaccaggatttcaggcactatcaga

SEQ ID NO: 173296 - DNA, 80 bp, synthetic construct
  source 1..80: mol_type = other DNA
atatacagcccatactggctaactcccaccagaatcagtctagactggacaacaccctggacatatgtgagatacaaccc

SEQ ID NO: 173297 - DNA, 80 bp, synthetic construct
  source 1..80: mol_type = other DNA
aattgaaaatttcatgggaagagcagcatgcgtgtacatcgcgcaatatgccaccgaaaaagcgaacgatgatctggaca

SEQ ID NO: 173298 - DNA, 80 bp, synthetic construct
  source 1..80: mol_type = other DNA
accacatcgattcgtcgtgccgtagaaccgtagagttttccgaacttttatacacgccggtggcgttagggccgtgtgtg

SEQ ID NO: 173299 - DNA, 80 bp, synthetic construct
  source 1..80: mol_type = other DNA
atgtgggcccggtagcgcaccgagggccccggcgcggcgacgacggcgggtccgagttccagcggtgccttgcggcggca

SEQ ID NO: 173300 - DNA, 80 bp, synthetic construct
  source 1..80: mol_type = other DNA
caatgtcacatttctcaagagaggtttcaaacaggatacaaaatattctttcttggttcacccaacatttccagtcaaag

SEQ ID NO: 173301 - DNA, 80 bp, synthetic construct
  source 1..80: mol_type = other DNA
gcacaagtggtacacccaggcggacctgtgtgccgttagtctggtgcaacttaacctgaccgcagcggatttcacacatc

SEQ ID NO: 173302 - DNA, 80 bp, synthetic construct
  source 1..80: mol_type = other DNA
ctatacagatgccggcttcgtaacctgttggtatcaaacaagcgtcgttgcgccagctgatgcacagagtgcgtgtcaca

SEQ ID NO: 173303 - DNA, 80 bp, synthetic construct
  source 1..80: mol_type = other DNA
acgtcagagaccctgatagaaaacttcctggggagggcggcactggtttgcatgcaaagtatagaatataagaatcatgc

SEQ ID NO: 173304 - DNA, 80 bp, synthetic construct
  source 1..80: mol_type = other DNA
caatgacatgggcactttatgttttagaatagtgacagaggaacacaccaacaaggtcaaaattacaaccagagtttacc

SEQ ID NO: 173305 - DNA, 80 bp, synthetic construct
  source 1..80: mol_type = other DNA
accggtagacgagaactcctgaatcatttttcccagcacccagagcagcagttctatgagaagagctatcagccagacat

SEQ ID NO: 173306 - DNA, 80 bp, synthetic construct
  source 1..80: mol_type = other DNA
cttttgttaaaagtggctacaaaaagaaggacttaatctgcctagaaccattttcagtgagtcccatgctagaaaattta

SEQ ID NO: 173307 - DNA, 80 bp, synthetic construct
  source 1..80: mol_type = other DNA
aagaatggattcccccgcttcacaattccctacacaggtttggcatcagcatattacatgttctatgatgggtacagtaa

SEQ ID NO: 173308 - DNA, 80 bp, synthetic construct
  source 1..80: mol_type = other DNA
aacaaatatctcaaatccgtaaattcgcacaaatcaaccaaacacccgaattccgttttatatccctagaaccggttttt

SEQ ID NO: 173309 - DNA, 80 bp, synthetic construct
  source 1..80: mol_type = other DNA
ggtgaagtaaggagagccatcaggggagaaaggatattgtcctactgcaactacccatcagctcacgacaggcaggtacc

SEQ ID NO: 173310 - DNA, 80 bp, synthetic construct
  source 1..80: mol_type = other DNA
caaaggatatatttggctcacacactcttagccaacatcaagcagttggtctgattggaacaatacttctgacagctggt

SEQ ID NO: 173311 - DNA, 80 bp, synthetic construct
  source 1..80: mol_type = other DNA
gaacatttggcgagcccctctccaaaatgtctcctacagggagagatgttggcttgaggcgtgttacagatctcacgact

SEQ ID NO: 173312 - DNA, 80 bp, synthetic construct
  source 1..80: mol_type = other DNA
gggcaagtaccaagcttacaattcctggcattaaagatagtacaggatgtcagaccccagagaaagaataccacctggaa

SEQ ID NO: 173313 - DNA, 80 bp, synthetic construct
  source 1..80: mol_type = other DNA
aaaacccgacattggttatgaatgatgttatgaacttctcaatgttcaccagcttgtccattacgaaaagcgtattatct

SEQ ID NO: 173314 - DNA, 80 bp, synthetic construct
  source 1..80: mol_type = other DNA
tggacatgtacagggtccctgtttccaccagtgcaaacacagacgaacctatactgtgcttgagcttgtcaccagcctct

SEQ ID NO: 173315 - DNA, 80 bp, synthetic construct
  source 1..80: mol_type = other DNA
aaaaccaaacattgccaagcacccagagttcaatgaagtgatgcctgggcagaagggagcgactttcaaacacccttaca

SEQ ID NO: 173316 - DNA, 80 bp, synthetic construct
  source 1..80: mol_type = other DNA
gggccagctcccagtagaccacgtccccccagacgcgcaggcacagggtctcggtcagggtctcgctctgttgcgccagg

SEQ ID NO: 173317 - DNA, 80 bp, synthetic construct
  source 1..80: mol_type = other DNA
aaggtaaaatagtatcaaaaaccagtgttaaagaatgcaatttgtacagcatacatactccatcaagtactaaattacaa

SEQ ID NO: 173318 - DNA, 80 bp, synthetic construct
  source 1..80: mol_type = other DNA
ttcagtatgacaatgtgccccctatgaaaatggatgaatttacagcccccaacactcatcccagcttgctgctacaggcc

SEQ ID NO: 173319 - DNA, 80 bp, synthetic construct
  source 1..80: mol_type = other DNA
caggttctgctgtaggttgtgacccagagacattttggtcaaaaattccagttatgttagatggtgaatgtataatggct

SEQ ID NO: 173320 - DNA, 80 bp, synthetic construct
  source 1..80: mol_type = other DNA
cccgtccccgtccccgccgcaaaagccttccgtccccgtccccagtcccgcacaaagcgccggcgcccagcacgcccaaa

SEQ ID NO: 173321 - DNA, 80 bp, synthetic construct
  source 1..80: mol_type = other DNA
ttgacctcggcgtgggagaggaagagccgggtccagcccacgtactgcgtggggtccattatggccgccctggtgacgac

SEQ ID NO: 173322 - DNA, 80 bp, synthetic construct
  source 1..80: mol_type = other DNA
acaaaaggtgatgacgtaatcccaacatgtgattgcacccaagctacatattactgtaaacataaaaatagatactatcc

SEQ ID NO: 173323 - DNA, 80 bp, synthetic construct
  source 1..80: mol_type = other DNA
tggcaaaccttatgaccatagtaagttatcacaatggaaagctgcatggacagccttttatactaaaagagacagtaact

SEQ ID NO: 173324 - DNA, 80 bp, synthetic construct
  source 1..80: mol_type = other DNA
ataaaagaagaagctttaaagcattttgaccctcgcttgctaattactcttggcaactacatctatattagatatggaga

SEQ ID NO: 173325 - DNA, 80 bp, synthetic construct
  source 1..80: mol_type = other DNA
accaactggctagtgcagagagaggaaatgtcacggctggttataaactcactcaccctggcgaggctggcagggatgtg

SEQ ID NO: 173326 - DNA, 80 bp, synthetic construct
  source 1..80: mol_type = other DNA
ctcggagaaggcaaaggccaccagcccgttcaccaaaacagtctgctctgtccgcttgtcggcgggattcggggccagct

SEQ ID NO: 173327 - DNA, 80 bp, synthetic construct
  source 1..80: mol_type = other DNA
taaatatggtggtggcacagctcagagaggaactccagaacaggaagagtgtaaaacaaaacctgcatgcaattttccaa

SEQ ID NO: 173328 - DNA, 80 bp, synthetic construct
  source 1..80: mol_type = other DNA
acatcagataacaaactaatagtagctatacccctacaaatggataataccctatttgctactactttactgggtgaagt

SEQ ID NO: 173329 - DNA, 80 bp, synthetic construct
  source 1..80: mol_type = other DNA
atgttaccgatagagagggagattggttccggtccgtttactgctctcacaaatgtttttgtggctgtggcgatcctgtt

SEQ ID NO: 173330 - DNA, 80 bp, synthetic construct
  source 1..80: mol_type = other DNA
tgtgggacctaggtctccaatcatcatgccaccttgttgtgccttggatcagctctcatttcttcaggaggaccagaaag

SEQ ID NO: 173331 - DNA, 80 bp, synthetic construct
  source 1..80: mol_type = other DNA
gccctgggacggcagcagccgccgggacggtgaagtcgtggaaggtagaggcccgtccctcccgaggtcgtggggccgga

SEQ ID NO: 173332 - DNA, 80 bp, synthetic construct
  source 1..80: mol_type = other DNA
ggcatatacagcccatactggataacacctaccagaataagcctagactgggacacaccatggacatatgtcagatacaa

SEQ ID NO: 173333 - DNA, 80 bp, synthetic construct
  source 1..80: mol_type = other DNA
gatctttgccgtgatcatcgccattccacactttatggtggtgaccaaaaaaaacaatcaatgtatgaccgactacgact

SEQ ID NO: 173334 - DNA, 80 bp, synthetic construct
  source 1..80: mol_type = other DNA
cctatggtcactttcctcaaagatgaactgagaaagaaagagaagattacagcaggtaaaacccgagtcattgaagctag

SEQ ID NO: 173335 - DNA, 80 bp, synthetic construct
  source 1..80: mol_type = other DNA
ggtgcatcgaagcctgtgaggtagactattgcatagtctatagaatgattatgatggaaatctatgacaaaatttatcag

SEQ ID NO: 173336 - DNA, 80 bp, synthetic construct
  source 1..80: mol_type = other DNA
atggcctccagtcgggagaggcgccttttccagtctgcgacggtctccttgccccccgcgacccgcttggggtccaacgt

SEQ ID NO: 173337 - DNA, 80 bp, synthetic construct
  source 1..80: mol_type = other DNA
gacaaccccttctatccctggatgccaacaaacaccaaattctctgtaacctttaaactggggtggaaaccctgaataaa

SEQ ID NO: 173338 - DNA, 80 bp, synthetic construct
  source 1..80: mol_type = other DNA
cttccagtcacgcacgtccaagtacagggcatacacacacctggtgaggtgtgccaggaatgcctctatgttggcacatg

SEQ ID NO: 173339 - DNA, 80 bp, synthetic construct
  source 1..80: mol_type = other DNA
ccgtgggagtttcacttgtcggtgtctacctctataagtcactaagccctccgagcgaagcgaggagggcgaccctagac

SEQ ID NO: 173340 - DNA, 80 bp, synthetic construct
  source 1..80: mol_type = other DNA
gtgtgtgtgttgtacctacacattcacatccaggtcaagaagtgctattaaatggacagaaaataaaagttagtgataag

SEQ ID NO: 173341 - DNA, 80 bp, synthetic construct
  source 1..80: mol_type = other DNA
ataaattaatagaagtgacaccaattggtttcgcacctacatcagaaaaaagatactcctctactccggggagacataaa

SEQ ID NO: 173342 - DNA, 80 bp, synthetic construct
  source 1..80: mol_type = other DNA
agaggcatgcactaacccatgctattgtaagaagtgcagtttccattgccagctgtgtttcttgaaaaaagggctcggga

SEQ ID NO: 173343 - DNA, 80 bp, synthetic construct
  source 1..80: mol_type = other DNA
gaacggcgcgtgaccttctccaccgagacccggcagggggtcctgcggtcgaaggtgctggccttgagggcgctgaggac

SEQ ID NO: 173344 - DNA, 80 bp, synthetic construct
  source 1..80: mol_type = other DNA
aagtgagtccaccattgaaagtttctttggacggtccgcttgcatcacaataatgtcagtggagaatttcaacgccactg

SEQ ID NO: 173345 - DNA, 80 bp, synthetic construct
  source 1..80: mol_type = other DNA
gtaaatatggtcacagactcacagtatgtcataggtattttatcaggacagcctacagaatcagaatctgaactagtaca

SEQ ID NO: 173346 - DNA, 80 bp, synthetic construct
  source 1..80: mol_type = other DNA
gtagagaaatacacagaggctatcttaaatgaagtattagtagtcccaaacattaatgcaagcaatccacaaacttcaaa

SEQ ID NO: 173347 - DNA, 80 bp, synthetic construct
  source 1..80: mol_type = other DNA
atataaccccgcagtagcaaactatggctacgtaccatttgcagaccaatttggggcaggtcagatgccagacggatcta

SEQ ID NO: 173348 - DNA, 80 bp, synthetic construct
  source 1..80: mol_type = other DNA
caaaatcgccagaaacaggaggagccaaaggagatcaaccaatagagtccaccagttttgttgcagatagagagcaataa

SEQ ID NO: 173349 - DNA, 80 bp, synthetic construct
  source 1..80: mol_type = other DNA
gccgcttttggagcaggtttcagtactgagatatctagcaggatacaggaactacaggaaaccattcagaatgtcattac

SEQ ID NO: 173350 - DNA, 80 bp, synthetic construct
  source 1..80: mol_type = other DNA
aatttttctgcccagccggctctctagtgactttccagaattcatggggttcacaaatggatttgtcagacccattgtgt

SEQ ID NO: 173351 - DNA, 80 bp, synthetic construct
  source 1..80: mol_type = other DNA
gcccagagaggctgggttgatgctgtagatgtgcctggctctgtccagaatgtagggccagtcaaagttggccacgttgt

SEQ ID NO: 173352 - DNA, 80 bp, synthetic construct
  source 1..80: mol_type = other DNA
cttgacaaaccaaatacaggataagatcacatctaaggttattaagtggttgatacgcatcatcagtgcactaacaatta

SEQ ID NO: 173353 - DNA, 80 bp, synthetic construct
  source 1..80: mol_type = other DNA
ttcagcttccaagcttcccggttggtgcccgtggggcctgggtttcgcctgcttgtgttcaacaccaatcgggtgatcaa

SEQ ID NO: 173354 - DNA, 80 bp, synthetic construct
  source 1..80: mol_type = other DNA
tcactgactccctagaggttctgtttcaaggacctgtttacaaagacctggaaatagatgtccacagtacaccaccacct

SEQ ID NO: 173355 - DNA, 80 bp, synthetic construct
  source 1..80: mol_type = other DNA
ctctgtgacatgacactcctaacgatctttgcctctgcggcggatatgcaatatccgttcggctcaccactaactgacac

SEQ ID NO: 173356 - DNA, 80 bp, synthetic construct
  source 1..80: mol_type = other DNA
aatttactgaatgctgcaatgctgcaaaaggtttggagtggatcagtctgaagattggcagatttatagattggcttaaa

SEQ ID NO: 173357 - DNA, 80 bp, synthetic construct
  source 1..80: mol_type = other DNA
aggctcttcaattaatggacaaaagcactagacaacgctttacaatagatgaaatcaccactcttatcatcaatgagaaa

SEQ ID NO: 173358 - DNA, 80 bp, synthetic construct
  source 1..80: mol_type = other DNA
actacgtgaggcccacggtggcggcagacccccaggcctccatcagctctcttttccccgggctggttttgctggccctg

SEQ ID NO: 173359 - DNA, 80 bp, synthetic construct
  source 1..80: mol_type = other DNA
aatccaaacactcaaaaatagaacgtgacttcaactacacacaatactgtttaaactgcataggcagcatcatactaatc

SEQ ID NO: 173360 - DNA, 80 bp, synthetic construct
  source 1..80: mol_type = other DNA
ctattatagctacatgttcagcatgcccagatctgtctgtgcgaatgctccgtgacacaccaatgaccaagcaaccagag

SEQ ID NO: 173361 - DNA, 80 bp, synthetic construct
  source 1..80: mol_type = other DNA
agatacctgaggccttgagtaggaggttttacttagacatggacctcaaaatcatgcccagttactcaaacaatggttta

SEQ ID NO: 173362 - DNA, 80 bp, synthetic construct
  source 1..80: mol_type = other DNA
aacctgggctggatggtgtttttaaacacacgttactgggggagatcttaaattattatgcccactggtccggaagcata

SEQ ID NO: 173363 - DNA, 80 bp, synthetic construct
  source 1..80: mol_type = other DNA
gagaaacttctaccaacagtgcaacggaaaaaagacacattgctcgaatgcaagaaattaaccctgtatgaagaccagat

SEQ ID NO: 173364 - DNA, 80 bp, synthetic construct
  source 1..80: mol_type = other DNA
tttgtcaacagttattcatactttagaggttcattagttttaagactaagtgtttatgccagtacttttaatagaggccg

SEQ ID NO: 173365 - DNA, 80 bp, synthetic construct
  source 1..80: mol_type = other DNA
cctcttgactatgacgaatattttacacaaccaaaaagacctagaatgtttcctccaacagaatcagcagagggagagtt

SEQ ID NO: 173366 - DNA, 80 bp, synthetic construct
  source 1..80: mol_type = other DNA
catgacccgttgggattgacgcggtttatcatgaggcaactcatgatgtacccgctggtgttgccgttcacctttccgtt

SEQ ID NO: 173367 - DNA, 80 bp, synthetic construct
  source 1..80: mol_type = other DNA
ctcgggcgtgcgacacaacaggccggcgcgcacagcctcctgtcgattacgaatcggcgtcaggtaggcgcgcaggaact

SEQ ID NO: 173368 - DNA, 80 bp, synthetic construct
  source 1..80: mol_type = other DNA
tctatttcaagcccaagcatgtcagggcgtgggtacccaggcctccaagattatgccagtacgagaagcaaggcagtgtc

SEQ ID NO: 173369 - DNA, 80 bp, synthetic construct
  source 1..80: mol_type = other DNA
ttgccagatgcaactgcagagctggagtatattattgtagatcaaaaaaaaagtattacccagtcactgtcactcagccc

SEQ ID NO: 173370 - DNA, 80 bp, synthetic construct
  source 1..80: mol_type = other DNA
gcttactcaaatatgattatccaactcaaccaggtcaatgtggagcagtgatcgcaaatgtgggcaatattgttgccatt

SEQ ID NO: 173371 - DNA, 80 bp, synthetic construct
  source 1..80: mol_type = other DNA
ctcattatgtttagttccatccgtaagcttccaagttgacgtaagatcgtgttttagatttgtattttcaccagccttta

SEQ ID NO: 173372 - DNA, 80 bp, synthetic construct
  source 1..80: mol_type = other DNA
gccgcagagcaagagtaaggagaaggcggtggggcaggagacgggggcgacgcagactgtacagacgcagatacaaaaaa

SEQ ID NO: 173373 - DNA, 80 bp, synthetic construct
  source 1..80: mol_type = other DNA
caacaccatcctgaccgtgcaaaagggcaagcccggctcgcacgcagacattggctgggcgtggtttactgaccacgtaa

SEQ ID NO: 173374 - DNA, 80 bp, synthetic construct
  source 1..80: mol_type = other DNA
gaatcaccaaaaccattgattcaaccgttaacactgttaatgaaaccatcaccaatcctagcaatgcagctggaggtgat

SEQ ID NO: 173375 - DNA, 80 bp, synthetic construct
  source 1..80: mol_type = other DNA
gtcccatacataaactgtgtaccaatggacaatatgctcagacacaacaatgtgagtcttctcatcattccaattgtccc

SEQ ID NO: 173376 - DNA, 80 bp, synthetic construct
  source 1..80: mol_type = other DNA
caggaaaacaaaaaggcactagaagactggctgtacggaacaggcagtctataccacacatttcacacttctgaatactt

SEQ ID NO: 173377 - DNA, 80 bp, synthetic construct
  source 1..80: mol_type = other DNA
cgccccaaaatctctgtataaatatagctgcatttcgctctgtattcagtcgctctgcggagaggctggcagattgagcc

SEQ ID NO: 173378 - DNA, 80 bp, synthetic construct
  source 1..80: mol_type = other DNA
agcgtatgctttgacgagataaaatagaggcgtcccaggagcgcgtcccgtgggaacgtggcgccgttctcgtcgctcac

SEQ ID NO: 173379 - DNA, 80 bp, synthetic construct
  source 1..80: mol_type = other DNA
tatgctaggctttgtcagtgcttgtcccgactttagtgtgagactgctcagggacacgacgcacatcagtcaatcgaaat

SEQ ID NO: 173380 - DNA, 80 bp, synthetic construct
  source 1..80: mol_type = other DNA
aactcattatacaactgaacacagcaaaatgggagctcaggtttcaacacaaaaaactggggcacacgagaccggggtga

SEQ ID NO: 173381 - DNA, 80 bp, synthetic construct
  source 1..80: mol_type = other DNA
gctggtactcctccatgtttataagcccccatagatatcagctacaataccgcacagcatactttgactgcacatacaac

SEQ ID NO: 173382 - DNA, 80 bp, synthetic construct
  source 1..80: mol_type = other DNA
tgcaaacgcccgctaccagcaatatgaataccactgcggctggtactcatccatgttcatatctccacacagataccaac

SEQ ID NO: 173383 - DNA, 80 bp, synthetic construct
  source 1..80: mol_type = other DNA
ggtattgaagacttaatatctgaggttgcaagtaacgcactgaagttgtcacaaccaaaacccaacacacagcagagctt

SEQ ID NO: 173384 - DNA, 80 bp, synthetic construct
  source 1..80: mol_type = other DNA
aagatcccagattagaagtggattttgatgaagccttgttttctaaatacaaagggaatgttgattgccctatgaatgat

SEQ ID NO: 173385 - DNA, 80 bp, synthetic construct
  source 1..80: mol_type = other DNA
ccaaccagagtctacatcgtacatttcctgggcgtggtctacgtcataatataagtaagtgcacttccgaatggctgagt

SEQ ID NO: 173386 - DNA, 80 bp, synthetic construct
  source 1..80: mol_type = other DNA
cacttttgtgatcactagttatcaagagcaaagtacacaactcacccaagacatgccagtcttgacgcaccagattatgt

SEQ ID NO: 173387 - DNA, 80 bp, synthetic construct
  source 1..80: mol_type = other DNA
acaaatatggctactcatcaatcaaagactttggtacattggcagttagaattgttaatgagtttgatccagtgacaata

SEQ ID NO: 173388 - DNA, 80 bp, synthetic construct
  source 1..80: mol_type = other DNA
agagagacggcttcgcacgtactgagaaaacccggagcccatgttctcggcccggtccaggaagaaggagtgctccagca

SEQ ID NO: 173389 - DNA, 80 bp, synthetic construct
  source 1..80: mol_type = other DNA
cgggtgcattttgggtgggttaaatctcagtcccaccacaaaggtggcatcctccggtttgaacatcagacccaacaaag

SEQ ID NO: 173390 - DNA, 80 bp, synthetic construct
  source 1..80: mol_type = other DNA
gccgtattaccaacccattccagtcctggtgatacggtggtcattgctgggaaggaggtgaaggtcaaggacgccaggcg

SEQ ID NO: 173391 - DNA, 80 bp, synthetic construct
  source 1..80: mol_type = other DNA
aaatatgtaaaatttagagtaaaaccaccaaaactaatgcttaacaaatggtacttcactcgtgacttctgtaaggtgcc

SEQ ID NO: 173392 - DNA, 80 bp, synthetic construct
  source 1..80: mol_type = other DNA
tatacttcaaacctaagcatgtcagagcatgggttcccaggccaccgaggctgtgccaatatgagaagcaaggcagcgtc

SEQ ID NO: 173393 - DNA, 80 bp, synthetic construct
  source 1..80: mol_type = other DNA
tgcgacgctggggacggggacgggggttgcgccggagacgtggggtgtgcgtggacggggggtgtgcatggctgtgtggg

SEQ ID NO: 173394 - DNA, 80 bp, synthetic construct
  source 1..80: mol_type = other DNA
ctgtttcgtctatgcttaggactgtgggtctcgagctacctggttcgacggcccatgacgatttagaatacaccgagcca

SEQ ID NO: 173395 - DNA, 80 bp, synthetic construct
  source 1..80: mol_type = other DNA
aaacagcactataacagcaacttatttaataaaactgcactatacaacacctttcaaaccatagcccagcttaaagagac

SEQ ID NO: 173396 - DNA, 80 bp, synthetic construct
  source 1..80: mol_type = other DNA
ttagaagttgccacaacagcattagcaatacagtctataggctattccaagagttggccagaataccatctagaattagc

SEQ ID NO: 173397 - DNA, 80 bp, synthetic construct
  source 1..80: mol_type = other DNA
cgaggccgcgccagagcagagcccgggactgactcagggccacatcccctcggcccgcggacgctgcctcgccagccccc

SEQ ID NO: 173398 - DNA, 80 bp, synthetic construct
  source 1..80: mol_type = other DNA
ggacagtggtgtggacggagacacggggtgacgtcgcggacggtggccttttgcggcagggacggagcgttgcggagacg

SEQ ID NO: 173399 - DNA, 80 bp, synthetic construct
  source 1..80: mol_type = other DNA
aacattggaacaggaacttctgcttatacttcacttaatgttttagctagattcacagatttggagctgcatggattaac

SEQ ID NO: 173400 - DNA, 80 bp, synthetic construct
  source 1..80: mol_type = other DNA
gaagattagggtatacttaaagccaaagcacattagagtgtggtgtccgcgcccaccccgagcggtggcatattatggcc

SEQ ID NO: 173401 - DNA, 80 bp, synthetic construct
  source 1..80: mol_type = other DNA
agtaaatggatttcagggagggaccgtcctggctgtcattctcttggactaacgaggagacaaagtcacagaagccagtt

SEQ ID NO: 173402 - DNA, 80 bp, synthetic construct
  source 1..80: mol_type = other DNA
ccccgctttctttctttcttcacttcttgatcgtaacataattagaagcatgacacacagtccaataggaggcggttaat

SEQ ID NO: 173403 - DNA, 80 bp, synthetic construct
  source 1..80: mol_type = other DNA
gttggtttccccgcaggccctcccttcttcggccgctattagcttagtagtctccaggttaaactcctcatagtcattat

SEQ ID NO: 173404 - DNA, 80 bp, synthetic construct
  source 1..80: mol_type = other DNA
agtattgggtagaatgttaacaaatgaggcagatatatactcattacctccatcacctaagtactttgatgggtatgatc

SEQ ID NO: 173405 - DNA, 80 bp, synthetic construct
  source 1..80: mol_type = other DNA
ggggcatcggggggtgttggtggagccatggggggggggccatgggccgcgcattcctagaaaaagtagcgggggcgtgg

SEQ ID NO: 173406 - DNA, 80 bp, synthetic construct
  source 1..80: mol_type = other DNA
ccctgctcgaggaccactgtcacaagaagatagtctatcatgctcaaggcatctgcctctggcacttcccggttagaggc

SEQ ID NO: 173407 - DNA, 80 bp, synthetic construct
  source 1..80: mol_type = other DNA
tttaattctgatcttgatgagtctattcttgtttcatattctagtgatctaatcatctaccgaacaaacacaaaaggtga

SEQ ID NO: 173408 - DNA, 80 bp, synthetic construct
  source 1..80: mol_type = other DNA
ccttcacgggtctagcctcagcttattacatgttctatgatggttatagtaacacaactggtgagcctaggaatacctat

SEQ ID NO: 173409 - DNA, 80 bp, synthetic construct
  source 1..80: mol_type = other DNA
ggtggcgaccgaagagacggtggagatggcggcgcgcgcgccgccgaagacgagtaccagcccgaagacctcgacgagct

SEQ ID NO: 173410 - DNA, 80 bp, synthetic construct
  source 1..80: mol_type = other DNA
caacactcagagccgtggtaactcaaggcccaaatactgaatttgcactctccttactcaggaaaaatatagtaactgtg

SEQ ID NO: 173411 - DNA, 80 bp, synthetic construct
  source 1..80: mol_type = other DNA
gatactatgcagactaggcatgtagtaaacaaacatgtgcgatccgagtccaccatcgaaaactttcttgcgcgctcagc

SEQ ID NO: 173412 - DNA, 80 bp, synthetic construct
  source 1..80: mol_type = other DNA
aggaacatgaaaaatatcatggcaatgtaaaagagctggttcataaatttggaattccacaactagtggcaaaacaaata

SEQ ID NO: 173413 - DNA, 80 bp, synthetic construct
  source 1..80: mol_type = other DNA
agtactaccaccagatacaaaccagaaagtgttcataattggatttgttagtgcatgcccagatttcaagcttagattgc

SEQ ID NO: 173414 - DNA, 80 bp, synthetic construct
  source 1..80: mol_type = other DNA
aattacataccagatagtggtgaggtaacaacacaaatcaaacccagaaccaatgtttttactattacatctgctggacc

SEQ ID NO: 173415 - DNA, 80 bp, synthetic construct
  source 1..80: mol_type = other DNA
gttgagtgctataaaaatcaaaccacaagtgagttacactttcgtttcgaataggacccgctaggatatagtacagtgga

SEQ ID NO: 173416 - DNA, 80 bp, synthetic construct
  source 1..80: mol_type = other DNA
tgttctggttcgccatggagattcttgaaagagaaattttgctcatggcttcaattaaattacatacacaaggaatctga

SEQ ID NO: 173417 - DNA, 80 bp, synthetic construct
  source 1..80: mol_type = other DNA
gggagagactcttacaaacacaggaagggccctatgggaggctctcagaagaacagcgagggcaatcgtcgcgatcccca

SEQ ID NO: 173418 - DNA, 80 bp, synthetic construct
  source 1..80: mol_type = other DNA
atatactgattggtgaaggaccatgctctccaggggattgtggtggtaaactactgtgtatgcatggaaccatagggatg

SEQ ID NO: 173419 - DNA, 80 bp, synthetic construct
  source 1..80: mol_type = other DNA
gttcctgcgttgacagcggttgaaacaggtgctaccagccaagtaacccctgaagacttgattgaaactaggcatgtcat

SEQ ID NO: 173420 - DNA, 80 bp, synthetic construct
  source 1..80: mol_type = other DNA
gaatgtgactggtgggggtaaatttgttataaccagaatagcaatcgagccaattgcgtctaagattttcatagtttgga

SEQ ID NO: 173421 - DNA, 80 bp, synthetic construct
  source 1..80: mol_type = other DNA
tcctccctccaatatcaggcctccaagagcaagaaagagactacagttcgcaggaggagaaagaacagtcctcctcagaa

SEQ ID NO: 173422 - DNA, 80 bp, synthetic construct
  source 1..80: mol_type = other DNA
ggtatgttatgaacagcaacaccaacgccgaagcagcggtggaaaactttttaggtagatcagccttatgggccaactta

SEQ ID NO: 173423 - DNA, 80 bp, synthetic construct
  source 1..80: mol_type = other DNA
ctgcaaagacacagacatggacaccacctatcccagtagacagcgtcgcgacttacaaattgttgacccacactccatgg

SEQ ID NO: 173424 - DNA, 80 bp, synthetic construct
  source 1..80: mol_type = other DNA
tatgttgcttctaccaaacagcaatagttgtgcctagcagtactccaaaaacaatgagtatgttgtgttttgtcagtgca

SEQ ID NO: 173425 - DNA, 80 bp, synthetic construct
  source 1..80: mol_type = other DNA
aaggtaaattaaatttaagatgtgcattaaaaccatgcaaagaaggcaaggtaggaaacgctaaatgctgcccattaata

SEQ ID NO: 173426 - DNA, 80 bp, synthetic construct
  source 1..80: mol_type = other DNA
aagcccacccacgcgctacccgagcccggtacgctccctagaatcttacaagtcagtgacccggcaaggctcggaccgaa

SEQ ID NO: 173427 - DNA, 80 bp, synthetic construct
  source 1..80: mol_type = other DNA
cagggcagagaggaccagttctttgcgggatgttttcacatgcatgctgctttctgcgggtgcggtgacgttgtcggcca

SEQ ID NO: 173428 - DNA, 80 bp, synthetic construct
  source 1..80: mol_type = other DNA
gggagataaacacgcgccaagtggcacagctcaggaggaaactagagttcttcacatacataaggtttgacatggaggtg

SEQ ID NO: 173429 - DNA, 80 bp, synthetic construct
  source 1..80: mol_type = other DNA
accacaggtacagactacagcagaaaacaccagacctagtacgcatcaaattggaacaggtgaggttcccgccctacaag

SEQ ID NO: 173430 - DNA, 80 bp, synthetic construct
  source 1..80: mol_type = other DNA
ggagacacggagcatgcagtggagagtgctatatcaagggtagcagacacgattatgagtggtccatcaaactcccaaca

SEQ ID NO: 173431 - DNA, 80 bp, synthetic construct
  source 1..80: mol_type = other DNA
agattgtggaggaaagctgctttgcaagcatggtgtgattggtattgttacagcaggtggtagtggcaaggtggccttca

SEQ ID NO: 173432 - DNA, 80 bp, synthetic construct
  source 1..80: mol_type = other DNA
cccccggctgtgcaaatacctacactcaggcaacatgaacttcaacgtggaggacattacagaggagcggaacgatataa

SEQ ID NO: 173433 - DNA, 80 bp, synthetic construct
  source 1..80: mol_type = other DNA
aggacacagcaccagcaggtggtccctaaaagtactgtacgaggagttccagaagcgccacaacttctggactcacagca

SEQ ID NO: 173434 - DNA, 80 bp, synthetic construct
  source 1..80: mol_type = other DNA
ccccggctctcgttgatatgctccaacagggcaaaaacaattggagtcgttatccgcaagatgcctacgcaaaacctagt

SEQ ID NO: 173435 - DNA, 80 bp, synthetic construct
  source 1..80: mol_type = other DNA
aagaagatagcactgtatgaggaacaagcacaaggttttgcccactccgatgctgaggcccaacagcaattgcttgttga

SEQ ID NO: 173436 - DNA, 80 bp, synthetic construct
  source 1..80: mol_type = other DNA
aaacaagacctagcaaaaaacacaaaattaaaattaaattcagacctcctaaactattccaagacaagtggtacccccag

SEQ ID NO: 173437 - DNA, 80 bp, synthetic construct
  source 1..80: mol_type = other DNA
tagtatagcaggtatcatatttgtgatttataaattattttgctcactccaaggtccatattctggtgagcccaaaccta

SEQ ID NO: 173438 - DNA, 80 bp, synthetic construct
  source 1..80: mol_type = other DNA
atctttggaacaggctgtatatggcatggaaaacctggaaccactcgatctcaccacgagtgcaggttttccctatgtca

SEQ ID NO: 173439 - DNA, 80 bp, synthetic construct
  source 1..80: mol_type = other DNA
actccgtgacaccccgttcatcacccaaacatcattcttccaaaatgagcctggcaacgccattgtcagatcagtggaac

SEQ ID NO: 173440 - DNA, 80 bp, synthetic construct
  source 1..80: mol_type = other DNA
ggggacaggggggatgtgcggtgccggtgctggggttggcggcggagacttgcgagcttttgaagcggggacggggcgtc

SEQ ID NO: 173441 - DNA, 80 bp, synthetic construct
  source 1..80: mol_type = other DNA
attagtaccaacaggatcagaaaatttaaaaagcctttttaatactgtctgcgtcatttactgcttgcacgcagaagaga

SEQ ID NO: 173442 - DNA, 80 bp, synthetic construct
  source 1..80: mol_type = other DNA
gggcgataaacatactccaggtccatgtttttttcctccgcctagatacaagaaatattcattgttattgcatctgggac

SEQ ID NO: 173443 - DNA, 80 bp, synthetic construct
  source 1..80: mol_type = other DNA
atggtgttgagacaaagattctgaagcaaacaattattacagatgaaaatgatgtggacacagaaattacaattttgtgg

SEQ ID NO: 173444 - DNA, 80 bp, synthetic construct
  source 1..80: mol_type = other DNA
gggcctccagtcatcatgtcaccttgttgtcccctggattagctcccatttcttcagaagaacaaagaaagatgattata

SEQ ID NO: 173445 - DNA, 80 bp, synthetic construct
  source 1..80: mol_type = other DNA
cgcaacactcccgcagccctgtcccgtgctggactggcggaacgacaagtgctgtggagccacacgcaccggcagcgcgt

SEQ ID NO: 173446 - DNA, 80 bp, synthetic construct
  source 1..80: mol_type = other DNA
gatagggaaacagttgcagacactacaccaagtgggcaagcaaattcaacacggatcccagccttgactgctgctgagac

SEQ ID NO: 173447 - DNA, 80 bp, synthetic construct
  source 1..80: mol_type = other DNA
aacagtcactagtccccagctacataaagaaaattactcacaatccagacggaactacagtagacaactcacttaaccaa

SEQ ID NO: 173448 - DNA, 80 bp, synthetic construct
  source 1..80: mol_type = other DNA
agtagttggacaagctagaactcagaatagtgaaaatcagcctagtgatgataattggttgaactttgatggcactttcc

SEQ ID NO: 173449 - DNA, 80 bp, synthetic construct
  source 1..80: mol_type = other DNA
cctttttttaatttgagtaatcactatggagtctatcaaggatttagtcaatgttgctactggtgccatggatactcttt

SEQ ID NO: 173450 - DNA, 80 bp, synthetic construct
  source 1..80: mol_type = other DNA
actgctggcgcttccttcaacgacccgtacgtgcttgactctggggtacctcttagccaatccttaatatacccacatca

SEQ ID NO: 173451 - DNA, 80 bp, synthetic construct
  source 1..80: mol_type = other DNA
caagacttaccactatggatgtgcatgctaggatacagtgactacataacaaaagcagtaggcagtccaggatactggaa

SEQ ID NO: 173452 - DNA, 80 bp, synthetic construct
  source 1..80: mol_type = other DNA
acccaaaccattgtcaaagtgccaagtgatttccactcatttgtgcttcctcgatctgggagtacggcgctcgatatcaa

SEQ ID NO: 173453 - DNA, 80 bp, synthetic construct
  source 1..80: mol_type = other DNA
agattttcaggaaagacagaaaaattatgattgttggaaacagcaactcgaaaatcagactctagatgatttggatgatg

SEQ ID NO: 173454 - DNA, 80 bp, synthetic construct
  source 1..80: mol_type = other DNA
cccaggttttctataccgttttctagtattgcctcagcttattatatgttttatgatggatattcagatgatagcacatc

SEQ ID NO: 173455 - DNA, 80 bp, synthetic construct
  source 1..80: mol_type = other DNA
tgtacctttgtacgcctgtttctcccctccctcccatcctaaattatcccagtaacttagaagacttgaattaccgtaca

SEQ ID NO: 173456 - DNA, 80 bp, synthetic construct
  source 1..80: mol_type = other DNA
tagaccctataataaacaggttaatatttatgataatgggcctaaaaagatggtcagtaagaagaaaatcttgacaatga

SEQ ID NO: 173457 - DNA, 80 bp, synthetic construct
  source 1..80: mol_type = other DNA
acggacagatacgagacgacgaggacgcagacgactcgtcgctggaccacgacaaccggagcgactccttggagcggctc

SEQ ID NO: 173458 - DNA, 80 bp, synthetic construct
  source 1..80: mol_type = other DNA
tgtagaatacacatacacccatgtgacaaactacaagccacattctggtgatgtacagacagccattaaaccaagagcaa

SEQ ID NO: 173459 - DNA, 80 bp, synthetic construct
  source 1..80: mol_type = other DNA
tataacttgaataatgataagcttaagcaattgtactagctaattgtagcaagtttacaataacaaggattattacaggt

SEQ ID NO: 173460 - DNA, 80 bp, synthetic construct
  source 1..80: mol_type = other DNA
agcctaagcacgtgagagcttggatcccgcgaccaccgcggttgtgtccatacataaatgcgggagacgtgaacttcact

SEQ ID NO: 173461 - DNA, 80 bp, synthetic construct
  source 1..80: mol_type = other DNA
tgagaggctagtgttttaaacatgcaccctaggccagccagagataatgtcacaagactatcaagttggtgtaaacacgc

SEQ ID NO: 173462 - DNA, 80 bp, synthetic construct
  source 1..80: mol_type = other DNA
attatcccaactcatgctgatcctggtaaggaagtacaaattgatggaattaacactacagtagaagattcttatgattt

SEQ ID NO: 173463 - DNA, 80 bp, synthetic construct
  source 1..80: mol_type = other DNA
aaacaaaaattcctgaaagaagagtcgttgctcaaggtccagaagaggaatttggacgctctctaattaaacataacaca

SEQ ID NO: 173464 - DNA, 80 bp, synthetic construct
  source 1..80: mol_type = other DNA
aagtctcagcggtggtgaacacgctaagacgttttccaacacgaaggccaatgggaccaatactgtgcagaccatagtca

SEQ ID NO: 173465 - DNA, 80 bp, synthetic construct
  source 1..80: mol_type = other DNA
caaacaggagccaccaaccgctttgcatcgtgggttattacaaccagacaagttgcccaattgaggaggaagctggagat

SEQ ID NO: 173466 - DNA, 80 bp, synthetic construct
  source 1..80: mol_type = other DNA
tagcctacataggcggctctaatgctcaggttagctatgaacacacacaccctggtgaacgtggccatgaaataggttct

SEQ ID NO: 173467 - DNA, 80 bp, synthetic construct
  source 1..80: mol_type = other DNA
aaaatcaacagcttatggggagaccacgtatatgaacaatcaattattgacaaaatggaacaaaaccaacaaaatatgta

SEQ ID NO: 173468 - DNA, 80 bp, synthetic construct
  source 1..80: mol_type = other DNA
ttacaatagagacttggcagttgtggcgacaggagcacaaggctcagaagtcattcctcattgcaactgcacttcaggtg

SEQ ID NO: 173469 - DNA, 80 bp, synthetic construct
  source 1..80: mol_type = other DNA
tatcgcagtggaccactacgctgcacaattaagtgtgttaaatatatctcctgaaccattaacactagaacaagctgtgt

SEQ ID NO: 173470 - DNA, 80 bp, synthetic construct
  source 1..80: mol_type = other DNA
ccaatgtagttgtggggtatggggaatggccagagtatttgggtgacagcgaagccaccgcagaagatcagccgacgcaa

SEQ ID NO: 173471 - DNA, 80 bp, synthetic construct
  source 1..80: mol_type = other DNA
attacccagtgggccaagcaactcagaaagcataccagcactcacagcagccgagactggacatacctcgcaggtcgtcc

SEQ ID NO: 173472 - DNA, 80 bp, synthetic construct
  source 1..80: mol_type = other DNA
atatcacactggcatctacagctcaatatttctgagcccacttagaagcaacttagaatttgccacagcataccaagatg

SEQ ID NO: 173473 - DNA, 80 bp, synthetic construct
  source 1..80: mol_type = other DNA
tctctggggtcgccacaggctttggcctccgttttaggccttccggactacaaaagcggccattttagtgacgtcacggc

SEQ ID NO: 173474 - DNA, 80 bp, synthetic construct
  source 1..80: mol_type = other DNA
ttctcaaaaaggggtgtacggatacaacacactcaacaaaatggggaccctttttgtgaggcacgtcaacaaagagacac

SEQ ID NO: 173475 - DNA, 80 bp, synthetic construct
  source 1..80: mol_type = other DNA
gcaagcattacccgatcaccataactaggcctaccttccaatggatggaggcaaatgaatactacccagccagataccaa

SEQ ID NO: 173476 - DNA, 80 bp, synthetic construct
  source 1..80: mol_type = other DNA
agtacccacactgggacacactctacgggggcctagcttatggcaatgcacctaaattagcaaccgaatctaccagaaca

SEQ ID NO: 173477 - DNA, 80 bp, synthetic construct
  source 1..80: mol_type = other DNA
gcggttggacaccgtttttctttgaatatgctggatatactgaaaacacgtcgtgtcacccacgatttacctgtattcat

SEQ ID NO: 173478 - DNA, 80 bp, synthetic construct
  source 1..80: mol_type = other DNA
attctcaaaggcggcaccctcgccggcgcgcctgtcctcccagggacccgagacgaaggcccgtctgtagaggaagtggt

SEQ ID NO: 173479 - DNA, 80 bp, synthetic construct
  source 1..80: mol_type = other DNA
tgggagaatactgcaccacaggcacggatgagaccaagagatttgctaattggacaattaacgcaagacgcatggtgcag

SEQ ID NO: 173480 - DNA, 80 bp, synthetic construct
  source 1..80: mol_type = other DNA
caccattctggcggtattaagactagagagggcactgaaagtaccaagaccatcagttataccgttaaatcctgcaaggg

SEQ ID NO: 173481 - DNA, 80 bp, synthetic construct
  source 1..80: mol_type = other DNA
cgctggctaacctcctacacaggtacaaatcacataaatgacacatttgcaaagggcaaacaccaagaatacgagtacca

SEQ ID NO: 173482 - DNA, 80 bp, synthetic construct
  source 1..80: mol_type = other DNA
ggccatggagaaggtggatggagatcaggaccaccacctcctcctcccccaggtctagcctaaatggctgctcctcctca

SEQ ID NO: 173483 - DNA, 80 bp, synthetic construct
  source 1..80: mol_type = other DNA
agaatttcactcttaagctatgtaaagatacagacgagatccgacaaacagctgagtaccaaaacgaccctattgcaaat

SEQ ID NO: 173484 - DNA, 80 bp, synthetic construct
  source 1..80: mol_type = other DNA
atagccgtgagacgctgctcaccttgcgcattacctacatcaagggcagttcggtgggagtcaactctaaggtgcgggcc

SEQ ID NO: 173485 - DNA, 80 bp, synthetic construct
  source 1..80: mol_type = other DNA
cacacttggtttgggatgtaggtttacaatcaacagcttctatggttataccatgggtatctgcatcccattatagattc

SEQ ID NO: 173486 - DNA, 80 bp, synthetic construct
  source 1..80: mol_type = other DNA
ctgcaccaatacacatacctggagaggtgcgcaacatgatggaactggcagaaatagacagtgtgattccaatgaacgca

SEQ ID NO: 173487 - DNA, 80 bp, synthetic construct
  source 1..80: mol_type = other DNA
cccaaaaagagcaagtgcctgctaaaagactttccactgtggtgcatggtgtacggatacgcagacttttgtagaaaaca

SEQ ID NO: 173488 - DNA, 80 bp, synthetic construct
  source 1..80: mol_type = other DNA
cctctaacagattttacactctaaggagtgtaacttgggacagctcctcaaaggggtggtggtggaaattacccgatgca

SEQ ID NO: 173489 - DNA, 80 bp, synthetic construct
  source 1..80: mol_type = other DNA
attatacccacacactcagaaccaggtggtcaaattgagattgatggagttaaaacaaatgtggtggatagctatgacct

SEQ ID NO: 173490 - DNA, 80 bp, synthetic construct
  source 1..80: mol_type = other DNA
taagccaaacacattacaggtacgtcatccatgaaccatacaccgatgctggatacgtaacatgctggtaccagactagc

SEQ ID NO: 173491 - DNA, 80 bp, synthetic construct
  source 1..80: mol_type = other DNA
gggaagacagccaagaagcgacagagacagaagcccactcggaagaggagaaggagacagacatcagagagcagctgcag

SEQ ID NO: 173492 - DNA, 80 bp, synthetic construct
  source 1..80: mol_type = other DNA
tgcattgtctctccttagaaaaaacattgtaacaatcactacagaaaaaggggagttcactggtttaggcatttatgatc

SEQ ID NO: 173493 - DNA, 80 bp, synthetic construct
  source 1..80: mol_type = other DNA
tgattccccggagaaaagaggaagttcccaggggacggcacgcaaaacaacggccagacacacacgcgggcgcaaggtgg

SEQ ID NO: 173494 - DNA, 80 bp, synthetic construct
  source 1..80: mol_type = other DNA
actacacctattactactactaaaccatcagaaaacttactcaacgacacaagtccatgtattaaaaatgacacctgccc

SEQ ID NO: 173495 - DNA, 80 bp, synthetic construct
  source 1..80: mol_type = other DNA
ctcgggggtcgccgtaggcttcagggtcgttccggcggccattttaagtaagcatggcgtgcggtgacgtcgcagttcaa

SEQ ID NO: 173496 - DNA, 80 bp, synthetic construct
  source 1..80: mol_type = other DNA
gaccttccaacaatccagtttattcaatgaatggcacattactaggcaatctacttattttccctcaccagttcatcaac

SEQ ID NO: 173497 - DNA, 80 bp, synthetic construct
  source 1..80: mol_type = other DNA
gagtactggcgggaaatgcgtttgtttacccacatcagataattaatctgcgcaccaacaactgtgccacgttggtgctg

SEQ ID NO: 173498 - DNA, 80 bp, synthetic construct
  source 1..80: mol_type = other DNA
gcacaggaaaattcctcatggcttacacaccacctggtggtcagttgccaaagaaccgtaaggaggcaatgcttgggacc

SEQ ID NO: 173499 - DNA, 80 bp, synthetic construct
  source 1..80: mol_type = other DNA
tgagaacaaaacagagtccgtagcttatggcatatcagctactaatgacatgggaactctgtgtttccgcgcattagaag

SEQ ID NO: 173500 - DNA, 80 bp, synthetic construct
  source 1..80: mol_type = other DNA
ccaagagatttttgctatcaaggtagatattgcctcacagcctttggcaagcaccatgcttggagaaattgcaagttact

SEQ ID NO: 173501 - DNA, 80 bp, synthetic construct
  source 1..80: mol_type = other DNA
ccaccacaacaggcaggtcgcgagagggttccggaggcttccccggcgtagcatggtttcgggttaaagcaaaaagtctg

SEQ ID NO: 173502 - DNA, 80 bp, synthetic construct
  source 1..80: mol_type = other DNA
gaggttgaaaatttcaacgccacacaaggcacagaaaagaagaagcagttcaccgtgtggcctatcacttacacaaacac

SEQ ID NO: 173503 - DNA, 80 bp, synthetic construct
  source 1..80: mol_type = other DNA
tcgcccgccattttaggccttccggactaccaaaatggcgaaaatagtgacgtcatggcagccattttgtgcaaagcacc

SEQ ID NO: 173504 - DNA, 80 bp, synthetic construct
  source 1..80: mol_type = other DNA
actgtggtggaaaactgttatgtaagcatggtgtcattggcattgtgacagctggtggagaaggacacgttgcctttata

SEQ ID NO: 173505 - DNA, 80 bp, synthetic construct
  source 1..80: mol_type = other DNA
aagatccaagactggaagtggatcttgatagttctattttctcaaagtacaaaggaaatgaggcaattaagattactgat

SEQ ID NO: 173506 - DNA, 80 bp, synthetic construct
  source 1..80: mol_type = other DNA
gcaactccctcgaagtccggcgctacgcgcttcgcgctgcgccggacatctcggaccccccctccacccgaaacgcttgc

SEQ ID NO: 173507 - DNA, 80 bp, synthetic construct
  source 1..80: mol_type = other DNA
gttgtacatggacacgtagtccgggaccgtctctatagagtacacctgacccaagcccaatccctgcacattctgcgtcc

SEQ ID NO: 173508 - DNA, 80 bp, synthetic construct
  source 1..80: mol_type = other DNA
agaatgttacgaccaacggttcactaccgaaggccaccaggtcatcccgttgtgcgcgtccgaacccgaggatgacgacg

SEQ ID NO: 173509 - DNA, 80 bp, synthetic construct
  source 1..80: mol_type = other DNA
ctctggcatcttccataagaatgctttgcatggctcaataccttcttagaaacgcacggggccaacaaggccttcttagg

SEQ ID NO: 173510 - DNA, 80 bp, synthetic construct
  source 1..80: mol_type = other DNA
tccagaccaaattcctgcaaaaatatgtttacttagaagaatctattactaagcagtgcacttgcaaccctttatctggg

SEQ ID NO: 173511 - DNA, 80 bp, synthetic construct
  source 1..80: mol_type = other DNA
accagctattcatggagagagcggcataacatcagttaacggtgcatcagcatatttaagcaccacaatatctaccaaca

SEQ ID NO: 173512 - DNA, 80 bp, synthetic construct
  source 1..80: mol_type = other DNA
gatacagcaacgaaagtgagtggggccagacttcgccataaggcctttaacttccgggtccgtatgggagccgccatttt

SEQ ID NO: 173513 - DNA, 80 bp, synthetic construct
  source 1..80: mol_type = other DNA
tggtggaagctacctgactgtttaaaggaaatggggatctttggtcaaaacatgtactatcattcctttggtagatcagg

SEQ ID NO: 173514 - DNA, 80 bp, synthetic construct
  source 1..80: mol_type = other DNA
gaagaaaatgagtattaccccgcccgttaccaaaccaacactttacttgcacacggtccagttgaagcaggagactgtgg

SEQ ID NO: 173515 - DNA, 80 bp, synthetic construct
  source 1..80: mol_type = other DNA
tgctacgtcactaaccacgtgcactccgcaggccagtccaagtctacgtcgtgcacttcctgggcgtggtttacatcctg

SEQ ID NO: 173516 - DNA, 80 bp, synthetic construct
  source 1..80: mol_type = other DNA
acgcttgtgtgactacaaacacaaaaagaatgtagacttcacacctacaggagtcaccaccaccagagataaaataacac

SEQ ID NO: 173517 - DNA, 80 bp, synthetic construct
  source 1..80: mol_type = other DNA
cctgtagtattatttcagactgatgttataagagacttagtagaaagcggaccttttagctataaaaacaacctagccaa

SEQ ID NO: 173518 - DNA, 80 bp, synthetic construct
  source 1..80: mol_type = other DNA
cagtaaccaatcacaatgtaatgacacttggtactatggaacaacttacactacaagtataacagaggcagcaaaaaaaa

SEQ ID NO: 173519 - DNA, 80 bp, synthetic construct
  source 1..80: mol_type = other DNA
aatggcggtggcgtttgtcccacgggtgaggtggaatcgtcggttagggccggcacgaggtggtgtgtctggaccccggc

SEQ ID NO: 173520 - DNA, 80 bp, synthetic construct
  source 1..80: mol_type = other DNA
ttacagcagggatagctctccatagatcaaatgaaaatgcacaggcaattgcaaacatgaagagtgctattcaaaataca

SEQ ID NO: 173521 - DNA, 80 bp, synthetic construct
  source 1..80: mol_type = other DNA
aaaaatcctgacaatagtaccaactcagacgctacaacatttaataaatgggtagaagatacattcaaaacaggcaagtt

SEQ ID NO: 173522 - DNA, 80 bp, synthetic construct
  source 1..80: mol_type = other DNA
agtcaagccagtttacaaaaattgactggaccaatgccacttttttaaagagaggcttcaaggctgatgaaaaatactct

SEQ ID NO: 173523 - DNA, 80 bp, synthetic construct
  source 1..80: mol_type = other DNA
tagggggagtacctcctcgtcgtcaccgagaaacttacgtgtaagaacacggcgtgacaataaacaacatagcgtaaatc

SEQ ID NO: 173524 - DNA, 80 bp, synthetic construct
  source 1..80: mol_type = other DNA
accgccaaacgctggtcatgtttccaccgtcaattacgcagctgacggtgtgagataccacgatgttggacttaggtttg

SEQ ID NO: 173525 - DNA, 80 bp, synthetic construct
  source 1..80: mol_type = other DNA
catgtaatacaatcgattataatgaatacaacatgctagattattttgacaattgtacctacaacataaatagcaccaaa

SEQ ID NO: 173526 - DNA, 80 bp, synthetic construct
  source 1..80: mol_type = other DNA
aaagcaccgtcaggcacgacgcgagtgagaacgcagtgcggcaacggcgcgaaagacggcgctataacgctctgacggtc

SEQ ID NO: 173527 - DNA, 80 bp, synthetic construct
  source 1..80: mol_type = other DNA
acaggtacagcaacctctccacagaaacacaaaaaagaaaagaagcatatgatgaactcaccaaaaaaaatggcacaaaa

SEQ ID NO: 173528 - DNA, 80 bp, synthetic construct
  source 1..80: mol_type = other DNA
ttacccagattagtcaatcaatatctgacaaattgaccaggaaagtaatcaagtggttggtgcgtatcattagtgcactt

SEQ ID NO: 173529 - DNA, 80 bp, synthetic construct
  source 1..80: mol_type = other DNA
cacaccccggagaactcggtagagtagttgggcaagctagagtccagaccaatgataatcaacctagtgatgacaactgg

SEQ ID NO: 173530 - DNA, 80 bp, synthetic construct
  source 1..80: mol_type = other DNA
catcacgatgccaacgataccaataatactaatgggcacgccacctgtgtactgtacttcgtagctgaagaagtgcacac

SEQ ID NO: 173531 - DNA, 80 bp, synthetic construct
  source 1..80: mol_type = other DNA
ataccatcatacctataaacaatactggaactaacaccacaagcattaatatgtacacagtgcagttagaaagaacagct

SEQ ID NO: 173532 - DNA, 80 bp, synthetic construct
  source 1..80: mol_type = other DNA
tgccccgtggccacggccagagcgatgcgtttggcggcgcgactgatctctggcaagtactgcgcctcgtgcaccagacg

SEQ ID NO: 173533 - DNA, 80 bp, synthetic construct
  source 1..80: mol_type = other DNA
ttatgatgaaacagagaagactggaaccgcatatgggatttcagcaacaaatgacatggggacgctctgcttcagagcac

SEQ ID NO: 173534 - DNA, 80 bp, synthetic construct
  source 1..80: mol_type = other DNA
tggatccactcccgaaacgttttactccttaacttattgaaattgtttgaagacaggatttcagtgtcacaatgggagct

SEQ ID NO: 173535 - DNA, 80 bp, synthetic construct
  source 1..80: mol_type = other DNA
cagtttattaaccttagaacaaataatacagctacaataatagtcccatatatgaactcagtgccaatggattcaatgac

SEQ ID NO: 173536 - DNA, 80 bp, synthetic construct
  source 1..80: mol_type = other DNA
gttctcaaggataatcagcaaagaattgagaaggctattgaagaagcagataatttctgcatactacagattcaggatgt

SEQ ID NO: 173537 - DNA, 80 bp, synthetic construct
  source 1..80: mol_type = other DNA
agacggcttccattcagggggatagagtggcggatgtgatcgagagttctataggggacagtatgagtagagcactaact

SEQ ID NO: 173538 - DNA, 80 bp, synthetic construct
  source 1..80: mol_type = other DNA
atgggcaacccgacaacgagctccaggaacgcaccacgtttgagtaccggggtacatccactaccccggactcaaacctc

SEQ ID NO: 173539 - DNA, 80 bp, synthetic construct
  source 1..80: mol_type = other DNA
atgcccacagtccagaataccgccagtagtggtccggtccactcaaaagaagtcccagccctgacagcagtcgagactgg

SEQ ID NO: 173540 - DNA, 80 bp, synthetic construct
  source 1..80: mol_type = other DNA
ttcttaaaatttctgataaaactcaaaaccatgcataaaagcaaaccactgagcattttccaaattttgttcaaactcgg

SEQ ID NO: 173541 - DNA, 80 bp, synthetic construct
  source 1..80: mol_type = other DNA
ggacttgacctaccatatgtgacctatctgaaagatgagcttcgggctcctgttaaagtgaaaacagggaaaacaagagc

SEQ ID NO: 173542 - DNA, 80 bp, synthetic construct
  source 1..80: mol_type = other DNA
acactcaaaacatatggcttgggccccagatttggcggtgtttacactggaaatataaaaataatgaattatcatttaat

SEQ ID NO: 173543 - DNA, 80 bp, synthetic construct
  source 1..80: mol_type = other DNA
caactaaaccagaacttaggagagctgtagcacagggcccagatcatgaatttggtatggcattactaaagaggaactgt

SEQ ID NO: 173544 - DNA, 80 bp, synthetic construct
  source 1..80: mol_type = other DNA
cccaccctgttagaagataaatggtacacgcagcaggacctatgtgaggttaatctgttgcaactgtccgttactgcggc

SEQ ID NO: 173545 - DNA, 80 bp, synthetic construct
  source 1..80: mol_type = other DNA
ggtatggtgctcctcctcgtcccccggcccccggggctcccagaccacagatgagacgccagctggcccttcccgcgccc

SEQ ID NO: 173546 - DNA, 80 bp, synthetic construct
  source 1..80: mol_type = other DNA
ataccccgtactacccctggagccgcgcgctacgccttcggctgcgcgcggcacctcagacccccgctcgtgctgacacg

SEQ ID NO: 173547 - DNA, 80 bp, synthetic construct
  source 1..80: mol_type = other DNA
ggtgctcaagtttcatcccaaaaagttggagcccatgagaattcgaatagggcatatggtggttccaccattaattacac

SEQ ID NO: 173548 - DNA, 80 bp, synthetic construct
  source 1..80: mol_type = other DNA
aatatggtatcaatacactacaaaagctgacacacaaatagcaaaaacgggctgctactgcatgctagaagacattccaa

SEQ ID NO: 173549 - DNA, 80 bp, synthetic construct
  source 1..80: mol_type = other DNA
actatatctatagcacacatggagacacccccgagggggccagaaagctcattagaatcttacagcgagccctcttcgca

SEQ ID NO: 173550 - DNA, 80 bp, synthetic construct
  source 1..80: mol_type = other DNA
taagctccggcaggtccaacacccagatgtggaccgcctacagagacatagtgtacaaccccctgttagataagggagag

SEQ ID NO: 173551 - DNA, 80 bp, synthetic construct
  source 1..80: mol_type = other DNA
ctcctggcacatgccccgtaaaatatagagtaaaatccagtgagtctacgaacaccgaaggtaccgtcggaagtaacctt

SEQ ID NO: 173552 - DNA, 80 bp, synthetic construct
  source 1..80: mol_type = other DNA
caaactttggcaatggaaaactgggcaatggcagcggccaggtgcccagatactggcagcagaggtggtaccccatactc

SEQ ID NO: 173553 - DNA, 80 bp, synthetic construct
  source 1..80: mol_type = other DNA
aaaaacacttaagcatactaccagaccaactgtcaaactacaaaaaccattatgatacaaacctatataacaatattcaa

SEQ ID NO: 173554 - DNA, 80 bp, synthetic construct
  source 1..80: mol_type = other DNA
gctgagggtactttagtaataaattcaaataactttaaggatactatactagaagtaggtcagctaacttttgcaggttt

SEQ ID NO: 173555 - DNA, 80 bp, synthetic construct
  source 1..80: mol_type = other DNA
aaccccgggcctgaagaggttgacaagaagggtcaaggtttcgtctgtgtgttgaagggcaggtgctgttgggtgcatct

SEQ ID NO: 173556 - DNA, 80 bp, synthetic construct
  source 1..80: mol_type = other DNA
ctttccattcttccgtgtcccctgccacctcagtggaccgtcaatttcgacggaccacgtacgaccgttgggacggtcga

SEQ ID NO: 173557 - DNA, 80 bp, synthetic construct
  source 1..80: mol_type = other DNA
cgtaaatagtgtaaaagaacacatacatgccattaacccagttggaaatattagcaaaaagatcattaaatggatgctaa

SEQ ID NO: 173558 - DNA, 80 bp, synthetic construct
  source 1..80: mol_type = other DNA
aaaagagagatttaattaacaacagtactaaagacatatctaaactcaaattggcactagacaaatatggagtggactta

SEQ ID NO: 173559 - DNA, 80 bp, synthetic construct
  source 1..80: mol_type = other DNA
acttcagttatcgcaacccactaggcccgcgttacctccatcagaacagagtgtcccaaacacaaaccaaagcacaccag

SEQ ID NO: 173560 - DNA, 80 bp, synthetic construct
  source 1..80: mol_type = other DNA
ctaagcagaggggaagtagcatgcacattttccgtggaggcgacgaatggacaaaaccaagtgcaaacggctgtccataa

SEQ ID NO: 173561 - DNA, 80 bp, synthetic construct
  source 1..80: mol_type = other DNA
acaagtactaacagcatcttacataggcataataggtcacaacccagacggtagcacaccagcaaaaggagcaaactcaa

SEQ ID NO: 173562 - DNA, 80 bp, synthetic construct
  source 1..80: mol_type = other DNA
gggaattctaccagcggtgcacaccgctggttgtgacccctgccaacaagggtcaagatttcccagaaacatccacaatc

SEQ ID NO: 173563 - DNA, 80 bp, synthetic construct
  source 1..80: mol_type = other DNA
acattactggtggttatgataccagaacatcaactagcaacagtaaataaaggaaatgtcaatgcaggatacaaatacac

SEQ ID NO: 173564 - DNA, 80 bp, synthetic construct
  source 1..80: mol_type = other DNA
tccaagaaaggtgaacattggcaaggaaatggtaattacccacatgcaaatacagatcaaatgtacaaaataccttttga

SEQ ID NO: 173565 - DNA, 80 bp, synthetic construct
  source 1..80: mol_type = other DNA
accaacaaccaccaacgtttctacaaagtcgtcggcaataaccacacagatacccacaacgacaaacacgaaagtccaga

SEQ ID NO: 173566 - DNA, 80 bp, synthetic construct
  source 1..80: mol_type = other DNA
ggtgatagctggatgaagaaattcacagaggcttgtaacgccgctaagggattggaatgggtttccaataaaatatccaa

SEQ ID NO: 173567 - DNA, 80 bp, synthetic construct
  source 1..80: mol_type = other DNA
attcacgccccccttgggaggtggcggcatatgcaaaggatagcactcccactctactactgggtatcatatgctgactg

SEQ ID NO: 173568 - DNA, 80 bp, synthetic construct
  source 1..80: mol_type = other DNA
aagacccacgtttagaaactgatttcaagacagccctgttttccaagtataaaggtaatctaccatgtgaaatgaatgat

SEQ ID NO: 173569 - DNA, 80 bp, synthetic construct
  source 1..80: mol_type = other DNA
gtgtctgtggttgtcttcccagactctgctttctgccgtcttcggtcaagtaccagctggtggtccgcatgttttgatcc

SEQ ID NO: 173570 - DNA, 80 bp, synthetic construct
  source 1..80: mol_type = other DNA
accaagcaaaaccaaattgcaacctagtgttttttatgatgttttccctggtaataaagaaccagctgttttgtctagta

SEQ ID NO: 173571 - DNA, 80 bp, synthetic construct
  source 1..80: mol_type = other DNA
taagagcccatatagatgcagagaaagcaaagcaggctcaaaccaataccacttcacctacctataacactgagcccttc

SEQ ID NO: 173572 - DNA, 80 bp, synthetic construct
  source 1..80: mol_type = other DNA
tatcatagaactcgtccacaataacaagcacattcatgtgattgggcctcctgtgttgcagggagtaggtctcgcgcctg

SEQ ID NO: 173573 - DNA, 80 bp, synthetic construct
  source 1..80: mol_type = other DNA
aagggaggagccatggggaacgccctcaaatgatctgtataaatgtacccgctctttgcattgtattcagtcgctctgcg

SEQ ID NO: 173574 - DNA, 80 bp, synthetic construct
  source 1..80: mol_type = other DNA
gacaagcacacaacacatgttaagattcgggtttaccacagagcaaaacatattagagcttggatacccagagcacctag

SEQ ID NO: 173575 - DNA, 80 bp, synthetic construct
  source 1..80: mol_type = other DNA
tacatgtcgtggacaataaatgccagaagaatggtgcaattgaggagaaagtttgagctgtttacatacatgagatttga

SEQ ID NO: 173576 - DNA, 80 bp, synthetic construct
  source 1..80: mol_type = other DNA
ctaaggcattggaggaccaagctggaacaaacttggaaatcactatcgtcactctcaaaagaaatgagaaatttagagac

SEQ ID NO: 173577 - DNA, 80 bp, synthetic construct
  source 1..80: mol_type = other DNA
aaacgacgtggagctgcgcgcggaaagtcaggacagcgccgtggcatcgggcccgggccgcattccgcagccgctcagcg

SEQ ID NO: 173578 - DNA, 80 bp, synthetic construct
  source 1..80: mol_type = other DNA
acccaaatgtctgtagcttttttctttttaccctcttgtttatcatctgcgattcgtggtaggtaggagagggaaatgat

SEQ ID NO: 173579 - DNA, 80 bp, synthetic construct
  source 1..80: mol_type = other DNA
cctgggagtatgtaagatacaacccactatcagacaaaggtctaggtaacagaatctatgcacagtggtgcagcgaagca

SEQ ID NO: 173580 - DNA, 80 bp, synthetic construct
  source 1..80: mol_type = other DNA
tactcagtgctgtacaggcagtggatagatttgtttatttagataatataatacattgtttgcttagaacttagtattat

SEQ ID NO: 173581 - DNA, 80 bp, synthetic construct
  source 1..80: mol_type = other DNA
taaattataccgtccataaaagatgcgaccgcagttacgaagtaatcaacgtaacaggacacgttggtggtaacataact

SEQ ID NO: 173582 - DNA, 80 bp, synthetic construct
  source 1..80: mol_type = other DNA
caggcgacaccgttataaaggggtgtacttccgaatggctgagttttccacgcccgtccgcggcgagatcgcgacggagg

SEQ ID NO: 173583 - DNA, 80 bp, synthetic construct
  source 1..80: mol_type = other DNA
cgtgtacctgcgctacaagctgctgagacgggggctacctccaatgcttctgatgaaaacttgatagagacaagatgtgt

SEQ ID NO: 173584 - DNA, 80 bp, synthetic construct
  source 1..80: mol_type = other DNA
tactcagggacactacacatataaaacaagatgccttgccccagggaattgaggagattatccagcaggttgctagcaac

SEQ ID NO: 173585 - DNA, 80 bp, synthetic construct
  source 1..80: mol_type = other DNA
gctattaattgtactgctacaattaacggaacaaataattctagttcaaaaacttgccaacaagacattgaaacaatacc

SEQ ID NO: 173586 - DNA, 80 bp, synthetic construct
  source 1..80: mol_type = other DNA
ctccacataaacccccttttatctttccagccataaacagggtctacatgttcccagacagggcccccaagcctctgcct

SEQ ID NO: 173587 - DNA, 80 bp, synthetic construct
  source 1..80: mol_type = other DNA
ttatcttcaagacaatgaggctacagctgaagatcagccaacacaaccagatgttgccacatgtagattttacaccctgg

SEQ ID NO: 173588 - DNA, 80 bp, synthetic construct
  source 1..80: mol_type = other DNA
agtttgcaaagtcacagtactatcggttacatgctgtgtcgatgaattcgtgtcgccgtttggtgaagttgttattacag

SEQ ID NO: 173589 - DNA, 80 bp, synthetic construct
  source 1..80: mol_type = other DNA
ccatgcttggagagctttccagttacttcacccactggacaggcagtctgcgcttcagttttatgttttgtggaacagca

SEQ ID NO: 173590 - DNA, 80 bp, synthetic construct
  source 1..80: mol_type = other DNA
tgtgcattagttgtatatgaaccaaaacccatagtcacacatggaagtcatttggaatttggatctttcactaatttacc

SEQ ID NO: 173591 - DNA, 80 bp, synthetic construct
  source 1..80: mol_type = other DNA
ataatgctgcaatgggaatcgccgcaggcaacttgacaatatacccccatcaatgggtgaatttgaggactaacaattgt

SEQ ID NO: 173592 - DNA, 80 bp, synthetic construct
  source 1..80: mol_type = other DNA
tcactcaagacccaggtaaattcaccgcactcgtcaaagacattacggggaattcaatgccagcattgaattccccgact

SEQ ID NO: 173593 - DNA, 80 bp, synthetic construct
  source 1..80: mol_type = other DNA
aagtactcatcaggaggaattatttctctatggtaccaaacagattttgtgggtgggagtgaccctacgggtacgatcgt

SEQ ID NO: 173594 - DNA, 80 bp, synthetic construct
  source 1..80: mol_type = other DNA
ggcgatgagctcgatgttgaagaccgacgccgaattggatttgcgcaccacgcacttcgtcagcactccgtaggccgagg

SEQ ID NO: 173595 - DNA, 80 bp, synthetic construct
  source 1..80: mol_type = other DNA
ccaggtgggtggagctaggtaggattcagctaggttcctactggggtacccccctaccctaccttaaggtgcgccaccct

SEQ ID NO: 173596 - DNA, 80 bp, synthetic construct
  source 1..80: mol_type = other DNA
cctctagatgaacaattcaggccatacacagctttcactctaccatcagtaaacaatgcagaaccaggaaagagatacat

SEQ ID NO: 173597 - DNA, 80 bp, synthetic construct
  source 1..80: mol_type = other DNA
ggtcaaaggtcacacctacgtcattcgtgacgtggggaggcctgctgcgcaaacgcggaagtaggccccgctacgtcacg

SEQ ID NO: 173598 - DNA, 80 bp, synthetic construct
  source 1..80: mol_type = other DNA
ttgctaggaaacaccttcacaactgaagactacacactagaataccatggaggactgtacagctcaatatggctatcccc

SEQ ID NO: 173599 - DNA, 80 bp, synthetic construct
  source 1..80: mol_type = other DNA
agtcacacccggtgccgggcgtggagtttcgcggtgaacgcgagaccccgtcggcacgcgagtttctgctttcgcacgac

SEQ ID NO: 173600 - DNA, 80 bp, synthetic construct
  source 1..80: mol_type = other DNA
ccaccacactgacattcagtggcaataatcaaacaacatgtaatgacacctggtactatggcaatgcatacacagacaaa

SEQ ID NO: 173601 - DNA, 80 bp, synthetic construct
  source 1..80: mol_type = other DNA
cttgattctcccgccattaagtgctgcggctcacaagagtgcacggccgcccgcaggcctgacgagcagtgccaggtgtt

SEQ ID NO: 173602 - DNA, 80 bp, synthetic construct
  source 1..80: mol_type = other DNA
tccggagccagaaaagtttggagggggcatgagcacagtcagattcagccagtttgtgttatatgaccaatataccagac

SEQ ID NO: 173603 - DNA, 80 bp, synthetic construct
  source 1..80: mol_type = other DNA
cagcaactatggctactgcacctactgtcctaccgataatttaattaccaaaattaaaaactacagagataaaagattca

SEQ ID NO: 173604 - DNA, 80 bp, synthetic construct
  source 1..80: mol_type = other DNA
gtcacggacccgtctcggccgaagtgtgcgtgcggactgtggtcgactgttattggcgcaaactttttggcggcgacgat

SEQ ID NO: 173605 - DNA, 80 bp, synthetic construct
  source 1..80: mol_type = other DNA
ggtccatggtgaggggacctgatacctcaccgccgtttgcctaggctataggctatttctccctttccctttcccttgtt

SEQ ID NO: 173606 - DNA, 80 bp, synthetic construct
  source 1..80: mol_type = other DNA
tagaaaccagatatgtggtgaatgataacacaaatgaggaagctgaaatagagatgttcttgggtcgttccgccttgtgg

SEQ ID NO: 173607 - DNA, 80 bp, synthetic construct
  source 1..80: mol_type = other DNA
tgccgaggatcaacccacacagcctgacgtagcaacatgccgcttttatactttagattcaatcaagtgggaaaagggat

SEQ ID NO: 173608 - DNA, 80 bp, synthetic construct
  source 1..80: mol_type = other DNA
cgtttccggcccctaggagaccctggttccccagaccggatccttacctggctttacaggtgcaggagctggcccggtcc

SEQ ID NO: 173609 - DNA, 80 bp, synthetic construct
  source 1..80: mol_type = other DNA
aaaggagggacaactagaagaagcgccccctactaatccatacaacacacccaccttcgccataaaaaagagagataaaa

SEQ ID NO: 173610 - DNA, 80 bp, synthetic construct
  source 1..80: mol_type = other DNA
acaagagaaattccacaacctcctaaaaggaaatcagattacaaccatttttaatacatgtctcaaggatgagttgagga

SEQ ID NO: 173611 - DNA, 80 bp, synthetic construct
  source 1..80: mol_type = other DNA
ttgcacaggttgatactctggttccaataaataatgcaaataatgtcagtggactagatatgtacaggattccactcaca

SEQ ID NO: 173612 - DNA, 80 bp, synthetic construct
  source 1..80: mol_type = other DNA
aaaactggtttgagtcctgcctcagatcacacgcatgcttttgtggctgtaataatcctgttattcattttaataacatt

SEQ ID NO: 173613 - DNA, 80 bp, synthetic construct
  source 1..80: mol_type = other DNA
tccgaatggctgagttttccacgcccgtccgcggcgagaacgccacggacgaagattctcgcgtcccgagggcgggtgcc

SEQ ID NO: 173614 - DNA, 80 bp, synthetic construct
  source 1..80: mol_type = other DNA
taagtcgctctccgcttcttcagagtcggacatggataggaaaggttcctctaggtcagacaggtagcggacgaggccag

SEQ ID NO: 173615 - DNA, 80 bp, synthetic construct
  source 1..80: mol_type = other DNA
ttctcatcccagtttataccatccagtgatactgaagccaagaacaagtttgcaccatgggattggttacttggttgtgg

SEQ ID NO: 173616 - DNA, 80 bp, synthetic construct
  source 1..80: mol_type = other DNA
tctatgtcttatacaaattgatgtgctttacacaaggtgcctatagtggattaccaagcccagtacccaagaaaccagag

SEQ ID NO: 173617 - DNA, 80 bp, synthetic construct
  source 1..80: mol_type = other DNA
gctagccactatagatttactaccccagatacatactcacaagcaggttacatcacttgttggtatcaaactaattttgt

SEQ ID NO: 173618 - DNA, 80 bp, synthetic construct
  source 1..80: mol_type = other DNA
aacttgaaattacagttataaaattggataggaatgagaagttcagggatataaggaaatatataccagagagtgaggat

SEQ ID NO: 173619 - DNA, 80 bp, synthetic construct
  source 1..80: mol_type = other DNA
agtgcctacaacggtctgttaagtaacttgccaaacaacttaaacaacaacactgaaaaaattgaaaacaatatatataa

SEQ ID NO: 173620 - DNA, 80 bp, synthetic construct
  source 1..80: mol_type = other DNA
attcctacttaatggagctatgcctccatggaaaagacacttacctacactacataaaaattttggaaccttatttaaaa

SEQ ID NO: 173621 - DNA, 80 bp, synthetic construct
  source 1..80: mol_type = other DNA
catctcaggtgacacccagtgataccatgcaaaccaggcatgtcaagaactaccattccagatctgagtccagcattgaa

SEQ ID NO: 173622 - DNA, 80 bp, synthetic construct
  source 1..80: mol_type = other DNA
ttagcttaaataagtattataatttaacaatgtactgtagaaggccagggaataagacagtcttaccagtaaccattatg

SEQ ID NO: 173623 - DNA, 80 bp, synthetic construct
  source 1..80: mol_type = other DNA
tttgaactggacagcatttccatactagacggattcagcatgcaccagagctcttctgcaactagtactggtacgttttc

SEQ ID NO: 173624 - DNA, 80 bp, synthetic construct
  source 1..80: mol_type = other DNA
accacaatgggcgcccaggtttcatcccagaaagttggcgctcatgaaaattcgaatagggcatatggaggttcaactat

SEQ ID NO: 173625 - DNA, 80 bp, synthetic construct
  source 1..80: mol_type = other DNA
cccttttattttcccgagcataaataaagtatacatgtttcccccagcagaggctaaaagggctcccagcaccggagact

SEQ ID NO: 173626 - DNA, 80 bp, synthetic construct
  source 1..80: mol_type = other DNA
agcatgtgtatacattgaagaatatttcaccaaagaccaggacagtgccaacagatacatgtcatggaccataaatgcta

SEQ ID NO: 173627 - DNA, 80 bp, synthetic construct
  source 1..80: mol_type = other DNA
tcgcctacggcgtatggcctcactacttaacacctcaagatgccactgctattgacaaaccatcacgcccagatacttcc

SEQ ID NO: 173628 - DNA, 80 bp, synthetic construct
  source 1..80: mol_type = other DNA
tgccgcaagcgactcctattccaaggaaccaaactgggatccctggtcagactcggaggagacacagtcgaagagcagcc

SEQ ID NO: 173629 - DNA, 80 bp, synthetic construct
  source 1..80: mol_type = other DNA
tggctacaagcccaaatcagacggctacgcgattacctgcgtttccccacccgcttagagtttattcccctagtcattta

SEQ ID NO: 173630 - DNA, 80 bp, synthetic construct
  source 1..80: mol_type = other DNA
cagttccatttgattcagctcttaatcactgcaattttgggttgttggtcgtcccggtggtgccattggactttaataca

SEQ ID NO: 173631 - DNA, 80 bp, synthetic construct
  source 1..80: mol_type = other DNA
gtggggtcccagctcagcaattgtccaaattctgtctccccaatagtgactcgcttcttatcctgtctttcagagcatcc

SEQ ID NO: 173632 - DNA, 80 bp, synthetic construct
  source 1..80: mol_type = other DNA
tggtgtccacgtgcacctagggctgtcccatacacacacaccagatcaacaaattacatgccacgggaaggtgatccaac

SEQ ID NO: 173633 - DNA, 80 bp, synthetic construct
  source 1..80: mol_type = other DNA
tagatgcatccaataaatttctgcctctgtatgcacttgagaataaaagaatcaaagagttacttaaaagaagtgaaatg

SEQ ID NO: 173634 - DNA, 80 bp, synthetic construct
  source 1..80: mol_type = other DNA
aagatgtgtggtaagaatttgctacttgttgccagcttgctagctagtattcgcttaatatactgtgcccgccaatatgt

SEQ ID NO: 173635 - DNA, 80 bp, synthetic construct
  source 1..80: mol_type = other DNA
gagataacaattgtagctacactagcagggcaaggagatgatttaggacatattgcactccagtacatgtatgttccccc

SEQ ID NO: 173636 - DNA, 80 bp, synthetic construct
  source 1..80: mol_type = other DNA
cacatagagcccccaccttacatcccagacctactttttcccaatactggtaaaaaaaaaaaattctctcccttcgactg

SEQ ID NO: 173637 - DNA, 80 bp, synthetic construct
  source 1..80: mol_type = other DNA
caagagtattgcagacatggctactggcatcacaaaaactgttgactctacaattaactcagtaaatgagacaattggca

SEQ ID NO: 173638 - DNA, 80 bp, synthetic construct
  source 1..80: mol_type = other DNA
ccgtcttgtcagggaagaaaacagatgaattagaaaaagttaggttacggcccggcggaaagaaaaaatattgtctaaag

SEQ ID NO: 173639 - DNA, 80 bp, synthetic construct
  source 1..80: mol_type = other DNA
tttgtggatcagcaatggcaaccggaaaatttttgttagcttattcaccgccaggtgctggggtgccgcctgacagaaag

SEQ ID NO: 173640 - DNA, 80 bp, synthetic construct
  source 1..80: mol_type = other DNA
gggggcttattacagggaagaagaaaatctagaagcaacagtgcttaaaaatcaagataatcaatggacctacaagatcc

SEQ ID NO: 173641 - DNA, 80 bp, synthetic construct
  source 1..80: mol_type = other DNA
atgttcagtacaatattcctagcaccagacagaccagtacctagatttccctgcgcctatcaagatgtcacatacaaccc

SEQ ID NO: 173642 - DNA, 80 bp, synthetic construct
  source 1..80: mol_type = other DNA
tcaaatggccgtgaaagcaatcggaaatataattgagacgtcagcaggagtcccgatcattcaggaagaagtcatatatt

SEQ ID NO: 173643 - DNA, 80 bp, synthetic construct
  source 1..80: mol_type = other DNA
tacatttggtttgggtacccaggtgatggccgctgccgacacccgccctcctcctcttaccctgggtggcaaaaagtatg

SEQ ID NO: 173644 - DNA, 80 bp, synthetic construct
  source 1..80: mol_type = other DNA
aacgctgcgccgccgctggctggactctttctgatcgaccatacctcactcgaattggtctgagagatagtgagttatgg

SEQ ID NO: 173645 - DNA, 80 bp, synthetic construct
  source 1..80: mol_type = other DNA
tccgcccgagagcaggtcggtcaggcgtctacgggccgcctccaggtcaaattttccgtcgccgctctcggccagctggg

SEQ ID NO: 173646 - DNA, 80 bp, synthetic construct
  source 1..80: mol_type = other DNA
gtggaaaacccgtgaaccgatacgggtacagacggccgaaaaaattcgagacgacaatacgacggcagggcgtgattttc

SEQ ID NO: 173647 - DNA, 80 bp, synthetic construct
  source 1..80: mol_type = other DNA
tattccatctttcttagaacctccagcatacaaagaaataaagaacaaccgactaatatttgatgataatcccataattg

SEQ ID NO: 173648 - DNA, 80 bp, synthetic construct
  source 1..80: mol_type = other DNA
gagcagctccagcagcgtgtcggccgagtcgccgttttccacggcgtgcttgaggatattgcgacagtagttggaatcaa

SEQ ID NO: 173649 - DNA, 80 bp, synthetic construct
  source 1..80: mol_type = other DNA
gtgttatgcataccatggattagccaaacccattaccgctatgtagcatccgatgagtacaccgcagggggctttatcac

SEQ ID NO: 173650 - DNA, 80 bp, synthetic construct
  source 1..80: mol_type = other DNA
ctcgagctcctaccgaaggactatcccggtccctcgtgtctgctcatggccaccttcatgcgataggctatacccccaag

SEQ ID NO: 173651 - DNA, 80 bp, synthetic construct
  source 1..80: mol_type = other DNA
aatttgacggtgagcgataaagcaccgttaatgtgtcgcggataagcacgatcttgaggccgtagatgaagctcacagtc

SEQ ID NO: 173652 - DNA, 80 bp, synthetic construct
  source 1..80: mol_type = other DNA
tgtatgtgcccccaggtgcgcctaaaccccaggagcgtgactcgtttcagtggcaaacagcgaccaatccatcagtgttt

SEQ ID NO: 173653 - DNA, 80 bp, synthetic construct
  source 1..80: mol_type = other DNA
ctgctgcaactacccccaagcccataagtcccaggtaccgtcactccagtttctggccttagtagtagtacagcaaaatg

SEQ ID NO: 173654 - DNA, 80 bp, synthetic construct
  source 1..80: mol_type = other DNA
acttcgccatagggcctttaacttccgggtccgtatgggggccgccattttagcttcggccgccattttaggccctcgcg

SEQ ID NO: 173655 - DNA, 80 bp, synthetic construct
  source 1..80: mol_type = other DNA
aaggtacccatgtgccgagtatgaggaatacgggggcctttggtcaacaatcaggtgccgtttatgtgggaaattacagg

SEQ ID NO: 173656 - DNA, 80 bp, synthetic construct
  source 1..80: mol_type = other DNA
tttttactagaacaatacagctactacaacactaaacaagtagtagcacaacttaaatatgactgggaccctaaaatgaa

SEQ ID NO: 173657 - DNA, 80 bp, synthetic construct
  source 1..80: mol_type = other DNA
ccatgcgagtgcttgtgatagctgtattagagatagatgttgaagttgatgcaggtaatgattggtatgtagatgaggta

SEQ ID NO: 173658 - DNA, 80 bp, synthetic construct
  source 1..80: mol_type = other DNA
gcacaaagccaaaaagacctagacttttccctgttacagagaggggcgaaggggtccagcagcaagaaggagactccagt

SEQ ID NO: 173659 - DNA, 80 bp, synthetic construct
  source 1..80: mol_type = other DNA
gttgacattcacattctgcgggtcagcgatggccacaggaaagctgctcctggcatattcgcctcctggcgccgatgttc

SEQ ID NO: 173660 - DNA, 80 bp, synthetic construct
  source 1..80: mol_type = other DNA
tcccacaggccaaccacagtctatgtcgtgcacttcctgggcatggtctacgtgataatataaagcggtgcacttccgaa

SEQ ID NO: 173661 - DNA, 80 bp, synthetic construct
  source 1..80: mol_type = other DNA
catctagcagcgtgttttgggtcttgatgaggaacacgatcctgtctaggattttgatgttgttgccgaatgagtccaga

SEQ ID NO: 173662 - DNA, 80 bp, synthetic construct
  source 1..80: mol_type = other DNA
cagagtaatgaagggacccttcggagggggccacagtaccctaagatactctctgtacgtactgtaccaagagcacctca

SEQ ID NO: 173663 - DNA, 80 bp, synthetic construct
  source 1..80: mol_type = other DNA
agatcaagaacttaaagacgcctttctagcaaagataagcaatgacttagattatacacagctgaagattactcatgatc

SEQ ID NO: 173664 - DNA, 80 bp, synthetic construct
  source 1..80: mol_type = other DNA
tgagattcgatggcatacttgtgtctaagattaatccctcatcatcattccctttaactgcattgttcaacatgtataag

SEQ ID NO: 173665 - DNA, 80 bp, synthetic construct
  source 1..80: mol_type = other DNA
accttagaatctttaaattgctctactgcaaatgtaccaacaaccaccaacgtttctacaaagtcgtcggcaataaccac

SEQ ID NO: 173666 - DNA, 80 bp, synthetic construct
  source 1..80: mol_type = other DNA
gaatacacataccactatcccaacaatgtcaccacagacttaataaacaacaacagcctcacacatgactggggcatata

SEQ ID NO: 173667 - DNA, 80 bp, synthetic construct
  source 1..80: mol_type = other DNA
atacaaacatagaacacaactgtagatgtgttataagaagcccctacacagtaccacaattattagaccacaacaatccc

SEQ ID NO: 173668 - DNA, 80 bp, synthetic construct
  source 1..80: mol_type = other DNA
ttacaatgaattttgtagaaagatcagaagtgtgcctgtgggaagggcattgacactacctgcatactctagtcttagac

SEQ ID NO: 173669 - DNA, 80 bp, synthetic construct
  source 1..80: mol_type = other DNA
gcgctgttggaaagcgacttcaacttcctccatactccagtctgtacagacaatggattgatgaattcatttagattata

SEQ ID NO: 173670 - DNA, 80 bp, synthetic construct
  source 1..80: mol_type = other DNA
tgtccggcggaggcacgctgtttctctggttagcgacgtggaccgacgacgaagacgatgaacccgcgcggcggtctgtt

SEQ ID NO: 173671 - DNA, 80 bp, synthetic construct
  source 1..80: mol_type = other DNA
atcgggggtcgccataggcttcggcctccattttagggcctaaaaactacccaaatggccgttccagtgacgtcacgggc

SEQ ID NO: 173672 - DNA, 80 bp, synthetic construct
  source 1..80: mol_type = other DNA
cgcgccgaagacctagacgacctctacgcagctatcgaaggagaagagtaaggaggcgccgcggtagggggtggcgtagg

SEQ ID NO: 173673 - DNA, 80 bp, synthetic construct
  source 1..80: mol_type = other DNA
gaggaagtgggaatctcaaagaggaacactacttcaagttcagaaatgatattaaagcaactgtagaaacagcaggaccc

SEQ ID NO: 173674 - DNA, 80 bp, synthetic construct
  source 1..80: mol_type = other DNA
aagagcagaaaataggacatacatttattggcatggaagagacaatagaactataataagtttaaataagtattataatt

SEQ ID NO: 173675 - DNA, 80 bp, synthetic construct
  source 1..80: mol_type = other DNA
ccccctgcaccccctaaattctctgtcagctttaaacttggctttaaaccctgaataaacaaggccatacactgttcact

SEQ ID NO: 173676 - DNA, 80 bp, synthetic construct
  source 1..80: mol_type = other DNA
gttccacttgtcggtgtctgcttcttaaggtcaccaagcactccgagcgccagcgaggagtgcgaccctaggtgggtact

SEQ ID NO: 173677 - DNA, 80 bp, synthetic construct
  source 1..80: mol_type = other DNA
atttacctagtgcacaaagtatatctaaaacaatcaagaatgtgactgctagactggtcttgtctaatgctaaaaacccg

SEQ ID NO: 173678 - DNA, 80 bp, synthetic construct
  source 1..80: mol_type = other DNA
tttgaactcttgcgccacgaatggtatgaaaaattttaaacagatatagaatttataaataattagtttgtagattttat

SEQ ID NO: 173679 - DNA, 80 bp, synthetic construct
  source 1..80: mol_type = other DNA
taggaacatcatcagatgcaaaaccagaggacatgattgaaactagatatgtgataaactcaaaaaccaatggtgaagca

SEQ ID NO: 173680 - DNA, 80 bp, synthetic construct
  source 1..80: mol_type = other DNA
ttgtttacaacccgtctcagaggagtcctgcattaagatgggagattgcgaagttcgcaatgagattgatatggtctcca

SEQ ID NO: 173681 - DNA, 80 bp, synthetic construct
  source 1..80: mol_type = other DNA
agcacatcaaagcttggtgtcctagaccacccagggctgtgccgtacacatccattgacaccactaattacaaacctcat

SEQ ID NO: 173682 - DNA, 80 bp, synthetic construct
  source 1..80: mol_type = other DNA
atgtcacacattccccgttatcacatctggttagcaggttgataaaatgggtcagtgatggaaaggttggcatattgggg

SEQ ID NO: 173683 - DNA, 80 bp, synthetic construct
  source 1..80: mol_type = other DNA
agccgcttcaacaggtaatgttacagctggttataatttaactcatcctggtgagctaggtagagacgtgggcatagcac

SEQ ID NO: 173684 - DNA, 80 bp, synthetic construct
  source 1..80: mol_type = other DNA
tgccagttacccagaagccttagatccatcagagatagctttaacagcaaccaaatatgggttgaccatcacacctgctg

SEQ ID NO: 173685 - DNA, 80 bp, synthetic construct
  source 1..80: mol_type = other DNA
aagaggccggaactcaggaaagccactttacaaggaccccaacatgagttcatacgagctcttatcaagagaaattgcca

SEQ ID NO: 173686 - DNA, 80 bp, synthetic construct
  source 1..80: mol_type = other DNA
gacagttcattagcatattaccaaatgaaaccacaagtgacttactaagacaatttgtacaaactaatgtagcagcacat

SEQ ID NO: 173687 - DNA, 80 bp, synthetic construct
  source 1..80: mol_type = other DNA
taatacaggaatccagttattacccaaaacacatccagtatgacatactgattggtgaagggccatgctctccaggggat

SEQ ID NO: 173688 - DNA, 80 bp, synthetic construct
  source 1..80: mol_type = other DNA
ccctcaaactgctgatagcttacacacctcctggtatcaggaaacctgagaatagaaaagaggcaatgttgggtactcat

SEQ ID NO: 173689 - DNA, 80 bp, synthetic construct
  source 1..80: mol_type = other DNA
gctctactgtaaattacactaccataaactactacaaggattcggcgagcaatgcagcatcaaagcaggatttttcccaa

SEQ ID NO: 173690 - DNA, 80 bp, synthetic construct
  source 1..80: mol_type = other DNA
aggcttgtgatatcctagaggctgcaaagggactggagtggattagtaataagatatccaaatttattgattggctcaag

SEQ ID NO: 173691 - DNA, 80 bp, synthetic construct
  source 1..80: mol_type = other DNA
ctgggtccggtggtgttgcgaggacggagattacgttgggaacggaggtggcgggtacagggggggtttgcgtcgaggac

SEQ ID NO: 173692 - DNA, 80 bp, synthetic construct
  source 1..80: mol_type = other DNA
ctatccctggatgcctaccaattttagagtcagtttcaaactgggatttaaaccctaaataaaaattacaaggccgtaca

SEQ ID NO: 173693 - DNA, 80 bp, synthetic construct
  source 1..80: mol_type = other DNA
tgagtactcggaaacagcggtgaggcagaagctcggttctccagggaacgaccgtcgatgcgtggtaggcgcagcaggtg

SEQ ID NO: 173694 - DNA, 80 bp, synthetic construct
  source 1..80: mol_type = other DNA
aaaggaaacaaaatatggttagacagcctaacaaaaagcgacaatatatatgacccaagacaaagcattctactaatggc

SEQ ID NO: 173695 - DNA, 80 bp, synthetic construct
  source 1..80: mol_type = other DNA
gcttgtatgggtacacagcattaaacaagatgggtaggatattcgtgcgccacgtcaacaaggagacaccattgcaagtc

SEQ ID NO: 173696 - DNA, 80 bp, synthetic construct
  source 1..80: mol_type = other DNA
aaaaagttgttcgccacttggaatattacatacacagacacagtgcagctcagaaggaagttggagatgttcacttactc

SEQ ID NO: 173697 - DNA, 80 bp, synthetic construct
  source 1..80: mol_type = other DNA
ctctgtagaagaggagctaggcatctcctctgaaatctacaactcctgcatagtagtagtgcagtgtccttatacctttc

SEQ ID NO: 173698 - DNA, 80 bp, synthetic construct
  source 1..80: mol_type = other DNA
tgaaagacactcaaacaatatcacagacagaagctcttacggaaggatttgaagatgagctggaagaagttgttatcgac

SEQ ID NO: 173699 - DNA, 80 bp, synthetic construct
  source 1..80: mol_type = other DNA
agtaaggctgggaagcttaatgtgagtcaagctatggcctgtctcttatacacatctgagcgctgcgacgaatcgagtgg

SEQ ID NO: 173700 - DNA, 80 bp, synthetic construct
  source 1..80: mol_type = other DNA
gcagaagcccaagaagaggaggagacggtctccgtccgagagcagttgcagctccaattccaagagcagctcagaatcag

SEQ ID NO: 173701 - DNA, 80 bp, synthetic construct
  source 1..80: mol_type = other DNA
tcactctcctcttgattttggtgtttcgctcagcgtggtatcccccacgtagatcagggcaatgaggctgcatattcccc

SEQ ID NO: 173702 - DNA, 80 bp, synthetic construct
  source 1..80: mol_type = other DNA
aatacccacaccaacggagtcagactattagcacaggtagttcaaaaaataggaaaggaagcactagtcatttggggacg

SEQ ID NO: 173703 - DNA, 80 bp, synthetic construct
  source 1..80: mol_type = other DNA
ttatgcaattcatgtatgtaccacctggtgcaccaaaaccagaaaagaggaatgattacacctgggagtcaagtacaaac

SEQ ID NO: 173704 - DNA, 80 bp, synthetic construct
  source 1..80: mol_type = other DNA
gatttttcggccgttttttgccgttttgttcagtatgcttctcacagcttgccgccgcaaggagcatgagcgcatcttca

SEQ ID NO: 173705 - DNA, 80 bp, synthetic construct
  source 1..80: mol_type = other DNA
acacccaaaagaccctagattagaggttgatctagacacagcagttatgtctaagtacaagggaaacccacaagtggagc

SEQ ID NO: 173706 - DNA, 80 bp, synthetic construct
  source 1..80: mol_type = other DNA
tcccagactcctcttccactcgtttgaccaaagacgggggttctttactgaaagagctatcaaacgaatgcatgatgaac

SEQ ID NO: 173707 - DNA, 80 bp, synthetic construct
  source 1..80: mol_type = other DNA
tcgcatccgttcagccaaccgtcaagtaacaacatttgcacaacctttcaggtccttaaagacaaatactacccaattat

SEQ ID NO: 173708 - DNA, 80 bp, synthetic construct
  source 1..80: mol_type = other DNA
ggacttagaataagtatctatatagtacaaatgctattaaggcttagggagggctataggcccgtgttctcttccccacc

SEQ ID NO: 173709 - DNA, 80 bp, synthetic construct
  source 1..80: mol_type = other DNA
tctaccaaccatgaacactccaggcagtaatcaatttctcacctcagatgattttcaatcaccatcggccatgccccaat

SEQ ID NO: 173710 - DNA, 80 bp, synthetic construct
  source 1..80: mol_type = other DNA
ttacaaaatggctaacttccttcctcttttttgaaaaaaggcgccaaaaaaccgtcagcgggggggccgcgcgctgcgcg

SEQ ID NO: 173711 - DNA, 80 bp, synthetic construct
  source 1..80: mol_type = other DNA
gtattttgtacaaaattggccaggttttgggcattcatgttgggggcaatggaagggatggttttgcagctatgctgttg

SEQ ID NO: 173712 - DNA, 80 bp, synthetic construct
  source 1..80: mol_type = other DNA
aattatgttattccaaacacatcttcaagactcaatactatgaggtggaaggagggatgccatcagggtgtgctggaacc

SEQ ID NO: 173713 - DNA, 80 bp, synthetic construct
  source 1..80: mol_type = other DNA
tttttgccataaacgtggacatagcctctcatcctttagcaactacattattaggggaaattgctggttattatacccat

SEQ ID NO: 173714 - DNA, 80 bp, synthetic construct
  source 1..80: mol_type = other DNA
gtaaggtaagtactccaaattttgaactgtctactctagaggagagtagggcataagtgggagatgggcgcgagaggctc

SEQ ID NO: 173715 - DNA, 80 bp, synthetic construct
  source 1..80: mol_type = other DNA
ttcacctccaaagaataggaaagatgcaatgcttggcactcacatcatctgggatctgggactgcaatctagctgcacta

SEQ ID NO: 173716 - DNA, 80 bp, synthetic construct
  source 1..80: mol_type = other DNA
tctgcttcaacaggaggcgcagcctgtcattttcagatgatttggcagaagccacctgcggacaaaaatcaggcgtttag

SEQ ID NO: 173717 - DNA, 80 bp, synthetic construct
  source 1..80: mol_type = other DNA
ttgtgtctagcttcagcatgcaatgatttctctgttaggatgttgcgagacacccccttcattgagcagaagcagttatt

SEQ ID NO: 173718 - DNA, 80 bp, synthetic construct
  source 1..80: mol_type = other DNA
aactgggtttcaatcacgatacctgcgcggcctacgcacaaatggcgctgatccagccggccagtcagaagagctcgctc

SEQ ID NO: 173719 - DNA, 80 bp, synthetic construct
  source 1..80: mol_type = other DNA
tcagctcaattgatgactttagacattgactcagtaaatatatctttagaagagagtgtatttggcactgaaggtctaga

SEQ ID NO: 173720 - DNA, 80 bp, synthetic construct
  source 1..80: mol_type = other DNA
agatactttccaaaaacttgattttagtaatgctactttcttgaagaggggctttaaaccagatgaaaaacatagcttcc

SEQ ID NO: 173721 - DNA, 80 bp, synthetic construct
  source 1..80: mol_type = other DNA
tgggctggaaacgtcttcgtcgtaattttacggcggaaaaggttagatttgattcattagccaagatctagagattctag

SEQ ID NO: 173722 - DNA, 80 bp, synthetic construct
  source 1..80: mol_type = other DNA
atgccaacctcttttagagtgtctttcaagctaggctttcaataaaatgtgctcagtttcaacttgcaaggccgtgggag

SEQ ID NO: 173723 - DNA, 80 bp, synthetic construct
  source 1..80: mol_type = other DNA
catgctgagcaagtacacgcgcatgtccagcctgtttaatgacaagtgcgcctttaagctggacctgttgcgcatggtag

SEQ ID NO: 173724 - DNA, 80 bp, synthetic construct
  source 1..80: mol_type = other DNA
gggagcggccgttggtgggcatgtgttggaattgctcccaccctcaattttcgcttgccttcttcccttgttaacctgat

SEQ ID NO: 173725 - DNA, 80 bp, synthetic construct
  source 1..80: mol_type = other DNA
actggaaaattcttactagcttacaccccaccaggaggagccctgccaaccacacgtaagcaagccatgctaggcgttca

SEQ ID NO: 173726 - DNA, 80 bp, synthetic construct
  source 1..80: mol_type = other DNA
gctagtaccagtaaacataccagaggaagaaaagggagcagaaaacagctgcctgatgcacccagcacaaacctcttcat

SEQ ID NO: 173727 - DNA, 80 bp, synthetic construct
  source 1..80: mol_type = other DNA
ggaaatggccagccgccgcgcccagaccccccgcctagactgagggccctgccggccccgtctagctccagcactcccac

SEQ ID NO: 173728 - DNA, 80 bp, synthetic construct
  source 1..80: mol_type = other DNA
gccatcatttttgtctgatgttgatgccaatgatgttaacaaaacaacaaaaccagacacatcagtatgtatattctata

SEQ ID NO: 173729 - DNA, 80 bp, synthetic construct
  source 1..80: mol_type = other DNA
aatttccagtgttagaagatctagctatgtcagggccttttgctccaaaagacaaaatacctagcagtacacttacagta

SEQ ID NO: 173730 - DNA, 80 bp, synthetic construct
  source 1..80: mol_type = other DNA
aggtttaatgctgaattcaccttcgtcacaaccactgagaatggtgaagcccgcccgtacatgttgcagtacatgtacat

SEQ ID NO: 173731 - DNA, 80 bp, synthetic construct
  source 1..80: mol_type = other DNA
tgaagtaggagcctatgtaagacccaacaagccactgagaccaatgacatacaagatggcaatagacatgtctcattttt

SEQ ID NO: 173732 - DNA, 80 bp, synthetic construct
  source 1..80: mol_type = other DNA
agtatctgagtgataaggaggcaacagcggaagatcagccaactcaaccagacgtggcaacctgccggttctacaccttg

SEQ ID NO: 173733 - DNA, 80 bp, synthetic construct
  source 1..80: mol_type = other DNA
tagaaagaaatactggcaaacacttacaggaacaaacgatttacatagctcatatggcaaagccacatctgaacaatttg

SEQ ID NO: 173734 - DNA, 80 bp, synthetic construct
  source 1..80: mol_type = other DNA
tgtacataggggcatatgtaacagcaccgataccaacaattctacatctacttcaaatagcaccgtctctgatactaatg

SEQ ID NO: 173735 - DNA, 80 bp, synthetic construct
  source 1..80: mol_type = other DNA
tttacaaaaataacatgggaaaacattacattccttaaaaggtatttcagacctgacccacaatttccttttttggtcca

SEQ ID NO: 173736 - DNA, 80 bp, synthetic construct
  source 1..80: mol_type = other DNA
ggtggtggcgacgcccgcagagacggtggagacggaggagagcgcgccgcccgagacgagtaccgcgacgacgatatcga

SEQ ID NO: 173737 - DNA, 80 bp, synthetic construct
  source 1..80: mol_type = other DNA
aatacaatattaatgtttatcacaacaatgggtattatctacatgatttacaagatgtttgcccagatgcaaggacctta

SEQ ID NO: 173738 - DNA, 80 bp, synthetic construct
  source 1..80: mol_type = other DNA
ccccaatgggatcgagagaaacctgtgggaggcattctttcgcatgcacgctgcagcgtgtggttgtggcgatcttgttg

SEQ ID NO: 173739 - DNA, 80 bp, synthetic construct
  source 1..80: mol_type = other DNA
tgagccaccactggcgggagccctacgacaatgtccccaaccgggagagaaactggctcgaggtggtcctcagaagtcac

SEQ ID NO: 173740 - DNA, 80 bp, synthetic construct
  source 1..80: mol_type = other DNA
ttagaagcatacaattcaagctcaataggagggggtgcaagccagcgcctccgtgggcaagcactactgtttccccggtg

SEQ ID NO: 173741 - DNA, 80 bp, synthetic construct
  source 1..80: mol_type = other DNA
accatcaattgcaagacgacattagtgaatcacactttattgtgtattacaatccagagcatgaagattaaataacgttt

SEQ ID NO: 173742 - DNA, 80 bp, synthetic construct
  source 1..80: mol_type = other DNA
caagtcaggggcaaataatctctagacagaagttaaaagaccttaacttgtccccagttaacactcccactaagacaaag

SEQ ID NO: 173743 - DNA, 80 bp, synthetic construct
  source 1..80: mol_type = other DNA
cctgggcacccaagccccaaccctcattttctgtcaccttcaagcttggttttaagccctaaataaaaaatgcaaggccg

SEQ ID NO: 173744 - DNA, 80 bp, synthetic construct
  source 1..80: mol_type = other DNA
ggagggctgcgtcaccaacgcggaagtggctgtcccacgtgacttgtcacgtgactgctacgtcacggccgccattttag

SEQ ID NO: 173745 - DNA, 80 bp, synthetic construct
  source 1..80: mol_type = other DNA
taatgctgccaagggattggaatggatagcaagtaaaatatcaaaattaattgactgggtgaaaaacaaaatcctaccac

SEQ ID NO: 173746 - DNA, 80 bp, synthetic construct
  source 1..80: mol_type = other DNA
agaaccgacccgtaaaccgcggttacggtgtttcttgcgctccgaggacgtcgcggctatcaccgtcagaatcgacggtg

SEQ ID NO: 173747 - DNA, 80 bp, synthetic construct
  source 1..80: mol_type = other DNA
ggggtcgacggtgggccgtcatgacacctcaattgccgtcagtacgcccctccacaatcaccgtccctacacgatgggcc

SEQ ID NO: 173748 - DNA, 80 bp, synthetic construct
  source 1..80: mol_type = other DNA
cctctaccaattctcacaccataactccacccacagtctctcacagtgatgctctgagcaggaggtttgcctttgacatg

SEQ ID NO: 173749 - DNA, 80 bp, synthetic construct
  source 1..80: mol_type = other DNA
tgacaccaggttccagccagtatctaacgtctgatgattttcaatcaccatgtgctctaccaaattttgatgtcacccca

SEQ ID NO: 173750 - DNA, 80 bp, synthetic construct
  source 1..80: mol_type = other DNA
aacagtctatggggagacttagtatacaaaaaagacatagtagacggcatgaaaaccaatgcagcaaacatgtaccaaag

SEQ ID NO: 173751 - DNA, 80 bp, synthetic construct
  source 1..80: mol_type = other DNA
cttttacgcacgaggcgttgagcaaaggtgaggtcgccatggaatttagtccaggggactcaacagagggtgtacaagct

SEQ ID NO: 173752 - DNA, 80 bp, synthetic construct
  source 1..80: mol_type = other DNA
ggtaaggaggtgtatgaggaatttatacaaaagataagaacagttccagttggaagaacattggtcttacctccatattc

SEQ ID NO: 173753 - DNA, 80 bp, synthetic construct
  source 1..80: mol_type = other DNA
gcattggcgtcaggagacacggctctgtcagttatcaccgtaccatgagtgccatgtgtgtccagtgcctaatcaccgtt

SEQ ID NO: 173754 - DNA, 80 bp, synthetic construct
  source 1..80: mol_type = other DNA
gacttataaattggcaataaatatgtcacattttataaaagaaaaggggggactggaagggatgttttacagtgagagga

SEQ ID NO: 173755 - DNA, 80 bp, synthetic construct
  source 1..80: mol_type = other DNA
ctgaaataataactgcatttgggccagctttgcagaatccagtaaatacaaggattaccattcaagcaatatctagtgtg

SEQ ID NO: 173756 - DNA, 80 bp, synthetic construct
  source 1..80: mol_type = other DNA
cgacccaatgcttgaaagtatacctggaattttatcaagagcatcccatggtgaattattccatgctccataagcaatac

SEQ ID NO: 173757 - DNA, 80 bp, synthetic construct
  source 1..80: mol_type = other DNA
tatcatgtcccaacacaggctaatgatggaacacttgaagagaggcactatttcaagttcagaggggatatcaagacagc

SEQ ID NO: 173758 - DNA, 80 bp, synthetic construct
  source 1..80: mol_type = other DNA
ctgtggttagcacagaggaagacaaaagcttgtttaccaaattcttaaagtctgtaatgccagctacatctaatagaaaa

SEQ ID NO: 173759 - DNA, 80 bp, synthetic construct
  source 1..80: mol_type = other DNA
actgaagggcaggactgtacttgtggtgggggataagatgaacattcccggaaaaactgtagactggctttctgaacatc

SEQ ID NO: 173760 - DNA, 80 bp, synthetic construct
  source 1..80: mol_type = other DNA
gaagacctagagctactgttcgccgccgcagaagaagacgctatgtgagtagaaggcgccgctacaggcgcagaggcaga

SEQ ID NO: 173761 - DNA, 80 bp, synthetic construct
  source 1..80: mol_type = other DNA
gggcttttgcgctagggacttgcgggggagggggggtgtgcaggacggcggtaggaacgtgctaagagacggaaggttgt

SEQ ID NO: 173762 - DNA, 80 bp, synthetic construct
  source 1..80: mol_type = other DNA
gaaatggtcttggacagcttaggatttcctggttacttaatgagtagattgaacaaaactacacacatatttaaggatga

SEQ ID NO: 173763 - DNA, 80 bp, synthetic construct
  source 1..80: mol_type = other DNA
gaagtacgtcactaaccacgtgactcccgcaggccaaccacagcctatgtcgtgcatttcctgggccgggtctacgtcct

SEQ ID NO: 173764 - DNA, 80 bp, synthetic construct
  source 1..80: mol_type = other DNA
tcgtcgtaggcggcggccacgatctcgccgaaggagagctgcaggtaggcttcgggtacggggtccagcgtgcctagcgc

SEQ ID NO: 173765 - DNA, 80 bp, synthetic construct
  source 1..80: mol_type = other DNA
ccagggttgattcttttataccattgaataacatagaaggggaaacaacaaagcccagtgtttactgtgtgacagtccca

SEQ ID NO: 173766 - DNA, 80 bp, synthetic construct
  source 1..80: mol_type = other DNA
tttgctataaatgtagatatagcatcccaccccttagcaaccaccatgctaggagaaattgcaagttattacacacactg

SEQ ID NO: 173767 - DNA, 80 bp, synthetic construct
  source 1..80: mol_type = other DNA
taccaggccccttaccagcagggcagcttagagacccaagggggtctgacatagcaggaacaacaagcacagtagatgag

SEQ ID NO: 173768 - DNA, 80 bp, synthetic construct
  source 1..80: mol_type = other DNA
ctctcccaagtttacaatcagatgcttgaagaggacaagaggcggcgtcaagtggtagatgttatggcagctatctttca

SEQ ID NO: 173769 - DNA, 80 bp, synthetic construct
  source 1..80: mol_type = other DNA
attcgcccttgcgtgtccattgttgcaaggagcgatttggagaaaataaactgtgagtttcacagatccacgggccacgc

SEQ ID NO: 173770 - DNA, 80 bp, synthetic construct
  source 1..80: mol_type = other DNA
agtcaatacctcaattttaaaacaggaatgtacagtgctatatttttatctgatcaaagactaagtccagactatccagg

SEQ ID NO: 173771 - DNA, 80 bp, synthetic construct
  source 1..80: mol_type = other DNA
caagtggtggggccttggtgggctgcataaggcagtaggttttaggtgacctacttggaccatgtggatccagtgtcctg

SEQ ID NO: 173772 - DNA, 80 bp, synthetic construct
  source 1..80: mol_type = other DNA
cttcgcgcgcgcgccggtgggctccgcccccccccgcgcatgcgcggtgccccccccccgcgtgagggctccgccgcccg

SEQ ID NO: 173773 - DNA, 80 bp, synthetic construct
  source 1..80: mol_type = other DNA
aatgcaagaaaaacagagagatgctgactttattgcaggacctccaaaaaaaccaagattcgaggtcccccccgcggagc

SEQ ID NO: 173774 - DNA, 80 bp, synthetic construct
  source 1..80: mol_type = other DNA
cgtgaaagagccagggggagaggtcgtggacgtggtgaaaagaggcccaggagtcccagtagtcagtcatcatcatccgg

SEQ ID NO: 173775 - DNA, 80 bp, synthetic construct
  source 1..80: mol_type = other DNA
ctactgcaactacaccagcaaacaccgtttctacaaaaccgtcgaaaacaaccacacagatatccacaacgacgaacaca

SEQ ID NO: 173776 - DNA, 80 bp, synthetic construct
  source 1..80: mol_type = other DNA
agaggctttaaacaagattccaaatatcccttcttgatacatccaacatttccagtgaatgaaatacatgagtcaaacgc

SEQ ID NO: 173777 - DNA, 80 bp, synthetic construct
  source 1..80: mol_type = other DNA
tggtgaaatagctagttattacactcactggacaggcagtctacgttttagctttttattctgtggcacagcatgtacta

SEQ ID NO: 173778 - DNA, 80 bp, synthetic construct
  source 1..80: mol_type = other DNA
tggataattccagcagattgcaaaattgagcgtgatttaaatcttgcaaatagtataataacaattatagcaaatattat

SEQ ID NO: 173779 - DNA, 80 bp, synthetic construct
  source 1..80: mol_type = other DNA
ttgacaaatggggaggatacttgtaaactgacccaggatgctgcacctgccgaaaaaggcaaggtgcagacagcagtgtg

SEQ ID NO: 173780 - DNA, 80 bp, synthetic construct
  source 1..80: mol_type = other DNA
tcacaggctcggcaccatccatgccgcccgactcgactcctagaccagctatgagagccctgcctgctcctccggtacca

SEQ ID NO: 173781 - DNA, 80 bp, synthetic construct
  source 1..80: mol_type = other DNA
tgggcagatttggaaatgacaggaggctttaagagctgggacattaactttcaagagcaggctcaaattaggaggaaaat

SEQ ID NO: 173782 - DNA, 80 bp, synthetic construct
  source 1..80: mol_type = other DNA
agacatgattgaaactcgttatgtgcaaacatcacaaaccagagatgaaatgagtgtagaaagctttctaggaagatcag

SEQ ID NO: 173783 - DNA, 80 bp, synthetic construct
  source 1..80: mol_type = other DNA
gtaagtactggaacaggcctcccagaaagtaccacacagatgtacccttttacccagacgtccccaaagtcccagagcaa

SEQ ID NO: 173784 - DNA, 80 bp, synthetic construct
  source 1..80: mol_type = other DNA
gacctatatgaataccacacaggagtctacagctccatctttttaagttcaggcagagcatactttgagacaacaggggc

SEQ ID NO: 173785 - DNA, 80 bp, synthetic construct
  source 1..80: mol_type = other DNA
aaagttagagtacgtcactggtgcatctaatgtcgtgcccatcacggtgaccatagcccctatgtcggcagagtacaacg

SEQ ID NO: 173786 - DNA, 80 bp, synthetic construct
  source 1..80: mol_type = other DNA
gtcacgtgctccgcgtgttccgacatgtcagtccgcatgttgcgagatacaccaatgatgcgacaggaagatgacataac

SEQ ID NO: 173787 - DNA, 80 bp, synthetic construct
  source 1..80: mol_type = other DNA
ggaagatcataatagtagcagtccatgtagccagtggatttatagaagcagaagtaataccccaagaaacaggaagacag

SEQ ID NO: 173788 - DNA, 80 bp, synthetic construct
  source 1..80: mol_type = other DNA
catttgaacataaaacaggaatattttctcctgccttactaagtccacaaagactaaacccacaagtaccaggactgtac

SEQ ID NO: 173789 - DNA, 80 bp, synthetic construct
  source 1..80: mol_type = other DNA
tcagtcgctggctggtgggcatcggagtcggtgggcggtcttccacggggacacgctccttcttggccttgttctttgac

SEQ ID NO: 173790 - DNA, 80 bp, synthetic construct
  source 1..80: mol_type = other DNA
aattgttatctcaaaaccagcggttgaacttggcttaccaagcattcacacaccaaacaaaacaaaattgcaacctagtg

SEQ ID NO: 173791 - DNA, 80 bp, synthetic construct
  source 1..80: mol_type = other DNA
atggcaacctttgtcctggccacatgagacaagagttatacttcacggaccacccacgcagggtgaccaagcacacggtt

SEQ ID NO: 173792 - DNA, 80 bp, synthetic construct
  source 1..80: mol_type = other DNA
atgcggggaatttgtcaatgtggatggtagattagtgaaagtgttgaaacaacagattctaactgatatggatgatgtgg

SEQ ID NO: 173793 - DNA, 80 bp, synthetic construct
  source 1..80: mol_type = other DNA
agtcagctatcaccacctactatacagatacctgcagcactcgaacgcaggtttttccttgacacagatatccgggttgc

SEQ ID NO: 173794 - DNA, 80 bp, synthetic construct
  source 1..80: mol_type = other DNA
tggcggcggagcacttccggcttgcccaaaatggcgggcaagctcttccgggtgaaaggtcggcaactacgtcacatgtc

SEQ ID NO: 173795 - DNA, 80 bp, synthetic construct
  source 1..80: mol_type = other DNA
tgcccctacaaatataaggcaaatgtcaactttgatgtcactgcaattacggacagcaggctgacaatcacgactgtacc

SEQ ID NO: 173796 - DNA, 80 bp, synthetic construct
  source 1..80: mol_type = other DNA
agaacgggctatgactatagagattcgtcgagatattaaacttcaaataggcggctatcattcatggttgtggtgactat

SEQ ID NO: 173797 - DNA, 80 bp, synthetic construct
  source 1..80: mol_type = other DNA
ggggaccaatagcttggaggcgtccggctggggtcagggaaaaggcctctgggttctccagcacggtgtgcatgacatat

SEQ ID NO: 173798 - DNA, 80 bp, synthetic construct
  source 1..80: mol_type = other DNA
gtcaagcactcctgtctccccggtacaaagggtgttaagtcttacccaagactgaagccttgagtatcgttatccgcata

SEQ ID NO: 173799 - DNA, 80 bp, synthetic construct
  source 1..80: mol_type = other DNA
gttctaaggtggatggagtagttaacgcagaagggttgtctaagggtgaggcccccattgaatttgaaaggacaagcacc

SEQ ID NO: 173800 - DNA, 80 bp, synthetic construct
  source 1..80: mol_type = other DNA
tctaatagattctatacattggaaagcaaaaactggactgcaacttcaaaaggatggtggtggaaacttccagatgccct

SEQ ID NO: 173801 - DNA, 80 bp, synthetic construct
  source 1..80: mol_type = other DNA
tcgcctttgccgatgtgcgtgacttatatgctgaggatgaggcaatggagcaggggataaccaactacattgagtcctta

SEQ ID NO: 173802 - DNA, 80 bp, synthetic construct
  source 1..80: mol_type = other DNA
tctacaccttagaatcggtgcaatggagtacgggtagcaaagggtggtggtggaaattaccagattgtcttaaggatatg

SEQ ID NO: 173803 - DNA, 80 bp, synthetic construct
  source 1..80: mol_type = other DNA
tgctgtagttccaatcactatatcaataagcccaatgtttgccgaattctctggggcacgtgcaaaaccagtggctgctc

SEQ ID NO: 173804 - DNA, 80 bp, synthetic construct
  source 1..80: mol_type = other DNA
cggcgatcattggagagggatgtcgatgactcccttctctgtcctttttatcgtaggctgtcagcgttgctgggtccgtc

SEQ ID NO: 173805 - DNA, 80 bp, synthetic construct
  source 1..80: mol_type = other DNA
accacccaatttatagccaaaatcactcgcacaccagatggacaagcagtatctaccttttctcctcctacctcttttcc

SEQ ID NO: 173806 - DNA, 80 bp, synthetic construct
  source 1..80: mol_type = other DNA
gcacaggggttaggtcagatgcttgaaagcatgattgacaacacagtccgtgagacgatgggtgcggcaacgtctagaga

SEQ ID NO: 173807 - DNA, 80 bp, synthetic construct
  source 1..80: mol_type = other DNA
cggtggcgagccgctcaaagtcacgctgtggacgcgcacgcgttccatcgtgatcccgcagggcacccccatcgccacgt

SEQ ID NO: 173808 - DNA, 80 bp, synthetic construct
  source 1..80: mol_type = other DNA
gcgcgccaggctccgagccggaatgcattggtggcaatgggattgcggtggattgttgctgtctgctcctgacagggaga

SEQ ID NO: 173809 - DNA, 80 bp, synthetic construct
  source 1..80: mol_type = other DNA
ataaatttatgggcagatctcacttcctatgtacatttacatttaattctaacaacaaagagtatacttttcccatcact

SEQ ID NO: 173810 - DNA, 80 bp, synthetic construct
  source 1..80: mol_type = other DNA
cttttaaaaaagacagagacgctaacgccctaaatacatttagaacacaatccaacttttcacacccacaattaacatta

SEQ ID NO: 173811 - DNA, 80 bp, synthetic construct
  source 1..80: mol_type = other DNA
catgggcactttatgctctagaatagttacagataatcataagcatccaatagaagttacaacaagagtataccataaag

SEQ ID NO: 173812 - DNA, 80 bp, synthetic construct
  source 1..80: mol_type = other DNA
caaattctcatggagatgggggggctctcctctgcctatgcaggcaatcgacgacccctgccaaaagggaacctttccct

SEQ ID NO: 173813 - DNA, 80 bp, synthetic construct
  source 1..80: mol_type = other DNA
tccaggtctagtctaatgactgaagcaccatcagagtttcccccggaggatagaaccccaccgagggaaccaggggatga

SEQ ID NO: 173814 - DNA, 80 bp, synthetic construct
  source 1..80: mol_type = other DNA
ctcatggttgaaaaaattcactgaagcatgcaatgcggccagagggcttgagtggataggaaataaaatatccaaattta

SEQ ID NO: 173815 - DNA, 80 bp, synthetic construct
  source 1..80: mol_type = other DNA
gtccacattgattgaacagatggaagctttcattgagccaaggcctagtgtctttaagtgttttgcaaacaaagttgcaa

SEQ ID NO: 173816 - DNA, 80 bp, synthetic construct
  source 1..80: mol_type = other DNA
agatacgacaagagaggtaaatgcagatgagcttactaaaggagaggccgcccatgagttctcaaaagaccaaatacaag

SEQ ID NO: 173817 - DNA, 80 bp, synthetic construct
  source 1..80: mol_type = other DNA
aaaggaagtacctgcactgactgctgtagaaacaggtgcgacaagtaaggtcatcccgtcggacgtcatagagacccggc

SEQ ID NO: 173818 - DNA, 80 bp, synthetic construct
  source 1..80: mol_type = other DNA
ggggagtaagacgttaataaagagtagcggcggttctgatagggcgaccgctgaagcgagctgcgtgtgcgtgccgtctg

SEQ ID NO: 173819 - DNA, 80 bp, synthetic construct
  source 1..80: mol_type = other DNA
cgactttgttgtcaacaaggggttcgggggctccttcgccacagagaccttctccctgaaggtgctctatgaccagtacc

SEQ ID NO: 173820 - DNA, 80 bp, synthetic construct
  source 1..80: mol_type = other DNA
ccattttaatttcacgataccaaattctctttccgacctcatcaaggttccgaattttcgtcagatcgcttctagcggtt

SEQ ID NO: 173821 - DNA, 80 bp, synthetic construct
  source 1..80: mol_type = other DNA
ggtcgtgtcgcgacatggacgtgcagggggatgtctgtcgcgatagagttgatgtgacagcccgctacacctctctgtcg

SEQ ID NO: 173822 - DNA, 80 bp, synthetic construct
  source 1..80: mol_type = other DNA
taccaccagcaaaactggatgaatgacttggaccagtgtgggcccttctcttacaaaggagagttaaagctagctacttt

SEQ ID NO: 173823 - DNA, 80 bp, synthetic construct
  source 1..80: mol_type = other DNA
aaatagtagcatatggagatgatgtcatagcctcatatcctgaggagcttgaccctgctgagattgctatctctggatta

SEQ ID NO: 173824 - DNA, 80 bp, synthetic construct
  source 1..80: mol_type = other DNA
tcagatgaagacgaggagattgatttggaggaagagtaccccagtgacgaagacccatctgagggcagtgatagcgaccc

SEQ ID NO: 173825 - DNA, 80 bp, synthetic construct
  source 1..80: mol_type = other DNA
tcaaagaataagtttgctccatgggactggttattgggatgtggagttatggctggtaacatcacggtatacccacatca

SEQ ID NO: 173826 - DNA, 80 bp, synthetic construct
  source 1..80: mol_type = other DNA
cgagattgtacaaagaagaaacaaacaattcgagtgggaaaccaaatttaccaacaatgcaacacacattaacccaacat

SEQ ID NO: 173827 - DNA, 80 bp, synthetic construct
  source 1..80: mol_type = other DNA
atggattaacctgcgaactaacaactgtgcaacaatcatcatgccatatattaatgcacttccgtttgattcagcgctca

SEQ ID NO: 173828 - DNA, 80 bp, synthetic construct
  source 1..80: mol_type = other DNA
tgtgtgctatagaaatcataccacaaatgagttacactttcgttgcgaataggacctgctaaaatataataataaggaaa

SEQ ID NO: 173829 - DNA, 80 bp, synthetic construct
  source 1..80: mol_type = other DNA
tgaagttgatggaggaatgccatctgggtgtgcaggtacctcaatttttaactcaatgattaataatattataattagaa

SEQ ID NO: 173830 - DNA, 80 bp, synthetic construct
  source 1..80: mol_type = other DNA
gcacctgagccaaggagaaagagccatggagtttaaggatggtaccacaggagaggaaaactccgtacaatctgcagtgt

SEQ ID NO: 173831 - DNA, 80 bp, synthetic construct
  source 1..80: mol_type = other DNA
cggccgtgctctacctcctggcgcttgtcgtctgggttgagatgttctgcctcgtcgccgtagccgtcgtcgagcgcgag

SEQ ID NO: 173832 - DNA, 80 bp, synthetic construct
  source 1..80: mol_type = other DNA
caagcagcacataaaaaccccacacagtgcacgtgaaaacaacgtccctagaaaacggtgttttctgtcctaccgtcacc

SEQ ID NO: 173833 - DNA, 80 bp, synthetic construct
  source 1..80: mol_type = other DNA
caacgtgtcatgatcacacgcaaccatcaaaagaacatgctcctccgcaccaacctcgaacgtctcacccattccacgaa

SEQ ID NO: 173834 - DNA, 80 bp, synthetic construct
  source 1..80: mol_type = other DNA
cccttgcgtgcttccagtggagcgcctaccaccttaccaatcactgtttcaattgcacctgacagatctgaattctctgg

SEQ ID NO: 173835 - DNA, 80 bp, synthetic construct
  source 1..80: mol_type = other DNA
gtacgagtccgtgcatcgtggccacgctgctatttgtggttgtggggattttgtacgccatattactgctcttgctgaaa

SEQ ID NO: 173836 - DNA, 80 bp, synthetic construct
  source 1..80: mol_type = other DNA
agcagcatcaaagaataatgcaaatgaatctattttctcaatatcacttagtccggctgcagatgagagactagcacaca

SEQ ID NO: 173837 - DNA, 80 bp, synthetic construct
  source 1..80: mol_type = other DNA
ttcgccgccgtagaagaagagcaacagtaaggaggcggaggtggaggggcagacggtggcgacgcacatacacccgacgc

SEQ ID NO: 173838 - DNA, 80 bp, synthetic construct
  source 1..80: mol_type = other DNA
aacacaccatcttctgcagacatgctatgttttgtttctgcatgcaaagatttttgtctgcgtatggccagagacactga

SEQ ID NO: 173839 - DNA, 80 bp, synthetic construct
  source 1..80: mol_type = other DNA
cgtggtgtcccaggccacctagagccacgcagtatgttcataagcacagtccaaactaccatgtgaacaaaggggaaact

SEQ ID NO: 173840 - DNA, 80 bp, synthetic construct
  source 1..80: mol_type = other DNA
tatatccgaaaccaatgatatgggaaccttatgttttcgggcactggatgggactgaagagagtgaaatcaaaatctttg

SEQ ID NO: 173841 - DNA, 80 bp, synthetic construct
  source 1..80: mol_type = other DNA
tacccgagcccggtacgttgcctagaatcttacaagtcagcgacccgacgcaactcggaccgaaaacaatcttccacctc

SEQ ID NO: 173842 - DNA, 80 bp, synthetic construct
  source 1..80: mol_type = other DNA
ctcaggagaaactaactctccaaagtggacacaaaatgactttcagcaatttaaaaaacaaacagacagcaactatggct

SEQ ID NO: 173843 - DNA, 80 bp, synthetic construct
  source 1..80: mol_type = other DNA
cggtgatgaggtattactaaatggcctaacagttaagctgaaagacaaatacaagctccttgacccagagaataccaatt

SEQ ID NO: 173844 - DNA, 80 bp, synthetic construct
  source 1..80: mol_type = other DNA
cagaaacacaaaatactgatacccagctttgacactaaccccaggggcagaaaaaacattaaagtgcctattctgccccc

SEQ ID NO: 173845 - DNA, 80 bp, synthetic construct
  source 1..80: mol_type = other DNA
gctgcagcagctgtgggagcagcaactccaacagaagcgacagctgggagtcgtgttccaacacctcctccgactcagac

SEQ ID NO: 173846 - DNA, 80 bp, synthetic construct
  source 1..80: mol_type = other DNA
tgagcaaggaaccgatactgtgtctatccttatcaccagcctctgatcccagattatcttacactatgctaggtgagatc

SEQ ID NO: 173847 - DNA, 80 bp, synthetic construct
  source 1..80: mol_type = other DNA
tacatggatataagaacattgatctggatcagttgaggatactaacatatggtgatgacataatattcacatacccagac

SEQ ID NO: 173848 - DNA, 80 bp, synthetic construct
  source 1..80: mol_type = other DNA
tgttcaggttccccttggaggtttcttaaagaaaaattttgtaaatggacacaattaaattacatacacaaggaatcaga

SEQ ID NO: 173849 - DNA, 80 bp, synthetic construct
  source 1..80: mol_type = other DNA
gtcaccagagcaaggccgtctatgtggctggttacaagatttgtaattaccacctcgccacacaagaggacatgcaaaat

SEQ ID NO: 173850 - DNA, 80 bp, synthetic construct
  source 1..80: mol_type = other DNA
gaaaaacaaacgtatgctgaattttttgcaggacctccaaaacgaccccgattcgaggtccccgcaatccaaggcgaaga

SEQ ID NO: 173851 - DNA, 80 bp, synthetic construct
  source 1..80: mol_type = other DNA
cgtacacactgacgaggccgataaagtacaagcggccagcctggcgcaggcacgagaagcgccggtaggtcttgtgatcg

SEQ ID NO: 173852 - DNA, 80 bp, synthetic construct
  source 1..80: mol_type = other DNA
cactggctctggtgacgttaaatgtcctgttcctattagtcacagcctgtagatttgggcacccagactcaaaaagtgca

SEQ ID NO: 173853 - DNA, 80 bp, synthetic construct
  source 1..80: mol_type = other DNA
agcaaatgctgttgtctgttatgctgaatggcctgagtatttaccagataaagatgctagtgatgtgaacaaaacctcaa

SEQ ID NO: 173854 - DNA, 80 bp, synthetic construct
  source 1..80: mol_type = other DNA
ccaaagtaaggagaatcaaccgccacccgaaggacctttatctgccatcactcctgaatgggcccttcattttaatcttc

SEQ ID NO: 173855 - DNA, 80 bp, synthetic construct
  source 1..80: mol_type = other DNA
ctggggagactatatatataataaggaagtagtaaatggcttcataaacaatgctcaaaactacttcaatgccagaaaag

SEQ ID NO: 173856 - DNA, 80 bp, synthetic construct
  source 1..80: mol_type = other DNA
cagtacgatgtcagcgcccccttcaaactggacaagaacagctcgcccagctaccaccccttcatgctcatgaaggccaa

SEQ ID NO: 173857 - DNA, 80 bp, synthetic construct
  source 1..80: mol_type = other DNA
aggcatacaatttaaatgctacagacactccacagtagactacataattacctacaacagaacaggaccctttgaagtaa

SEQ ID NO: 173858 - DNA, 80 bp, synthetic construct
  source 1..80: mol_type = other DNA
tcagaccacttcgggctcgcgggggtcgggaaatttactaaacagactccgagttggcattgcactcaggagctatgaat

SEQ ID NO: 173859 - DNA, 80 bp, synthetic construct
  source 1..80: mol_type = other DNA
aagagtataacttggtctagtgcttcaaagggatggtggtggaaattgccagatgcgttacgggatatgggcatctttgg

SEQ ID NO: 173860 - DNA, 80 bp, synthetic construct
  source 1..80: mol_type = other DNA
aatacaatgagacttggtattcacaagatttgcaatgcgaacagtccaataagagtgagaatgagagtagatgctatatg

SEQ ID NO: 173861 - DNA, 80 bp, synthetic construct
  source 1..80: mol_type = other DNA
attgtttccattagatatcaacccagagccaataacaatggatcaagcagtatatgggacagagggattggaaccattag

SEQ ID NO: 173862 - DNA, 80 bp, synthetic construct
  source 1..80: mol_type = other DNA
aaatgcgtagttcgcggctacatgcccctgctcatctgtggcagtgggtccaccggaactacacacagaaactatggcag

SEQ ID NO: 173863 - DNA, 80 bp, synthetic construct
  source 1..80: mol_type = other DNA
acgtcgttttcctcctctccgtcgtcatcgtccagaaacggcacccgctgcttagcccaggacattctttctccgcgtcc

SEQ ID NO: 173864 - DNA, 80 bp, synthetic construct
  source 1..80: mol_type = other DNA
atcccgacatcttctggtcgcagctttatgcttcaatggagaaacatctactagtgtttgactacacaaactatgatggg

SEQ ID NO: 173865 - DNA, 80 bp, synthetic construct
  source 1..80: mol_type = other DNA
gctggttatgtgacgtgctggtatcagacaaatttcatcacagcaccaaacacaccccccacagctgacattatttgcct

SEQ ID NO: 173866 - DNA, 80 bp, synthetic construct
  source 1..80: mol_type = other DNA
gcaaggtagattgggtgatgatgccaaatttttctgcccaactggttcgcttgttgcattccagaactcctggggttcac

SEQ ID NO: 173867 - DNA, 80 bp, synthetic construct
  source 1..80: mol_type = other DNA
taggggatgtacaattaagggaatggcgcccctaatagtgtgcggccacaccatggctggcaataactttgccatccgaa

SEQ ID NO: 173868 - DNA, 80 bp, synthetic construct
  source 1..80: mol_type = other DNA
gtcattggcattgtaacagctggtggcgaggggcatgtggcatttactgatttaagaccttacagcaaccttgctgaaac

SEQ ID NO: 173869 - DNA, 80 bp, synthetic construct
  source 1..80: mol_type = other DNA
gcggccacgcccccgccgccattttgtgcagcccgccaatttctgttcaaacaggccaatcagcgtctactacgtacact

SEQ ID NO: 173870 - DNA, 80 bp, synthetic construct
  source 1..80: mol_type = other DNA
gggggccaacttagccatcaatgtcaatatcagtggcacctatctgagcttcctattggccatgacgtcactgcggtgct

SEQ ID NO: 173871 - DNA, 80 bp, synthetic construct
  source 1..80: mol_type = other DNA
ctgcacgccctatgatattaatcaaatgttaaattgcgtgggagaacatcaagctgctatgcaaattatcagggaaataa

SEQ ID NO: 173872 - DNA, 80 bp, synthetic construct
  source 1..80: mol_type = other DNA
gtcatcagtgttgtcagggccctgtgggccattgtcatcagtgttgtcagggccctgtgggccattgtcatcagtgttgt

SEQ ID NO: 173873 - DNA, 80 bp, synthetic construct
  source 1..80: mol_type = other DNA
caaagatacaccataccaaatggcaagtgcaatccgtgtatactttaagccaaaacacatcagagtctgggtaccgcgac

SEQ ID NO: 173874 - DNA, 80 bp, synthetic construct
  source 1..80: mol_type = other DNA
taaaagaggggaatttaatttactggggatacatgacaactgtgcggttgttcccacccatgctgaatgtggtgatgagg

SEQ ID NO: 173875 - DNA, 80 bp, synthetic construct
  source 1..80: mol_type = other DNA
tgcacgacatcaccatgaccggtcccttctcttacaaggacgagctagttagcacccaactaacagccacctacaagttt

SEQ ID NO: 173876 - DNA, 80 bp, synthetic construct
  source 1..80: mol_type = other DNA
agccaggcacccacacccccagctaaggccagggctccttcggaaagaccccgcacggcctcgcagatgccccggatcca

SEQ ID NO: 173877 - DNA, 80 bp, synthetic construct
  source 1..80: mol_type = other DNA
aagcactcctgtttccccggtatgcgaggaatagactcctacagggttgaagcctcaagtatcgttatccgcattggtac

SEQ ID NO: 173878 - DNA, 80 bp, synthetic construct
  source 1..80: mol_type = other DNA
atccactaaagtggatggggtatgaactgtaccctaaaaaatggaaactgcagaaaataaccctaccaataaaggaagaa

SEQ ID NO: 173879 - DNA, 80 bp, synthetic construct
  source 1..80: mol_type = other DNA
gcgcgccatgtaaacaaagacacgccataccagatgtccagcacaatacgcgtgtactttaaacccaagcacatcagggt

SEQ ID NO: 173880 - DNA, 80 bp, synthetic construct
  source 1..80: mol_type = other DNA
tatattgtagggacaagaagtgggaaacgacactgaaggaggtcatagcacgaagagaagcggtggaggaaatatgtatc

SEQ ID NO: 173881 - DNA, 80 bp, synthetic construct
  source 1..80: mol_type = other DNA
gttagtccattgaaggcagaaaatgctactagtgtcatagtcccaataactatatccattagccccatgttcgcagaatt

SEQ ID NO: 173882 - DNA, 80 bp, synthetic construct
  source 1..80: mol_type = other DNA
gccgaggatgctgatttgcgtttgcggcccgcggaagtggaggcgcccgccatggcgccgccgccggtaacgcggggcgt

SEQ ID NO: 173883 - DNA, 80 bp, synthetic construct
  source 1..80: mol_type = other DNA
acccacacaaatggggtaaggttattggctcatgtgattcaaaagataggaaaagaagcaatagtaatctgggggaaagt

SEQ ID NO: 173884 - DNA, 80 bp, synthetic construct
  source 1..80: mol_type = other DNA
tactcatcaatgctaaaaggcaatcaattttatacaatatcaggcaaaaaacttataaaaacattcacacctatagaata

SEQ ID NO: 173885 - DNA, 80 bp, synthetic construct
  source 1..80: mol_type = other DNA
atggtgaccctggatcaggaaaatcgcttgccactacagttatatctagaggtctagctagtgaaggtgaagtctactcc

SEQ ID NO: 173886 - DNA, 80 bp, synthetic construct
  source 1..80: mol_type = other DNA
attattataacaaaataattgcagaaaactatccaacagattggagaggcagcaaagccttaacacatttaacaggcata

SEQ ID NO: 173887 - DNA, 80 bp, synthetic construct
  source 1..80: mol_type = other DNA
cttacatgaggtttgacgcagagttcacattcatcaccaccgaaaggaatggcaataccagtccaattcccgtccaatac

SEQ ID NO: 173888 - DNA, 80 bp, synthetic construct
  source 1..80: mol_type = other DNA
agtcttaaaaccagacccagcaaaaaacactatataaagataaaaataggggcccccaaactatttgaagataagtggta

SEQ ID NO: 173889 - DNA, 80 bp, synthetic construct
  source 1..80: mol_type = other DNA
atttcaagttaataatgaattatggcaaggagtcaaagcctgtgtcaaatctaagtttagagaaatttttggcatcaatg

SEQ ID NO: 173890 - DNA, 80 bp, synthetic construct
  source 1..80: mol_type = other DNA
atagctaatgtagtatctatagtaggtgttatctatataatttataaattgttttgtacactccaaggtccatactcagg

SEQ ID NO: 173891 - DNA, 80 bp, synthetic construct
  source 1..80: mol_type = other DNA
tataaaaaaatgcaagatgaacaattcccacaacagtggatgggatcccctgcactaacacacctaacaggcatatttag

SEQ ID NO: 173892 - DNA, 80 bp, synthetic construct
  source 1..80: mol_type = other DNA
caaataccaacactatattatcttttaccaacgctacatcatcttataacacaacaatcaccgtaactatcacgtcagat

SEQ ID NO: 173893 - DNA, 80 bp, synthetic construct
  source 1..80: mol_type = other DNA
atgccgggaggaaaccccgtaccctctttgtggaacagaacacactggtacgtcagtgtagcccaccagagagaggtagc

SEQ ID NO: 173894 - DNA, 80 bp, synthetic construct
  source 1..80: mol_type = other DNA
cctggctcaagttcgcacttcctatacagtgttaaagccttgtatcggaagtttgggcttcgtcccagtgtactcaataa

SEQ ID NO: 173895 - DNA, 80 bp, synthetic construct
  source 1..80: mol_type = other DNA
aaagacatgtcgtggagaccgccgtctctcaaccttgccgagagagaagaacaatggtaccagtgcattcttagctcgca

SEQ ID NO: 173896 - DNA, 80 bp, synthetic construct
  source 1..80: mol_type = other DNA
aatctaactgcagaaaacgccgggaaatataccagacgggaccgttataacggttacgaagaaaattactatgtaacggt

SEQ ID NO: 173897 - DNA, 80 bp, synthetic construct
  source 1..80: mol_type = other DNA
tacataccaccaggagctaatacaccaagcagtaatagtgcaacagagtggaacacagcttccaacccaagtgtattctt

SEQ ID NO: 173898 - DNA, 80 bp, synthetic construct
  source 1..80: mol_type = other DNA
aagcattttataaagaaaaatgaagagcccattccaagtgagggagtttatcatggtgtgactaaacctaaacaagtgat

SEQ ID NO: 173899 - DNA, 80 bp, synthetic construct
  source 1..80: mol_type = other DNA
caagccaaaacacgtgcgtgcttgggtgcccaggccaccacgcctgtgcccgtatatcaatagcaccaatgtcaatttca

SEQ ID NO: 173900 - DNA, 80 bp, synthetic construct
  source 1..80: mol_type = other DNA
cctcactacccatggctaccaaaaaagccacctacccctcctacatgtagagtaagtttcaaattaaagctcgatgccta

SEQ ID NO: 173901 - DNA, 80 bp, synthetic construct
  source 1..80: mol_type = other DNA
tgctttctctctggagtcgacgtctgctggtcggcaagctgggtcgcgacgtgcccgtctttgtgcacgaacagcaatat

SEQ ID NO: 173902 - DNA, 80 bp, synthetic construct
  source 1..80: mol_type = other DNA
cggaaccctcacaggttgactccagaccggccctgccatggcatggagatggtggaagcggcggaggcgctggtggctcc

SEQ ID NO: 173903 - DNA, 80 bp, synthetic construct
  source 1..80: mol_type = other DNA
gagcgcgttactccaaggagacgcagtggaggcaattgagagtgcagttgccagggtggcagacacaattagcagtggtc

SEQ ID NO: 173904 - DNA, 80 bp, synthetic construct
  source 1..80: mol_type = other DNA
atggtgagtggccatcgtacattagtccacaagaagcaaacccagtggatgcgcccacggaacctgatgtgagtagtaac

SEQ ID NO: 173905 - DNA, 80 bp, synthetic construct
  source 1..80: mol_type = other DNA
aaagcacatctacactgtactaggccgtgggagtttcactcgtcggtgtctacctctataagtcactaagcactccgagc

SEQ ID NO: 173906 - DNA, 80 bp, synthetic construct
  source 1..80: mol_type = other DNA
tacataccaccaggagctaaaccacccaaaggaaaagactcaatggagtggaacacagcttctaatccaagtgtgttttt

SEQ ID NO: 173907 - DNA, 80 bp, synthetic construct
  source 1..80: mol_type = other DNA
agtatccgttctgctcaccacaaaccgtcactcccattaccacattccaggttctgcaagaaccttacaacagatacata

SEQ ID NO: 173908 - DNA, 80 bp, synthetic construct
  source 1..80: mol_type = other DNA
gatcacgcttgggaattcaacaattacaacacaggaagccgccaatgctgttgtctgttatgcagaatggccagaatatt

SEQ ID NO: 173909 - DNA, 80 bp, synthetic construct
  source 1..80: mol_type = other DNA
ctcttaataaactgccaattagaagcaagttgagtgtgtgttcccatctctcctagtcgccgcctggtcactcggtgctc

SEQ ID NO: 173910 - DNA, 80 bp, synthetic construct
  source 1..80: mol_type = other DNA
aataaagcctggttgactgtagtttcagcggttactagtgccattagtattctattactagtaaccaaaatctttaaaaa

SEQ ID NO: 173911 - DNA, 80 bp, synthetic construct
  source 1..80: mol_type = other DNA
gttaatttgtccaactatgaagatgctagagcaaaaatgtcttttgctcttgaccaggaagattggaaatctgatgcctc

SEQ ID NO: 173912 - DNA, 80 bp, synthetic construct
  source 1..80: mol_type = other DNA
aatgtatgagaaaagaaaaagagaaacatacctaggcagcaaatacattaactttaaaacaggcatgtttagccctatat

SEQ ID NO: 173913 - DNA, 80 bp, synthetic construct
  source 1..80: mol_type = other DNA
tgatgacatcatacctgattgtgattgcactacgggtacatactactgcaaaagtaaagaccgctattaccctgtgagtg

SEQ ID NO: 173914 - DNA, 80 bp, synthetic construct
  source 1..80: mol_type = other DNA
acgagtggatgagatttatgggttgcctggattctttaattggttacataacaggctagaaaggtgtacattatacgtag

SEQ ID NO: 173915 - DNA, 80 bp, synthetic construct
  source 1..80: mol_type = other DNA
agaagacaagtggtacactcagcaagatctagcgcccgttaatcttgtgtcacttgtggtttctgcgactagcttcatac

SEQ ID NO: 173916 - DNA, 80 bp, synthetic construct
  source 1..80: mol_type = other DNA
cccatggttactttcctcaaagatgaacttagaaagaaagaaaagatatcttctgggaaaactcgtgtcatagaggctag

SEQ ID NO: 173917 - DNA, 80 bp, synthetic construct
  source 1..80: mol_type = other DNA
cacggtcccggtttagcaggtaggccgtggtgggcaacgcgttgcgaacggtgtcgttaagcttaactttgctttccacc

SEQ ID NO: 173918 - DNA, 80 bp, synthetic construct
  source 1..80: mol_type = other DNA
ggaacggcttacctcgggtaactgtttgccattaaaaggttggggattaggtttagcccctttagctgccatttcgaacc

SEQ ID NO: 173919 - DNA, 80 bp, synthetic construct
  source 1..80: mol_type = other DNA
cgtacatcaagtctagtaatgtaaactttgaaccgaccaatttgactgactcgagaacgagcataacatacatacctgat

SEQ ID NO: 173920 - DNA, 80 bp, synthetic construct
  source 1..80: mol_type = other DNA
tgaaagtggacatagcatctcaacctttggcaacaacaatgattggggaaatttccagttactacacccattggactggc

SEQ ID NO: 173921 - DNA, 80 bp, synthetic construct
  source 1..80: mol_type = other DNA
agttacaacctagtgtcttttatgacatattcccaggtgtcaaggagcccgcacctttgcatacaaatgaccccaggctt

SEQ ID NO: 173922 - DNA, 80 bp, synthetic construct
  source 1..80: mol_type = other DNA
gcgtggctgcctgcacaccctaacgggtgtgaagcctggtaatagacaaggtgtgaagagcctactgcgctcacttagag

SEQ ID NO: 173923 - DNA, 80 bp, synthetic construct
  source 1..80: mol_type = other DNA
ctacacatggtggcgtcataaaatactttaacatcaattactatagggattcagctagctccggtttgactaaacaagat

SEQ ID NO: 173924 - DNA, 80 bp, synthetic construct
  source 1..80: mol_type = other DNA
ctttgacccaaccaacctaactgattcaagatcaagtataacatatgtgccagacactatccgtccggaagtccgtacag

SEQ ID NO: 173925 - DNA, 80 bp, synthetic construct
  source 1..80: mol_type = other DNA
atgccattactcaggaagccatcctccaaggtgactctatagaggacatgataaacaatgctgtgtccaacaccctttct

SEQ ID NO: 173926 - DNA, 80 bp, synthetic construct
  source 1..80: mol_type = other DNA
taaggaatggtttacacccgcccctaaagttgcaagtagccgaactctgcggggtgatttggcaaacttttcagaccaga

SEQ ID NO: 173927 - DNA, 80 bp, synthetic construct
  source 1..80: mol_type = other DNA
caacagcctagtacacacaataactctataggaggaccatacactaactatagtgacacatggtacaaaggcactgccta

SEQ ID NO: 173928 - DNA, 80 bp, synthetic construct
  source 1..80: mol_type = other DNA
ccagaattcttatagtatgtccatacacttacccaaaactgtaccacgaaacaaacccactgtatggctttgtagcatac

SEQ ID NO: 173929 - DNA, 80 bp, synthetic construct
  source 1..80: mol_type = other DNA
ctgctttccatattcgcaaccgcctgtgacttgcaatataataaggcgcacttccgaatggctgagttttccacgcccgt

SEQ ID NO: 173930 - DNA, 80 bp, synthetic construct
  source 1..80: mol_type = other DNA
atcacaattggcttaaccctactgcatgaaccgaactagacataagtgcggtaggggtaaattctccgcgttcggtgcgg

SEQ ID NO: 173931 - DNA, 80 bp, synthetic construct
  source 1..80: mol_type = other DNA
caagtcatgattggtatgagatacaagaaagtgaatattatccaaaacacatacaatacaatttgttaattggcgagggg

SEQ ID NO: 173932 - DNA, 80 bp, synthetic construct
  source 1..80: mol_type = other DNA
atatttggaagaaaaatttagaaaaccaaaccatggatgacctaaatgatactgtttcatacataaaacataatttccca

SEQ ID NO: 173933 - DNA, 80 bp, synthetic construct
  source 1..80: mol_type = other DNA
actgacactgtggttgttaactcccaagttctgcaatccatgtatgatgaaacaattagcatattacctgatgaaaaaac

SEQ ID NO: 173934 - DNA, 80 bp, synthetic construct
  source 1..80: mol_type = other DNA
aaggttggcataccaacagggactgccggtattaaacactccagggagtaatcagttcatgacatcggacgattttcaat

SEQ ID NO: 173935 - DNA, 80 bp, synthetic construct
  source 1..80: mol_type = other DNA
caagaaacaaaatagacatcgctgagggcccaggggctatgaacatagcaaatgtcttaagtactactggtgcgcaatct

SEQ ID NO: 173936 - DNA, 80 bp, synthetic construct
  source 1..80: mol_type = other DNA
atgtgaacaccatggacgcataccggattccagtacaatccaatatggatactggaggccaagtatttggcttcccactg

SEQ ID NO: 173937 - DNA, 80 bp, synthetic construct
  source 1..80: mol_type = other DNA
caaagtccagccccgggaaggcctgacgcagttcgcggtacagatgaggccagtagggttgcggcgtcttgcgactaagc

SEQ ID NO: 173938 - DNA, 80 bp, synthetic construct
  source 1..80: mol_type = other DNA
cgccccggcccataaagtatcccaggttcccggcctggaatatctggttgttgccgttgacccccgtgtacttgttgatg

SEQ ID NO: 173939 - DNA, 80 bp, synthetic construct
  source 1..80: mol_type = other DNA
tttcttgctaggatgataacaaatgaaagtgacatttattcgctgccaccagatcccaaatattttgatggatatgacca

SEQ ID NO: 173940 - DNA, 80 bp, synthetic construct
  source 1..80: mol_type = other DNA
cacgacctgctagcaatagtagtgaccttatactagctataccacttgacatgaacaacactctgttttccactacacta

SEQ ID NO: 173941 - DNA, 80 bp, synthetic construct
  source 1..80: mol_type = other DNA
ccagtttagataacaaaggaatgctgtttaccagcaattttgtcttagcatccacaaactctaacacattgagtcctcca

SEQ ID NO: 173942 - DNA, 80 bp, synthetic construct
  source 1..80: mol_type = other DNA
attgtataaggctttccataaaaaccctggaatcttaactggatctgctgtagggtgtgatcctgataccttctggtctg

SEQ ID NO: 173943 - DNA, 80 bp, synthetic construct
  source 1..80: mol_type = other DNA
cctgcaggacgcgtgacatgtccgggtgcattttgggttggttaaatctcagtcccaccacaaagtgggcatcctccggt

SEQ ID NO: 173944 - DNA, 80 bp, synthetic construct
  source 1..80: mol_type = other DNA
ccagttactaaatattgaactcccccggggattttgggacaatgaacgcaaaccagcgtttgggcaatccaaatactttg

SEQ ID NO: 173945 - DNA, 80 bp, synthetic construct
  source 1..80: mol_type = other DNA
cacggcagccattttgtcgtgacgtttgagacacgtgatgggggcgtgcctaaacccggaagcatccctggtcacgtgac

SEQ ID NO: 173946 - DNA, 80 bp, synthetic construct
  source 1..80: mol_type = other DNA
gccgtgtcgtcgccgccaccgtcgtcgccgctgccgcttgtcagcttcacggagctgctgttaccgccgccgtccgtcgc

SEQ ID NO: 173947 - DNA, 80 bp, synthetic construct
  source 1..80: mol_type = other DNA
tctgtctgattccccggaggtccctggggacacacgaaaagcaacgcccgggtggcgagggacgacggccagagacaaga

SEQ ID NO: 173948 - DNA, 80 bp, synthetic construct
  source 1..80: mol_type = other DNA
gagcactccaaagaagtaccagcactgacagcagtagaaactggagcaactaacccacttgagccctccgacactgtcca

SEQ ID NO: 173949 - DNA, 80 bp, synthetic construct
  source 1..80: mol_type = other DNA
catagttaaagatgattataaaataaatcagggaaagttaaacttacagtgtgctctcaaaccatgtaaagtaggaaaag

SEQ ID NO: 173950 - DNA, 80 bp, synthetic construct
  source 1..80: mol_type = other DNA
catggtacaataacgcaatgagcatctcaactgaatacccaaaaactaactatgaagccttaataacatattttaaaagt

SEQ ID NO: 173951 - DNA, 80 bp, synthetic construct
  source 1..80: mol_type = other DNA
gtttcaacaccgggacttttcacacggtgatttcggcaccgggactttccgcacggcggtttcgccaccgctgacgttct

SEQ ID NO: 173952 - DNA, 80 bp, synthetic construct
  source 1..80: mol_type = other DNA
tctatggcatatgacattacaactggtgataagaaccccagtaaattagttaggttaaaaactactgaatggatgcagac

SEQ ID NO: 173953 - DNA, 80 bp, synthetic construct
  source 1..80: mol_type = other DNA
ggtggagggtatcaagtgttgtgtgacagggctgtgatgtctttcgggagtgaagaatcactaattacaaatgcatatct

SEQ ID NO: 173954 - DNA, 80 bp, synthetic construct
  source 1..80: mol_type = other DNA
aaaagtctagtgggactcaaccagatttaatcctaactatacctctaaaaatggatgatactctattctctaccaccctt

SEQ ID NO: 173955 - DNA, 80 bp, synthetic construct
  source 1..80: mol_type = other DNA
tgttaaagatgttttggaaaagggcatacccactttacaatcaccaactgttgaagcctgtggttattctgataggatta

SEQ ID NO: 173956 - DNA, 80 bp, synthetic construct
  source 1..80: mol_type = other DNA
ccaggactgccgttccgggtcaaagggcatcctcggcgggacctacataaaatggtggacaatctcttccgggtcaaagg

SEQ ID NO: 173957 - DNA, 80 bp, synthetic construct
  source 1..80: mol_type = other DNA
taagtagtgcagacagcaactacctatttgttacctaccacccagaaaacatcccagataaaattaaaaagataagagac

SEQ ID NO: 173958 - DNA, 80 bp, synthetic construct
  source 1..80: mol_type = other DNA
ttaccactggccttaaaattccatatccagatactaagaatcccagcactactgcatctgttactccaaacacgctattt

SEQ ID NO: 173959 - DNA, 80 bp, synthetic construct
  source 1..80: mol_type = other DNA
gcggacgacttcgacgtccgcctccctcagtgccccgccctcggtttccagtcgggagccgatggtgcagacgcccatcc

SEQ ID NO: 173960 - DNA, 80 bp, synthetic construct
  source 1..80: mol_type = other DNA
ggttggtgtcaaaacaactctagcagaagaagttttcgctatacctgtggatgtggcatcacaacccttggcaacaactc

SEQ ID NO: 173961 - DNA, 80 bp, synthetic construct
  source 1..80: mol_type = other DNA
tcggcaattcgactatcactactcaagaagccgccaatataatagtgtcttacgctgagtggccagagtattgtccagac

SEQ ID NO: 173962 - DNA, 80 bp, synthetic construct
  source 1..80: mol_type = other DNA
aaaaagttagaacttttcacttatgtaaggtttgattctgaatacacaatactagcaacagcctcacaacctgaaacagc

SEQ ID NO: 173963 - DNA, 80 bp, synthetic construct
  source 1..80: mol_type = other DNA
tggccaacctggaagacaaaggtagagcattcaccagtgattacgtgattgccagcaccaatatgacagtcctcactcca

SEQ ID NO: 173964 - DNA, 80 bp, synthetic construct
  source 1..80: mol_type = other DNA
actggagacgtgggtggcttggtgacaatgctctcaaaagaatgctgcagaaaccgctcgatgctgaatactattcgctc

SEQ ID NO: 173965 - DNA, 80 bp, synthetic construct
  source 1..80: mol_type = other DNA
cacgtcaacagcttacgggagaggagacaagaaattcaacgcacactcaacgtgaagaagtggaggacgtttcgagagag

SEQ ID NO: 173966 - DNA, 80 bp, synthetic construct
  source 1..80: mol_type = other DNA
tggtcacttgctctgcgtgttctgacatgtcagtacgcatgcttcgggacactccaatgatgaaacaagaaattaatatt

SEQ ID NO: 173967 - DNA, 80 bp, synthetic construct
  source 1..80: mol_type = other DNA
ctagatccttccctcttgcgacccttccccctgactcaacttcttcggagccgcgcgctacgccttcggctgcgcgcggc

SEQ ID NO: 173968 - DNA, 80 bp, synthetic construct
  source 1..80: mol_type = other DNA
acaagactaacccaaacagtggctacatagcatacgacacaaactttggaaatggaaagatgccctcaggaaggggccag

SEQ ID NO: 173969 - DNA, 80 bp, synthetic construct
  source 1..80: mol_type = other DNA
agagcgtacttggattgacaaattcatttgaatagcaatagtaatgtagaaatctacctgagtaggagtaggattttaca

SEQ ID NO: 173970 - DNA, 80 bp, synthetic construct
  source 1..80: mol_type = other DNA
ttctctcatgctctgcggtgacctcgccgaggacatcacggagttcttctctaatcttggaaaccctcttgctgctgttt

SEQ ID NO: 173971 - DNA, 80 bp, synthetic construct
  source 1..80: mol_type = other DNA
ataagtggtactttacaaaagactttgcaaaagtaccaatactcatgatgtgggccacagcctgtgaacccagaaaccca

SEQ ID NO: 173972 - DNA, 80 bp, synthetic construct
  source 1..80: mol_type = other DNA
acatgctggaactgcggcaaggcgggacatacagccaggcagtgcaaggcccctagaaggcagggatgctggaaatgtgg

SEQ ID NO: 173973 - DNA, 80 bp, synthetic construct
  source 1..80: mol_type = other DNA
ttcggttccatcggcaactttttggtgatcttcaccatcacctggcgacgtcggattcaatgctccggcgatgtttactt

SEQ ID NO: 173974 - DNA, 80 bp, synthetic construct
  source 1..80: mol_type = other DNA
accagtgtgttgcttgctgagaggtcctcccggatgcggtaaatccttagtcacttccatcatagcacatggtctaacca

SEQ ID NO: 173975 - DNA, 80 bp, synthetic construct
  source 1..80: mol_type = other DNA
actggtgctcccgagaagggaacaactatgactccaccagatctaaatgcatgctaaaagaccttccactatttataatg

SEQ ID NO: 173976 - DNA, 80 bp, synthetic construct
  source 1..80: mol_type = other DNA
cctgctggtaccaaacaggcatagtggtgccgcctggcacgcccagcaagtgtgtggtactgtgctttgtatcggcctgt

SEQ ID NO: 173977 - DNA, 80 bp, synthetic construct
  source 1..80: mol_type = other DNA
caatcacccttacgttttagatgatggcacatcattggcatgttcccttatattcccacatcaatggatcaacttgagaa

SEQ ID NO: 173978 - DNA, 80 bp, synthetic construct
  source 1..80: mol_type = other DNA
tttcctgatatgtttcctaaacccgctccctccagcaacgactggagagaggagtttatggcctgtaaatactgggacag

SEQ ID NO: 173979 - DNA, 80 bp, synthetic construct
  source 1..80: mol_type = other DNA
agcaataactaatgtaccattttcagcagctaccttatatgaaagtcaaactaaaaaattactgtccacaacatttacag

SEQ ID NO: 173980 - DNA, 80 bp, synthetic construct
  source 1..80: mol_type = other DNA
ggttacaaatttgtgcaacgaatttgtgaccatgggcgctcaagtgagtaagcagaacgttggttcacatgaaaactctg

SEQ ID NO: 173981 - DNA, 80 bp, synthetic construct
  source 1..80: mol_type = other DNA
aaagagatccaaaacaatacttattaagcctccaaaactcatgataaacaagtggtactttgctaaagacatctgcaaaa

SEQ ID NO: 173982 - DNA, 80 bp, synthetic construct
  source 1..80: mol_type = other DNA
ccgccgtcgccgcgcaaaagctgcgtagaaacgccgcaaaaggcccccgtggccgacgccgccgcgcttacttatgtccc

SEQ ID NO: 173983 - DNA, 80 bp, synthetic construct
  source 1..80: mol_type = other DNA
gtttcatcgtggacttgttgtcttcatctaaagatcccaaggtcatagagtattgtgcagaacaggggtggattggaagg

SEQ ID NO: 173984 - DNA, 80 bp, synthetic construct
  source 1..80: mol_type = other DNA
ttccaggcgattgcagaaggtgccgaagatggcttcgaagtgaatattgtaacgctcggggtcgtcgccgtagtagatgc

SEQ ID NO: 173985 - DNA, 80 bp, synthetic construct
  source 1..80: mol_type = other DNA
gactccgcggtccgcgaccggctacgtagcgcgtgtccctgccagtctccgcagttacaccacacgtcgtgagcagcgtg

SEQ ID NO: 173986 - DNA, 80 bp, synthetic construct
  source 1..80: mol_type = other DNA
agaccacctagactgtgcaattatgaaagggcagaaaatgttaattttcaagtgatgggcgtaacagacacccgcgattc

SEQ ID NO: 173987 - DNA, 80 bp, synthetic construct
  source 1..80: mol_type = other DNA
ggtgtgacacaatcgcccgttgtaactgtcagaccgggatatattactgcagctcccgaagaaagcactatccagttagc

SEQ ID NO: 173988 - DNA, 80 bp, synthetic construct
  source 1..80: mol_type = other DNA
tggaactattcacatacctgaggtttgatactgaaattacaatagtacccacacttcgactgtttagctcatctggtgct

SEQ ID NO: 173989 - DNA, 80 bp, synthetic construct
  source 1..80: mol_type = other DNA
gcccccccctcagctggatcaccctggtcgagaagccattctctacaggtttccgctaggtttaagaaggtttattcaag

SEQ ID NO: 173990 - DNA, 80 bp, synthetic construct
  source 1..80: mol_type = other DNA
tattacagacgtagatacaaaaagagacgcagaaaaaggagaaaactgactcttaaaatgtggaatcctagcatgattag

SEQ ID NO: 173991 - DNA, 80 bp, synthetic construct
  source 1..80: mol_type = other DNA
gacatatgtgacaacccagcatacggacaatcacgttattttgccgctgttaggtgtggtttccacttccaagtgcaagt

SEQ ID NO: 173992 - DNA, 80 bp, synthetic construct
  source 1..80: mol_type = other DNA
cgctgacgtcaaaccatctcgtgctcgctgagtcacatccggttgttgacaagcgatggaggaccgcacccaaagtgcgc

SEQ ID NO: 173993 - DNA, 80 bp, synthetic construct
  source 1..80: mol_type = other DNA
tttcaagaaagtatgtacttaaatcacaaaacaggaatattcagccccatactattatcacaacaaagactggctccaga

SEQ ID NO: 173994 - DNA, 80 bp, synthetic construct
  source 1..80: mol_type = other DNA
gtattgtgttgagcaaggatgggtgggtaaggcagtgacaactgtagagagagacttcaactatatccagtatgtactaa

SEQ ID NO: 173995 - DNA, 80 bp, synthetic construct
  source 1..80: mol_type = other DNA
cgcagttgccagggtagctgatacaatcgccagcgggcctagtaactccaccagcattcccgctttgaccgcagtggaga

SEQ ID NO: 173996 - DNA, 80 bp, synthetic construct
  source 1..80: mol_type = other DNA
tgtaggggagaattcttatattgtaatatgacctggttcttaaactggatagagaacaagacaaatacaactcagagaaa

SEQ ID NO: 173997 - DNA, 80 bp, synthetic construct
  source 1..80: mol_type = other DNA
atacatgtcatggaccataaacgcaagaagaatggtgcagttgaggcgaaaattcgagttgttcacttacatgagatttg

SEQ ID NO: 173998 - DNA, 80 bp, synthetic construct
  source 1..80: mol_type = other DNA
ttagagctacctccctattcatacctataccaacagtgggtggataattttgtttaaataattatagatacagtatatca

SEQ ID NO: 173999 - DNA, 80 bp, synthetic construct
  source 1..80: mol_type = other DNA
ccagagcactctaaagaagtacctgcactgacagcagtagaaactggagcaaccaacccactagagccttctgatactgt

SEQ ID NO: 174000 - DNA, 80 bp, synthetic construct
  source 1..80: mol_type = other DNA
ggggaggcaggccacactatcctaggaccaaacccaagtaatgcacggtgggctaacaatccagatgaagaccccctttt

SEQ ID NO: 174001 - DNA, 80 bp, synthetic construct
  source 1..80: mol_type = other DNA
tgccgccgccgccaccaccgccgggcggacgtcggggtcgggcccggaacaatacccgaggaggcgacggtggtgccggt

SEQ ID NO: 174002 - DNA, 80 bp, synthetic construct
  source 1..80: mol_type = other DNA
caaccaggactggacagtgtattcaaacacacattgctcggtgaaatattgaattactacgctcactggtcaggcagtgt

SEQ ID NO: 174003 - DNA, 80 bp, synthetic construct
  source 1..80: mol_type = other DNA
tgctcagggtctccttggaggttcttaaaagagaaattctgtaagtggactcaattaaattatatacacaaggaatcaga

SEQ ID NO: 174004 - DNA, 80 bp, synthetic construct
  source 1..80: mol_type = other DNA
aaacaaagatcccagaaagaagggttgtagcacaaggccctgaagaagaatttggacgctccttgatcaaacacaatact

SEQ ID NO: 174005 - DNA, 80 bp, synthetic construct
  source 1..80: mol_type = other DNA
attttacaggtgaactaaatatacatgttttgttcctggctgaaaagggatttcttagagtggctcacacttatgacaca

SEQ ID NO: 174006 - DNA, 80 bp, synthetic construct
  source 1..80: mol_type = other DNA
gatatgcgtacaacgacgaaaaagtgcgaaagcgactggtgcgcgtgttacgatggcggtactttgtcggtgtaattgca

SEQ ID NO: 174007 - DNA, 80 bp, synthetic construct
  source 1..80: mol_type = other DNA
gtagtgacatccaaatatcgcaacaacgtaggcttattagatgtagctaaagctctactaccatgtacccaatgtcctaa

SEQ ID NO: 174008 - DNA, 80 bp, synthetic construct
  source 1..80: mol_type = other DNA
taccagcacttacagcagttgaaacaggacacacatcgcaagtggatcccagcgacaccatacaaactagacacgtggtt

SEQ ID NO: 174009 - DNA, 80 bp, synthetic construct
  source 1..80: mol_type = other DNA
ctcgctctttcggtctcaggtcatctgcatcgactcggcgtccttcatgacgctctgcaccgccttttccaacagttcct

SEQ ID NO: 174010 - DNA, 80 bp, synthetic construct
  source 1..80: mol_type = other DNA
ccgggcttccaccccaccccacagattcatatcccgggagaagtgcgtaacttgttggaactgtgtcaaatagacaccat

SEQ ID NO: 174011 - DNA, 80 bp, synthetic construct
  source 1..80: mol_type = other DNA
cccagcaaactgaccagacccaggggtaaaaagagcattaaagttaatataaaaccccccactacattcatagacaagtg

SEQ ID NO: 174012 - DNA, 80 bp, synthetic construct
  source 1..80: mol_type = other DNA
catttccaactaagcctaccgccagtgacttccaatcatggcaatcaaaattcatagacagacgagactccctctttctc

SEQ ID NO: 174013 - DNA, 80 bp, synthetic construct
  source 1..80: mol_type = other DNA
aggttcgacatggaagttacttttgtcatcactagctcacaggacgacgggacgcagctagcgcaggatatgccgttaca

SEQ ID NO: 174014 - DNA, 80 bp, synthetic construct
  source 1..80: mol_type = other DNA
aactgtgatgggacactattaggaaatatcactatcttcccacatcagtttattaatttgaggagtaacaactcagccac

SEQ ID NO: 174015 - DNA, 80 bp, synthetic construct
  source 1..80: mol_type = other DNA
ttaattcaaaagaggttcccgctctcactgccgtggaaactggggcaaccagtcaagttacacctgaagatttaattgaa

SEQ ID NO: 174016 - DNA, 80 bp, synthetic construct
  source 1..80: mol_type = other DNA
gcaacaactgatttaggcaatttggcggtgttgatacagcgggtaataatcttacgtgaaatattttccgcatcagccag

SEQ ID NO: 174017 - DNA, 80 bp, synthetic construct
  source 1..80: mol_type = other DNA
tgaatgggttgggcaaaagattagcaggtttatagattggcttaaagagaaggtactaccaacagttaaatcaaaaaaag

SEQ ID NO: 174018 - DNA, 80 bp, synthetic construct
  source 1..80: mol_type = other DNA
cagccagaaccagcttgaatgatgttccaacacctaaccacagcactagcgttcacatgagattacaaacaagaggcgcg

SEQ ID NO: 174019 - DNA, 80 bp, synthetic construct
  source 1..80: mol_type = other DNA
ctagttataccctgggtctctgcttcccatttccgtaacactacaccagatacatactccaaagctggttttgtgacatg

SEQ ID NO: 174020 - DNA, 80 bp, synthetic construct
  source 1..80: mol_type = other DNA
tgagactggcatataatctagtaaaagaaccattactagaagagacatattatacagatggctcttgtaacagggcttca

SEQ ID NO: 174021 - DNA, 80 bp, synthetic construct
  source 1..80: mol_type = other DNA
aatggaaatcacagataacatgaaagttgcaattgaccattactctggtcaattgttatcattggatatccccacacagg

SEQ ID NO: 174022 - DNA, 80 bp, synthetic construct
  source 1..80: mol_type = other DNA
ttggaatatgcctcgacggcgtccacgtatgtgccaataacagtcaccgtagcaccgatgtgcgccgagtacaacggttt

SEQ ID NO: 174023 - DNA, 80 bp, synthetic construct
  source 1..80: mol_type = other DNA
ccaagcgaacctccacataaaccccttattatactcccagcagtaaacaaagtatacctgtttccaccagaaaaacccac

SEQ ID NO: 174024 - DNA, 80 bp, synthetic construct
  source 1..80: mol_type = other DNA
ctgggtacccttatgtgaccttgggtttgaaaaagaaagatttggtcaataaaaccaccagggatgtaaccaaattacag

SEQ ID NO: 174025 - DNA, 80 bp, synthetic construct
  source 1..80: mol_type = other DNA
gccatggtgtcatccatctccgcagtccgttcttcagctttggcattggtccgggtccgggtggtctgattttgattctg

SEQ ID NO: 174026 - DNA, 80 bp, synthetic construct
  source 1..80: mol_type = other DNA
aaataacaatagttacagcagctgcagcacaaggtgatgacactgggcacatagtactgcaatttatgtatgtgccccca

SEQ ID NO: 174027 - DNA, 80 bp, synthetic construct
  source 1..80: mol_type = other DNA
ccctggatgataaggagagaagaaacatcagaatctttgttaaaccaaagcacattactgcatggatgccaagaccccct

SEQ ID NO: 174028 - DNA, 80 bp, synthetic construct
  source 1..80: mol_type = other DNA
ttcctcctgacacccctaaacccattaccactgcacaagattggaaacaggagtatgagtgctgtaaatactgggataga

SEQ ID NO: 174029 - DNA, 80 bp, synthetic construct
  source 1..80: mol_type = other DNA
gttctatcattgtgtcatcttatgtggcataatggacgggatgtgtacaaggagtttgagaaggggattcgcagtgtgag

SEQ ID NO: 174030 - DNA, 80 bp, synthetic construct
  source 1..80: mol_type = other DNA
tgaccaaccaggacacgccacatcagttcactgaagaggcatcttccgggaagcaagtacaaacagcagtgtgcaatgca

SEQ ID NO: 174031 - DNA, 80 bp, synthetic construct
  source 1..80: mol_type = other DNA
gctggtaatattacagtatacccccaccaaataatcaaccttcgcacaaataactgcgccacattggtgctgccctatgt

SEQ ID NO: 174032 - DNA, 80 bp, synthetic construct
  source 1..80: mol_type = other DNA
gatatacaaacacattgtttacctatttattgggtttacacctttaagttctttcactctacaccttactcgtgttgtgt

SEQ ID NO: 174033 - DNA, 80 bp, synthetic construct
  source 1..80: mol_type = other DNA
cagaaccctctcactaaggggcaaccctgagtgaaaaatctctggcagtttggcgcccgaacagggacccgagagacctg

SEQ ID NO: 174034 - DNA, 80 bp, synthetic construct
  source 1..80: mol_type = other DNA
tacctaaaaacagcaaacgattcctactggaaagcactcacaaaaccaaataaccaagctacacaaataggacaagcacg

SEQ ID NO: 174035 - DNA, 80 bp, synthetic construct
  source 1..80: mol_type = other DNA
gcagaggaagttattaacatagaccccgacaaggcatcaactggaggttgcaacaaaatggcaaagagtaatttgtttct

SEQ ID NO: 174036 - DNA, 80 bp, synthetic construct
  source 1..80: mol_type = other DNA
gtcggcgttacaaggagtcggcgccgcaggagacgctgcctacgaatcacgaacgcgagattttggatctcatgcgacac

SEQ ID NO: 174037 - DNA, 80 bp, synthetic construct
  source 1..80: mol_type = other DNA
cagtttcctttaaataaaaactcaccagcacacagagacactctatacgggggcagtccatatacacacaacatctttca

SEQ ID NO: 174038 - DNA, 80 bp, synthetic construct
  source 1..80: mol_type = other DNA
gcaatggccgacagcgacaaagcatatgagttcaccagtgcaaacgcaagtgaccagaccaaagttcaaaccgcagtgca

SEQ ID NO: 174039 - DNA, 80 bp, synthetic construct
  source 1..80: mol_type = other DNA
ctgaataagacaggatttagcaccccagacgaaaaatttcagaaagacccaccacacaaatggatgggctatgaactatg

SEQ ID NO: 174040 - DNA, 80 bp, synthetic construct
  source 1..80: mol_type = other DNA
accccaagctccaccaaccagtgtcacattaacatgacatacagcaagggcaaatacgaagagtacgagtaccacctagg

SEQ ID NO: 174041 - DNA, 80 bp, synthetic construct
  source 1..80: mol_type = other DNA
cccaggagtggggacgacggccagagacgcggaaaagaggaagtccccaggtggacgggcgcgcgcggaaatgaggaagc

SEQ ID NO: 174042 - DNA, 80 bp, synthetic construct
  source 1..80: mol_type = other DNA
ggggatgaagacgttaataaagaataggggcggttttgatagggcgaccgccgaggcgagccgcgtgtgcgtgtggtgtc

SEQ ID NO: 174043 - DNA, 80 bp, synthetic construct
  source 1..80: mol_type = other DNA
tactcacttgatttgggatattgggttgcaatcaagcgccacaatggtcgctccgtggatctccaatagtgtctatagaa

SEQ ID NO: 174044 - DNA, 80 bp, synthetic construct
  source 1..80: mol_type = other DNA
aacccagtcgaagaatttgtggatactacattgaaagaggtcttagtagtaccagatacccaaagaactggaccaataca

SEQ ID NO: 174045 - DNA, 80 bp, synthetic construct
  source 1..80: mol_type = other DNA
ggtggcgatcgtattgctcatgctaacctccctagtgatgataactggcttaattttgatggtactttattgggtaatgc

SEQ ID NO: 174046 - DNA, 80 bp, synthetic construct
  source 1..80: mol_type = other DNA
agagatgttcacatacttgaggtttgatttagaagtgacattcgttataacaagtgcacaagtaacatctaccaataaac

SEQ ID NO: 174047 - DNA, 80 bp, synthetic construct
  source 1..80: mol_type = other DNA
gtgggaagggcattgacactacctgcatactctagtcttagacgaaaatggttagattcgttctagataactctaattga

SEQ ID NO: 174048 - DNA, 80 bp, synthetic construct
  source 1..80: mol_type = other DNA
caagacattggtcaggaatgtacttgatcccgtcaaaatgtctctacaagctatgttagaaaaagtcaaatccgggaata

SEQ ID NO: 174049 - DNA, 80 bp, synthetic construct
  source 1..80: mol_type = other DNA
tggtagagtcatagcaacaactacagacaagaaaacaagacaaccatcgtttgacagttggcttaattgcaatggtactc

SEQ ID NO: 174050 - DNA, 80 bp, synthetic construct
  source 1..80: mol_type = other DNA
ccggacctacaaaagccggacaaggcacttcagagcccaccaccggcctccacagacccagccaccatgctatcaggtaa

SEQ ID NO: 174051 - DNA, 80 bp, synthetic construct
  source 1..80: mol_type = other DNA
tgttcagtactcgcacacacacactaccaactacaaattgagcacagaagtacacaatgatgtggctataagacccagaa

SEQ ID NO: 174052 - DNA, 80 bp, synthetic construct
  source 1..80: mol_type = other DNA
atagacgtagcgcacgagatcggccgaggccaggggaaggcgccccctgtaggcgtctatcgtccttgccacagcgcgga

SEQ ID NO: 174053 - DNA, 80 bp, synthetic construct
  source 1..80: mol_type = other DNA
ggaaaataaccataataactactggacagccagaaatgaccaaacatttagcgaatccaaggcccttagtcacaaaactg

SEQ ID NO: 174054 - DNA, 80 bp, synthetic construct
  source 1..80: mol_type = other DNA
actccctcagagccgcacgcaccggcagcgcgcagaaagcgccgtggaccagtcgccgcagaagcggcggagcgcttacg

SEQ ID NO: 174055 - DNA, 80 bp, synthetic construct
  source 1..80: mol_type = other DNA
gggcaaaatcaagtacagacagccgttcacaatgccgctatgggcgtcgcagtaggcaacttgaccatcttcccccacca

SEQ ID NO: 174056 - DNA, 80 bp, synthetic construct
  source 1..80: mol_type = other DNA
agactacccaaaaactaactggcttgcactaataaaaacactcacagacagtacaaacaactatcaaaatgaacaatatg

SEQ ID NO: 174057 - DNA, 80 bp, synthetic construct
  source 1..80: mol_type = other DNA
acaggggagggggagtactggctacagcaattatgcgtattgtggtgcggattatcgtgtactcgtgtgcgtattacgac

SEQ ID NO: 174058 - DNA, 80 bp, synthetic construct
  source 1..80: mol_type = other DNA
tagccagatgcaactgcagggctggagtgtattattgcgattcaagaagaaagtactacccagtgtctgtcacagaacct

SEQ ID NO: 174059 - DNA, 80 bp, synthetic construct
  source 1..80: mol_type = other DNA
gaacaatttgacaatctctgcctggcggctttgcgctatccgggccacaaattgtatccctctgtccacactctgttccc

SEQ ID NO: 174060 - DNA, 80 bp, synthetic construct
  source 1..80: mol_type = other DNA
aactccgacgtgctttctttgagaataaagttaatcacgcggatagcggccacgtcccacatgtccacaaacacacgtac

SEQ ID NO: 174061 - DNA, 80 bp, synthetic construct
  source 1..80: mol_type = other DNA
ccgccgcaatcaacgcccgtgtctccgtcgccaccccccgtccccaccaccgtccccggtcccgcaacgcgccgtccccg

SEQ ID NO: 174062 - DNA, 80 bp, synthetic construct
  source 1..80: mol_type = other DNA
ggggtcaagcaaacggcctggcattcagcgtcgcatacggctttccagtcccccccagcctgaggaacatctacgcggag

SEQ ID NO: 174063 - DNA, 80 bp, synthetic construct
  source 1..80: mol_type = other DNA
ggtgtattgttcggaaatgcattcattttcccgcaccaaattattaatttgagaaccaacaacagtgccacgttggtgtt

SEQ ID NO: 174064 - DNA, 80 bp, synthetic construct
  source 1..80: mol_type = other DNA
ccggcgacggtggtgtagcccgcgtggtgccccgcctgaggcttgtgcctcaggacgccacaatgttgacagggtgagaa

SEQ ID NO: 174065 - DNA, 80 bp, synthetic construct
  source 1..80: mol_type = other DNA
acacttattttgccctatgttaatgcagtaccaatggattcaatgctcagacataataattggagcatagtcatcatacc

SEQ ID NO: 174066 - DNA, 80 bp, synthetic construct
  source 1..80: mol_type = other DNA
tgcccgctctggtggcagtcggagcaggagaccaccagccaagaaagcgaagaagagcagaagacgccgaagacgatcga

SEQ ID NO: 174067 - DNA, 80 bp, synthetic construct
  source 1..80: mol_type = other DNA
tacttcaagcccaaacacatcagggcatgggtaccgcgtccgccccgattatgcccatacaaatacaaggcaaatgttaa

SEQ ID NO: 174068 - DNA, 80 bp, synthetic construct
  source 1..80: mol_type = other DNA
aggatggcatgcgcctctttcaacacagcaggcctctcctcaccctctgggagagcgtggccgcaaatcaggaggtcacg

SEQ ID NO: 174069 - DNA, 80 bp, synthetic construct
  source 1..80: mol_type = other DNA
tgctcgcgagttcccgtccgccgtccttgccgcaaacacctccgtcacctccgtcccggccccgcaacatcccccgtccc

SEQ ID NO: 174070 - DNA, 80 bp, synthetic construct
  source 1..80: mol_type = other DNA
gctcaactttgatggaacattgctgggtaatatcacaatatacccacaccaacttattaacctaaggagtaacaattcag

SEQ ID NO: 174071 - DNA, 80 bp, synthetic construct
  source 1..80: mol_type = other DNA
tgttaagggctggttaaaggtgtctgccaattctcgcatgtcctcctttccccttgttttgaaatagaatatgaatgtgg

SEQ ID NO: 174072 - DNA, 80 bp, synthetic construct
  source 1..80: mol_type = other DNA
actttaaacatgtaaacaagcatagccccaacactatcaaaagtaccgtaagaatatacttcaagccaaaacacgtgcag

SEQ ID NO: 174073 - DNA, 80 bp, synthetic construct
  source 1..80: mol_type = other DNA
taccagaactggacaatgtggaggagttttgtgctcaactggtaaaatctatggaattcatgttggtggtaatggacggc

SEQ ID NO: 174074 - DNA, 80 bp, synthetic construct
  source 1..80: mol_type = other DNA
gacccatgcagactcaaaaacaagggatacctacacgtatgcccagtggttctcaacaatttatgacaacagaagatgag

SEQ ID NO: 174075 - DNA, 80 bp, synthetic construct
  source 1..80: mol_type = other DNA
tcaaccattaagacaccagttaatgccactactattaaggaattcttcaaccatgcaattgaaggtgatgagcaaggtct

SEQ ID NO: 174076 - DNA, 80 bp, synthetic construct
  source 1..80: mol_type = other DNA
tcactattggaaactccactataacaacgcaggattccctaaatactattgtagcttatggtgaatggcctgagtatctc

SEQ ID NO: 174077 - DNA, 80 bp, synthetic construct
  source 1..80: mol_type = other DNA
aaggagagatcatggcaaagaagagtgtgtcagaggcaggtataccacccataaatacacctgcatcaactaaactgcat

SEQ ID NO: 174078 - DNA, 80 bp, synthetic construct
  source 1..80: mol_type = other DNA
gtggtccaacaactaaggcaagagaagaaaaacaggaaatgtgtagagcacaacttgtctgccattttccagggccttgg

SEQ ID NO: 174079 - DNA, 80 bp, synthetic construct
  source 1..80: mol_type = other DNA
taattacaacaagataaaagttgagaccaccaaagaattggaacagaagcattttcttaaaccaagacaagatatcagaa

SEQ ID NO: 174080 - DNA, 80 bp, synthetic construct
  source 1..80: mol_type = other DNA
accactagtgcaggttatccttatgccaccatgggtatcaggaaaaaggatattgtcaatagagttgaaaagagcactac

SEQ ID NO: 174081 - DNA, 80 bp, synthetic construct
  source 1..80: mol_type = other DNA
ttggtttataatggttttgactgctgcatttaagagatccacgtaagacaacacaaatatatttggctgcagacaacaat

SEQ ID NO: 174082 - DNA, 80 bp, synthetic construct
  source 1..80: mol_type = other DNA
ctttaagaataatgtatgacgaacatttaaggcaccttaactactggactgttagtaacgaagacctagacctgtgtaga

SEQ ID NO: 174083 - DNA, 80 bp, synthetic construct
  source 1..80: mol_type = other DNA
atggctccaaccatgtttctgaaataaaagcagctgcaactacatactggaaagctgttacctctgaactacctcaacaa

SEQ ID NO: 174084 - DNA, 80 bp, synthetic construct
  source 1..80: mol_type = other DNA
caagggatggtatcagactacttaaatcagatgggccatgcctttggggaaggtttcactcaaaatgtcagggatagtat

SEQ ID NO: 174085 - DNA, 80 bp, synthetic construct
  source 1..80: mol_type = other DNA
aaattggggcaattggctagttttcaaaagaagggggattggaagcaactgtataaatttgtagataggagcacactact

SEQ ID NO: 174086 - DNA, 80 bp, synthetic construct
  source 1..80: mol_type = other DNA
cattgaaggtgaatggcagtggcgtcccaacagtccctatcacagtttcagtagccccttataaatctgagttctctgga

SEQ ID NO: 174087 - DNA, 80 bp, synthetic construct
  source 1..80: mol_type = other DNA
actggacagggctgagggagtgttgcgtgacataagtaagcgcgtcggcgtcctcagcgcgtttgcggcgtgctgtgtcc

SEQ ID NO: 174088 - DNA, 80 bp, synthetic construct
  source 1..80: mol_type = other DNA
tgttaatgggtcttggaccctgaggctcaaaccacgtaactcccacaggccaatgagagtgtatgtcgtgcacttcctgg

SEQ ID NO: 174089 - DNA, 80 bp, synthetic construct
  source 1..80: mol_type = other DNA
accgaaccagacgttagttcaaacaggttttatacgctggagtcagtccagtggtcttcaaccagcaaggggtggtggtg

SEQ ID NO: 174090 - DNA, 80 bp, synthetic construct
  source 1..80: mol_type = other DNA
ggtagccgtacaaggccacaaattgggcagccatctcatccatgtttccaaccctctcaataaactggggcgcggccagg

SEQ ID NO: 174091 - DNA, 80 bp, synthetic construct
  source 1..80: mol_type = other DNA
aagatgaggccctgctcatcctccaccctggcggcggacaagagtctgcggtctcgggttctaaatgaaaggtcaaatag

SEQ ID NO: 174092 - DNA, 80 bp, synthetic construct
  source 1..80: mol_type = other DNA
agaaaaacaccttcgcacccgtcgactggttgctcgggtgtggggtgatggctggcaatgtcacagtgtttcctcaccaa

SEQ ID NO: 174093 - DNA, 80 bp, synthetic construct
  source 1..80: mol_type = other DNA
agtgacccacgacttagctacacgatgttgggtgagattttgaattattacacccactgggctggttcattgaaattctc

SEQ ID NO: 174094 - DNA, 80 bp, synthetic construct
  source 1..80: mol_type = other DNA
atccaggatacagcacagtattgaaccgcacactgatgggagagatgttaaattactatgcccattggtcggggagcatg

SEQ ID NO: 174095 - DNA, 80 bp, synthetic construct
  source 1..80: mol_type = other DNA
gaggagaaggcgctggggcctaccgagaagaagatttagaagaacttttcgcggccgcaagagacgacgatatgtgagta

SEQ ID NO: 174096 - DNA, 80 bp, synthetic construct
  source 1..80: mol_type = other DNA
ggcaacctaactttattagacactgctacataataggatacatgccactgataatatgtggagagaacactttctcccac

SEQ ID NO: 174097 - DNA, 80 bp, synthetic construct
  source 1..80: mol_type = other DNA
agcctacacccagtgtggtttcaagcacttgagcaacttctgaacaaccttgggctccctggtgaattggcatacaaatt

SEQ ID NO: 174098 - DNA, 80 bp, synthetic construct
  source 1..80: mol_type = other DNA
ccattcctttcaacttcttaaagaatgatatgtctgaccaaggcatagttacagaagtgacacccattcaaccaatgtat

SEQ ID NO: 174099 - DNA, 80 bp, synthetic construct
  source 1..80: mol_type = other DNA
caggcaaaagccaactagaaaattttttaaaaactaatgtaacagataattcaaatgtaggcaacacattagctacacca

SEQ ID NO: 174100 - DNA, 80 bp, synthetic construct
  source 1..80: mol_type = other DNA
gccagttccgagagcagcgagcaatcaacctccagctccgagagttgtgggtccagctcgccaaaacccaaaccaatacg

SEQ ID NO: 174101 - DNA, 80 bp, synthetic construct
  source 1..80: mol_type = other DNA
tgtggaacagcagccatatcttccggttccagtagacagcctcgcgaagtacaaattgttgacccactcaccatgggacc

SEQ ID NO: 174102 - DNA, 80 bp, synthetic construct
  source 1..80: mol_type = other DNA
cactatcagtccctaacggaaaccaacccacactccctatcacagtgacaattgcaccaatgtgtacagagttttcaggt

SEQ ID NO: 174103 - DNA, 80 bp, synthetic construct
  source 1..80: mol_type = other DNA
caccagtggtatgaatcctgctaccgtggccatgctgcttattgtggctgtggggattttattagtcaccttgttgctct

SEQ ID NO: 174104 - DNA, 80 bp, synthetic construct
  source 1..80: mol_type = other DNA
tgtttcctgttttactttaatgtgtgtcttatggttacaactatagagtaaccatgggtgcacaagtgagcaaacaaaat

SEQ ID NO: 174105 - DNA, 80 bp, synthetic construct
  source 1..80: mol_type = other DNA
gtgactatggttttgttcaaattccctcggctcaatgggagccacacccctctcagggcacataccagggccacattgat

SEQ ID NO: 174106 - DNA, 80 bp, synthetic construct
  source 1..80: mol_type = other DNA
actcatgtatgtgccacccggtggtcctgttccgaagaactcgcgcgactacgcctggcaaacgtccacaaatcccagcg

SEQ ID NO: 174107 - DNA, 80 bp, synthetic construct
  source 1..80: mol_type = other DNA
agacactgaacaatataagaacacttttattactgcattatcatctaaactaggcacaacatggggaaacagactaaata

SEQ ID NO: 174108 - DNA, 80 bp, synthetic construct
  source 1..80: mol_type = other DNA
tccttggaaggtcagcgtgcgttcacattgacacatacaaggcaaaaggtgaaaaggggtcccctgagagatacgccagc

SEQ ID NO: 174109 - DNA, 80 bp, synthetic construct
  source 1..80: mol_type = other DNA
acagcttacataattgcactggcagcggcccagaagaattttaccatgaaactttgcaaggacactagtcacatattaca

SEQ ID NO: 174110 - DNA, 80 bp, synthetic construct
  source 1..80: mol_type = other DNA
tgtgacccagagaccttttggtcgaagatcccagttatgcttgatggtgagtgtctcatggcctttgattattccaatta

SEQ ID NO: 174111 - DNA, 80 bp, synthetic construct
  source 1..80: mol_type = other DNA
cgcaacgcacctcgaactcctcgagcaccgaggagaggtcggggttgtggaaacgcagctcgcggtagtatcccaaccaa

SEQ ID NO: 174112 - DNA, 80 bp, synthetic construct
  source 1..80: mol_type = other DNA
tatcattgcttgtacagaaatgtacaaccttcttttcttcagccgccacagaaattctagataatgaccttgtcaaattt

SEQ ID NO: 174113 - DNA, 80 bp, synthetic construct
  source 1..80: mol_type = other DNA
tttataatcctgagattgacgatcttgagattctggactctgggacatttctctttgcaatagctactgttctagcccaa

SEQ ID NO: 174114 - DNA, 80 bp, synthetic construct
  source 1..80: mol_type = other DNA
catccaggccaaatacaaattcaaattcaaatggggtggcaatctctcttaccaccagaccatcagaaacccctgcgcct

SEQ ID NO: 174115 - DNA, 80 bp, synthetic construct
  source 1..80: mol_type = other DNA
agttagacccagagagaatagcagagcaaggaaaaacctatggattaacaattactcctccagacaaaacagaacatttt

SEQ ID NO: 174116 - DNA, 80 bp, synthetic construct
  source 1..80: mol_type = other DNA
tagataaaacccctcacaacaacacactatatggtggcagtacgtatgccaccgaaaaaaatgccactggaaacaaaata

SEQ ID NO: 174117 - DNA, 80 bp, synthetic construct
  source 1..80: mol_type = other DNA
aaagtgctaataaattaaatacagccataacagagggagcatttcatgctcctcaaatacaaaaagacaccagtacttta

SEQ ID NO: 174118 - DNA, 80 bp, synthetic construct
  source 1..80: mol_type = other DNA
aagatacacaatctatacaacaagaaacagcattgacagaaggactaggtgaagatctaatggaagtcattgtcgataaa

SEQ ID NO: 174119 - DNA, 80 bp, synthetic construct
  source 1..80: mol_type = other DNA
agtgtgtgggaaatcaactatacagacaccgtacaactcagaaggaaattggaaatgtttacatactcacgctttgacac

SEQ ID NO: 174120 - DNA, 80 bp, synthetic construct
  source 1..80: mol_type = other DNA
acattccaggggaggttaaaaacttactggaaatgattcaggtagatacattaataccgatgaataacaccactgctaca

SEQ ID NO: 174121 - DNA, 80 bp, synthetic construct
  source 1..80: mol_type = other DNA
ggccacaggcttagaactcagaaacccctggctcagaatgagcaccctgagcccctgcataggcttcaatgtccttaaaa

SEQ ID NO: 174122 - DNA, 80 bp, synthetic construct
  source 1..80: mol_type = other DNA
gagagaatggccctgacaagtcggctgcatgatgcacttcggcagtcacgtgtgtgagtctccacggcctctgtcaaaag

SEQ ID NO: 174123 - DNA, 80 bp, synthetic construct
  source 1..80: mol_type = other DNA
ttcaatacatgtatgttcccccaggtgcaccccttccagataaaagaatgcatgatgcctggcaaactagtacaaatgcc

SEQ ID NO: 174124 - DNA, 80 bp, synthetic construct
  source 1..80: mol_type = other DNA
ggttcccggacaatacacccatctggagttcaacctaattacatggtagataaattaagagtccctcctcaccactcgaa

SEQ ID NO: 174125 - DNA, 80 bp, synthetic construct
  source 1..80: mol_type = other DNA
tacaccacctacaaaaatgcaaacccgggagaacatggtggagagttcgtagacaaatttactgcagcgacggaggcaac

SEQ ID NO: 174126 - DNA, 80 bp, synthetic construct
  source 1..80: mol_type = other DNA
cttccaaccgttccatctgatagtgtagaaactagaacaacctacatgcactatgatggtacagaaaccagtatagagag

SEQ ID NO: 174127 - DNA, 80 bp, synthetic construct
  source 1..80: mol_type = other DNA
cttcaaaccaagtcgatgtgacaatacttgggagcctattgcagctagattttcaaaatcctagggtttatggccaaaat

SEQ ID NO: 174128 - DNA, 80 bp, synthetic construct
  source 1..80: mol_type = other DNA
aagccaagatcatcagagactatggaggaaggcaagagctggatagcagttcccacctggagggtgccagggagaatgga

SEQ ID NO: 174129 - DNA, 80 bp, synthetic construct
  source 1..80: mol_type = other DNA
taatacgtgggttgaaaataacttcaaaacaggcaagctagtaaagtacaactataatcagtatgctcctaacatagaaa

SEQ ID NO: 174130 - DNA, 80 bp, synthetic construct
  source 1..80: mol_type = other DNA
gcgccggagggctgccgccccccccggagaaagggtgaggccccccccgggaggtggtttgcccaccggcccgccacccg

SEQ ID NO: 174131 - DNA, 80 bp, synthetic construct
  source 1..80: mol_type = other DNA
tgaacaatacgagtaccacctaggatggtactctaacatattcataggcaacctgagacacaacctggccttcaggtcgg

SEQ ID NO: 174132 - DNA, 80 bp, synthetic construct
  source 1..80: mol_type = other DNA
ggcagcactaccaaactaccccacaattatgtccacagacctgtatgagtaccactcgggcatatactctagcatattcc

SEQ ID NO: 174133 - DNA, 80 bp, synthetic construct
  source 1..80: mol_type = other DNA
ccctgcaagacggacggaccttcccactccggtagacagcctagagacgtacaagttgttgacccgctcaccatgggtcc

SEQ ID NO: 174134 - DNA, 80 bp, synthetic construct
  source 1..80: mol_type = other DNA
cagctcgggcggcagtccggcgtagtatttatctaggtggcgtagcagcggcgggtccagctggtgacgcaggcagaatt

SEQ ID NO: 174135 - DNA, 80 bp, synthetic construct
  source 1..80: mol_type = other DNA
tcctgggccgggtctacgtcctaatataaggccgtgcacttccgaatggctgagttttccacgcccgtccgcagcgagaa

SEQ ID NO: 174136 - DNA, 80 bp, synthetic construct
  source 1..80: mol_type = other DNA
tcacttgcggtttctgcggcttcctttctccacccattcggctcaccacaaactgccaacctttgcacaaccttccaggt

SEQ ID NO: 174137 - DNA, 80 bp, synthetic construct
  source 1..80: mol_type = other DNA
gtttttaccagactaagattgttgttcctctgagcacccccaccaaaatggacatgctagcctttgtaagtgcatgtcca

SEQ ID NO: 174138 - DNA, 80 bp, synthetic construct
  source 1..80: mol_type = other DNA
atctggaaacaaaataatgctgcttggtgggcaaaagacgaaaaagcacacaccaacttacacagccagtacaacaagcc

SEQ ID NO: 174139 - DNA, 80 bp, synthetic construct
  source 1..80: mol_type = other DNA
ccttattacaacatccaagttcagaaacactacaggattactagatgtagcaaaagcactacaaccatgcacaggttgtc

SEQ ID NO: 174140 - DNA, 80 bp, synthetic construct
  source 1..80: mol_type = other DNA
caactacgtagaagaaggctggataggcagtgtcataggcagtatcctgcacagtctcaataacggcctgatccaccacg

SEQ ID NO: 174141 - DNA, 80 bp, synthetic construct
  source 1..80: mol_type = other DNA
tggttacttacataaaagatgagctcagaggtaaagataaaattaggctagggaagagtagattaattgaagcatctagt

SEQ ID NO: 174142 - DNA, 80 bp, synthetic construct
  source 1..80: mol_type = other DNA
acccctccacaatacgcgcctgtaacataaggggctttgtagcactggtagtttgtggacacactcgcgcatcacacaac

SEQ ID NO: 174143 - DNA, 80 bp, synthetic construct
  source 1..80: mol_type = other DNA
ggcaggaaaaaccagaattatagaagcagctagtgttaatgacacagcacacttccgtatgacatttggaaatctcttct

SEQ ID NO: 174144 - DNA, 80 bp, synthetic construct
  source 1..80: mol_type = other DNA
agatgtggagattggtactgtggtaccatatggagaggtcaaccttagtggtaatccaacatgtcggcttctcaagtaca

SEQ ID NO: 174145 - DNA, 80 bp, synthetic construct
  source 1..80: mol_type = other DNA
ggaaaccagccttccagatgatactggaaaccaaacgtaagcatgacgctatgccattgtctccgtggttgccgaaacgt

SEQ ID NO: 174146 - DNA, 80 bp, synthetic construct
  source 1..80: mol_type = other DNA
ctttagatattaatcatgttgactaccaaacaaactataaaaactgggcaattagtatacaggaaatgtcacagattagg

SEQ ID NO: 174147 - DNA, 80 bp, synthetic construct
  source 1..80: mol_type = other DNA
agatcttatttcaatgaacaacaaggtcaaataatgacaaagaaggatgtcaaggaaatcaatttatatagtatacacac

SEQ ID NO: 174148 - DNA, 80 bp, synthetic construct
  source 1..80: mol_type = other DNA
tccaggtgtggtcaccggatcagcagtggggtgtgaccctgaagtgttctggtcaactataccattgatgctagatggag

SEQ ID NO: 174149 - DNA, 80 bp, synthetic construct
  source 1..80: mol_type = other DNA
actaaggagatacatattccagggaaaattgataacatgttgcatatagccatggttgactcactcattcctataaataa

SEQ ID NO: 174150 - DNA, 80 bp, synthetic construct
  source 1..80: mol_type = other DNA
tacacttataggtgaaatctccagttattacactcactggactggaagtgttaggttcagcttcatgttctgtgggtcag

SEQ ID NO: 174151 - DNA, 80 bp, synthetic construct
  source 1..80: mol_type = other DNA
ccccaggacttaagatcccagaaaatgacaccgaccggttgtgggattccgcatcgaatcctagtgttttcttccaaccc

SEQ ID NO: 174152 - DNA, 80 bp, synthetic construct
  source 1..80: mol_type = other DNA
gcagcggcgtagagagcagaatctggaagggatcccgcaattcttcgggtcggaggtcgaggtgcaactggatcagatgg

SEQ ID NO: 174153 - DNA, 80 bp, synthetic construct
  source 1..80: mol_type = other DNA
ctcttgatttgaacactagcgcaggatttccatatattgcaatgggagttaaaaagagagatttaataaacaacaagacc

SEQ ID NO: 174154 - DNA, 80 bp, synthetic construct
  source 1..80: mol_type = other DNA
tcttaaacataggtagagtagccagagaatttccaggactatacacagacgttgtctataatccatggacagataaaggc

SEQ ID NO: 174155 - DNA, 80 bp, synthetic construct
  source 1..80: mol_type = other DNA
agtgctaaaatgatgcgttggtatggttcccaggactgcacggcgatgaagagccagagtatgggaagcatgaagcttag

SEQ ID NO: 174156 - DNA, 80 bp, synthetic construct
  source 1..80: mol_type = other DNA
aatacctgggggatagtgaggccactgcagaagatcagccaacacaaccagatgttgccacatgccgcttctacactttg

SEQ ID NO: 174157 - DNA, 80 bp, synthetic construct
  source 1..80: mol_type = other DNA
aaaccgccatactgcaaggtgaccctatcgcagacataattgaaaacactgtcacacaaactgccaatgtagccaccgga

SEQ ID NO: 174158 - DNA, 80 bp, synthetic construct
  source 1..80: mol_type = other DNA
gcaccatgtgcaaaaacttgtccttgcgcgcggtttcgccgccgggaaagacgggcgacagcacgttggttacagccttg

SEQ ID NO: 174159 - DNA, 80 bp, synthetic construct
  source 1..80: mol_type = other DNA
cctgcttagtgtatatctaggacaagcctgctcaaacaagtgggcttttgatatccatttcaagaggccacaaggtaaat

SEQ ID NO: 174160 - DNA, 80 bp, synthetic construct
  source 1..80: mol_type = other DNA
acgaatgtcacattaacatgacatacagcaagggcaaatacgaggaatacgagtaccacctagggtggtattctaacata

SEQ ID NO: 174161 - DNA, 80 bp, synthetic construct
  source 1..80: mol_type = other DNA
cacatggtcatcacatatatccttatgtacaccgccaaacaaatcatcgacacaaaatcctaacttcacatattatatgc

SEQ ID NO: 174162 - DNA, 80 bp, synthetic construct
  source 1..80: mol_type = other DNA
taaccagcatggggggctctacctatgtaccaatcacagttactatcgccccgatgtgtgctgagtacaacgggctgcga

SEQ ID NO: 174163 - DNA, 80 bp, synthetic construct
  source 1..80: mol_type = other DNA
agaatggcctttggtaatctattttccaaatttcaccaaaacccaggtatcgtcacagggtctgcagtaggttgtgatcc

SEQ ID NO: 174164 - DNA, 80 bp, synthetic construct
  source 1..80: mol_type = other DNA
cgaggatagaggaatgatcaagcaagcacagtgttcccttgaaagaaacataaaccatatacaatacaccttgaactgct

SEQ ID NO: 174165 - DNA, 80 bp, synthetic construct
  source 1..80: mol_type = other DNA
gctccaaagcctaaacccacttctggagactgggaaacagagtatgcagcttgcagtgcctttgacagacccgctagaac

SEQ ID NO: 174166 - DNA, 80 bp, synthetic construct
  source 1..80: mol_type = other DNA
ctttttccctcttcctgctcctaaagtcacaatctcacgggcactacggggtgatatggcaactctttcaaatcaaagcc

SEQ ID NO: 174167 - DNA, 80 bp, synthetic construct
  source 1..80: mol_type = other DNA
gcggaccctttagctacaaagatgacctagctaatactacaataacagccagatacaagtttagatttaaatggggcggt

SEQ ID NO: 174168 - DNA, 80 bp, synthetic construct
  source 1..80: mol_type = other DNA
ttaccaagggataggcattaacgccttaactgcacatacaactatatcagacactttatacacacaaggtaactactacc

SEQ ID NO: 174169 - DNA, 80 bp, synthetic construct
  source 1..80: mol_type = other DNA
ggtagggtgtgaccctgaagtattctggtcaaccatacctcttatgttagatggagaatgtctaatggcttttgattact

SEQ ID NO: 174170 - DNA, 80 bp, synthetic construct
  source 1..80: mol_type = other DNA
gcccacttgacaaaaccaggaaccaacaccattcttctagccatctcatctgatttacaggtcgacagtgttgacacacc

SEQ ID NO: 174171 - DNA, 80 bp, synthetic construct
  source 1..80: mol_type = other DNA
tgggtgcctagaccacctaggttatgtcagtatgagaaacagaaaaacgttaacttcacccccacaggtgtcactacagc

SEQ ID NO: 174172 - DNA, 80 bp, synthetic construct
  source 1..80: mol_type = other DNA
cattgaaggcaaacacaaatgctgccaataccctgcctatcactgtaagcatagccccagataagtcagaattttcaggt

SEQ ID NO: 174173 - DNA, 80 bp, synthetic construct
  source 1..80: mol_type = other DNA
gtaatggggaggtgatcacagcgcgtcatgttctccggcagctttacatagagggtctccgtcatgtcatcaatgttggt

SEQ ID NO: 174174 - DNA, 80 bp, synthetic construct
  source 1..80: mol_type = other DNA
ttatatccccttccccttttgtaacttagaagtcgtgaacacagaccaataggtggcgatcacccagatcgcttaaggtc

SEQ ID NO: 174175 - DNA, 80 bp, synthetic construct
  source 1..80: mol_type = other DNA
agcgagccagggccacgttgctgggtgcgggaaagagcccgctctcctccgccaggggccccgtgatgaaggtgtacagg

SEQ ID NO: 174176 - DNA, 80 bp, synthetic construct
  source 1..80: mol_type = other DNA
agcaagtctccgggttgggcctaacgggtgagctgattgaaccgccattccacgagttcgcctacgagagcctaaagacc

SEQ ID NO: 174177 - DNA, 80 bp, synthetic construct
  source 1..80: mol_type = other DNA
atcaattagcaagtataggtaatgaaaaagttgggcctgggtacaaattcacacatcctggtgaagcaggtagacaaatt

SEQ ID NO: 174178 - DNA, 80 bp, synthetic construct
  source 1..80: mol_type = other DNA
caaaacacactatgacgaacacctatttaaacaaacatctctgtacaacacatttcaaaccatagctcaacttaaagaaa

SEQ ID NO: 174179 - DNA, 80 bp, synthetic construct
  source 1..80: mol_type = other DNA
cgagcgtgaggaacgaaagcagcatcaccacgtagacgcagctgatgcatttccaacgacgtcggtcacggccacctaga

SEQ ID NO: 174180 - DNA, 80 bp, synthetic construct
  source 1..80: mol_type = other DNA
ttgtgttttgcttctgcgtgtaatgacttctcagtacgcatgctcagggacacgccatttatcgagcaaacccaactgct

SEQ ID NO: 174181 - DNA, 80 bp, synthetic construct
  source 1..80: mol_type = other DNA
ctgacatccttaacatcgtccgtcagatggcctgtcttggacgagaccatagtctggaacatctcctcgaggacgggata

SEQ ID NO: 174182 - DNA, 80 bp, synthetic construct
  source 1..80: mol_type = other DNA
cgcgaaataaatttcggctcatggcgttaaccaggtagaaactgtgcgtacagttgcgttgcgcgtaacgtagaagcaag

SEQ ID NO: 174183 - DNA, 80 bp, synthetic construct
  source 1..80: mol_type = other DNA
aacacgaggcaagtttcaagagttaaaagcaactactgtttattttccaaaatgagctgggtatagttgatgatctgtag

SEQ ID NO: 174184 - DNA, 80 bp, synthetic construct
  source 1..80: mol_type = other DNA
agatggtctcggtccaatcatgacctagacctagccagatacaagggcacaactctaaaactgtacagacaccacacctt

SEQ ID NO: 174185 - DNA, 80 bp, synthetic construct
  source 1..80: mol_type = other DNA
ttccttggcagaatgattactagtgagacagacatatactcattaccaccagatccaaaacactttgatggctatgatca

SEQ ID NO: 174186 - DNA, 80 bp, synthetic construct
  source 1..80: mol_type = other DNA
taaggatttagatttgagcactgctacctttttaaaaagaggcttcaaacctgatacacaccacccttttttgattcatc

SEQ ID NO: 174187 - DNA, 80 bp, synthetic construct
  source 1..80: mol_type = other DNA
gactgtgcaattctaagcatatctataaagattcatattatgaggtggaaggaggtgtgccatctggatgttcaggtact

SEQ ID NO: 174188 - DNA, 80 bp, synthetic construct
  source 1..80: mol_type = other DNA
atatgggctaactatcacccctgcagacaagtcagagaaatttgaaaaagtcacttgggaaaatgccacgtttctcaaga

SEQ ID NO: 174189 - DNA, 80 bp, synthetic construct
  source 1..80: mol_type = other DNA
agccacaaacactcactgacactgaatactttcaaaaggtagatggactctggggagacacagtgtttggtgactaccca

SEQ ID NO: 174190 - DNA, 80 bp, synthetic construct
  source 1..80: mol_type = other DNA
gtgcgaacaggtatgttcaccccacctactacttgggtcgaggaggttggcattccccaacagggaacggggtccaaccc

SEQ ID NO: 174191 - DNA, 80 bp, synthetic construct
  source 1..80: mol_type = other DNA
cgacaccccctgtgggaatcccattcagtggatgtggtaccgcctgttggtaaactcgtgcctgaggagtgcccactgtc

SEQ ID NO: 174192 - DNA, 80 bp, synthetic construct
  source 1..80: mol_type = other DNA
gtatggtttaactataacaccagcagacaaaagtgataccttccagaaaattacatgggacaatgtgactttccttaaga

SEQ ID NO: 174193 - DNA, 80 bp, synthetic construct
  source 1..80: mol_type = other DNA
tctggtgaccttgaagaggaagaggaggggtcccgagaatccccatccctaccgtccagcaaaaaggtggccgatgaatt

SEQ ID NO: 174194 - DNA, 80 bp, synthetic construct
  source 1..80: mol_type = other DNA
tagtgtaatccctaccaccagacccagattaatttggtgggtacaagcagcaggctgtagtgattatgggtgatttgtgt

SEQ ID NO: 174195 - DNA, 80 bp, synthetic construct
  source 1..80: mol_type = other DNA
gtcagggtctcttaagatttcattaatgtatacgggtcctgctttatccagtgcaaaattgattctagcttacactccac

SEQ ID NO: 174196 - DNA, 80 bp, synthetic construct
  source 1..80: mol_type = other DNA
tagggaaagaggttctgcagcggctgcatgcagagacgccgctgtcgagtatagatcaaataagtgataatgactacggc

SEQ ID NO: 174197 - DNA, 80 bp, synthetic construct
  source 1..80: mol_type = other DNA
ttagagaatatgattgacaacacagtccgcgagacagtagggacatcagcctctagggacgctctcccaaacaccgaatc

SEQ ID NO: 174198 - DNA, 80 bp, synthetic construct
  source 1..80: mol_type = other DNA
gtgtgacctatgggaatgcaaatccgggtgaggctggtgggcagttctctgctacttttgtgccttccactaacgatgga

SEQ ID NO: 174199 - DNA, 80 bp, synthetic construct
  source 1..80: mol_type = other DNA
cctcaccacctcgtcgtccccttcccggcgtggggcaccagcgtccacagcactgcaggtaacacaggtagcataggaaa

SEQ ID NO: 174200 - DNA, 80 bp, synthetic construct
  source 1..80: mol_type = other DNA
cacctactacacagtacctccatttaaaataaacaaatacactagtccaatgctacacccaggcatgatgatgcagtaca

SEQ ID NO: 174201 - DNA, 80 bp, synthetic construct
  source 1..80: mol_type = other DNA
gcctagcaattccaccagtattcctgccctgactgcggttgagaccggacacacatcacaggtggaacctagtgacacaa

SEQ ID NO: 174202 - DNA, 80 bp, synthetic construct
  source 1..80: mol_type = other DNA
ccaactcatgcctcccccggagatttcatcgttattgatggtagggagattgaggttctcgatgctgaggcacttgaaga

SEQ ID NO: 174203 - DNA, 80 bp, synthetic construct
  source 1..80: mol_type = other DNA
ctaagaaacctgctggcaataatgatttgttgcttaccattccattagacattagtaacaccctattctccaccacattg

SEQ ID NO: 174204 - DNA, 80 bp, synthetic construct
  source 1..80: mol_type = other DNA
tgtcatcgggatccatgttggaggaaatggaagagtgggttactgtgcagctttgctgcgacggtattttgccacgccac

SEQ ID NO: 174205 - DNA, 80 bp, synthetic construct
  source 1..80: mol_type = other DNA
cgtgacctctttagcagaaagagtattaagagaatctcagaacaatatgaaactactgagtttctattcccaggcccaaa

SEQ ID NO: 174206 - DNA, 80 bp, synthetic construct
  source 1..80: mol_type = other DNA
gttgctgggtataaaatttgtaactaccacttagcaacacccagtgaccacctgaacgccattagtgtgatgtgggacag

SEQ ID NO: 174207 - DNA, 80 bp, synthetic construct
  source 1..80: mol_type = other DNA
aatgtttaatatcagacataccactgtggtgtgcagtctttggttaccaagactggattaaaaaagaattaaatcactgg

SEQ ID NO: 174208 - DNA, 80 bp, synthetic construct
  source 1..80: mol_type = other DNA
aaccaccgatctcaccaagagacattacatacagaaacgcacctcagttaagtcagcaggtccaagtgacatgtatgtgc

SEQ ID NO: 174209 - DNA, 80 bp, synthetic construct
  source 1..80: mol_type = other DNA
acgctgcaggtgagattcactctagcacctgcatgggcggtgacattttcaaatttaaccagatctgagaaaaatgcaca

SEQ ID NO: 174210 - DNA, 80 bp, synthetic construct
  source 1..80: mol_type = other DNA
attcttgcccgcatgataaccaatccatcagatatatattccctacccccaaatccaaaatattttgatggatatcatca

SEQ ID NO: 174211 - DNA, 80 bp, synthetic construct
  source 1..80: mol_type = other DNA
gcgtactcacagacctgccgctgtggtccctcttgtactgctactctgactttgtgcaggaggagctcaacatagactca

SEQ ID NO: 174212 - DNA, 80 bp, synthetic construct
  source 1..80: mol_type = other DNA
tacatgcgatcgtaatttatctttatctctgtacggtcttaattttactcattctggtaaatatagctttcgatgttata

SEQ ID NO: 174213 - DNA, 80 bp, synthetic construct
  source 1..80: mol_type = other DNA
aagaggacatggagcatgcagtagccgtgatgtgggaccgagaccttatggtggtggaaagccgggctcaggggattgat

SEQ ID NO: 174214 - DNA, 80 bp, synthetic construct
  source 1..80: mol_type = other DNA
cacagtgatcaccaacgctttacaactgtctcagcccaaaccgcagaaacaactcactgctcaatccaccgcctcatcca

SEQ ID NO: 174215 - DNA, 80 bp, synthetic construct
  source 1..80: mol_type = other DNA
tgggttcactcatttaacttcacattcatttgaccttattagaattgttctgttgatacgacaccactaccacaatgggt

SEQ ID NO: 174216 - DNA, 80 bp, synthetic construct
  source 1..80: mol_type = other DNA
agcagaccctgtggggatagtcagtggagtccagacatattcggccaagatgtcgacatatatgacaatgcaccaaacag

SEQ ID NO: 174217 - DNA, 80 bp, synthetic construct
  source 1..80: mol_type = other DNA
gcttgcgcgtttcggaccttcggcgtcggggggggcgggggctttactaaacagactccgagttgccattggacactgta

SEQ ID NO: 174218 - DNA, 80 bp, synthetic construct
  source 1..80: mol_type = other DNA
gcgttacataggtcatcagagaatgcacaggccatagcacggattaagggagcaattcagaatacaaatgaagcagtcaa

SEQ ID NO: 174219 - DNA, 80 bp, synthetic construct
  source 1..80: mol_type = other DNA
acgcccgcgagcgcggcgagttcggggacgaggacgaagagcaggagaacgacggcgagccgcgcgaggcccagctcgat

SEQ ID NO: 174220 - DNA, 80 bp, synthetic construct
  source 1..80: mol_type = other DNA
tggttccaactgtccaaaggaaaagagaaatcctagaggaatgcaagaaaatcagtctttaccaggaacaagtgaatggc

SEQ ID NO: 174221 - DNA, 80 bp, synthetic construct
  source 1..80: mol_type = other DNA
tggaaagatgagtttgaaacctgtgcagcctggaacaggccccctagaaaattccactcagacacaccatactacccctg

SEQ ID NO: 174222 - DNA, 80 bp, synthetic construct
  source 1..80: mol_type = other DNA
ggcaaaaagtatagaagggttaaaattcacccccctaaaatgtttgaagacaagtggtactctcagagcgacctgtgccc

SEQ ID NO: 174223 - DNA, 80 bp, synthetic construct
  source 1..80: mol_type = other DNA
gattataccagaagccagggataaggtggaatttctttccaagctaaaacaactggacttgttggagaaccaaatttcca

SEQ ID NO: 174224 - DNA, 80 bp, synthetic construct
  source 1..80: mol_type = other DNA
gatgatgttatcgcctcataccctgaactactagacccacaagaaatagcaaatactgctaaaatatatggcttaacaat

SEQ ID NO: 174225 - DNA, 80 bp, synthetic construct
  source 1..80: mol_type = other DNA
ttcaaaacggatgacaaatatacatttcttgtacaccctttgtacccagagaaagaagtgtgggaatctataagatggac

SEQ ID NO: 174226 - DNA, 80 bp, synthetic construct
  source 1..80: mol_type = other DNA
ttgcagatctattgcagaatcctgtggaacagtttgtagataatgtcttagaggaagttttagttgtacccaacactcaa

SEQ ID NO: 174227 - DNA, 80 bp, synthetic construct
  source 1..80: mol_type = other DNA
tgcgttccaaatcaaagtcactgcaggaaatgtgcaggataagagtgcaatattttcttttcagttgaacccaggaaata

SEQ ID NO: 174228 - DNA, 80 bp, synthetic construct
  source 1..80: mol_type = other DNA
gagagtcgattctgtcggtcaacattgtaagcatcgtggcggtggtgtgatggagtggaaaacagtgatactaggtgttt

SEQ ID NO: 174229 - DNA, 80 bp, synthetic construct
  source 1..80: mol_type = other DNA
ttttctctaccctttttgagtgtggcttcagcttactacatgttttatgatggatataatgaagaagggcaaaattacgg

SEQ ID NO: 174230 - DNA, 80 bp, synthetic construct
  source 1..80: mol_type = other DNA
aagataaaactaagggctttgtactatatggagacacatttgccaacggaaatatgccagtacttgcaccacagataccc

SEQ ID NO: 174231 - DNA, 80 bp, synthetic construct
  source 1..80: mol_type = other DNA
ttagaagactggctatatggaaaatgcacacactatcaaacatttgccacagacactagactaaaccctcaacgaccaat

SEQ ID NO: 174232 - DNA, 80 bp, synthetic construct
  source 1..80: mol_type = other DNA
ctccataccagggataccaggagccgccggcccacgggctccaatcatcttcatatccaggatatgcgggtccctggacc

SEQ ID NO: 174233 - DNA, 80 bp, synthetic construct
  source 1..80: mol_type = other DNA
gacatgcaaaatgcagtggcgatcatgtgggaccgtgatctcctggttgctgagagcagagcgcagggtattgacaccat

SEQ ID NO: 174234 - DNA, 80 bp, synthetic construct
  source 1..80: mol_type = other DNA
gaagggtgttactactgcaaatctcaggacaggtatttccctgtcaagaccacacagcatgattggtatgagatacaaga

SEQ ID NO: 174235 - DNA, 80 bp, synthetic construct
  source 1..80: mol_type = other DNA
cgcccttcactctgacgactacaccccccaaggacagccctttggaggggcccttagcactacctccttctctttaaaag

SEQ ID NO: 174236 - DNA, 80 bp, synthetic construct
  source 1..80: mol_type = other DNA
aacggctttcaaacaaagaaatcatctttgtttggctttaacacatacaaccctaaccaagaaaaactaacattagccag

SEQ ID NO: 174237 - DNA, 80 bp, synthetic construct
  source 1..80: mol_type = other DNA
gtttcggcagtacggcgcgggatctttctgcgggagtttgcacggcgcttttgcgcgaccctcggtctttgtcgtttcgt

SEQ ID NO: 174238 - DNA, 80 bp, synthetic construct
  source 1..80: mol_type = other DNA
gggagttgccattcctttcaacttcttaaagaacgatatgtctgatcaaggcatagtcacagaaattacaccaattcagc

SEQ ID NO: 174239 - DNA, 80 bp, synthetic construct
  source 1..80: mol_type = other DNA
gtcaaaaatctggaaccattagacctaactacaagtgctggttttccatatgttgcactgggtataaagaaaagggactt

SEQ ID NO: 174240 - DNA, 80 bp, synthetic construct
  source 1..80: mol_type = other DNA
gttggagtcatttacccattctagggtaaggctataattgtaacccccgttagttatatgagttccgttgttggaagtag

SEQ ID NO: 174241 - DNA, 80 bp, synthetic construct
  source 1..80: mol_type = other DNA
tagggtcagcagcttggtcagggataggtgcaaaaacctgagctcgtcctcgcgcagagcgcaaagcggccagttcttta

SEQ ID NO: 174242 - DNA, 80 bp, synthetic construct
  source 1..80: mol_type = other DNA
gaggttgaaaactttaatgccacatccacagacgataagaagaagcaattcacaacttggcctataacatacactaatac

SEQ ID NO: 174243 - DNA, 80 bp, synthetic construct
  source 1..80: mol_type = other DNA
ctggaagccaagaaggcggccagcgtggaccaagtaccgcagacgcaggtggagacgacttcgaccccgcagacctagaa

SEQ ID NO: 174244 - DNA, 80 bp, synthetic construct
  source 1..80: mol_type = other DNA
aatacaagaaagtgagtactacccaaagcatatccaatataatttattaattggtgagggtccatgtgaaccaggtgatt

SEQ ID NO: 174245 - DNA, 80 bp, synthetic construct
  source 1..80: mol_type = other DNA
gcaccatgagcctcaggttccccgagagggcgggttacgagaaactgggataccgcccgcatgccaaacgcgtgcgggtg

SEQ ID NO: 174246 - DNA, 80 bp, synthetic construct
  source 1..80: mol_type = other DNA
gaaaccgcgtggagactctgaggcaggacaggggtgtggccaatatcccagccgagtcgtatttaaaggccagcgacgcc

SEQ ID NO: 174247 - DNA, 80 bp, synthetic construct
  source 1..80: mol_type = other DNA
aacaagcaaatacaactttaaattcacttggggtggcaatcctatatttcaacagactgtcaaagacccctgtaagcaat

SEQ ID NO: 174248 - DNA, 80 bp, synthetic construct
  source 1..80: mol_type = other DNA
ttctctaggagattccttttcccagccagaggtggctggttaaataatacctattgtaacaaaacatgtaagacacaaca

SEQ ID NO: 174249 - DNA, 80 bp, synthetic construct
  source 1..80: mol_type = other DNA
ccgtgtctctggggctgacctttatgcagaaggcgtcccctactaggtccacggccagctcgtaggtggtgcctatgttt

SEQ ID NO: 174250 - DNA, 80 bp, synthetic construct
  source 1..80: mol_type = other DNA
gcagaccgcgccagatgctgctgaacttgggctgcccgcgcagatagagcgacgagagcgagtcaaagtagcccacgacg

SEQ ID NO: 174251 - DNA, 80 bp, synthetic construct
  source 1..80: mol_type = other DNA
attagatcacaagccgtaaaggtacaaggtttacctaccctaactacccccgggtctggtcagtttctaacaacagatga

SEQ ID NO: 174252 - DNA, 80 bp, synthetic construct
  source 1..80: mol_type = other DNA
aaggcatctgcctctggcacttccctgttagaggccgggtcgtagacgatggcctgttcctggtaggtatgtccggctat

SEQ ID NO: 174253 - DNA, 80 bp, synthetic construct
  source 1..80: mol_type = other DNA
aataacggcgaaggatcgtcgcggcactcgtagcccagcgaggggtaacccagccaaaccagcgcgctaatgagcacgct

SEQ ID NO: 174254 - DNA, 80 bp, synthetic construct
  source 1..80: mol_type = other DNA
ctaacctgcttgggccaaatagttttgctacaacatcaacaccagaaaacaatcatgttgagcaggcaaccaccactgtt

SEQ ID NO: 174255 - DNA, 80 bp, synthetic construct
  source 1..80: mol_type = other DNA
ctcaaacgaccagctagacctcgccagatacaggggctgtaaactaaggttctacagaagccccgtctgtgactttatag

SEQ ID NO: 174256 - DNA, 80 bp, synthetic construct
  source 1..80: mol_type = other DNA
ccagacggcagcaactacataccctttcagtttagagcaaagtggtaccccacagtactacaccagcaacaggtaatgga

SEQ ID NO: 174257 - DNA, 80 bp, synthetic construct
  source 1..80: mol_type = other DNA
cagctagtaacgtcgaggccagctcacacgccataggccttggcagggttccagcactgcaggcagctgaaacaggtgct

SEQ ID NO: 174258 - DNA, 80 bp, synthetic construct
  source 1..80: mol_type = other DNA
ccctcactggaagagcgaaattcacaaaaacaccactaaccaatgactggatcatagaggaggagtgtgagttggactat

SEQ ID NO: 174259 - DNA, 80 bp, synthetic construct
  source 1..80: mol_type = other DNA
gtggttgattggttctcagacaaaattaaatctatgttgaattttgttgaaagaaacaaggcttggctcactgtggtttc

SEQ ID NO: 174260 - DNA, 80 bp, synthetic construct
  source 1..80: mol_type = other DNA
tacaagccaaccctggtgagacaggtgggaccttcacggatacatacaatcccagctctgagacaactggtgcacgcaag

SEQ ID NO: 174261 - DNA, 80 bp, synthetic construct
  source 1..80: mol_type = other DNA
aggcgcaacagcaacaacatgggcatcatacataaacacaaccaaatttactacagcaaccacaacaacttatgcatatc

SEQ ID NO: 174262 - DNA, 80 bp, synthetic construct
  source 1..80: mol_type = other DNA
ttttgaacggagaattcgcagtgttagcgctggacgtgcactgtacattcctccatacgaaatgctcttgcatgagtggt

SEQ ID NO: 174263 - DNA, 80 bp, synthetic construct
  source 1..80: mol_type = other DNA
actctgtattgctcaatggatgcaagtacccagtagacaccttgtatgtggatgaagcttttgcttgccacactggtacc

SEQ ID NO: 174264 - DNA, 80 bp, synthetic construct
  source 1..80: mol_type = other DNA
gtggcgttgttatagtattgtgaaaaagaattctcgtaagcatgttgacaactgcaaaataaaaccattttattgagcat

SEQ ID NO: 174265 - DNA, 80 bp, synthetic construct
  source 1..80: mol_type = other DNA
gaggcccagctggcgggctggatgcggcggcccatgcgcttctatccctcagatacccctcactacccgtggctaccccc

SEQ ID NO: 174266 - DNA, 80 bp, synthetic construct
  source 1..80: mol_type = other DNA
actatccagttagcttgacttcacatgactggtatgaaattcaggaatcacaattctatccaaaacatatacagtataac

SEQ ID NO: 174267 - DNA, 80 bp, synthetic construct
  source 1..80: mol_type = other DNA
actgcggtgtgtaaactcacctccggcacccgccctcgggactggccgggcccgaattgccccttgactgcggtgtgtaa

SEQ ID NO: 174268 - DNA, 80 bp, synthetic construct
  source 1..80: mol_type = other DNA
ctgcaaggagaagactacgattcacaggtcagaaaattacatccctggccagaagactcggagagcgagagcgaagcaga

SEQ ID NO: 174269 - DNA, 80 bp, synthetic construct
  source 1..80: mol_type = other DNA
cgcacctccagtccctcgtccgccgcaccggagcgtggcggtacaaagtaaggcagtggcgcgtccgaaaagaagggtcg

SEQ ID NO: 174270 - DNA, 80 bp, synthetic construct
  source 1..80: mol_type = other DNA
gacatttgtcatcacaagttcccagcgcatgtcaacgtcgtatgaatcagacactcctgcgctgacccatcaaataatgt

SEQ ID NO: 174271 - DNA, 80 bp, synthetic construct
  source 1..80: mol_type = other DNA
ttccaggagccaatattcacaacacctacattatagttgtcatatccccttacactaaacctccaatgctaaacaaaagt

SEQ ID NO: 174272 - DNA, 80 bp, synthetic construct
  source 1..80: mol_type = other DNA
ctggactcacctttacgacgtgcttttccgtggtttcgctgggcagccgccgttacgcgactacctggggccggaccttt

SEQ ID NO: 174273 - DNA, 80 bp, synthetic construct
  source 1..80: mol_type = other DNA
atagagaacttcctgtgtaggtccgcatgtgtgtattacaccacctacgacacacacggtagcgatgcagatgataaata

SEQ ID NO: 174274 - DNA, 80 bp, synthetic construct
  source 1..80: mol_type = other DNA
cagtatgatgaatacaagaacttagtaaggaaagccttagaaccggtcaaaatggctattgacaccatgctcaataatgt

SEQ ID NO: 174275 - DNA, 80 bp, synthetic construct
  source 1..80: mol_type = other DNA
accgtccgctgccaccctctttgagccccaccgttcgctgccaccctctttgatccccttcttaccgattctggctgtag

SEQ ID NO: 174276 - DNA, 80 bp, synthetic construct
  source 1..80: mol_type = other DNA
acaaaggtgaggaattcactacagttgattggtcaaacgtgactttcctgaagaggcacttcaaaccagatagtaaatac

SEQ ID NO: 174277 - DNA, 80 bp, synthetic construct
  source 1..80: mol_type = other DNA
atgcgacagactacaaaaagtttgatccatttggaggaggaatatccacactaaactttaacctagagtttctgtatgat

SEQ ID NO: 174278 - DNA, 80 bp, synthetic construct
  source 1..80: mol_type = other DNA
gcacagctaaaaagatttgtagaaaatacagaaaaaaaccaatcaacacctaatccatggcaatcaaaatatgttaacac

SEQ ID NO: 174279 - DNA, 80 bp, synthetic construct
  source 1..80: mol_type = other DNA
tgtttgacgagcaccagaagcaccacaacacgtggagctatcccaacaaccagctagacctggggaggtacaagggctgc

SEQ ID NO: 174280 - DNA, 80 bp, synthetic construct
  source 1..80: mol_type = other DNA
tcacaagttacacctggtgacacaatgcagacacgtcacgtgaagaactaccacactcggtcggagtcgagtattgaaaa

SEQ ID NO: 174281 - DNA, 80 bp, synthetic construct
  source 1..80: mol_type = other DNA
gcgtgcttgccagagtacgttaacgcgcgtgctagcaatgctaccacgaatgcaacagcaccacatccaccctacaatgc

SEQ ID NO: 174282 - DNA, 80 bp, synthetic construct
  source 1..80: mol_type = other DNA
cccagataaatattctctggcagggtacataacatgttggtaccagaccaatcttgtggttccaccaaatacaccgacaa

SEQ ID NO: 174283 - DNA, 80 bp, synthetic construct
  source 1..80: mol_type = other DNA
tggccagatacaggggctgcagcttcaccttctacagacacaaaaagactgactttatagtatggtggaacagaaagcct

SEQ ID NO: 174284 - DNA, 80 bp, synthetic construct
  source 1..80: mol_type = other DNA
tgtgagattaacatggtatgaagagagcttttacacagatgtaacacctgatgtggcagaccagctattgcatgggactt

SEQ ID NO: 174285 - DNA, 80 bp, synthetic construct
  source 1..80: mol_type = other DNA
tgaaggacactccatttattacacaagacaatttctaccaaggagatgtgcacgatgctgtggttggcgccatgactcgc

SEQ ID NO: 174286 - DNA, 80 bp, synthetic construct
  source 1..80: mol_type = other DNA
agttcaggggaaacaagctcgcagtcctcgcaagaagaagccgctcaagaagtcctccagcaggtccaagaggcgccgct

SEQ ID NO: 174287 - DNA, 80 bp, synthetic construct
  source 1..80: mol_type = other DNA
agcaactggggagatgttatatggaatgagcaaaccatacagaactttaaaactaacacggagaacctctggacagccag

SEQ ID NO: 174288 - DNA, 80 bp, synthetic construct
  source 1..80: mol_type = other DNA
acacaaaacaaacagggagaacaagtgtttgggtttagactttacttaggtgatggtgttctaaaaacaacactactggg

SEQ ID NO: 174289 - DNA, 80 bp, synthetic construct
  source 1..80: mol_type = other DNA
caggcagagattcagcgtagatgaactcaccactttagttatcaatgagaaaaacaggagagctaacattggtaattgca

SEQ ID NO: 174290 - DNA, 80 bp, synthetic construct
  source 1..80: mol_type = other DNA
tcacaggaaaaatagtaaagtggattatcaggattatatcagctattacaattataattagaaacagtgcagatccccat

SEQ ID NO: 174291 - DNA, 80 bp, synthetic construct
  source 1..80: mol_type = other DNA
ttgtccccgagctcttcttcaagctttttagggacactccctggtcggactggtacctgtttgaccccaaggacgccggg

SEQ ID NO: 174292 - DNA, 80 bp, synthetic construct
  source 1..80: mol_type = other DNA
tagctcctatgtgttgtgagtttaatggtctgagaaatgccataacacaaggcgttcccacgtatctactaccgggatct

SEQ ID NO: 174293 - DNA, 80 bp, synthetic construct
  source 1..80: mol_type = other DNA
gcacggtccccgagcgcccgcaataccccgtccccggccttgcaataccccgtccccgccgccgccgttccgcgaccacc

SEQ ID NO: 174294 - DNA, 80 bp, synthetic construct
  source 1..80: mol_type = other DNA
cttagtatcctaaccacagaaaccgcaaagaacaaaacacactatgaacaaaacttatttaacaaaataccatactatga

SEQ ID NO: 174295 - DNA, 80 bp, synthetic construct
  source 1..80: mol_type = other DNA
gccccccgctggaatgccagtaccctgtggaagtaaggggcctcatctgccctgtagttgtgttgtccagaggtctgatg

SEQ ID NO: 174296 - DNA, 80 bp, synthetic construct
  source 1..80: mol_type = other DNA
tcgccgctatagacgacgaagagtaaggagaaagagacgatggaggagggggcgacccagacgcagactgtacaggcgca

SEQ ID NO: 174297 - DNA, 80 bp, synthetic construct
  source 1..80: mol_type = other DNA
caccggccataacagatcttttacggtcagtgagaacacctgaagtgatcaaatattgccaagacaacaagtggatagtg

SEQ ID NO: 174298 - DNA, 80 bp, synthetic construct
  source 1..80: mol_type = other DNA
ctacaaactacgaaaacctaataactgcaataaaaactggtcttaaaaaacatcaagcctttaacacatttaaaactcaa

SEQ ID NO: 174299 - DNA, 80 bp, synthetic construct
  source 1..80: mol_type = other DNA
cccatacacagacaaaggcaaaggcaacagagtgtggatagaccctctaacaaaagaaaacaacttatattcacccacac

SEQ ID NO: 174300 - DNA, 80 bp, synthetic construct
  source 1..80: mol_type = other DNA
ggacgactataccatgagcggtttcgggggctccttcggcaccgagaccttctcccttaaggtactctatgaccagtacg

SEQ ID NO: 174301 - DNA, 80 bp, synthetic construct
  source 1..80: mol_type = other DNA
gtgacagggtgcaacaaatcacattgggcaattccacaattactacacaggaggctgcaaacgccgttgtgtgttatgct

SEQ ID NO: 174302 - DNA, 80 bp, synthetic construct
  source 1..80: mol_type = other DNA
ttgaatttagtgtcatcctaccccagtagggacttggctgtagtgtttacaggtgcacatggagctgaaaccgtgccaca

SEQ ID NO: 174303 - DNA, 80 bp, synthetic construct
  source 1..80: mol_type = other DNA
aaactcgacacgtgaaaaactaccactcccgctctgagtcaacaatagaaaacttcctcagtcggtctgcctgtgtatac

SEQ ID NO: 174304 - DNA, 80 bp, synthetic construct
  source 1..80: mol_type = other DNA
tgctccaagaccacctccaggcctagaccagccgaacccagacccgcagccaggccccgaacgcccccttagagccctgc

SEQ ID NO: 174305 - DNA, 80 bp, synthetic construct
  source 1..80: mol_type = other DNA
cagcacatatataaccctaattataaaactgaagaagggactccagacaccaaagtggcaattagagctaacattaaaac

SEQ ID NO: 174306 - DNA, 80 bp, synthetic construct
  source 1..80: mol_type = other DNA
agtagacgctgattgggcagcgtctacttcgtacatttcctgggaggagtcatccgcctgatataagtaagtgtacttcc

SEQ ID NO: 174307 - DNA, 80 bp, synthetic construct
  source 1..80: mol_type = other DNA
tcggactccagctccgagagctctgggtgcagctcgccaaaacccagagcaatacgcacctaaaccccctattattttac

SEQ ID NO: 174308 - DNA, 80 bp, synthetic construct
  source 1..80: mol_type = other DNA
aagctaatgattcagttttaatctcttattcttcagatttagtcatataccgaacaaacactacaggtgatgactatatt

SEQ ID NO: 174309 - DNA, 80 bp, synthetic construct
  source 1..80: mol_type = other DNA
tggatagcatgttacgccacaacaatgtttcccttgtaattatacccatctgtcctttaaaaactcccagtggagcacct

SEQ ID NO: 174310 - DNA, 80 bp, synthetic construct
  source 1..80: mol_type = other DNA
gatagccctttctacccctggtgcagagatgtgtacaatgtaacttttaagcttggtttcaaataaacaaggccgtggga

SEQ ID NO: 174311 - DNA, 80 bp, synthetic construct
  source 1..80: mol_type = other DNA
cggctcgtgttggacgtccttcagacaatcaacccccgagaccccagaggccacctgcaataagatccatgagagctcta

SEQ ID NO: 174312 - DNA, 80 bp, synthetic construct
  source 1..80: mol_type = other DNA
cacctttgcaaaaggcaagataaaataccacgagtaccacctaggctggtactctaacatattcataggcagccacagat

SEQ ID NO: 174313 - DNA, 80 bp, synthetic construct
  source 1..80: mol_type = other DNA
tggcggcggcgtggccggcgcttgtgcggtcgagacgagcgcgtcagcaggccgggtcgatgacgccggcgacgaggtgc

SEQ ID NO: 174314 - DNA, 80 bp, synthetic construct
  source 1..80: mol_type = other DNA
ccacctacgacatccccggcaccggtaacctgcctcgcagaatacaagtcattgacccgaaagtcctcggtccccactat

SEQ ID NO: 174315 - DNA, 80 bp, synthetic construct
  source 1..80: mol_type = other DNA
gtgtgtcctggggctggagcccaaaagtcgttaaagacgctgctgatggtgtgggagctatgcctcccgtcgactggccg

SEQ ID NO: 174316 - DNA, 80 bp, synthetic construct
  source 1..80: mol_type = other DNA
ataaattactacaaagattcagctagttcaggtttatctaaacaggatttttcccaagacccttccaaatttacacaacc

SEQ ID NO: 174317 - DNA, 80 bp, synthetic construct
  source 1..80: mol_type = other DNA
cccggccatactccaagagttgacaagccaggactcgaatcccccagccggctcaagaattttcaggctgacgcggtgcc

SEQ ID NO: 174318 - DNA, 80 bp, synthetic construct
  source 1..80: mol_type = other DNA
ataagtgtgtggtactgtgttttgtatcggcttgcaacgacttttctgtacgcatgctgcgcgacacaccattcattggg

SEQ ID NO: 174319 - DNA, 80 bp, synthetic construct
  source 1..80: mol_type = other DNA
tacagatggacaacacactgttcagcactacacttattggggagattttaaattacttctctaattggtcaggaagtata

SEQ ID NO: 174320 - DNA, 80 bp, synthetic construct
  source 1..80: mol_type = other DNA
gggtccgctgggtccgctgccccgctccggcgtgtggtggccggctgcagccgggtccggggttccggccctggagctcg

SEQ ID NO: 174321 - DNA, 80 bp, synthetic construct
  source 1..80: mol_type = other DNA
tgggtctcaatcagggtgcactcgctggatccatcacatacgtggtactcgccacagccccagcaggcaaacacggaggc

SEQ ID NO: 174322 - DNA, 80 bp, synthetic construct
  source 1..80: mol_type = other DNA
gggaggaggtaggagacagccagtccctgggcctgcctggagccaccttctctaagagagggctctgtgggctggtagtg

SEQ ID NO: 174323 - DNA, 80 bp, synthetic construct
  source 1..80: mol_type = other DNA
gggttgcgccagggacggggggtgtgcgaggacggggaccttttgcggcgaggacaggggcgtgtgcagcgtggacttgc

SEQ ID NO: 174324 - DNA, 80 bp, synthetic construct
  source 1..80: mol_type = other DNA
ttaaagctacacactccctggaaaagaatttggagtacacacaatattgcttaaactgtttaggcagtttaatactaatc

SEQ ID NO: 174325 - DNA, 80 bp, synthetic construct
  source 1..80: mol_type = other DNA
acagctgacttgcaagtggattcatctgccacacaaggtccagatcacatacctacatgtgattgcactcaagcttgtta

SEQ ID NO: 174326 - DNA, 80 bp, synthetic construct
  source 1..80: mol_type = other DNA
gggttactagtgtgtccacatggtgtcatcgggttgattactgcaggtggcagtggagtcgtcgccttcactgacatcag

SEQ ID NO: 174327 - DNA, 80 bp, synthetic construct
  source 1..80: mol_type = other DNA
caacaaaatataaatggactaggaataagatagacattgctgagggccccggttctatgaacatggccaatgtgctaagt

SEQ ID NO: 174328 - DNA, 80 bp, synthetic construct
  source 1..80: mol_type = other DNA
accaggctccataccagggataccaggagccgccggccccccaggctccataccagggataccaggagccgccggccccc

SEQ ID NO: 174329 - DNA, 80 bp, synthetic construct
  source 1..80: mol_type = other DNA
aatacagtttcactcacccaggtgaacagggtattgatcttaacactgcagaagtaaatggtggaccaatgaaagatcca

SEQ ID NO: 174330 - DNA, 80 bp, synthetic construct
  source 1..80: mol_type = other DNA
caagggaaaaggcagagggagcagagacagagaccatacaaagaggtgacagaggacttactgcacctcgaacaaggaga

SEQ ID NO: 174331 - DNA, 80 bp, synthetic construct
  source 1..80: mol_type = other DNA
agtacgagcctccagaagaaggctcaggttcagtccaaagacaggagagaccgtggtcgacagacacggaagagacagaa

SEQ ID NO: 174332 - DNA, 80 bp, synthetic construct
  source 1..80: mol_type = other DNA
gtcgccgctacgtcataagtcacgtgggggggaccccgctgtaacccggaagtaggccccgccacgtgactactcacgtg

SEQ ID NO: 174333 - DNA, 80 bp, synthetic construct
  source 1..80: mol_type = other DNA
cctcagtcaattacgtagtaccaatggctgatctaccagataagggtactctgttttcatcagattatgtcttttgcagt

SEQ ID NO: 174334 - DNA, 80 bp, synthetic construct
  source 1..80: mol_type = other DNA
gtcaatgatgtttggtttccaccattctgtcacagttgaaatcattaatactgttttgtgttttgttaaaagtggcattt

SEQ ID NO: 174335 - DNA, 80 bp, synthetic construct
  source 1..80: mol_type = other DNA
agattcatggctgaagaaatttacagagatgtgtaatgctgcacgcggccttgaatggataggaaacaaaatttcaaaat

SEQ ID NO: 174336 - DNA, 80 bp, synthetic construct
  source 1..80: mol_type = other DNA
catgtatgtcccacctggcggtccagtgccagcatccgtggacagttacagttggcaatcatccaccaaccctagcatat

SEQ ID NO: 174337 - DNA, 80 bp, synthetic construct
  source 1..80: mol_type = other DNA
gatatcgccgagcaagcgcatttgcggcacgtgggcggcacgcgtgttattgttcgttcgttgccagatagcaagtgctg

SEQ ID NO: 174338 - DNA, 80 bp, synthetic construct
  source 1..80: mol_type = other DNA
atgggtactcgtggctagatttattgaaataaaccgcgatcccgggcgtctcagcacacgaaaaaccgcatccacatcat

SEQ ID NO: 174339 - DNA, 80 bp, synthetic construct
  source 1..80: mol_type = other DNA
tgctgtatgttgtacagcagttgaatcaagatgagcactctcacataataggtcttttgagggtaatgaattatgctgac

SEQ ID NO: 174340 - DNA, 80 bp, synthetic construct
  source 1..80: mol_type = other DNA
aatgcattgtaagaaaactagatgaaagacaagccaccttcacttttcttgtcaactatgaaatgaaacttctgcacaag

SEQ ID NO: 174341 - DNA, 80 bp, synthetic construct
  source 1..80: mol_type = other DNA
acgtacacttcctggggcgtgtcttcgaggtctataaaagcagaggcggtgacgaatggcagagttttttctagcccgtc

SEQ ID NO: 174342 - DNA, 80 bp, synthetic construct
  source 1..80: mol_type = other DNA
tccacctatggtggaaggggctgccgcggagggtgatgacggagatgacggagatgaaggaggtgatggagatgagggtg

SEQ ID NO: 174343 - DNA, 80 bp, synthetic construct
  source 1..80: mol_type = other DNA
ttcttttcttgttcatccaacttttccagttgaagaaatctgtgagtcaataagatggacaaagaacccacgatgcatgc

SEQ ID NO: 174344 - DNA, 80 bp, synthetic construct
  source 1..80: mol_type = other DNA
tcatgaaacgatagggtgccaacgcgcgttggatgcgcagttcgcacatctcgttctgacactcgtggcactgcagggcg

SEQ ID NO: 174345 - DNA, 80 bp, synthetic construct
  source 1..80: mol_type = other DNA
acaactaaagagatatatagaaaatacagaaaaaaataccacatcgccaaacccatggcaaacaaaatatgtaaacacta

SEQ ID NO: 174346 - DNA, 80 bp, synthetic construct
  source 1..80: mol_type = other DNA
cacagaagtaatgtataaccctaacaacgacaggggagtgggcaacaaagtatggattgactggtgcacaaaaaatgact

SEQ ID NO: 174347 - DNA, 80 bp, synthetic construct
  source 1..80: mol_type = other DNA
cagaatatttaaaggatgaggaagcgaccgctgaagaccaaccaacacaacccgacgtagctacatgtaggttctacact

SEQ ID NO: 174348 - DNA, 80 bp, synthetic construct
  source 1..80: mol_type = other DNA
gacgacccagagtaaggagatggcgcaggcgcagggtgtgggcgcccaggccatacataagaaggcgcaggcgaagcttc

SEQ ID NO: 174349 - DNA, 80 bp, synthetic construct
  source 1..80: mol_type = other DNA
ggtctcccaggctcagctgactgttaacctccttccttaacatagtctgcaggaacgtcgtggccttggtcacgggtgtc

SEQ ID NO: 174350 - DNA, 80 bp, synthetic construct
  source 1..80: mol_type = other DNA
gctagcttaaatagcactcctttttacccctggatgcccagggaaccccctacctgccgtgtaacctttaaacttggctg

SEQ ID NO: 174351 - DNA, 80 bp, synthetic construct
  source 1..80: mol_type = other DNA
gtcatcagtgacgtggggaggcgtactgtaaaacacggaagaagttaacctccattttgtgtaagttccggccgaggatg

SEQ ID NO: 174352 - DNA, 80 bp, synthetic construct
  source 1..80: mol_type = other DNA
cctagcgcccaacttagcctaaaatacaaatttagatttaactggggtggcaatcctattgttgaacagattgttagaga

SEQ ID NO: 174353 - DNA, 80 bp, synthetic construct
  source 1..80: mol_type = other DNA
ctggagcgcgtgccaaagctgctgcggctagtcagggactaccagtatatgttacacccggttctggtcaatttatgaca

SEQ ID NO: 174354 - DNA, 80 bp, synthetic construct
  source 1..80: mol_type = other DNA
agcgtatgtgcccataacaatatccatcagtcccatggcatcagaattttcaggagctagaaacactagtcctcaaggcc

SEQ ID NO: 174355 - DNA, 80 bp, synthetic construct
  source 1..80: mol_type = other DNA
acgaacggcatagcgctataaccgggtgtatggtatttatatgtgcgtctagcatccttgcgagattctgaaagtcttct

SEQ ID NO: 174356 - DNA, 80 bp, synthetic construct
  source 1..80: mol_type = other DNA
tcaaccttaccaattacaatatctattgcccctatcaaatcagaattttcaggtgcaagacagtctgcaaaagcgcaagg

SEQ ID NO: 174357 - DNA, 80 bp, synthetic construct
  source 1..80: mol_type = other DNA
cacttgccctgttaggatgctctggttcaccatggcgctacttgaaagacaaagtttgcaagtggctgggtattgatcca

SEQ ID NO: 174358 - DNA, 80 bp, synthetic construct
  source 1..80: mol_type = other DNA
cccattaacaactgtagaacaagtgtttaacaccctctactctaagggggcttattttcagtcccacctaactcctagct

SEQ ID NO: 174359 - DNA, 80 bp, synthetic construct
  source 1..80: mol_type = other DNA
ggccccccagacacaacctgtcctctcctcccttctacccccagtgcccctctaaattctgtgtaaaattcagcctcggc

SEQ ID NO: 174360 - DNA, 80 bp, synthetic construct
  source 1..80: mol_type = other DNA
tccggactacaaaatccgccattttaagtagttgaggcggacggtggcgtgggttcaaaggtcaccatcagccacaccta

SEQ ID NO: 174361 - DNA, 80 bp, synthetic construct
  source 1..80: mol_type = other DNA
acagagactatataaagagtgtaagagaaaaacaagacgtggactttgagggcatagtatgtataatatgtccctataca

SEQ ID NO: 174362 - DNA, 80 bp, synthetic construct
  source 1..80: mol_type = other DNA
ccagctcgctgctgcccaccagagtattgctcaagaggccctacaccgcttcctccgaacgcatgacaatttcatcgaaa

SEQ ID NO: 174363 - DNA, 80 bp, synthetic construct
  source 1..80: mol_type = other DNA
gttacagactgagacgctatgccagacgcaggttccgacgcaaaaagatagtactgactcagtggaacccccagactacc

SEQ ID NO: 174364 - DNA, 80 bp, synthetic construct
  source 1..80: mol_type = other DNA
aacttagtaaacttagacaatactactttgaatgggagactaagactacaggagtagcagtgccacctacgtggaccacc

SEQ ID NO: 174365 - DNA, 80 bp, synthetic construct
  source 1..80: mol_type = other DNA
tacacaggtggagattcagtttaaccatttattgatttaatccaggaacaaaaaacagtcctagtgacccagtgcccgga

SEQ ID NO: 174366 - DNA, 80 bp, synthetic construct
  source 1..80: mol_type = other DNA
aaaaaaaaacctaccaaactggagacccccagaaacaacataccctgacaaaccatacccttttgaatattacacaggac

SEQ ID NO: 174367 - DNA, 80 bp, synthetic construct
  source 1..80: mol_type = other DNA
aatttcggttacaaggtgggtttaagaagtgggacatcaattttcaagagcaggcacacatcaggcgtaagctagagttc

SEQ ID NO: 174368 - DNA, 80 bp, synthetic construct
  source 1..80: mol_type = other DNA
tctgacagttacacgattccgctgcagagtgcatcatgtgtacaataaactgttgattttagctttgtttgcccccgtga

SEQ ID NO: 174369 - DNA, 80 bp, synthetic construct
  source 1..80: mol_type = other DNA
cttttatggcatacctgcatggaggaacgcgacaattcccctcttttgtgcaaccaacaatagagatacatggggaacca

SEQ ID NO: 174370 - DNA, 80 bp, synthetic construct
  source 1..80: mol_type = other DNA
ggctcggcgacatctgaataatgcataaaacgatgaaaggagacaaaaacaccgtagtgggggggggggggaagtcggca

SEQ ID NO: 174371 - DNA, 80 bp, synthetic construct
  source 1..80: mol_type = other DNA
tgttggaaatgcttttgtgtttccgcatcagataattaacctacgcaccaacaactccgccactatagttctaccatatg

SEQ ID NO: 174372 - DNA, 80 bp, synthetic construct
  source 1..80: mol_type = other DNA
ctacaacatcaaagcagccactcaaggtccagtgacaaactaccttaaccaactgggaagtgcttttggagagggtttca

SEQ ID NO: 174373 - DNA, 80 bp, synthetic construct
  source 1..80: mol_type = other DNA
gactgagacccccaacagggccacagccagatggcactgcatatgagtccagtttcctaacaaagtggaaatcggcatgg

SEQ ID NO: 174374 - DNA, 80 bp, synthetic construct
  source 1..80: mol_type = other DNA
gcggtttggcactcgtctcggtatccgtgatgtccaccagcgtgtcggtgaaacgcggatcttgacggttggggggatag

SEQ ID NO: 174375 - DNA, 80 bp, synthetic construct
  source 1..80: mol_type = other DNA
cggaagtagcatcatagaaaccatacagaaagctaatattcccctgggaattcatgctgtatgggcgggcgtagtggtat

SEQ ID NO: 174376 - DNA, 80 bp, synthetic construct
  source 1..80: mol_type = other DNA
agtcgcgtggggaggcttggcgtgtaacccggaagtcaatcctctcacgtggcctgtcacgtgactgctgcgtcacggcg

SEQ ID NO: 174377 - DNA, 80 bp, synthetic construct
  source 1..80: mol_type = other DNA
accgctcatatcactaagggcggtgcccaggtagaggagctcgcgatagtcccattcaatggacgtgtaccggatgttta

SEQ ID NO: 174378 - DNA, 80 bp, synthetic construct
  source 1..80: mol_type = other DNA
ctgggtgttgcgtccaggttaaaggtcaaaacccatagtgcattgccgcaaatggcggtcaattgcttccgggtcaaagt

SEQ ID NO: 174379 - DNA, 80 bp, synthetic construct
  source 1..80: mol_type = other DNA
cacaaatgccaaccaacactttcatttctgtaactacaagccaaatgccactcaactcaaatggctcagacagtattact

SEQ ID NO: 174380 - DNA, 80 bp, synthetic construct
  source 1..80: mol_type = other DNA
tctatggagatgatgtgattttatcattggacagagaaattgaaccagagaatctgccatggtacattgcagattcattt

SEQ ID NO: 174381 - DNA, 80 bp, synthetic construct
  source 1..80: mol_type = other DNA
actgaagtctgggaatccattagatggacaaagaacccccggaatatgcaggagcatgtgttatccctttgtcaccttat

SEQ ID NO: 174382 - DNA, 80 bp, synthetic construct
  source 1..80: mol_type = other DNA
acacaccagcagcgtcagcacatacttggaatgctacaactactcaaactactatgtcaggttataagaactggagaaaa

SEQ ID NO: 174383 - DNA, 80 bp, synthetic construct
  source 1..80: mol_type = other DNA
tacataatatgagatccgcatacttcaaacaactaacttcagaaggtccacaagcaacaaacagtactgaaggctatgca

SEQ ID NO: 174384 - DNA, 80 bp, synthetic construct
  source 1..80: mol_type = other DNA
tcacagccgccattttgttttacaaaatggccgacttccttcctcttttttcaaaatggcgtaccggcggcggcgcgcgc

SEQ ID NO: 174385 - DNA, 80 bp, synthetic construct
  source 1..80: mol_type = other DNA
aagtccatcctgaaaaaggcaccggagcccccacctccggagccccaagccaccttcgatgccgccccctatgcccgcat

SEQ ID NO: 174386 - DNA, 80 bp, synthetic construct
  source 1..80: mol_type = other DNA
gatgggttcactgattacggtttcctagattgtacagatgaactagaactgtcacaatctatggggtcgtagacagtgtg

SEQ ID NO: 174387 - DNA, 80 bp, synthetic construct
  source 1..80: mol_type = other DNA
gtcctgagagggaaaaaggcagacgaattagaaaaaattaggttacggcccggcggaaagaaaaagtacaggttaaaaca

SEQ ID NO: 174388 - DNA, 80 bp, synthetic construct
  source 1..80: mol_type = other DNA
agaaaaagaggataacagttctagatgtaggggatgcctacttcagcatcccgctgtgtgaagacttcaggcaatatact

SEQ ID NO: 174389 - DNA, 80 bp, synthetic construct
  source 1..80: mol_type = other DNA
aacctagacctagtgtttttaaatgttttgcaactagggtagcaaaccagacaaggaaagcagccaaagaagttgtggaa

SEQ ID NO: 174390 - DNA, 80 bp, synthetic construct
  source 1..80: mol_type = other DNA
tgtatcaaatcaccgagggcgacggtaacgtgtactcgtacaaccaccacacggtgtttcggcagatgcacgccgccgga

SEQ ID NO: 174391 - DNA, 80 bp, synthetic construct
  source 1..80: mol_type = other DNA
agcctccgacgagaggttgtcgcgcactctgttgggtgagatattgaactactacacccattggctggggtctatcaaat

SEQ ID NO: 174392 - DNA, 80 bp, synthetic construct
  source 1..80: mol_type = other DNA
gagtacttataagatgtccatacacataccctcaattaataaaacacaacgacaaatactttggcttcgtagtgtacagc

SEQ ID NO: 174393 - DNA, 80 bp, synthetic construct
  source 1..80: mol_type = other DNA
gctagggggtggcgagggagacgcagacgcagactgtacagacgcagatatgttgtcaggagaaagaaaaagaaactgac

SEQ ID NO: 174394 - DNA, 80 bp, synthetic construct
  source 1..80: mol_type = other DNA
gtgaacataaagtgcaggccaaggtatgtaatgccggcatgggggttggagtgggaaacctgaccatatacccacaccag

SEQ ID NO: 174395 - DNA, 80 bp, synthetic construct
  source 1..80: mol_type = other DNA
agatcttactttacagacacacaaggtcagatcacactatcaaagaaaaccagtgaatgtggattacctagtatacacaa

SEQ ID NO: 174396 - DNA, 80 bp, synthetic construct
  source 1..80: mol_type = other DNA
agatttgaagacagccgtcatgtccaaatacaaagggaacgtgaaaattgagatgagtgagaacatacagattgcagtgg

SEQ ID NO: 174397 - DNA, 80 bp, synthetic construct
  source 1..80: mol_type = other DNA
ggcgaactggtggacacatgatgtgtgctggtagaggctggtgtcacctgtgttatattttcaccacctgttgggtgagc

SEQ ID NO: 174398 - DNA, 80 bp, synthetic construct
  source 1..80: mol_type = other DNA
actttggcacccatcacaccagttacctctatgaccacatacgggtttggacatcagaacaaagctgtgtatgtcgctgg

SEQ ID NO: 174399 - DNA, 80 bp, synthetic construct
  source 1..80: mol_type = other DNA
atagtcaggaacagcactgacacccccaccatcatagctacattagcactacttggatgttctggttcaccgtggcgcta

SEQ ID NO: 174400 - DNA, 80 bp, synthetic construct
  source 1..80: mol_type = other DNA
tggacatgtacagagtacctgtgtctaccagtgcaaatctagatgatcctatcctgtgtctatcactgtctccagcctcg

SEQ ID NO: 174401 - DNA, 80 bp, synthetic construct
  source 1..80: mol_type = other DNA
cgtgctgacgtgagataaagtccggcaggccctgacgttgcgcgtggtccagaggcgcgcgcacttcgagcaccttgacg

SEQ ID NO: 174402 - DNA, 80 bp, synthetic construct
  source 1..80: mol_type = other DNA
acagagtgtagtcataatggatgatattatgcagaaccctactggtgaagacatgactttgttttgtcaaatggtttcta

SEQ ID NO: 174403 - DNA, 80 bp, synthetic construct
  source 1..80: mol_type = other DNA
actctccgacgcaagtcagatacacttaaagagtgtaaaaagattccattgtataaggaacaagtcaaagcatttgccac

SEQ ID NO: 174404 - DNA, 80 bp, synthetic construct
  source 1..80: mol_type = other DNA
agatatgtttggtgaccccaaaccctacaagccctcctccaatgactgggaggaggagtacgaggccgcaaagcactggg

SEQ ID NO: 174405 - DNA, 80 bp, synthetic construct
  source 1..80: mol_type = other DNA
tacagaaaacaaagatttaaatggctaactacataccaaggagaaaaccacattaacagcacattcgccaaaggcaaata

SEQ ID NO: 174406 - DNA, 80 bp, synthetic construct
  source 1..80: mol_type = other DNA
catattcaggtgagcccaaaccaaccaccaagaaaccagagagacgtgttgtgacacaaggaccacaggaagaatttgga

SEQ ID NO: 174407 - DNA, 80 bp, synthetic construct
  source 1..80: mol_type = other DNA
ggcacccactgcggcctcccccggcgggtcccctctttggacattgtttgtgggttcatcattcactccattctcagcaa

SEQ ID NO: 174408 - DNA, 80 bp, synthetic construct
  source 1..80: mol_type = other DNA
aatactgtgaagataacaactggataatccctgctgaatgtaaaatagagagagatttaaatatagcaaataccattatt

SEQ ID NO: 174409 - DNA, 80 bp, synthetic construct
  source 1..80: mol_type = other DNA
caagctgagccagttcctcgcactggagtgggtcattggcaaaaaggtaaataaagtcatcgcacgggggttttgcctcc

SEQ ID NO: 174410 - DNA, 80 bp, synthetic construct
  source 1..80: mol_type = other DNA
cgactaacaacattagaataaaaaaatgtacagtaaaagttcaattgtttcccaaaccccctgaaaataggagaatgact

SEQ ID NO: 174411 - DNA, 80 bp, synthetic construct
  source 1..80: mol_type = other DNA
atagtagtgccaagcttaaaaacaaaacccagaggcagaaggtacataaaagtaaaaataaagcctccaaaacttatgct

SEQ ID NO: 174412 - DNA, 80 bp, synthetic construct
  source 1..80: mol_type = other DNA
cgcaaagaggccatgttaggcactcacgtaatctgggatgttggcctccaatcttcatgcactatggttgttccatggat

SEQ ID NO: 174413 - DNA, 80 bp, synthetic construct
  source 1..80: mol_type = other DNA
ggaaagggtgcctgcactaacagcggtagaaactggtcacacgtcacaggtggtacctagtgacactatagaaacaaggt

SEQ ID NO: 174414 - DNA, 80 bp, synthetic construct
  source 1..80: mol_type = other DNA
ttacccacccatgcttcaccaggtgagacactagtgatcgacgggaaggaggtcagaattttagatgcacaagcattagt

SEQ ID NO: 174415 - DNA, 80 bp, synthetic construct
  source 1..80: mol_type = other DNA
ttcttagtcggtccgcttgtgtttacatcgaagagtattatactaaagaccaagaccaaaagaacaggtatatgtcatgg

SEQ ID NO: 174416 - DNA, 80 bp, synthetic construct
  source 1..80: mol_type = other DNA
taacctgcctaaaatcaaagaacatgctaacaactgtgaaggacctcacgatgaaaacattaaatccaacacatgatata

SEQ ID NO: 174417 - DNA, 80 bp, synthetic construct
  source 1..80: mol_type = other DNA
aaccggggggccgacttaaggtcagggtcaagatcaggccccccaccctgttagaagataaatggtacacgcagcaggac

SEQ ID NO: 174418 - DNA, 80 bp, synthetic construct
  source 1..80: mol_type = other DNA
aataaatttatctagtttagtacaactcagacgaaaactggagttgttcacatatgtcaggtttgattctgaatatacca

SEQ ID NO: 174419 - DNA, 80 bp, synthetic construct
  source 1..80: mol_type = other DNA
gcaaaagaaccatgacaactactgggaagcaagaaatgatcaaacatttagcgaatcaaaggccctgagtcacaaaactg

SEQ ID NO: 174420 - DNA, 80 bp, synthetic construct
  source 1..80: mol_type = other DNA
caagtttcgttttaactggggtggcgactctatatttccacagattattaaaaacccctgcccagacaccggggttcgac

SEQ ID NO: 174421 - DNA, 80 bp, synthetic construct
  source 1..80: mol_type = other DNA
ttttctcagagttgcccacacctatgacacagaagaagggagagataaattcttgtcatctaatggtgtaattacaatac

SEQ ID NO: 174422 - DNA, 80 bp, synthetic construct
  source 1..80: mol_type = other DNA
cgcgacgccccgtatgcagcgcaaaaggcccccgtccccggccctgcaacgcgccgtccccgccgcaaaagctccctgtc

SEQ ID NO: 174423 - DNA, 80 bp, synthetic construct
  source 1..80: mol_type = other DNA
ctaaaccgcacattactgggggagatcattaattactatgcccattggtcgggtagcctgaaattcacattcatgttttg

SEQ ID NO: 174424 - DNA, 80 bp, synthetic construct
  source 1..80: mol_type = other DNA
gtaagagaatcagcgtggatgcgcccgtcaatagggaacgctgtaattccacgtcgcgggcaaacagatacgtagcgagc

SEQ ID NO: 174425 - DNA, 80 bp, synthetic construct
  source 1..80: mol_type = other DNA
agcaatcctcccacgtggcctgtcacgtgattgctacgtcacagccgccattttgttgtacaaaatggccgacttccttc

SEQ ID NO: 174426 - DNA, 80 bp, synthetic construct
  source 1..80: mol_type = other DNA
ggacaccgcatcggtgcaagaacagaccgtggagaccacaacccagatgaaaacccattttacctatgtaatggaacttt

SEQ ID NO: 174427 - DNA, 80 bp, synthetic construct
  source 1..80: mol_type = other DNA
tcctacaccagaaatgcacatcccaggtgaggtgaagaacatgttagaaatagtacaggtggagtccataatggagctga

SEQ ID NO: 174428 - DNA, 80 bp, synthetic construct
  source 1..80: mol_type = other DNA
tttcaatcaccgtgcatagtccccaactacgatgttaccgcaccaatacacatccctggagaggtgcgaaacatgatgga

SEQ ID NO: 174429 - DNA, 80 bp, synthetic construct
  source 1..80: mol_type = other DNA
tagcatcccggcgaccaccagctctgtcatgctgcgtggcctccggggctgcgtcctgccttgttgggtgcaaggctcgt

SEQ ID NO: 174430 - DNA, 80 bp, synthetic construct
  source 1..80: mol_type = other DNA
tgctttggtggacaacaacgttactttgtatacaacagttccatcaatggtggaaaccagatacaacgttatgcattcag

SEQ ID NO: 174431 - DNA, 80 bp, synthetic construct
  source 1..80: mol_type = other DNA
gtaaaatgaagaacacccacaaggaacagaaattatttaatgactggaagataaatctatccagtttggtgcagtttagg

SEQ ID NO: 174432 - DNA, 80 bp, synthetic construct
  source 1..80: mol_type = other DNA
ttgtatgctggttttcatgcaaacccaggtattttgactggatcggccataggctgtgatcctgatgtcttctggtcaca

SEQ ID NO: 174433 - DNA, 80 bp, synthetic construct
  source 1..80: mol_type = other DNA
acgggtcccagcatacacccaggcatgctaatgctgacaaaaaacaaaatactaatacccagcttaaaaaccagacctaa

SEQ ID NO: 174434 - DNA, 80 bp, synthetic construct
  source 1..80: mol_type = other DNA
ccaccttttacgcgtgtcgggctatgcgtcgtcttctactcggcgttatccgaataaatgactgccaggagctgccacct

SEQ ID NO: 174435 - DNA, 80 bp, synthetic construct
  source 1..80: mol_type = other DNA
agcttacataggtggttccaaagtggacgtagcctacaaacatactcatcctggagagaccggacacaagattggtgaga

SEQ ID NO: 174436 - DNA, 80 bp, synthetic construct
  source 1..80: mol_type = other DNA
gaaggctttaaacagaatgcctcaaattactttgaagcaagaaaaggcacagtagtaacatccacacaatacttaaacca

SEQ ID NO: 174437 - DNA, 80 bp, synthetic construct
  source 1..80: mol_type = other DNA
aaaagaggtgccagccctcacagctgttgagacaggcgcgaccagtcaggttactcctagtgacttgattgagaccaggc

SEQ ID NO: 174438 - DNA, 80 bp, synthetic construct
  source 1..80: mol_type = other DNA
gacaaaataacagacataccaccaaaagcagcaaaactatactataatcaaaccaaacaacttattggcataacattcac

SEQ ID NO: 174439 - DNA, 80 bp, synthetic construct
  source 1..80: mol_type = other DNA
tccaccatttccaccgtgtcgaagcgacagccgctgccgtagtacatagctccgttcaacggccggcgggccgggtcgcc

SEQ ID NO: 174440 - DNA, 80 bp, synthetic construct
  source 1..80: mol_type = other DNA
tcacggccgccattttagttcacaaaatggctgacttccttcctctttttcaaataaaaagcggaagtgccgccgcggcg

SEQ ID NO: 174441 - DNA, 80 bp, synthetic construct
  source 1..80: mol_type = other DNA
atttatagatctgagaaattatagctcccttagtgaacatcaaggcatcacagactatgtcacacaattgggcaatgcat

SEQ ID NO: 174442 - DNA, 80 bp, synthetic construct
  source 1..80: mol_type = other DNA
accgcaaagatgcgatgttgggaacacaccttatatgggacattggactgcaatcctcgtgtactatggtggtgccatgg

SEQ ID NO: 174443 - DNA, 80 bp, synthetic construct
  source 1..80: mol_type = other DNA
ctgccaatgctgtggtcgcatatggggaatggccatcatacatcactccacaagaggctaacccagttgatgcaccaact

SEQ ID NO: 174444 - DNA, 80 bp, synthetic construct
  source 1..80: mol_type = other DNA
tacggtgattagtaatgccttgcaactatcccagccaaaaccacaaaagcagctcacagctcaatctacacagtctacta

SEQ ID NO: 174445 - DNA, 80 bp, synthetic construct
  source 1..80: mol_type = other DNA
ggcggtctcagtaccgtgtccttctccctcaaggtgctatatgaccagaaccagaggggtctcaacagatggacttaccc

SEQ ID NO: 174446 - DNA, 80 bp, synthetic construct
  source 1..80: mol_type = other DNA
aggggggctccgagagctctgggtcaaactcggaggagaaagtctccagatccgggagttgttggacgcggcgcttagcc

SEQ ID NO: 174447 - DNA, 80 bp, synthetic construct
  source 1..80: mol_type = other DNA
tcttcaggcacgtcaacaagcccaatccagcaacgattactagtgtagctcgcatatacttcaaacccaagcacgtgcga

SEQ ID NO: 174448 - DNA, 80 bp, synthetic construct
  source 1..80: mol_type = other DNA
cttgtgaatttcctgcaagtattcctgcctacagaacaacaaattatcattttgatacttctccaataaacagaatttta

SEQ ID NO: 174449 - DNA, 80 bp, synthetic construct
  source 1..80: mol_type = other DNA
gcctagtctgcatcatctgtccctacactaaaccccctctatttgacaaaggaaaccccaagatggggtatgtattctat

SEQ ID NO: 174450 - DNA, 80 bp, synthetic construct
  source 1..80: mol_type = other DNA
tcgcgagcaccaacaccggcttcatggctccgaaggtccgctgctcggctccgctcaccgctccggtctggctgcagcag

SEQ ID NO: 174451 - DNA, 80 bp, synthetic construct
  source 1..80: mol_type = other DNA
tatgaggtttaatgcagagttcacatttgtcacgacaactgaagatggggaagctcgcccgtacatgctgcaatacatgt

SEQ ID NO: 174452 - DNA, 80 bp, synthetic construct
  source 1..80: mol_type = other DNA
gcttgcacccagtgtggtttcaagcactggagcagctactaaacaaccttggcttccctggagaattggcctacaaacta

SEQ ID NO: 174453 - DNA, 80 bp, synthetic construct
  source 1..80: mol_type = other DNA
tggcttcgcgcctttaaattaccgcaccttagaactcattcacattatcttgctggttagacagtggtaccatcatgggg

SEQ ID NO: 174454 - DNA, 80 bp, synthetic construct
  source 1..80: mol_type = other DNA
ccccggtaaagaggtgtacatcaatggaattgcaactaaagttagtgactcatatgatttgtacaataaacagggtgtta

SEQ ID NO: 174455 - DNA, 80 bp, synthetic construct
  source 1..80: mol_type = other DNA
gatacgcagggccagcacggcgttggaggccaggtacatggcgtagccgcgacgcgggttggcacaggcccagcccgcgg

SEQ ID NO: 174456 - DNA, 80 bp, synthetic construct
  source 1..80: mol_type = other DNA
acaccacgcgtttccctaatatgtacatcccagtgggagccgtcactgaacaggggatgctgaacttaggtggtaggccc

SEQ ID NO: 174457 - DNA, 80 bp, synthetic construct
  source 1..80: mol_type = other DNA
aaaaggcactgttttagcatgactgtttccaaaccgtaacgtggtaaataaatcatggcttccgacgtgggttctcatcc

SEQ ID NO: 174458 - DNA, 80 bp, synthetic construct
  source 1..80: mol_type = other DNA
atttttatgggcgagtgggcggtccacacgcgcgggcgcagcacccattggtcgcacgccgcctcctggaatgtaaaccc

SEQ ID NO: 174459 - DNA, 80 bp, synthetic construct
  source 1..80: mol_type = other DNA
cccaagaaacaggaagacaaacagctctcttcctgttaaagctggcaagcagatggcccattacacacttgcacacagac

SEQ ID NO: 174460 - DNA, 80 bp, synthetic construct
  source 1..80: mol_type = other DNA
attaaagcttggtgccctagaccaccaatggctgtggaatacacacacacacgtgtaaccaattataaagttgcagaaaa

SEQ ID NO: 174461 - DNA, 80 bp, synthetic construct
  source 1..80: mol_type = other DNA
aggcgacggcggctggaaggatgttggacatgaacacaggaaatctgcgggattatgacccggtcgtgaacactgtgcca

SEQ ID NO: 174462 - DNA, 80 bp, synthetic construct
  source 1..80: mol_type = other DNA
gaggcatgactaccacgtgactcccgcaggccaaccacagtctacgtcgtccacttcctgggcatggtctacatcataat

SEQ ID NO: 174463 - DNA, 80 bp, synthetic construct
  source 1..80: mol_type = other DNA
tttccaattaaagtcaccagtcatgattggtatgagatccaagagagtgagtattaccctaagcatattcagtacaactt

SEQ ID NO: 174464 - DNA, 80 bp, synthetic construct
  source 1..80: mol_type = other DNA
gaagaaaaagagatacatacctaggcagtaaatatttaaactatagaacaggactatacagcagcatatttttagctaat

SEQ ID NO: 174465 - DNA, 80 bp, synthetic construct
  source 1..80: mol_type = other DNA
aaatgttttttggcaggccttacagaaaaaagaaaagggcgctgctactgtctgagctgccagattcaaagaagaaacca

SEQ ID NO: 174466 - DNA, 80 bp, synthetic construct
  source 1..80: mol_type = other DNA
tgcgtagaaacgccgtgcaaagacccgccgcgaaaggcccccgagcgtccgcgtactccctcagcccggtgccgctgaca

SEQ ID NO: 174467 - DNA, 80 bp, synthetic construct
  source 1..80: mol_type = other DNA
gggcaatggtagggatggcttttcagctatgctacttagatcatatttcagtgaaactcaagggcaaatcactagttcaa

SEQ ID NO: 174468 - DNA, 80 bp, synthetic construct
  source 1..80: mol_type = other DNA
gttctgagtccacggtagagaatttcctgtgtagatctgcgtgtgtatattatactacttacaagaaccatggcaccgat

SEQ ID NO: 174469 - DNA, 80 bp, synthetic construct
  source 1..80: mol_type = other DNA
acatggatagacaccggataaaggtgtatataaaaccaaagcatataacagcttggtgccccagagcccccagagcggtg

SEQ ID NO: 174470 - DNA, 80 bp, synthetic construct
  source 1..80: mol_type = other DNA
gtgcctgtgggaagggcattgacactacctgcatactctagtcttagacggaaatggttagattcgttttgacagttcta

SEQ ID NO: 174471 - DNA, 80 bp, synthetic construct
  source 1..80: mol_type = other DNA
caatcagattactactattttcaatacttgtctaaaagatgaactgagaagacttgacaagatcttggctggtaagacca

SEQ ID NO: 174472 - DNA, 80 bp, synthetic construct
  source 1..80: mol_type = other DNA
tacgaagacagcaccactgttctggccaccctagcattattaggttgtgaaatctcaccatggtcatggttaaagaaaaa

SEQ ID NO: 174473 - DNA, 80 bp, synthetic construct
  source 1..80: mol_type = other DNA
caatttcttaccacagatgatacacaatccccttcagccctcccttattttcatccaacaaaagagatttttatacctgg

SEQ ID NO: 174474 - DNA, 80 bp, synthetic construct
  source 1..80: mol_type = other DNA
ccgaaatacaataccccagaagtcacttggcactcgtgggacatcagacgaggactctttggcaaagcaggtattaaaag

SEQ ID NO: 174475 - DNA, 80 bp, synthetic construct
  source 1..80: mol_type = other DNA
aacacgggttaaaatcacaaccagagtgtatcacaaggcaaagcatgtaaaagcgtggtgcccgcgtcctccaagggctg

SEQ ID NO: 174476 - DNA, 80 bp, synthetic construct
  source 1..80: mol_type = other DNA
ctcaggtgtcgagacaaaatgttggtacgcactcaactcagaactcagtttcaggtgggtctagcttaaattatttcaac

SEQ ID NO: 174477 - DNA, 80 bp, synthetic construct
  source 1..80: mol_type = other DNA
cggccggcgcggcgggtgggggaaacgacgagtttttccgttacgccatggttcgcgtgaggtttctctgtacctcccgc

SEQ ID NO: 174478 - DNA, 80 bp, synthetic construct
  source 1..80: mol_type = other DNA
cgggaggctcaaaggagttacctggtatttctgacgtcccagttctgctacgaagagtacgtgcagaggacttttggggt

SEQ ID NO: 174479 - DNA, 80 bp, synthetic construct
  source 1..80: mol_type = other DNA
ctcaagtatctaggcagaatgttggcacacacaccacacaaaacgctgtatcaaatggttccagtttgaattactttaac

SEQ ID NO: 174480 - DNA, 80 bp, synthetic construct
  source 1..80: mol_type = other DNA
ttagggctgccaggtggcgcaaactaggattaattcacctgtatccctttccctccacccgcagtaactcagcgctggcg

SEQ ID NO: 174481 - DNA, 80 bp, synthetic construct
  source 1..80: mol_type = other DNA
ttctcacagttttagatccattagtaccaacagggtcagaaaatttaaaaagcctttttaataccgtctgcgtcatttgg

SEQ ID NO: 174482 - DNA, 80 bp, synthetic construct
  source 1..80: mol_type = other DNA
tggatttacacctttatctacttacacattaagcttgatcagaatcaccctgttgattagatatcattatcacaatgggt

SEQ ID NO: 174483 - DNA, 80 bp, synthetic construct
  source 1..80: mol_type = other DNA
ccggggagtggtagtgtgatgtgcagaaccctacttggagagatcctcaattactatacacattggagtggaagtatcaa

SEQ ID NO: 174484 - DNA, 80 bp, synthetic construct
  source 1..80: mol_type = other DNA
ggtatggagtgtggccccaatatttacctgatgatgatgctagtgctattgacaaaccaactcatccagacacatcctca

SEQ ID NO: 174485 - DNA, 80 bp, synthetic construct
  source 1..80: mol_type = other DNA
cgcagatgcacacgtagagacccgagtcgtgccgcagcctggctccgcgcttcatcagtttcctcaccgcgtagcgaagc

SEQ ID NO: 174486 - DNA, 80 bp, synthetic construct
  source 1..80: mol_type = other DNA
ggggatagcgatactaccccttgcacccctagcctttgcagcaacgtcatcaccacaagtaccgatcacagtcacaattg

SEQ ID NO: 174487 - DNA, 80 bp, synthetic construct
  source 1..80: mol_type = other DNA
tctttctaggtggataccacagtccaggcccccaaggctaccgtgctaattacctcctcatgtccacccccaccctgtgt

SEQ ID NO: 174488 - DNA, 80 bp, synthetic construct
  source 1..80: mol_type = other DNA
aatactagggatgacataaagaacctgggacctagtgatatgtttgttcacactaaagaagccatttatagatgtgcaca

SEQ ID NO: 174489 - DNA, 80 bp, synthetic construct
  source 1..80: mol_type = other DNA
ggtactgctggtagtgcactggtggtatatgagccaaaaccagttgtccaaaataaacaatacatggaatttggatcatt

SEQ ID NO: 174490 - DNA, 80 bp, synthetic construct
  source 1..80: mol_type = other DNA
ttaaccagaacccccacgggggaggcatgagcacagtgactttctctctcaaagtgctctatgaccagtaccagagattc

SEQ ID NO: 174491 - DNA, 80 bp, synthetic construct
  source 1..80: mol_type = other DNA
gttgtgcacgttgaccgacacgttctccacctcgctgcccgtaaagtacgtgtgctgcacctgcagctgattgtcgccgc

SEQ ID NO: 174492 - DNA, 80 bp, synthetic construct
  source 1..80: mol_type = other DNA
acgatttctcggtgagactgttgaaagacacacctttcatatcccaacagactttcttccagggaccggtcgaagattca

SEQ ID NO: 174493 - DNA, 80 bp, synthetic construct
  source 1..80: mol_type = other DNA
gttccctgaggctttaaagaacatgggtctatttggacaaaacatggaataccattacctgggtagatccgggtacacaa

SEQ ID NO: 174494 - DNA, 80 bp, synthetic construct
  source 1..80: mol_type = other DNA
tcgctagaggcttaacagacagtggcaatgtttactcactaccaccaaatccaaagcactttgacgggtattgccaacag

SEQ ID NO: 174495 - DNA, 80 bp, synthetic construct
  source 1..80: mol_type = other DNA
tggtaatattctacttagtggaaatcaaacagctagaatgcttaaatacaattatcccaccaagtctggatattgtggtg

SEQ ID NO: 174496 - DNA, 80 bp, synthetic construct
  source 1..80: mol_type = other DNA
gttcacttacctgcgatttgatgtggaagtcacatttgtgatcactagtgcccaagatcaatccacaagtgttgctcaag

SEQ ID NO: 174497 - DNA, 80 bp, synthetic construct
  source 1..80: mol_type = other DNA
cgtaacctccttcgtttccagacgtaacgttacacagcgtcagatgcacatgactgcaattgcacacgccaccgaccgat

SEQ ID NO: 174498 - DNA, 80 bp, synthetic construct
  source 1..80: mol_type = other DNA
tttttacttaaacaatacagctactataacacaaagcagactgtagcacaattaaaatgggactggtttcctaaacaaaa

SEQ ID NO: 174499 - DNA, 80 bp, synthetic construct
  source 1..80: mol_type = other DNA
gaaagatactagtgcctagctgggccacctaccccaggggcagaaaatatgttttagctaagataccaccccccaaactg

SEQ ID NO: 174500 - DNA, 80 bp, synthetic construct
  source 1..80: mol_type = other DNA
aaaaacagggccaaattgttacaaaaagaaatgttagggaactaaacattaaacccattaacactccaaacacaaccaag

SEQ ID NO: 174501 - DNA, 80 bp, synthetic construct
  source 1..80: mol_type = other DNA
tctgccgggaggtgctgggtcgcctgaccctcttgcactccaagtgcaacaatctggactctctgtttctgtacaatggg

SEQ ID NO: 174502 - DNA, 80 bp, synthetic construct
  source 1..80: mol_type = other DNA
tgcaggactgctagacacagctaaggcattacaagcttgtccagattgcgtaaaaccaccttactacaaacagtgttgcc

SEQ ID NO: 174503 - DNA, 80 bp, synthetic construct
  source 1..80: mol_type = other DNA
agacaaagattccaaaaagcaacacaaaacgccataccacaatatactacattaatgcccacagcgctgtatgagtacca

SEQ ID NO: 174504 - DNA, 80 bp, synthetic construct
  source 1..80: mol_type = other DNA
tgactacgtttgcggccgtggcaggtgtggtttatgttatgtacagattgtttgccggtcaacagggagcttatactggt

SEQ ID NO: 174505 - DNA, 80 bp, synthetic construct
  source 1..80: mol_type = other DNA
atggccctcatacctcaaaccaactgaggctaatcctgtcgacgctcccactgagccagatgttagctcaaacaggtttt

SEQ ID NO: 174506 - DNA, 80 bp, synthetic construct
  source 1..80: mol_type = other DNA
ttgtgcggtggcccatatcatacagacaggtcgctcaactccgcaggaagatggagatgtttacatacctgcgatatgac

SEQ ID NO: 174507 - DNA, 80 bp, synthetic construct
  source 1..80: mol_type = other DNA
agccacccttctattaaagtgtttaatggctcaaacagaccacaaaatgacgaatactttgcaaaaaaagacagcctgtg

SEQ ID NO: 174508 - DNA, 80 bp, synthetic construct
  source 1..80: mol_type = other DNA
gaccaaacatacgccccctcaggctctacagaaaccatagtgtgggggcagtcagattttaactcatttaaaaagcacac

SEQ ID NO: 174509 - DNA, 80 bp, synthetic construct
  source 1..80: mol_type = other DNA
acctaccttaaggatgaattaaggaccccagccaaaatcagagcaggcaagacaagactcattgaggcagctagcctaaa

SEQ ID NO: 174510 - DNA, 80 bp, synthetic construct
  source 1..80: mol_type = other DNA
taatggagattgcagaggtggattctgtggtaccggtcaacaatgttgaaggcaaactggatgcgatggacattttccgc

SEQ ID NO: 174511 - DNA, 80 bp, synthetic construct
  source 1..80: mol_type = other DNA
ttatgcaaactgatcagaggaaaaatgaccctaacagaggaagtacagtggacagaattggcagaggcagagctgcagga

SEQ ID NO: 174512 - DNA, 80 bp, synthetic construct
  source 1..80: mol_type = other DNA
gctatgtaccttactccctgaactttggcaaaggcaaaatgaaaggaggcagctcccaggtaccactcagttggagatgc

SEQ ID NO: 174513 - DNA, 80 bp, synthetic construct
  source 1..80: mol_type = other DNA
tggtgcggtgcggtgcggtggggagttgcgtgtgctgcggaggacggcgacggcgaataaaagcgacgtgcggcgcgcac

SEQ ID NO: 174514 - DNA, 80 bp, synthetic construct
  source 1..80: mol_type = other DNA
gcctgttgaatgcctaatcaagaaatcagcatctttatacagagttatcaaattccacgtctacaacgaactttggcggg

SEQ ID NO: 174515 - DNA, 80 bp, synthetic construct
  source 1..80: mol_type = other DNA
agctaggtacatcttccgaaatactaaactcatgcttactaatagttcagtgcccctacacatttccacccatgtatgac

SEQ ID NO: 174516 - DNA, 80 bp, synthetic construct
  source 1..80: mol_type = other DNA
tactttggctgctacatctgataaaccgaccagtcataaagacgatacaaccacatcatctacagatcatctataccgct

SEQ ID NO: 174517 - DNA, 80 bp, synthetic construct
  source 1..80: mol_type = other DNA
gcgtacggttactcagagatactacccatatatcacaagaaactatagttgcaaacacacaaggcattgaagaaaccatt

SEQ ID NO: 174518 - DNA, 80 bp, synthetic construct
  source 1..80: mol_type = other DNA
accccatatacgcaaacagcttaaacaatggaacctcaactacatcaaaacctacatcagtagaccccataataaaaata

SEQ ID NO: 174519 - DNA, 80 bp, synthetic construct
  source 1..80: mol_type = other DNA
agccaaatgactcatactactccagtgatctcacagtccaagcaatgtatgttcctccaggagcaccaagtcccacaaaa

SEQ ID NO: 174520 - DNA, 80 bp, synthetic construct
  source 1..80: mol_type = other DNA
gaattatatcagcaatggttataataattagaaattcttcagatccccagactatattagctacactgactttgattgga

SEQ ID NO: 174521 - DNA, 80 bp, synthetic construct
  source 1..80: mol_type = other DNA
ggctccacctcaacccgctgttattcaaccagcaataaacaaagttcttctgtttccagaaatgggtccaaagcccgctc

SEQ ID NO: 174522 - DNA, 80 bp, synthetic construct
  source 1..80: mol_type = other DNA
acaggtagcacatatgactgggaaaactatagtaaaccaacaaactactctaactgcaaatcatgctttaacacaaaaag

SEQ ID NO: 174523 - DNA, 80 bp, synthetic construct
  source 1..80: mol_type = other DNA
acaaccgggaggacgtggagggtcacgaccagcataaaatatgccatataaaggatcgtgtaaaccattagtgcatgggc

SEQ ID NO: 174524 - DNA, 80 bp, synthetic construct
  source 1..80: mol_type = other DNA
ggtgaccgtcctctgtccggatctacgtcccagtctctctcttttgtacagcactcgcgcgggaacggccccctcaaccc

SEQ ID NO: 174525 - DNA, 80 bp, synthetic construct
  source 1..80: mol_type = other DNA
ctgtcacgatcgccccaatgtgtgctgaatacaacggtctaaggttggcgtatcagcaaggattgccagtattaaacaca

SEQ ID NO: 174526 - DNA, 80 bp, synthetic construct
  source 1..80: mol_type = other DNA
gaggaaacaaccacaaaagttgaaactagagcagctgttacaacagtaggtccatcagatatgtttgtacacacttcaga

SEQ ID NO: 174527 - DNA, 80 bp, synthetic construct
  source 1..80: mol_type = other DNA
ataggggacaacactgacgtgaggggcgattcacgtcactgacggctgacgggaataagacgggtgatggatttccacct

SEQ ID NO: 174528 - DNA, 80 bp, synthetic construct
  source 1..80: mol_type = other DNA
agcctgagtaatggagaaacagctaacacgtttgactcacaaaacacgaccgggcaaacagccgtgcaggccaatgttat

SEQ ID NO: 174529 - DNA, 80 bp, synthetic construct
  source 1..80: mol_type = other DNA
attcttacctacaaccaacacaaccacattaagtagctctaatgcaacatactccataaacccatccaacaaaacagaaa

SEQ ID NO: 174530 - DNA, 80 bp, synthetic construct
  source 1..80: mol_type = other DNA
gggccctattacgcatgccaacgttaccaccccttcgggcattacaccctattgttggcatcatcctccagagccgtgcg

SEQ ID NO: 174531 - DNA, 80 bp, synthetic construct
  source 1..80: mol_type = other DNA
gctgcgctcgcggcccccgggtggaggctcatcctcccccccccgcgcgcatgggtgaggaggttccccattcctccggt

SEQ ID NO: 174532 - DNA, 80 bp, synthetic construct
  source 1..80: mol_type = other DNA
aataccactgcgggtggtactcatccatgttcttgagcccccacagataccagctacaattcaccacagcatactttgac

SEQ ID NO: 174533 - DNA, 80 bp, synthetic construct
  source 1..80: mol_type = other DNA
cttcacttatgttaggtttgattcagaaattactctagttccttgtatagctggcaaaggggctgatattggacacattg

SEQ ID NO: 174534 - DNA, 80 bp, synthetic construct
  source 1..80: mol_type = other DNA
tctgggaaagccaacactatggatatgtatagaatcccactgagcaccacaggtgacacaggcccgatcttttgcttgag

SEQ ID NO: 174535 - DNA, 80 bp, synthetic construct
  source 1..80: mol_type = other DNA
aaaggcaactaaaagagaccaaagatataaagatatgctaaacattataacagtatataacagcacacaaacactagcac

SEQ ID NO: 174536 - DNA, 80 bp, synthetic construct
  source 1..80: mol_type = other DNA
tccctacatactcaaagtcaaatatctacaactcaaaagccagctaaacacggtgataaatcatttccaaataacaacgg

SEQ ID NO: 174537 - DNA, 80 bp, synthetic construct
  source 1..80: mol_type = other DNA
ccctggaaaagaaattcaagttgatggtataactacaaaagttgctgactcatttgatttgtataataaagatggtataa

SEQ ID NO: 174538 - DNA, 80 bp, synthetic construct
  source 1..80: mol_type = other DNA
acacgtagtcgaccccaaatgggacacttgcaaacaacaaaaccccagcggctctgcaagcaataaatacttagtagtaa

SEQ ID NO: 174539 - DNA, 80 bp, synthetic construct
  source 1..80: mol_type = other DNA
tgactatgacccagtaaaaagcaaatttttaatacaagacctacaactatgggctgcagcttcaggatatctagactact

SEQ ID NO: 174540 - DNA, 80 bp, synthetic construct
  source 1..80: mol_type = other DNA
tggaaacgtatcagtgaagtataaatacacacatccaggagagggtggtatagacttaagtacaccacaagatgaggaag

SEQ ID NO: 174541 - DNA, 80 bp, synthetic construct
  source 1..80: mol_type = other DNA
gaaaaccactcatgttttcaaagatgaagtgtatgtagtggatggcggaatgccttcagggatatcaggtacctctattt

SEQ ID NO: 174542 - DNA, 80 bp, synthetic construct
  source 1..80: mol_type = other DNA
accagcagggaaggggaccgcagagaagaagtgttacatgaatcattgcaacacttcagtcatcagagagtcatgtgata

SEQ ID NO: 174543 - DNA, 80 bp, synthetic construct
  source 1..80: mol_type = other DNA
tttccacatcaattcattaacttgagaagcaataattcagcgacaattatagttccatatgtgaatgcagttccaatgga

SEQ ID NO: 174544 - DNA, 80 bp, synthetic construct
  source 1..80: mol_type = other DNA
tgctttctaccaaacagccatagtggtcccttcaggtgcacccaaaacaatgagtatgttagccttcgtcagtgcatgca

SEQ ID NO: 174545 - DNA, 80 bp, synthetic construct
  source 1..80: mol_type = other DNA
ttcatcccccagtttacggaggtgaccatcgagtaccttccggggagcgacgagtatgtggcctactactgtggccgccg

SEQ ID NO: 174546 - DNA, 80 bp, synthetic construct
  source 1..80: mol_type = other DNA
gtcccgcaagcagtctggcacgcatgggacttcagacatggactgtttagccagacgggtattaaaagaatgtcagaaca

SEQ ID NO: 174547 - DNA, 80 bp, synthetic construct
  source 1..80: mol_type = other DNA
attccagttggaaggttaccaccagacaagttgcacagctcaggaggaagatggagatgttcacgtacctgcgcttcgac

SEQ ID NO: 174548 - DNA, 80 bp, synthetic construct
  source 1..80: mol_type = other DNA
caattaacaaccttgaagataatgttactagtgaagctatgtattccataaaattgcaatcatcagttgattcagatctt

SEQ ID NO: 174549 - DNA, 80 bp, synthetic construct
  source 1..80: mol_type = other DNA
aactaagacaattgactcaactgttgataaagttaatgaaatggtgactgatatcggtaatgcttctggtggtgatatat

SEQ ID NO: 174550 - DNA, 80 bp, synthetic construct
  source 1..80: mol_type = other DNA
ggagatacggatgtggccatcaacaatgcagtggccagggtggcggatacaattgccagtggacccagtaattccaccag

SEQ ID NO: 174551 - DNA, 80 bp, synthetic construct
  source 1..80: mol_type = other DNA
accctatatttcaacagatggtcagagacccctgtaaacaccaagacggtactgcgccccgtagacaacctcgtgaccta

SEQ ID NO: 174552 - DNA, 80 bp, synthetic construct
  source 1..80: mol_type = other DNA
tgggcacattgtgctttaggatagtaactgaagagcacactaacaaggtcaaagtcacaactagagtttaccacaaagct

SEQ ID NO: 174553 - DNA, 80 bp, synthetic construct
  source 1..80: mol_type = other DNA
ctaccacaaccaacacaagctgagtttggaatgccaaacccacatcctacacctacaaatgactactatgaatatcactt

SEQ ID NO: 174554 - DNA, 80 bp, synthetic construct
  source 1..80: mol_type = other DNA
caagtgtcttaaaaaagcatgtttttttgtggcaggcactaccgaaagaagaggctactgccactgcgatacgtgccggg

SEQ ID NO: 174555 - DNA, 80 bp, synthetic construct
  source 1..80: mol_type = other DNA
ccattttcaacacaattataaacaacataataatcaggactttggttttagatacatacaaagggattgaattggataag

SEQ ID NO: 174556 - DNA, 80 bp, synthetic construct
  source 1..80: mol_type = other DNA
gcctctcgagcacgaggaacggcctctcgagataacaccgaatgtgattatcgtgcaggcggatgttcatatggcaccat

SEQ ID NO: 174557 - DNA, 80 bp, synthetic construct
  source 1..80: mol_type = other DNA
gagaatcagaacgattatttcttcctcgtggatttgtaccaataacaccttacacaccgcacttaatcagagttatattg

SEQ ID NO: 174558 - DNA, 80 bp, synthetic construct
  source 1..80: mol_type = other DNA
ctgccaacgccaccgccgccgcctcgtctggctcgtggccggcgggcccgattccgaaggttggggtcgacgcgtggcat

SEQ ID NO: 174559 - DNA, 80 bp, synthetic construct
  source 1..80: mol_type = other DNA
aaacattggtgaagataagggtattccacagagctaagcacattagagcttgggtaccaagaccacccagagcactacca

SEQ ID NO: 174560 - DNA, 80 bp, synthetic construct
  source 1..80: mol_type = other DNA
tcaaggggcaattcgggctcgggactggccgggccctgggcaaggctcttaaaaaatgcacttttctcgaataagcagaa

SEQ ID NO: 174561 - DNA, 80 bp, synthetic construct
  source 1..80: mol_type = other DNA
ttgtctcatcggtgaccgccccctcagcctcggcccctttcatcaactccgcctttgagcccgaggtgcccacccccgtc

SEQ ID NO: 174562 - DNA, 80 bp, synthetic construct
  source 1..80: mol_type = other DNA
cggtctcaggcaagccgtgaaacaaggcatccctgttgagatgaaacccggaaccaaccagtttttgaccactgatgatg

SEQ ID NO: 174563 - DNA, 80 bp, synthetic construct
  source 1..80: mol_type = other DNA
tggtgagtgttgggaagtctcaaaaaacggtagagattgggaaactctcaaactgaaaaatttggtacagaaaataacag

SEQ ID NO: 174564 - DNA, 80 bp, synthetic construct
  source 1..80: mol_type = other DNA
cacgcggtttacgtaggctacgcaggtatttgacgtgtaacccagacccatgtctacggtgttaatgttctgcgtgacgt

SEQ ID NO: 174565 - DNA, 80 bp, synthetic construct
  source 1..80: mol_type = other DNA
ttcacaagacacacccattacacagaatccagtagagaggtatgttgatgaagtactaaatgaggttttagttgttccaa

SEQ ID NO: 174566 - DNA, 80 bp, synthetic construct
  source 1..80: mol_type = other DNA
aagatagtctacatactgtcctagcttatggggagtggcctaagtacctatctgatcttgatgcaacctctgttgacaaa

SEQ ID NO: 174567 - DNA, 80 bp, synthetic construct
  source 1..80: mol_type = other DNA
atatgaggcaaggggcaatccagagagcactgaccgttttgatgcatgggagataagcatacgcgacatggtccagctgc

SEQ ID NO: 174568 - DNA, 80 bp, synthetic construct
  source 1..80: mol_type = other DNA
cagttcccactgctcagactctcgcagaaatgtccttcttcacccacactgtcgacccctctgtcctctgcacctccttt

SEQ ID NO: 174569 - DNA, 80 bp, synthetic construct
  source 1..80: mol_type = other DNA
tacggacgatggaaacgcagggggcgacgcagacgaaaacgaaagagactgattatgactcagtggaacccctccactgt

SEQ ID NO: 174570 - DNA, 80 bp, synthetic construct
  source 1..80: mol_type = other DNA
acccctaccacccatgtggtgtagtgctcttgtattacggtacacttgcacgccagtttgcctccccaccccctttccat

SEQ ID NO: 174571 - DNA, 80 bp, synthetic construct
  source 1..80: mol_type = other DNA
ttccgcgccgccgccgaagacgatttgtaagtaggagatggcgccggccttacaggcgcaggaggagacgcgggcgacgc

SEQ ID NO: 174572 - DNA, 80 bp, synthetic construct
  source 1..80: mol_type = other DNA
acaacccaaactgtgacagggccataggcaaccgtgtatggttccaatatagcacaaaaatggacacagattttaatgaa

SEQ ID NO: 174573 - DNA, 80 bp, synthetic construct
  source 1..80: mol_type = other DNA
tctgtgctgatcttgccccccatgcccgggattttttcaatgcctcgggcaatgttctttcctccctctactactggata

SEQ ID NO: 174574 - DNA, 80 bp, synthetic construct
  source 1..80: mol_type = other DNA
taggctcgaggtaaagttaactgaatctttgttttcaaaatacaagggcaatgtccagatggaaccaactgaaaatatgc

SEQ ID NO: 174575 - DNA, 80 bp, synthetic construct
  source 1..80: mol_type = other DNA
cccacaacagacagatacgagtaccacgtaggcatgttcagtcccatcttcctcaccccttatagatcagcgggcctaga

SEQ ID NO: 174576 - DNA, 80 bp, synthetic construct
  source 1..80: mol_type = other DNA
ccggcccaacgccgccgcgccgtcctgctctcagacgcctcccggcgctcccggcggccccccccaccacccctagcaca

SEQ ID NO: 174577 - DNA, 80 bp, synthetic construct
  source 1..80: mol_type = other DNA
tagaggtaggagatgtgatcccttatggtgaaattaatttaagtggcaatcctacgtgccggttgctaaaatataactac

SEQ ID NO: 174578 - DNA, 80 bp, synthetic construct
  source 1..80: mol_type = other DNA
cactaatttttccattaatcactctatctcccatctctacctgctctcctttaacagtgaccattgcacccatgaacaca

SEQ ID NO: 174579 - DNA, 80 bp, synthetic construct
  source 1..80: mol_type = other DNA
gaggggaagcccatatgtagacaaggtgagaagagccgcgtttgctaatcatgagtcctccggcccctgaatgcggctaa

SEQ ID NO: 174580 - DNA, 80 bp, synthetic construct
  source 1..80: mol_type = other DNA
cggccaattctgttgttgcctacggtagatggcctgaatacatcagagataccgaggcaaatcctgtagaccaaccaacc

SEQ ID NO: 174581 - DNA, 80 bp, synthetic construct
  source 1..80: mol_type = other DNA
ctcaaagtcgagacacttggtacaagggcaatacttataccgacgaaatatccaagttagcaaaacaaaccagagaaaga

SEQ ID NO: 174582 - DNA, 80 bp, synthetic construct
  source 1..80: mol_type = other DNA
ctatcctaacacagaaaacaatggcaatgacaatgtactaaacgccattactgctactgaaattagaaactatggagata

SEQ ID NO: 174583 - DNA, 80 bp, synthetic construct
  source 1..80: mol_type = other DNA
tgtacatgctctcctttatcagtgcatgcccagacttcaaacttaggctcatgaaggacacccagacaatatcacagact

SEQ ID NO: 174584 - DNA, 80 bp, synthetic construct
  source 1..80: mol_type = other DNA
cgctgctatgtggcaaggcagtggttcttcagaaccggcgcacatcagcaagtttatcactcaatatggttgtctcacag

SEQ ID NO: 174585 - DNA, 80 bp, synthetic construct
  source 1..80: mol_type = other DNA
cgaattcatcgacacagcatgtaaccgatagtactgtgactttgcaaactatatcattatcaaccaacactactactatg

SEQ ID NO: 174586 - DNA, 80 bp, synthetic construct
  source 1..80: mol_type = other DNA
cgaaagcggcggtgtgtgtgtgcatgtaagcgtaaaaaggggaagtagaaagcgtgtgtttgtgttagaaaagcgggtcc

SEQ ID NO: 174587 - DNA, 80 bp, synthetic construct
  source 1..80: mol_type = other DNA
gcggcctggtaccgcccggtccgcaaatttcacacagatacccctttctacccctgggtgggtccccccaagcctcaata

SEQ ID NO: 174588 - DNA, 80 bp, synthetic construct
  source 1..80: mol_type = other DNA
tcaaagaggcttccaccactggtcccaatgatgttcaagcggctgcgcacaatgcggggatgggagtggcagcaggcaac

SEQ ID NO: 174589 - DNA, 80 bp, synthetic construct
  source 1..80: mol_type = other DNA
atcatgagtgtggacaactacaacgagactctaactaatggtcaaaaatccagtttgttcgctacctggaatgtcactta

SEQ ID NO: 174590 - DNA, 80 bp, synthetic construct
  source 1..80: mol_type = other DNA
gtggtaccccagactcaggtttcagcttcaggttatgcatgacatctacctcacaggcccctttagctacaaagatgacc

SEQ ID NO: 174591 - DNA, 80 bp, synthetic construct
  source 1..80: mol_type = other DNA
tatcttcttgccattagatggtggtgagggttggcgtttaacccggaagtcaatcctctcacgtggcctgtcacgtgggc

SEQ ID NO: 174592 - DNA, 80 bp, synthetic construct
  source 1..80: mol_type = other DNA
gaaaaaacaccacgaccagggcctagacaaagaggtcagagtcactatcatatgtccctacactcagcccccactcacca

SEQ ID NO: 174593 - DNA, 80 bp, synthetic construct
  source 1..80: mol_type = other DNA
tatatgccttagaggcaaagagaattaaatcattgaagaacaaattaaccaattttatacagtttcgttcaaaacatagg

SEQ ID NO: 174594 - DNA, 80 bp, synthetic construct
  source 1..80: mol_type = other DNA
catgtgtcaaattaacacctttatgtgtagcaatgaaatgtaacataagtacaagtgacacaactatgataaggacaacc

SEQ ID NO: 174595 - DNA, 80 bp, synthetic construct
  source 1..80: mol_type = other DNA
aaaaagtaaagcaccctaaagaactcacagcgttcaaagagatacctatgcccgttgaacgaaaaacaacattataatgg

SEQ ID NO: 174596 - DNA, 80 bp, synthetic construct
  source 1..80: mol_type = other DNA
tacacagacgttgtctataatccatggacagataaaggcaaaggaaacaaaatatggttagacagcctaacaaaaagcga

SEQ ID NO: 174597 - DNA, 80 bp, synthetic construct
  source 1..80: mol_type = other DNA
ctttctcaggggctgccaactgctgcacacttgcttttgtggttgtgatgattttattaatcatgttattcgcctacaaa

SEQ ID NO: 174598 - DNA, 80 bp, synthetic construct
  source 1..80: mol_type = other DNA
tgtggtccagcccctacatatagaggagctgaccttcggggcggttgcctgtctggggacatttagtgctactgacggtt

SEQ ID NO: 174599 - DNA, 80 bp, synthetic construct
  source 1..80: mol_type = other DNA
aatattgtgaagataacaaatggataattcctgctgagtgcaaggtagaaagagatctgaatatagctaatacaatcata

SEQ ID NO: 174600 - DNA, 80 bp, synthetic construct
  source 1..80: mol_type = other DNA
ttttgctttatctgctgccatcatgcctacatactatcttgcgttacatgggggacagtcatataatctaattgttgaca

SEQ ID NO: 174601 - DNA, 80 bp, synthetic construct
  source 1..80: mol_type = other DNA
ggacatgggaggaactggtgaggaacgccctcatactttctgtataaatgtacccgctgcttgcactgtattcagtcgct

SEQ ID NO: 174602 - DNA, 80 bp, synthetic construct
  source 1..80: mol_type = other DNA
attacacaaatctagagacatatgggtacaattcgttacacagacgcttgatgcgttattcactaaaggtgcatgcctcc

SEQ ID NO: 174603 - DNA, 80 bp, synthetic construct
  source 1..80: mol_type = other DNA
ccaatttgccctcttgaaacaatgagcactattaccacagtacctatcacaatttccattagtccaatgtgcgcagaatt

SEQ ID NO: 174604 - DNA, 80 bp, synthetic construct
  source 1..80: mol_type = other DNA
tattgttggtccgccaataaacagagtgtatatgtttcccccccagggtcccaagcctatctgcaccccccagggctggg

SEQ ID NO: 174605 - DNA, 80 bp, synthetic construct
  source 1..80: mol_type = other DNA
taggcttcaatgtgctatctaacagtgtctacacagacctcagcaacctcccaaaccacaaagacagaagactacaaata

SEQ ID NO: 174606 - DNA, 80 bp, synthetic construct
  source 1..80: mol_type = other DNA
gcgcattccttctgcagttaaccagcgcaatcctcgccagtgaacccggacgatataatcagcttctccaaaagcaagtg

SEQ ID NO: 174607 - DNA, 80 bp, synthetic construct
  source 1..80: mol_type = other DNA
aaagcaaaacacatcaacgcgtggtgtccaagggctccaagagcagtaccctaccaacacactggaagcacaaacttggt

SEQ ID NO: 174608 - DNA, 80 bp, synthetic construct
  source 1..80: mol_type = other DNA
aaattatgttgatgaaattttaaatgaagtgttagttgtacccaacattaaggaaagtaaaccatcaacatcaaattcag

SEQ ID NO: 174609 - DNA, 80 bp, synthetic construct
  source 1..80: mol_type = other DNA
aagacagtcagtttagagaaaacatatggaacacagagaaagtagtacaagtaattactgacatagctactaaaaacatg

SEQ ID NO: 174610 - DNA, 80 bp, synthetic construct
  source 1..80: mol_type = other DNA
tgctgacccacaaaccatgggcccagaatgggtgttccacacctgggactggcgacgcggactttttggtgaaaatgctc

SEQ ID NO: 174611 - DNA, 80 bp, synthetic construct
  source 1..80: mol_type = other DNA
ttacaactccagatacttattcaaaagctggctacataacttgttggtaccaaacaaactttgttgtacccccaggaacc

SEQ ID NO: 174612 - DNA, 80 bp, synthetic construct
  source 1..80: mol_type = other DNA
atatccatgtcagggaccaaatatggtttgactatcaccccagcagacaaatcagaacacttcaaaccagtgacttggga

SEQ ID NO: 174613 - DNA, 80 bp, synthetic construct
  source 1..80: mol_type = other DNA
gggtgcaatccagcgccaccacaacaagcacttctgtctccccggtgactttacataagctgtacccacggctgaaagtg

SEQ ID NO: 174614 - DNA, 80 bp, synthetic construct
  source 1..80: mol_type = other DNA
ccaatgcaggacatacaagagtccatacggtggacacgtgatccgaaaaacacacaggatcatgtgcgctctctatgtat

SEQ ID NO: 174615 - DNA, 80 bp, synthetic construct
  source 1..80: mol_type = other DNA
gctcgtgtatcttgtgccaattgctgttgctctaccgcgacggcgaatggatcctctgtctttgctgcaacggccgttat

SEQ ID NO: 174616 - DNA, 80 bp, synthetic construct
  source 1..80: mol_type = other DNA
ctcaagtatctagacaaaccactggatcgcatgaaaatgctatcacagctaccagcggaggtcttatcaagtatttcaat

SEQ ID NO: 174617 - DNA, 80 bp, synthetic construct
  source 1..80: mol_type = other DNA
tgtttcaaagagaagtaatgactaccatcagcaggtctgggcccttctcctacaaagacgagctgcccagcaccacacta

SEQ ID NO: 174618 - DNA, 80 bp, synthetic construct
  source 1..80: mol_type = other DNA
tcacgttgatgaaaacgaggtcgtggatctgatggccgacgaggccggcggcggcgtcaccactttgaccaccctgagtt

SEQ ID NO: 174619 - DNA, 80 bp, synthetic construct
  source 1..80: mol_type = other DNA
ctgtacaatgcctcccagacaataaagactacactgagatcaaactaaacataacagaggcctttgatgcatgggataat

SEQ ID NO: 174620 - DNA, 80 bp, synthetic construct
  source 1..80: mol_type = other DNA
cccaggtttccagacagaatgtaggaactcactctactcaaaatacagttgctaatgggtctagcttgaactattttaac

SEQ ID NO: 174621 - DNA, 80 bp, synthetic construct
  source 1..80: mol_type = other DNA
aaggccacggtgcaagatacacaggggagtgggccagcaaacacggaacgagtgcccgcgttaacagcagccgagaccgg

SEQ ID NO: 174622 - DNA, 80 bp, synthetic construct
  source 1..80: mol_type = other DNA
ttagccaactgctcactgactctaaaatacaaattcttttttacctggggcggaaaccaggtctatcaacagacaatcaa

SEQ ID NO: 174623 - DNA, 80 bp, synthetic construct
  source 1..80: mol_type = other DNA
aacaggcttatgcacaacagtgtctgacaaaataacaggtaaagtcatcaaatggttagttagagtcatcagtgccctca

SEQ ID NO: 174624 - DNA, 80 bp, synthetic construct
  source 1..80: mol_type = other DNA
agccggcggtgctgttggcggtgcggcaaaagagtgtcatgtcgtgcgtgcacaaaaaacaacacacaccacaggccagg

SEQ ID NO: 174625 - DNA, 80 bp, synthetic construct
  source 1..80: mol_type = other DNA
actaccacaacaaccacatacacataccctggcaccacaaatacagcagtaacatttataacagccaatgatacctggta

SEQ ID NO: 174626 - DNA, 80 bp, synthetic construct
  source 1..80: mol_type = other DNA
tgaagtagtggtagtcccagatactaaaccttctggaccccagcacacaactagacccagtgctttaggtgcaatggaaa

SEQ ID NO: 174627 - DNA, 80 bp, synthetic construct
  source 1..80: mol_type = other DNA
gtaagactgacgtaagtagtagcgtaattactagtctcggtgcaatagtgtcatgttatggtaagactaagtgtaccgct

SEQ ID NO: 174628 - DNA, 80 bp, synthetic construct
  source 1..80: mol_type = other DNA
aatcacacagacacagacacgcgtcttctttgcgacgtgcgccgcgcacgtcgcttttattcgccgtcgccgtcctccgc

SEQ ID NO: 174629 - DNA, 80 bp, synthetic construct
  source 1..80: mol_type = other DNA
tcttcatcctcctcctctgaggatgaaatctctccatctgtggagtgttcttcgctgccctccatagggtccatatcgca

SEQ ID NO: 174630 - DNA, 80 bp, synthetic construct
  source 1..80: mol_type = other DNA
ataaaacatgtatgtttatggagcacacactcaccagtgaagggcagtggcgaataccgctggagtttccaaaacaaggc

SEQ ID NO: 174631 - DNA, 80 bp, synthetic construct
  source 1..80: mol_type = other DNA
acacaccctggtgaaaaagggagggaagttggaagcccacgagaaacgcatccaaaccacccaagtgatgacagttggtt

SEQ ID NO: 174632 - DNA, 80 bp, synthetic construct
  source 1..80: mol_type = other DNA
gacgggctgtatttatataacgcctttcggcgcaccaccagcataatctgcgaggaggaccttgacggtgactgccgcca

SEQ ID NO: 174633 - DNA, 80 bp, synthetic construct
  source 1..80: mol_type = other DNA
ctttcgtcggtatcgccaatgcttattcgcatttttatgacgggtttgccacggtgccgattgagggcgaaaccaccgat

SEQ ID NO: 174634 - DNA, 80 bp, synthetic construct
  source 1..80: mol_type = other DNA
aataagtgcctagcacatcacgtaggcaccaggtgtcaccagggctacttgcctcggcatctcctcaccggagaaggggt

SEQ ID NO: 174635 - DNA, 80 bp, synthetic construct
  source 1..80: mol_type = other DNA
gctacctgatgcgctcaaggacatgggaatgtttggtcagaacatgtatcaccattatttagggcgtgcaggctacaccg

SEQ ID NO: 174636 - DNA, 80 bp, synthetic construct
  source 1..80: mol_type = other DNA
gattttgtcactaacgctaccaacatttcaactactgcaaataaaaccacgcacaaaccctctaccgcctcgtcagatac

SEQ ID NO: 174637 - DNA, 80 bp, synthetic construct
  source 1..80: mol_type = other DNA
actcagcaagacctctgttccgttagccttgtgcaatttaacctaaccgcagctgatttccaacatccgttcggctcacc

SEQ ID NO: 174638 - DNA, 80 bp, synthetic construct
  source 1..80: mol_type = other DNA
attattcaaattggtctgggtcaattaaactcacgttcttctgtgtctgtgatagtttcagtactggtaagttcctgata

SEQ ID NO: 174639 - DNA, 80 bp, synthetic construct
  source 1..80: mol_type = other DNA
actactcaaactggtccggatcaatcaaacttacattcttttgtgtttgtgacagtttcagtactggcaagttcttgata

SEQ ID NO: 174640 - DNA, 80 bp, synthetic construct
  source 1..80: mol_type = other DNA
agaatcaggaagaaggataggtggatatgaaaatgttacacgcaatagacaacccagtgatgaaaattggcttaactgta

SEQ ID NO: 174641 - DNA, 80 bp, synthetic construct
  source 1..80: mol_type = other DNA
tctcgcgcaagtcctgagaggccctcggcgtcgatggggttcacctcgggcgtccgagcctcgttttcttcttcttcatc

SEQ ID NO: 174642 - DNA, 80 bp, synthetic construct
  source 1..80: mol_type = other DNA
actgcaggtagagtgaatgaacaaatattcggtactagattgtacataggagatggtgttttcaagaccactttatttgg

SEQ ID NO: 174643 - DNA, 80 bp, synthetic construct
  source 1..80: mol_type = other DNA
acaaccctagtgttgaagcagatgaagggaggaaattcgccgccctcgactacctgcttggttgcggggttttggcagga

SEQ ID NO: 174644 - DNA, 80 bp, synthetic construct
  source 1..80: mol_type = other DNA
tgaagaaatttactgagtgctgcaacgcagctaaaggcctagagtggattggtgtaaagattagcaaatttatagattgg

SEQ ID NO: 174645 - DNA, 80 bp, synthetic construct
  source 1..80: mol_type = other DNA
cgccattttagcttcggcctccattttaggcccttcgcagccaccatagtcgcatatcagtgacgtcacaggcgccatct

SEQ ID NO: 174646 - DNA, 80 bp, synthetic construct
  source 1..80: mol_type = other DNA
ccggcgaggacgggtgtttttgggcgtgcgggatgtccgcgggacggcggcaaggccggtggttgcaccggggactgaga

SEQ ID NO: 174647 - DNA, 80 bp, synthetic construct
  source 1..80: mol_type = other DNA
tttcacaaccgtatattctacattcaatacatcatatgccaatatatctaatacggctgccactacagaattgatttcaa

SEQ ID NO: 174648 - DNA, 80 bp, synthetic construct
  source 1..80: mol_type = other DNA
atggtggactaaagacttttatgccaccaaagcagacagcaactacgggtactgtagctttacccctaaagatgacacag

SEQ ID NO: 174649 - DNA, 80 bp, synthetic construct
  source 1..80: mol_type = other DNA
agagttgtgtcaagttgataccatcattccaattaaccacacaacagcaaccacctctagtgtgaatatgtacacaattg

SEQ ID NO: 174650 - DNA, 80 bp, synthetic construct
  source 1..80: mol_type = other DNA
aaactcaagatgtggaaaaaatgaaactctacttagataagtatggaatagacctacccttagtcacttacataaaagat

SEQ ID NO: 174651 - DNA, 80 bp, synthetic construct
  source 1..80: mol_type = other DNA
agagtgtatcatagagcaaaacatgtgagagcatgggttcctagagcccctagggccttgcaatatttacatattggcag

SEQ ID NO: 174652 - DNA, 80 bp, synthetic construct
  source 1..80: mol_type = other DNA
tgaaaggtgttggaccagcagaacctggggactgtggtggaatcttgcgatgcatgcacggcccaatcggtctactgaca

SEQ ID NO: 174653 - DNA, 80 bp, synthetic construct
  source 1..80: mol_type = other DNA
atgctagttggaaggtgaccactaggcaagtggcgcaactaagacggaaaatggaaatgttcacgtacttgaggtttgat

SEQ ID NO: 174654 - DNA, 80 bp, synthetic construct
  source 1..80: mol_type = other DNA
ggatagcatcacctatataccagacaccgttaagcctgatgtgacaaatcacggagcatttggtcagcaatctggggccg

SEQ ID NO: 174655 - DNA, 80 bp, synthetic construct
  source 1..80: mol_type = other DNA
ttcaccaatttgcattcggatagcttcatttgaaaattctaaactcattcataaagatgggagctcaagttactaggcag

SEQ ID NO: 174656 - DNA, 80 bp, synthetic construct
  source 1..80: mol_type = other DNA
atgaaaatttttacttattcattaaacctagagctgaatataactataccaaaattactgacaccactccagtctgttac

SEQ ID NO: 174657 - DNA, 80 bp, synthetic construct
  source 1..80: mol_type = other DNA
gatgaagtaagtagttatctcatacctctaatagccaatagacagaatgaacagatatttggtacaaaattgttcattgg

SEQ ID NO: 174658 - DNA, 80 bp, synthetic construct
  source 1..80: mol_type = other DNA
ccctgctttctcggcatctctgatagcctgagaagaaaccccaactaaatccgctgcttcacctattctccagcgccggg

SEQ ID NO: 174659 - DNA, 80 bp, synthetic construct
  source 1..80: mol_type = other DNA
cttattgccagcttgctagctagtgtttacttaatatattgcagggaatatgtgactgttttctatggagtgcctgcgtg

SEQ ID NO: 174660 - DNA, 80 bp, synthetic construct
  source 1..80: mol_type = other DNA
tcccggaaaatcactcaaaactgcgtccatgacacatcaattcccgataagtacccccctttgaaatcggatccccccac

SEQ ID NO: 174661 - DNA, 80 bp, synthetic construct
  source 1..80: mol_type = other DNA
attttccctatggttacaggcttatggttataagtttgtaatcatgggagcacaggtttcaagacaaaaggttggttcgc

SEQ ID NO: 174662 - DNA, 80 bp, synthetic construct
  source 1..80: mol_type = other DNA
ccacaccagacacatactccttggctggttatgtgacttgttggtaccagactaacttagtggtgccacccaatacacca

SEQ ID NO: 174663 - DNA, 80 bp, synthetic construct
  source 1..80: mol_type = other DNA
gtgcgcctgttgagagataccacacacatcagtcagagcactctgctcgcttcaacacagggaatagatgaggtcatcga

SEQ ID NO: 174664 - DNA, 80 bp, synthetic construct
  source 1..80: mol_type = other DNA
atgatgtgatagcatcctatccttatcctttggatcctacacatatagcagaaacagcagccagatatggattgaatatt

SEQ ID NO: 174665 - DNA, 80 bp, synthetic construct
  source 1..80: mol_type = other DNA
catcccaggtacctatcactatatctatcagtcctatgtgtgctgagttctcaggtgccagagcaaagccaaatgcagcc

SEQ ID NO: 174666 - DNA, 80 bp, synthetic construct
  source 1..80: mol_type = other DNA
ctaaaagaggtcttagttgttccagatactaaacctagtggtccaatacacacaacaaaaccagctgccttgtctgccat

SEQ ID NO: 174667 - DNA, 80 bp, synthetic construct
  source 1..80: mol_type = other DNA
taaagttgtacagacacgccacagtagactacatagtgtcatacaacagaacaggcccctttgagataagtgacatgacc

SEQ ID NO: 174668 - DNA, 80 bp, synthetic construct
  source 1..80: mol_type = other DNA
agataagcgtcagaattaagccccccaagatgttcttagacaagtggtacactcaagacgacctgtgttccgttaatctt

SEQ ID NO: 174669 - DNA, 80 bp, synthetic construct
  source 1..80: mol_type = other DNA
taatccaaacacagacaaaggaaaaggcaaccacatttggatacagtctgtaactaaaacaaacacaactttaaactctc

SEQ ID NO: 174670 - DNA, 80 bp, synthetic construct
  source 1..80: mol_type = other DNA
cagcctggcttagacattttaatatatccacacacggaaaatacacccatcccaacataagaaatggaaaatatcataac

SEQ ID NO: 174671 - DNA, 80 bp, synthetic construct
  source 1..80: mol_type = other DNA
tcaaccattaaaacaccagtcaatgccacaaccatcaaagaattcttcaaccacgcaatggatggtgatgaacagggatt

SEQ ID NO: 174672 - DNA, 80 bp, synthetic construct
  source 1..80: mol_type = other DNA
tggaaacacccgtagagagatccctcagcgcggtgaaaccgcgtcccgagcggcgtgccgctgacaaagaccgtgggaca

SEQ ID NO: 174673 - DNA, 80 bp, synthetic construct
  source 1..80: mol_type = other DNA
cactgacccaggacatgccggtgctaacgcaccaaataatgtacgttccaccgggcggtgccgtgcctagtggtgcagaa

SEQ ID NO: 174674 - DNA, 80 bp, synthetic construct
  source 1..80: mol_type = other DNA
ttttctctcagaacagatattgcttcacaacctcttgctactactctaattggtgagatatctaattacttcacacactg

SEQ ID NO: 174675 - DNA, 80 bp, synthetic construct
  source 1..80: mol_type = other DNA
ggtgaaatagcaagttactttacacactggacaggtagcttgcgattcagtttcatgttttgtgggactgcaaacaccac

SEQ ID NO: 174676 - DNA, 80 bp, synthetic construct
  source 1..80: mol_type = other DNA
atgcttacaccaggctcagggcaatttttaacaactgatgatatgcaatctccctcagttttaccatactttcatccaac

SEQ ID NO: 174677 - DNA, 80 bp, synthetic construct
  source 1..80: mol_type = other DNA
taccttcccgctctcccggctccgcctgcggagccgcctaatccagaaccacgccgtggtggtggggaagatggcgccgc

SEQ ID NO: 174678 - DNA, 80 bp, synthetic construct
  source 1..80: mol_type = other DNA
caatagccaccgcgccttcctacagtactacgccgggcccgcgggcccccccctccggcctactttggcttgccgggcct

SEQ ID NO: 174679 - DNA, 80 bp, synthetic construct
  source 1..80: mol_type = other DNA
gtttgcccttgcggaactgcggtttccgatctgctcaccacaaactgacaccaattgcattaacttcctggtgttagatg

SEQ ID NO: 174680 - DNA, 80 bp, synthetic construct
  source 1..80: mol_type = other DNA
ttccccttacaaccaggggcatcaagtgtactacagcggacactattgggagaaatattgaattactacacacattggtc

SEQ ID NO: 174681 - DNA, 80 bp, synthetic construct
  source 1..80: mol_type = other DNA
aagaatgatggagacacagtcctccacatggtttggcttcaatggtacaagagcagagaacaggacatatatgtattggc

SEQ ID NO: 174682 - DNA, 80 bp, synthetic construct
  source 1..80: mol_type = other DNA
acatggactactggatactgctaaagcactgcaggcatgtcctgattgtgataaacccttgtattacaaacagtgttgcc

SEQ ID NO: 174683 - DNA, 80 bp, synthetic construct
  source 1..80: mol_type = other DNA
ttaagtgcacagagctcacagcagagtacaagtttaaattcttatggggtggcaatatgattcccgaacaggtacttaaa

SEQ ID NO: 174684 - DNA, 80 bp, synthetic construct
  source 1..80: mol_type = other DNA
aaatgatatgggtgcattgtgctttagaatagtaactgaacagcatacaaatcaagttaaaatcacaactaggatttacc

SEQ ID NO: 174685 - DNA, 80 bp, synthetic construct
  source 1..80: mol_type = other DNA
ccacaagcatccacaaacacaaccaatgaccaatattttaacacattagatggctattggggagatgctatatatgttag

SEQ ID NO: 174686 - DNA, 80 bp, synthetic construct
  source 1..80: mol_type = other DNA
tatttgacaaactatattctcaatgctgctactttgaaacctttcagactatagcccagcttaaccccggctttaaagct

SEQ ID NO: 174687 - DNA, 80 bp, synthetic construct
  source 1..80: mol_type = other DNA
ctgacatggcaactgaggtttttgcaatcaaggtggacattgcatcacatccactggccacaactttaattggtgagatt

SEQ ID NO: 174688 - DNA, 80 bp, synthetic construct
  source 1..80: mol_type = other DNA
ataactacacagaatcaggatatgttacactatggtaccaaacaaactttgttccaggtagtgctatagcacaaggttct

SEQ ID NO: 174689 - DNA, 80 bp, synthetic construct
  source 1..80: mol_type = other DNA
ctaacactactcattattcctctggtgccactgcgaactggaaacacgggagggactactttacctattactgtaacaat

SEQ ID NO: 174690 - DNA, 80 bp, synthetic construct
  source 1..80: mol_type = other DNA
ctgttttaaaaacccttcccccttttgtaacaaatctagaagtaatacacaccgatcaatagcgggcgcggcacaccagc

SEQ ID NO: 174691 - DNA, 80 bp, synthetic construct
  source 1..80: mol_type = other DNA
agacggggatggtgtcaccggagcccctcttaggaccggtaatgggagtgccataaggcataagatttctcagggcccgg

SEQ ID NO: 174692 - DNA, 80 bp, synthetic construct
  source 1..80: mol_type = other DNA
accgtgagagtgtacttcaaacccaagcacatacgtgcctggattccacgaccaccaagactgtgcccgtacctgcgtaa

SEQ ID NO: 174693 - DNA, 80 bp, synthetic construct
  source 1..80: mol_type = other DNA
gcataggcctggtggtagtgcagtgcccgtacacctttccccccatgtatgacaagaacagacccgacatggggtacgtg

SEQ ID NO: 174694 - DNA, 80 bp, synthetic construct
  source 1..80: mol_type = other DNA
ttgtttttgaccttttccttaaaaccccaattccatttagacccctatttggaaagttggaccttcccaaaaaaaaaaaa

SEQ ID NO: 174695 - DNA, 80 bp, synthetic construct
  source 1..80: mol_type = other DNA
ccaacataaatttatacgtatcactccgctgaattgcgtccttgttaacacgaatatatttcttattactgctatctaaa

SEQ ID NO: 174696 - DNA, 80 bp, synthetic construct
  source 1..80: mol_type = other DNA
gccgctgttgcggcggtagctgatacggtgtcgcctggtgctgctgtgtcggtggctgctgttgctgctgttgttgcggt

SEQ ID NO: 174697 - DNA, 80 bp, synthetic construct
  source 1..80: mol_type = other DNA
gggtatagcgatagagtgttgcaacttactttaggcaattccaccattactacacaggaagcagcaaacacagtagtggc

SEQ ID NO: 174698 - DNA, 80 bp, synthetic construct
  source 1..80: mol_type = other DNA
tatgttgatgaagtcctgaatgaagtgctagtagttccaaatattagggagagtcaagcagcaacatcaaattcagctcc

SEQ ID NO: 174699 - DNA, 80 bp, synthetic construct
  source 1..80: mol_type = other DNA
atgacatgtttggggacccccttcctcaccccccaacagccgaagagtgggaaacagagtaccagtgctgtaaggccttt

SEQ ID NO: 174700 - DNA, 80 bp, synthetic construct
  source 1..80: mol_type = other DNA
ccgtcgtcacttctttcgctccctcgacccagcagcgcccacagcgcgggcgagacggtgcaggagtccgaggcggcggc

SEQ ID NO: 174701 - DNA, 80 bp, synthetic construct
  source 1..80: mol_type = other DNA
catgctcagagatactaccccatcacagttacgccacatgactggtatgagatccaagaatcacaatactaccctaaaca

SEQ ID NO: 174702 - DNA, 80 bp, synthetic construct
  source 1..80: mol_type = other DNA
agatgctaacacattattatgggattaaataaaagtctaaatctaacaatcacacatgtgcatttacaacacaacgagac

SEQ ID NO: 174703 - DNA, 80 bp, synthetic construct
  source 1..80: mol_type = other DNA
tttgagaccatataacaaccttgcaaaaacacaaggcccaatcagtcaatatgtgacacaactaggcaatgcatttggag

SEQ ID NO: 174704 - DNA, 80 bp, synthetic construct
  source 1..80: mol_type = other DNA
gaagagtgagagtcttcggagcacggctgagtgagggcagtaagggcggcaggaatcaaccacgacggagagctcctgta

SEQ ID NO: 174705 - DNA, 80 bp, synthetic construct
  source 1..80: mol_type = other DNA
acgattgagaactttctcgccagatcagcgtgtgtcttctatttggaatacaagactggtactaaagaggattccaacag

SEQ ID NO: 174706 - DNA, 80 bp, synthetic construct
  source 1..80: mol_type = other DNA
tgttcaggctcaccttggagattcattaaagaaaaggtttgtggatggctacagctcaactatatacacaaagaatcaga

SEQ ID NO: 174707 - DNA, 80 bp, synthetic construct
  source 1..80: mol_type = other DNA
gtgtactactccacgtgggaagtacgggtggagtagtacactattattacggtaatcttgtacgccagttttataacccc

SEQ ID NO: 174708 - DNA, 80 bp, synthetic construct
  source 1..80: mol_type = other DNA
ttaagggagggaagagaaatgaaccagttgcagtattaatacatggttctcctggtactggaaaatctcttgctacttca

SEQ ID NO: 174709 - DNA, 80 bp, synthetic construct
  source 1..80: mol_type = other DNA
tgtttgtgccaccagatattgaggccccggatggtattagtgataaagggtgggacggtgcctcaaaccccagtatcttt

SEQ ID NO: 174710 - DNA, 80 bp, synthetic construct
  source 1..80: mol_type = other DNA
caacctcaagtgataccaacaataaaaaaattaacttctcaccaccacaaaacaccaactacaattggtacacctacaat

SEQ ID NO: 174711 - DNA, 80 bp, synthetic construct
  source 1..80: mol_type = other DNA
ctataatagtaccttatgtcaatgcagtcccaatggattccatgcttaggcataacaattggagtttagtaataattcct

SEQ ID NO: 174712 - DNA, 80 bp, synthetic construct
  source 1..80: mol_type = other DNA
cttacggagctgctccagcgcgaatctcagtgccatatgtgggactagccaatgcctactcacatttctatgacggattc

SEQ ID NO: 174713 - DNA, 80 bp, synthetic construct
  source 1..80: mol_type = other DNA
tggcgactgtattggccatcttcagcatctggctgctaacctgggtagaccacctgctccacagccgccccgggaacagc

SEQ ID NO: 174714 - DNA, 80 bp, synthetic construct
  source 1..80: mol_type = other DNA
cttccaggtgttgcgagaacagtacaataaagtaataggcttccccatgaaaggggaagaggcctatactgactttgaaa

SEQ ID NO: 174715 - DNA, 80 bp, synthetic construct
  source 1..80: mol_type = other DNA
cgagacaggtagcacagctacgcaggaaaattgagctgttcacatacactaggtttgatgtcgaaatcacattcgtgatc

SEQ ID NO: 174716 - DNA, 80 bp, synthetic construct
  source 1..80: mol_type = other DNA
ccagcgcatcttgtgacgagtcttcttcgtcctcggactcgagacgccgcctcagccgcttttttgggagcgcgcgggga

SEQ ID NO: 174717 - DNA, 80 bp, synthetic construct
  source 1..80: mol_type = other DNA
tttacccggagcgaggtataggttgtacccacggccaaaaaccttcaaccgttatccgccaaccaactacgtaacggcta

SEQ ID NO: 174718 - DNA, 80 bp, synthetic construct
  source 1..80: mol_type = other DNA
ccgctcccatcgcaaaaagttgagttcggtagtcgagggcgcgttgaccacggggggctccagggagcctccaagcggcg

SEQ ID NO: 174719 - DNA, 80 bp, synthetic construct
  source 1..80: mol_type = other DNA
ggaacacgccgcagaagcggcggcgcgcttacggcgccaagaagtcgctcagccctgtcccgcactggcggcggtcggtg

SEQ ID NO: 174720 - DNA, 80 bp, synthetic construct
  source 1..80: mol_type = other DNA
actcaaagatactccatttattgaacaacaaaatttctaccaaggtgatgtgcatgatgcagttgtgggtgcgatgtcgc

SEQ ID NO: 174721 - DNA, 80 bp, synthetic construct
  source 1..80: mol_type = other DNA
atacaactcaccggaactcacattccatacctgggacttcagacgtggtctctttggccagaaagctattgagagaatgc

SEQ ID NO: 174722 - DNA, 80 bp, synthetic construct
  source 1..80: mol_type = other DNA
aataatgaagcattagtggaaaatttccttggtaggtcatcactatgggcaaatctcaccctagacactaatgggtatgt

SEQ ID NO: 174723 - DNA, 80 bp, synthetic construct
  source 1..80: mol_type = other DNA
tttacagagcatggatgcatatcatatagaagtgaatacgggaaaccaccaaggtgacaagatctttgccttccagatac

SEQ ID NO: 174724 - DNA, 80 bp, synthetic construct
  source 1..80: mol_type = other DNA
tttttcggggttctcgttgcaatcctcggtcacttgttcaaaggttttgagagattcttcggccaattctgggaacagcg

SEQ ID NO: 174725 - DNA, 80 bp, synthetic construct
  source 1..80: mol_type = other DNA
caggtaatgtatgtcccaccaggcggcccagtcccaaaaagtgtggatgacttcgcctggcaaacctcgactaatccaag

SEQ ID NO: 174726 - DNA, 80 bp, synthetic construct
  source 1..80: mol_type = other DNA
cctcaaagaccgtccttactatccctggatgcctaagcctaaacctgcatgccgtgtaacatttaagcttggctttcaat

SEQ ID NO: 174727 - DNA, 80 bp, synthetic construct
  source 1..80: mol_type = other DNA
gatttcacggagggcgggtacatcacatgtttttaccaaaccagaattgttgtaccctcgggcacgccaacatcaatgtc

SEQ ID NO: 174728 - DNA, 80 bp, synthetic construct
  source 1..80: mol_type = other DNA
gtttgtttgaccagatcaatataaacactacatcctatttgttcataatgggagctcaagtttctactcagaaatctggg

SEQ ID NO: 174729 - DNA, 80 bp, synthetic construct
  source 1..80: mol_type = other DNA
attttcccaggaacaaaagaaccagcccccttacatgccagtgatcctagactcgaaacaaacttggatcaagcagtttt

SEQ ID NO: 174730 - DNA, 80 bp, synthetic construct
  source 1..80: mol_type = other DNA
cgataatacaggtctaatgcagattatgtatgttcctccaggtatagatgcaccaaactcagcaagtagccctctgtggg

SEQ ID NO: 174731 - DNA, 80 bp, synthetic construct
  source 1..80: mol_type = other DNA
gggccgtcagtcaaaactacgactacgcgctctacgcgagcacgccggcgttgtttgactttttacgcgtcgtgcgtcag

SEQ ID NO: 174732 - DNA, 80 bp, synthetic construct
  source 1..80: mol_type = other DNA
tactggccaccctcagcttgctggggtgtgacgcctctccatggcattggttaaaagagaaagtttgcaacatactaggc

SEQ ID NO: 174733 - DNA, 80 bp, synthetic construct
  source 1..80: mol_type = other DNA
tttgccaagtagattcaatgatcccaattaacaacacagtggcgagtcataaaagggtaagtatgtatgctgttcgcgtg

SEQ ID NO: 174734 - DNA, 80 bp, synthetic construct
  source 1..80: mol_type = other DNA
ttgggacaacatgacgtggcaacaatgggaaaaacaaatccgcgacctggaggcaaatatcagtgaaagtctagaacagg

SEQ ID NO: 174735 - DNA, 80 bp, synthetic construct
  source 1..80: mol_type = other DNA
ggcccacgtccccggggtactggaggtggttgatgggacccttgtcctcctccatctgggaggtggcatatctgaaggca

SEQ ID NO: 174736 - DNA, 80 bp, synthetic construct
  source 1..80: mol_type = other DNA
gacgcacgtcgtgtgggattttggcttacaatccagtatcactatcatcataccttggattagtgggtcacattacagaa

SEQ ID NO: 174737 - DNA, 80 bp, synthetic construct
  source 1..80: mol_type = other DNA
aactttaccaactccgtctccctaaagctgatgacagaagtggtggcggtgcttgagggcaccacccaagactttttctc

SEQ ID NO: 174738 - DNA, 80 bp, synthetic construct
  source 1..80: mol_type = other DNA
cggtgcttcacgctcttcgttaaaataacacaaggacaagatactaaagaaataactgaggtgagtgtgggaagatggga

SEQ ID NO: 174739 - DNA, 80 bp, synthetic construct
  source 1..80: mol_type = other DNA
atggtcagacgctgctacataaagggttatatggctgctctaataagtggggacggaacatttgccacaaactacagcag

SEQ ID NO: 174740 - DNA, 80 bp, synthetic construct
  source 1..80: mol_type = other DNA
agcacaacagtctagacctcaaaacaacgaaacagaatactttggacaactagatggactatggggagaccctatataca

SEQ ID NO: 174741 - DNA, 80 bp, synthetic construct
  source 1..80: mol_type = other DNA
agtgtgtgataaatataaagattcacaagggaaactgaacgtgtctgcagctttccaaccatgtgatgtgaatactaaag

SEQ ID NO: 174742 - DNA, 80 bp, synthetic construct
  source 1..80: mol_type = other DNA
acacacaaatgaacgttacagccacaaacggaacacaaattacagacgcagacaaaaaaatatttgatgaacatttatac

SEQ ID NO: 174743 - DNA, 80 bp, synthetic construct
  source 1..80: mol_type = other DNA
gatcaggatgtatacatgaatctaaattagaacttgagcttgcacactatgataagaagaactttactacatggaatatc

SEQ ID NO: 174744 - DNA, 80 bp, synthetic construct
  source 1..80: mol_type = other DNA
taccctcccctctgctgtcttcacccttgttgctgaccatctcacccgcatcaccggagatccccgcgtcggtcgctaca

SEQ ID NO: 174745 - DNA, 80 bp, synthetic construct
  source 1..80: mol_type = other DNA
cagcaacaattatagtaccctatgttaatgcagttcccatggattctatgctcagacataacaattggagtttgctaatt

SEQ ID NO: 174746 - DNA, 80 bp, synthetic construct
  source 1..80: mol_type = other DNA
tttcctgggcatggtctacgtgattatataaagcggtgcacttccgaatggctgagttttccacgcccgtccgcagcggt

SEQ ID NO: 174747 - DNA, 80 bp, synthetic construct
  source 1..80: mol_type = other DNA
tttgcggccaggtgctcatggaactctcccgctcttcccttgttttctgatagcatgtttgcgaggttttggatgttaag

SEQ ID NO: 174748 - DNA, 80 bp, synthetic construct
  source 1..80: mol_type = other DNA
gcaccattaacaccgtgcctgtatctagccacgggggcgcacatcgtggtgacctggccacattgagtacacgaggtgcc

SEQ ID NO: 174749 - DNA, 80 bp, synthetic construct
  source 1..80: mol_type = other DNA
gaggcccttcttccttttaacgggaggaagaaaggtgggctttgaggggtgcgggaatatgggtctctcatcgctctctt

SEQ ID NO: 174750 - DNA, 80 bp, synthetic construct
  source 1..80: mol_type = other DNA
cttacagtgaacgaaaacggtacattccccattaccaccaccaaaaagcccactacgaccacaagaacgacaactaccac

SEQ ID NO: 174751 - DNA, 80 bp, synthetic construct
  source 1..80: mol_type = other DNA
taagaacaaagtacttaaatgcaactagaaaagcactcccagcactagctacactaggagacgaaatgctagaataccac

SEQ ID NO: 174752 - DNA, 80 bp, synthetic construct
  source 1..80: mol_type = other DNA
ctatagaggcaattagtctgttagatctaattagtcttaagggtaagttttcgattaccgcattgattaacggtgataat

SEQ ID NO: 174753 - DNA, 80 bp, synthetic construct
  source 1..80: mol_type = other DNA
cattcattgaaaatcctccattcgcgtatactatgtgagtggcacacaaattatctaaaacatcactatgatttatgttt

SEQ ID NO: 174754 - DNA, 80 bp, synthetic construct
  source 1..80: mol_type = other DNA
gtatggaggcggaggtcttacctaaaacaaccacaaaaatgtaacttactttgtactactatacaggcttatttgaggcc

SEQ ID NO: 174755 - DNA, 80 bp, synthetic construct
  source 1..80: mol_type = other DNA
ctttggggcccgcaggcgcggggcctcggccctggcctcttcccgctcgctctgctcggtgtcactgttgcccgagtcac

SEQ ID NO: 174756 - DNA, 80 bp, synthetic construct
  source 1..80: mol_type = other DNA
acacatgatatgggatgtaggattacaatcaacagtttccatggtggtgccatggatttcagctagtaattacagattca

SEQ ID NO: 174757 - DNA, 80 bp, synthetic construct
  source 1..80: mol_type = other DNA
ataacaattgcaaagaagaccaatgacaatgtgatactagtccttccacttgagatggacaacacccttttctccaccac

SEQ ID NO: 174758 - DNA, 80 bp, synthetic construct
  source 1..80: mol_type = other DNA
cctcctccgccgccagggtcttggtgatctcccggatgcggccaaaggcctgtccgccgcactcgagagtgttgccaagg

SEQ ID NO: 174759 - DNA, 80 bp, synthetic construct
  source 1..80: mol_type = other DNA
aatagagaatttcatgagcagatctgcttgtgtgtattacactagctacaaaacaaaggacacacagcaagatgccatgt

SEQ ID NO: 174760 - DNA, 80 bp, synthetic construct
  source 1..80: mol_type = other DNA
ttttaaatatctcggacaaggagtaccaagtacactttacccaccaaacacattgccatacaactacatcatccctgtat

SEQ ID NO: 174761 - DNA, 80 bp, synthetic construct
  source 1..80: mol_type = other DNA
taatacactaaacaatatgggtaaattgtacgttaggcatgttaatggagccagcccagggccagtgaagagtaccatcc

SEQ ID NO: 174762 - DNA, 80 bp, synthetic construct
  source 1..80: mol_type = other DNA
gggtggcactgaggcggcgggaggggccccatactctatcgctgtcaacagcgccaaaaagcggacgttctcctcatcta

SEQ ID NO: 174763 - DNA, 80 bp, synthetic construct
  source 1..80: mol_type = other DNA
gcccgggcggccccagaggccggttcctcgccccttccccgggcttcagagcccagggtgtcccccagaagggaccctag

SEQ ID NO: 174764 - DNA, 80 bp, synthetic construct
  source 1..80: mol_type = other DNA
atgcatactgtcccagtcgcgacacacagcccagcctagctcggtgaagggtcgacgcacacccgaaaaagtgtgcttga

SEQ ID NO: 174765 - DNA, 80 bp, synthetic construct
  source 1..80: mol_type = other DNA
tgaatgacaaaacaatcagtccaatcacaagtaaggtccgcatatatttcaaaccaaagcatgtgaaagcatgggtgccg

SEQ ID NO: 174766 - DNA, 80 bp, synthetic construct
  source 1..80: mol_type = other DNA
gcatctgccagaggagaggactggttccgatccgtatattgctctcatcaagctttttgtggctgcaatgatcctgtacg

SEQ ID NO: 174767 - DNA, 80 bp, synthetic construct
  source 1..80: mol_type = other DNA
ccttaatacaatcaaacatgggctcacaagtgtctacccaacggtccggctctcatgaaaactccaactcagccaccgag

SEQ ID NO: 174768 - DNA, 80 bp, synthetic construct
  source 1..80: mol_type = other DNA
acgcacctttggttttgggcatcagaacaaggctatatacgtggcaggttacaagatttgtaactaccatttagccactc

SEQ ID NO: 174769 - DNA, 80 bp, synthetic construct
  source 1..80: mol_type = other DNA
tgcatctaaagggtgggaatactcatacacaaaactaatggcgcccatatactattcagcagttagaaacagcacataca

SEQ ID NO: 174770 - DNA, 80 bp, synthetic construct
  source 1..80: mol_type = other DNA
tggtgttaaatatcagaagatgggagcacaagtttcatctcagaggtcaggatcccacgagactgggaatgtggctactg

SEQ ID NO: 174771 - DNA, 80 bp, synthetic construct
  source 1..80: mol_type = other DNA
ccagaaacctcatcagacagattttacactttagatagtgtagtatgggatgggagttccagagggtggtggtggaaact

SEQ ID NO: 174772 - DNA, 80 bp, synthetic construct
  source 1..80: mol_type = other DNA
ggagcaggaggagcagatgcagaagcaggaggagcaggtgcgtaagcaggaggagcagatgcggaagcaggaggagcaga

SEQ ID NO: 174773 - DNA, 80 bp, synthetic construct
  source 1..80: mol_type = other DNA
atgacaacatactaaccgtccttgagggcaccacagactctgagaaaagaaattcaacatatgaacaactccttaacata

SEQ ID NO: 174774 - DNA, 80 bp, synthetic construct
  source 1..80: mol_type = other DNA
acttagaactccatggattaacacctttatctacacaaatgatgagaaatgaatttagagtcagtacaacagaaaatgta

SEQ ID NO: 174775 - DNA, 80 bp, synthetic construct
  source 1..80: mol_type = other DNA
gagaggcaggtgatcataaattcttgtatttgtaagagtgcggcctggcggtctagggcccgtgggacggagacttgggc

SEQ ID NO: 174776 - DNA, 80 bp, synthetic construct
  source 1..80: mol_type = other DNA
aagatatactcaatagggagacccaggacacctccaagatggaacattacttagataaatatggcatagatttaccactt

SEQ ID NO: 174777 - DNA, 80 bp, synthetic construct
  source 1..80: mol_type = other DNA
gaatttatcttagaaaaagaaaaagacttaagaaacgtaaaaaaataatattaactcaatggaacccagctgtggtaaag

SEQ ID NO: 174778 - DNA, 80 bp, synthetic construct
  source 1..80: mol_type = other DNA
tgtgtgtgtgtgatgcattcagcacgggaaagtttctcgttgcgtacacaccaccaggaggtaaactaccagacaatagg

SEQ ID NO: 174779 - DNA, 80 bp, synthetic construct
  source 1..80: mol_type = other DNA
gccagtgacgctcttgcaaggaggttcgccttcgatatggacatatacacaatgtctgagtactcagttaagggaaggct

SEQ ID NO: 174780 - DNA, 80 bp, synthetic construct
  source 1..80: mol_type = other DNA
tctggctacagtctataacaaaatagttgaggaaagtaagaacagaaaggagttaactagctcactacaggcaatttttc

SEQ ID NO: 174781 - DNA, 80 bp, synthetic construct
  source 1..80: mol_type = other DNA
gcgccgctggtggcgaccgaagagaaggtggagatggcggcgcgcgcgccgccgaagacgagtaccaacccgaagacctc

SEQ ID NO: 174782 - DNA, 80 bp, synthetic construct
  source 1..80: mol_type = other DNA
ataaggatgtttctgtctttttccaaaataaaattttgggcaagagtcctctggttgatgattttctggatattgaaatg

SEQ ID NO: 174783 - DNA, 80 bp, synthetic construct
  source 1..80: mol_type = other DNA
atggatacagtctgtaacaaaacctaccacagaatttatagaaaaacaatgtaaatgccaccttaaagatctacctctgt

SEQ ID NO: 174784 - DNA, 80 bp, synthetic construct
  source 1..80: mol_type = other DNA
acagaaactatcaacttcatacaggcaaaaatgacctctacgggggcttcacttcacagtatgccaaatccacacacatg

SEQ ID NO: 174785 - DNA, 80 bp, synthetic construct
  source 1..80: mol_type = other DNA
cccaacgtaacattgttaacgcctgtcacagtacaaaccgtagtttcattatgcttagttccatccgtaagcgtccaagt

SEQ ID NO: 174786 - DNA, 80 bp, synthetic construct
  source 1..80: mol_type = other DNA
gcacaccccccggccccgcacaccccccgtccccgtccccagcgcaaccagcgccgtcaaccccagcacgcccgaaaaca

SEQ ID NO: 174787 - DNA, 80 bp, synthetic construct
  source 1..80: mol_type = other DNA
cacccttcatttctcaacaaaatttcctccaaggtccagttgagaacgcaataacatcagctattggtagggttgctgat

SEQ ID NO: 174788 - DNA, 80 bp, synthetic construct
  source 1..80: mol_type = other DNA
ggagaaaggtagatctttcacaagtgagtatattctagctagtacaaatttagactcacttgctccacccaccatcacta

SEQ ID NO: 174789 - DNA, 80 bp, synthetic construct
  source 1..80: mol_type = other DNA
tgatgggaggatggttaaagtactcaagcaacaaatattaactgacaccaatgatgttgatactgaaattaccatactgt

SEQ ID NO: 174790 - DNA, 80 bp, synthetic construct
  source 1..80: mol_type = other DNA
ctaacctgggtagaccacctgctccacagccgccccgggaacagcacccgccagcgataagggccctgccagcgctcccg

SEQ ID NO: 174791 - DNA, 80 bp, synthetic construct
  source 1..80: mol_type = other DNA
cagcgtgggtaccaagaccaccaagggcaacacagtacactcataaatatagtacaaactatcattacaaacccaattct

SEQ ID NO: 174792 - DNA, 80 bp, synthetic construct
  source 1..80: mol_type = other DNA
tttggtaatggcaaatggatagatggcaggggcgacattcccacatactggctacagaggtggaaaccagtagtactgtt

SEQ ID NO: 174793 - DNA, 80 bp, synthetic construct
  source 1..80: mol_type = other DNA
gttagaggtacttattgacgtagtagacgtgacggtggtattactaggggaagtgacggcgcttgtggtgctacttttca

SEQ ID NO: 174794 - DNA, 80 bp, synthetic construct
  source 1..80: mol_type = other DNA
aatcccctccccttgtaacttagaagcaagtacacacaggccaatagcaagtagcaagccatgctacttatggtcaagca

SEQ ID NO: 174795 - DNA, 80 bp, synthetic construct
  source 1..80: mol_type = other DNA
acgcgtgtctgtgtctgtctgattccccggggaaaagagggagttcccaggcgacggcagcgcgggtccctggtgacaca

SEQ ID NO: 174796 - DNA, 80 bp, synthetic construct
  source 1..80: mol_type = other DNA
gtgggtttgtgacactgtggcaccaaactgcatttgtttccaacggacaagtgggatctattatggtcacttgctctgcg

SEQ ID NO: 174797 - DNA, 80 bp, synthetic construct
  source 1..80: mol_type = other DNA
gacaaaccaactcgcccagatacgtcatccaaccgattttatactttagagagcaaacagtggatggagaactcaaaagg

SEQ ID NO: 174798 - DNA, 80 bp, synthetic construct
  source 1..80: mol_type = other DNA
caccggtgcacaacccaaatgggatcgagagaaacctgtgggaggcattctttcgtatgcatgcttcagcttgtggttgt

SEQ ID NO: 174799 - DNA, 80 bp, synthetic construct
  source 1..80: mol_type = other DNA
ggaagccgccttgttcagtcatccttaagtgtaaattaccctttaggtttaagaagagatcaaaatactacaccaataaa

SEQ ID NO: 174800 - DNA, 80 bp, synthetic construct
  source 1..80: mol_type = other DNA
aaccagcagctttgcatccaaaagacaagagattagaagctgacctaaacacagctgtgttcagcaaatataaaggtaat

SEQ ID NO: 174801 - DNA, 80 bp, synthetic construct
  source 1..80: mol_type = other DNA
aagtcacgtggggatggctgctgtaaacccggaagtagctgacccgcgtgacttatcacgtggtgcgtgcgtcacggcgg

SEQ ID NO: 174802 - DNA, 80 bp, synthetic construct
  source 1..80: mol_type = other DNA
gatttgtcaagtagattctatgataccaattaataatactattgccatgaataacaaaataggtatgtacacagtagagg

SEQ ID NO: 174803 - DNA, 80 bp, synthetic construct
  source 1..80: mol_type = other DNA
aacccctacccccaagtaacttagaagataagcacactcgaccaatagtgggtgattatccaaatcatcaaaggtcaagc

SEQ ID NO: 174804 - DNA, 80 bp, synthetic construct
  source 1..80: mol_type = other DNA
gagcgcccaccttggccttgatgtagtcattgacttgctggttgccaaaggcctcggccggaaagacgctaaagaagtct

SEQ ID NO: 174805 - DNA, 80 bp, synthetic construct
  source 1..80: mol_type = other DNA
ttccgcatattacatgttttatgatggttatgaagaaggctctacaaatgcacgctatggaacaacagtcacaaatgaca

SEQ ID NO: 174806 - DNA, 80 bp, synthetic construct
  source 1..80: mol_type = other DNA
tatgagtctcaggtgcccaaatttcttctttcctgtaccagcaccaaaaaccacaccacgttcacaaagtcgcgctctcc

SEQ ID NO: 174807 - DNA, 80 bp, synthetic construct
  source 1..80: mol_type = other DNA
ggttagaaaatgtactataaggggcgtcctgcccatgattctagccggcgcgggccgctttgcttttaactacggactgc

SEQ ID NO: 174808 - DNA, 80 bp, synthetic construct
  source 1..80: mol_type = other DNA
actgaagaaaccacaattataacaaaaggccacaaagcattctgtcacctcacaggcattttttccccaccttggctaaa

SEQ ID NO: 174809 - DNA, 80 bp, synthetic construct
  source 1..80: mol_type = other DNA
ctgaacaaaatggggaggatttttgtccgccccgttaataaggaaacaccgttgcaagtgatcaacacagttccgaggta

SEQ ID NO: 174810 - DNA, 80 bp, synthetic construct
  source 1..80: mol_type = other DNA
taaacaacttgattatagcaatgttacttttcttaaaaggggttttaaacaagatgagaagtatcaattcttaatacatc

SEQ ID NO: 174811 - DNA, 80 bp, synthetic construct
  source 1..80: mol_type = other DNA
tatttacagctgctgaaaacgccagagaagcatacacagcagcagccaaaaaaataattacaccctgggtatttggcctt

SEQ ID NO: 174812 - DNA, 80 bp, synthetic construct
  source 1..80: mol_type = other DNA
gagagagcaaatgcatgggagctcttccatcaatctacccttgacgaagcgggatctaatgaaccacatctggaagaagg

SEQ ID NO: 174813 - DNA, 80 bp, synthetic construct
  source 1..80: mol_type = other DNA
ccctctagcagacaaaggcataggcaacagagtatatgcacaatggtgctcagaacaaagctgcaaactagatgaaaaaa

SEQ ID NO: 174814 - DNA, 80 bp, synthetic construct
  source 1..80: mol_type = other DNA
accaggcatgtagtgaattacaagaccagatctgagagcacactggaatcgttctttggtagatcagcctgtgtaacaat

SEQ ID NO: 174815 - DNA, 80 bp, synthetic construct
  source 1..80: mol_type = other DNA
ttactaaaggacacgccatttatagaacaaactgcattactgcaaggtgatgtggtagaagctgtagagaacgccgttgc

SEQ ID NO: 174816 - DNA, 80 bp, synthetic construct
  source 1..80: mol_type = other DNA
tgccagaagcccacccacgcactgcccgagcccggtacgctccctagaatcctacaagtcagtgacccgacgcaacttgg

SEQ ID NO: 174817 - DNA, 80 bp, synthetic construct
  source 1..80: mol_type = other DNA
atcgtccacagaaatatagtgtatctgagactctttccaaacatcaataattttgtaaatagtttctcatattttagagg

SEQ ID NO: 174818 - DNA, 80 bp, synthetic construct
  source 1..80: mol_type = other DNA
cccccccccgaagatcgtcactacccacgtgactcccacaggccaatccagagatactacgtacacttcctggggtggag

SEQ ID NO: 174819 - DNA, 80 bp, synthetic construct
  source 1..80: mol_type = other DNA
tccgtctcccctcctcccaactgctggagccggtcggaggaggccggggtgttatctgctgactgaaacccgtccccgct

SEQ ID NO: 174820 - DNA, 80 bp, synthetic construct
  source 1..80: mol_type = other DNA
aattagaggcaacattatagacgttgatgtagatgcaggatacatagctctagaaatagaattccccaatctaacattgg

SEQ ID NO: 174821 - DNA, 80 bp, synthetic construct
  source 1..80: mol_type = other DNA
tgcctgtcatgaacgtcccaggcagtaatcagtttctaacatcagatgattaccaatccccatccgctatgccgcagttc

SEQ ID NO: 174822 - DNA, 80 bp, synthetic construct
  source 1..80: mol_type = other DNA
cgccttcctacggtcctggggccggagcggtcgccccggccggcggctactttacctccccaggaggttactacgccggg

SEQ ID NO: 174823 - DNA, 80 bp, synthetic construct
  source 1..80: mol_type = other DNA
gcaggggcgtcccggcgagcacggtagtgcggttggttgcaacccagacgttcactggacttccttcttctacgccttca

SEQ ID NO: 174824 - DNA, 80 bp, synthetic construct
  source 1..80: mol_type = other DNA
actatcaaacattccaaacagagcaaatgttcagacccaaacaatacaatgcagatggctctacctggaaagactacaaa

SEQ ID NO: 174825 - DNA, 80 bp, synthetic construct
  source 1..80: mol_type = other DNA
tcgcctgcagcattgacccacagtacttagaaaacaactataccacattattaaagtacattgaagacaattactcatca

SEQ ID NO: 174826 - DNA, 80 bp, synthetic construct
  source 1..80: mol_type = other DNA
ttttaggtaccatatatgctctttacaagcttatgtgtctaacacaaggtgcttattcagggataccaactccaatagca

SEQ ID NO: 174827 - DNA, 80 bp, synthetic construct
  source 1..80: mol_type = other DNA
tgtagaggggtcatcactatggccatgtttctgaagtcgcgtggggtccggtcttgcagggaccggcgcctcttgtcgga

SEQ ID NO: 174828 - DNA, 80 bp, synthetic construct
  source 1..80: mol_type = other DNA
tagcatttgtgagtgcttgccctgatttcagtgtgcgattgttaagagacactacccacatttcacaaggtgccctgttt

SEQ ID NO: 174829 - DNA, 80 bp, synthetic construct
  source 1..80: mol_type = other DNA
gcttttgggcaacaatcaggagctatatatgtgggcaactacagagtggtcaataggcaccttgccactcacgttgactg

SEQ ID NO: 174830 - DNA, 80 bp, synthetic construct
  source 1..80: mol_type = other DNA
cagtatttaacacctttaaaactgaggagcaccttaagtgccctgcagccaaagaccaaaaacaaactgaccccacgaca

SEQ ID NO: 174831 - DNA, 80 bp, synthetic construct
  source 1..80: mol_type = other DNA
ttaacagcagcaaagcactatgcagctcagttgttccctcttgacatcaaccctgaacctataacaatggaacaagctgt

SEQ ID NO: 174832 - DNA, 80 bp, synthetic construct
  source 1..80: mol_type = other DNA
gttacagttagggtccccccacctaaactatttgaagataagtggtactctcaacatgacttgtgtcaggtacatcttgt

SEQ ID NO: 174833 - DNA, 80 bp, synthetic construct
  source 1..80: mol_type = other DNA
ccagcaggcggtcgtgatccgaattcttggacgacttgatctgcttggtgaagagaaagcccttgcgcgacgacgtggtg

SEQ ID NO: 174834 - DNA, 80 bp, synthetic construct
  source 1..80: mol_type = other DNA
ccccggtacaaagggtgttaagtcttacccaagactgaagccttgagtatcgttacccgcataactactggacaaagcct

SEQ ID NO: 174835 - DNA, 80 bp, synthetic construct
  source 1..80: mol_type = other DNA
gtggttaatttcttccgggtcaaaggtcatcgctacgtcataagtcacgtgggaacggctgctgtaaacacggaagtagc

SEQ ID NO: 174836 - DNA, 80 bp, synthetic construct
  source 1..80: mol_type = other DNA
tagaattgccacctggtgagcggtgtgcgggctgccgtctctatcagacgcgttatggcacgccggctgcccaagcccac

SEQ ID NO: 174837 - DNA, 80 bp, synthetic construct
  source 1..80: mol_type = other DNA
cactaaaatcctctacatatgactgggaaaactatagtaccccaggaaactatgcagcatgccacacacaatttacaacc

SEQ ID NO: 174838 - DNA, 80 bp, synthetic construct
  source 1..80: mol_type = other DNA
gcagaaagaaaaggaaagtgctactgccagcactgcaccctgctgagaaaacaccaactggcatgagctggtgcccacct

SEQ ID NO: 174839 - DNA, 80 bp, synthetic construct
  source 1..80: mol_type = other DNA
ttctgctcaccacaaactggcaacacttgcatcagcttccaggtccttaattccgtttacaacaactacctcagtattaa

SEQ ID NO: 174840 - DNA, 80 bp, synthetic construct
  source 1..80: mol_type = other DNA
gcaatatatgtatgtgcccccaggggctcccatccctactaccagaaatgattacacatggcaatctagtaccaatgctt

SEQ ID NO: 174841 - DNA, 80 bp, synthetic construct
  source 1..80: mol_type = other DNA
tggaacatcacctacactgatacagtgcaactaagacgcaagttggagatgtttacctactcaagatttgacattgaatt

SEQ ID NO: 174842 - DNA, 80 bp, synthetic construct
  source 1..80: mol_type = other DNA
gtatttccagagagacttttgcgcagtgcccctgctaactgtcaacgcaaccgcatgcaacttgcggtttccgttcggct

SEQ ID NO: 174843 - DNA, 80 bp, synthetic construct
  source 1..80: mol_type = other DNA
tggtaacatcttgcttagtggcaatcaaacagcacgaatgttaaaatacaattatcctacaaaatcaggttactgtggtg

SEQ ID NO: 174844 - DNA, 80 bp, synthetic construct
  source 1..80: mol_type = other DNA
taactgtgcagtggtaccaacacacgctgaatgtggtgactttgtcacaattgatggtagggaagtcagggttctcaaac

SEQ ID NO: 174845 - DNA, 80 bp, synthetic construct
  source 1..80: mol_type = other DNA
ccaaaagcggacgcggtcggagtctacggttgagtctttcttcgcaagaggagcttgtgtggccattattgaagtggata

SEQ ID NO: 174846 - DNA, 80 bp, synthetic construct
  source 1..80: mol_type = other DNA
aagacaaatggtacacccagcaggacctgtgcgacgttaatcttttgtcacttgcggtttctgcggcttcctttagacat

SEQ ID NO: 174847 - DNA, 80 bp, synthetic construct
  source 1..80: mol_type = other DNA
ggcatatatgtactaaaaaacagtatatacaatggcaacctctccaacctacatggaggagagtggcaaacaaacagaca

SEQ ID NO: 174848 - DNA, 80 bp, synthetic construct
  source 1..80: mol_type = other DNA
cagtcctaggtcagcggccgcgtggaggagaacccgggtgacggcggtgtagaggcccccgagtgcccgtcgcgtgtctg

SEQ ID NO: 174849 - DNA, 80 bp, synthetic construct
  source 1..80: mol_type = other DNA
tgcacaaccccatgcaatagacctggcagatgaggctagacgaaccccaccagcgatggtggtctagcctgcgtggctgc

SEQ ID NO: 174850 - DNA, 80 bp, synthetic construct
  source 1..80: mol_type = other DNA
gatctggcggctcgttttggacgtcctgtcggtaccagaccacctacgactccccagccaccgtcagtgagatccgtgcc

SEQ ID NO: 174851 - DNA, 80 bp, synthetic construct
  source 1..80: mol_type = other DNA
atcgtggagaaaaaatgtgatcgttagttagctaggtgagacttacagctatccatccgtctagtttttcgttgtaatga

SEQ ID NO: 174852 - DNA, 80 bp, synthetic construct
  source 1..80: mol_type = other DNA
tttaatagaaaacttcctgggcagatcagcactgtgggcgactgtgacaatggacaatggttttaaaacctggaaaataa

SEQ ID NO: 174853 - DNA, 80 bp, synthetic construct
  source 1..80: mol_type = other DNA
ataaatgccgttttcgtggcagcgtgtcatgccgcgagtcacaaactccatcaaactgtcggccacgatgcaaacgtgct

SEQ ID NO: 174854 - DNA, 80 bp, synthetic construct
  source 1..80: mol_type = other DNA
ggatagtagacatgaaaacagctatacttggaacttcccacgtcaactcaatggatctgagcacttcagctggatattct

SEQ ID NO: 174855 - DNA, 80 bp, synthetic construct
  source 1..80: mol_type = other DNA
catatgtgacaataggacgcacaaattacaacaggccaattaaacccattattaagaagagagaccaaataacacaatac

SEQ ID NO: 174856 - DNA, 80 bp, synthetic construct
  source 1..80: mol_type = other DNA
ggaagtgccggcactgaccgcggttgaaacaggggcgacgagtagcgttaccccatcagatctggttcaaacccggcatg

SEQ ID NO: 174857 - DNA, 80 bp, synthetic construct
  source 1..80: mol_type = other DNA
aagaaataaggcttggttaacagtggtttcagccgttaccagcgcaattagtatactgcttttggtgaccaaaatcttca

SEQ ID NO: 174858 - DNA, 80 bp, synthetic construct
  source 1..80: mol_type = other DNA
tgtcaaagatgttctagagaaagggattccaacattacaatctccaactgtagaagcatgtggttattcagacagaatca

SEQ ID NO: 174859 - DNA, 80 bp, synthetic construct
  source 1..80: mol_type = other DNA
gtttatgcactgtacaaactgatgtgtatagcacaaggtccttataccggcttaccacaacccaaaccaagaaaaccaga

SEQ ID NO: 174860 - DNA, 80 bp, synthetic construct
  source 1..80: mol_type = other DNA
taatagtagggttagtagtactaagaatagtaatatacattttgcagatgctagcaagacttagaaagggctataggcca

SEQ ID NO: 174861 - DNA, 80 bp, synthetic construct
  source 1..80: mol_type = other DNA
tgtacgcggagtataatggcttgagactgggcttccaccaagggttacctgtgttgaatacaccaggaagcaaccaattt

SEQ ID NO: 174862 - DNA, 80 bp, synthetic construct
  source 1..80: mol_type = other DNA
atgtgtggagatgagtggacctccaaagtagaagtgaatttcttaattttgggaatgcacattgcaggaaacggagaaat

SEQ ID NO: 174863 - DNA, 80 bp, synthetic construct
  source 1..80: mol_type = other DNA
tggatccaggagctgtttcgcactgcggtggaggtagagactgccttcatcgaggctcgtggagaggtggttaccttggt

SEQ ID NO: 174864 - DNA, 80 bp, synthetic construct
  source 1..80: mol_type = other DNA
ccgtgttcaacacctttaaaactgaggagcaccttaagtgccctccagtaaaagaatgcaaacaaatggacccatctaat

SEQ ID NO: 174865 - DNA, 80 bp, synthetic construct
  source 1..80: mol_type = other DNA
tggacttttgtaaaaggcttaaacagctggacattttagaaagacaagtcacaacaatgcacgtttccaatccgacacaa

SEQ ID NO: 174866 - DNA, 80 bp, synthetic construct
  source 1..80: mol_type = other DNA
acaatgccaccactgaaccccccgtccaaattttattctgggggcgtcacctgaaaccttgttttcgagcacctcacata

SEQ ID NO: 174867 - DNA, 80 bp, synthetic construct
  source 1..80: mol_type = other DNA
ttgagacatttcctgtgtgctgaggaacaaggtgtaaccgactacatacatatgttaggtgaagcttttggcaatggctt

SEQ ID NO: 174868 - DNA, 80 bp, synthetic construct
  source 1..80: mol_type = other DNA
tcctcccctccaggcccgagcctctccctcgcggagaggggcctctttgggccctcaagtccagccccaccgagacccga

SEQ ID NO: 174869 - DNA, 80 bp, synthetic construct
  source 1..80: mol_type = other DNA
cgcaggttgcggagccggttgacatcatgagcaagggcccaggtgagggaccaggtgggtggtgtgtgcccggtggattg

SEQ ID NO: 174870 - DNA, 80 bp, synthetic construct
  source 1..80: mol_type = other DNA
gattcatagcctttttcatcgccggcatcctcttcagggcgataaaaaaccacttccttccccgcgaaactcttcaatgc

SEQ ID NO: 174871 - DNA, 80 bp, synthetic construct
  source 1..80: mol_type = other DNA
atcctgttcgcttctccgttggtgatggcatcaacgaatgatggttatatcaatgcttcaacggtttcaggtagtagagc

SEQ ID NO: 174872 - DNA, 80 bp, synthetic construct
  source 1..80: mol_type = other DNA
gctcatggaaggtttcctcatttttcccgtcatagaaaggggacatttccacagtctgcccggtggtggtcacaaagaag

SEQ ID NO: 174873 - DNA, 80 bp, synthetic construct
  source 1..80: mol_type = other DNA
tgaacagtttggaagcataccgtatccctgtccattcagttacagagacaggtgctcaagtgtttggtttcaccctacaa

SEQ ID NO: 174874 - DNA, 80 bp, synthetic construct
  source 1..80: mol_type = other DNA
tgaccagagattacaatacacaatggtgggtgaaattttgaactactacacccattggacgggttcgctaagattcacat

SEQ ID NO: 174875 - DNA, 80 bp, synthetic construct
  source 1..80: mol_type = other DNA
gtcgctgatgttgcccgggaatctggggtacctgcaatgcagcctcagtactttgacctccccttaactcaacccattag

SEQ ID NO: 174876 - DNA, 80 bp, synthetic construct
  source 1..80: mol_type = other DNA
gtcttgaatggattgctaacaaaatctcaaaattgattgaatggataaaaaacaaagtcctgccgcaagccaaagagaaa

SEQ ID NO: 174877 - DNA, 80 bp, synthetic construct
  source 1..80: mol_type = other DNA
tttcacgataccgcactgtaacaaggtaatttggatacgacactataatcgaaccacacacggaaactacttcccaatac

SEQ ID NO: 174878 - DNA, 80 bp, synthetic construct
  source 1..80: mol_type = other DNA
ccggtgcgcgtgccagaagtcaaggactgcccgtaatgatgacccccggctctggccaatttatgaccactgatgattat

SEQ ID NO: 174879 - DNA, 80 bp, synthetic construct
  source 1..80: mol_type = other DNA
tctacgttttagctttatgttctgtggtacagctaatacaacacttaaagtgctcattgcttacacgccaccagggatca

SEQ ID NO: 174880 - DNA, 80 bp, synthetic construct
  source 1..80: mol_type = other DNA
gcaagacggacggacaacccaccgactccagtagacaccctagagcaatacaagtggcggacccggaacaaatgggaccc

SEQ ID NO: 174881 - DNA, 80 bp, synthetic construct
  source 1..80: mol_type = other DNA
tcacttgcggttagcgcatgttccttcctgcatccgtttgtgccaccagaaagtgacaacatatgcataacgttccaggt

SEQ ID NO: 174882 - DNA, 80 bp, synthetic construct
  source 1..80: mol_type = other DNA
tgtgtaccctggataagtcaaacacattacaggtttgtggcagatgatgtttacacagacgcaggttttgtgacgtgctg

SEQ ID NO: 174883 - DNA, 80 bp, synthetic construct
  source 1..80: mol_type = other DNA
tcaccttgttgtaccttggatcagctctcatttcttcagaagaaccagaaaggataattacacagagagtgggttcgtta

SEQ ID NO: 174884 - DNA, 80 bp, synthetic construct
  source 1..80: mol_type = other DNA
tcaggtttgattcagaagtaaccttggtgccttgtattgctggtcggggagatgacatcggacacgttgtaatgcaatat

SEQ ID NO: 174885 - DNA, 80 bp, synthetic construct
  source 1..80: mol_type = other DNA
aaggttggttagtgaacatctccagtcaagttcagttggaacgaaacataaacagagccatgaccattcttcaagctgtc

SEQ ID NO: 174886 - DNA, 80 bp, synthetic construct
  source 1..80: mol_type = other DNA
ctatactaaaggggctgtttcataacagttatcacgaagaagacaaaagcttggctgaatttttgatggatagaaacatt

SEQ ID NO: 174887 - DNA, 80 bp, synthetic construct
  source 1..80: mol_type = other DNA
acatactatgaaacagtacaagtactagcccaattatctccgaatttccagccggccctcaaaccctcaggtaactcaag

SEQ ID NO: 174888 - DNA, 80 bp, synthetic construct
  source 1..80: mol_type = other DNA
cacataaactctacctttgctaatgctaccactccagaatatgaataccacacaggctggttttcaccagtatttatagg

SEQ ID NO: 174889 - DNA, 80 bp, synthetic construct
  source 1..80: mol_type = other DNA
acttgacactgtgaggtatgactacggccactatctcataatgttggggccattccagccatggagcggactgacggccc

SEQ ID NO: 174890 - DNA, 80 bp, synthetic construct
  source 1..80: mol_type = other DNA
ggaaggccatccaatttgtggacaaaatgacacgcaccagatacactgttgatgagttgaccactttgattgtgaatgaa

SEQ ID NO: 174891 - DNA, 80 bp, synthetic construct
  source 1..80: mol_type = other DNA
gctgttggcgtgcattcacggcatctggggtgaccggggccatcgggtttacttttcacacgtagacctgggaagtttga

SEQ ID NO: 174892 - DNA, 80 bp, synthetic construct
  source 1..80: mol_type = other DNA
actttcagagagacttttgctcagtacctctgctaactgtcaacgcaaccgcatgtaatttgcggtttccgttcggctca

SEQ ID NO: 174893 - DNA, 80 bp, synthetic construct
  source 1..80: mol_type = other DNA
gctcaagaattaataacgcatccagggaagtagtgacatggttctcagacaaagtcaaatctatgcttagctttgttgaa

SEQ ID NO: 174894 - DNA, 80 bp, synthetic construct
  source 1..80: mol_type = other DNA
gatgcaggaaaataaaatcatcctaggacaggaacaggaaggatcttactacaaagaaggggtacctctagaagcaacag

SEQ ID NO: 174895 - DNA, 80 bp, synthetic construct
  source 1..80: mol_type = other DNA
tcgttgttccaaaagtagagcataaagagaaagaaaagtagcgtaacgatgaagccgaaaacgacgagggtcggcagggc

SEQ ID NO: 174896 - DNA, 80 bp, synthetic construct
  source 1..80: mol_type = other DNA
aaaaccgaggtggtcgcccagtcgtccacgctgtcgacggcctctgtcagtgccgggttgtcaaaaccgccatcggacgc

SEQ ID NO: 174897 - DNA, 80 bp, synthetic construct
  source 1..80: mol_type = other DNA
tcttccagcagctgataaagacgcagcagggggtccacatagacccatccctactgtaggccccagtcagtggctcttcc

SEQ ID NO: 174898 - DNA, 80 bp, synthetic construct
  source 1..80: mol_type = other DNA
caaaaatgatagactcaacagatgaatccgtgggctttgtcccaataggatacaactttgcaaaaggcctaatgccagac

SEQ ID NO: 174899 - DNA, 80 bp, synthetic construct
  source 1..80: mol_type = other DNA
gggtataactgactatgtccacatgttaggtgaagcctttggtttggggtttgtagatagtgttaaagatcaaataaatg

SEQ ID NO: 174900 - DNA, 80 bp, synthetic construct
  source 1..80: mol_type = other DNA
agtacaccacttgcaaatactgggaccgtcctcctagaaccaaccacctttcacttgtcggtgtctacctctataagtca

SEQ ID NO: 174901 - DNA, 80 bp, synthetic construct
  source 1..80: mol_type = other DNA
tctcataccattaatggttgaccaacaagggaaaagaatatttggtacagacctgtttataggagatggagtttttaaaa

SEQ ID NO: 174902 - DNA, 80 bp, synthetic construct
  source 1..80: mol_type = other DNA
acacaccacgcacctagattggggtgcgcgcgctagcgcgcgcaccccaatgcgccccgccctcgttccgacccgcttgc

SEQ ID NO: 174903 - DNA, 80 bp, synthetic construct
  source 1..80: mol_type = other DNA
cagaggtggcaaacagcaacgaaagtgagtggggccagacttcgccataaggcctttatcttcttgccattggatagtgg

SEQ ID NO: 174904 - DNA, 80 bp, synthetic construct
  source 1..80: mol_type = other DNA
ctctagtagatgctactaccaatcaaacctggtcacattacgtaaaccctaataaacttacaacaacacctacatcagaa

SEQ ID NO: 174905 - DNA, 80 bp, synthetic construct
  source 1..80: mol_type = other DNA
aaacaccttagtattagctccactatggataatgctaaccaagaacattataaacaaaacttgtttaacaaaattgagct

SEQ ID NO: 174906 - DNA, 80 bp, synthetic construct
  source 1..80: mol_type = other DNA
tggataccaagaccacccagagcattaccatacacttccataggaagaaccaactttccaaaaacacccaataaagtcat

SEQ ID NO: 174907 - DNA, 80 bp, synthetic construct
  source 1..80: mol_type = other DNA
aggtgattaagctggatgctgatccagttgaatcccaatcaacactggagatagctggcttggttagaaagaatcttgtt

SEQ ID NO: 174908 - DNA, 80 bp, synthetic construct
  source 1..80: mol_type = other DNA
tatggaatacatagtattgattatagctttggaaaaagttgaaactgatggcgttttccctgacgaccgtgctgttacgg

SEQ ID NO: 174909 - DNA, 80 bp, synthetic construct
  source 1..80: mol_type = other DNA
atgggagcacaagtgtcaacacagaaaaccggggctcacgagaccagtttgagtgccagtgggaactctattatacacta

SEQ ID NO: 174910 - DNA, 80 bp, synthetic construct
  source 1..80: mol_type = other DNA
acgaagaagcgggcagaggaaggtaagagtgccatctatctgtacttttatttattgcatcacaagtcacatcaataata

SEQ ID NO: 174911 - DNA, 80 bp, synthetic construct
  source 1..80: mol_type = other DNA
caagcaatctccgctttcgctgtaacagcagggatggtgtatgtggtgtacaagctgtttgcaggttttcaaggagctta

SEQ ID NO: 174912 - DNA, 80 bp, synthetic construct
  source 1..80: mol_type = other DNA
taccgctcagtacacccttaggatactattccaagaaaaactagcccagcacaacttctggtcagccagcaacgaggacc

SEQ ID NO: 174913 - DNA, 80 bp, synthetic construct
  source 1..80: mol_type = other DNA
aaatatggccatggctacacagttgtgtaaggattgtcacaaaccagcaaatttttcatcatgctgtcctttagtttgtg

SEQ ID NO: 174914 - DNA, 80 bp, synthetic construct
  source 1..80: mol_type = other DNA
gtgtaacatttataccaccaatggccgatttaccagataagggaaaaccatttgattctaaatttgtactgtgtagtacc

SEQ ID NO: 174915 - DNA, 80 bp, synthetic construct
  source 1..80: mol_type = other DNA
agtggagaactttcttagtaggtcagcgtgtgtctattacgccacgtacaaaacgactgccagtaaacctgaggaccagt

SEQ ID NO: 174916 - DNA, 80 bp, synthetic construct
  source 1..80: mol_type = other DNA
ctgtgagcaacaaggttccatcaccagtattacagatgtgagggagttgggctacgctccaatcaacacccccaccaaga

SEQ ID NO: 174917 - DNA, 80 bp, synthetic construct
  source 1..80: mol_type = other DNA
cacgcacgaaaatgccaatgttgccacaaatggatctcacatcacatataatcagataaacttttataaggatagttatg

SEQ ID NO: 174918 - DNA, 80 bp, synthetic construct
  source 1..80: mol_type = other DNA
ctatcttcaacaccatcataaacaatatcataattaggaccttagttttggacacatataagggaattgagttagataaa

SEQ ID NO: 174919 - DNA, 80 bp, synthetic construct
  source 1..80: mol_type = other DNA
cctttgtacgcctgttttatctcccttcccaatgtaatttagaagctcttaaatcaaggctcaataggtggggcgcaaac

SEQ ID NO: 174920 - DNA, 80 bp, synthetic construct
  source 1..80: mol_type = other DNA
atcaactcgcgccctggaagggatttttgaagcaactcatcgattgatttacggcgctaaggatgactctggtcagagat

SEQ ID NO: 174921 - DNA, 80 bp, synthetic construct
  source 1..80: mol_type = other DNA
gctttgttgtaggtggaccagttggtgattttgaacttttgctttgccacggaacggtctgcgttgtcgggaagatgcgt

SEQ ID NO: 174922 - DNA, 80 bp, synthetic construct
  source 1..80: mol_type = other DNA
atatggagagtggcctcaatacctgtcagaccttgatgcaacttctgttgacaaacccacacatcctgaaacttcttcag

SEQ ID NO: 174923 - DNA, 80 bp, synthetic construct
  source 1..80: mol_type = other DNA
aacaacagtaatgacagcaggtccatcagatttgtatgtacactctagtaattttatttacagaaacttacacctgtgtg

SEQ ID NO: 174924 - DNA, 80 bp, synthetic construct
  source 1..80: mol_type = other DNA
gacccagtgacatgtttgtacacactaaagaggctgtttataaatgtgctcatttaactacaccttctgagaaaactata

SEQ ID NO: 174925 - DNA, 80 bp, synthetic construct
  source 1..80: mol_type = other DNA
ttagctactacaatcataggagagcttgctagctactacacccattggacaggcagcttgcgctttagtttcatgttctg

SEQ ID NO: 174926 - DNA, 80 bp, synthetic construct
  source 1..80: mol_type = other DNA
acgcagagtaaggagacggaggtgggggaaaagacggtggcgacgcagacggtacacccgtagacgaaagagacgcatta

SEQ ID NO: 174927 - DNA, 80 bp, synthetic construct
  source 1..80: mol_type = other DNA
aagtactatgaagttgatggtggaatgccatcaggctgtagtggcactagcatattcaactccatgatcaataatatcat

SEQ ID NO: 174928 - DNA, 80 bp, synthetic construct
  source 1..80: mol_type = other DNA
gcgggcgttgcaggatccagtggcttctctgctcccctccacaccatcctggctgacataaccaaatttgcccttaccca

SEQ ID NO: 174929 - DNA, 80 bp, synthetic construct
  source 1..80: mol_type = other DNA
agatacctggtacagaggcactgcatacaacaatagcattacgaacgttcctttacaggcagcacaactatatcacgaca

SEQ ID NO: 174930 - DNA, 80 bp, synthetic construct
  source 1..80: mol_type = other DNA
ttacagagaccctaaagtagactatattgttacatacaccactacacctccatttaaactgaacaaatacagtagtagca

SEQ ID NO: 174931 - DNA, 80 bp, synthetic construct
  source 1..80: mol_type = other DNA
ctctccccttgccctaggctctggccgttgcgcccggcggggtcaactccatgactagcatggagctgtaggagtctaaa

SEQ ID NO: 174932 - DNA, 80 bp, synthetic construct
  source 1..80: mol_type = other DNA
aaaaagagaaagctagtactgactctgtggaacccccaagatgtcaggagatgcacaatcaggggcatgatacccctgat

SEQ ID NO: 174933 - DNA, 80 bp, synthetic construct
  source 1..80: mol_type = other DNA
ctacaatctagctgtgtgttgtgcgtaccctggataagccagacacattacaggtttgtagcagatgatgtttacacaga

SEQ ID NO: 174934 - DNA, 80 bp, synthetic construct
  source 1..80: mol_type = other DNA
aaacttttcaaattactcacaagaactagaaaacatactatatacaaggggctcctactggaactcttttcacgcccttg

SEQ ID NO: 174935 - DNA, 80 bp, synthetic construct
  source 1..80: mol_type = other DNA
tgccgctcgcgacgcttttcctcttcgtcgtaatagccgacggccgccgaacgggcggcgtgggcgtcggcggccggtgc

SEQ ID NO: 174936 - DNA, 80 bp, synthetic construct
  source 1..80: mol_type = other DNA
atggggctcacaaatggacctgacagatccactttgcattgaggatgatacagaaaactgcaaacaaaccatgtccccga

SEQ ID NO: 174937 - DNA, 80 bp, synthetic construct
  source 1..80: mol_type = other DNA
agaacagacacttcatggaatttagaacagcaatcaagaatgtgggtcccagtgatctttgtgtacatactaaggatgct

SEQ ID NO: 174938 - DNA, 80 bp, synthetic construct
  source 1..80: mol_type = other DNA
ttgtttcagcaagtaatggagctgtagtcaagtatttcaacatcaactactacaaagattcagctagttcaggtttatcc

SEQ ID NO: 174939 - DNA, 80 bp, synthetic construct
  source 1..80: mol_type = other DNA
cctcggcgggacctacataaaatggtggacaatctcttccgggtcaaaggtcacgcctacgtcatgtgtgacgtaggagg

SEQ ID NO: 174940 - DNA, 80 bp, synthetic construct
  source 1..80: mol_type = other DNA
ctatcactgtgacattccatgtaatatcaacgatgaacgtaaacaacgtagactactttgacaactgtaacaactataaa

SEQ ID NO: 174941 - DNA, 80 bp, synthetic construct
  source 1..80: mol_type = other DNA
tcagggcttgtgggggttatagacttgcccgctcagtctaccaaaccagtgggctttgctgcatggacaatagatgttat

SEQ ID NO: 174942 - DNA, 80 bp, synthetic construct
  source 1..80: mol_type = other DNA
ccggaatccccatatcacagttgacgatatgcccccatcagtggatcaacttgcggaccaataactgcgccacaataata

SEQ ID NO: 174943 - DNA, 80 bp, synthetic construct
  source 1..80: mol_type = other DNA
gtataacagcaactagcggatctgcaccctcaataccagttacagttaccattgcacctatgtttttggaattatcaggc

SEQ ID NO: 174944 - DNA, 80 bp, synthetic construct
  source 1..80: mol_type = other DNA
atgaacgtgaggatctgcgtgccgccaacgccacgtacgcgcagatggtcaagaaactggagcagatcgagaaagccggt

SEQ ID NO: 174945 - DNA, 80 bp, synthetic construct
  source 1..80: mol_type = other DNA
agagatgaaagtcatttagagatacaggcatattggaacttaacaccagaaaaaggatggctctcctcttatgcagtaag

SEQ ID NO: 174946 - DNA, 80 bp, synthetic construct
  source 1..80: mol_type = other DNA
attgggccctataccagtgcagtcaggatatatttcaaaccaaagcatgtgaaagcgtgggtacctcgaccaccgcggtt

SEQ ID NO: 174947 - DNA, 80 bp, synthetic construct
  source 1..80: mol_type = other DNA
catcggtcaaaatcccgatggcgctgactgcgatggctacacaggccagcctgtccactacatcgacgacatcggtcaaa

SEQ ID NO: 174948 - DNA, 80 bp, synthetic construct
  source 1..80: mol_type = other DNA
gcccactacagagttcaacgaacagcaatgcaagtgtgttataactgacatcccattatatgctgctctattcgggtacg

SEQ ID NO: 174949 - DNA, 80 bp, synthetic construct
  source 1..80: mol_type = other DNA
tagactggaagtggaccttgacaaggctgtgttcagcaaatacaaagggaatgtagaaatacaattcaaccagtacatgg

SEQ ID NO: 174950 - DNA, 80 bp, synthetic construct
  source 1..80: mol_type = other DNA
taggacctacttacagcaacacaaccacaccagaatacgaatatcacgcaggctggtactctccagtgttcataggcccc

SEQ ID NO: 174951 - DNA, 80 bp, synthetic construct
  source 1..80: mol_type = other DNA
caccaacagagtttcccccggaggataacaccccaccgagggaaccaggggatgagtgggtaatagaaatcctaagagag

SEQ ID NO: 174952 - DNA, 80 bp, synthetic construct
  source 1..80: mol_type = other DNA
tctcatggttactcctttaacggtactgaaggtgaccaagatagaaatatattgtggcagggtctctggagcacaggcag

SEQ ID NO: 174953 - DNA, 80 bp, synthetic construct
  source 1..80: mol_type = other DNA
cagcaagaatacatggacatcttaacattgatgctagattcatcaaataaattcctgcctttgtatgctgctgaaaataa

SEQ ID NO: 174954 - DNA, 80 bp, synthetic construct
  source 1..80: mol_type = other DNA
tcctccacagcaggccgataacccgcagccacggcctactggtggggacggtggcgccgccggtggcgcccaagatggag

SEQ ID NO: 174955 - DNA, 80 bp, synthetic construct
  source 1..80: mol_type = other DNA
caacttctatgacggatggtcacatttcacacaggacggggtgtacggctttaactccctcaataatatgggttccatat

SEQ ID NO: 174956 - DNA, 80 bp, synthetic construct
  source 1..80: mol_type = other DNA
aaacacctagaaactctgagaaagtactactttttctgggagacatacccggcagcagccaacaccacacccgtgacaca

SEQ ID NO: 174957 - DNA, 80 bp, synthetic construct
  source 1..80: mol_type = other DNA
cccccctcaatttggtaacatagaagttagaaacatatatggccaatagcaggcgtggcgcaccagtcgcgtctcggtca

SEQ ID NO: 174958 - DNA, 80 bp, synthetic construct
  source 1..80: mol_type = other DNA
ttgctatactaggagtatcaaacaaggccccagccgcagggaatgagaaggagctgtttaccacctggagaataagttat

SEQ ID NO: 174959 - DNA, 80 bp, synthetic construct
  source 1..80: mol_type = other DNA
aggactaataacaaacggatcaggcacacaaaatatgtggcaaaaggtacaaaacacaattgcactatcaatagaaggta

SEQ ID NO: 174960 - DNA, 80 bp, synthetic construct
  source 1..80: mol_type = other DNA
agtctactacaattggactttcagaatcccaggacatatggcgaagctgtggacatctatgatacagcacctgggaacaa

SEQ ID NO: 174961 - DNA, 80 bp, synthetic construct
  source 1..80: mol_type = other DNA
atatggggaccatctatgcgcgtcatgttaatgattccagcccaggcggtttaaccagtaccattcgcatctacttcaaa

SEQ ID NO: 174962 - DNA, 80 bp, synthetic construct
  source 1..80: mol_type = other DNA
tggtaattggttagatcttacctcctgggtaaaatatgtatacttaggattttatgtagtagcaggaataataggactta

SEQ ID NO: 174963 - DNA, 80 bp, synthetic construct
  source 1..80: mol_type = other DNA
catgatgaacaacacactaagaaatttagagtgtggcgcatcaatttacaagaaatggcccagattaggcgtaaatatga

SEQ ID NO: 174964 - DNA, 80 bp, synthetic construct
  source 1..80: mol_type = other DNA
tcctggtcctgataacatacccacctgcgactgcaccacaggcacttattactgcaagagtagggacagatactatccag

SEQ ID NO: 174965 - DNA, 80 bp, synthetic construct
  source 1..80: mol_type = other DNA
atcgctgctatgctcggccgtccggaagaccagaaccctcctccgccacccggggctgtgagacccctacctgctctccc

SEQ ID NO: 174966 - DNA, 80 bp, synthetic construct
  source 1..80: mol_type = other DNA
caaaaagatatcccttctggaggaacaagccaatggtttcagctcagccagttcagaggatcaacaggctcttattattg

SEQ ID NO: 174967 - DNA, 80 bp, synthetic construct
  source 1..80: mol_type = other DNA
cgaaaagagcgcggtactggccatgaaatacgtgtttaactggaaatggagcggcaaccccatatctgaacaggttgtca

SEQ ID NO: 174968 - DNA, 80 bp, synthetic construct
  source 1..80: mol_type = other DNA
ttaacatgcataaacactctagctactccatggtgctttaaattcccagagctagacaaactaccaccagtggcaaacaa

SEQ ID NO: 174969 - DNA, 80 bp, synthetic construct
  source 1..80: mol_type = other DNA
taccagattattctatatatccgattcgagtttggtttgttgtctttcagagattatgactcatgctaaccagtgctatt

SEQ ID NO: 174970 - DNA, 80 bp, synthetic construct
  source 1..80: mol_type = other DNA
catatatatatcagctggatatggaggcaattgccaaggaaggtgcaaaatatggtcttacaataacacctgctgataaa

SEQ ID NO: 174971 - DNA, 80 bp, synthetic construct
  source 1..80: mol_type = other DNA
gacaaatcagaattttcaggggcacgacaaaagagtcaaatccagggtctgcctgtcaggctggcgagtggcacacaaca

SEQ ID NO: 174972 - DNA, 80 bp, synthetic construct
  source 1..80: mol_type = other DNA
agcagtgttgtccactaatttgtggtaaggccttgatactccagaataaaagaactaaggccagttattctataaacaca

SEQ ID NO: 174973 - DNA, 80 bp, synthetic construct
  source 1..80: mol_type = other DNA
ctaccaatattgacagagcagtgagtcaggcaaccaatttaatcaacactattctcatgttcatcaccacacttggtata

SEQ ID NO: 174974 - DNA, 80 bp, synthetic construct
  source 1..80: mol_type = other DNA
ttagctacaacaggaccaagtccaagtgtctcctacaggacatgcccctgtttttcatgtgctatggctacatagactgg

SEQ ID NO: 174975 - DNA, 80 bp, synthetic construct
  source 1..80: mol_type = other DNA
tctactagaacccacttggattgataaattcatttaaattttttagtaatgtagaaatctccctgagtaggagtaggatt

SEQ ID NO: 174976 - DNA, 80 bp, synthetic construct
  source 1..80: mol_type = other DNA
acaccagtgtccagagaggaagaccgtaagataaagatggctgcctctcatctggaacggtgggaagctcagcagttgtt

SEQ ID NO: 174977 - DNA, 80 bp, synthetic construct
  source 1..80: mol_type = other DNA
caggcgtgttgttcggaaacgcattcattttcccacaccagattatcaatttgagaactaataacagtgccacgctggtc

SEQ ID NO: 174978 - DNA, 80 bp, synthetic construct
  source 1..80: mol_type = other DNA
gaggtcgagaacttcaatgccactagtgaagcagacaagaggaaacagttcaccacttggccaatcacatacaccaatac

SEQ ID NO: 174979 - DNA, 80 bp, synthetic construct
  source 1..80: mol_type = other DNA
ggggatgacaagcaggtgggggctccaactgtagctgatacccgaccaagcaccagccaaaacacggagcgcattccagc

SEQ ID NO: 174980 - DNA, 80 bp, synthetic construct
  source 1..80: mol_type = other DNA
gaagattaccaggagaggcagaagaattatgattgctggaaactgcagttagagaaccaaactctagacgatctggacga

SEQ ID NO: 174981 - DNA, 80 bp, synthetic construct
  source 1..80: mol_type = other DNA
ttcgctcctctggaggtgtctggtggcattacacccagtgtacctataacagtgactatcgctccaatggacgcagagta

SEQ ID NO: 174982 - DNA, 80 bp, synthetic construct
  source 1..80: mol_type = other DNA
cgccacggacctgcgtcagctgtcgccgcgggacgcgtggatcgtgctggtggcgaccgtggtgcacgaggtggaccccg

SEQ ID NO: 174983 - DNA, 80 bp, synthetic construct
  source 1..80: mol_type = other DNA
tacaaccggccttaaaattccatatccaaataacactaacgctgaaattgctgcatctgatcaagtacacacacttctca

SEQ ID NO: 174984 - DNA, 80 bp, synthetic construct
  source 1..80: mol_type = other DNA
agaagactcaatactaaatgaaaaaactgcaaaagccctaatagtagacattcccctgtgggcagccttctttggctatg

SEQ ID NO: 174985 - DNA, 80 bp, synthetic construct
  source 1..80: mol_type = other DNA
ccatacccctggaaagtgccatgtatggaatggatggccttgaggcattagacttaactaccagtgcaggattcccttac

SEQ ID NO: 174986 - DNA, 80 bp, synthetic construct
  source 1..80: mol_type = other DNA
cgtgtggtggaggcagctaacgctggtgctcttgccagcccccgccgttcccgtaattacataggctgaaaagggcagga

SEQ ID NO: 174987 - DNA, 80 bp, synthetic construct
  source 1..80: mol_type = other DNA
caaccacagtctacgtcgtacatttcctggacatggtctacataatcatataaagcgctgcacttccgaatggctgagtt

SEQ ID NO: 174988 - DNA, 80 bp, synthetic construct
  source 1..80: mol_type = other DNA
acagcaagtaccagcattgacggctgctgagaccgggcacacttcacaggtggtacccagtgacacgatgcaaacgcgcc

SEQ ID NO: 174989 - DNA, 80 bp, synthetic construct
  source 1..80: mol_type = other DNA
agatcatatttttctgaaacacagggccaaattgtcgctaagaaatccacgattgaatgtaatcttcctagtatacacac

SEQ ID NO: 174990 - DNA, 80 bp, synthetic construct
  source 1..80: mol_type = other DNA
tgtgcctggcaggcgacagcacaacccacatgtttacaaaatatgagaatgcaaatccgggtgagaaagggggtgaattc

SEQ ID NO: 174991 - DNA, 80 bp, synthetic construct
  source 1..80: mol_type = other DNA
ggcaaaactctaggcctgtggagcgctgctttgccatcaagaattatgtcccgggcctggactcacaaagctgtgtgacg

SEQ ID NO: 174992 - DNA, 80 bp, synthetic construct
  source 1..80: mol_type = other DNA
gtcagaatatatatgagaatgaagcatgtcagggcatggatacctcgcccgatgcgcaaccaaaactacttgttcaaagc

SEQ ID NO: 174993 - DNA, 80 bp, synthetic construct
  source 1..80: mol_type = other DNA
cccatgtcagcagcccacctttccgctccccggtcccggtggcgtccctcctagactacaaatcgagaacccgaaacggc

SEQ ID NO: 174994 - DNA, 80 bp, synthetic construct
  source 1..80: mol_type = other DNA
ttgactagattggaaactggtgattggggccctacggcatccagaggatctaaaattatatctgtggatctaccaagcac

SEQ ID NO: 174995 - DNA, 80 bp, synthetic construct
  source 1..80: mol_type = other DNA
ccaatggtcactttcttaaaggatgagcttagaaaaccagagaaaatatcaaagggaaaaactagagttattgaggctag

SEQ ID NO: 174996 - DNA, 80 bp, synthetic construct
  source 1..80: mol_type = other DNA
ggaaattcctgattgcttacactcctccaggtggtagattaccccagagcaggaaagaagctatgttgggggtgcacatt

SEQ ID NO: 174997 - DNA, 80 bp, synthetic construct
  source 1..80: mol_type = other DNA
ttcggacatcagaaccaggcagtttacgttgcaggctataagatcatcaactaccacttagcaactgcagaagactttag

SEQ ID NO: 174998 - DNA, 80 bp, synthetic construct
  source 1..80: mol_type = other DNA
gtgttgcccgtgtctactttaaacccaaacatgtcaaagcttgggtgccccgcgcaccacgcttgtgcccgtatttgtat

SEQ ID NO: 174999 - DNA, 80 bp, synthetic construct
  source 1..80: mol_type = other DNA
atttaataattagattcattatggagacaatcaagggtgtttcagatatggccactaagatgattgattcaactgtcaat

SEQ ID NO: 175000 - DNA, 80 bp, synthetic construct
  source 1..80: mol_type = other DNA
ttaacgcaatacgttgagttgttcttatcaaataaaacacttaaatcaggtagtcacgttaatagtaatctgatactcgc

SEQ ID NO: 175001 - DNA, 80 bp, synthetic construct
  source 1..80: mol_type = other DNA
accccccacgagtatccagttctagaaaatctcctgatatcccgggctgccattattcccttgagtgttatagcttcctc

SEQ ID NO: 175002 - DNA, 80 bp, synthetic construct
  source 1..80: mol_type = other DNA
agaaagagagacatgggatcagtggtggacagattactggcaagtaacctggatcccagaatgggattttgtctcaaccc

SEQ ID NO: 175003 - DNA, 80 bp, synthetic construct
  source 1..80: mol_type = other DNA
cggacagagctagcgagaacattatcggggccgtcgctagacaatttaaattcgcccgagtgtgcaaaccacgtatttcc

SEQ ID NO: 175004 - DNA, 80 bp, synthetic construct
  source 1..80: mol_type = other DNA
acaaaacagcgagcaaatcagagacaaaataaaacagaacatgaaaagttactaccaaaaaatacttgatgaatcaacta

SEQ ID NO: 175005 - DNA, 80 bp, synthetic construct
  source 1..80: mol_type = other DNA
caccagaacaggcagatgagattaaagagatgatgcaagaagtcacaacacagagacatgagacaaatgttcaggctagg

SEQ ID NO: 175006 - DNA, 80 bp, synthetic construct
  source 1..80: mol_type = other DNA
ggatttcctacatggagttgtactctattattccggtaattttgtacgccagttttatcacccctccccttgtaacttag

SEQ ID NO: 175007 - DNA, 80 bp, synthetic construct
  source 1..80: mol_type = other DNA
acaacccggggcggacacggttatggagaggacactattaggtgagatcctcaactactatgcgaactggtcaggcagca

SEQ ID NO: 175008 - DNA, 80 bp, synthetic construct
  source 1..80: mol_type = other DNA
tcccaccaggcaatagccaccgcgccttcctacggtcctggggccggagcggtcgccccggccggcggctactttacctc

SEQ ID NO: 175009 - DNA, 80 bp, synthetic construct
  source 1..80: mol_type = other DNA
ccccacgttcctgttcgaccaccggcggcggttgattttggagcagcatcgatccacgttgatcggctccaaggaggaac

SEQ ID NO: 175010 - DNA, 80 bp, synthetic construct
  source 1..80: mol_type = other DNA
tggaggtaatgccaacgttaaatataagcacacccatccaggagacagaggacacactatgagaccatcggatgtacgag

SEQ ID NO: 175011 - DNA, 80 bp, synthetic construct
  source 1..80: mol_type = other DNA
agttgtcatatgtaggagcagctgacagcaaggtgcgttatgaccacacgcacccaggggaggaaggacacactttctca

SEQ ID NO: 175012 - DNA, 80 bp, synthetic construct
  source 1..80: mol_type = other DNA
gaaaacatgttctaccactttctaggaagatctggttacactatacatgtacaatgtaattctagcaagttccaccaagg

SEQ ID NO: 175013 - DNA, 80 bp, synthetic construct
  source 1..80: mol_type = other DNA
atacaaactagtaaaagatgaatacaatgcagtctatacaaccactgccacataccctccagaatacacacaaagaaact

SEQ ID NO: 175014 - DNA, 80 bp, synthetic construct
  source 1..80: mol_type = other DNA
tatgtgtcaatagggcgcaccaactatgacaggccaaatataaaaccagttattgaaaagagaactagtatcaagcaata

SEQ ID NO: 175015 - DNA, 80 bp, synthetic construct
  source 1..80: mol_type = other DNA
ccatgatccacattcctggggaggtgaccaacctgcttgagttatgtcagatagaaaccatattagaagtgaacaacgtt

SEQ ID NO: 175016 - DNA, 80 bp, synthetic construct
  source 1..80: mol_type = other DNA
caataatgaagctattattgaaaacttcctaggtagatcatcattgtgggctgaattgagccttggagacaataaatttt

SEQ ID NO: 175017 - DNA, 80 bp, synthetic construct
  source 1..80: mol_type = other DNA
aacgtgccggcgacggcgccctaaatacgcgctcgcgccggtgggctgctgcccccccccccgcgcatgcgcgcgggtcc

SEQ ID NO: 175018 - DNA, 80 bp, synthetic construct
  source 1..80: mol_type = other DNA
tgagagataggaggacatcagcaaattacccattactggcagtagtggaacaacttagaatggagaacaacactagggac

SEQ ID NO: 175019 - DNA, 80 bp, synthetic construct
  source 1..80: mol_type = other DNA
cgactcgcctgctataaattgctgcggcacccaggagtgttctcccgccacacgacctgatgagcattgcaaggtgttca

SEQ ID NO: 175020 - DNA, 80 bp, synthetic construct
  source 1..80: mol_type = other DNA
cgcatggcgggcaacattgattacccagcttcacctcatcgggcttacacattttacttcccccaagctgtagtaaaaac

SEQ ID NO: 175021 - DNA, 80 bp, synthetic construct
  source 1..80: mol_type = other DNA
aaacaggccaatcagcgtctactacgtacacttcctggggtgtgtcctacctctgtatataaccagaaggggtgacgaat

SEQ ID NO: 175022 - DNA, 80 bp, synthetic construct
  source 1..80: mol_type = other DNA
caatcacgatcacagtcgcgcctatggacgccgagtacaacgggctacgactggcgggacaccaagggttacctaccatg

SEQ ID NO: 175023 - DNA, 80 bp, synthetic construct
  source 1..80: mol_type = other DNA
gagcgcagttgctagggtagcagacacaattagcagtggtccgacgaactcccaagcagtcccagcattgacggcggttg

SEQ ID NO: 175024 - DNA, 80 bp, synthetic construct
  source 1..80: mol_type = other DNA
caacttagaagttaatcacagatgatcgacaggaagctcagtgagccaactgagccttgatcaagcacttctgttacccc

SEQ ID NO: 175025 - DNA, 80 bp, synthetic construct
  source 1..80: mol_type = other DNA
gagaatttaaaaatgaagccccttatgatggtcagcttgaacatatcatatcacaaatggcttacattacaggttctact

SEQ ID NO: 175026 - DNA, 80 bp, synthetic construct
  source 1..80: mol_type = other DNA
aaacattcttaccaatgggtctcaccaaactttcactgttattaattactataaggatgcagcaagttcttcatcagcta

SEQ ID NO: 175027 - DNA, 80 bp, synthetic construct
  source 1..80: mol_type = other DNA
gcaaaagctcttggctccgctgtcgacggcgccatctctggcgtcaaggctggggccaaagctgcctcttccaaggtcaa

SEQ ID NO: 175028 - DNA, 80 bp, synthetic construct
  source 1..80: mol_type = other DNA
aaatctataatacagagggtgggatgccgtctggcatatgtggtacatccattttcaatactatgataaataatatcata

SEQ ID NO: 175029 - DNA, 80 bp, synthetic construct
  source 1..80: mol_type = other DNA
aggaggcccagtgccggctagggctgatagctatgcatggcaaacatccaccaaccccagcatcttctggactgaaggta

SEQ ID NO: 175030 - DNA, 80 bp, synthetic construct
  source 1..80: mol_type = other DNA
ggggcatcactcttaaagagatggcacagatcagaaggaagtgtgaaatgtttacatatcttagatttgattctgagatt

SEQ ID NO: 175031 - DNA, 80 bp, synthetic construct
  source 1..80: mol_type = other DNA
ctaccggctcaggcggccttgtcgccgccactgaccacctggtcactaccgccgtttccgtccacgcggatacctgacag

SEQ ID NO: 175032 - DNA, 80 bp, synthetic construct
  source 1..80: mol_type = other DNA
tcgacctggcgggtgccccggggcgatgtcgcctcccgtgagcgtcactggtacctttcagtacgagacagccacgatgc

SEQ ID NO: 175033 - DNA, 80 bp, synthetic construct
  source 1..80: mol_type = other DNA
agacacaaacaagtagactttataggccagtatgacattacagagccctacaaactagacaaatacagctgtcccagcta

SEQ ID NO: 175034 - DNA, 80 bp, synthetic construct
  source 1..80: mol_type = other DNA
ccattgggccatttcctaaaagatagtagcccgcagtgtacaacgctgcaccatccacgagtggaaagctcagagcgcta

SEQ ID NO: 175035 - DNA, 80 bp, synthetic construct
  source 1..80: mol_type = other DNA
gctatgacaatactacaagcaattaccacctttgcagcagttgcaggcgttgtgtacgtgatgtaccgcctgtttgcagg

SEQ ID NO: 175036 - DNA, 80 bp, synthetic construct
  source 1..80: mol_type = other DNA
tacctaaggtttgacctggaggtaactttcgtcatcacgagtgcgcaggtaacatccacgaaccagagccaagacgcgcc

SEQ ID NO: 175037 - DNA, 80 bp, synthetic construct
  source 1..80: mol_type = other DNA
aatctcaataacagcacaaagttgttacttaattccaaagctattgataacaaattaggtttcaatagatcaaacacctc

SEQ ID NO: 175038 - DNA, 80 bp, synthetic construct
  source 1..80: mol_type = other DNA
agcatatttaacaccattattaataacataataataagaacactagtactggatacatacaaatatgttaatctagataa

SEQ ID NO: 175039 - DNA, 80 bp, synthetic construct
  source 1..80: mol_type = other DNA
ccccctagaagcaacctgaaagacagccccttttacccctggatgccaaaacagtctcagttccgtgtaacctttaaact

SEQ ID NO: 175040 - DNA, 80 bp, synthetic construct
  source 1..80: mol_type = other DNA
tttcctcagggttgctcacacttatgacacagaagaaggaagagataaatttctatcatctaatggtgtgattacaatac

SEQ ID NO: 175041 - DNA, 80 bp, synthetic construct
  source 1..80: mol_type = other DNA
aacagcacaaacagccagaaaagcatacacagcagcagcaaaaaaaataataactccctggatttttggtaacccagatg

SEQ ID NO: 175042 - DNA, 80 bp, synthetic construct
  source 1..80: mol_type = other DNA
caaagaaaaaaccacctcctgacatgagccactggtccagacccgtacaccatgcggcaggcatcgagcatctctggtgg

SEQ ID NO: 175043 - DNA, 80 bp, synthetic construct
  source 1..80: mol_type = other DNA
attttgctaaacagactccgaggtgctcttggacactgagtgggcatatcagtaacgaaagtgagtggggccagacttcg

SEQ ID NO: 175044 - DNA, 80 bp, synthetic construct
  source 1..80: mol_type = other DNA
ctaatgctcttaagcaaacacagaatagtagtaaagagccaacaaacaaaaaaagggggcaaaaaatatgttaaatttca

SEQ ID NO: 175045 - DNA, 80 bp, synthetic construct
  source 1..80: mol_type = other DNA
cagaatatgtactaggtacagtgtcaggcaacactggagttgagcacacacatccaccgtttgccaccacgcaacccggc

SEQ ID NO: 175046 - DNA, 80 bp, synthetic construct
  source 1..80: mol_type = other DNA
ttgcagggccatagacggccgccagcccagcggcgagggcaaccagcgactctagaggatccccgccacggttgatgaga

SEQ ID NO: 175047 - DNA, 80 bp, synthetic construct
  source 1..80: mol_type = other DNA
caaatggacgttccctaacgaccagctagacctagctagatacaggggctgtgaactcacattttacagaactaaagcca

SEQ ID NO: 175048 - DNA, 80 bp, synthetic construct
  source 1..80: mol_type = other DNA
gaggaggtgaaggtagccgtggagggcaacagcagtcaggactctgcggtggccattgcctcaatcattggggaatcctg

SEQ ID NO: 175049 - DNA, 80 bp, synthetic construct
  source 1..80: mol_type = other DNA
cagggtgaagtaccttgaatcgtctgtcaattcagaacatatcttctcagtggaccacaattgtgaaactattgcgaagg

SEQ ID NO: 175050 - DNA, 80 bp, synthetic construct
  source 1..80: mol_type = other DNA
gcctttatgttatacaacaattgaatcaggatgaacactctcatataattggtttattgagagttatgaattatgcagac

SEQ ID NO: 175051 - DNA, 80 bp, synthetic construct
  source 1..80: mol_type = other DNA
ttaatgaagaagcagcagactgggatgccaatcatccaataccaggccccttaccagcggggcagctcagagacccaaga

SEQ ID NO: 175052 - DNA, 80 bp, synthetic construct
  source 1..80: mol_type = other DNA
caacacaacgggaatagaagggagcaacgttactattaagggtaattctacgtggcactgtcgttcagtcacttgggtac

SEQ ID NO: 175053 - DNA, 80 bp, synthetic construct
  source 1..80: mol_type = other DNA
tgcccgaggaaagtacaaagaatatgaataccacctaggctggtattcaaacatatttataggcaacctgagacacaacc

SEQ ID NO: 175054 - DNA, 80 bp, synthetic construct
  source 1..80: mol_type = other DNA
aaatacaaccgctctttgcattgtattcagtcgctctgcggagaggctggcagattgagccctgggaggttctctccagc

SEQ ID NO: 175055 - DNA, 80 bp, synthetic construct
  source 1..80: mol_type = other DNA
gtctgtgtctgtttgagtccccaggggacggcagcgcgggtccttggggacacacgcaaaacaacggccagacaagacgc

SEQ ID NO: 175056 - DNA, 80 bp, synthetic construct
  source 1..80: mol_type = other DNA
ctactgaacaaactccatattgttggttttttgttcccaaagatatggatctcgacaacgtccaacggcctactaacagc

SEQ ID NO: 175057 - DNA, 80 bp, synthetic construct
  source 1..80: mol_type = other DNA
ggtgaatgttgggaggtgtcaaagaatggaagggactgggaaacattaaaattgaaagacttagttgacaagattacaat

SEQ ID NO: 175058 - DNA, 80 bp, synthetic construct
  source 1..80: mol_type = other DNA
ggccgggccatgggcaaggctcttagggtcatcgctcttaaatatgttttttggcaggccttacagaaaaaagaaaaggg

SEQ ID NO: 175059 - DNA, 80 bp, synthetic construct
  source 1..80: mol_type = other DNA
atgctggtatcagaccaattttgtagttcctgctagtacaccagacaatgctaaaatggtgtgtatggtttcagcttgta

SEQ ID NO: 175060 - DNA, 80 bp, synthetic construct
  source 1..80: mol_type = other DNA
gacaatagactaacaccagtcacagatgatggccaggcttattataaagcttttctagacgctgcatttaccaaagacag

SEQ ID NO: 175061 - DNA, 80 bp, synthetic construct
  source 1..80: mol_type = other DNA
tacctcttaaagtcaccaagcactccgagcgtcagcgaggagtgcgacccttcctcaaggggcaactccctcgaagtccg

SEQ ID NO: 175062 - DNA, 80 bp, synthetic construct
  source 1..80: mol_type = other DNA
tggttagagttgcagataccgtgagcactagcgccaccaactccgaacaagtgccgaacctgaccgcggtggagaccggt

SEQ ID NO: 175063 - DNA, 80 bp, synthetic construct
  source 1..80: mol_type = other DNA
taactgagtcgagagaaaaaattacactcgacagggacacacacacaccaatgcgaacgtgcggaccttttggccaccaa

SEQ ID NO: 175064 - DNA, 80 bp, synthetic construct
  source 1..80: mol_type = other DNA
caatacaagcagctgacccgaaatacatcacaccgagactatccttccactcgtgggacttcagacgagggctttttggc

SEQ ID NO: 175065 - DNA, 80 bp, synthetic construct
  source 1..80: mol_type = other DNA
ttgaagagtactttaccaaagatcaagacagcgccaataggtacatgtcatggactataaatgctagaaggatggtgcaa

SEQ ID NO: 175066 - DNA, 80 bp, synthetic construct
  source 1..80: mol_type = other DNA
atacaatgaaaaaataaaagacattccagaaaaagcaagtcaattatactatgatcagacaaaaaaacttataggaatca

SEQ ID NO: 175067 - DNA, 80 bp, synthetic construct
  source 1..80: mol_type = other DNA
ggaacctcttaatttggctatacaacagctgcagaagcttactgttgaagatcttccaacccctccaactagtattccaa

SEQ ID NO: 175068 - DNA, 80 bp, synthetic construct
  source 1..80: mol_type = other DNA
gtagagtgggttattgcgcctctttaacccgcaattactttgctgccacacagggtgagatcatagctaaatttggtgtg

SEQ ID NO: 175069 - DNA, 80 bp, synthetic construct
  source 1..80: mol_type = other DNA
ttctctaacaagatacgcagtgtcagcgctggacgtgcactgtatatcccaccttatgacctattgagacatgaatggtg

SEQ ID NO: 175070 - DNA, 80 bp, synthetic construct
  source 1..80: mol_type = other DNA
gacatattcggaacacacaccctaagtcaacaccaagctattggtgttgacttagggattcttctgaccccgggtcttat

SEQ ID NO: 175071 - DNA, 80 bp, synthetic construct
  source 1..80: mol_type = other DNA
accctggagaacttcatggggagagcagcttgcgtgtttatgtccacataccaatcaatggattccactgataagacaaa

SEQ ID NO: 175072 - DNA, 80 bp, synthetic construct
  source 1..80: mol_type = other DNA
actcagagccagcatcactaccactcctacagtatctataactgttacaatagcaccatataaatctgagttttccggtg

SEQ ID NO: 175073 - DNA, 80 bp, synthetic construct
  source 1..80: mol_type = other DNA
caagtcagcaacccgcagaggcaagctcccacgaccacctggcactcgtgggactggcgccgatccctctttacagaaac

SEQ ID NO: 175074 - DNA, 80 bp, synthetic construct
  source 1..80: mol_type = other DNA
aggcactacaacatttagagtaagacccccaaccctattcacagacaaatggtactttcaaaaggacttttgcaaaatcc

SEQ ID NO: 175075 - DNA, 80 bp, synthetic construct
  source 1..80: mol_type = other DNA
aaggtaatgcaggatgtgagatgaatgagttcattaaaacagctgttgaccattacacggcacaattatttatgctagac

SEQ ID NO: 175076 - DNA, 80 bp, synthetic construct
  source 1..80: mol_type = other DNA
taagtttcagcccaccttcaccccatccagtgaggaaggaaagaaaaacacctttgcgcccgttgattggctacttgggt

SEQ ID NO: 175077 - DNA, 80 bp, synthetic construct
  source 1..80: mol_type = other DNA
gtgttcaatccctagcagaaaggggcgagaagacacaaatatcagagatcaaaaatatcctcacaaccagtagatacaga

SEQ ID NO: 175078 - DNA, 80 bp, synthetic construct
  source 1..80: mol_type = other DNA
gggtttcaccgtgttagccaggatagtctctatctcctgacctcgtgatccgcccgcctcggccacaagcagacaacttt

SEQ ID NO: 175079 - DNA, 80 bp, synthetic construct
  source 1..80: mol_type = other DNA
agtcatgattggtatgaaatccaagaaagtgaatattacccaaaacatatccaatacaatttgttgattggtgaaggacc

SEQ ID NO: 175080 - DNA, 80 bp, synthetic construct
  source 1..80: mol_type = other DNA
cccagcttttggcagtcaaatatagcaagatggtttttagaaaatgttagaaatcctcaaaaattaaaccaggcccctga

SEQ ID NO: 175081 - DNA, 80 bp, synthetic construct
  source 1..80: mol_type = other DNA
ccaggaacaggtaaatcaattgctacttccatcttagccagaatgttgactactgaatcagatatatactctcttccacc

SEQ ID NO: 175082 - DNA, 80 bp, synthetic construct
  source 1..80: mol_type = other DNA
aaggatggttggttaacatctccaaccaagtacaactggaacgcaacatcaacagggcaatgaccattctccaagctgta

SEQ ID NO: 175083 - DNA, 80 bp, synthetic construct
  source 1..80: mol_type = other DNA
gagtcagttctaggccccaatgtagatgcagagtcagtaggccttgtaatagttatatgcccttatactacacctccact

SEQ ID NO: 175084 - DNA, 80 bp, synthetic construct
  source 1..80: mol_type = other DNA
agtgtgtttgctgttacatggaaacccagggtgtggaaaatcactagttacctctgtagtggcacgcggcctcactagtg

SEQ ID NO: 175085 - DNA, 80 bp, synthetic construct
  source 1..80: mol_type = other DNA
taacatgtttattgcaaccagccataaattcataaacaccagcagcaactctacagctttaacagaaaacactgcaaagt

SEQ ID NO: 175086 - DNA, 80 bp, synthetic construct
  source 1..80: mol_type = other DNA
cggtcccgcaaaagccctccgtccccgccgcaggagtcctccgccgcaaaagacccccctgcccgcgccgtccgcaccct

SEQ ID NO: 175087 - DNA, 80 bp, synthetic construct
  source 1..80: mol_type = other DNA
agccacactagaagaatttgagtaccacataggcttttacagctctgtattcttaagcccccagagagacctgcagttcc

SEQ ID NO: 175088 - DNA, 80 bp, synthetic construct
  source 1..80: mol_type = other DNA
agttggatgtgatccggacgtattttggtcacaaatgagggcaactatgggtgaaaacatcctggcttttgattatacaa

SEQ ID NO: 175089 - DNA, 80 bp, synthetic construct
  source 1..80: mol_type = other DNA
aggcgccacggcaagacctggatagtcgtggccatcatcagcctcatcctctcgaatctctccaacgtgcaaataggcta

SEQ ID NO: 175090 - DNA, 80 bp, synthetic construct
  source 1..80: mol_type = other DNA
caacaaagctggagcaaaaaaaatgaccaatggtcaggatcaggcacatacccacaggatactacagaaatgtacaaaat

SEQ ID NO: 175091 - DNA, 80 bp, synthetic construct
  source 1..80: mol_type = other DNA
aaaaagaatagcactgagacatctagcggcagaaacaggaactgcagagaaaatgccagatacaagtagaccaacagcac

SEQ ID NO: 175092 - DNA, 80 bp, synthetic construct
  source 1..80: mol_type = other DNA
ttgaagtcctaaatagactcacatataatagttcatgcccaaataaggtgcactgcattgtacaaggcagattaggaaat

SEQ ID NO: 175093 - DNA, 80 bp, synthetic construct
  source 1..80: mol_type = other DNA
tgggggatcgtcatcatcccagtggtcccattggactttactgatgccagtaacacccagataccaatcacagtcacaat

SEQ ID NO: 175094 - DNA, 80 bp, synthetic construct
  source 1..80: mol_type = other DNA
gcggctccggcggaagctcgatgagcagttgctgcgagtctcggcgctcggcgtccgccgtttcgtcggacgtggcgtag

SEQ ID NO: 175095 - DNA, 80 bp, synthetic construct
  source 1..80: mol_type = other DNA
gttgtacaaccacgttatccatgtattcacccacacccgtacacaggtcatacacattaacttcaaccaacttcacacat

SEQ ID NO: 175096 - DNA, 80 bp, synthetic construct
  source 1..80: mol_type = other DNA
ccggaaagatgcaatgcttgggacacatatcatctgggacctaggcttgcaatccagttgtacaatggtagctccttgga

SEQ ID NO: 175097 - DNA, 80 bp, synthetic construct
  source 1..80: mol_type = other DNA
ataaatttgatataccccaactagtggcaagacaaatagtaaacacatgtgcccaatatcaacagaaaggggaggctata

SEQ ID NO: 175098 - DNA, 80 bp, synthetic construct
  source 1..80: mol_type = other DNA
gtaagcccccaagtaagcaaggagataattggctaaagaagttcacagaatgttgcaatgctgctaaaggtcttgaatgg

SEQ ID NO: 175099 - DNA, 80 bp, synthetic construct
  source 1..80: mol_type = other DNA
catccaatatatggatgacattcttgtggccagtgacagaactgatttagaacatgatcaagtagttttgcagctaaagg

SEQ ID NO: 175100 - DNA, 80 bp, synthetic construct
  source 1..80: mol_type = other DNA
catagacaagtggtacacccaagaggacctgtgcgacgttactcttgtgtcacttgcggttagcgcagcttccttaacac

SEQ ID NO: 175101 - DNA, 80 bp, synthetic construct
  source 1..80: mol_type = other DNA
gagagagggggagtgtttgacaacgcttacaaccccagtgcagaggcatctgagggcaagaaattcgcagcccttgacta

SEQ ID NO: 175102 - DNA, 80 bp, synthetic construct
  source 1..80: mol_type = other DNA
attcaaccagcaataaacaaagttcttctgctgcgccggacacctcagcccccccctccacccgaaacgcttgcgcgttt

SEQ ID NO: 175103 - DNA, 80 bp, synthetic construct
  source 1..80: mol_type = other DNA
caaagcaactattgagggtcaatcagtagaagtattactagacacaggagctgatgactcaatagtagcagggatagaat

SEQ ID NO: 175104 - DNA, 80 bp, synthetic construct
  source 1..80: mol_type = other DNA
tgaaaactattacccagtcataggcacttcctctttagaaaacggtacaaactacgattccaatgctataactaccttag

SEQ ID NO: 175105 - DNA, 80 bp, synthetic construct
  source 1..80: mol_type = other DNA
gtagtctattgcaattggactttcaaaacccacgcccttatggtgaaaatgtggaaatttatgataatgggccaaataaa

SEQ ID NO: 175106 - DNA, 80 bp, synthetic construct
  source 1..80: mol_type = other DNA
cttttatcaaaccaaaattgttgtacccttaagtacaccaactaaaatggtaatgttggcattcgtaagtgcatgccctg

SEQ ID NO: 175107 - DNA, 80 bp, synthetic construct
  source 1..80: mol_type = other DNA
aagaacaaccgtacgatgctgaatattttgcaggacctccaaagaagtcaaagttcgaggtccccgcactgccaaacgac

SEQ ID NO: 175108 - DNA, 80 bp, synthetic construct
  source 1..80: mol_type = other DNA
ggctgaatccaaatgtgtattggcacaagatggaaagcaaagttgctgtagttactgggtgggagacaggtgtgtatgtg

SEQ ID NO: 175109 - DNA, 80 bp, synthetic construct
  source 1..80: mol_type = other DNA
gagactcagataaagtggggcgacatcaacctagagggcaaagtcctcatccgctgcccgtggacccagccgcccctggt

SEQ ID NO: 175110 - DNA, 80 bp, synthetic construct
  source 1..80: mol_type = other DNA
gcccctcctcatctgtggaacgggcacagtcggcaccacctacagaaactatgggagccactctaatgactatgtaaaat

SEQ ID NO: 175111 - DNA, 80 bp, synthetic construct
  source 1..80: mol_type = other DNA
agtagtgatagagttaatttcttgtcatcaaatggtgtgatcaccatcccagctggtgaacagatgacactttcagctcc

SEQ ID NO: 175112 - DNA, 80 bp, synthetic construct
  source 1..80: mol_type = other DNA
caacaacacaagacggtacacaaaggttcgccaattggacgattagtgtgaaagacatggtgcagttgaggaggaaatgt

SEQ ID NO: 175113 - DNA, 80 bp, synthetic construct
  source 1..80: mol_type = other DNA
cttagtatcctaaccacagaaactgaaaagaataaaacccactataaagaagccctttttacaaagctagcatactacaa

SEQ ID NO: 175114 - DNA, 80 bp, synthetic construct
  source 1..80: mol_type = other DNA
atgggcgcacaggtgagcaagcagagtaatggcactcatgaaaatattgtctcagcaagcaatggagctgttgttaagta

SEQ ID NO: 175115 - DNA, 80 bp, synthetic construct
  source 1..80: mol_type = other DNA
ggatcagcagtggggtgtaacccagatgtgttttggtcacagatatatgcaatgctagaaggagagctattggcttttga

SEQ ID NO: 175116 - DNA, 80 bp, synthetic construct
  source 1..80: mol_type = other DNA
aacggctacttagacatacaccactttgatagtacaagccaagacacacaagtagaaaatataacagcatttttaaaaac

SEQ ID NO: 175117 - DNA, 80 bp, synthetic construct
  source 1..80: mol_type = other DNA
ccagcgtcttctggacggaggggagctcaccagcgcgtatgtccattccctttattagcattggcaatgcatacagcaat

SEQ ID NO: 175118 - DNA, 80 bp, synthetic construct
  source 1..80: mol_type = other DNA
aacgggaaagacaaaatctatggaggcctatcagattgctgtgggtacagggaatactgacaaaaccaaacctattttca

SEQ ID NO: 175119 - DNA, 80 bp, synthetic construct
  source 1..80: mol_type = other DNA
acgtggccaatccaggccatgacggacaagcacttctgtctccccgggcgtgtgaggaataggcctcaaaaaggctgaag

SEQ ID NO: 175120 - DNA, 80 bp, synthetic construct
  source 1..80: mol_type = other DNA
cggagtctacgattgaaaactttctgtgtaggtccgcatgtgtacacatagcaaggtatgaagctggcgctaatgcaaac

SEQ ID NO: 175121 - DNA, 80 bp, synthetic construct
  source 1..80: mol_type = other DNA
ttttcgatatcggtgttgtatctagggcaaacgaaagtagcattaatagcttcagtatgattttttggtgttactaatag

SEQ ID NO: 175122 - DNA, 80 bp, synthetic construct
  source 1..80: mol_type = other DNA
tcttatacacggagtgcctggttgcggtaagtcattgacaacgactgttatagcaaggggtttagccacagaatctgaaa

SEQ ID NO: 175123 - DNA, 80 bp, synthetic construct
  source 1..80: mol_type = other DNA
acagggaaaatagtcaaatgggtcattagaattatatcagctattaccattataatcagaaatagtgcagacccacacac

SEQ ID NO: 175124 - DNA, 80 bp, synthetic construct
  source 1..80: mol_type = other DNA
tgatctggttgtcggcctcctcacccaggaaggtcaagagctggcgcagaacgttgtcggtgacaataaacacccccccc

SEQ ID NO: 175125 - DNA, 80 bp, synthetic construct
  source 1..80: mol_type = other DNA
gagaagaggatgttgccgttgcgcgccaggtcttcggggaaaacgaccggcaggccggtgtggcgctgcacaaagcgcgt

SEQ ID NO: 175126 - DNA, 80 bp, synthetic construct
  source 1..80: mol_type = other DNA
tggtgttgagaccaaagttctaaagcaaacaattgttacagatgaaaatgatgtagacacagaaataacaatcttgtggc

SEQ ID NO: 175127 - DNA, 80 bp, synthetic construct
  source 1..80: mol_type = other DNA
catatgtaaactccacctccacggattctatggccaaacataacaattggggaattgtagtgataccttttgtcccattg

SEQ ID NO: 175128 - DNA, 80 bp, synthetic construct
  source 1..80: mol_type = other DNA
gacacaccgacaatcttggctaccctcgccttattaggttgcagccaatcaccatggacattcttgaaggaaaaaatctg

SEQ ID NO: 175129 - DNA, 80 bp, synthetic construct
  source 1..80: mol_type = other DNA
tgaggaatatactaagcaccacaacaggtggtctcactcaaacgtagacctagaactggttagatacagaggagccagac

SEQ ID NO: 175130 - DNA, 80 bp, synthetic construct
  source 1..80: mol_type = other DNA
caacatccgagcaaccaccaacctctttctggacggggcctttagcaccgagctgatgggtgacacctcctcgctgagcc

SEQ ID NO: 175131 - DNA, 80 bp, synthetic construct
  source 1..80: mol_type = other DNA
aaagactgagttacaagctatccttatggccttacaagattcaggacaggatgtaaacatagtcactgactctcagtatg

SEQ ID NO: 175132 - DNA, 80 bp, synthetic construct
  source 1..80: mol_type = other DNA
tgttgggaagaacctatacataccatcttatgatgtgctactctatgaatggtatgagaaatttaatatatacagatact

SEQ ID NO: 175133 - DNA, 80 bp, synthetic construct
  source 1..80: mol_type = other DNA
acaccagcagaaaacaaacgcctgtggcagtacacatacaccaggctaatgtcacactactattacaaagctaaccctca

SEQ ID NO: 175134 - DNA, 80 bp, synthetic construct
  source 1..80: mol_type = other DNA
aggcggacacatgttgtggatgtcatgtctgctatatttcagggccccatctctatggaagttccacccccacccgccat

SEQ ID NO: 175135 - DNA, 80 bp, synthetic construct
  source 1..80: mol_type = other DNA
acaaataggaagccaacaagccatgttggttattgtcaagcacttctgttaccccggtactagggtgttaaacttcccca

SEQ ID NO: 175136 - DNA, 80 bp, synthetic construct
  source 1..80: mol_type = other DNA
cctccaggcgccaggcctgcacctccttctgtctgagctgatcgttgttgttattcttcaatttctgcaggtaacttagg

SEQ ID NO: 175137 - DNA, 80 bp, synthetic construct
  source 1..80: mol_type = other DNA
tcgaacagagacaaccaccaaccagatgaaagtgctttctttaactgcaatgggaccttgttggggaacctaactatctt

SEQ ID NO: 175138 - DNA, 80 bp, synthetic construct
  source 1..80: mol_type = other DNA
acaatatgtcattcccatcaccaatatcctacatcatatcatgatttatgccgttcatgcaataatacagagttgcatct

SEQ ID NO: 175139 - DNA, 80 bp, synthetic construct
  source 1..80: mol_type = other DNA
gcttgaatggatagctaataaaatctcaaaatttatagattgggttaaaaccaaaattctcccacaagctagagagaaac

SEQ ID NO: 175140 - DNA, 80 bp, synthetic construct
  source 1..80: mol_type = other DNA
aataacctgagtagccatataaactccatagaagcataccaaataccagtgagtgcacagatcacagccaaggctgacgc

SEQ ID NO: 175141 - DNA, 80 bp, synthetic construct
  source 1..80: mol_type = other DNA
cctactcctacttctattgctggactcattctcattcttgcttctgacctttctaccaactggtctgccatcgtttccaa

SEQ ID NO: 175142 - DNA, 80 bp, synthetic construct
  source 1..80: mol_type = other DNA
cgccccgtccaacgcgcctgtggagggccaatcggaccgcgggagctctccaagtggatgacaggcacagccgggtgccc

SEQ ID NO: 175143 - DNA, 80 bp, synthetic construct
  source 1..80: mol_type = other DNA
gaagaaaggtggccgtcatcgggagaagagaagacgcagaacgtacagcagcagctcaaactgcagctcaagcgacagct

SEQ ID NO: 175144 - DNA, 80 bp, synthetic construct
  source 1..80: mol_type = other DNA
cccaattatcccccaatttccagccggccctcaaacccaccaataactcaagtaacacacaaaagaccctaggagaggca

SEQ ID NO: 175145 - DNA, 80 bp, synthetic construct
  source 1..80: mol_type = other DNA
cggcccttacccccggacttgctggagtcctctaggagcccccctttccccagccctgaggcggctgttcaattaaagcc

SEQ ID NO: 175146 - DNA, 80 bp, synthetic construct
  source 1..80: mol_type = other DNA
tgggcgccattttgtccccacgcgcgcataatggcggacctaggcctaaaacccccaggaagcgggtctatggttggctg

SEQ ID NO: 175147 - DNA, 80 bp, synthetic construct
  source 1..80: mol_type = other DNA
gtatttgtgtctaatgcaaaaagcaatgtttatacactttgcaaagggttgtggatgtctgcgggaaggccatgggccag

SEQ ID NO: 175148 - DNA, 80 bp, synthetic construct
  source 1..80: mol_type = other DNA
tgcagggcaaagcccgatagactctctaggagggcggcggtggcctcgagccacctccaccgcgagcgggacacccggtg

SEQ ID NO: 175149 - DNA, 80 bp, synthetic construct
  source 1..80: mol_type = other DNA
cacggccggaatcatgactatgaccgccgccaccgtctgtcatcgaaggcgggccccggtcacctcctttcttttcaacc

SEQ ID NO: 175150 - DNA, 80 bp, synthetic construct
  source 1..80: mol_type = other DNA
cctatggtcactttccttaaagatgaactcagaaagaaggaaaaaatttctgctggaaagacccgtgtgattgaagcgag

SEQ ID NO: 175151 - DNA, 80 bp, synthetic construct
  source 1..80: mol_type = other DNA
atacaaccccacagtaccaaactatggctacattccattctcagaacagttcggggcgggtcagatgccagacgggtcca

SEQ ID NO: 175152 - DNA, 80 bp, synthetic construct
  source 1..80: mol_type = other DNA
gatcaagcacttctgtttccccggcaagtgtgaatatgctttacccaaggcaaaagctaatcttgtcgttatccgcaagg

SEQ ID NO: 175153 - DNA, 80 bp, synthetic construct
  source 1..80: mol_type = other DNA
aaagtaatggcattaccgcgagccattactcctacgcgcgcaattaacgaatccaccatcggggcagctggtgtcgataa

SEQ ID NO: 175154 - DNA, 80 bp, synthetic construct
  source 1..80: mol_type = other DNA
atcatcccgcggctataaaagacataatcaagaaaatgagagacaataatttcaaactagagacaggccccaatgacaaa

SEQ ID NO: 175155 - DNA, 80 bp, synthetic construct
  source 1..80: mol_type = other DNA
ttcggaagtgagcagttgctccaggtccagcgtggggacctgcagatgtcccgaccagtcctttaagaattccagcagat

SEQ ID NO: 175156 - DNA, 80 bp, synthetic construct
  source 1..80: mol_type = other DNA
caactcgccctcaccaaaccgatatggactgaacaaagatgtggttaggcagctatcccaccggtatccacagttacccc

SEQ ID NO: 175157 - DNA, 80 bp, synthetic construct
  source 1..80: mol_type = other DNA
tttcccgctccggtctagtgggggttgtcgatctgtcagatggaggaacaggtactactgggtacgccacctgggacatt

SEQ ID NO: 175158 - DNA, 80 bp, synthetic construct
  source 1..80: mol_type = other DNA
agtagacaaacacccggaaataataatcatgatggaaagccaagcaggtggaagcaagctgatagaacagactttgaaca

SEQ ID NO: 175159 - DNA, 80 bp, synthetic construct
  source 1..80: mol_type = other DNA
aatcagatcatagaagacatgataaaaaaggaagcaatctatgttgcatgggtcccagcccataaaggcataggaggaaa

SEQ ID NO: 175160 - DNA, 80 bp, synthetic construct
  source 1..80: mol_type = other DNA
cgttttcagcccttccggactacaaaatcggccattttagtgacgtcatggcggccattttaagtaaggcggaagcagct

SEQ ID NO: 175161 - DNA, 80 bp, synthetic construct
  source 1..80: mol_type = other DNA
ccgcagcagactcctggaccccagaggcctctctgatcagatgcccgtcggtcagagcccttttggccccctcaaagaga

SEQ ID NO: 175162 - DNA, 80 bp, synthetic construct
  source 1..80: mol_type = other DNA
agacggaagcagtaacacaaacaaagaaacatggcaaaacgcatggtctaaacaaggagactcctatacaccaagcgaat

SEQ ID NO: 175163 - DNA, 80 bp, synthetic construct
  source 1..80: mol_type = other DNA
tggtttcagtacaacactaaggcagacacccagatagctgctcagggctgctactgtcacctagaagacgtacccctgtg

SEQ ID NO: 175164 - DNA, 80 bp, synthetic construct
  source 1..80: mol_type = other DNA
ctctctggactactcgacagacgcctctacatacgtgcctattaccgtcactgttgcgccaatgtgtgcagagtacaatg

SEQ ID NO: 175165 - DNA, 80 bp, synthetic construct
  source 1..80: mol_type = other DNA
tagtatagctggcattatttttgttatttataagctgttttgcacactccaaggtccatattctggtgagcctaaaccta

SEQ ID NO: 175166 - DNA, 80 bp, synthetic construct
  source 1..80: mol_type = other DNA
tgtactctgtgaaaggagggatgccatcaggtatttcaggcacttcaatctttaacacaattatcaacaatattataatc

SEQ ID NO: 175167 - DNA, 80 bp, synthetic construct
  source 1..80: mol_type = other DNA
acgaatcgggaggtggatacttgcagtcccaagaaggatcaggcagggagcagaactcgccctcctgtgagggacggctg

SEQ ID NO: 175168 - DNA, 80 bp, synthetic construct
  source 1..80: mol_type = other DNA
acccagtgacatgttcgtacacaccaaagaggctatttacagatgtgcacacttgactgaacccaacgagaatactatat

SEQ ID NO: 175169 - DNA, 80 bp, synthetic construct
  source 1..80: mol_type = other DNA
acaagccatgtttgtcccagtaggagctccaaccccaaaatcacaagattcatatgagtggcagtcagcttgcaacccca

SEQ ID NO: 175170 - DNA, 80 bp, synthetic construct
  source 1..80: mol_type = other DNA
tgacctgcggtttccgttctgctcaccacaaacgaacacttcctgcatacagttcctcgttttggcaggaaattacagtg

SEQ ID NO: 175171 - DNA, 80 bp, synthetic construct
  source 1..80: mol_type = other DNA
caagatgggtaggatattcgtgcgccatgtaaacaaagagacaccactgcaagtcataagcacaatacggatgtatatga

SEQ ID NO: 175172 - DNA, 80 bp, synthetic construct
  source 1..80: mol_type = other DNA
gatatcttttatgtatacaggtccagcattgtctagtgctaaactcttaatagcttatacaccaccaggggcaccaggac

SEQ ID NO: 175173 - DNA, 80 bp, synthetic construct
  source 1..80: mol_type = other DNA
atcttcctgccatttgtccgtgtggggggtcgccataggcttcggcctcgttttcaggccttccggactacaaaagtcgc

SEQ ID NO: 175174 - DNA, 80 bp, synthetic construct
  source 1..80: mol_type = other DNA
ctgatctgaagatggctgtcctatccaaatacaaaggaaatgtggaaattgaaatgagtgagaacatgcagatcgctgta

SEQ ID NO: 175175 - DNA, 80 bp, synthetic construct
  source 1..80: mol_type = other DNA
ttcgggggcggcatggccaccgtgactttctccctaaacgtactgtacgaccagttcagacggcacctaaacaggtggtc

SEQ ID NO: 175176 - DNA, 80 bp, synthetic construct
  source 1..80: mol_type = other DNA
ccccactctatttgaggacaagtggtacactcaagaggacctctgtgccgttaacctgttgtcacttgaggtttctgcgg

SEQ ID NO: 175177 - DNA, 80 bp, synthetic construct
  source 1..80: mol_type = other DNA
ttcacctatctggtggcagagctttcaccggtggaactcgtgacagatgtctacgccaccctaggcatcgtggagatcat

SEQ ID NO: 175178 - DNA, 80 bp, synthetic construct
  source 1..80: mol_type = other DNA
gttgcaaggaccacagcatgagttcatcagggcactcgtgaagagaaactgccatataatcacaacaagcaagggtgagt

SEQ ID NO: 175179 - DNA, 80 bp, synthetic construct
  source 1..80: mol_type = other DNA
taaactaccaacaaaactactctcaaacataccaaaccttcaatcaaaaaatgaaggacaacctacagttaatacaaaaa

SEQ ID NO: 175180 - DNA, 80 bp, synthetic construct
  source 1..80: mol_type = other DNA
actgggccaccgagtaccaaatagctcgctggctcgatcgccccttgcggcactacccctcagaccccccgcactacccg

SEQ ID NO: 175181 - DNA, 80 bp, synthetic construct
  source 1..80: mol_type = other DNA
cgggggccgcgcgtagcttttcggcggcgacggggaacaaaacaggcacgcacacgcagctcgcttcagcggtcgcccta

SEQ ID NO: 175182 - DNA, 80 bp, synthetic construct
  source 1..80: mol_type = other DNA
attgcccgctatggcactgataagcaaggagaacagatatccagatacacgaagtggaaaattacaactcggcaagtggc

SEQ ID NO: 175183 - DNA, 80 bp, synthetic construct
  source 1..80: mol_type = other DNA
gattataatgcatatgatgaaagtagggacaatttcacaatttggaaaataaatataaaagaaatggcccagattaggag

SEQ ID NO: 175184 - DNA, 80 bp, synthetic construct
  source 1..80: mol_type = other DNA
caaccattttgaaatgtgatgatcgggagctagacataccccacgtccatgttttccgccgttattaaaatataataagt

SEQ ID NO: 175185 - DNA, 80 bp, synthetic construct
  source 1..80: mol_type = other DNA
catgtctacttgcctcctgtggtggcagagcttggccctgtgcccaacccccgccttgggagcctgtaggggccaacacc

SEQ ID NO: 175186 - DNA, 80 bp, synthetic construct
  source 1..80: mol_type = other DNA
acccacgcagatagccagccccgctagcgtatccagcgccatcccgttcgctcccgtcgtcgtctcctgaacaaagcaac

SEQ ID NO: 175187 - DNA, 80 bp, synthetic construct
  source 1..80: mol_type = other DNA
agagcttgagcaatggagagacagccagcacattcgactcgcaaaactctactgggcagacggctgtgcaggccaacgta

SEQ ID NO: 175188 - DNA, 80 bp, synthetic construct
  source 1..80: mol_type = other DNA
cagtgtggactttgaagtcaccaaagtcacagaagaaagggagtcgattaacacagtaccgaaagtggaccacgcgtttc

SEQ ID NO: 175189 - DNA, 80 bp, synthetic construct
  source 1..80: mol_type = other DNA
ttggtatcttgactgctggtggtgaagggcatgctgctttcactgatctcagaccataccgaaaattagcagtccaccaa

SEQ ID NO: 175190 - DNA, 80 bp, synthetic construct
  source 1..80: mol_type = other DNA
tggctaaccttaaccccgcagccgttactcacaatccagtgaaatggcggtcgtaacgcgaaagtgcgggatgggaccaa

SEQ ID NO: 175191 - DNA, 80 bp, synthetic construct
  source 1..80: mol_type = other DNA
tagacatatagattggtggatacatactttactcaaaattaaggatatggtgctcagtgtttttaaaccaagcatggaga

SEQ ID NO: 175192 - DNA, 80 bp, synthetic construct
  source 1..80: mol_type = other DNA
gatggagacccacattactgtttcaacaagcagtaatgagagacataatagagacgggccccttcagctacaaggacgac

SEQ ID NO: 175193 - DNA, 80 bp, synthetic construct
  source 1..80: mol_type = other DNA
cctcggagccaccatgatggccacccttcaaggccagagccggagacagagcagggggaggggcaggggcaggtgcaggt

SEQ ID NO: 175194 - DNA, 80 bp, synthetic construct
  source 1..80: mol_type = other DNA
gtgtgggagattaactacacggacactgtccaactcaggcggaagctagaaatcttcacgtactcacgtttcgatacaga

SEQ ID NO: 175195 - DNA, 80 bp, synthetic construct
  source 1..80: mol_type = other DNA
aaagagcactatgataccactctttttaaccaaacacaatactacaacacttttcaaacaatagctcagctaaaggacac

SEQ ID NO: 175196 - DNA, 80 bp, synthetic construct
  source 1..80: mol_type = other DNA
acatactaacagcaccagcactacacccaggcaacctaatgctgcaaaagagaaaaatcctagtccctagcttattgacc

SEQ ID NO: 175197 - DNA, 80 bp, synthetic construct
  source 1..80: mol_type = other DNA
ggctcaactaattactttggatattgatccaaaacctatttctttagaggatagtgtctttggtatagagggcttagaag

SEQ ID NO: 175198 - DNA, 80 bp, synthetic construct
  source 1..80: mol_type = other DNA
ggacagcatatgtacctataacaatatccatcagccctatggcatcagagttctcaggagctagaaataacagtcctcaa

SEQ ID NO: 175199 - DNA, 80 bp, synthetic construct
  source 1..80: mol_type = other DNA
caccagattcgcgatgaaaccaaaaattacccaacataattgttttgggcggcagttttttaccatcaagacatttgcaa

SEQ ID NO: 175200 - DNA, 80 bp, synthetic construct
  source 1..80: mol_type = other DNA
actccggtgacactttttatggattggtcaccatcaatgactttggaacattggctgtgagggtggtgaatgagttcaac

SEQ ID NO: 175201 - DNA, 80 bp, synthetic construct
  source 1..80: mol_type = other DNA
caaacacttctgtttccccggtcaatgaagatatgctttacccaaggcaaaaacttttgagatcgttatccgcgcatcaa

SEQ ID NO: 175202 - DNA, 80 bp, synthetic construct
  source 1..80: mol_type = other DNA
cgcccgccgaacggacttggtacgctgacgtggtgcgctgcgttcgcgcgcaagtggatttgggcgtggaagtgcgcgcg

SEQ ID NO: 175203 - DNA, 80 bp, synthetic construct
  source 1..80: mol_type = other DNA
cagaaatttagaagtcatggcccccgtgtactgaaacttgtccccgttgatggacagggccacataagacaagtgacagc

SEQ ID NO: 175204 - DNA, 80 bp, synthetic construct
  source 1..80: mol_type = other DNA
gtttccatgctaatccaggagttcttactggctctgctataggttgtgatcctgacatcttttggtcacaactatattca

SEQ ID NO: 175205 - DNA, 80 bp, synthetic construct
  source 1..80: mol_type = other DNA
taagaccacacaacatgattggtatgaactacaagagactgtgtactaccccaaacatatacagtacaacatcttaattg

SEQ ID NO: 175206 - DNA, 80 bp, synthetic construct
  source 1..80: mol_type = other DNA
accctacaatgcctgtaaccaaagcaaagggaactttcccagtatctcagagggaattcaaaaatgaagcaccctatgac

SEQ ID NO: 175207 - DNA, 80 bp, synthetic construct
  source 1..80: mol_type = other DNA
atttatcccagagcatcaacgggagtggtcaaacatgcatctagcaacaaatgttacaaaattccctatgttagatgtag

SEQ ID NO: 175208 - DNA, 80 bp, synthetic construct
  source 1..80: mol_type = other DNA
agcaaaagcaataaagtacaggattattgccaaaacaacgtgtgctctttcttcatacaggcccgcaatttccatgacag

SEQ ID NO: 175209 - DNA, 80 bp, synthetic construct
  source 1..80: mol_type = other DNA
agtctatattctcaggcccaaaaaagccaagggtggacctcgacaaaatccagctgcaagaagacaactattcccaaggc

SEQ ID NO: 175210 - DNA, 80 bp, synthetic construct
  source 1..80: mol_type = other DNA
cacacgtatagtccaaattttgtgccacaaaaaggaacagtccaaactcatatcaaattcagacccgatgttaaagatgt

SEQ ID NO: 175211 - DNA, 80 bp, synthetic construct
  source 1..80: mol_type = other DNA
ggcctgtaaatattgggatagacctcccagacacaaccttagagacccccccttttacccctgggcccctaaaaacaatc

SEQ ID NO: 175212 - DNA, 80 bp, synthetic construct
  source 1..80: mol_type = other DNA
aggtcatatttcacagaagcacaaggtcaaataaccactaccaaacctactagtgagtgtaacctacccagtattcatac

SEQ ID NO: 175213 - DNA, 80 bp, synthetic construct
  source 1..80: mol_type = other DNA
ctttacaataagggtagacattgcatcacaacctttagcaaccacactaattggtgaaattgccagttattacacacatt

SEQ ID NO: 175214 - DNA, 80 bp, synthetic construct
  source 1..80: mol_type = other DNA
aattaggcatttggcaaatggactgcacacacttggaaggaaaaatcattatagtagcagtacatgttgcaagtggattc

SEQ ID NO: 175215 - DNA, 80 bp, synthetic construct
  source 1..80: mol_type = other DNA
tgcaccatcacagggtacctacccatagtgtggtgcggacacgggagggcgggcgacaactatgccctacactctgacga

SEQ ID NO: 175216 - DNA, 80 bp, synthetic construct
  source 1..80: mol_type = other DNA
ctacatgctcactcaccctctggccatgctcctaagcaaaaaacacgtagttgtgcccagccttaaaacaaaaccacacg

SEQ ID NO: 175217 - DNA, 80 bp, synthetic construct
  source 1..80: mol_type = other DNA
caaccaggcttggattcggtattcaagagaacactgctaggagaggtgctcaactattatgcacactggtcagggagtat

SEQ ID NO: 175218 - DNA, 80 bp, synthetic construct
  source 1..80: mol_type = other DNA
agaaaactcgatttcaagacacctccagctccagccgtggatccactccagtcaagaagtccaaagcgaagaagaaacgc

SEQ ID NO: 175219 - DNA, 80 bp, synthetic construct
  source 1..80: mol_type = other DNA
tcctgcatcagatagaagattacagtacaccatgttaggggaaatacttaattattacactcactggacagggtcactga

SEQ ID NO: 175220 - DNA, 80 bp, synthetic construct
  source 1..80: mol_type = other DNA
ccccgagatcacataggggtccctccgctgcgtggacatgacggtgggaaagcggtccctcagcctaaagaagagcgtgt

SEQ ID NO: 175221 - DNA, 80 bp, synthetic construct
  source 1..80: mol_type = other DNA
agagtagagggtggtatgccatcaggcatctgtggtaccagtatctttaacacaatgattaacaatatcattatcaggac

SEQ ID NO: 175222 - DNA, 80 bp, synthetic construct
  source 1..80: mol_type = other DNA
ttccttgcaagaatgataaccaatgatagtgatatttactcattgcctcctgaccctaaatactttgatggatatgatca

SEQ ID NO: 175223 - DNA, 80 bp, synthetic construct
  source 1..80: mol_type = other DNA
ttaccaacacctcaagacggccttaggcttaactgaaaaaaccacatacgaaaaccactataaaaataacttatataaga

SEQ ID NO: 175224 - DNA, 80 bp, synthetic construct
  source 1..80: mol_type = other DNA
ccccacaacaactttagtttcaaaaattaaaaaatacagacaaaaaaggtttaagtggctaacaacaccaagcagccaaa

SEQ ID NO: 175225 - DNA, 80 bp, synthetic construct
  source 1..80: mol_type = other DNA
tcttccagcaactaataaagacacaacagggggtacacatagatccatgcctactataggtccccagcagtggctttttc

SEQ ID NO: 175226 - DNA, 80 bp, synthetic construct
  source 1..80: mol_type = other DNA
gttcatcagggcactcgtgaagagaaactgtcatataatcacaacaagcaagggtgagtttaacctacttggagtgcatg

SEQ ID NO: 175227 - DNA, 80 bp, synthetic construct
  source 1..80: mol_type = other DNA
gtatcaaactgtccacgctaacctcatccagcacggccagggtgcaatcagacaggtagttgtacatggacacgtagtcc

SEQ ID NO: 175228 - DNA, 80 bp, synthetic construct
  source 1..80: mol_type = other DNA
ccagcagggtccctctccctcgcggcccttcactcctccgtcaacaccacgccctgtgatccgtagagccctgccggcac

SEQ ID NO: 175229 - DNA, 80 bp, synthetic construct
  source 1..80: mol_type = other DNA
ctacagcacttaaatttgatggctctaaccaaaacgcatgtaatgacacctggtactatggcaatgcatacacctcctca

SEQ ID NO: 175230 - DNA, 80 bp, synthetic construct
  source 1..80: mol_type = other DNA
atcaacccagagcccataacactagaacaagctgtttatggaacagaaggtttggaaccattggacctcaacacaagtgc

SEQ ID NO: 175231 - DNA, 80 bp, synthetic construct
  source 1..80: mol_type = other DNA
cattttccatacagaggttgttgtttttgtggatcctaagaggtttcaagtgcgaatcttaaagttctcacgagaatatt

SEQ ID NO: 175232 - DNA, 80 bp, synthetic construct
  source 1..80: mol_type = other DNA
atcattataacaatgggtgcacaagtctcatcacagaaagttggagcacatgagaataccaatgtggcaacgggtggttc

SEQ ID NO: 175233 - DNA, 80 bp, synthetic construct
  source 1..80: mol_type = other DNA
ggctgcgcccccccccctgcgcatgcgcgcggagcccccccccgcgcgcatgcgcagggagaaggcgcagccgcccgtcg

SEQ ID NO: 175234 - DNA, 80 bp, synthetic construct
  source 1..80: mol_type = other DNA
tagaaggagactaaaaaagagaaaaaagattgtaataactcaatggaatccctccgtggtaaaaaaatgtgtgattcgcg

SEQ ID NO: 175235 - DNA, 80 bp, synthetic construct
  source 1..80: mol_type = other DNA
actggccaccatgaaaaagagaaagataatacttcctagctataagactaaacccaaggggcccattaaaaagactataa

SEQ ID NO: 175236 - DNA, 80 bp, synthetic construct
  source 1..80: mol_type = other DNA
attgaaatgtgtcaagttgatactttaatacctgtaaacaatgtgcaggcttcaaaaaataacataagtatgtacacagt

SEQ ID NO: 175237 - DNA, 80 bp, synthetic construct
  source 1..80: mol_type = other DNA
actgcatctccccccttaccaaagtctatatacacaatggattgatgaattcatttgaaatttacatatagtacaatgtt

SEQ ID NO: 175238 - DNA, 80 bp, synthetic construct
  source 1..80: mol_type = other DNA
gcactagttttcccccatcaatggatcaatttgcgcaccaataactgtgcaaccattatcatgccatatgttaatgcact

SEQ ID NO: 175239 - DNA, 80 bp, synthetic construct
  source 1..80: mol_type = other DNA
aactcatggggttcacaaatggacttgacagatcctttgtgtatagaggacagtgttgaagattgtaagcaagatatctc

SEQ ID NO: 175240 - DNA, 80 bp, synthetic construct
  source 1..80: mol_type = other DNA
ttaatagatagactatgtaaatctaaacatatttttagaaacacttattatgaggttgaaggtggggttccatcagggtg

SEQ ID NO: 175241 - DNA, 80 bp, synthetic construct
  source 1..80: mol_type = other DNA
ccagatggactccatgatagcaaatataaagtatggcacattaatttacaagagatggcccagattaggcgaaaatttga

SEQ ID NO: 175242 - DNA, 80 bp, synthetic construct
  source 1..80: mol_type = other DNA
aaacaggagatgttgcagtttccattgtacccaggacaaatgttagggaaatcagaaactttggacccagtgacatgtat

SEQ ID NO: 175243 - DNA, 80 bp, synthetic construct
  source 1..80: mol_type = other DNA
tagcacaactttcccccgcttttagaccagccttaaaaccaactaacacaaccccaaacaccaacgctacaagcactaca

SEQ ID NO: 175244 - DNA, 80 bp, synthetic construct
  source 1..80: mol_type = other DNA
tggcgtatggggtgtggccacattacttaacaccacaagatgcaactgccattgacaaaccgtcacaaccagaaacttca

SEQ ID NO: 175245 - DNA, 80 bp, synthetic construct
  source 1..80: mol_type = other DNA
acatgagccccctctatgccgtggaaaataagagggttgctagtatgctgagagagctcaagacaatgactgcttatcag

SEQ ID NO: 175246 - DNA, 80 bp, synthetic construct
  source 1..80: mol_type = other DNA
taagaaaaagataataatacccagtctcaaaaccagacccagcagaaaacactatgtaaagataaagataggggccccca

SEQ ID NO: 175247 - DNA, 80 bp, synthetic construct
  source 1..80: mol_type = other DNA
aacctttttaatgacagaatgaactccatgttatacgctctttatatagtttctctgcactaacctttaaaatcgtatcc

SEQ ID NO: 175248 - DNA, 80 bp, synthetic construct
  source 1..80: mol_type = other DNA
tgtcgtggaccataaacgctaggagaatggttcagttgaggcggaagtttgagttgttcacctatatgcggttcgacatg

SEQ ID NO: 175249 - DNA, 80 bp, synthetic construct
  source 1..80: mol_type = other DNA
ggtcttggtttgctcgtggttttttgggcgacgttggggacgtggggccgggggtttctgggcgacgttggtgacggttg

SEQ ID NO: 175250 - DNA, 80 bp, synthetic construct
  source 1..80: mol_type = other DNA
gcttcccgcccgatacttacgcagaacgtagtatcacactgaaagattcttggttggtcgttcagttacatccccagtaa

SEQ ID NO: 175251 - DNA, 80 bp, synthetic construct
  source 1..80: mol_type = other DNA
ttcaagctggaggtgttacccatcggactctttatgagcacacacaacatctcgcctcgggcatcccaacggagaccttt

SEQ ID NO: 175252 - DNA, 80 bp, synthetic construct
  source 1..80: mol_type = other DNA
aagtgaaagatactgaggaagcaagaaagatagcacagagccatctagcggtgaacacagaaaaaacaccagctacaagt

SEQ ID NO: 175253 - DNA, 80 bp, synthetic construct
  source 1..80: mol_type = other DNA
aaaaaaggaacacactacgaccccaaagccagcaagtgccacatagcagacctaccgctatggatggcagtgtttggcat

SEQ ID NO: 175254 - DNA, 80 bp, synthetic construct
  source 1..80: mol_type = other DNA
cttatatataatatgtggtcgcgtgtggtctttttaaggagccctgaaacacagacaggtatgggcggtggccggctgcc

SEQ ID NO: 175255 - DNA, 80 bp, synthetic construct
  source 1..80: mol_type = other DNA
aggatttattgtggacctccttagtgcctccaaagacccgaaagtcatagagttctgtgagaaagagggatggatcaaac

SEQ ID NO: 175256 - DNA, 80 bp, synthetic construct
  source 1..80: mol_type = other DNA
aggcacttcagagcccaccaccggcctccacagacccagacaccatgctatcaggtaacgcaggagaaggagcaacagcc

SEQ ID NO: 175257 - DNA, 80 bp, synthetic construct
  source 1..80: mol_type = other DNA
gttttttctgctaagtctttaatcttgtggtctacaacacaatataagaaactgcacttccgaatggctgagttttccac

SEQ ID NO: 175258 - DNA, 80 bp, synthetic construct
  source 1..80: mol_type = other DNA
agattcaaatcccaggtcaagtaagaaatttaatggagattgccgaggtggactcagttgttcctgtaaacaacactgag

SEQ ID NO: 175259 - DNA, 80 bp, synthetic construct
  source 1..80: mol_type = other DNA
ctgatgccagtgatgtagatacagaagttactttattgtggctggaccgcaatgagaagttcagggacattcgtcggttc

SEQ ID NO: 175260 - DNA, 80 bp, synthetic construct
  source 1..80: mol_type = other DNA
actaggcacgtggtaaattataagacaaggtctgagagcacattagagtctttctttggtaggtcagcctgtgtaacagt

SEQ ID NO: 175261 - DNA, 80 bp, synthetic construct
  source 1..80: mol_type = other DNA
tagacaaaggcataggcaacatgatttggatagacccaataacaaaatccaacagtgaataccaagaaggcaaatctaaa

SEQ ID NO: 175262 - DNA, 80 bp, synthetic construct
  source 1..80: mol_type = other DNA
caagacggtggcacccaaaagggatttgaggtgtgggacatagacgtaatgggatttgttcaactcagaagaaaattaga

SEQ ID NO: 175263 - DNA, 80 bp, synthetic construct
  source 1..80: mol_type = other DNA
cttttgtgagccagactgccttttaccaaaatgatgtgcagaatgcaattgaccgagcgatagttcgcgtggctgacacg

SEQ ID NO: 175264 - DNA, 80 bp, synthetic construct
  source 1..80: mol_type = other DNA
ggagccagctgctgcgcgcgccctcgagcgcgcgaccgatgccaccatcgatggcatcgaaggtgctggtaaggtcgcca

SEQ ID NO: 175265 - DNA, 80 bp, synthetic construct
  source 1..80: mol_type = other DNA
caaactctaccagttaccatttccattgcaccagataaatcagaattctctggagctagacagtctgttgagccccaagg

SEQ ID NO: 175266 - DNA, 80 bp, synthetic construct
  source 1..80: mol_type = other DNA
gttctgtaatgcagcccgtgggttggagtggattggtaacaagttatcaaagttcattgactggctgaaatccaagattc

SEQ ID NO: 175267 - DNA, 80 bp, synthetic construct
  source 1..80: mol_type = other DNA
tactggacaaagcctagtagcaccctacgatgtagcatggttggttgttccgccagtatcccctggtaaacctggcagat

SEQ ID NO: 175268 - DNA, 80 bp, synthetic construct
  source 1..80: mol_type = other DNA
cctcgacggcggtactgaagccgccgtcgagccactttttaaagtcggtcatgaagttgttgatctgctgaaactgcgga

SEQ ID NO: 175269 - DNA, 80 bp, synthetic construct
  source 1..80: mol_type = other DNA
ttcagaagagtgtttggcaacttgtacgctggcttccatgcaaacccaggtatcctaactgggtcagctataggctgtga

SEQ ID NO: 175270 - DNA, 80 bp, synthetic construct
  source 1..80: mol_type = other DNA
ttttagccttgacagcagacttgcaggtggatgctaccacagaatcaggaagtgacgtcataccggattgtgattgcatg

SEQ ID NO: 175271 - DNA, 80 bp, synthetic construct
  source 1..80: mol_type = other DNA
ccgtgtgtactttaaaccgaaacacattagggtctgggtaccacgaccaccgcgcctatgcccctacatcaagtccagca

SEQ ID NO: 175272 - DNA, 80 bp, synthetic construct
  source 1..80: mol_type = other DNA
acgatggatattttccgcattcccgtccagagtgggaaccatcaaagcacacaggtttttggctttcaagttcaaccagg

SEQ ID NO: 175273 - DNA, 80 bp, synthetic construct
  source 1..80: mol_type = other DNA
atggagaacaaaattgacattcccaaagcaggggcatggtgcactctcgcaattctttgcatactatacaggagagctga

SEQ ID NO: 175274 - DNA, 80 bp, synthetic construct
  source 1..80: mol_type = other DNA
caataagatttaggtactgtgccccgccagggtttgctttgctaaggtgtaatgatactgattattcaggcttcagccct

SEQ ID NO: 175275 - DNA, 80 bp, synthetic construct
  source 1..80: mol_type = other DNA
agccatgttcataccacctggcgcaccaaatccaattaaatgggatgattacacatggcaaagtgcttcaaatccaagtg

SEQ ID NO: 175276 - DNA, 80 bp, synthetic construct
  source 1..80: mol_type = other DNA
agaaaagcacacagaccaataggaggtggtcacccagatcacttacggtcaagcacttctgtttccccggttgatctaga

SEQ ID NO: 175277 - DNA, 80 bp, synthetic construct
  source 1..80: mol_type = other DNA
cccggatccgggctcgccaaacacccctccgtaagagccgacgaggaactgtccgcgaccttggcgagagacatcgtgtt

SEQ ID NO: 175278 - DNA, 80 bp, synthetic construct
  source 1..80: mol_type = other DNA
ggagatcaccactcgcgagatggtgcagctgcggaggaagtgtgaactcttcacctacatgcgatatgatctagaaatca

SEQ ID NO: 175279 - DNA, 80 bp, synthetic construct
  source 1..80: mol_type = other DNA
gtagaatgaagaacactcataaggaacaaaaactatttaatgactggaaaataaacttatccagtttggttcagttcagg

SEQ ID NO: 175280 - DNA, 80 bp, synthetic construct
  source 1..80: mol_type = other DNA
aagtgatcccatccgacttagtacagactcggcatgtgatccagacacgcagtcgcagcgaatccatggtggagtcattc

SEQ ID NO: 175281 - DNA, 80 bp, synthetic construct
  source 1..80: mol_type = other DNA
acacaccctggtgaagttggtagagatgttggcaaggaaaatcgagagccggcaaacaaccaacccagtgatgataattg

SEQ ID NO: 175282 - DNA, 80 bp, synthetic construct
  source 1..80: mol_type = other DNA
aaatttctcatagcatataccccacctggaggtggcatacctgcaagcaggaaggatgctatgcttggtgtccatgtcat

SEQ ID NO: 175283 - DNA, 80 bp, synthetic construct
  source 1..80: mol_type = other DNA
tctacgcagcttttgcgcggcggtgttttcgggcgtgctgggcgccggcggtgttttcgggcgtgctgggcgccggcgcc

SEQ ID NO: 175284 - DNA, 80 bp, synthetic construct
  source 1..80: mol_type = other DNA
agctataactaagcccggtgtcgatggaggccatctcgtgatgcacctcaaaggttaccgcgtccaccctggcctcccgg

SEQ ID NO: 175285 - DNA, 80 bp, synthetic construct
  source 1..80: mol_type = other DNA
ttttaggtacacctctcgtgacgaacattcagcagctgggtacatcacatgttggtaccagacacaacttgtctttcctc

SEQ ID NO: 175286 - DNA, 80 bp, synthetic construct
  source 1..80: mol_type = other DNA
cacaataaatacaaggcctgcaaaattcacatctcggtgtctgttcctttaagtaaaaacttatataaacatccaccact

SEQ ID NO: 175287 - DNA, 80 bp, synthetic construct
  source 1..80: mol_type = other DNA
ttttacaacacccggatgtccatccaagccacacatttagaaacaaattatacttcactaatggaccaactgaaaaacaa

SEQ ID NO: 175288 - DNA, 80 bp, synthetic construct
  source 1..80: mol_type = other DNA
acccgccggagacgccgagtaccggcccgaagacctcgacgagctgtacgccgctatcgaaagagaccaagagtaaggag

SEQ ID NO: 175289 - DNA, 80 bp, synthetic construct
  source 1..80: mol_type = other DNA
gccacgtgaacgggccatcaccactaccaatgaccagcacagtaagagtgtacttcaaaccaaaacatgtaaaagcatgg

SEQ ID NO: 175290 - DNA, 80 bp, synthetic construct
  source 1..80: mol_type = other DNA
cgccgctgctgccgcggctgagtccgtattgtctggcagcagggaggccagcagggtgttccagtcatcgggcgaagtgg

SEQ ID NO: 175291 - DNA, 80 bp, synthetic construct
  source 1..80: mol_type = other DNA
gagtgcctatacaatgcgtccaacgaaaagcgtaaagataacgtctgtgcgtagggggggggggggagcatctttgctat

SEQ ID NO: 175292 - DNA, 80 bp, synthetic construct
  source 1..80: mol_type = other DNA
aggttggggcggacaacgtgttgcggatcgtggcgagaacgtcgtcctccccttcttcaccgccccacccaccctcggtt

SEQ ID NO: 175293 - DNA, 80 bp, synthetic construct
  source 1..80: mol_type = other DNA
ccacaagcattatggaaacaaatgatgccgtgttggcagtaaacaccagcaaatttccaaacatgtacatcccagttgga

SEQ ID NO: 175294 - DNA, 80 bp, synthetic construct
  source 1..80: mol_type = other DNA
aggagccacattttacttttacagagacaaaaaaactgactttatagtaaccttcaacacagtacctccttttaaaataa

SEQ ID NO: 175295 - DNA, 80 bp, synthetic construct
  source 1..80: mol_type = other DNA
gaacaaaaatcatcttctttagacaccccacggtagactttgtggtacaaatacacacacagcctcccttccaagacaca

SEQ ID NO: 175296 - DNA, 80 bp, synthetic construct
  source 1..80: mol_type = other DNA
tacatctaaagtccccataacaatatcaataagtccaatgtgcgctgaattttctggtgcaagggcaagacccagcgcaa

SEQ ID NO: 175297 - DNA, 80 bp, synthetic construct
  source 1..80: mol_type = other DNA
acaccacaggagtgggcagacgaataccagacggcctctgtgtggggcaggccggtgcgctcctactacacagacacccc

SEQ ID NO: 175298 - DNA, 80 bp, synthetic construct
  source 1..80: mol_type = other DNA
gaatttgagaggaaaatacgcagtgtcagcgctggacgtgcactgtatattcctccttatgatctcctgctgcatgagtg

SEQ ID NO: 175299 - DNA, 80 bp, synthetic construct
  source 1..80: mol_type = other DNA
tggacgcgaggatctgcaggccacccaggctccatacccgggatacgaggagccacggcccccccaggctccttttgtag

SEQ ID NO: 175300 - DNA, 80 bp, synthetic construct
  source 1..80: mol_type = other DNA
cccaggttgtgctgtcagaaaattgtcacattctgctcatatctataagggtacttattatgaagtggatgggggaatgc

SEQ ID NO: 175301 - DNA, 80 bp, synthetic construct
  source 1..80: mol_type = other DNA
tgccaccagccaagtaaccccagaggatgtcattgagacacgacatgtaataaacagcagactcagatcagaaagtacga

SEQ ID NO: 175302 - DNA, 80 bp, synthetic construct
  source 1..80: mol_type = other DNA
ataacaccaatgatactattagggacaagagtatgtacacaattagacttggtggtgtgacaaatgctaaggaagccatt

SEQ ID NO: 175303 - DNA, 80 bp, synthetic construct
  source 1..80: mol_type = other DNA
ccacccagctccccttcccggcccgccccgctggcttttgggcccctccgggctttttttccggctggtggtcgcggcgc

SEQ ID NO: 175304 - DNA, 80 bp, synthetic construct
  source 1..80: mol_type = other DNA
agatattgatcatagtaacatgtccttagaagatagtgtctttggcatagagggtcttgaagcattggatttaaatacta

SEQ ID NO: 175305 - DNA, 80 bp, synthetic construct
  source 1..80: mol_type = other DNA
tgaagatatgattgaaacacgctatgtgcagattacacaaactagagatgaaatgagtgttgaaagtttccttggtaggt

SEQ ID NO: 175306 - DNA, 80 bp, synthetic construct
  source 1..80: mol_type = other DNA
tggacaattcggaatccactacatccaaagacaggctattctccgtgtggaaaataacatacaaggacacagtacagttg

SEQ ID NO: 175307 - DNA, 80 bp, synthetic construct
  source 1..80: mol_type = other DNA
tagagaccagagcgactgtcaagacagcaggccctagtgatatgtatgtacatactaaggaagccatttacaagaatgct

SEQ ID NO: 175308 - DNA, 80 bp, synthetic construct
  source 1..80: mol_type = other DNA
ttggatttactccattgagtgttttcaccccagacgtaattcgtgtggttctgctgattagaagtttctatcacaatggg

SEQ ID NO: 175309 - DNA, 80 bp, synthetic construct
  source 1..80: mol_type = other DNA
atgtagactggattcattatgagtaccccacgcataaaatgtgcgaattaggcaactatcaccaaacaacaccacggcac

SEQ ID NO: 175310 - DNA, 80 bp, synthetic construct
  source 1..80: mol_type = other DNA
gtacacaccagggtattgtcactgattatgtcaaccagttaggcaccgcctttggtgatggattctctagtaatatcaag

SEQ ID NO: 175311 - DNA, 80 bp, synthetic construct
  source 1..80: mol_type = other DNA
cccgagtggattcattcatgccaattaacaacatcaaacaaaagctagatgtgcccatctatagtttgacagtgactgca

SEQ ID NO: 175312 - DNA, 80 bp, synthetic construct
  source 1..80: mol_type = other DNA
ataccaaatttattagatggtgaattgttagcctttgactattcaaattttgatgctagtttatccccagtgtggtttga

SEQ ID NO: 175313 - DNA, 80 bp, synthetic construct
  source 1..80: mol_type = other DNA
atcacgtacaccaacactgtacaactccgtaggaaacttgagttctttacatattccagatttgacttagaaatgacatt

SEQ ID NO: 175314 - DNA, 80 bp, synthetic construct
  source 1..80: mol_type = other DNA
gcggacccgttttgcggaactggccaagcgacgcggtacgcgtctctccaacgagggagccctgcccaacccccggaaac

SEQ ID NO: 175315 - DNA, 80 bp, synthetic construct
  source 1..80: mol_type = other DNA
aacgtctcccttgcgcggcgcagggactctaaggcaccccgagcagatgtaaactgtgtttcaaacagagcgtggtccct

SEQ ID NO: 175316 - DNA, 80 bp, synthetic construct
  source 1..80: mol_type = other DNA
gtgttctccccacgggaaaaagaatagcttctgcagaaggccattgacgcaagttttgcccgtggggattacccgaccca

SEQ ID NO: 175317 - DNA, 80 bp, synthetic construct
  source 1..80: mol_type = other DNA
ctgcatcgccaggttttaaaattttagaacttacattaagaggtttaaactgcaagcctttcaattgtttaggaaactct

SEQ ID NO: 175318 - DNA, 80 bp, synthetic construct
  source 1..80: mol_type = other DNA
cttccccatgagacagatgccagagggactgaccccatcagcccctccggacccagcagcagaaatgctcgaggagtata

SEQ ID NO: 175319 - DNA, 80 bp, synthetic construct
  source 1..80: mol_type = other DNA
gcgcaccacatggactgttacattaatttgtatagcctgtgtacttctgtttttcgcacgacgggcctttaataaaaagt

SEQ ID NO: 175320 - DNA, 80 bp, synthetic construct
  source 1..80: mol_type = other DNA
tttgcctcccctcccaagtgtaacttagaagtttgtactttataaaggccaataggcgggtagtcaaccacactactcat

SEQ ID NO: 175321 - DNA, 80 bp, synthetic construct
  source 1..80: mol_type = other DNA
cacagccacactagcattacttggttgtgacggatctccatggaggtatctcaaaatgtatatcagtaaacacttttgct

SEQ ID NO: 175322 - DNA, 80 bp, synthetic construct
  source 1..80: mol_type = other DNA
aaattagtgactgatatgcaaaagcaactgaaccaactcaaggcatatcagcgcacgcacaggactgaaccagtgtgttt

SEQ ID NO: 175323 - DNA, 80 bp, synthetic construct
  source 1..80: mol_type = other DNA
ttattggtactatggaaatgcctacaatcatacatgtgaaggtacaatttcgggatatctcctgggcatgtgcaagctat

SEQ ID NO: 175324 - DNA, 80 bp, synthetic construct
  source 1..80: mol_type = other DNA
cctacaaatatcaattagacatggaagcaattgccaaggaaggtgttaaatatggtctaaccataaccccagctgacaaa

SEQ ID NO: 175325 - DNA, 80 bp, synthetic construct
  source 1..80: mol_type = other DNA
ctgcacaaagcaaccagacccctttggagggtctctatctactacctcatttaacttaaaggtgctatatgaccaaaatc

SEQ ID NO: 175326 - DNA, 80 bp, synthetic construct
  source 1..80: mol_type = other DNA
gggacggggggtgtgcgtggacggggggtgtgcgtggacgtggggtgtgcgtagacgtggggtgtgcagccccggggagg

SEQ ID NO: 175327 - DNA, 80 bp, synthetic construct
  source 1..80: mol_type = other DNA
gaggtcgagaatttcaatgcgagtacaactgaagacaagaaaaagcagttcactacttggcccatcacatacacaaacac

SEQ ID NO: 175328 - DNA, 80 bp, synthetic construct
  source 1..80: mol_type = other DNA
ggactgggccacagagtacctagcggctaagatatttgacaggccagtcaggagcaacctaaaagacaccccctactacc

SEQ ID NO: 175329 - DNA, 80 bp, synthetic construct
  source 1..80: mol_type = other DNA
gtaacgtaccgggtgcgggtcgcgcgcttcgcgcgcgcccgggacaagcccgcccccccccccgcgcatgcgcgcggcgc

SEQ ID NO: 175330 - DNA, 80 bp, synthetic construct
  source 1..80: mol_type = other DNA
acaaattatagaaaatatgattagaaaatcagaaatttatttggcctgggtgccagcccataaaggaataggagggaatc

SEQ ID NO: 175331 - DNA, 80 bp, synthetic construct
  source 1..80: mol_type = other DNA
ataaggatggtataaaattggaaatcacagttctcaaactcaaaagaaatgagaaattcaaggatattagaaaatacatt

SEQ ID NO: 175332 - DNA, 80 bp, synthetic construct
  source 1..80: mol_type = other DNA
cgaaagagtcaaaggggtggtggtggaaactaccgaacacactaagggacatgggactattcgggcaaaacatgtactac

SEQ ID NO: 175333 - DNA, 80 bp, synthetic construct
  source 1..80: mol_type = other DNA
aatagaaaagattatgcaaactgttgctaatacaatagagagtgaagttaaggcagagttgggtgtgataccatctctta

SEQ ID NO: 175334 - DNA, 80 bp, synthetic construct
  source 1..80: mol_type = other DNA
gataatataaagcgacgcacttccgaatggctgagtttatgccgcccgtccgcagcgagatcgcgacgaaggagcgatcg

SEQ ID NO: 175335 - DNA, 80 bp, synthetic construct
  source 1..80: mol_type = other DNA
ccaaagacaagatagagtatatcaccaaactgaaacaattaagcatgcttgagaatcagatcaacaccatacaccagtcc

SEQ ID NO: 175336 - DNA, 80 bp, synthetic construct
  source 1..80: mol_type = other DNA
ttagaacaaaatatttaactgctacaaggttagctctaccattactacaaacacaaggagatgaactactagaataccac

SEQ ID NO: 175337 - DNA, 80 bp, synthetic construct
  source 1..80: mol_type = other DNA
tgtagtggttcaccttggagatttctcaaagaaaaattttgtaagtggactcaattgacttacatacacaaagaatcaga

SEQ ID NO: 175338 - DNA, 80 bp, synthetic construct
  source 1..80: mol_type = other DNA
cccaccctggtgagcagggcagggaaatagatccaaaccggagatctactgacaacaagagacctagtgatgataattgg

SEQ ID NO: 175339 - DNA, 80 bp, synthetic construct
  source 1..80: mol_type = other DNA
cctacctcagacagatacgagtaccatgtgggaatgttcagtcccattttcctcacaccgttcaggtcagctggcctaga

SEQ ID NO: 175340 - DNA, 80 bp, synthetic construct
  source 1..80: mol_type = other DNA
cgagtgggtgagagaaatactggaggaactaaaagaagaagctgtaaggcattttgatcctcgcttgctaactgcgcttg

SEQ ID NO: 175341 - DNA, 80 bp, synthetic construct
  source 1..80: mol_type = other DNA
gatcagggtgcatccatgaatcagtgttagacattgtagataattacgatgatcaaagctttactaaatggaagataaac

SEQ ID NO: 175342 - DNA, 80 bp, synthetic construct
  source 1..80: mol_type = other DNA
gctagtaagtaacttaagcccgtcagccacagggtttcccgagggcacaacaattaacaaaacgcaaatagaacagtaca

SEQ ID NO: 175343 - DNA, 80 bp, synthetic construct
  source 1..80: mol_type = other DNA
aggttccaagttaataatgaattgtggcaaggtgtaaaagcctgtgtcaagtctaaatttagggagatttttggggtcaa

SEQ ID NO: 175344 - DNA, 80 bp, synthetic construct
  source 1..80: mol_type = other DNA
attaactcagctcttcctctatggggactgtattttaaaattatttcataatgaaggattttatataataaaagaagtag

SEQ ID NO: 175345 - DNA, 80 bp, synthetic construct
  source 1..80: mol_type = other DNA
cgactagtagaaaacaagccatgctaggaacccacattatctgggatctgggtctgcagtcaagctgtgtgctttgtgtg

SEQ ID NO: 175346 - DNA, 80 bp, synthetic construct
  source 1..80: mol_type = other DNA
aggctagacattccccaccagcgatggtggtctagcctgcgtggctgcctgcacaccctatgggtgtgaagccaaattta

SEQ ID NO: 175347 - DNA, 80 bp, synthetic construct
  source 1..80: mol_type = other DNA
aaataaaacaccacccgcacaaatgaaagaagcaaacaaagcatatataaatgcagccaaaaaaaacctaccaaactggg

SEQ ID NO: 175348 - DNA, 80 bp, synthetic construct
  source 1..80: mol_type = other DNA
tcatgaatgacattaaaaacaccggaccgtgggcctacagagacgagagggcaagcaccaccttgtgcatggcctacacc

SEQ ID NO: 175349 - DNA, 80 bp, synthetic construct
  source 1..80: mol_type = other DNA
taccaccagaaatcaatagatgaaaactttccaacaacctggagaggaaacatggccttttctcatctaacaggcatata

SEQ ID NO: 175350 - DNA, 80 bp, synthetic construct
  source 1..80: mol_type = other DNA
cgaccgcgccaccagatggcacacgtgggggaaatgagggttagcataggcaacccccgcctacacaccaactatagcaa

SEQ ID NO: 175351 - DNA, 80 bp, synthetic construct
  source 1..80: mol_type = other DNA
cagcgagtctgcaaaagccagaggagtgcaaggagaccctgcattttgccaccttacaggcatatactcacctccctggc

SEQ ID NO: 175352 - DNA, 80 bp, synthetic construct
  source 1..80: mol_type = other DNA
tgatactagctacgtaacaaaatataaagagctagaaaacaaattatattctgaatgcacttactttcaaactacacaag

SEQ ID NO: 175353 - DNA, 80 bp, synthetic construct
  source 1..80: mol_type = other DNA
aacaaaatactaatacccagctatgacactaaacccaagggcaaacaaaaagtttctattagaataccccctcctaaatt

SEQ ID NO: 175354 - DNA, 80 bp, synthetic construct
  source 1..80: mol_type = other DNA
ccgaggcgcttaaggatatgggactatttgggcagaacatgttttatcattaccttgggcgatccggatacaccatacac

SEQ ID NO: 175355 - DNA, 80 bp, synthetic construct
  source 1..80: mol_type = other DNA
gcaatcatcatgccatatggttatcccatggattagttctcacttctttagaagaacaaggaaggacaattacacagaag

SEQ ID NO: 175356 - DNA, 80 bp, synthetic construct
  source 1..80: mol_type = other DNA
cacacacactatctaggcaattacaaaaatcttgtaaattaaatggtgtgtacaccaacccaacagctagcgaatttatg

SEQ ID NO: 175357 - DNA, 80 bp, synthetic construct
  source 1..80: mol_type = other DNA
actatggatgccccaccaccacctgcaatagcagacttgttgcaatcagttagaaccccagaagtaattaaatactgtga

SEQ ID NO: 175358 - DNA, 80 bp, synthetic construct
  source 1..80: mol_type = other DNA
gaaattgaagataaatgtgataaggatgaagaggaaagtggaacggaagatgttacaagcataccgcaaacactgccgca

SEQ ID NO: 175359 - DNA, 80 bp, synthetic construct
  source 1..80: mol_type = other DNA
gtcaaggagcaattcgggctcgggactggccgggctatgggcaaggctcttaaaaaagcatgtttctcggcagggcttgg

SEQ ID NO: 175360 - DNA, 80 bp, synthetic construct
  source 1..80: mol_type = other DNA
ctgagttcatgatggggtccaacacagattcaaatactgggggcatcacatacgataaagccaatccagtggaggttgga

SEQ ID NO: 175361 - DNA, 80 bp, synthetic construct
  source 1..80: mol_type = other DNA
acggcggcgacgaggacaactcgctctcgacggaggccgggacgacagaggacgggagtgtggtggcgccggaggacgga

SEQ ID NO: 175362 - DNA, 80 bp, synthetic construct
  source 1..80: mol_type = other DNA
ctgcaaccgcagcccacccgcacttcccgaggatgctacccttctaatcaaatggttggacacggccctgggcagggagg

SEQ ID NO: 175363 - DNA, 80 bp, synthetic construct
  source 1..80: mol_type = other DNA
cttagggacttccaagttgctgaagaacaaggaataccagaatacatccactctcttggtgaagcttttggttcagggtt

SEQ ID NO: 175364 - DNA, 80 bp, synthetic construct
  source 1..80: mol_type = other DNA
tttactacctgccctaaggatgaattaagacctctggacaaagtgttggaatccaagactagggctattgattcttgtcc

SEQ ID NO: 175365 - DNA, 80 bp, synthetic construct
  source 1..80: mol_type = other DNA
cgctaatgaagcaaccgaggttgaacctgtttacttgtcagaaaatcaacatgacatcctggtacaggaatgcctcaaag

SEQ ID NO: 175366 - DNA, 80 bp, synthetic construct
  source 1..80: mol_type = other DNA
accagaccgggaggcaaaccctccataaaagtcagagtaaagccccccactacactaatagacaagtggtactttcaaca

SEQ ID NO: 175367 - DNA, 80 bp, synthetic construct
  source 1..80: mol_type = other DNA
ttaaatacactaaaagtattctctcaaatcaagggccctttaaaggtttcaacgaggtttcaacagcttttaggcacata

SEQ ID NO: 175368 - DNA, 80 bp, synthetic construct
  source 1..80: mol_type = other DNA
ttgttgttctctgtatatatcgtgtggtggctttatcgtcatcattattatcatcattcttgtttccatcatcacgatga

SEQ ID NO: 175369 - DNA, 80 bp, synthetic construct
  source 1..80: mol_type = other DNA
gacatgattgaggggcatgtgtcaactgcgatgaatgatatcctcaacccccaccagcaaccaacagctagcaatgttga

SEQ ID NO: 175370 - DNA, 80 bp, synthetic construct
  source 1..80: mol_type = other DNA
aacttccaaataaagcttgcagaatgagtcattcgaggccctcctctgttcacttagcggtatctacctcttaaggtcac

SEQ ID NO: 175371 - DNA, 80 bp, synthetic construct
  source 1..80: mol_type = other DNA
acactacttttggcaatggcaagatgcccaatggctcaggccacatcccagtatactggcaacagagatggtggcccaga

SEQ ID NO: 175372 - DNA, 80 bp, synthetic construct
  source 1..80: mol_type = other DNA
cccgccaggaaacagtggagaagagaccattggagaggccttcgagtggctagacaggactatagaagccttgaacagag

SEQ ID NO: 175373 - DNA, 80 bp, synthetic construct
  source 1..80: mol_type = other DNA
tctgccagctacacagagcacacctgccatgagctggtacccgccggtgcataatgccgccgggagagaaagaaacttct

SEQ ID NO: 175374 - DNA, 80 bp, synthetic construct
  source 1..80: mol_type = other DNA
tgcactaacaagaggggaagaggcttgtgaattcaaagacaccaacaacacgaatgcaaacgatgtacaaaacgtagtcc

SEQ ID NO: 175375 - DNA, 80 bp, synthetic construct
  source 1..80: mol_type = other DNA
gtggaagttaatgtccagagatcacctctgattctggcccccaacgcctctggcatgtttgagtcccgctggctgaacat

SEQ ID NO: 175376 - DNA, 80 bp, synthetic construct
  source 1..80: mol_type = other DNA
tgttcataacgctgggatgggcgttggggttggtaatttgactatatatccacaccagtggatcaacctcagaactaaca

SEQ ID NO: 175377 - DNA, 80 bp, synthetic construct
  source 1..80: mol_type = other DNA
aaatacaaggtttgtcagtggttgcaggtcaatccaccaccaagccgccaaagtgacagttggctaaagaaattcactga

SEQ ID NO: 175378 - DNA, 80 bp, synthetic construct
  source 1..80: mol_type = other DNA
ggcatcaacgccgacaacacaaattacggcatatctgaaactaatgacatggggactttgtgcttccgagcactggatgg

SEQ ID NO: 175379 - DNA, 80 bp, synthetic construct
  source 1..80: mol_type = other DNA
aaagctgtgatccaaggaccagaacatgaattcggtatggccctgattaaaagaaactgtcacatagccacaacagatag

SEQ ID NO: 175380 - DNA, 80 bp, synthetic construct
  source 1..80: mol_type = other DNA
ttatgacgggtggtcacatttcaatcaatcaggcgtttatgggttcaataccctgaacaacatgggcagactgtttatga

SEQ ID NO: 175381 - DNA, 80 bp, synthetic construct
  source 1..80: mol_type = other DNA
aaaccaaaactcaagagataacataataaccaactttttattaaaaaacatgaccacgtaccacaaaaaaataacagacg

SEQ ID NO: 175382 - DNA, 80 bp, synthetic construct
  source 1..80: mol_type = other DNA
ccggcctggactcagtgttcaagagaacactactgggagaggtgctcaactactatgcacactggtcaggaagtatcaag

SEQ ID NO: 175383 - DNA, 80 bp, synthetic construct
  source 1..80: mol_type = other DNA
ccaacatctcccatgacggcaactacctgtgccgcatgaaactgggcgagaccgaggtcaccaagcaggaacacctgagc

SEQ ID NO: 175384 - DNA, 80 bp, synthetic construct
  source 1..80: mol_type = other DNA
agaccacaactccaaccacatctgcaccatcaaacataatagtcaatgacaattttccatgcgtaaagaataacaactgc

SEQ ID NO: 175385 - DNA, 80 bp, synthetic construct
  source 1..80: mol_type = other DNA
gcgcgggcagccacggcccagactgcggtcgcgatggcccggagcgcgctcgccaccacgatgacggtgcccaacgataa

SEQ ID NO: 175386 - DNA, 80 bp, synthetic construct
  source 1..80: mol_type = other DNA
cctctacgcccgaccgcacccaccattttgtcacctctgtcacgccacaaccactcacgatgccaccaaggcctcctcct

SEQ ID NO: 175387 - DNA, 80 bp, synthetic construct
  source 1..80: mol_type = other DNA
ctccctgacatcataaccatgagaaaatgtataaaatgtatatatcacttcctgtaaaaactgatatggtacaatggttg

SEQ ID NO: 175388 - DNA, 80 bp, synthetic construct
  source 1..80: mol_type = other DNA
tacatagacgaagtcttaaatgaagttttagtggtaccaaatatcagagagagtcatggaacaacatcaaactctgctcc

SEQ ID NO: 175389 - DNA, 80 bp, synthetic construct
  source 1..80: mol_type = other DNA
aggaaggaataatgtcaagccccggccagcaagtgggctttattgcataagtgacatcgtccttttccccaagatagaaa

SEQ ID NO: 175390 - DNA, 80 bp, synthetic construct
  source 1..80: mol_type = other DNA
ctccatgatgaaggcacacatagatgctgacaaagctcaagctgccagcaccaactaccctgggtctggcactacacctt

SEQ ID NO: 175391 - DNA, 80 bp, synthetic construct
  source 1..80: mol_type = other DNA
ttcatcaggcccaaaacggccaagaacagaaattcctccagaaaatgcagaagaaggctcatattccagggaacaaaaac

SEQ ID NO: 175392 - DNA, 80 bp, synthetic construct
  source 1..80: mol_type = other DNA
ttggaatggtcttgagtcaattgggtttccctggtgagctcatgaagaagttgtgcaacaccacccacatatacaaagac

SEQ ID NO: 175393 - DNA, 80 bp, synthetic construct
  source 1..80: mol_type = other DNA
ggccggcgagcccgaaagtccatgcgcacagatggcatgagtccttgagtgacggtggtgagctggggaacagggctacc

SEQ ID NO: 175394 - DNA, 80 bp, synthetic construct
  source 1..80: mol_type = other DNA
actgtgattgacgtattgtagcgtgtaatttaggttgcactcagcctcgaagtagagggggaaccacagttcgtcgtact

SEQ ID NO: 175395 - DNA, 80 bp, synthetic construct
  source 1..80: mol_type = other DNA
gtatgatcaccgctggtggggaaggtcacgtggcttttattgacctgcgtccgtactccatagtgacagagcaccagggt

SEQ ID NO: 175396 - DNA, 80 bp, synthetic construct
  source 1..80: mol_type = other DNA
tggtgacatgatacacattgctcaactattttcagtcatgtcagacaccacaaccccatcaacttctagtgggattgatg

SEQ ID NO: 175397 - DNA, 80 bp, synthetic construct
  source 1..80: mol_type = other DNA
gccactacgaattgctttctaaaagtaagcagtctatggggagaccacgtatatgacaaaagcaaattaatatccgggtg

SEQ ID NO: 175398 - DNA, 80 bp, synthetic construct
  source 1..80: mol_type = other DNA
ggagcaggaggagtggcaggagcaggagaaggggcaggagcaggagaaggtgcaggagcaggaggaggtgcaggagcagg

SEQ ID NO: 175399 - DNA, 80 bp, synthetic construct
  source 1..80: mol_type = other DNA
atgttagagtttggtgtccaagaccaccacgagcagtaccatacaacggtactggggtagacatcaaggaaaacacattg

SEQ ID NO: 175400 - DNA, 80 bp, synthetic construct
  source 1..80: mol_type = other DNA
ctgtacccaagaatgagggctataacaatgacagctggaagataagaaaacaactctttcaaaaggttgaaagcagagag

SEQ ID NO: 175401 - DNA, 80 bp, synthetic construct
  source 1..80: mol_type = other DNA
cgcgggcacggaccgcaacgtgctgctgatgtctgccgcggtacgcacgtcgccgtccatgtcgctgcgcagataagagg

SEQ ID NO: 175402 - DNA, 80 bp, synthetic construct
  source 1..80: mol_type = other DNA
tccaaatgctctaggatacttgatgtgcaaaccattcctaacaggaactgacagaggaaaaatagaagtgtatcttagtt

SEQ ID NO: 175403 - DNA, 80 bp, synthetic construct
  source 1..80: mol_type = other DNA
aaaccaccaagaaagatccaaaaccacaaacaacaaaatcaaaagaagtccccaccaccaagccaacagaagaacccacg

SEQ ID NO: 175404 - DNA, 80 bp, synthetic construct
  source 1..80: mol_type = other DNA
aaagtggttttccacggtttaccattcctttcactggcttggggtcagcatactacatgttctatgatggttatgatgaa

SEQ ID NO: 175405 - DNA, 80 bp, synthetic construct
  source 1..80: mol_type = other DNA
cactagtactgagacagccacatcaacatacagtacaacagttatcagcaataaaagcacttcagaatctataaattgct

SEQ ID NO: 175406 - DNA, 80 bp, synthetic construct
  source 1..80: mol_type = other DNA
caaaacgagtatatgtaccactatccaggcacacaaacatttgatattataagcaaaaacacactatcacacgactatgg

SEQ ID NO: 175407 - DNA, 80 bp, synthetic construct
  source 1..80: mol_type = other DNA
gtgtttctcccccctttcgaccgccctatggcaggcgggcttgtggacggcttcggcccacccacagcaagaatgccatc

SEQ ID NO: 175408 - DNA, 80 bp, synthetic construct
  source 1..80: mol_type = other DNA
atagagaacttcatgtgtcgagctgcctgtgtgtacatcgcccgttatgggacggacaagcagggagagcaaatatctag

SEQ ID NO: 175409 - DNA, 80 bp, synthetic construct
  source 1..80: mol_type = other DNA
attagatgtcacggcagcctgggtccggcacggcaccctctccccagacagtccggtcggagccatcaagggaggccagt

SEQ ID NO: 175410 - DNA, 80 bp, synthetic construct
  source 1..80: mol_type = other DNA
aagaccaagtgcacgggctggggctgaccggtgagctggtagagccgccgttccatgagtttgcatatgagagtctaagg

SEQ ID NO: 175411 - DNA, 80 bp, synthetic construct
  source 1..80: mol_type = other DNA
aaaagaaagctattgattggtttgatcgtaacaaagaacatatatgtgcaatcctagactatgcctcagacataatagta

SEQ ID NO: 175412 - DNA, 80 bp, synthetic construct
  source 1..80: mol_type = other DNA
tgctcaatagattaacatacaatagttccagtccaaatactgtacactgcatcgtgcaaggcagactaggggacgatgcc

SEQ ID NO: 175413 - DNA, 80 bp, synthetic construct
  source 1..80: mol_type = other DNA
gtaccggaaccaccgccaccaccgcggtcgtgcttcttgccgccaccgccgccacctcctcccagaccgccgagacccat

SEQ ID NO: 175414 - DNA, 80 bp, synthetic construct
  source 1..80: mol_type = other DNA
actagtacttactctctccccccagacccctctcactttgatggatataaacagcaaggggtcgtgattatggacgatct

SEQ ID NO: 175415 - DNA, 80 bp, synthetic construct
  source 1..80: mol_type = other DNA
cagagaaccatgggcctcgaagcggaacggtttgtgtcccttccagggactggcgatccagctccagccgtccagcggct

SEQ ID NO: 175416 - DNA, 80 bp, synthetic construct
  source 1..80: mol_type = other DNA
gctgtggcgatcccgtgcttcattttaataacattgctgctcgctttcactatctgcctgctacctcctcgcctctggac

SEQ ID NO: 175417 - DNA, 80 bp, synthetic construct
  source 1..80: mol_type = other DNA
gtttggtgcgggtcagatgccagacgggtccacctacgtgcccattaagtggaggggaaagtggtaccccaacatgatac

SEQ ID NO: 175418 - DNA, 80 bp, synthetic construct
  source 1..80: mol_type = other DNA
ggcgagagcacgggcgtgcggaagagatgccggtagagcggttgcgtctcggcctcgtccagactggcgatgagcgccga

SEQ ID NO: 175419 - DNA, 80 bp, synthetic construct
  source 1..80: mol_type = other DNA
ggtaacccaacaactagactgctgaaatatgactatccaaccaaaccaggccagtgtggcggtgtaatattgaacacagg

SEQ ID NO: 175420 - DNA, 80 bp, synthetic construct
  source 1..80: mol_type = other DNA
gctccgggtggagtgggaatagcgtccaggcatctttcagggtcacgagaccggggtccatgcttagaaaacagccctcc

SEQ ID NO: 175421 - DNA, 80 bp, synthetic construct
  source 1..80: mol_type = other DNA
aacagtcaagaagtgccagctttgaccgcggttgagaccggtgcctcaggacaagcagtaccatcagatgttatcgaaac

SEQ ID NO: 175422 - DNA, 80 bp, synthetic construct
  source 1..80: mol_type = other DNA
tttattgtgaaaattttagttagaatactttgctacatggttttgtattgtcacaagcctaacattctcactacagcttg

SEQ ID NO: 175423 - DNA, 80 bp, synthetic construct
  source 1..80: mol_type = other DNA
acttgacactattgatagtaccattagtcacacttagagccagcactgatactacaccggtggtgtctataactgtaact

SEQ ID NO: 175424 - DNA, 80 bp, synthetic construct
  source 1..80: mol_type = other DNA
atactggatgcaaagatggagggtctactctcaatttcaaaaagaaaccatgaacagaatatgcaggaccggaccgttca

SEQ ID NO: 175425 - DNA, 80 bp, synthetic construct
  source 1..80: mol_type = other DNA
aaaccatcaggaacaaaactaacagcacttaatgtacttaacacatttagaacagagggctgtgctagccatccacaatt

SEQ ID NO: 175426 - DNA, 80 bp, synthetic construct
  source 1..80: mol_type = other DNA
tagactactatgaatatcacgcaggctggttcagtaacatatttataggccccaacagatacaatttacaattccaaaca

SEQ ID NO: 175427 - DNA, 80 bp, synthetic construct
  source 1..80: mol_type = other DNA
acagtgggagggacatgggaggagttggtggggaacgcccattaagcctctgtataaatgtacccgcttcttgcattgta

SEQ ID NO: 175428 - DNA, 80 bp, synthetic construct
  source 1..80: mol_type = other DNA
acggcttgagtgagggggaagttgccaagaaattctcgaagaccagcaccaatggtacaaacacagtgcagtcaattgta

SEQ ID NO: 175429 - DNA, 80 bp, synthetic construct
  source 1..80: mol_type = other DNA
gtgatttcttgcttgcccggcgtcacacggtgacgcagcagcgcgcggctcacgtagcaggccgactcgcggatgacctg

SEQ ID NO: 175430 - DNA, 80 bp, synthetic construct
  source 1..80: mol_type = other DNA
ccggctagaacctgtcccacagacaaccccttctatccctggctgcccacaaagccccctcacccgtaccagggttacaa

SEQ ID NO: 175431 - DNA, 80 bp, synthetic construct
  source 1..80: mol_type = other DNA
ctacacagatccccctctagttcacaaagacaaatctaaaaataactggggctatgtattctacgacgcccactttggca

SEQ ID NO: 175432 - DNA, 80 bp, synthetic construct
  source 1..80: mol_type = other DNA
tggaagtcttggcggcgttggtatttaaaaaccagcgatccctgagaacgctccaggtagagtttccagccctgggccaa

SEQ ID NO: 175433 - DNA, 80 bp, synthetic construct
  source 1..80: mol_type = other DNA
aaagaagtctctctctagatgcggggtcgactgcgtggggtgctggaagtggaagcggtgctgatgggtgagtgtcgtgg

SEQ ID NO: 175434 - DNA, 80 bp, synthetic construct
  source 1..80: mol_type = other DNA
tggtcagaaatagtgctgacaccccaaccattttagccacactctctctcttgggctgccactcgtcgccatggaacttt

SEQ ID NO: 175435 - DNA, 80 bp, synthetic construct
  source 1..80: mol_type = other DNA
gacagcgttgttacaaggtgatacagaagtggctgtcaacaacgccatggccagagtggcggacacaatcgccagtgggc

SEQ ID NO: 175436 - DNA, 80 bp, synthetic construct
  source 1..80: mol_type = other DNA
agtaacattaacattgtagcaaacagagacagtaactatgactggtttcccttaaacccactaaatgcaccaggcccaac

SEQ ID NO: 175437 - DNA, 80 bp, synthetic construct
  source 1..80: mol_type = other DNA
atgctaacccaggtgtgctgactggttcagcagtgggatgtgacccggatgtattctggtcacaaatacactctatgctt

SEQ ID NO: 175438 - DNA, 80 bp, synthetic construct
  source 1..80: mol_type = other DNA
cgaaagaatcaaagggatggtggtggaagctaccagacgcactaagggatatggggttgtttgggcaaaacatgtactac

SEQ ID NO: 175439 - DNA, 80 bp, synthetic construct
  source 1..80: mol_type = other DNA
cccctaggatccactggatgttagtacactggtatcgcggtacctttgtacgcctgttttatatccccttccccgcaact

SEQ ID NO: 175440 - DNA, 80 bp, synthetic construct
  source 1..80: mol_type = other DNA
accaccgaagaggagacgacgtcaatgcaaagacagcctccgctcgggcaacaaccgcccccccccgtgatttctaccgg

SEQ ID NO: 175441 - DNA, 80 bp, synthetic construct
  source 1..80: mol_type = other DNA
ttgtatagtgcagggtagattaggaaatgatgccagattttattgtcctactgggtctttagttgaatttcaaaactcat

SEQ ID NO: 175442 - DNA, 80 bp, synthetic construct
  source 1..80: mol_type = other DNA
ggtgtgtgacatcctagaaattccattcgtgttaaaacagggggactcttggatgaaaaagttcacagaggcatgtaatg

SEQ ID NO: 175443 - DNA, 80 bp, synthetic construct
  source 1..80: mol_type = other DNA
ggctacgtattctacgacgcccactttggcaacggaaagaccccggagggactgggccaagtacacccctactggatgca

SEQ ID NO: 175444 - DNA, 80 bp, synthetic construct
  source 1..80: mol_type = other DNA
ttctgatgctttaggttttctaatgtgcaaaccattgatacctagtaacacaagcacctttgcggagatatacattagcc

SEQ ID NO: 175445 - DNA, 80 bp, synthetic construct
  source 1..80: mol_type = other DNA
ggccatctatgaacaatttctgtaccacagaaacagatggagcacctctaaccacgacctagacctagccaggtaccaag

SEQ ID NO: 175446 - DNA, 80 bp, synthetic construct
  source 1..80: mol_type = other DNA
gaagcttcctgatgctttgaaagatatgggaatatttggacaaaacatgtttttccattcacaaggcagaacaggttaca

SEQ ID NO: 175447 - DNA, 80 bp, synthetic construct
  source 1..80: mol_type = other DNA
gtacatgatgtcacccagagaacccagctgagatgcccagggattcacagtgctccggtattcataggcggcatccgggc

SEQ ID NO: 175448 - DNA, 80 bp, synthetic construct
  source 1..80: mol_type = other DNA
ataaattatttcaaagatgccgcctctagtggtgcatcaaagttagaattctcacaagatcctagcaaatttacagaccc

SEQ ID NO: 175449 - DNA, 80 bp, synthetic construct
  source 1..80: mol_type = other DNA
tgttatatacagtaatctagctaacacaatacttcaaaataacgaagtatggtttacgaaggctaaaaaagcatggacta

SEQ ID NO: 175450 - DNA, 80 bp, synthetic construct
  source 1..80: mol_type = other DNA
ggaggaggctatcaacagagcggttgcaagggtggctgatacaatgccaactggaccgcgcaacactgagagtatacctg

SEQ ID NO: 175451 - DNA, 80 bp, synthetic construct
  source 1..80: mol_type = other DNA
actattaccacgcgcaaagtggctcagttacgcagaaagcttgagatgttcacttacctaagatttgaccttgaagtgac

SEQ ID NO: 175452 - DNA, 80 bp, synthetic construct
  source 1..80: mol_type = other DNA
agtctggcttgatttcttttatctatgatcgattcttctttttctcgggggttgcatcttccgtgaaagtaaagtgacac

SEQ ID NO: 175453 - DNA, 80 bp, synthetic construct
  source 1..80: mol_type = other DNA
agttcgtcgttgcggcaagcagtcctgccacaaagcctaatgggcaaggattatatccagactttgcccataccaaccct

SEQ ID NO: 175454 - DNA, 80 bp, synthetic construct
  source 1..80: mol_type = other DNA
ccaggggcagcatattatggtgcaacttccatcaacgacttcggcatccttgcagtaagagtagttaatgaacacaaccc

SEQ ID NO: 175455 - DNA, 80 bp, synthetic construct
  source 1..80: mol_type = other DNA
gtacatgtcatgggtcattagtcctagaaggatggtgcagatgcgtaggaagtttgaactcttcacttacctacgttttg

SEQ ID NO: 175456 - DNA, 80 bp, synthetic construct
  source 1..80: mol_type = other DNA
acagatacccacaacgacaaacacgaaagtccagaccaccccatgtactaacatcaccaggaccgtcacttgtgatggtt

SEQ ID NO: 175457 - DNA, 80 bp, synthetic construct
  source 1..80: mol_type = other DNA
cacatatgcttataggagccgggtttgcaatgccaggtgactgtggagggattttaagatgcacccatggggtaatgggc

SEQ ID NO: 175458 - DNA, 80 bp, synthetic construct
  source 1..80: mol_type = other DNA
ggtactcaatttcagctagtcacatgggattctgttactttcctaaaacggggttttaagaatgattcaaaatacccctt

SEQ ID NO: 175459 - DNA, 80 bp, synthetic construct
  source 1..80: mol_type = other DNA
tttaccaaaaagtacactcacagtggaaagcagtagctgaagacaactataaactagtagctaaagaatacaaagaagta

SEQ ID NO: 175460 - DNA, 80 bp, synthetic construct
  source 1..80: mol_type = other DNA
aacagatgaaggcccccaagccacctcagactatggcaaacaccacacgtggactaagcccactaataactactacgaat

SEQ ID NO: 175461 - DNA, 80 bp, synthetic construct
  source 1..80: mol_type = other DNA
aagagacaaacggccctgtaaagaacccggtatacaatatggatggaacattactaggtaatctgctcatatttccccat

SEQ ID NO: 175462 - DNA, 80 bp, synthetic construct
  source 1..80: mol_type = other DNA
ctcatgcatggtcttgttcacctgctcttcgatgcacttgaaggcgtccgggagctctatgcccacggttgtgttggtca

SEQ ID NO: 175463 - DNA, 80 bp, synthetic construct
  source 1..80: mol_type = other DNA
actctgttgggcgagatattgaactattacacccattgggctgggtccatcaaatttacattcctattttgtgggagcat

SEQ ID NO: 175464 - DNA, 80 bp, synthetic construct
  source 1..80: mol_type = other DNA
ttttatcagacaaagattgtggtacctctgagtactccaaccaaaatggatatgctggcctttgtaagtgcgtgtcctga

SEQ ID NO: 175465 - DNA, 80 bp, synthetic construct
  source 1..80: mol_type = other DNA
actgaagcagtaacagtaaccgcagatacgccatacaccaatttctcagacacctggtacagaggcattgcatacacaaa

SEQ ID NO: 175466 - DNA, 80 bp, synthetic construct
  source 1..80: mol_type = other DNA
ggacagcgacagctgcccatcgcgacagcgcttcaacaccgattccaacacctcgccttcgaaacgcgcatccagatgga

SEQ ID NO: 175467 - DNA, 80 bp, synthetic construct
  source 1..80: mol_type = other DNA
tcaaacgaatactttcaaacactagatggtctctggggaaatcctatatatgcaaactccagaaacaacgaaggatcatc

SEQ ID NO: 175468 - DNA, 80 bp, synthetic construct
  source 1..80: mol_type = other DNA
tgtaccatacacaactgtaaactcaaccaattatatgcctcatactggtgatctgcaaattttcattaaacctagaacag

SEQ ID NO: 175469 - DNA, 80 bp, synthetic construct
  source 1..80: mol_type = other DNA
tgtctgccaccggcggttcggtgattaaatattttaacatcaactactataaagattctgctagttcagggttgactaag

SEQ ID NO: 175470 - DNA, 80 bp, synthetic construct
  source 1..80: mol_type = other DNA
ggcaaaacgtaactttcctgaaaagaggatttgaaccagatacaaagcacccatttttaattcacccaattttcccaatg

SEQ ID NO: 175471 - DNA, 80 bp, synthetic construct
  source 1..80: mol_type = other DNA
ttggtgtagtatttaacacatttaaaacagaagaacacataagagacccaaattttaaaacatttaaaaacaccaataca

SEQ ID NO: 175472 - DNA, 80 bp, synthetic construct
  source 1..80: mol_type = other DNA
acagtaggtaaggtaaatgagcaagtgtttggcaccagaatgttcattggggatggtgtttttaaaaccacactttttgg

SEQ ID NO: 175473 - DNA, 80 bp, synthetic construct
  source 1..80: mol_type = other DNA
tgggtgatcgctatggcttccggccgtggccccgcgctcctggggcaccaggtgtaggcggcccagacgtacccccccgt

SEQ ID NO: 175474 - DNA, 80 bp, synthetic construct
  source 1..80: mol_type = other DNA
gggcgttgcgcgaacggagctggatgaagcagcgttcgggccaggccacgtgcagccgggtgccgcattcctgctccaga

SEQ ID NO: 175475 - DNA, 80 bp, synthetic construct
  source 1..80: mol_type = other DNA
ttaaggctgcccttgagcgtcaagccgctgcgggcttgcgaccttcaccagggtctggaacgggtgccaagattgtgcag

SEQ ID NO: 175476 - DNA, 80 bp, synthetic construct
  source 1..80: mol_type = other DNA
cacaattacaggaggacaaaagctgataagttcactgagggtggatatgtcagtgtgtggtatcaaacaacatttgtctc

SEQ ID NO: 175477 - DNA, 80 bp, synthetic construct
  source 1..80: mol_type = other DNA
agtagacaggaaagcagcagcataaagaggaactagctgacgctgcataagaaaggaaactggctgacactgcagggact

SEQ ID NO: 175478 - DNA, 80 bp, synthetic construct
  source 1..80: mol_type = other DNA
agcacatagttcaacccgcgtcacaacaatataaacaatctacaaatggcaattactatacaaaagtacaaagtgtttgg

SEQ ID NO: 175479 - DNA, 80 bp, synthetic construct
  source 1..80: mol_type = other DNA
atgatggggccacgactaaggtgcctatcaccctgaccgttgcaccgatgtgctgtgagtttaacgggcttagatcgctg

SEQ ID NO: 175480 - DNA, 80 bp, synthetic construct
  source 1..80: mol_type = other DNA
taacatataaaagcgagaagtatacatataagggttgctagacacaggtttgtttctgtgctagcccaatggcacttgta

SEQ ID NO: 175481 - DNA, 80 bp, synthetic construct
  source 1..80: mol_type = other DNA
atgctagtagaccactcaaacgacctgcaaggctttgtactctacagcaaaaactttggagagggcaaaatgcccggagg

SEQ ID NO: 175482 - DNA, 80 bp, synthetic construct
  source 1..80: mol_type = other DNA
gcatgccccccctcccggaggctggactcctgaccagcctgtaggtgaggaccgagtccgacaggaggtctcccaaaccc

SEQ ID NO: 175483 - DNA, 80 bp, synthetic construct
  source 1..80: mol_type = other DNA
gaagaaaaagagtgagcgtttgtagctgcggtactgcgtgaccatgctcacgttgaaaatggtcaggcagaaaaagtgca

SEQ ID NO: 175484 - DNA, 80 bp, synthetic construct
  source 1..80: mol_type = other DNA
ttgacacctgggtccgagcaattcctgactacagatgatagacaatctccatcagctctaccaaattatgagcccacccc

SEQ ID NO: 175485 - DNA, 80 bp, synthetic construct
  source 1..80: mol_type = other DNA
ctgtacaattcagaatgatttttggaaatctattctcaagttttcatgcaaaccctgggattctaacaggatcggctgtt

SEQ ID NO: 175486 - DNA, 80 bp, synthetic construct
  source 1..80: mol_type = other DNA
actggtcttcttcacgctaactggtggttccacatcctcattctcactcctctcactcctccaaccgatggagaccagac

SEQ ID NO: 175487 - DNA, 80 bp, synthetic construct
  source 1..80: mol_type = other DNA
ctggggcgactacatatacaaacacactgtagtagataactttatagcaaatgcaaacaactatttcactgctagacaag

SEQ ID NO: 175488 - DNA, 80 bp, synthetic construct
  source 1..80: mol_type = other DNA
taaagtgagctaccagaccctgtgctatattatcaaattgaacacaataaaatgggtgctcaagtgtcgacacaaaagac

SEQ ID NO: 175489 - DNA, 80 bp, synthetic construct
  source 1..80: mol_type = other DNA
actctggacaaagtcattcacgtcccatcagttagaagcacgggagcatttgggcaacaatccggtgccatttacgtggg

SEQ ID NO: 175490 - DNA, 80 bp, synthetic construct
  source 1..80: mol_type = other DNA
agcagatggtaccccagacttaaattccaactacaagtactacatgacctatatgtaacagggccctttagctacaaaga

SEQ ID NO: 175491 - DNA, 80 bp, synthetic construct
  source 1..80: mol_type = other DNA
agagacaaagttgaatacataaccaagctaaagcaactgagcatgttggaaaaccagataaacacaatacatcagtcgtg

SEQ ID NO: 175492 - DNA, 80 bp, synthetic construct
  source 1..80: mol_type = other DNA
tgtgtccacccgcgagggcttcttttatgcgggctgtaagcaacttcataactgcttttgtggttgtgatgattttatta

SEQ ID NO: 175493 - DNA, 80 bp, synthetic construct
  source 1..80: mol_type = other DNA
acccctgtctacacagatgatgagaaatgaattcagagttagtacaacagagaatgtagtcaatttgtccaattatgaag

SEQ ID NO: 175494 - DNA, 80 bp, synthetic construct
  source 1..80: mol_type = other DNA
aaagatccaagattagaagtcaatcttaaggaagctgtgatgtctaagtacaaaggtaatgcagaaattgcaatgaatga

SEQ ID NO: 175495 - DNA, 80 bp, synthetic construct
  source 1..80: mol_type = other DNA
tcaggttgtgcccagtgatactatccagacacggcacgtacgcaactaccattccagaactgaatccacattagaaaatt

SEQ ID NO: 175496 - DNA, 80 bp, synthetic construct
  source 1..80: mol_type = other DNA
aaggtaacacaagcttagaagtgactcataacatgaaggttgctgcaacccattatgcagctcaattaatgactctagat

SEQ ID NO: 175497 - DNA, 80 bp, synthetic construct
  source 1..80: mol_type = other DNA
accgggtaatgcagctcacactaggtaattctaccataaccacccaggaagcagccaatgcggtgattgggtatggtgaa

SEQ ID NO: 175498 - DNA, 80 bp, synthetic construct
  source 1..80: mol_type = other DNA
ctcgtggcatccttcagattcagacgagtctgactacagcgagagcgacgaggatgaagcaacccccggctctcaggcct

SEQ ID NO: 175499 - DNA, 80 bp, synthetic construct
  source 1..80: mol_type = other DNA
gctgcggtgcggtgcggtagggacggcggtcgcggaggacggcgacggcgaataaaagcgacgtgcgcggcgcacgtcgc

SEQ ID NO: 175500 - DNA, 80 bp, synthetic construct
  source 1..80: mol_type = other DNA
caagcagcagcgactcggagagcagctccggctcctccagagccacctcctcaaaacgcaagcgggtctccacctaaacc

SEQ ID NO: 175501 - DNA, 80 bp, synthetic construct
  source 1..80: mol_type = other DNA
tcaggtaccaacggtatatattccaaaaaaacagatagtaactatggataccactcttttcaagttaaaaacaaaaaaaa

SEQ ID NO: 175502 - DNA, 80 bp, synthetic construct
  source 1..80: mol_type = other DNA
cataaaacatgcggtcgtagctacgaagtaatcaacgtaacgggacacgttggtagtaacgttactctgaaaaaatgtaa

SEQ ID NO: 175503 - DNA, 80 bp, synthetic construct
  source 1..80: mol_type = other DNA
ctgttccctattttgggccaggagttgactataagggggatgcactcacaccactatcacgtaaggatttgacaacttat

SEQ ID NO: 175504 - DNA, 80 bp, synthetic construct
  source 1..80: mol_type = other DNA
tcccaatggggtaaaccttgaaatcacaatagtggaattggataggaatgagaagtttagagatataagaacacacatcc

SEQ ID NO: 175505 - DNA, 80 bp, synthetic construct
  source 1..80: mol_type = other DNA
agacgcgctaactaaatctcaagaaggaagcacagacttctgcactgtactacagtacaaaagcagaaatggagaaatgt

SEQ ID NO: 175506 - DNA, 80 bp, synthetic construct
  source 1..80: mol_type = other DNA
cgtcacttgtcatacactcaaacaacttcaaggacactatcttaacggttggtgccaccacactagccggcataataaat

SEQ ID NO: 175507 - DNA, 80 bp, synthetic construct
  source 1..80: mol_type = other DNA
ttcgatctcatgtcgctcttggagcgcgaagagagttggcgtcgcgtagtcgactactcgcacaacctgtggtgtacgtg

SEQ ID NO: 175508 - DNA, 80 bp, synthetic construct
  source 1..80: mol_type = other DNA
ggactaaccgcaaccggtacaacacaacaaaacttgtggaccgaagtacaaaacacaacagcactatcaccaacaggctc

SEQ ID NO: 175509 - DNA, 80 bp, synthetic construct
  source 1..80: mol_type = other DNA
agaccacctccagggctagaccagccaaaccagggagggccggaaggtcccggaggtccccccagaggcccgccagctct

SEQ ID NO: 175510 - DNA, 80 bp, synthetic construct
  source 1..80: mol_type = other DNA
aatacaaattcacacatccgggtgaacagggcattgatctaggtactagtggtgaaagaactggacctgctaaggacgca

SEQ ID NO: 175511 - DNA, 80 bp, synthetic construct
  source 1..80: mol_type = other DNA
atcgggtacgaccggaggaacaggacccacaacccctacaagttgtccaccacattgactaacatatacacaggatcggg

SEQ ID NO: 175512 - DNA, 80 bp, synthetic construct
  source 1..80: mol_type = other DNA
gaatcgcttgcgcgattcggacctgcggcctcgggggggtcgggggctttactaaacagactccgagttgccattggact

SEQ ID NO: 175513 - DNA, 80 bp, synthetic construct
  source 1..80: mol_type = other DNA
acaatagaagctaaaatcagagtatacatgaaaccaaaacatgttagggtgtggtgtccaaggccaccacgtgcagtccc

SEQ ID NO: 175514 - DNA, 80 bp, synthetic construct
  source 1..80: mol_type = other DNA
acaatgcaatgcgtccaagttccaccagggatgcttgctggttgtgtgtgtgcctgaggctgaaatggggtgttcaaaag

SEQ ID NO: 175515 - DNA, 80 bp, synthetic construct
  source 1..80: mol_type = other DNA
gataagtttgcaagagatggctcaaatacgtaggaaatttgaattattcacttatgtaagatttgactcagaagtgacaa

SEQ ID NO: 175516 - DNA, 80 bp, synthetic construct
  source 1..80: mol_type = other DNA
tccggactgggacagatacctgtttactggcagagcaggtggcgaccgtacctaaagtggcaactacaagtaatgaatga

SEQ ID NO: 175517 - DNA, 80 bp, synthetic construct
  source 1..80: mol_type = other DNA
cccatatgtgagtttaggaataaagaagaaagacatattaaacagagaaacacaggacacgtctaaaatggagcattatt

SEQ ID NO: 175518 - DNA, 80 bp, synthetic construct
  source 1..80: mol_type = other DNA
gcaggacaccaaggcctaccaaccatgaacaccccagggagcacgcaatttcttacatctgacgacttccaatcaccgtg

SEQ ID NO: 175519 - DNA, 80 bp, synthetic construct
  source 1..80: mol_type = other DNA
cacctagtgggaagggaggaaattaccccgtgcaaagcataggcggcaactatactcatgtgccgctaagtccccgaact

SEQ ID NO: 175520 - DNA, 80 bp, synthetic construct
  source 1..80: mol_type = other DNA
ccataacaggtaggaagtatggactcaccatcactccgcctgataaatccactgagtttaagaatatgacttgggaaagt

SEQ ID NO: 175521 - DNA, 80 bp, synthetic construct
  source 1..80: mol_type = other DNA
tcagttttctggcaagttggacaaacttaccccagatttactatacctttctccagcatagcatcagcttactacatgtt

SEQ ID NO: 175522 - DNA, 80 bp, synthetic construct
  source 1..80: mol_type = other DNA
cagctttgtttcactaggaaaggccttggcataatatatgagcgacctagaagaagaagagttaagaagaaggataaggt

SEQ ID NO: 175523 - DNA, 80 bp, synthetic construct
  source 1..80: mol_type = other DNA
agcaaaaaaaataataactccctggatttttggtaacccagatgacaaccacctagagtaccacgcaggcatgtacagca

SEQ ID NO: 175524 - DNA, 80 bp, synthetic construct
  source 1..80: mol_type = other DNA
cagaatctgaaatatactcactaccaccagatcccaaacactttgatggatatgatcaacagaaagttgtgataatggat

SEQ ID NO: 175525 - DNA, 80 bp, synthetic construct
  source 1..80: mol_type = other DNA
gacaaaattccagattgtgactgcaccagcggatgctattattcaaaagcacaggataggtacataccagttgagtgtga

SEQ ID NO: 175526 - DNA, 80 bp, synthetic construct
  source 1..80: mol_type = other DNA
tttcagaaacaagtactacatgacattagcctctgtggaccttttagctacaaagacgatgttaagaatacgtgcatcca

SEQ ID NO: 175527 - DNA, 80 bp, synthetic construct
  source 1..80: mol_type = other DNA
tagatttttgcaaaaggctaaaacagcttgatataatagaaagacaggttgaaacactgcacatgaaccacacaaatgaa

SEQ ID NO: 175528 - DNA, 80 bp, synthetic construct
  source 1..80: mol_type = other DNA
ccaggggtaccaaagcctgggtccagacaaaaggcaatgctctcaacacatgtagtttgggatgttggactgcaatctac

SEQ ID NO: 175529 - DNA, 80 bp, synthetic construct
  source 1..80: mol_type = other DNA
aatttcacagtggagctttgttagttgtcctgattcctgagcatcagttggcttacatcggcggggataaagttgatgtg

SEQ ID NO: 175530 - DNA, 80 bp, synthetic construct
  source 1..80: mol_type = other DNA
aatattacagtaccagcaactcaaggcttgccagtcctggttactccagggtccagccagtacttgacatccgatgattt

SEQ ID NO: 175531 - DNA, 80 bp, synthetic construct
  source 1..80: mol_type = other DNA
aaaaccaaccagtgaatacaatgaaagacagtgctataacttaattcagcacgtacccctgtgggcagctatacacggct

SEQ ID NO: 175532 - DNA, 80 bp, synthetic construct
  source 1..80: mol_type = other DNA
atgggccacatttatgtgagacatgtcaatgaacagaacctgggcgtttccactagcaccgtgcgtgtgtactttaaacc

SEQ ID NO: 175533 - DNA, 80 bp, synthetic construct
  source 1..80: mol_type = other DNA
tcacaggtcgtcccgagtgacaccatgcagacaaggcacgtcaaaaactaccattctagatcagagtcaacgattgagaa

SEQ ID NO: 175534 - DNA, 80 bp, synthetic construct
  source 1..80: mol_type = other DNA
tggattcactccattaacaccaaactccctaacactcatcaaactagttttgttgataagacactactatcataatgggt

SEQ ID NO: 175535 - DNA, 80 bp, synthetic construct
  source 1..80: mol_type = other DNA
ggttttctcagagtagctcacacatatgacagtgatgaggggcgagatgacttcttgtcatccaatggagtcattaccat

SEQ ID NO: 175536 - DNA, 80 bp, synthetic construct
  source 1..80: mol_type = other DNA
tattagtaagcactttcacctaccatatatagaaaggcaatcaaatgacttgtggtttaaaaagttcaatgacatgtgta

SEQ ID NO: 175537 - DNA, 80 bp, synthetic construct
  source 1..80: mol_type = other DNA
cctgggttgatacagaggagacagaaagactatggcatacttttgaaacaagtagtccctgatattacggcttataatca

SEQ ID NO: 175538 - DNA, 80 bp, synthetic construct
  source 1..80: mol_type = other DNA
tcccacaggagaaacaatacaaaatgatacaaatacttctggaaaaactacatggtcaccaaccactactacatgggatg

SEQ ID NO: 175539 - DNA, 80 bp, synthetic construct
  source 1..80: mol_type = other DNA
ctaaagatgcaggttaccacactattaacaccccatctaagagtaagctacaccctagtgtcttttatgacatctttcca

SEQ ID NO: 175540 - DNA, 80 bp, synthetic construct
  source 1..80: mol_type = other DNA
ggctgcagcttcaccttctacagacacaaaaagactgactttatagtgtggtggaacagaaagcctccctttaaactgaa

SEQ ID NO: 175541 - DNA, 80 bp, synthetic construct
  source 1..80: mol_type = other DNA
gaggggctctcagcactgtatcttttagcctaaaagtactgtatgatcagtatctaagacacctgaacagatggagcacc

SEQ ID NO: 175542 - DNA, 80 bp, synthetic construct
  source 1..80: mol_type = other DNA
tgtcttttagaaaacatgccactatggacccttgtattcgggtaccaagactgggtaaaaaaagaactaaacaactgggt

SEQ ID NO: 175543 - DNA, 80 bp, synthetic construct
  source 1..80: mol_type = other DNA
ttctatacattagaaagtgttgattggaagtctggatctaaaggttggtggtggaagttcccagatgccctaaaagatat

SEQ ID NO: 175544 - DNA, 80 bp, synthetic construct
  source 1..80: mol_type = other DNA
cattaaacaacatgggcaaattatacgcacgccatgtgaacaaagacacaccgtaccagatgtccagtacgattcgtgtg

SEQ ID NO: 175545 - DNA, 80 bp, synthetic construct
  source 1..80: mol_type = other DNA
tcactgctggtgggcctggaattgtcgcctttgcagacatccgtgacctctgggtttacgaagaagaggccatggagcag

SEQ ID NO: 175546 - DNA, 80 bp, synthetic construct
  source 1..80: mol_type = other DNA
agacacaggtggcttgaactattctaaaacttcatatatagagtgtttatttgcatagaatttttcctctataaaaaaaa

SEQ ID NO: 175547 - DNA, 80 bp, synthetic construct
  source 1..80: mol_type = other DNA
aacacactgttctccacaactttgctgggagaagtgcttaattacttttcaaactggtcaggttcaataaaactcagttt

SEQ ID NO: 175548 - DNA, 80 bp, synthetic construct
  source 1..80: mol_type = other DNA
ttgggtcccacgaccaccgcgcttgtgtccctacatcaaatccggcaatgttaacttcaacccaacaaacttgacagact

SEQ ID NO: 175549 - DNA, 80 bp, synthetic construct
  source 1..80: mol_type = other DNA
gcggttaggcctaaaaagtagatcgtttgactatccacgtttactttcttggaacctacatataacttcgtgttccaacg

SEQ ID NO: 175550 - DNA, 80 bp, synthetic construct
  source 1..80: mol_type = other DNA
gggtgggcacctggtagagtccgtcatcatcttcctcacctgcccctgagtcactgccggttggggtaagaactgaggtg

SEQ ID NO: 175551 - DNA, 80 bp, synthetic construct
  source 1..80: mol_type = other DNA
tcactacctcacttcatgggaccctaataatccaaatcacattaatcccacctacagcgacgcccgctattcagtgtatg

SEQ ID NO: 175552 - DNA, 80 bp, synthetic construct
  source 1..80: mol_type = other DNA
atgggacactgttaggaaatgcactcatatacccacatcagatgatcaacctccggacaaacaactctgcaaccatagtg

SEQ ID NO: 175553 - DNA, 80 bp, synthetic construct
  source 1..80: mol_type = other DNA
gggaatgtttgggcaaaacatgtaccatcattcaatgggtaggtttggagctctcatacacgttcaatgtaatgctacca

SEQ ID NO: 175554 - DNA, 80 bp, synthetic construct
  source 1..80: mol_type = other DNA
gggaggtttggacagtaaatgacattcagaaactagtgggagtattaaactgggcagctcaacttttccccggaatcaaa

SEQ ID NO: 175555 - DNA, 80 bp, synthetic construct
  source 1..80: mol_type = other DNA
gaattacgaagcgttgcatgatgaggccgtggctgtagttgcgcagcacgcattcgtacatgccggccgtgtccgtcgat

SEQ ID NO: 175556 - DNA, 80 bp, synthetic construct
  source 1..80: mol_type = other DNA
agaaaatttccatcacacatgcttccttgaagcgatcgagaaaatgcaaacgcgcggtcatgacctcgaaaagttgaaag

SEQ ID NO: 175557 - DNA, 80 bp, synthetic construct
  source 1..80: mol_type = other DNA
ataacagaataagtccagaaattagaggactttacaaagacataatatacaatcctttaacagacaaaggaataggtaac

SEQ ID NO: 175558 - DNA, 80 bp, synthetic construct
  source 1..80: mol_type = other DNA
gctccatgtcctgtggtgtgctttccaccggtggtagaattggcctttccacctgttgaggtgaccgtgggaaccgccgt

SEQ ID NO: 175559 - DNA, 80 bp, synthetic construct
  source 1..80: mol_type = other DNA
tccaggagaagtaaagaacctgttagaaattgcccaagtggacacgctggtacccataaacaatgctcaaggggttatgg

SEQ ID NO: 175560 - DNA, 80 bp, synthetic construct
  source 1..80: mol_type = other DNA
gagggtttgctgtaaacccggaagcaatcctcccacgtggttggtcacgtgactgctacgtcaccgccgccattttaagt

SEQ ID NO: 175561 - DNA, 80 bp, synthetic construct
  source 1..80: mol_type = other DNA
taatagttaaggaaaactacaaactcagtcagggcaaacttaacttacagtgtgcacttaaaccatgccaggatggtaaa

SEQ ID NO: 175562 - DNA, 80 bp, synthetic construct
  source 1..80: mol_type = other DNA
gaaaaacaaattgaaaatctgcgaggtgcggattcaaaaactcaggaaaaaattaaactagagatagatactctccatga

SEQ ID NO: 175563 - DNA, 80 bp, synthetic construct
  source 1..80: mol_type = other DNA
agggattctattcacatcagattatgtactggcatccaccaactcatataccatagcaccgccgacaatttcagcctcag

SEQ ID NO: 175564 - DNA, 80 bp, synthetic construct
  source 1..80: mol_type = other DNA
ggaattgaggacttgatatctgaggttgcgagcaatgcactgaagctatcacaaccaaaacctcaagcacagcagagcct

SEQ ID NO: 175565 - DNA, 80 bp, synthetic construct
  source 1..80: mol_type = other DNA
cagctttaaacttggctttaaaccctgaataaacaaggccatacactgttcacttgtcggtgtctacctcttaaggtcac

SEQ ID NO: 175566 - DNA, 80 bp, synthetic construct
  source 1..80: mol_type = other DNA
tccaacgacgattcagtcctgcgagccgccgagatgcgtgacaacgtggcaggctcgatttccaaagcgtacaagggcac

SEQ ID NO: 175567 - DNA, 80 bp, synthetic construct
  source 1..80: mol_type = other DNA
ggaacagggatttgttggttactcaatcaagagcacaaggaactgataccatcgcacgctgtcactgtaaatgtggtgtg

SEQ ID NO: 175568 - DNA, 80 bp, synthetic construct
  source 1..80: mol_type = other DNA
atggagacgacttgatatggggctccaatcaagactttcaccctcgtgaactccaggctttctatcagaaattcaccaac

SEQ ID NO: 175569 - DNA, 80 bp, synthetic construct
  source 1..80: mol_type = other DNA
gccgggaagaaggggctgcggacataggccggatccgcgcgcgccgtttggccggccctcagggaccggcagtatgcctc

SEQ ID NO: 175570 - DNA, 80 bp, synthetic construct
  source 1..80: mol_type = other DNA
ggagattatccgtatctgcatcctcgctaaccactaccgcaacagccgcgacgtgttgcgggacctgcgcacgcagctcg

SEQ ID NO: 175571 - DNA, 80 bp, synthetic construct
  source 1..80: mol_type = other DNA
ggtaaccgtgtctcagcctgcgtggcggccaacccagcttctgctgggacgccaattcattgacatggtgtgaagacctg

SEQ ID NO: 175572 - DNA, 80 bp, synthetic construct
  source 1..80: mol_type = other DNA
tggttcttccgtacgtcaacagtcttgccatagactgcatggccaaacataacaattgggggttagtcatcatgccactc

SEQ ID NO: 175573 - DNA, 80 bp, synthetic construct
  source 1..80: mol_type = other DNA
attttaaaagaaggggaggaataggggatatgactccatcagaaagactaatcaatatgatcaccacagaacaagagata

SEQ ID NO: 175574 - DNA, 80 bp, synthetic construct
  source 1..80: mol_type = other DNA
ttataaaaatattggttagaatactctgttatatggtactttactgccataagccaaacattttaacaactgcctgtcta

SEQ ID NO: 175575 - DNA, 80 bp, synthetic construct
  source 1..80: mol_type = other DNA
cagacggcgtgattgagcacctgcgccacggcgcgtaaaacgctggggtgtacggctacggtgcaggcgtggaacggcgt

SEQ ID NO: 175576 - DNA, 80 bp, synthetic construct
  source 1..80: mol_type = other DNA
tcatgatgggtagtaacacagctacttccactggtggtgtcacctatgcaaacgccaatccaggggaaagtggtggaaag

SEQ ID NO: 175577 - DNA, 80 bp, synthetic construct
  source 1..80: mol_type = other DNA
tcatgcatatcagagcagccaaagcttatagcaaagctggtaagcttaacattagccaggctatggccaccatgtcaact

SEQ ID NO: 175578 - DNA, 80 bp, synthetic construct
  source 1..80: mol_type = other DNA
atataaactttcaggaacaggcacagattaggaagaagtttgaattgttcacatacctccgttttgatatggaggttaca

SEQ ID NO: 175579 - DNA, 80 bp, synthetic construct
  source 1..80: mol_type = other DNA
agacgcagacgcagacgcagacataagcccaccctagtactcagacagtggcaacctgacgttatcagacactgtaagat

SEQ ID NO: 175580 - DNA, 80 bp, synthetic construct
  source 1..80: mol_type = other DNA
cgccgccgcgggtggcgccgccgatgggggagaagaagaggccgccgcgtacggcgaggaagaactagaagagcttttcc

SEQ ID NO: 175581 - DNA, 80 bp, synthetic construct
  source 1..80: mol_type = other DNA
aattgataaaccaactcatccagaaacctcaacagaccgattttacacactaaccagtgtgatatgggatacaacctcaa

SEQ ID NO: 175582 - DNA, 80 bp, synthetic construct
  source 1..80: mol_type = other DNA
attgattggactaatgtccatttcttaaaagagggtttagaccagactcggagttcccttttcttgtacatccagtatac

SEQ ID NO: 175583 - DNA, 80 bp, synthetic construct
  source 1..80: mol_type = other DNA
caaactgccccacgtcgtaggccttcgcggccgtctcgtagataggcagcatgaacccaccctggttggtggagaagatg

SEQ ID NO: 175584 - DNA, 80 bp, synthetic construct
  source 1..80: mol_type = other DNA
ggcttgaaactcacgagtggacaccatcatttgctagggggcaccagatcacacatgtggaattgccaaaaatattttgg

SEQ ID NO: 175585 - DNA, 80 bp, synthetic construct
  source 1..80: mol_type = other DNA
gtggagtcgcaggtgcgtgccgcgcagggcagaatgacgtcgaaagccagccggtgatcgtacacggcgcaagccgcgtt

SEQ ID NO: 175586 - DNA, 80 bp, synthetic construct
  source 1..80: mol_type = other DNA
gtgttggccaccctcagcttactagggtgtgacgcctcgccgtggcactggttgaaggagaaggtctgtaatatattggg

SEQ ID NO: 175587 - DNA, 80 bp, synthetic construct
  source 1..80: mol_type = other DNA
tgtgcgccgagtataatgggttgcgtctggctggtaagcaaggtttaccaacgatgttgacacccgggagtaaccaattc

SEQ ID NO: 175588 - DNA, 80 bp, synthetic construct
  source 1..80: mol_type = other DNA
ttcataacatgttagaactagtacaggtggagtcaatgatggagataaacaatgtcgctggttcaagcggtatggagaga

SEQ ID NO: 175589 - DNA, 80 bp, synthetic construct
  source 1..80: mol_type = other DNA
ccttccgctttgcacaaaatggtggacaaaaacttccgggtcaaaggtcgcatacacgtcataagtcacgtggtgagggc

SEQ ID NO: 175590 - DNA, 80 bp, synthetic construct
  source 1..80: mol_type = other DNA
tttcagacccaccatggaatcatttgaaggagaggtggactctatacagtcacctgacaatgcgcggggagatgatgtac

SEQ ID NO: 175591 - DNA, 80 bp, synthetic construct
  source 1..80: mol_type = other DNA
tcacaccatatgtcgcaaggaatatcagggacgctgcctgccaggctgtcaaggtgagcatgcctctaactgggttcatg

SEQ ID NO: 175592 - DNA, 80 bp, synthetic construct
  source 1..80: mol_type = other DNA
tgtttaggactacctttggtaatttattctcaaaattccatctaaatccaggcatagttacaggatcaggtgtggggtgt

SEQ ID NO: 175593 - DNA, 80 bp, synthetic construct
  source 1..80: mol_type = other DNA
agccgttcactcggctcaccgggaacgcccagtatgcagtctcaatctctcccacggacccccctctgatggtggccggc

SEQ ID NO: 175594 - DNA, 80 bp, synthetic construct
  source 1..80: mol_type = other DNA
atgcagtcaaggatgccacacaaagtgtgcccattacagttaccatagcaccaatgtgttgtgagttcaatgggcttagg

SEQ ID NO: 175595 - DNA, 80 bp, synthetic construct
  source 1..80: mol_type = other DNA
ttatcatggaccacgacacactgatgaacaccaccacgatgactccctcccgcaccctcaacaagctaccgacgattcta

SEQ ID NO: 175596 - DNA, 80 bp, synthetic construct
  source 1..80: mol_type = other DNA
aaccctcgggcagtatcagactgcggggaggggcagtgataagtcatgacaattttagatgaggtagacattttgcatat

SEQ ID NO: 175597 - DNA, 80 bp, synthetic construct
  source 1..80: mol_type = other DNA
ttcataaatctcaggaccaacaatacagctacaatagtaactccatacataaattcagtaccaatggattcaatgactag

SEQ ID NO: 175598 - DNA, 80 bp, synthetic construct
  source 1..80: mol_type = other DNA
tacttaaaaaaagtaaaacaagaattctcacaaactaccctagcaaccaccatgcatggaatgttcacacactggacagg

SEQ ID NO: 175599 - DNA, 80 bp, synthetic construct
  source 1..80: mol_type = other DNA
caacagcacatacatgggccttcctgacttgacacttcaagcaatgtttgtacctactggtgcccttactccagagaaac

SEQ ID NO: 175600 - DNA, 80 bp, synthetic construct
  source 1..80: mol_type = other DNA
aatccattaactccttcagacactgtacagaccagacatgtcatacaaagtaggtccagatcagaaagtacaatagaatc

SEQ ID NO: 175601 - DNA, 80 bp, synthetic construct
  source 1..80: mol_type = other DNA
gcaggacaggggtgtggccaatatcccagccgagtcgtatttaaaggccagcgatgccccggacctacaaaagccggaca

SEQ ID NO: 175602 - DNA, 80 bp, synthetic construct
  source 1..80: mol_type = other DNA
gagaagtcagaagagttcttaaaaggggttaacccttcaattatcactcttggttccatggttgtcctttatatatttat

SEQ ID NO: 175603 - DNA, 80 bp, synthetic construct
  source 1..80: mol_type = other DNA
gatctcaactatttccaccatacccactcaaacatctacaattaacgcgactgtaatgacaacctcaccaaacggaggca

SEQ ID NO: 175604 - DNA, 80 bp, synthetic construct
  source 1..80: mol_type = other DNA
ccgtgtcctcacaccgcaggccaaaggccacaggtcccccaaagtagtgatttgtggagatgggagctggctcaaacacc

SEQ ID NO: 175605 - DNA, 80 bp, synthetic construct
  source 1..80: mol_type = other DNA
acccggtccctccgggtggcagagacaggcagggccccccggcagctggccccgaggaggcgcccggagtggtgccggtc

SEQ ID NO: 175606 - DNA, 80 bp, synthetic construct
  source 1..80: mol_type = other DNA
caaaaaatattgcaaacataagtttagtatcagcacatggaaaaggttcagacccagaagtaacatatatgtggaccaat

SEQ ID NO: 175607 - DNA, 80 bp, synthetic construct
  source 1..80: mol_type = other DNA
ccacaatgtctggcacaacactaacgacagaagatgaaaacatattttcaaaactctattcaactgccagctactggcag

SEQ ID NO: 175608 - DNA, 80 bp, synthetic construct
  source 1..80: mol_type = other DNA
gtgttacatttatacccccaatggctgatctacctgataaaggcaaaccttttgattctagatttgtgttatgtagtaca

SEQ ID NO: 175609 - DNA, 80 bp, synthetic construct
  source 1..80: mol_type = other DNA
gacctcaactatttccaccatatctacccaaacatctacaactaacgtaactgtaataacaacttcaccaaacggcgaca

SEQ ID NO: 175610 - DNA, 80 bp, synthetic construct
  source 1..80: mol_type = other DNA
caaaagctcaaggtactgactcaatagcaaggtgcaactgtaaggcaggagtgtactactgcgaatccaggaggaaatac

SEQ ID NO: 175611 - DNA, 80 bp, synthetic construct
  source 1..80: mol_type = other DNA
agtgggaaacatctatagaaggtggattcagttagggctacagaaatgtgtccggatgtacaatcctactaatatactgg

SEQ ID NO: 175612 - DNA, 80 bp, synthetic construct
  source 1..80: mol_type = other DNA
acagaccccccagacacgacctcagaagcacccccttctacccctgggcccccacccctaaaccatacaatgtcaacttt

SEQ ID NO: 175613 - DNA, 80 bp, synthetic construct
  source 1..80: mol_type = other DNA
gacaaacaattcagctaccatcatgctaccttggatgaactgtgcaccaatggattttgcacttagacacaaccagtgga

SEQ ID NO: 175614 - DNA, 80 bp, synthetic construct
  source 1..80: mol_type = other DNA
aactggataaactaccaagacaactataacactacttacaatgcatttaaaacaaaaatgcagaacaatttaactttaat

SEQ ID NO: 175615 - DNA, 80 bp, synthetic construct
  source 1..80: mol_type = other DNA
gtgttgtcattgtgccatcttatgtggcataatggcaaatctaagtaccatgagtttgtggccaagataaggagcgttag

SEQ ID NO: 175616 - DNA, 80 bp, synthetic construct
  source 1..80: mol_type = other DNA
acagctactacaacactaaacaagtagtagcacaacttaaatataaatggaaccctaatcaaaaccctactatgccaaat

SEQ ID NO: 175617 - DNA, 80 bp, synthetic construct
  source 1..80: mol_type = other DNA
agtccagtggagggagccattgagagagctgtggcgcgtgttgctgacaccctacccagcgggccctctaattcagaagc

SEQ ID NO: 175618 - DNA, 80 bp, synthetic construct
  source 1..80: mol_type = other DNA
ccttatggggaactcaatctcagtggtaatccaactacccgcctcatgaaatacaactaccccacccagccaggtcaatg

SEQ ID NO: 175619 - DNA, 80 bp, synthetic construct
  source 1..80: mol_type = other DNA
taattttgatggtacattactgggtaatataactattttccctcaccagttcatcaatttgaggagtaataactctgcaa

SEQ ID NO: 175620 - DNA, 80 bp, synthetic construct
  source 1..80: mol_type = other DNA
gttttataacccctcccctttgtaacttagaagatgtaaacacagaccaataggtggtaactaaccaagttactaaaggt

SEQ ID NO: 175621 - DNA, 80 bp, synthetic construct
  source 1..80: mol_type = other DNA
cccggcgcaaacgcccccgtgtctccgtccccaccactgtccccgccgcaaaagcccgcacacccccgtccctgcacacc

SEQ ID NO: 175622 - DNA, 80 bp, synthetic construct
  source 1..80: mol_type = other DNA
acagcagtgccatgtaccacccaggcatgatgatgcaggccaaaaagaaactagttgtacctagcttccagacaagaccc

SEQ ID NO: 175623 - DNA, 80 bp, synthetic construct
  source 1..80: mol_type = other DNA
gggtgaaggtaagtacctacaccaatttcagtagccgaaaggcttgttatcctacctttagacaggtagaagattgtggg

SEQ ID NO: 175624 - DNA, 80 bp, synthetic construct
  source 1..80: mol_type = other DNA
gcagtgtggaacgctggcatgggtgtcggagtgggaaacttaacgatatttccacaccaatggataaacctccgcactaa

SEQ ID NO: 175625 - DNA, 80 bp, synthetic construct
  source 1..80: mol_type = other DNA
tgcccaactgtagtaaggtagtagtgtcctcttgcacaagaatgatggaaacacagacctctacatggtttggcttcaat

SEQ ID NO: 175626 - DNA, 80 bp, synthetic construct
  source 1..80: mol_type = other DNA
ttttacacgttcgataccaaagattgggcgaagaactctacaggctggttttggaaattcccggatatcctgaccgaggt

SEQ ID NO: 175627 - DNA, 80 bp, synthetic construct
  source 1..80: mol_type = other DNA
cttcaagaagaagtatattcagtatatataatatgtgtaatatgtccttatacagaacctaaaatgctctctaaaacaaa

SEQ ID NO: 175628 - DNA, 80 bp, synthetic construct
  source 1..80: mol_type = other DNA
gaattatatcagctatggttataatcattaggaactcttcagatccacaaacaataattgccactttaacactaattgga

SEQ ID NO: 175629 - DNA, 80 bp, synthetic construct
  source 1..80: mol_type = other DNA
ggcaaagaaaaaaaaaaggaacaaaataatagattagcagaaggaataatccgtgcgaccgagcttgtgcttcttttctt

SEQ ID NO: 175630 - DNA, 80 bp, synthetic construct
  source 1..80: mol_type = other DNA
caggcggtgcctgccttaactgcagtggaaaccggacacacatctcaagtgactcctagcgacaccgtgcagactagaca

SEQ ID NO: 175631 - DNA, 80 bp, synthetic construct
  source 1..80: mol_type = other DNA
cagagtacctagagagccaagtaaaatacggagacctcagaaaagaaggcaaggtcctcatcacctgtccttacacaaaa

SEQ ID NO: 175632 - DNA, 80 bp, synthetic construct
  source 1..80: mol_type = other DNA
aaagaaaaaaagtaataatacctagcttccaaaccaggccaaaaggtagaataaaacgcaaaattaaagtaaggcccccc

SEQ ID NO: 175633 - DNA, 80 bp, synthetic construct
  source 1..80: mol_type = other DNA
gcattaaatacattcagaacagaaggctgcgccagtcacccacaactaaaaaagcctaactcctctagtaaccccagcag

SEQ ID NO: 175634 - DNA, 80 bp, synthetic construct
  source 1..80: mol_type = other DNA
tgacaaagtgcgcttttggatacatttcacgaatcgcaaccgcagtaccaccggtatccaccaggtcatcaataacgatg

SEQ ID NO: 175635 - DNA, 80 bp, synthetic construct
  source 1..80: mol_type = other DNA
ccaccactaacaacacaaccaccactaacaacacaaccacaacagggtccacaacaaagttagagataaatgaaactttt

SEQ ID NO: 175636 - DNA, 80 bp, synthetic construct
  source 1..80: mol_type = other DNA
aagagctcaaacaattgcagtgctacaaaagaactaagagaacagaacctgtttgtttaatgatacatggacccccaggg

SEQ ID NO: 175637 - DNA, 80 bp, synthetic construct
  source 1..80: mol_type = other DNA
tacttacttcttaatgttttaactaaggatgcctatgggattggaaaaaaaatcacagcaacttgctactaatcagttga

SEQ ID NO: 175638 - DNA, 80 bp, synthetic construct
  source 1..80: mol_type = other DNA
tctcgctcagagacaagcattgaaaatttcctttgcaggtccgcctgtgtatacttcacaacctacaagaatcaaacagg

SEQ ID NO: 175639 - DNA, 80 bp, synthetic construct
  source 1..80: mol_type = other DNA
ttgaatctttcttttgtagggcagcttgtgttgccatactaggagtgtcaaacaaagccccagcccaagggaatgagaaa

SEQ ID NO: 175640 - DNA, 80 bp, synthetic construct
  source 1..80: mol_type = other DNA
aatccgtataatttcagctttaacaatagttgttagaaacagttcggatcctttgactattgtggcaacacttgcaatgt

SEQ ID NO: 175641 - DNA, 80 bp, synthetic construct
  source 1..80: mol_type = other DNA
gcctgggcctgcaatttactaacctcgggatgccatatgttttgcagaatgcccaccagatcgcctgccacttccacagc

SEQ ID NO: 175642 - DNA, 80 bp, synthetic construct
  source 1..80: mol_type = other DNA
tataagagacagggcggggtttacgtcctaatataaagcggtgcacttccgaatggctgagttttccacgcccgtccgca

SEQ ID NO: 175643 - DNA, 80 bp, synthetic construct
  source 1..80: mol_type = other DNA
ggtttcatgtcacaggttaaagaccagatttctgaattaaaccctatgaacaaaataacagggaaagtgctcaaatggac

SEQ ID NO: 175644 - DNA, 80 bp, synthetic construct
  source 1..80: mol_type = other DNA
ctttttctctcgttccgggctagtgggagtggtcaatctcaccgatgggggtactgacaccacaggatacgctacttggg

SEQ ID NO: 175645 - DNA, 80 bp, synthetic construct
  source 1..80: mol_type = other DNA
aagaaacgtactaccctgtaataggcacttctgctttagaggcaggctcaaactacaactcaactgcagtacaaacttta

SEQ ID NO: 175646 - DNA, 80 bp, synthetic construct
  source 1..80: mol_type = other DNA
gagaaaaggttaaagtaaaagtgcagccccccaaactgttcatagacaagtggtacacccaagaggacctgtgcgacgtt

SEQ ID NO: 175647 - DNA, 80 bp, synthetic construct
  source 1..80: mol_type = other DNA
aacatctcaattccagcaactcaagggttaccggtaatggtcactccaggttcgagcccatatctcacttcagatgattt

SEQ ID NO: 175648 - DNA, 80 bp, synthetic construct
  source 1..80: mol_type = other DNA
gcatcagacaacagtttaccaccagcaaaaatgaaagaagcaaacaaagcatacacacaagcagctaaaaaaattctaag

SEQ ID NO: 175649 - DNA, 80 bp, synthetic construct
  source 1..80: mol_type = other DNA
agtcacttgatcggctcagagggtgccgtggagaagattctaaagaacttagttaaactcgtctctgcgctcgtcatcgt

SEQ ID NO: 175650 - DNA, 80 bp, synthetic construct
  source 1..80: mol_type = other DNA
caaacaacactgctacaaggtgatacggacgtggccgtcaacaatgcagtagccagggtagctgatacaattgccagtgg

SEQ ID NO: 175651 - DNA, 80 bp, synthetic construct
  source 1..80: mol_type = other DNA
ttagccagacgcactataggatggtgcaacaagatgaatacacggcagctggctatgtcacatgctggtatcagacaaat

SEQ ID NO: 175652 - DNA, 80 bp, synthetic construct
  source 1..80: mol_type = other DNA
aacgtagttccgtactttgtacttcataataatacgtatacacgattacaagaccaatcagcaaaccgaaaataaaccgc

SEQ ID NO: 175653 - DNA, 80 bp, synthetic construct
  source 1..80: mol_type = other DNA
taaaggagtaaaaaacatcacgaaggtaaatttgacagcgtcctcagcgggttcagacccagaggtaacacatatgtgga

SEQ ID NO: 175654 - DNA, 80 bp, synthetic construct
  source 1..80: mol_type = other DNA
ttacttatctgatgatgaagctaccgcggaagatcaaccaactcagcctgatgtcgccacgtgtagattctatacactag

SEQ ID NO: 175655 - DNA, 80 bp, synthetic construct
  source 1..80: mol_type = other DNA
caacaggtccaaagcgacccaggttggaagtccccgcgttcgaagaggggcaagaaaaaagcttacttttcagacaaaga

SEQ ID NO: 175656 - DNA, 80 bp, synthetic construct
  source 1..80: mol_type = other DNA
gggatccctcgctgctcccggcgacctccgccggcttcccggtccacccgccgcggaacggacgggacccggtgtccgcg

SEQ ID NO: 175657 - DNA, 80 bp, synthetic construct
  source 1..80: mol_type = other DNA
tacaatacatcgataattttaagcacatcaacggaaattaacgttggctctacggaaataaacgttactttcatgaatac

SEQ ID NO: 175658 - DNA, 80 bp, synthetic construct
  source 1..80: mol_type = other DNA
aatagcttttacacaaaaagagatagcaactatggctggtgtaactttaaccctactgcttttaacaacaataatataac

SEQ ID NO: 175659 - DNA, 80 bp, synthetic construct
  source 1..80: mol_type = other DNA
aactgcatttcttctgtaccttttattgtgccgatggcacatttggaagaaaaaggtaaattttacactagcaaattagt

SEQ ID NO: 175660 - DNA, 80 bp, synthetic construct
  source 1..80: mol_type = other DNA
gagtggttggaaagaaataaggaacaggtttgtgctatactagattatgcttctgacataattgttgagtcaaaagacca

SEQ ID NO: 175661 - DNA, 80 bp, synthetic construct
  source 1..80: mol_type = other DNA
gaagtattgatcaatgggtttactgtaaaaattaaagataagtggaagctagtagatcctgacaatttaaatctggaaat

SEQ ID NO: 175662 - DNA, 80 bp, synthetic construct
  source 1..80: mol_type = other DNA
acttcaatgtgacaggagttaccgaatctagggaaaacataaccaccatgaagaccactggtgcctttggtcaacagtct

SEQ ID NO: 175663 - DNA, 80 bp, synthetic construct
  source 1..80: mol_type = other DNA
tagagagaaatgaaaaattcagagacatcagacgtttcatccctgaacacatcaatgaatggagaaacatgagattggca

SEQ ID NO: 175664 - DNA, 80 bp, synthetic construct
  source 1..80: mol_type = other DNA
cggccagcatacacccgggcatggtctacatcataatataataaggcgcacttccgaatggctgagttttccacgcccgt

SEQ ID NO: 175665 - DNA, 80 bp, synthetic construct
  source 1..80: mol_type = other DNA
tcttctgccgccgctgccgcttcgtccgaggccggcggcacgcgcgtaccctgcgtcgaccgttggcccttctttccctt

SEQ ID NO: 175666 - DNA, 80 bp, synthetic construct
  source 1..80: mol_type = other DNA
cgtgctgtagcctaccaacacacatacagtacaaacttcgttccaaaagagggatttgaaggcttgaaaactcagattaa

SEQ ID NO: 175667 - DNA, 80 bp, synthetic construct
  source 1..80: mol_type = other DNA
taacatttataacagcaaatgacagctggtacagaggtacagtttataaagatgacattaaaaatgtgcctctaaaagca

SEQ ID NO: 175668 - DNA, 80 bp, synthetic construct
  source 1..80: mol_type = other DNA
gcaaggccctaattttgcaaaacaaaagaacaaaggctagttattctattaacaccgtggtgcaacaactgcggcaggaa

SEQ ID NO: 175669 - DNA, 80 bp, synthetic construct
  source 1..80: mol_type = other DNA
tccagctcaaccatccctgaatctgtaatagaaaccagatatgtagtgaatgacaacacaaatgaggaagctgaaataga

SEQ ID NO: 175670 - DNA, 80 bp, synthetic construct
  source 1..80: mol_type = other DNA
ccctccttccattgagcccaacactggcgtttaccctctgccagcggcgctctgtgtctcccaccctgaatctgtcttct

SEQ ID NO: 175671 - DNA, 80 bp, synthetic construct
  source 1..80: mol_type = other DNA
tacacatcaattggacgcaccaattatcctaaaaatccacaaccagtaatcaagaagagagaaggggacataaaaactta

SEQ ID NO: 175672 - DNA, 80 bp, synthetic construct
  source 1..80: mol_type = other DNA
aggaataaggcctggctaacagttgtctcagctgtcactagtgcaattagcatattactcctggtaactaagattttcaa

SEQ ID NO: 175673 - DNA, 80 bp, synthetic construct
  source 1..80: mol_type = other DNA
tacaaaccagatggagagggacacgcactaacagacagacacttcattcagaagagggaaaacataaagaatgtaggacc

SEQ ID NO: 175674 - DNA, 80 bp, synthetic construct
  source 1..80: mol_type = other DNA
caatctgtaacaaaaaaaacatcagattttgaagaacgcagctgccgctgtattatctcagacctcccaatatgggctat

SEQ ID NO: 175675 - DNA, 80 bp, synthetic construct
  source 1..80: mol_type = other DNA
ggtatgtcatgaacaataacaccaatgcagaagcagcagtagagaatttcttaggcagatcagccctatgggccaaccta

SEQ ID NO: 175676 - DNA, 80 bp, synthetic construct
  source 1..80: mol_type = other DNA
ggcgctgtggctggtgcaacacaacaagtacctattacagtgaccatagctccaatgttttgtgagtttaatggtcttag

SEQ ID NO: 175677 - DNA, 80 bp, synthetic construct
  source 1..80: mol_type = other DNA
agctagtgggggccacagaagacgtgggcttctgtctccttagtaacacattcatgaatggagacatgcccgtcctggcc

SEQ ID NO: 175678 - DNA, 80 bp, synthetic construct
  source 1..80: mol_type = other DNA
cctttagaacagaagggtgctacagtcacccaaaactacctaaaaaacaggttacagctgctaatgacagtacatacttt

SEQ ID NO: 175679 - DNA, 80 bp, synthetic construct
  source 1..80: mol_type = other DNA
ggtgagtttacacaccgcagtcaaggggcaattcgggctcgggactggccgggctatgggcaaggctcttaaaaaagcat

SEQ ID NO: 175680 - DNA, 80 bp, synthetic construct
  source 1..80: mol_type = other DNA
acacagacctacggaggctaccagagacaatttttcacaggaaaacagtactgggactacagagtaggcatgtttagtcc

SEQ ID NO: 175681 - DNA, 80 bp, synthetic construct
  source 1..80: mol_type = other DNA
taaaagagtgataacttcttcagcttcaaatatcaccccagcttttttctgctcatgaaggttagatgcctgctgcttaa

SEQ ID NO: 175682 - DNA, 80 bp, synthetic construct
  source 1..80: mol_type = other DNA
ttatcaactctccgctttaaatcataagatccttcgttgccttgcgttacgttgcaaaacgtcaatcctgtatgactaca

SEQ ID NO: 175683 - DNA, 80 bp, synthetic construct
  source 1..80: mol_type = other DNA
cagaggacatgattgaaacccgctatgtccaaacctcacaaactagagatgagatgagcatcgaaagttttcttggtagg

SEQ ID NO: 175684 - DNA, 80 bp, synthetic construct
  source 1..80: mol_type = other DNA
ctggcactttatgatcaatgctctcaatgaatacaactatgagatggactattctcaatatgatggttcacttagttcaa

SEQ ID NO: 175685 - DNA, 80 bp, synthetic construct
  source 1..80: mol_type = other DNA
tgagaagcaataattcagcaactcttatattaccatatgttaatgcagtgcctatggattcaatgcttagacacaataac

SEQ ID NO: 175686 - DNA, 80 bp, synthetic construct
  source 1..80: mol_type = other DNA
attgtctccatcctttcaacctgccgaaaaagccattaatacaacaaaacaggaaaatgctaccacaacaacactaggca

SEQ ID NO: 175687 - DNA, 80 bp, synthetic construct
  source 1..80: mol_type = other DNA
gggcctggccggagagcaaagaagcgcctacgcttttctccgggctctccaagacagccaagactcggaggagagtcaag

SEQ ID NO: 175688 - DNA, 80 bp, synthetic construct
  source 1..80: mol_type = other DNA
atgattgagggggccgttgaagggattactaaaaatgcattggttcccccgacttccaccaatagcctgcctgacacaaa

SEQ ID NO: 175689 - DNA, 80 bp, synthetic construct
  source 1..80: mol_type = other DNA
tctcttgcgccaggtctcccatcaaagcgaaacaagctcgactcggccttcagaggagaaaacccagagcaaaaagaatg

SEQ ID NO: 175690 - DNA, 80 bp, synthetic construct
  source 1..80: mol_type = other DNA
cagcttttgaataaccttggctttcctggtgaacttgcttacaaactatgcaacactacacacatctataaagatgagat

SEQ ID NO: 175691 - DNA, 80 bp, synthetic construct
  source 1..80: mol_type = other DNA
gtcagttggcggttaaccgcatgtgacttcaggtttccgttctgctcaccacaaactgacaacccttgctacaccttcca

SEQ ID NO: 175692 - DNA, 80 bp, synthetic construct
  source 1..80: mol_type = other DNA
ccttagagaatttcttaggaaggtcagcttgtgttcatataacagaaattaagaataagctgcctacagagcctgtagcc

SEQ ID NO: 175693 - DNA, 80 bp, synthetic construct
  source 1..80: mol_type = other DNA
aagctaccagcccgtgtcaggccgccaagcgccacttcgccgaggagtgcagcctgtatggccccagacaggactgggtt

SEQ ID NO: 175694 - DNA, 80 bp, synthetic construct
  source 1..80: mol_type = other DNA
gtgaaaggagaaaatctccttctccccgacttatggctagatttcctacaactcagccccatcttccagcgcaagcttgc

SEQ ID NO: 175695 - DNA, 80 bp, synthetic construct
  source 1..80: mol_type = other DNA
cacaccctatgggtgtgaagccaaataatggacaaggtgtgaagagccccgtgtgctcgctttgagtcctccggcccctg

SEQ ID NO: 175696 - DNA, 80 bp, synthetic construct
  source 1..80: mol_type = other DNA
tatgtccatacccttggtgaagcttttggggcaggctttgtggataatattaaagatcaaattcaaacaattaacccaat

SEQ ID NO: 175697 - DNA, 80 bp, synthetic construct
  source 1..80: mol_type = other DNA
cacttaccacgtgtctccagcaggccaaccgaagcctacgtcgtcaatttcctggggcggagctacatcctaatataagt

SEQ ID NO: 175698 - DNA, 80 bp, synthetic construct
  source 1..80: mol_type = other DNA
ttccggcacgtaaacaagcccaacccagccgctattacaagtgtggcgcgcatttacttcaaaccgaaacatgtacgcgc

SEQ ID NO: 175699 - DNA, 80 bp, synthetic construct
  source 1..80: mol_type = other DNA
ttccggtggtttcccttttccgcccgtttatccaatagcatgtaagagaggttgcctagatttggcaactttgagggaac

SEQ ID NO: 175700 - DNA, 80 bp, synthetic construct
  source 1..80: mol_type = other DNA
cagcatagctacgaactaagtggcggatgtcctgccgcaagtcttggcagagaatgagctttcgtaaacccttgagggtc

SEQ ID NO: 175701 - DNA, 80 bp, synthetic construct
  source 1..80: mol_type = other DNA
ggagggtccaaatacctagaataccatggaggcttatacagctccatatggctatcggcaggccgctcctactttgaaac

SEQ ID NO: 175702 - DNA, 80 bp, synthetic construct
  source 1..80: mol_type = other DNA
cgtggggcggtggtgacaggtcccggctggcccggcgcttgctcgcgttcctgccgttacccaggagaatggccgcgagt

SEQ ID NO: 175703 - DNA, 80 bp, synthetic construct
  source 1..80: mol_type = other DNA
gcgagagagactcttgcgggcgcgtggaggaggttatgtaaggcagtgcagcgcatcgggagtggaatcctcgcagtccc

SEQ ID NO: 175704 - DNA, 80 bp, synthetic construct
  source 1..80: mol_type = other DNA
catacagcaaccaggacctagagctagtcagatactttggggtcaccttcacagcatacagacaccccacagaagacttt

SEQ ID NO: 175705 - DNA, 80 bp, synthetic construct
  source 1..80: mol_type = other DNA
tactagaagtggaaaacttcaacgccactgatgctacagataagaagaaacagttcaccgtgtggccaatcacttacaca

SEQ ID NO: 175706 - DNA, 80 bp, synthetic construct
  source 1..80: mol_type = other DNA
gagagtttcatgaacggagacatgccctggcctagcaaccacataccgttaaagttgtggtttaagtggtttcctatgat

SEQ ID NO: 175707 - DNA, 80 bp, synthetic construct
  source 1..80: mol_type = other DNA
ccacaagggctcccagtgtatataacacctggatctgggcagttcttaacaactgacgatctgcaatcaccatcagctct

SEQ ID NO: 175708 - DNA, 80 bp, synthetic construct
  source 1..80: mol_type = other DNA
cgaaaaaagaaactaataataagacaatggcagccaaactataccagaaagtgcaacattgtcggttacatgccagtaat

SEQ ID NO: 175709 - DNA, 80 bp, synthetic construct
  source 1..80: mol_type = other DNA
acttgtgcccacctaaccaaaccaagtgacaagacaatcctgctagcccttactgcagacctccaagttgacagtgctga

SEQ ID NO: 175710 - DNA, 80 bp, synthetic construct
  source 1..80: mol_type = other DNA
tcgcgtttgcgtgtcgagatttctacggtatgtttattcttcctgcgatgatgtagggtccttggtgtaagtaggatttc

SEQ ID NO: 175711 - DNA, 80 bp, synthetic construct
  source 1..80: mol_type = other DNA
taactaagttggccgcaggcgatagatccggattaaccgcagtgatacgtagagcgaataacgtacttaaaaacgaaatg

SEQ ID NO: 175712 - DNA, 80 bp, synthetic construct
  source 1..80: mol_type = other DNA
gggaggtttgcgggccgacgctttctgcatttcggcgtctgcggcgtgttgcggccgacgcgctcagggatctttctgcg

SEQ ID NO: 175713 - DNA, 80 bp, synthetic construct
  source 1..80: mol_type = other DNA
ccgcttgtgtttacattgtggagtacaagacaaaggatgacactccggataaaatgtatgatagttgggttattaatacc

SEQ ID NO: 175714 - DNA, 80 bp, synthetic construct
  source 1..80: mol_type = other DNA
cagctccggtcggtgaacagtataaagtctccctgtgactccacattgacgcaaagatccagagacaccccaaaaatgcc

SEQ ID NO: 175715 - DNA, 80 bp, synthetic construct
  source 1..80: mol_type = other DNA
gcaagcacttctgtttccccggacgtgtgaataggctctaccagggctgaagctgtagcgttcgttatccgcatgtctac

SEQ ID NO: 175716 - DNA, 80 bp, synthetic construct
  source 1..80: mol_type = other DNA
cacagtgaccattgcgccaatgtttacagagtttaatggactgagaaacatcacagttccggcaacacaaggattgccag

SEQ ID NO: 175717 - DNA, 80 bp, synthetic construct
  source 1..80: mol_type = other DNA
cgccgctgtttctcaacagcattcgtgcgccttgacactgtacggcagaaaagccggctccaagtgcaagcgccgcggca

SEQ ID NO: 175718 - DNA, 80 bp, synthetic construct
  source 1..80: mol_type = other DNA
caaagctaatgatagacaagtggtacccacaaactgaactctgtgaagtaactctctttacattacatgccacagcatgt

SEQ ID NO: 175719 - DNA, 80 bp, synthetic construct
  source 1..80: mol_type = other DNA
ttcagaagagtatttggcaatttgtatgctggttttcatgcaaacccaggtattttaactggatcggctataggctgtga

SEQ ID NO: 175720 - DNA, 80 bp, synthetic construct
  source 1..80: mol_type = other DNA
ccagagttgccataagatgtccttacacagaccccccactaacagggtcctccacagacgtgggctttatacccatatca

SEQ ID NO: 175721 - DNA, 80 bp, synthetic construct
  source 1..80: mol_type = other DNA
gctgttagaatgtgcacggaaagcgttccagcttcgtccaccacgatcacattggtggtccatagctgcccctggtgcat

SEQ ID NO: 175722 - DNA, 80 bp, synthetic construct
  source 1..80: mol_type = other DNA
acgcattaaagaacttcttaaacgaagtcaaatgattctccgtacatcaaagaggacagaaccagtcggggtggtattcc

SEQ ID NO: 175723 - DNA, 80 bp, synthetic construct
  source 1..80: mol_type = other DNA
catctgtctacgagcacctcgaaaagtttatgatcgttggaaagacagcagagagtacggacaagtgtttatgacggata

SEQ ID NO: 175724 - DNA, 80 bp, synthetic construct
  source 1..80: mol_type = other DNA
tgatagaagaatattggccataccattagacatgagtaacacactcttctccacaacacttttaggagaagtgctaaact

SEQ ID NO: 175725 - DNA, 80 bp, synthetic construct
  source 1..80: mol_type = other DNA
ttttcatctcaattcataccatccagcgacacagaagccaaaaacaaatttgcaccatgggattggttgcttggttgtgg

SEQ ID NO: 175726 - DNA, 80 bp, synthetic construct
  source 1..80: mol_type = other DNA
ccagcaggtaatgtccctgatacattacaaacaggaataggcacaaacaatactaacaaacaaaactccataaccatcgc

SEQ ID NO: 175727 - DNA, 80 bp, synthetic construct
  source 1..80: mol_type = other DNA
gaacagttcattgaaagttcaagggaggccggttttccggtcatcaacaccccaagtaaaacaaagctcgagcctagcgt

SEQ ID NO: 175728 - DNA, 80 bp, synthetic construct
  source 1..80: mol_type = other DNA
ttgacgtcatatgtatgattacatgcactgatacaaacagtaatgtttgacgctacaacaccagtaccattaaaccgtac

SEQ ID NO: 175729 - DNA, 80 bp, synthetic construct
  source 1..80: mol_type = other DNA
cctgcgttaacaaaaacgacggcaaatctaactggggctacgtgttctacgatgttaactttggcaatggcaagacacca

SEQ ID NO: 175730 - DNA, 80 bp, synthetic construct
  source 1..80: mol_type = other DNA
atggtagctgttgttccagaacatcaattggcttatataggagccggatcaacacgagtcaaatatgatcatactcaccc

SEQ ID NO: 175731 - DNA, 80 bp, synthetic construct
  source 1..80: mol_type = other DNA
tgggacataacaactaggcagatggtccagctgcgtcgtaaatgcgagatgtttacctacatgcgatatgatgtggaagt

SEQ ID NO: 175732 - DNA, 80 bp, synthetic construct
  source 1..80: mol_type = other DNA
atgtggtgtcttggcaggaaatgcgttcgtgtttccacaccagatcatcaatctgaggaccaataatagtgccactctag

SEQ ID NO: 175733 - DNA, 80 bp, synthetic construct
  source 1..80: mol_type = other DNA
gcacaagtttcatctcagaaggtgggtgcacatgagaacaccaatgtggctacaggtggttccaccgtcaattacaccac

SEQ ID NO: 175734 - DNA, 80 bp, synthetic construct
  source 1..80: mol_type = other DNA
ttgatttgtcttgaacctttctctgtctcacccatgctcgaaaagctagtgcaagacaaatttcatgcactactcaaggg

SEQ ID NO: 175735 - DNA, 80 bp, synthetic construct
  source 1..80: mol_type = other DNA
aacatttcaaccagtcacttgggacaatgtcacctttttaaaaagaggttttaggaatgatgctagataccccttccttg

SEQ ID NO: 175736 - DNA, 80 bp, synthetic construct
  source 1..80: mol_type = other DNA
acagaggatttgctgcacctcaattctctctttggaaacgaccagtagtcacagcatacattgagggtcagccagtagaa

SEQ ID NO: 175737 - DNA, 80 bp, synthetic construct
  source 1..80: mol_type = other DNA
cctaaactgccctgcagccaaagaccttaaacaacctgaccctactcaggcaaatgcaaactgctttctaaaagtcagca

SEQ ID NO: 175738 - DNA, 80 bp, synthetic construct
  source 1..80: mol_type = other DNA
cctaaggacaaataactccagtaccatagtagcaccttatatcaattgtcaacccatggacaatatgcttaagcataaca

SEQ ID NO: 175739 - DNA, 80 bp, synthetic construct
  source 1..80: mol_type = other DNA
gcgtttgtaggttcatacaagatcataaattatcatcttgccacagatcaagaaaaacatgatgcagtatatgttgactg

SEQ ID NO: 175740 - DNA, 80 bp, synthetic construct
  source 1..80: mol_type = other DNA
attccaccaacactgcaccaatggacagccaaaattggtgccttgctcacagctctttttgccagtggcttacagcccag

SEQ ID NO: 175741 - DNA, 80 bp, synthetic construct
  source 1..80: mol_type = other DNA
ttgccctctagaaactaatgggggtgacactactgtgcctataacaatatccattagtccaatgtttgctgaattctctg

SEQ ID NO: 175742 - DNA, 80 bp, synthetic construct
  source 1..80: mol_type = other DNA
atttaataaagatggtgtaaaattagaaatcactgtgctcaaattaaagagaaatgagaagttcaaagatattaggaagt

SEQ ID NO: 175743 - DNA, 80 bp, synthetic construct
  source 1..80: mol_type = other DNA
agaaaatgctatatcaggggtctcatgccgcttatctgggcgggaatggggtccggtggcaagaactacgccgtccgctc

SEQ ID NO: 175744 - DNA, 80 bp, synthetic construct
  source 1..80: mol_type = other DNA
ggtggcaatcctattgttgaacagattgttagagaccccagcacgcagcccacctacgaacttcccggtgccggtaacct

SEQ ID NO: 175745 - DNA, 80 bp, synthetic construct
  source 1..80: mol_type = other DNA
tgccattgacaaaccgtcacaaccagaaacttcatcaaacagattctacaccctagagagcaggtcatgggattcctcat

SEQ ID NO: 175746 - DNA, 80 bp, synthetic construct
  source 1..80: mol_type = other DNA
gctgaagcctggaaccaaccagttcttgaccaccgacgacgagatttcggccccaattttaccaggatttaatgcaacac

SEQ ID NO: 175747 - DNA, 80 bp, synthetic construct
  source 1..80: mol_type = other DNA
tgggcagccacacccccgggacagctttcgcatccgatgctgtctctaaaggagaggtggctttgcaatttaccgaaact

SEQ ID NO: 175748 - DNA, 80 bp, synthetic construct
  source 1..80: mol_type = other DNA
ctttatacagagcgaactgggtccctttgtagacacagagactacaggccttatctgctgcatctgtccatacactaagc

SEQ ID NO: 175749 - DNA, 80 bp, synthetic construct
  source 1..80: mol_type = other DNA
tatgcggaagtaatcctcgcccacgtgacttgtcacgtggtgcatgcgtcacagccgccattttgttttacaaaatggcc

SEQ ID NO: 175750 - DNA, 80 bp, synthetic construct
  source 1..80: mol_type = other DNA
aagatgatttcacagagggcgggtatatttgttgcttttatcaaactgctatagttgtcccaccaggagccccaacagac

SEQ ID NO: 175751 - DNA, 80 bp, synthetic construct
  source 1..80: mol_type = other DNA
tgcctgtggacagcccctcaaatgtcaataggtgcgcccctcatctgtcagcactctgcccctcaagtgtcaaggatcgc

SEQ ID NO: 175752 - DNA, 80 bp, synthetic construct
  source 1..80: mol_type = other DNA
ggagcgccactgtgggacaagcttttgaatacacagcactgaccaaccaggacacaccgcaccaattcactgagggaaag

SEQ ID NO: 175753 - DNA, 80 bp, synthetic construct
  source 1..80: mol_type = other DNA
ccagtatcacaccactgacggcagttgcaaacattaacacatttggcggatttggtcatcaaagcaaagcagtctacgta

SEQ ID NO: 175754 - DNA, 80 bp, synthetic construct
  source 1..80: mol_type = other DNA
acatcaggtgaaaagaagagtaacataaaaatagcaggagacagcaactacaactggtacccttataaccttaaagacaa

SEQ ID NO: 175755 - DNA, 80 bp, synthetic construct
  source 1..80: mol_type = other DNA
cttggacgcgaggatatcaaattgtgcatgtggaactgccaaaagctttttgggcaagagattcacaaccagcatttggt

SEQ ID NO: 175756 - DNA, 80 bp, synthetic construct
  source 1..80: mol_type = other DNA
cactgcaagtggtccgccagcaacagagactttgacctttgcaggtacaggggcacggtcctaaagttttacagacacct

SEQ ID NO: 175757 - DNA, 80 bp, synthetic construct
  source 1..80: mol_type = other DNA
aaaacgccatgatgacaatgtggtgtctgacgttgtttgtgctgtggatgttgagagtggtgggaatgcacgtgttgcgt

SEQ ID NO: 175758 - DNA, 80 bp, synthetic construct
  source 1..80: mol_type = other DNA
tgagcacctctgtctcaggcaccggatgcccccggctccacggccccggccactggccggtgtagcttcttacctgcggg

SEQ ID NO: 175759 - DNA, 80 bp, synthetic construct
  source 1..80: mol_type = other DNA
tgaaccaacacaagcggtcggaatcatccgtggaaaatttcctgtgtcgctccgcttgcgtatactacacaacctatgac

SEQ ID NO: 175760 - DNA, 80 bp, synthetic construct
  source 1..80: mol_type = other DNA
aaaaaggatgggttgttaatgtaaacagtgaggttcagattgaacgcaatttgaacagagccatgacgatcttgcaagct

SEQ ID NO: 175761 - DNA, 80 bp, synthetic construct
  source 1..80: mol_type = other DNA
tgattcagagtcatacacatatatcgggatctcacctaagggtgaaggtacaagcagctttgtagcagttcgggatagag

SEQ ID NO: 175762 - DNA, 80 bp, synthetic construct
  source 1..80: mol_type = other DNA
gggataccaggagcagccggccccccaggctccataccagggataccaggagcagccggccccccaggctccataccagg

SEQ ID NO: 175763 - DNA, 80 bp, synthetic construct
  source 1..80: mol_type = other DNA
ggaagttctctcatactgccatgattcaccaaatcttgtcatgcaacttcataaaccagtgattgattctgaccacgtgg

SEQ ID NO: 175764 - DNA, 80 bp, synthetic construct
  source 1..80: mol_type = other DNA
tcgtgagagcaacacactctttagaaaagaatttagaatacacacaatattgcttaaattgtttaggcagcttgatactt

SEQ ID NO: 175765 - DNA, 80 bp, synthetic construct
  source 1..80: mol_type = other DNA
cgtagtggatgtgacggtgatattaggggaagtgacggcacttgtagtgctacttcccattcctgggtgcgtgttactca

SEQ ID NO: 175766 - DNA, 80 bp, synthetic construct
  source 1..80: mol_type = other DNA
gcccccattactccagtttcctcaatgacaacatatggttttggacatcagaacaaagcggtatatgttgcagggtataa

SEQ ID NO: 175767 - DNA, 80 bp, synthetic construct
  source 1..80: mol_type = other DNA
ctaaacactttgatggttactgcaaacaggatgtagtaataatggatgatttaggtcaaaacccagatggtcaagattta

SEQ ID NO: 175768 - DNA, 80 bp, synthetic construct
  source 1..80: mol_type = other DNA
ccatctctgccttgaccgttcttgtcgtctgtgtgatgattgtgttgcatgtgcacgcagaggtgttctttggactctct

SEQ ID NO: 175769 - DNA, 80 bp, synthetic construct
  source 1..80: mol_type = other DNA
cccgcgtggctgcctgctccctaacgggagaagccatcctactgacaaggtgtgaagagccccgtacgctagttgtgagt

SEQ ID NO: 175770 - DNA, 80 bp, synthetic construct
  source 1..80: mol_type = other DNA
ttttgcatggcaatcgtctacaaatcctagtatattttggacagagggtaacgcgcctgcaagaatgtccatcccgttta

SEQ ID NO: 175771 - DNA, 80 bp, synthetic construct
  source 1..80: mol_type = other DNA
tacgtctttgtttggtatcgcggctacgaattccctgcgccgacgccgcaggcgacgacggcgggtggtggtggtagtgg

SEQ ID NO: 175772 - DNA, 80 bp, synthetic construct
  source 1..80: mol_type = other DNA
actcagaagcagcaacatagagtggcccttcgcatacagggacatagtgtacaaccctctcatggacaagggggtgggta

SEQ ID NO: 175773 - DNA, 80 bp, synthetic construct
  source 1..80: mol_type = other DNA
tatctgtgcgtatgctcagagacacacccctaattagtcaggcaccgaacaccacacaaaatccagtggagactttcaca

SEQ ID NO: 175774 - DNA, 80 bp, synthetic construct
  source 1..80: mol_type = other DNA
aaatacaacgaccccaggaacaaccacacccgcaaacacaaaatccacaacactaaaatatgagataaacgagacttctc

SEQ ID NO: 175775 - DNA, 80 bp, synthetic construct
  source 1..80: mol_type = other DNA
aagaagaaagatctaattaacaagcaaacaaaggatataactaaacttaaaatggccctagacaagtatggtgttgactt

SEQ ID NO: 175776 - DNA, 80 bp, synthetic construct
  source 1..80: mol_type = other DNA
ttggcaacggcaaaatgccagacggctccggacacgtacccacgtattggcaacagagatggtggcccagattcagcttt

SEQ ID NO: 175777 - DNA, 80 bp, synthetic construct
  source 1..80: mol_type = other DNA
ccagttccagctccagcacttcgcggtccaactcgccaagacccaggcgaatctccacgtaaaccccctgttatccttcc

SEQ ID NO: 175778 - DNA, 80 bp, synthetic construct
  source 1..80: mol_type = other DNA
taattaaattggtggtgtcaattcacatcatcataggaaaattagacactaaaacagtagtgcatggggatcctgatggc

SEQ ID NO: 175779 - DNA, 80 bp, synthetic construct
  source 1..80: mol_type = other DNA
cccgctgacaacgaccgtgggacgacacgcaccgccagcgcgcacaaagcgccggacgcggcacgcagtggcactgagtg

SEQ ID NO: 175780 - DNA, 80 bp, synthetic construct
  source 1..80: mol_type = other DNA
gtctgccacttgcatccggcgctttggttacacgggagactaatggggggtgtggtatggcacaggctggtggtgagtct

SEQ ID NO: 175781 - DNA, 80 bp, synthetic construct
  source 1..80: mol_type = other DNA
accagctattaacaaccaaaaccctattaccacacttgctggactacaaaactacctcacaggagaaggaacaggaaaat

SEQ ID NO: 175782 - DNA, 80 bp, synthetic construct
  source 1..80: mol_type = other DNA
aggaaagaacagacacacgcaaaacaacggccagaggaagctcgggggcgcggggaccgcggaggaaacgacagacgaag

SEQ ID NO: 175783 - DNA, 80 bp, synthetic construct
  source 1..80: mol_type = other DNA
caaccacacactacacacatgtggggcatttggccaacaatctagagcagtttatgtgggcaactacagggtaatcaata

SEQ ID NO: 175784 - DNA, 80 bp, synthetic construct
  source 1..80: mol_type = other DNA
taatgcaacaaaaacacaaaatactgattcccagctttgataccaaacccgggggcagatccaaaatttcagtacacatt

SEQ ID NO: 175785 - DNA, 80 bp, synthetic construct
  source 1..80: mol_type = other DNA
agcatggatgaccacgatctgacggcggacggtacgttcgggagccaacaacgctacgccggtgcagctgagaaaggcca

SEQ ID NO: 175786 - DNA, 80 bp, synthetic construct
  source 1..80: mol_type = other DNA
ttcctgagtagcaccacccatcaactgaatgccctcatgagtaaaagtctgcgggcggcagcccttggggaccgttggca

SEQ ID NO: 175787 - DNA, 80 bp, synthetic construct
  source 1..80: mol_type = other DNA
atctagagatgacatttgtgattacaagctctcagcgcatgtcaacaacatatgactcggacacaccagtacttacgcac

SEQ ID NO: 175788 - DNA, 80 bp, synthetic construct
  source 1..80: mol_type = other DNA
agcctgtcgggagacacaagagcgcgaaaatcaaacctagagcgacgacggtgaaaaaaccgattataagcgcgtgtctc

SEQ ID NO: 175789 - DNA, 80 bp, synthetic construct
  source 1..80: mol_type = other DNA
tccaacaggaatgactactacaatcccagttacagtgactattgctcccatgtatactgaattttcaggcatcagatcaa

SEQ ID NO: 175790 - DNA, 80 bp, synthetic construct
  source 1..80: mol_type = other DNA
taccgccaatggagtccaaacagcagtgtacaacgcaggcatgggtgttgccgcaggcaacttgaccatttttccacatc

SEQ ID NO: 175791 - DNA, 80 bp, synthetic construct
  source 1..80: mol_type = other DNA
tttctagctaggatgataacaagtgatagtgacatctactctctgccacctgatcctaagtactttgatggttacgacca

SEQ ID NO: 175792 - DNA, 80 bp, synthetic construct
  source 1..80: mol_type = other DNA
agaagcttaaacagtgattctagtgatgagagatatttggaactgcaatcagcatacgagaacaaccaggtatcaacact

SEQ ID NO: 175793 - DNA, 80 bp, synthetic construct
  source 1..80: mol_type = other DNA
gaagtccccttcaccatttcttttccttccttttgtcattcttatcttgctcagtgtacttatatatatgcaagtagcat

SEQ ID NO: 175794 - DNA, 80 bp, synthetic construct
  source 1..80: mol_type = other DNA
gagagatacggccaccccggtgggccgcgcgcgcctggggcaccgggagtagagggcaaccccaaccctccttctatccg

SEQ ID NO: 175795 - DNA, 80 bp, synthetic construct
  source 1..80: mol_type = other DNA
atctgcgacacacgcgactctgtttcggtctggcgcgtgggcgggcgcgcctctcggaggacggcgtgacggtgtacgtg

SEQ ID NO: 175796 - DNA, 80 bp, synthetic construct
  source 1..80: mol_type = other DNA
ttacagtactacaagcacttcaactgaaaatgaatatggtattgccccaacaaatgatatgggtacactgtgttttaggg

SEQ ID NO: 175797 - DNA, 80 bp, synthetic construct
  source 1..80: mol_type = other DNA
gtgagaaggttagtgaaataacctctatggtaacttctgtggtttcagagaaattattgaagaacctgattaaactgatt

SEQ ID NO: 175798 - DNA, 80 bp, synthetic construct
  source 1..80: mol_type = other DNA
cagccaagtggatggtactgtaaatgagcatggattgagtgagggggagaccgctaagaaattctcttccaccagcacaa

SEQ ID NO: 175799 - DNA, 80 bp, synthetic construct
  source 1..80: mol_type = other DNA
agttaagatactataatcttctagtttagcataattttagatgggcaatatgcgtatgcctattaataaaaacttaggag

SEQ ID NO: 175800 - DNA, 80 bp, synthetic construct
  source 1..80: mol_type = other DNA
ggaagtaatcctcacccacgtgacttaccacgtggtgcgtgcgtcaccgccgccattttgttttacaaaatggccgactt

SEQ ID NO: 175801 - DNA, 80 bp, synthetic construct
  source 1..80: mol_type = other DNA
gcctaaaaagtggaaattgcagaaaattgagctcccagaaagagatgtttggacagtaaatgacattcagaagttagtag

SEQ ID NO: 175802 - DNA, 80 bp, synthetic construct
  source 1..80: mol_type = other DNA
aatatccatgttttgtttctaagtgatagggggtttttgagggttgcacacacctatgacaccagtggcgatcgggtcaa

SEQ ID NO: 175803 - DNA, 80 bp, synthetic construct
  source 1..80: mol_type = other DNA
ataccctcaccaatggattaacttgaggacaaacaattgcgctactatagtcatgccatacataaactgtgtacccatgg

SEQ ID NO: 175804 - DNA, 80 bp, synthetic construct
  source 1..80: mol_type = other DNA
gggcaacagaataacaagcaggcaatctttgcgctcagcctgagcccagcatctgatgggcggctgtcacgcacattgtt

SEQ ID NO: 175805 - DNA, 80 bp, synthetic construct
  source 1..80: mol_type = other DNA
aagtggtggtagtacccgacactaaaccttcaggaccacaacacactactaagcccagtgcattgggtgcattagaaata

SEQ ID NO: 175806 - DNA, 80 bp, synthetic construct
  source 1..80: mol_type = other DNA
atttcaggtgaataacgaattatggcagggtgtcaaagcatgtgttaaatctaaatttagggaaatttttggagtcaatg

SEQ ID NO: 175807 - DNA, 80 bp, synthetic construct
  source 1..80: mol_type = other DNA
aaccctcctggaatgcagaaagatttcattgtatcaggaacaggtaaagggattccctactgcaacagaacaagcccaga

SEQ ID NO: 175808 - DNA, 80 bp, synthetic construct
  source 1..80: mol_type = other DNA
aagtcgttgagaccgttaaagtccccggctcgaatggcgatgcagccgtaggccatcagcgtgtcccgtaggtcgtccat

SEQ ID NO: 175809 - DNA, 80 bp, synthetic construct
  source 1..80: mol_type = other DNA
ctatcactcttgaaggaccaccaccagctgcaattagtgacctattacagtcagttagaactcctgaagtaatcaaatac

SEQ ID NO: 175810 - DNA, 80 bp, synthetic construct
  source 1..80: mol_type = other DNA
gttgctattagcgcggctagtaacagtagtttagtgttacattgtatacccatgtttttaataactatgaatattctgct

SEQ ID NO: 175811 - DNA, 80 bp, synthetic construct
  source 1..80: mol_type = other DNA
gctcaagtgtcatcacagaaggttggggcgcatgaaaataccaatgtagctactggtgggtccacagttaattacaccac

SEQ ID NO: 175812 - DNA, 80 bp, synthetic construct
  source 1..80: mol_type = other DNA
gcctaatggaaaggctgcggttcccagtatctgctcaggcgggcaagggtgagttgtgtgcagtattcagggctgaccca

SEQ ID NO: 175813 - DNA, 80 bp, synthetic construct
  source 1..80: mol_type = other DNA
accttagtgtgctacaaatgagtcctccggcccctgaatgcggctaatcctaaccctgcagctatcgtatgcaagccagc

SEQ ID NO: 175814 - DNA, 80 bp, synthetic construct
  source 1..80: mol_type = other DNA
catgggctctcaggtatccacacaacgctctggttcccatgagaactctaactcagctactgagggctccactataaatt

SEQ ID NO: 175815 - DNA, 80 bp, synthetic construct
  source 1..80: mol_type = other DNA
tggcaacagatacacagcaccctcactgcacccgggtaacatgatgctacagagacagaaaatactaatcccaagcttta

SEQ ID NO: 175816 - DNA, 80 bp, synthetic construct
  source 1..80: mol_type = other DNA
aggacagctcatcatcataccatccaggagtccttataaaagcaaaacacaaagtactagtaccaagctatgatacacat

SEQ ID NO: 175817 - DNA, 80 bp, synthetic construct
  source 1..80: mol_type = other DNA
ccaagcacagctgacatgctatgttttgtttcagcatgcaaggatttttgcctacgcatggctagagatactgacatgca

SEQ ID NO: 175818 - DNA, 80 bp, synthetic construct
  source 1..80: mol_type = other DNA
gtggcataatggtgaggaaaaatacaaccacttcgtgaccaagattaggagtgttagcgctggtcgtgcactctatatac

SEQ ID NO: 175819 - DNA, 80 bp, synthetic construct
  source 1..80: mol_type = other DNA
ttgcatatacttccagattttagatccctactggtataaccgccggatgtccataaccccagacttactaaagtcaaact

SEQ ID NO: 175820 - DNA, 80 bp, synthetic construct
  source 1..80: mol_type = other DNA
tcgatggtgtaggaagcgtagccccgcttggtcacctcggccgacaggctctccacgtcaccgcggtagagcatgacggc

SEQ ID NO: 175821 - DNA, 80 bp, synthetic construct
  source 1..80: mol_type = other DNA
ccatgaggtagaagggctgttcgatgtggttctggtcgggcgtgtggtagaagagcacgcggatgagcgtgctgctctgc

SEQ ID NO: 175822 - DNA, 80 bp, synthetic construct
  source 1..80: mol_type = other DNA
gggcatcacaacctcgagacagctatgagtgggcagaatacatacaggaaagagaccaactattcagagaggacaactcg

SEQ ID NO: 175823 - DNA, 80 bp, synthetic construct
  source 1..80: mol_type = other DNA
caaggaggatcaggcaaggatttgagctcgcgcttttgtgaagctcagggccaaggctatagtgaaggagagttcatgaa

SEQ ID NO: 175824 - DNA, 80 bp, synthetic construct
  source 1..80: mol_type = other DNA
tgttaagagacaccacacacatcactcaggatgccctcgcccagggaattgatgacatcattcagcaggtagctagcaat

SEQ ID NO: 175825 - DNA, 80 bp, synthetic construct
  source 1..80: mol_type = other DNA
ctagtatgaatgacacagcaaatttcagaagagtgtttggcaacttgtacgctggcttccatgcaaatccaggcatccta

SEQ ID NO: 175826 - DNA, 80 bp, synthetic construct
  source 1..80: mol_type = other DNA
ccacgctgttctccgaccgttggtactttcaaaaggacttggccaatgttccgttgctaaccacaaaagccatagcttgc

SEQ ID NO: 175827 - DNA, 80 bp, synthetic construct
  source 1..80: mol_type = other DNA
aggggcttcactagcttggttatatgtgggaactccaaatcggggcgaaactacgccctacacagcgaggactacaccac

SEQ ID NO: 175828 - DNA, 80 bp, synthetic construct
  source 1..80: mol_type = other DNA
ataccgtgccaacccctgagcatacaacgccacgaacgcacggggccttcggccaacagtcaggcgctgtgtacgtggga

SEQ ID NO: 175829 - DNA, 80 bp, synthetic construct
  source 1..80: mol_type = other DNA
catcccgggggtggtggtggaaattgccagactgtttgaaagacatgggtatgttcgggcaaaacatgtattaccactat

SEQ ID NO: 175830 - DNA, 80 bp, synthetic construct
  source 1..80: mol_type = other DNA
ttgttcctgaacaccaactagcttacattgggggcaccaatgcgcaagttagctataaacacacccacccaggtgaaagt

SEQ ID NO: 175831 - DNA, 80 bp, synthetic construct
  source 1..80: mol_type = other DNA
agaagcattaataaattaaacacattcagtacagaaggagcatttagtcacccaaaagtagaaaagtttaaaccaaagat

SEQ ID NO: 175832 - DNA, 80 bp, synthetic construct
  source 1..80: mol_type = other DNA
cgcttgagaccccttcccgctctccccgcgcctcccgctgactcacaagcaccatggcctggggctggtggctcaagcgg

SEQ ID NO: 175833 - DNA, 80 bp, synthetic construct
  source 1..80: mol_type = other DNA
atggcaaaaacccagacggtaccggacagatacacacgtactggatgatgagatggagaccctacatgatgttccaaaga

SEQ ID NO: 175834 - DNA, 80 bp, synthetic construct
  source 1..80: mol_type = other DNA
actattttggagaaggcaaaatgccaaacggagacatgtacgtaccatttaaaataagaatgaaatggtacccttcaatg

SEQ ID NO: 175835 - DNA, 80 bp, synthetic construct
  source 1..80: mol_type = other DNA
tctactaatgagtgtaacctacctagtattcacacaccaagcaagacaaagttacaacctagtgtgttttatgatgtctt

SEQ ID NO: 175836 - DNA, 80 bp, synthetic construct
  source 1..80: mol_type = other DNA
ccagagccaaacacctccagtcctagcatgcctgaactaagtccagtccttggtcttcatcagggacaaggggctgggga

SEQ ID NO: 175837 - DNA, 80 bp, synthetic construct
  source 1..80: mol_type = other DNA
aacagaaagttgtcatcatggatgatgtagggcaaaacccagatggtggtgacctaagtattttttgtcaaatggtttct

SEQ ID NO: 175838 - DNA, 80 bp, synthetic construct
  source 1..80: mol_type = other DNA
tcaaacagaagaaaagaagtgagccagttgctatcatgatacatggtccaccaggaacaggcaaatctataacaaccagc

SEQ ID NO: 175839 - DNA, 80 bp, synthetic construct
  source 1..80: mol_type = other DNA
gagatggcactccctgatcaaacacctgagtataacacaaaagagctacagaaagtgtgttatgtgccccatcacaaggt

SEQ ID NO: 175840 - DNA, 80 bp, synthetic construct
  source 1..80: mol_type = other DNA
taccagtacctctactaaacagaagaactttttcaattggacgctaaacaccagagaatttgttcaattgagacggaaaa

SEQ ID NO: 175841 - DNA, 80 bp, synthetic construct
  source 1..80: mol_type = other DNA
tagatacaccttgggtggaaaaggaatcagcattatcaatagattataaaactgctttgggagctgttaggtttaacaca

SEQ ID NO: 175842 - DNA, 80 bp, synthetic construct
  source 1..80: mol_type = other DNA
cctcattataggctacgaccccattatagtgtgtggacttaacaaaacaagcacaaactttagtagccatatagatgact

SEQ ID NO: 175843 - DNA, 80 bp, synthetic construct
  source 1..80: mol_type = other DNA
gactaccagaactacagcagaagtttacatcagtttgagatgtcctaactttttctttcctgtgccagctcctaagccga

SEQ ID NO: 175844 - DNA, 80 bp, synthetic construct
  source 1..80: mol_type = other DNA
ctgggatccctatatcgcaattgacaatatgcccccatcaatggatcaacctgcggaccaataactgtgccacaataata

SEQ ID NO: 175845 - DNA, 80 bp, synthetic construct
  source 1..80: mol_type = other DNA
caccagcaattgttgacttactcaggtctgttagaagcccagatgttattaaatattgtgaagataataaatggattgtg

SEQ ID NO: 175846 - DNA, 80 bp, synthetic construct
  source 1..80: mol_type = other DNA
caggtagagcctgggtgttccctgctagactctcaccagtgcttggccggcactgggcagacggctccacgcttgcttgc

SEQ ID NO: 175847 - DNA, 80 bp, synthetic construct
  source 1..80: mol_type = other DNA
ctgggccagccacttaactccctactttcttgctggactaaaaaacccttttccctcaagtgaacaaaattttacagttc

SEQ ID NO: 175848 - DNA, 80 bp, synthetic construct
  source 1..80: mol_type = other DNA
tcggcccgggcggcgcgcttacgccccgcaaaactccctagctgcctcagcgcaaaactccctcggcccggtcggcgcac

SEQ ID NO: 175849 - DNA, 80 bp, synthetic construct
  source 1..80: mol_type = other DNA
cggcaggaaaagaaaaacagaaagtgtgtagaacacaatctcactgctatatttcaaggattaggagatgattcaacacc

SEQ ID NO: 175850 - DNA, 80 bp, synthetic construct
  source 1..80: mol_type = other DNA
acaccagtatggcctactgggagtggtggagacgcaggtggccccggcgccggtggagaaggtggaggagacgtcggaga

SEQ ID NO: 175851 - DNA, 80 bp, synthetic construct
  source 1..80: mol_type = other DNA
gtggcaatgtgaacttcgacccaaagcccgtaacggaggttaggtctagtattaacgatgtaggcgcacttcaatcacca

SEQ ID NO: 175852 - DNA, 80 bp, synthetic construct
  source 1..80: mol_type = other DNA
aggccccaggtgccattgagaccaatgacatacaaattggcaatagacatgtctcattttataaaagaaaaggggggact

SEQ ID NO: 175853 - DNA, 80 bp, synthetic construct
  source 1..80: mol_type = other DNA
ggttctttgaacttgggttgctcttggcctgcaccatctttgccctgtccgtggtctccagggccctggaggtgtcggct

SEQ ID NO: 175854 - DNA, 80 bp, synthetic construct
  source 1..80: mol_type = other DNA
cccatatggatacaacacacttaacgacatgggccagttgtatttcacgcacgtgaatgagggtagcccgggagcggtga

SEQ ID NO: 175855 - DNA, 80 bp, synthetic construct
  source 1..80: mol_type = other DNA
agtgcaacgtaagaaagagactttagatcagtgcaaaaagataggactttatgaagaacaaacaaaaggcttttcccact

SEQ ID NO: 175856 - DNA, 80 bp, synthetic construct
  source 1..80: mol_type = other DNA
gtagccaacactaccccaagtggaccatcaaactccgagcaagtgcctgcgctaacggcagtcgagacggggcacacgtc

SEQ ID NO: 175857 - DNA, 80 bp, synthetic construct
  source 1..80: mol_type = other DNA
ccaatgcacccacagccatagtttccaacagggattctatcaccaccatgccaaatgatatctcactcacaagcaaaggg

SEQ ID NO: 175858 - DNA, 80 bp, synthetic construct
  source 1..80: mol_type = other DNA
aatgcactcactatcaaacatttgccacagacaccagactagctccagaaaaatcaacaacaccctcaggagaaactaac

SEQ ID NO: 175859 - DNA, 80 bp, synthetic construct
  source 1..80: mol_type = other DNA
ctcaaaatggaggttaacttcttccgggtcaaaggtcacgcctacgtcacaagtcacgtgggggaggctactacgcaaac

SEQ ID NO: 175860 - DNA, 80 bp, synthetic construct
  source 1..80: mol_type = other DNA
ctttctatccctggatgccccgctaccgcgtaagcttacgtcttggtttcaacccacaataaaaattcaaggccgtggga

SEQ ID NO: 175861 - DNA, 80 bp, synthetic construct
  source 1..80: mol_type = other DNA
acaaatcagcatgtcttaattcccccaactatatccactatacccgccttaaatcggcgattgttctttgatttaactgt

SEQ ID NO: 175862 - DNA, 80 bp, synthetic construct
  source 1..80: mol_type = other DNA
taaggactaacaacagtgccacgctggttttaccctatgttaattcactgtccatcgactgcatggctagacacaacaac

SEQ ID NO: 175863 - DNA, 80 bp, synthetic construct
  source 1..80: mol_type = other DNA
ccccctgcccttatacagaagaattaggggccggtcagagtcgtacgtgaggtaaagcccatccggtggcagggcctggc

SEQ ID NO: 175864 - DNA, 80 bp, synthetic construct
  source 1..80: mol_type = other DNA
gtcctgttaaaggtgccttgtattcacgtgaaatatgcggccatacatacacacacaatcttctacactcatatgactta

SEQ ID NO: 175865 - DNA, 80 bp, synthetic construct
  source 1..80: mol_type = other DNA
ccggcaaatttttaatatcatacgccccgcctggtgctggcttcccggaaaaccggaaagatgcaatgttagggacacat

SEQ ID NO: 175866 - DNA, 80 bp, synthetic construct
  source 1..80: mol_type = other DNA
gcgtaaaaaatcgccggtaaaatgttttttcttgttcatgtaaaagtaccggaactaaaatgctagttagaatggttgca

SEQ ID NO: 175867 - DNA, 80 bp, synthetic construct
  source 1..80: mol_type = other DNA
tatcaactttgaccggggaaacagaagtgcttgacctttagtaacctggaaagctaccacctattggtctttgtttaaaa

SEQ ID NO: 175868 - DNA, 80 bp, synthetic construct
  source 1..80: mol_type = other DNA
gggccgtcggtggactataagcaggcaaacaaggtaatgacacatgtagcagacatccgcacatacggattcgggcacca

SEQ ID NO: 175869 - DNA, 80 bp, synthetic construct
  source 1..80: mol_type = other DNA
attggtacccacttaatcctacaaacaacagtacacagacaaataacatacagaaaattaaacaagcagctaccatttac

SEQ ID NO: 175870 - DNA, 80 bp, synthetic construct
  source 1..80: mol_type = other DNA
agcagcagagggagagccgagagagaccctacaaggaggtgacagaggacttgctgcacctcaattctctctttggagaa

SEQ ID NO: 175871 - DNA, 80 bp, synthetic construct
  source 1..80: mol_type = other DNA
gcggcggtagaaacgtcgcagccaccggcgcagtttgcggcgcagacgtcggcggtcctccagcagcagctggtgcatca

SEQ ID NO: 175872 - DNA, 80 bp, synthetic construct
  source 1..80: mol_type = other DNA
aagtacttggcgctgcgagacgatggccggcccctggcatggcggcgccgctgtagcggcggaggactcaagaacgtcgt

SEQ ID NO: 175873 - DNA, 80 bp, synthetic construct
  source 1..80: mol_type = other DNA
cgttaaacaacatgggcaaattgtacgcacgccacgtaaataaagacaccccataccagatgtccagtacaatccgcgtg

SEQ ID NO: 175874 - DNA, 80 bp, synthetic construct
  source 1..80: mol_type = other DNA
ggttacagctatactgcaggagcacaataataagacaaaaattactaactcccttgaaattctgttccaaggtccagtgt

SEQ ID NO: 175875 - DNA, 80 bp, synthetic construct
  source 1..80: mol_type = other DNA
gagaacgtgttttgcaccatgcagacctacagcacccccctcacgcttgtcatagtcacgtcgctgtttttgttcacaac

SEQ ID NO: 175876 - DNA, 80 bp, synthetic construct
  source 1..80: mol_type = other DNA
taaacactcaagaagtaccagctctgactgcagttgaaaccggagcctctggacaagcaataccatcagatgttattgaa

SEQ ID NO: 175877 - DNA, 80 bp, synthetic construct
  source 1..80: mol_type = other DNA
agatactaacaactataaagaatcttttgttgctgcattaccaacaaaagtatctactgactggggcaaaagactaaaca

SEQ ID NO: 175878 - DNA, 80 bp, synthetic construct
  source 1..80: mol_type = other DNA
aatgtgtacataccaaggatgcaatatacacttgtgcacacttgacaacgcccaacaataacacaatattgttggcaata

SEQ ID NO: 175879 - DNA, 80 bp, synthetic construct
  source 1..80: mol_type = other DNA
tttaagtgacccactgtgtatagaagacaaggttgaagagtgtaaacaatcactgtcccctaatgagttgggcttgactt

SEQ ID NO: 175880 - DNA, 80 bp, synthetic construct
  source 1..80: mol_type = other DNA
atagtgtagaggccaatgccaagaatacaagtatgtatacagttactttgagtagagaaacagagttagcaaaggaaatc

SEQ ID NO: 175881 - DNA, 80 bp, synthetic construct
  source 1..80: mol_type = other DNA
ggtagaagcacaggtggggctgaggcccccgcacatccaccacccctgcggcgcctggtgtctggaaacacttgggaatg

SEQ ID NO: 175882 - DNA, 80 bp, synthetic construct
  source 1..80: mol_type = other DNA
aaatactggcaaacattaacaaaagacaatgacttacacagcaattatggcaaggcccaaagtgaagagtttgagtacca

SEQ ID NO: 175883 - DNA, 80 bp, synthetic construct
  source 1..80: mol_type = other DNA
taactggttctgctgtgggctgtgatccagaagtgttttggtctaaaataccagctatgttgaatggtgagtgtttaatg

SEQ ID NO: 175884 - DNA, 80 bp, synthetic construct
  source 1..80: mol_type = other DNA
gcgtggaaacccggacaactatgatgcactatacagggtcagaaacaacactggaaaattttctgggtagagcagcatgt

SEQ ID NO: 175885 - DNA, 80 bp, synthetic construct
  source 1..80: mol_type = other DNA
taggctgcctcaagttgcatcagccagggcttcatgccctcctcagttccctagtccccgggcttcagcccccctccgtc

SEQ ID NO: 175886 - DNA, 80 bp, synthetic construct
  source 1..80: mol_type = other DNA
agaacataaacgttctcaacaggtatgaaatgaacaaactagatgatgctataaccttatattgtgtgtatatagatagg

SEQ ID NO: 175887 - DNA, 80 bp, synthetic construct
  source 1..80: mol_type = other DNA
ttacctggtataataaagatttctatacagatgttattccagatgtggcagagcatctagtgcatagtgcttatttctct

SEQ ID NO: 175888 - DNA, 80 bp, synthetic construct
  source 1..80: mol_type = other DNA
tgctttcgtacgctccaccaggtgcgggggcgcccaaaactcgcaaagacgccatgttgggcacacacgtggtgtgggat

SEQ ID NO: 175889 - DNA, 80 bp, synthetic construct
  source 1..80: mol_type = other DNA
gaagccatttagataacacatgatcaggagacaaacacacaggtttacctttaggaggccataaaaaatgttgcggcttt

SEQ ID NO: 175890 - DNA, 80 bp, synthetic construct
  source 1..80: mol_type = other DNA
ggtagggaagtgtacgagaccttcttacagaaaattagatcagttgaagttggtcgaacactaaacttaccaccttattc

SEQ ID NO: 175891 - DNA, 80 bp, synthetic construct
  source 1..80: mol_type = other DNA
aggagaagaaagaagccagcgtggaagaagtggagaacacgcagatggagaagatttcgacgccgaagacctaaacgcac

SEQ ID NO: 175892 - DNA, 80 bp, synthetic construct
  source 1..80: mol_type = other DNA
agtcggatgtgaaagatcgagagggcagtggcctgaggttatacggtattattcgccgttcaaacggtagcatgacggga

SEQ ID NO: 175893 - DNA, 80 bp, synthetic construct
  source 1..80: mol_type = other DNA
agctacgcctgacacaccaccaccaataaggcctctgccagccctgcccgcgccggaccctccggcgcccccgagacgcc

SEQ ID NO: 175894 - DNA, 80 bp, synthetic construct
  source 1..80: mol_type = other DNA
tacaaccccatgaatgacaaaggagtaggaaacaaagtatggatagactggtgtaccaaaggagatagcttctgggtaga

SEQ ID NO: 175895 - DNA, 80 bp, synthetic construct
  source 1..80: mol_type = other DNA
aaatggccgacttccttcctcttttttaaaaaaaagcggaagtgccgccgcggcggcgggtggcggcgcgctacgcgcgc

SEQ ID NO: 175896 - DNA, 80 bp, synthetic construct
  source 1..80: mol_type = other DNA
tcctggatctcgtccacctgcgactggatctgctcctccaggcacttgatgacctgcttcttaaacaggtcgcggatgtc

SEQ ID NO: 175897 - DNA, 80 bp, synthetic construct
  source 1..80: mol_type = other DNA
agctagaaatcacagttttgaaattggatagaaatgaaaaatttagagatattagaaagtatatcccagagaatgaagat

SEQ ID NO: 175898 - DNA, 80 bp, synthetic construct
  source 1..80: mol_type = other DNA
ctaatacctccacttaaaatgaaccagtttacaagtcccaacacgcacccgggactactcatgctcagcaaacacaagat

SEQ ID NO: 175899 - DNA, 80 bp, synthetic construct
  source 1..80: mol_type = other DNA
gtgtaacttttatacccccaatggctgatttacctgataaaggaaaaccttttgactctaggtttgttttctgtagcaca

SEQ ID NO: 175900 - DNA, 80 bp, synthetic construct
  source 1..80: mol_type = other DNA
acacaccctggtgaaactggtagggatgttggaaaggacagggaaagtaccagataccaacctagtgatgacaattggct

SEQ ID NO: 175901 - DNA, 80 bp, synthetic construct
  source 1..80: mol_type = other DNA
gaccgccaaatacaaattcatatttaacttcgggggcaaccccgtaccctcacagattgtacaagatccctgcacacaac

SEQ ID NO: 175902 - DNA, 80 bp, synthetic construct
  source 1..80: mol_type = other DNA
aacgaagacctagacctgtgtagatacgtgggctgcaaactcatattttttaaacaccccacttccagtgaaatctgtat

SEQ ID NO: 175903 - DNA, 80 bp, synthetic construct
  source 1..80: mol_type = other DNA
aatcacaacttgttagcaccacctactataacttctttaccagctatgaacagaagattcttccttgatttggatattat

SEQ ID NO: 175904 - DNA, 80 bp, synthetic construct
  source 1..80: mol_type = other DNA
gacgccaatctgtctacatagaagaagaagaggatgaagactaagtcacaggcttagccaggtgatttgtgaatttcagt

SEQ ID NO: 175905 - DNA, 80 bp, synthetic construct
  source 1..80: mol_type = other DNA
tactacccaataaatgtgaagaaacaccaatggtatgagattcaagaatcagaatattacccaaaacatatccaatacaa

SEQ ID NO: 175906 - DNA, 80 bp, synthetic construct
  source 1..80: mol_type = other DNA
tctatagtggcagggatagaattaggacttaattacaagccaaaaatagtagggggaattggaggatttataaatacaaa

SEQ ID NO: 175907 - DNA, 80 bp, synthetic construct
  source 1..80: mol_type = other DNA
ccacttctattctagatcagggcttgtaggagttatagatttgcctacccagtccaccaaaccagtgggcttcgctgcat

SEQ ID NO: 175908 - DNA, 80 bp, synthetic construct
  source 1..80: mol_type = other DNA
cggggcacactgcttccatcctgacacaccccgccaacacgcccgcgacacaccccgacgacacacccggacggacaaga

SEQ ID NO: 175909 - DNA, 80 bp, synthetic construct
  source 1..80: mol_type = other DNA
gcttataatggttacaaataaagcaatagcatcacaaatttcacaaataaagcatttttttcactgcattctagttgtgg

SEQ ID NO: 175910 - DNA, 80 bp, synthetic construct
  source 1..80: mol_type = other DNA
acagtaggcaaagtgaatgaccaagtgtttggcaccagaatgtttataggagatggtgttttcaaaaccacactgtttgg

SEQ ID NO: 175911 - DNA, 80 bp, synthetic construct
  source 1..80: mol_type = other DNA
atatactcatccacatgtgtgtttacatttccaatgtaaacacacatgtggatgagtatatgatgagccttcaacctagg

SEQ ID NO: 175912 - DNA, 80 bp, synthetic construct
  source 1..80: mol_type = other DNA
tggattgccaacaaaatatccaagttgattgattgggtcaaacaaaaaattttacctcaggcaagagacaagctagattt

SEQ ID NO: 175913 - DNA, 80 bp, synthetic construct
  source 1..80: mol_type = other DNA
tttctctttcaaacaggccaatccagtactacttcgtgcacttcctggggcgtgtcctgcccctccatataagcagaggc

SEQ ID NO: 175914 - DNA, 80 bp, synthetic construct
  source 1..80: mol_type = other DNA
gtgcagttgtacctacccatgcaaattgtggacaaagtgcactcatagatgggaaggaaaccaagattctcaagcaagta

SEQ ID NO: 175915 - DNA, 80 bp, synthetic construct
  source 1..80: mol_type = other DNA
acagaaaaaggagaatttacaggtttgggggtatatgatcatgtctgtgttattcccactcatgcacaacctagtgatag

SEQ ID NO: 175916 - DNA, 80 bp, synthetic construct
  source 1..80: mol_type = other DNA
ccttcacgtcagacaaaatagcgaaaggtgaggcagcactcacgttcacaccaaccaagcatgagggaactagcgctggc

SEQ ID NO: 175917 - DNA, 80 bp, synthetic construct
  source 1..80: mol_type = other DNA
gtagtgcctgaacatcagttagcatacattggaggtgataacacccgagttaaatacaagcatacacatccaggtgaatt

SEQ ID NO: 175918 - DNA, 80 bp, synthetic construct
  source 1..80: mol_type = other DNA
catgtgagagtgtggtgtcctaggccaccgagagctgtggagtacaccggaccgtcagttgactacaagcaaagtaattc

SEQ ID NO: 175919 - DNA, 80 bp, synthetic construct
  source 1..80: mol_type = other DNA
acttactgcaagggaagaagaaaagggatatatttaatagacagaccagggatactactgaaatgacaaggatgttagaa

SEQ ID NO: 175920 - DNA, 80 bp, synthetic construct
  source 1..80: mol_type = other DNA
ttggaaagccactggctgccgacgacgaacatgatgacgatcggcgccgagcactctatgaggaagccgaacggtggtgt

SEQ ID NO: 175921 - DNA, 80 bp, synthetic construct
  source 1..80: mol_type = other DNA
aaaaaggatatcataaacaaaactacaaaggacactgtaaaaatgcaaaagatgctggatcaatatggggttgatttacc

SEQ ID NO: 175922 - DNA, 80 bp, synthetic construct
  source 1..80: mol_type = other DNA
agcaagaaagaggctcagatttcacgagagaggagctacaaatactctcggagaagccgccgtccccagagaaagaagtc

SEQ ID NO: 175923 - DNA, 80 bp, synthetic construct
  source 1..80: mol_type = other DNA
cggcgtggacagtggtgtggttgtcggcggggacggtggcctttcgcggcggagacacggacgaggacggagacacggag

SEQ ID NO: 175924 - DNA, 80 bp, synthetic construct
  source 1..80: mol_type = other DNA
ctacatggagtgccgggatgtggcaaatcactcattactactatcattgccagggggctagctactgagggaaatatcta

SEQ ID NO: 175925 - DNA, 80 bp, synthetic construct
  source 1..80: mol_type = other DNA
ggcctcgtaggccgagacgggcagccggagcttgtggtactgtccctccggcaggtggagtgggacacagttagagaaca

SEQ ID NO: 175926 - DNA, 80 bp, synthetic construct
  source 1..80: mol_type = other DNA
tgccgtaacaacggtcaagaagaaaattactacgtgacagtgttaaccggagatacaacgttatccattcttggcacatg

SEQ ID NO: 175927 - DNA, 80 bp, synthetic construct
  source 1..80: mol_type = other DNA
agctcatggataaaaataccaggcaacgtttcaccattgatgaaatcactaccctgattatcaatgaaaagaatagaagg

SEQ ID NO: 175928 - DNA, 80 bp, synthetic construct
  source 1..80: mol_type = other DNA
tagggggtcgccataggcttcggcctccatttcaggccttccggactacaaaaatcgccattttagtgacgtcacggcag

SEQ ID NO: 175929 - DNA, 80 bp, synthetic construct
  source 1..80: mol_type = other DNA
ccacgtgcactccacagaccaaccagagcctatgtcgtgcacttcctgggccgggtctacatcctaatataagtaactgc

SEQ ID NO: 175930 - DNA, 80 bp, synthetic construct
  source 1..80: mol_type = other DNA
tgcgaaggtctccttgccccccgcgacccgcttggggtccaacgtggccagagccaacctcagctcctccatgccatcca

SEQ ID NO: 175931 - DNA, 80 bp, synthetic construct
  source 1..80: mol_type = other DNA
accatggaggcataccctattcctctacaagccggtgtgcagaataacaatcaatcaatattttcaatcagcttaagccc

SEQ ID NO: 175932 - DNA, 80 bp, synthetic construct
  source 1..80: mol_type = other DNA
cggtttgttcaacatgatgtgtacacggatgctggttatatcacatgctggtaccaaaccagtttagtggtacctgcgga

SEQ ID NO: 175933 - DNA, 80 bp, synthetic construct
  source 1..80: mol_type = other DNA
tagtggtcattccagaacatcaacttgcatcacaccaaggtggaaatgtatcagttaaatatactctcacacatcccggt

SEQ ID NO: 175934 - DNA, 80 bp, synthetic construct
  source 1..80: mol_type = other DNA
acaattatagcaaacattattagtatatcaggaataatctatgtcatctacaagctcttttgtacattacaaggacctta

SEQ ID NO: 175935 - DNA, 80 bp, synthetic construct
  source 1..80: mol_type = other DNA
tgggacccagttggcacaggacatgcctgtcttaacacaccagatcatgtacatcccacccgggggaccagtgccaaaca

SEQ ID NO: 175936 - DNA, 80 bp, synthetic construct
  source 1..80: mol_type = other DNA
aaagaggatgctcaaaatgaactaattgtaaatatagataaattaaagaaaggtttagatcagttagcacctttatatgc

SEQ ID NO: 175937 - DNA, 80 bp, synthetic construct
  source 1..80: mol_type = other DNA
cctttcacggctacattgactttatagaaatggaaataggcaaaggacaagacccaaaagaaaacggactcatctgctgc

SEQ ID NO: 175938 - DNA, 80 bp, synthetic construct
  source 1..80: mol_type = other DNA
agacaattttcaaaaacttacttatgagaatgtcacattcttaaaaaggggatttaaacaagatgataagtaccctttcc

SEQ ID NO: 175939 - DNA, 80 bp, synthetic construct
  source 1..80: mol_type = other DNA
gcaacctccaagggatggtggtggaagttccccgatgctcttagcgagatgggggtgtttggtcaaaacatgtattacca

SEQ ID NO: 175940 - DNA, 80 bp, synthetic construct
  source 1..80: mol_type = other DNA
tcgccgccgtcgaagaagagcaacagtaaggagaaggaggtgcgggcgcagacgggggcgacgcacatataccagacgca

SEQ ID NO: 175941 - DNA, 80 bp, synthetic construct
  source 1..80: mol_type = other DNA
aaccaaaacaggacaatgtggcggagttttgtgttcaacaggcaaaatttatggtatacatgtaggtggaaatggtagac

SEQ ID NO: 175942 - DNA, 80 bp, synthetic construct
  source 1..80: mol_type = other DNA
agtacaaatactaggaagacttaggcaagggtataggcctgtttcttcttcccctccctcttatgttcagcagatccata

SEQ ID NO: 175943 - DNA, 80 bp, synthetic construct
  source 1..80: mol_type = other DNA
gaaaaacaaatagagcatttaagagtggcagattcaaaaacacaggagaaaattaaacatgaaattgatacactacatga

SEQ ID NO: 175944 - DNA, 80 bp, synthetic construct
  source 1..80: mol_type = other DNA
cttcgggcacctcgacgtcggcggtgacggtgaagccgagccgctcgtagaaggtgaggttgcggggcgcggaggtctcc

SEQ ID NO: 175945 - DNA, 80 bp, synthetic construct
  source 1..80: mol_type = other DNA
cataacagagaagctactcaaaaatctggtgaaactcattagcagtttagtgataattattagaaactatgaagacacca

SEQ ID NO: 175946 - DNA, 80 bp, synthetic construct
  source 1..80: mol_type = other DNA
cgcgcagagcaactcccggtgggtgacggacggcggccagacgcggaaaaagaggaagtccccgtcgaggacacgcggag

SEQ ID NO: 175947 - DNA, 80 bp, synthetic construct
  source 1..80: mol_type = other DNA
cagacgcgcgtctgtcttgcgtctctttttggaatccccggtggaaaaaagaggaagaagtccctggggacgcgaagatc

SEQ ID NO: 175948 - DNA, 80 bp, synthetic construct
  source 1..80: mol_type = other DNA
gtaactatgacaaagcacttagcatacttaatactgcatcagtattaacagatgaaatacacacaaaaagagaaaactgc

SEQ ID NO: 175949 - DNA, 80 bp, synthetic construct
  source 1..80: mol_type = other DNA
caaacgagtggttctgggccaatgttacacatgataatgatttacactccacttatggtaaagccacattaaaatgcatg

SEQ ID NO: 175950 - DNA, 80 bp, synthetic construct
  source 1..80: mol_type = other DNA
atccttctactatgaaggaataggtatcaacgaacaaaccaaacacaccagcatagcacaaacattattcacacaaggca

SEQ ID NO: 175951 - DNA, 80 bp, synthetic construct
  source 1..80: mol_type = other DNA
acccagagcaagctatagacagagcattagctagagtcgcggacacaattcgaagtggaccatctaattcagaacaagta

SEQ ID NO: 175952 - DNA, 80 bp, synthetic construct
  source 1..80: mol_type = other DNA
aaagacctaaaagcccagatgatagaagccaacacgttttatacaaaagcaggaaaaaagttaattaaaggctttacacc

SEQ ID NO: 175953 - DNA, 80 bp, synthetic construct
  source 1..80: mol_type = other DNA
cgatcagtttttacttctcatggcgctttttgtggttgcggtgattttgtgggtcatcttcagagacttagcgaacgcct

SEQ ID NO: 175954 - DNA, 80 bp, synthetic construct
  source 1..80: mol_type = other DNA
gcctgttttcagcagcctgttgtagcctgcccccaagtttcgcaggtttcccccatgcttccacccgttaacccaatagc

SEQ ID NO: 175955 - DNA, 80 bp, synthetic construct
  source 1..80: mol_type = other DNA
tccaagattagggtgtacttaaaacccaaacacatcagagtgtggtgcccccgcccaccgagggcagtggcgtattacgg

SEQ ID NO: 175956 - DNA, 80 bp, synthetic construct
  source 1..80: mol_type = other DNA
acatgggcccgttcgaaggctactctatgtcggccgatcgcgccgcctcggatctactcatcggcatgttcggctccgtt

SEQ ID NO: 175957 - DNA, 80 bp, synthetic construct
  source 1..80: mol_type = other DNA
ttattaatcacctttcttatctgggcgagcgttacggcttcaggccaaatcctcgcgggcctgcatctcctggagtaggg

SEQ ID NO: 175958 - DNA, 80 bp, synthetic construct
  source 1..80: mol_type = other DNA
gagcgggctctgggcgtgcccccagcgccttcctaattctggcccaggcctcattcgcctctcgcgctcgccgctcccgc

SEQ ID NO: 175959 - DNA, 80 bp, synthetic construct
  source 1..80: mol_type = other DNA
gcgctccaatggctcggaaggggggtgtttgcaatcccaagaaggatcaggcagggagcagaaatcgccctcctgtgaag

SEQ ID NO: 175960 - DNA, 80 bp, synthetic construct
  source 1..80: mol_type = other DNA
aactttgatgcgacagctgtcactgacacgagaagcacaatcaacaccgtccccgtatcaaaccatggaggtgagcgccg

SEQ ID NO: 175961 - DNA, 80 bp, synthetic construct
  source 1..80: mol_type = other DNA
gaataaaatcatcttagaacaagaacaggaaggcacatactacagagaaggggaacctttagaagcaacagtgcagaaga

SEQ ID NO: 175962 - DNA, 80 bp, synthetic construct
  source 1..80: mol_type = other DNA
ttttgtattctgcggctcagccatggccaccggtaagttcttactagcatactcccctccaggcgccaacgcccccaagt

SEQ ID NO: 175963 - DNA, 80 bp, synthetic construct
  source 1..80: mol_type = other DNA
agtacagaaaaacctagcaaatcagtggacatacaaaatccatcagggagacagaatcctaagagtaggaaaatatgcaa

SEQ ID NO: 175964 - DNA, 80 bp, synthetic construct
  source 1..80: mol_type = other DNA
ataattcttctgctaagtatggtagtgtagttactaatgatatgggcaccatatgttcaagaatagttacagagaggcaa

SEQ ID NO: 175965 - DNA, 80 bp, synthetic construct
  source 1..80: mol_type = other DNA
cggaggaacagcaacggcgaaggcaggaacagcgtcacgaagaacggcgcaaaaaatcgtcctcgtctgccggtggtggt

SEQ ID NO: 175966 - DNA, 80 bp, synthetic construct
  source 1..80: mol_type = other DNA
attcaatgtcaacaatgaactatggcagggtgttaaagcctgtgtaaaatccaaattcagagaaatctttggggtcaatg

SEQ ID NO: 175967 - DNA, 80 bp, synthetic construct
  source 1..80: mol_type = other DNA
gagtagtcataagatgcccgtacacataccctcagcttataaaacacaacaatgacaactggggcttcgtcccctatagc

SEQ ID NO: 175968 - DNA, 80 bp, synthetic construct
  source 1..80: mol_type = other DNA
tgtgtacacataacagagattgaaaacaaagtaccccaagaccctacgccagaaggaggaaatacccacaaagaacaaaa

SEQ ID NO: 175969 - DNA, 80 bp, synthetic construct
  source 1..80: mol_type = other DNA
gcaagggaatgcgttactacaagtggtgcctagtcagttgaaacaggccccaccgtccgctgccgccctccttgagcccc

SEQ ID NO: 175970 - DNA, 80 bp, synthetic construct
  source 1..80: mol_type = other DNA
gtttctctactgtaatatgacttttttcttaaactgggtagaaaatagaactgggctcaagagaaattatgcgtcatgcc

SEQ ID NO: 175971 - DNA, 80 bp, synthetic construct
  source 1..80: mol_type = other DNA
tgtcattacaagtgcccaagttacttctacaaaccagagccaggatgcaccagtcctcacctatcaggtaatgtatgtgc

SEQ ID NO: 175972 - DNA, 80 bp, synthetic construct
  source 1..80: mol_type = other DNA
actggaagtagaaaacttcaatgcaacagaagcagcagacaaaaagaagcaattcactgtgtggcccatcacgtacacca

SEQ ID NO: 175973 - DNA, 80 bp, synthetic construct
  source 1..80: mol_type = other DNA
acacagaagatcatgaaattatgaaattttcctggaaaggaatcactgctgacactagagctctgaggagatttggcttt

SEQ ID NO: 175974 - DNA, 80 bp, synthetic construct
  source 1..80: mol_type = other DNA
ctatgctatatacaaactattgtgtatttcacagggcgcttatacaggtaatgcaaatcctgttcccagaaaaccagaac

SEQ ID NO: 175975 - DNA, 80 bp, synthetic construct
  source 1..80: mol_type = other DNA
aagataaatggatggctacctctaattgtctgtggctcagggagcacccagaacaatttcatagttcactcagaggacat

SEQ ID NO: 175976 - DNA, 80 bp, synthetic construct
  source 1..80: mol_type = other DNA
gtgttaccttcattccaccaatggctgatttgccagacaagggaaaaccctttgattcaaggtttgttctgtgtagtact

SEQ ID NO: 175977 - DNA, 80 bp, synthetic construct
  source 1..80: mol_type = other DNA
ttatcacaatcccagcaggggagcaaatgactttgtcagttcctttctactcaaacagaccactacgcacagtgagaagt

SEQ ID NO: 175978 - DNA, 80 bp, synthetic construct
  source 1..80: mol_type = other DNA
atgctagagtgaggatttacatgaagcccaagcacattcgagtgtggtgcccgagaccccctagagccgctgagtacacc

SEQ ID NO: 175979 - DNA, 80 bp, synthetic construct
  source 1..80: mol_type = other DNA
ccaatccatcatgaagaatcgcaataaactacttatgtgtatcatttttatttttaccatgtgcctcatttgtctttact

SEQ ID NO: 175980 - DNA, 80 bp, synthetic construct
  source 1..80: mol_type = other DNA
tattatatattaaacttatataaacatccaccgcctccctaatacgcaggcgcagtagggggctccgccccctacaaccc

SEQ ID NO: 175981 - DNA, 80 bp, synthetic construct
  source 1..80: mol_type = other DNA
gaccgaccgggctatctggacctgaccgcggagcgacatggcggcaacgccggcggttatcgccgagattcgtctaaata

SEQ ID NO: 175982 - DNA, 80 bp, synthetic construct
  source 1..80: mol_type = other DNA
cgctatacggcgctgcctcactggacgacttcggatcactggctgttcgcgtggtaaatgaccacaaccccacacggctc

SEQ ID NO: 175983 - DNA, 80 bp, synthetic construct
  source 1..80: mol_type = other DNA
acaaatcaggtacatagcactaagtttgacacatggaatatcaatttacaggaaatggctcaaattagacgcaaatttga

SEQ ID NO: 175984 - DNA, 80 bp, synthetic construct
  source 1..80: mol_type = other DNA
gtggggcagatggaggcgccgctggaggcctcgctatcgcagacgcacctggagggtacgcagaagacgacctagacgaa

SEQ ID NO: 175985 - DNA, 80 bp, synthetic construct
  source 1..80: mol_type = other DNA
cttgtaccactgaagcctggtaatagtggggtcaacacagtacccatcacagtatccatagccccacttaaatctgagtt

SEQ ID NO: 175986 - DNA, 80 bp, synthetic construct
  source 1..80: mol_type = other DNA
gttgacgttgagatgggaatcgacgtggtgctggacgtcagattgctgaccgaggaaaccgtggtgggagtggtgacggt

SEQ ID NO: 175987 - DNA, 80 bp, synthetic construct
  source 1..80: mol_type = other DNA
cctacaccgaaaacacttaccatgagctttgtagaaccctttctaagcagtcacaagagagaaatcctgtactactatgg

SEQ ID NO: 175988 - DNA, 80 bp, synthetic construct
  source 1..80: mol_type = other DNA
gcttcaactaaaacaactattaaatgacatgggactctctaccccagaagagaagttccaaaaagaccccccattcaaat

SEQ ID NO: 175989 - DNA, 80 bp, synthetic construct
  source 1..80: mol_type = other DNA
aaataacctctctatattctcaactgaagatgccactaacaaacagcactttgacacaaacttattctcacaaattcaat

SEQ ID NO: 175990 - DNA, 80 bp, synthetic construct
  source 1..80: mol_type = other DNA
cctggcacaattgtttgcatactatacaggggaacttaatatacatgttctgttcttgagccctagtgggttcctgaggg

SEQ ID NO: 175991 - DNA, 80 bp, synthetic construct
  source 1..80: mol_type = other DNA
tggatttacccttttgacttctcacacgttgattctcattaaagttgccttattgctgagacattactatcataatgggc

SEQ ID NO: 175992 - DNA, 80 bp, synthetic construct
  source 1..80: mol_type = other DNA
gaggacttagttacagttactgctacgctagcattgcttgggtgtgacgggtcgccttggaggtttctcaagatgtacat

SEQ ID NO: 175993 - DNA, 80 bp, synthetic construct
  source 1..80: mol_type = other DNA
acacacattagtcaagaggctatgccacaaggaattggtgacatgattgagggggccgttgaagggattactaaaaatgc

SEQ ID NO: 175994 - DNA, 80 bp, synthetic construct
  source 1..80: mol_type = other DNA
ctagactgacatcagagtggatagttgaagaagaatgtgaactggattatttcagaatcaagtatcttgaatcagctgta

SEQ ID NO: 175995 - DNA, 80 bp, synthetic construct
  source 1..80: mol_type = other DNA
attttatgtcgcccttgtacccgaacggtccgctttgtactatagcctccataacttctttttggtggaatatgtttacg

SEQ ID NO: 175996 - DNA, 80 bp, synthetic construct
  source 1..80: mol_type = other DNA
tttaaaggcaccaaagagcccgcagttttatcagataaagacccacgtttagagactgactttaaaacatccttattctc

SEQ ID NO: 175997 - DNA, 80 bp, synthetic construct
  source 1..80: mol_type = other DNA
gcacctggagtaggaggcccgccacccccgctccgtcgagccctgccggcacccccggctccggagccgtcccagcaggc

SEQ ID NO: 175998 - DNA, 80 bp, synthetic construct
  source 1..80: mol_type = other DNA
acccctttgacttcagacgggggttctataatcaacaagctatcaaacgtgtgtcaggaaaaccaactgatgatgaacta

SEQ ID NO: 175999 - DNA, 80 bp, synthetic construct
  source 1..80: mol_type = other DNA
atttacgtttgtggtgacagaaagatactactccagcaacgccggacatgcactaaatcaggtttaccaaatcatgtatg

SEQ ID NO: 176000 - DNA, 80 bp, synthetic construct
  source 1..80: mol_type = other DNA
gttacaaaaaattacgatacacttgttgacgccattaaaaagtccccacaaggtttaacagtatttaacacatttaaaac

SEQ ID NO: 176001 - DNA, 80 bp, synthetic construct
  source 1..80: mol_type = other DNA
gcgtctgcactacaaagtacggcggcgccttgcgtagcagtgtctgtaaaaagctgtgaatcaagccgcgttccatggcg

SEQ ID NO: 176002 - DNA, 80 bp, synthetic construct
  source 1..80: mol_type = other DNA
aacttccagatcctggggccccaatacaaaaaacaccttagtattagctccactatgggtaatactaacagaaaccacta

SEQ ID NO: 176003 - DNA, 80 bp, synthetic construct
  source 1..80: mol_type = other DNA
cttgttggtatcagacatcacttatactaccacccaatactgctggtcaggttcatttattgtctttcatcagtgcatgc

SEQ ID NO: 176004 - DNA, 80 bp, synthetic construct
  source 1..80: mol_type = other DNA
ggttggggtaagaactgagggggcaaagtcatcaatctcagcgtaaaagttttcgtgtctttcgttttcaggagactcat

SEQ ID NO: 176005 - DNA, 80 bp, synthetic construct
  source 1..80: mol_type = other DNA
aacagtaggcttagttataatacagtgcccatacacaagtcccccactctatgacaaagacaaaccagacatggggtacg

SEQ ID NO: 176006 - DNA, 80 bp, synthetic construct
  source 1..80: mol_type = other DNA
tctctaacatcagcacttccattactgacaagttaacttccaaagtgatcaagtggttggtacgcatcattagtgctctt

SEQ ID NO: 176007 - DNA, 80 bp, synthetic construct
  source 1..80: mol_type = other DNA
cctggggcatggcacatccagcagcgtgttttgggtcttgatgaggaacacgatcctgtctaggattttgatgttgttgc

SEQ ID NO: 176008 - DNA, 80 bp, synthetic construct
  source 1..80: mol_type = other DNA
gcacctggacatctaccgtcgtctgctgcgggtctttccctcgtttgtggcgctcaaccgcctgttgggaggccttttcc

SEQ ID NO: 176009 - DNA, 80 bp, synthetic construct
  source 1..80: mol_type = other DNA
cctccttgataggggttgaaaccatatgcgctatgccacttgtcaacaatcgcctcgttttggccaccaaaataaacctt

SEQ ID NO: 176010 - DNA, 80 bp, synthetic construct
  source 1..80: mol_type = other DNA
tatatagactatctatgtaattcccaccatgtgtaccgcaacaagacttattgtgtacttggtggaatgccctcaggctg

SEQ ID NO: 176011 - DNA, 80 bp, synthetic construct
  source 1..80: mol_type = other DNA
gatcagccagacccactacaggcaggtgaagacagatgtgtacactagcgcggggtacatatcagggtggtatcaaacca

SEQ ID NO: 176012 - DNA, 80 bp, synthetic construct
  source 1..80: mol_type = other DNA
tagttgttcccaacataagagaaagccatccaaccacatctaatgcagccacagctttagacgctgctgaaaccggtcac

SEQ ID NO: 176013 - DNA, 80 bp, synthetic construct
  source 1..80: mol_type = other DNA
cgcgcttacttatgtccagagccacacgcaccggcagcgcgcagaaagctccgtggacaaaactcccgcagccctgtcca

SEQ ID NO: 176014 - DNA, 80 bp, synthetic construct
  source 1..80: mol_type = other DNA
ttcctgtgcaccccacgccggcctcggtccgactttttgagatcctgcagggaaagtacgcctacgtccagggacagacc

SEQ ID NO: 176015 - DNA, 80 bp, synthetic construct
  source 1..80: mol_type = other DNA
acgcggactctccataatgcgtaaaaaattcctcaaaccctccagtaacatcatattttctgtaggatcaactatttatc

SEQ ID NO: 176016 - DNA, 80 bp, synthetic construct
  source 1..80: mol_type = other DNA
caggaacccggaggaacacgcgcaacagggccgcggactgggtccccgagcgcgcaccctcctaggtggacgcccgacat

SEQ ID NO: 176017 - DNA, 80 bp, synthetic construct
  source 1..80: mol_type = other DNA
aaaagcaagaagaaagctccacttcagaggaagaaagcatccttatctcgcaagaagagacgccgacacaactactcaga

SEQ ID NO: 176018 - DNA, 80 bp, synthetic construct
  source 1..80: mol_type = other DNA
cgtggccatttcatgtaaaccaacatgcaggtggtcgtaacgagtaatcacgggatggaaccaactactttgggtaaccg

SEQ ID NO: 176019 - DNA, 80 bp, synthetic construct
  source 1..80: mol_type = other DNA
ctgtatggtgctgcttcgttgaatgattttggatcactggctgtccgtgtggtgaatgaccacaaccccacgcgactcac

SEQ ID NO: 176020 - DNA, 80 bp, synthetic construct
  source 1..80: mol_type = other DNA
cctctctctgtccttcagaggaaccagggacctcgggcaccccagagcccctcgggcccgcctccaggcgccctcctggt

SEQ ID NO: 176021 - DNA, 80 bp, synthetic construct
  source 1..80: mol_type = other DNA
gcggttcaaagcacaaccaccgtaatgacacccacggtggttacaaactccacattcagtgtgtcacttattgcgttgag

SEQ ID NO: 176022 - DNA, 80 bp, synthetic construct
  source 1..80: mol_type = other DNA
aaattggacaagattgctgcaggcaagacaagatgcattggagcatgtggagttggttactgtatcgtttacagttatca

SEQ ID NO: 176023 - DNA, 80 bp, synthetic construct
  source 1..80: mol_type = other DNA
cgaaatagttcagtactacacccattgggcaggatcattgagattttctttaatgtatacaggtcccgccttgtctagtg

SEQ ID NO: 176024 - DNA, 80 bp, synthetic construct
  source 1..80: mol_type = other DNA
agtttcatcccaaaaagttggagcccatgagaattcgaatagggcatacggtggctccaccattaattacaccaccatca

SEQ ID NO: 176025 - DNA, 80 bp, synthetic construct
  source 1..80: mol_type = other DNA
gtactgactcagtggcacccagccacaagacgaaaatgcgttatcaagggctacctgccaatactgtggtgcggatacct

SEQ ID NO: 176026 - DNA, 80 bp, synthetic construct
  source 1..80: mol_type = other DNA
gcaagcggtggacccgtggcagacttcgcagacgatggcctcgaccagctcgtcgccgccctagacgacgaagagtaagg

SEQ ID NO: 176027 - DNA, 80 bp, synthetic construct
  source 1..80: mol_type = other DNA
ccggagccctcacaggttgattcgagaccagccctgacgtggcatggggatggtggaagcgacggaggcgctggtggttc

SEQ ID NO: 176028 - DNA, 80 bp, synthetic construct
  source 1..80: mol_type = other DNA
aaactctcggacagggaatactgaaaccgaacactttatgttataaagttagcctgcattctacacatcaaatacactat

SEQ ID NO: 176029 - DNA, 80 bp, synthetic construct
  source 1..80: mol_type = other DNA
gattcgttcatgcctataaataacatcccttctatgatcaatagtataggggcctacaacatccccataacaggtggaca

SEQ ID NO: 176030 - DNA, 80 bp, synthetic construct
  source 1..80: mol_type = other DNA
gtgacaattgtcaccaacaaccatgggctaatgcagacaatgtatgtcccaccagggatagacccacccaagacaaagac

SEQ ID NO: 176031 - DNA, 80 bp, synthetic construct
  source 1..80: mol_type = other DNA
ggggcactaagcatgcaggcaggggaattcaggccgctaatgactccgggatggaccttagatgcatccacttgcatgga

SEQ ID NO: 176032 - DNA, 80 bp, synthetic construct
  source 1..80: mol_type = other DNA
atcaaattcagccccaacacttgatgcagcagaaactggtcacaccaaccaggtgcaaccagaggatatgatagaaacca

SEQ ID NO: 176033 - DNA, 80 bp, synthetic construct
  source 1..80: mol_type = other DNA
tcaactgaacacacaaactgatgttgcaaaagaggtgtttgctattccagtagatgtagcttctcaacctttagctacca

SEQ ID NO: 176034 - DNA, 80 bp, synthetic construct
  source 1..80: mol_type = other DNA
tatcacagttcaacactggtgctaaccaacactacaatttctgtaactacaaacctgactataataaattagagtggcta

SEQ ID NO: 176035 - DNA, 80 bp, synthetic construct
  source 1..80: mol_type = other DNA
tttaaataaggagaccaaagacacaacaaaaatggaagagtgcctaagtaaatatggtattgacctgccactggttacct

SEQ ID NO: 176036 - DNA, 80 bp, synthetic construct
  source 1..80: mol_type = other DNA
ttgttctttgactggagcttgtttacgcttgagttttcgcatagtgtttttcaacttagtaccgttaatatacttaggga

SEQ ID NO: 176037 - DNA, 80 bp, synthetic construct
  source 1..80: mol_type = other DNA
ctcgttgagcggcggagcagttcagatcacgccgccgaccggaaaaacagcgtttgtagaatgcaaatgcggtgctcaaa

SEQ ID NO: 176038 - DNA, 80 bp, synthetic construct
  source 1..80: mol_type = other DNA
caggaaggcgcctattacaaagaaggagagcctttggaagccactgtacagaaaaatttagacaatcagtggacatacaa

SEQ ID NO: 176039 - DNA, 80 bp, synthetic construct
  source 1..80: mol_type = other DNA
agaatttaagaatatgacctgggagaatgttactttcctgaagagaggatttcgtcctgatgaacgttacaaattcctca

SEQ ID NO: 176040 - DNA, 80 bp, synthetic construct
  source 1..80: mol_type = other DNA
actaatataagtagctgcacttccgaatggctgagttttccacgcccgtccgcagcggtgaagccacggagggagctcag

SEQ ID NO: 176041 - DNA, 80 bp, synthetic construct
  source 1..80: mol_type = other DNA
taccagctggagaacaaatgtcactgtcagcccccttctattcccataagccgttgaggacagttagggacacccacagt

SEQ ID NO: 176042 - DNA, 80 bp, synthetic construct
  source 1..80: mol_type = other DNA
gagaataagaggatcaaagaactcctcaagagaagtgaaatgatcctacgcacttcaaaaagaacagagccagttggtgt

SEQ ID NO: 176043 - DNA, 80 bp, synthetic construct
  source 1..80: mol_type = other DNA
ggggtggtactggaagtttccggacattttagcagagacaggcgtcttcggtcaaaatgctcagtttcatttcctctata

SEQ ID NO: 176044 - DNA, 80 bp, synthetic construct
  source 1..80: mol_type = other DNA
aggagatggcgtcgcaagcggaggtggagacgcagaaaatatattagggggaggctgcgccgcaaaaagagacgaaagat

SEQ ID NO: 176045 - DNA, 80 bp, synthetic construct
  source 1..80: mol_type = other DNA
tgtatcagatcatgtacgtaccacctggagcaccaattcccacagcttgggatgattatacttggcaaagttcatcaaac

SEQ ID NO: 176046 - DNA, 80 bp, synthetic construct
  source 1..80: mol_type = other DNA
cccgtggactggccatgagtatcgaggctgctagactgccagatgatccaataattgttgaggatgacgatgaaagtgag

SEQ ID NO: 176047 - DNA, 80 bp, synthetic construct
  source 1..80: mol_type = other DNA
ataaaccaattaaacacatttaaaacagaaggcaacatatcacaccctaaactacaaaaaccttcagcatccaacaacca

SEQ ID NO: 176048 - DNA, 80 bp, synthetic construct
  source 1..80: mol_type = other DNA
tggacgccattaaggaggctgccgcgccattgcaatctccatccgttgaggcgtgtggctatagtgaccgtgtcgcccag

SEQ ID NO: 176049 - DNA, 80 bp, synthetic construct
  source 1..80: mol_type = other DNA
actatttatataaaatagggtctttttatcaacaagtattagtacccagctacatcaaaagaatcacacacaaccctgat

SEQ ID NO: 176050 - DNA, 80 bp, synthetic construct
  source 1..80: mol_type = other DNA
aacccctgcctcttgtaggcccggagcagtggctctttcccgagagaaagcccagacctccgcccaccagcggagactgg

SEQ ID NO: 176051 - DNA, 80 bp, synthetic construct
  source 1..80: mol_type = other DNA
gccatcttaagtagttgaggcggacggtggcgtgagttcaaaggtcaccatcagccacacctactcaaaatggtgggcaa

SEQ ID NO: 176052 - DNA, 80 bp, synthetic construct
  source 1..80: mol_type = other DNA
tccacagcctattggaattatgccagatagaaactatgcttgaagtaaacaacacatccaaagcaatggaactcgatcgg

SEQ ID NO: 176053 - DNA, 80 bp, synthetic construct
  source 1..80: mol_type = other DNA
ttggccctccgcggtgtccggtggtcctcacacgtgccctcccccgggccgatggctgaggcccggaatatgcaagtgca

SEQ ID NO: 176054 - DNA, 80 bp, synthetic construct
  source 1..80: mol_type = other DNA
gataaacaagaggaaacagcaattaaacatagaagggatattaagattgttaagaatgtgggccctagtgatatgtatgt

SEQ ID NO: 176055 - DNA, 80 bp, synthetic construct
  source 1..80: mol_type = other DNA
aattacaacagaagagtgtatcccgactctgctgatagcacaaagcattacataaccaccagggaatcaattaagacagc

SEQ ID NO: 176056 - DNA, 80 bp, synthetic construct
  source 1..80: mol_type = other DNA
atgcacaatcaccctcagctttgccctactttcacccaacaaaagaaatatttataccaggagaagtcaagaatctatca

SEQ ID NO: 176057 - DNA, 80 bp, synthetic construct
  source 1..80: mol_type = other DNA
gacggtatacggcttcggtgtacatcataccgtaacgtgccagctcgtccagatgacgcgcgcacagcagcagaatctct

SEQ ID NO: 176058 - DNA, 80 bp, synthetic construct
  source 1..80: mol_type = other DNA
atgataacatttcttaaagatgagctcagaaaaccagagaaaataagtgctggaaaaaccagaattatagaagctagtag

SEQ ID NO: 176059 - DNA, 80 bp, synthetic construct
  source 1..80: mol_type = other DNA
agagctattgcacgtgtcgcagacaccattggaagtggaccagtcaactcggagtcaatcccggccttaaccgctgcgga

SEQ ID NO: 176060 - DNA, 80 bp, synthetic construct
  source 1..80: mol_type = other DNA
gcgtcttgtctctggccgttgtttttcgtgtgtccccagggaatcagacagacgcagacacgcgtcttctttgcgacgtg

SEQ ID NO: 176061 - DNA, 80 bp, synthetic construct
  source 1..80: mol_type = other DNA
tcccaaatactgtgcctattacagtatctatcagcccaatgtgtgctgaattctctggggctcgagcaaagagtcaaggg

SEQ ID NO: 176062 - DNA, 80 bp, synthetic construct
  source 1..80: mol_type = other DNA
ttaaactcctcatagtcattatacaggttgattattcccccgtccacgtcgcctatggagttgactcgtcgtcggcaaag

SEQ ID NO: 176063 - DNA, 80 bp, synthetic construct
  source 1..80: mol_type = other DNA
aaatgggaaagtatctctaaatctgcttatgagttagtagcagacgaatacaaacaactatacaccacaactgttacata

SEQ ID NO: 176064 - DNA, 80 bp, synthetic construct
  source 1..80: mol_type = other DNA
gattgtacagatgctacttactactgtaagcacaagaatagatactacccaattaaagttacaagccatgattggtatga

SEQ ID NO: 176065 - DNA, 80 bp, synthetic construct
  source 1..80: mol_type = other DNA
gaaagtaaagtatattatttacttgtttgttggattcactccattcaattcttttacctataaactcattacaacagtct

SEQ ID NO: 176066 - DNA, 80 bp, synthetic construct
  source 1..80: mol_type = other DNA
ctctgtgctttcttgagtttcttctacaatttcattaatgtcactcataattactccataaaatgggtctttccctgcca

SEQ ID NO: 176067 - DNA, 80 bp, synthetic construct
  source 1..80: mol_type = other DNA
caaaaccccctactacccgtaaggaagccatgctgggcacacatatgatatgggatataggattgcaatccagtgccaca

SEQ ID NO: 176068 - DNA, 80 bp, synthetic construct
  source 1..80: mol_type = other DNA
aatacgtggcgcgatattgaatggataaaatacggactttaccagccgcagttatgcagcgtgggacattaccgcgttac

SEQ ID NO: 176069 - DNA, 80 bp, synthetic construct
  source 1..80: mol_type = other DNA
tggttattccaactcatgctgatcctgagaaagttgtacaaattgatggtatcaatgtcaatgtaattgattcatatgat

SEQ ID NO: 176070 - DNA, 80 bp, synthetic construct
  source 1..80: mol_type = other DNA
tggtaacatactcctcagcggagatcaaacagctagaatgctaaaatacaactaccccactaaatctggttattgtggag

SEQ ID NO: 176071 - DNA, 80 bp, synthetic construct
  source 1..80: mol_type = other DNA
tttggccgtcatacttaaatgacaaggacgctaaccctgtcgaccaaccaacagagccagacgtagctgcatgccgcttt

SEQ ID NO: 176072 - DNA, 80 bp, synthetic construct
  source 1..80: mol_type = other DNA
atcagacgggggtggtgtcgccggctggaaatcaacctaagtgttatattatgtgttttgtgtcagcatgcaatgacttt

SEQ ID NO: 176073 - DNA, 80 bp, synthetic construct
  source 1..80: mol_type = other DNA
aaagacctacaaacacaaatgttacaagcaaatgaattttacacctcagcaggcaaaaacataattccaacatttttacc

SEQ ID NO: 176074 - DNA, 80 bp, synthetic construct
  source 1..80: mol_type = other DNA
ggaaaggaggtagaaacagccatagtatctaggagggatatcaaaattgtcaatgcaggcccaacagacatgtatgtgca

SEQ ID NO: 176075 - DNA, 80 bp, synthetic construct
  source 1..80: mol_type = other DNA
acccagaatgacctaattagagtggaaccaattggtgtttggatacaaggtgaaccaggacaaggcaagtcgttccttac

SEQ ID NO: 176076 - DNA, 80 bp, synthetic construct
  source 1..80: mol_type = other DNA
tcccgttggtggtcagcagcagatagtgaacgtggaggttgtcaaaatcaaagtagttggagctcaagatggagttttgg

SEQ ID NO: 176077 - DNA, 80 bp, synthetic construct
  source 1..80: mol_type = other DNA
aacaaaccggggtatatggattcaatacccttaataatatggggactttgtacgccaggcacgttaacggtgctagtccc

SEQ ID NO: 176078 - DNA, 80 bp, synthetic construct
  source 1..80: mol_type = other DNA
cagctagcctaaatgatacagtacattttagaatgatttttggtaatcttttctccacctttcatgctaacccaggcata

SEQ ID NO: 176079 - DNA, 80 bp, synthetic construct
  source 1..80: mol_type = other DNA
aggatggacgccaacgactactacccggacagatatcagtcacacatgatcatgggttgtggttttgctgaaccggatga

SEQ ID NO: 176080 - DNA, 80 bp, synthetic construct
  source 1..80: mol_type = other DNA
gtactgtggctgtgcgtattgtgaatgagcatgacccagttaaaatagaatcaaaagtgagggtctacttaaagcctaag

SEQ ID NO: 176081 - DNA, 80 bp, synthetic construct
  source 1..80: mol_type = other DNA
agtgaaagatgttctggaaaagggcattccaacactacaatcccctacagtggaggcatgtggttattcagatagaataa

SEQ ID NO: 176082 - DNA, 80 bp, synthetic construct
  source 1..80: mol_type = other DNA
cgccggcgttaacacaggaaaaaaaaaccacgcaggaaccgcgtaggaaccacgcggaacatgggacactatctggaaat

SEQ ID NO: 176083 - DNA, 80 bp, synthetic construct
  source 1..80: mol_type = other DNA
atcatttacttcgtatacaaactcagcacccagatgctccaggctccagcaccccacgctctcccctaccaccagtgact

SEQ ID NO: 176084 - DNA, 80 bp, synthetic construct
  source 1..80: mol_type = other DNA
tctgaaaaaatgtaatcacacaatatggcacaatgtggattggattaaatatgaagaaccttattcttcatacaagatgt

SEQ ID NO: 176085 - DNA, 80 bp, synthetic construct
  source 1..80: mol_type = other DNA
tggatttacacctttaacaccacacaccgtaaaactcattacagttgtattgttaatacgatatcactaccacaatgggt

SEQ ID NO: 176086 - DNA, 80 bp, synthetic construct
  source 1..80: mol_type = other DNA
gaagcggtcgacgtaggccaggatgtccggcgagagctcgaggccgtactcgagggtcttcatgaggtgtccaaactgga

SEQ ID NO: 176087 - DNA, 80 bp, synthetic construct
  source 1..80: mol_type = other DNA
caagaggacctgtgcaccgttaatcttgtgacatttgcggttagtgcagcttcctttacacatccgttctgcccaccaca

SEQ ID NO: 176088 - DNA, 80 bp, synthetic construct
  source 1..80: mol_type = other DNA
gtccgagctgcggtatgggtcacggcggcgtgtgttttattgacgaagatgccgatgtgtgactaaaaacgtcccagccc

SEQ ID NO: 176089 - DNA, 80 bp, synthetic construct
  source 1..80: mol_type = other DNA
cgtcctctggctctcttcgccagggggcctaggtactcttggtgcagcccttttagcattggcagcaggtaagccacacg

SEQ ID NO: 176090 - DNA, 80 bp, synthetic construct
  source 1..80: mol_type = other DNA
cttgttttattaatagaatctcagccaggacctatacctgagacttcaaagtctggtcctgggttctgagacccccaaga

SEQ ID NO: 176091 - DNA, 80 bp, synthetic construct
  source 1..80: mol_type = other DNA
ccatggaaaaacacctccttgtgtttgattacacaaactatgatggtagcctacacccagtatggtttcaagcacttgag

SEQ ID NO: 176092 - DNA, 80 bp, synthetic construct
  source 1..80: mol_type = other DNA
gtggagggaaactcctatgcaaacacggggtcatcggtattgttacagcaggaggagaaggccacgtggcattcactgat

SEQ ID NO: 176093 - DNA, 80 bp, synthetic construct
  source 1..80: mol_type = other DNA
aatttttttgtccagctggttctcttgtgactttccaaaattcttggggctcacagatggatttgacagatccattatgc

SEQ ID NO: 176094 - DNA, 80 bp, synthetic construct
  source 1..80: mol_type = other DNA
cctacgttaaaaatcaatggaatgtgtactttgacctcagctttgaataaagtgcaacttcaaacttgcaaggccgtggg

SEQ ID NO: 176095 - DNA, 80 bp, synthetic construct
  source 1..80: mol_type = other DNA
ttcccccaccagtggatcaacctacgcaccaacaactgcgctaccatagtagtcccatatattaatgccttaccttttga

SEQ ID NO: 176096 - DNA, 80 bp, synthetic construct
  source 1..80: mol_type = other DNA
tatgaaaatggcactaaaaccaacaagtttagtaactggtcaaacaccacacctcacaacaacacactatatgcaggcag

SEQ ID NO: 176097 - DNA, 80 bp, synthetic construct
  source 1..80: mol_type = other DNA
aagatcataaatacggaagtgggacgtaggttgtatctcccaccatacaatctactagagcgttcctggattgacaagtt

SEQ ID NO: 176098 - DNA, 80 bp, synthetic construct
  source 1..80: mol_type = other DNA
tactgactgcaccatcactgcacccaggcagcatgatgaccagcaaacacagaataatgatacccagtctggagaccaga

SEQ ID NO: 176099 - DNA, 80 bp, synthetic construct
  source 1..80: mol_type = other DNA
actgtgcgtagtacactgtgattccggtcaccttgtacgcctgtttgctaccccaccccaactttctttcattcttcact

SEQ ID NO: 176100 - DNA, 80 bp, synthetic construct
  source 1..80: mol_type = other DNA
ccaagtcgaaaccatcttagaggtcaataacgtgcccaccaacgcgaccagcctgatggaaaggctgcggttcccagtgt

SEQ ID NO: 176101 - DNA, 80 bp, synthetic construct
  source 1..80: mol_type = other DNA
aaaactaactatgaatatctaatagattatttaaaaagacattggcacgaagaattaaagaaaggaacaatgggtaacta

SEQ ID NO: 176102 - DNA, 80 bp, synthetic construct
  source 1..80: mol_type = other DNA
ggcagacccgtaaaaagaataagaataaagcccccaactctctttacagaccgttggtactttcaaaaggactttagtaa

SEQ ID NO: 176103 - DNA, 80 bp, synthetic construct
  source 1..80: mol_type = other DNA
gcagttggtcccagtagaaagcctagagcagtacaagtctttgacccgaagtaccaagcaccagagtggacgttccacgc

SEQ ID NO: 176104 - DNA, 80 bp, synthetic construct
  source 1..80: mol_type = other DNA
aacaaaatcccaataaagaaaagtggactgaaatgtggtcaagtaacaatggcatataccacagaaaaacagacagtaac

SEQ ID NO: 176105 - DNA, 80 bp, synthetic construct
  source 1..80: mol_type = other DNA
caggtctattacagagaaggcagagatcagctgtggaaaggccctggagaactactgtggaagggagaaggagcggtcat

SEQ ID NO: 176106 - DNA, 80 bp, synthetic construct
  source 1..80: mol_type = other DNA
atatcagacaaaataactaccagggttataaaatggttgattaggattattagtgctctaaccatcatgattaggaactc

SEQ ID NO: 176107 - DNA, 80 bp, synthetic construct
  source 1..80: mol_type = other DNA
aattgccagatgtaactgcaaggctggagtgtattattgcaattcaaggagaaagtattatccagtgactgttaccggac

SEQ ID NO: 176108 - DNA, 80 bp, synthetic construct
  source 1..80: mol_type = other DNA
caccacaaatacctgcagcacgttcagcgagcacgtctcttttaaccagttgccgtgggccggatcctcgtaagtctggc

SEQ ID NO: 176109 - DNA, 80 bp, synthetic construct
  source 1..80: mol_type = other DNA
acttcaccgagggcgggttcatcacatgcttttaccagactagaatagtggtgccagcatccacaccaactagcatgtac

SEQ ID NO: 176110 - DNA, 80 bp, synthetic construct
  source 1..80: mol_type = other DNA
gctaatactaactgctttctaaaagttagtagtctctggggagaccacgtatatgaaaaagataaattaataaaatgttg

SEQ ID NO: 176111 - DNA, 80 bp, synthetic construct
  source 1..80: mol_type = other DNA
cccccattgtgtgtgtcctcatcttcctccgtcccctctgtcccaacctccgtcagcgttgacggcagttctgaacccac

SEQ ID NO: 176112 - DNA, 80 bp, synthetic construct
  source 1..80: mol_type = other DNA
atactatatatatatatgacacaggctggtcagctcgggaggccctgcaccggggccaacagctcctaagggctgacaca

SEQ ID NO: 176113 - DNA, 80 bp, synthetic construct
  source 1..80: mol_type = other DNA
tgggactagcatcgcgcaagacatgccgccactgacacaccaaatcatgtatataccccctggtggtccaataccaaaca

SEQ ID NO: 176114 - DNA, 80 bp, synthetic construct
  source 1..80: mol_type = other DNA
cagccgcgggcccgtatcgtcctgatgaccagcggcctcgcgctcggctgcttccacaccgacaatgtcgggatccaaca

SEQ ID NO: 176115 - DNA, 80 bp, synthetic construct
  source 1..80: mol_type = other DNA
cggacacaacacgcttacggccctcaacactccctcgaggacccaccacgcggcccggaatggacccaccacgcggcccg

SEQ ID NO: 176116 - DNA, 80 bp, synthetic construct
  source 1..80: mol_type = other DNA
atagagagtttagattgcctaagaaagtcgatctcgaaatgataattaacgataaggcaattagtccacctaaaaactta

SEQ ID NO: 176117 - DNA, 80 bp, synthetic construct
  source 1..80: mol_type = other DNA
tgggtttatttcacttaccaatctacccctagcttaatacgtgttgtgctgttgataagacactattaccgcaatgggag

SEQ ID NO: 176118 - DNA, 80 bp, synthetic construct
  source 1..80: mol_type = other DNA
cgttccggttgtcttgttacattaacattataccacctgttatcgttgcgtttgtctagccattttgaaaaagggtgatg

SEQ ID NO: 176119 - DNA, 80 bp, synthetic construct
  source 1..80: mol_type = other DNA
caggctttttgccaactttcaaggagcatacactggcatgcccaaccctaagccaaaggttccaacactgagagccgcca

SEQ ID NO: 176120 - DNA, 80 bp, synthetic construct
  source 1..80: mol_type = other DNA
agacattattaacaggagagacaaacaatttgagtgggaaactaaatttagtgccaatgcaacccacattaaccctacat

SEQ ID NO: 176121 - DNA, 80 bp, synthetic construct
  source 1..80: mol_type = other DNA
attcaccacctggtgcgcaaccaccacaggatagaaaacaagcaatgttaggaactcatatcatttgggacatcggtctc

SEQ ID NO: 176122 - DNA, 80 bp, synthetic construct
  source 1..80: mol_type = other DNA
ctatcccaaacatatacaatataatctactcattggtgaaggacactgtgaaccaggtgactgtggaggcaagctattgt

SEQ ID NO: 176123 - DNA, 80 bp, synthetic construct
  source 1..80: mol_type = other DNA
tttatcaactaatactggtgataatgctatgaagagactacttatccctgttaactcacagacagcagtagaccagcttt

SEQ ID NO: 176124 - DNA, 80 bp, synthetic construct
  source 1..80: mol_type = other DNA
agtatctaaaagatgaagaagctactgctgaggaccagccaacacagcccgacgtggccacatgcagattctacacgttg

SEQ ID NO: 176125 - DNA, 80 bp, synthetic construct
  source 1..80: mol_type = other DNA
cacagtagaaacagacaaatactttgccaagctagacggcttatggggagaccccatttatgccaacagccttaactcaa

SEQ ID NO: 176126 - DNA, 80 bp, synthetic construct
  source 1..80: mol_type = other DNA
ctgcagcaacagcgaatcctgggagtcaaactcagactcctgttcaaccaagtccaaaaaatccaacaaaatcaagatat

SEQ ID NO: 176127 - DNA, 80 bp, synthetic construct
  source 1..80: mol_type = other DNA
caacaatcaagcccaagctaatgacacctggtacctaggcaatgcatataatgtcacagaagcaaaagaagcagctgaaa

SEQ ID NO: 176128 - DNA, 80 bp, synthetic construct
  source 1..80: mol_type = other DNA
acaggacatctcacccattgtgcaggttaccagcatgatgaaattatactacatggtcactctatcaagtatttggagca

SEQ ID NO: 176129 - DNA, 80 bp, synthetic construct
  source 1..80: mol_type = other DNA
aaaattttcaaacaggcaagtcgtccctgtttggctttaacacatacaacccaaataaagacaacattctagaaattaga

SEQ ID NO: 176130 - DNA, 80 bp, synthetic construct
  source 1..80: mol_type = other DNA
tacgttggagaacttcctagggagatcagcatgtgtgcatattgacacatacaaaaccaaagggcaagttggtgatagct

SEQ ID NO: 176131 - DNA, 80 bp, synthetic construct
  source 1..80: mol_type = other DNA
aagtcccagcgctcactgctgtggaaacgggacacacatcacaagtggaacccagtgacacagtgcagacaagacatgtg

SEQ ID NO: 176132 - DNA, 80 bp, synthetic construct
  source 1..80: mol_type = other DNA
atagggcgcacaaattatcctaaaagcacagacccagtaattaaaaagaggaaaggtgatatcaagtcctatggcttggg

SEQ ID NO: 176133 - DNA, 80 bp, synthetic construct
  source 1..80: mol_type = other DNA
cccacaacttatgtctgggtgttattccaggtgagacctcacacaaggacacacccgagtcattgctccgggctatcgtg

SEQ ID NO: 176134 - DNA, 80 bp, synthetic construct
  source 1..80: mol_type = other DNA
aaaaccaggatcatcacgcgtgagttggataaggctctggatggtgtactgacacacaagcaaggctgcctccattgtct

SEQ ID NO: 176135 - DNA, 80 bp, synthetic construct
  source 1..80: mol_type = other DNA
acaggaatgagaagtttagggatattcgtgcccacttgcccaccacaatccaggaaaccaatgatgcagtactagctgtt

SEQ ID NO: 176136 - DNA, 80 bp, synthetic construct
  source 1..80: mol_type = other DNA
tgcggttactgcgagataccaagtttatcaaccaggagagcttctaccagggagatgtgcaagacgctgtgactggggcc

SEQ ID NO: 176137 - DNA, 80 bp, synthetic construct
  source 1..80: mol_type = other DNA
acgtttaatacctgggttgaatcaaaattcaaaacaggcaagttagtaaagtacaactttgctcaatatgaacctgacgc

SEQ ID NO: 176138 - DNA, 80 bp, synthetic construct
  source 1..80: mol_type = other DNA
aacttctcaaaatgggcaattacgatcaaggaaatggctcagatcagaagaaagtgtgaactttttacatatcttagatt

SEQ ID NO: 176139 - DNA, 80 bp, synthetic construct
  source 1..80: mol_type = other DNA
atcacggtacctttgtgcgcctgttttataaccctttccccaacgcaacatagaagctatacacactgatcaacagcagg

SEQ ID NO: 176140 - DNA, 80 bp, synthetic construct
  source 1..80: mol_type = other DNA
tacccacgtattggcaacagagatggtggcccagattcagctttcagagacaagtcatgcacgacattattctgactggg

SEQ ID NO: 176141 - DNA, 80 bp, synthetic construct
  source 1..80: mol_type = other DNA
caacctagcagcacagtacaatcaaataaatactttgcagaattagatggtctctggggagaccccatatatgcaaacag

SEQ ID NO: 176142 - DNA, 80 bp, synthetic construct
  source 1..80: mol_type = other DNA
caatgctaacagcaaatgaaacaggagctagcatgcccgtggagccatcagatagtgttgagactagattaacctatatg

SEQ ID NO: 176143 - DNA, 80 bp, synthetic construct
  source 1..80: mol_type = other DNA
aacactacaaacttaacacaacacccttcagctccaactattccattcacaccagactttagaaatgtggacaactttca

SEQ ID NO: 176144 - DNA, 80 bp, synthetic construct
  source 1..80: mol_type = other DNA
ctgtatcaaccgaatcgcctccgagggcctgtttgatttctccaagagaagcatcgcccactccaaaaaccgacacgagt

SEQ ID NO: 176145 - DNA, 80 bp, synthetic construct
  source 1..80: mol_type = other DNA
ggaaccagcagtcttgcatccagcagacaagagattagaagtagacttaaatgactccctcttttctaaatacaagggca

SEQ ID NO: 176146 - DNA, 80 bp, synthetic construct
  source 1..80: mol_type = other DNA
gtaactatgggcattaagaaaagagatctggtcaacaaactcacacgcgatgtgtcaaaactggaacaaatgatggaaaa

SEQ ID NO: 176147 - DNA, 80 bp, synthetic construct
  source 1..80: mol_type = other DNA
ttgagacaggcgcgacaaatccattggagccgtctgacacggtacaaacaaggcatgttatccagactagatccaggtca

SEQ ID NO: 176148 - DNA, 80 bp, synthetic construct
  source 1..80: mol_type = other DNA
ctttacaagtgtggctcgcatctactttaaaccaaaacacgtaagagcgtgggtcccacgaccgccacgactgtgcccat

SEQ ID NO: 176149 - DNA, 80 bp, synthetic construct
  source 1..80: mol_type = other DNA
ccaacaacacagggttgatgcaaataatgttcgttccaccagggatagaccaccctaaaacacataatgacggaaaatgg

SEQ ID NO: 176150 - DNA, 80 bp, synthetic construct
  source 1..80: mol_type = other DNA
gcaactccaactcgtcatgctccaactcaccaagacgcagagcaacctgcacataaatccccgtgtccttggccatgcat

SEQ ID NO: 176151 - DNA, 80 bp, synthetic construct
  source 1..80: mol_type = other DNA
gccgagcgcactgccggtgcgtgccttcgtgcgcactgccgctgcgtggcgccgcacggtcttggtttgctcggggctct

SEQ ID NO: 176152 - DNA, 80 bp, synthetic construct
  source 1..80: mol_type = other DNA
caaaaatttggtaaaaataatctcctccctcgtcataattactaggaactatgaggacaccacaacagttttggcaacac

SEQ ID NO: 176153 - DNA, 80 bp, synthetic construct
  source 1..80: mol_type = other DNA
cgtgggaaaaaatttatggttcagtgcgtcgagtgctatctttggaacagtagaaaattgaaccttgttggcgggagaag

SEQ ID NO: 176154 - DNA, 80 bp, synthetic construct
  source 1..80: mol_type = other DNA
gctcctcccaattcatgaccacggatgatcactcgtcagctcccgcattcccagacttctcaccaactcctgagatccac

SEQ ID NO: 176155 - DNA, 80 bp, synthetic construct
  source 1..80: mol_type = other DNA
tcccaccaaggaaatttcaatcccaggacaagtacaaaatttaatagagttgtgtcaagtagctaccatgataccaatta

SEQ ID NO: 176156 - DNA, 80 bp, synthetic construct
  source 1..80: mol_type = other DNA
aatagttaaagaagattttaagattaaccagggaaaacttaacctacaatgtgctcttaaaccatgtaaggaagggaagg

SEQ ID NO: 176157 - DNA, 80 bp, synthetic construct
  source 1..80: mol_type = other DNA
tcactgagaagcggacttccatcaatcatgttccaactccatcacacagcaacagtgtgcacgtgcgtctgggcaactgt

SEQ ID NO: 176158 - DNA, 80 bp, synthetic construct
  source 1..80: mol_type = other DNA
aacatgatcctaggctaaaggccaattttaaggaagctttattttctaaatataaaggaaacaaacagtgtgacataaat

SEQ ID NO: 176159 - DNA, 80 bp, synthetic construct
  source 1..80: mol_type = other DNA
taggagcgatcgagcgtcccgagggcgggtgccggaggtgagtttacacaccgcagtcaaggagcaattcgggctcgtga

SEQ ID NO: 176160 - DNA, 80 bp, synthetic construct
  source 1..80: mol_type = other DNA
gacgcagacgaaagagacagaaaataataattaaggaatggcagcccgccatgatcagacgctgctatataatagggtac

SEQ ID NO: 176161 - DNA, 80 bp, synthetic construct
  source 1..80: mol_type = other DNA
tcaaacaaaagaagaggagtgagcctgtggcagtcatgatacatgggcctcctggaactgggaaatcaatcactacaagt

SEQ ID NO: 176162 - DNA, 80 bp, synthetic construct
  source 1..80: mol_type = other DNA
gcagcaccgcctccgcaatcgaaaagctgttcaactccccgtccgccagcctgggtgccagggtgtctggtcacaatgaa

SEQ ID NO: 176163 - DNA, 80 bp, synthetic construct
  source 1..80: mol_type = other DNA
actgggcgccagcactctgattctacggaatccttgtgcgcctgttttatacccccccccccctcaatttggtaacatag

SEQ ID NO: 176164 - DNA, 80 bp, synthetic construct
  source 1..80: mol_type = other DNA
cccgtcctccagagacccgggcttcaggccctgcctctcctgttacccttttagaaccacagcctgtacacatgtgccag

SEQ ID NO: 176165 - DNA, 80 bp, synthetic construct
  source 1..80: mol_type = other DNA
agacgacgccctgctcgccgctttcgacctcgtcgaagagtaaggaggcacggggggcggtggcgcagacgctacagaaa

SEQ ID NO: 176166 - DNA, 80 bp, synthetic construct
  source 1..80: mol_type = other DNA
ctggagccataactcaaaatccagtggaggagtacatagatggagttctaaatgaggttcttgtagttccaaacatcaag

SEQ ID NO: 176167 - DNA, 80 bp, synthetic construct
  source 1..80: mol_type = other DNA
gccacgtcgccggctgtgaggtggcggatcgccggcaggtgaaacgcgcccaggtgtcgattgcgctccagcctcagctc

SEQ ID NO: 176168 - DNA, 80 bp, synthetic construct
  source 1..80: mol_type = other DNA
attttgttcagcccgccaatttctgttcaaacaggccaatcagcgtctactacgtacacttcctggggtgtgtcctgcca

SEQ ID NO: 176169 - DNA, 80 bp, synthetic construct
  source 1..80: mol_type = other DNA
ttgcatgagtggtacgaaaaattttaaactgatatagaaatattaaacagttagttttttatttataaaaaaaaaaaaaa

SEQ ID NO: 176170 - DNA, 80 bp, synthetic construct
  source 1..80: mol_type = other DNA
cagcgagcggcggtgtcctcgcaagccagcaactcgcggaaagccagcagcgaacgtaggtagcggccgcgagcggaggc

SEQ ID NO: 176171 - DNA, 80 bp, synthetic construct
  source 1..80: mol_type = other DNA
tcggcaggagaacacaataaactcctgatcctcatacacaggagtccaagcgtcagaattaaagtccgcggagccataac

SEQ ID NO: 176172 - DNA, 80 bp, synthetic construct
  source 1..80: mol_type = other DNA
ggcaattcgggctcgggactggccgggctatgggcaaggctcttaaaaatgcacttttctaggatacaaagaaagaaaag

SEQ ID NO: 176173 - DNA, 80 bp, synthetic construct
  source 1..80: mol_type = other DNA
ttccacaggttggttttggaaattcccagatattttgacagaagtaggtgtgtttggtcaaaatgctcaattccactacc

SEQ ID NO: 176174 - DNA, 80 bp, synthetic construct
  source 1..80: mol_type = other DNA
ggggccagcgccccaagaagaggagcaaagagaaggctcgcctttcagagtccgacagctcagaccatgggtctcctcca

SEQ ID NO: 176175 - DNA, 80 bp, synthetic construct
  source 1..80: mol_type = other DNA
gtatacgccctttacaaactcatgtgtattgcccaagggccttatactggtctaccccaacctaaaccaagaaaaccaga

SEQ ID NO: 176176 - DNA, 80 bp, synthetic construct
  source 1..80: mol_type = other DNA
gaacccgacgtgagcagtaacagattctacacactggagtcagtgcagtggggtaaggagtccaaaggttggtggtggaa

SEQ ID NO: 176177 - DNA, 80 bp, synthetic construct
  source 1..80: mol_type = other DNA
gacatgctttgaaaaactatacccaccaaacacaacacctaaaaactactgggaaccaacatacacaaaactcatgtcca

SEQ ID NO: 176178 - DNA, 80 bp, synthetic construct
  source 1..80: mol_type = other DNA
gggcctacagaaagaaaaggaaagtgccactgcctggcgtgcgagctccacaggagaaacggcctaggatgagctggtcc

SEQ ID NO: 176179 - DNA, 80 bp, synthetic construct
  source 1..80: mol_type = other DNA
tttacaggatcctcacacaggttgcactactgcggaggcctgtactcctcagtatggctatctgcaggcagatcgtactt

SEQ ID NO: 176180 - DNA, 80 bp, synthetic construct
  source 1..80: mol_type = other DNA
acagtgccacgcacgccgcgccgcgttgacggcccgcaaatctcccgcagtccggtcccgctaactagtaccgtgggacg

SEQ ID NO: 176181 - DNA, 80 bp, synthetic construct
  source 1..80: mol_type = other DNA
catagaggggcaaccagtaaaagtactactgaataccggggctgatgattcaatagtagcagggattaaattagaaccat

SEQ ID NO: 176182 - DNA, 80 bp, synthetic construct
  source 1..80: mol_type = other DNA
agtctgggtttccagatacgcgctggttctgattttgatgatttgtgcctctgaaagctctacgagctgggccgtgacat

SEQ ID NO: 176183 - DNA, 80 bp, synthetic construct
  source 1..80: mol_type = other DNA
tcgctcaagacccgggaaagtttactgagccggtcaaggatattatgataaaatcactccccgccttgaactctccaacg

SEQ ID NO: 176184 - DNA, 80 bp, synthetic construct
  source 1..80: mol_type = other DNA
ttaccaacctaaatcagggttcccgaggttcacaatccccttcactggggtagcatcagcatattacatgttctatgatg

SEQ ID NO: 176185 - DNA, 80 bp, synthetic construct
  source 1..80: mol_type = other DNA
gtctaataaaacataatacatgcattgtggaaacagaaaatggcaaattcacaggtttagggatatatgataacctttta

SEQ ID NO: 176186 - DNA, 80 bp, synthetic construct
  source 1..80: mol_type = other DNA
ctttcaacatgacatctgcaaaaccacactgttcaccattagcgcaacaccatgtgacctgcggtttccgttctgctcac

SEQ ID NO: 176187 - DNA, 80 bp, synthetic construct
  source 1..80: mol_type = other DNA
aaccaggcatgtgcacaactttcataccaggtcagagtcctcagtggagaatttcctcagtagatcagcgtgtgtctact

SEQ ID NO: 176188 - DNA, 80 bp, synthetic construct
  source 1..80: mol_type = other DNA
tagccgccggctctcggtccgccttatcctgggcgttggccggtcccgtgacgctcccctcccccgctgctccccaaaaa

SEQ ID NO: 176189 - DNA, 80 bp, synthetic construct
  source 1..80: mol_type = other DNA
agaaagcccccctttgtagaaagccagatcacagggcccagtctgcatcccggcatactaatgaacaagagaagaagaat

SEQ ID NO: 176190 - DNA, 80 bp, synthetic construct
  source 1..80: mol_type = other DNA
acacgcatcgggagtgcgcacaaaggcagccgcgctgacgtcccgcaaacctccctcagtctggtcccgcgaacaaatgc

SEQ ID NO: 176191 - DNA, 80 bp, synthetic construct
  source 1..80: mol_type = other DNA
gatggacatgtacagagttcctgtcaccactagtgcagatacgagtgcccccatattatgtctgagtttgtcaccagcct

SEQ ID NO: 176192 - DNA, 80 bp, synthetic construct
  source 1..80: mol_type = other DNA
actccacctatgccaacggcaacatagagcagtatgaataccactgcgggtggttcagctccatgtttctgagctcacac

SEQ ID NO: 176193 - DNA, 80 bp, synthetic construct
  source 1..80: mol_type = other DNA
gctctgaaaatactgaatctccaagacctttgcagatggtccttaaaaatgcccatgacgagttgatcaagaaacagtat

SEQ ID NO: 176194 - DNA, 80 bp, synthetic construct
  source 1..80: mol_type = other DNA
tggtgagaaactgtgtgttctgtggaatactgatcatcatccccgaggccaaaaagggcgaatcgcaagctgtagtgtta

SEQ ID NO: 176195 - DNA, 80 bp, synthetic construct
  source 1..80: mol_type = other DNA
accctttttcaacaggcgtcgggttcaaaagaccccgaatggaaacccagtacgcgggagccacagaaaaccaagaagaa

SEQ ID NO: 176196 - DNA, 80 bp, synthetic construct
  source 1..80: mol_type = other DNA
tcaggcacaaatggcatataccaaaaaaaaacagacagtaactttggttaccactcctttcaagttagaaacaaaaaaac

SEQ ID NO: 176197 - DNA, 80 bp, synthetic construct
  source 1..80: mol_type = other DNA
acgcacagaagttaaaaatccttagagaatactactttaactgggaaactgcacagtccacaaaccatgttttcaataca

SEQ ID NO: 176198 - DNA, 80 bp, synthetic construct
  source 1..80: mol_type = other DNA
ctctctggtaacgagcagagaagaagtagaggcccgcggccattgggcccagattgagagaccagtccaggggcccgagg

SEQ ID NO: 176199 - DNA, 80 bp, synthetic construct
  source 1..80: mol_type = other DNA
aacttcttcgggagagcagcgtgtgtggagttcaaaacgtaccgtataggatcaagtgccgatttaactgataaatacgc

SEQ ID NO: 176200 - DNA, 80 bp, synthetic construct
  source 1..80: mol_type = other DNA
cattatttgcattcagtgcccttacacagaccctcctctatatgaaaagcacaaccccaacatgggctttgtagtatatg

SEQ ID NO: 176201 - DNA, 80 bp, synthetic construct
  source 1..80: mol_type = other DNA
tcatacaagtggataccttgattcctatgaataacttgcaaggtagtgacgaggtaagtaactacttaatacctttaaca

SEQ ID NO: 176202 - DNA, 80 bp, synthetic construct
  source 1..80: mol_type = other DNA
acgcggcggcgagggtgcgtacggccctggggacgtcgtcgcgggtggcgaggcgcaccgtgggcttgtactcggtcatg

SEQ ID NO: 176203 - DNA, 80 bp, synthetic construct
  source 1..80: mol_type = other DNA
cggcactccatataataccacttggttagacaaatggaaaagagcgtggcaacagttttacacaaaaagagatagcaact

SEQ ID NO: 176204 - DNA, 80 bp, synthetic construct
  source 1..80: mol_type = other DNA
caccactgcacaaacaattacaaaccagaaaccatacactacatttgcagacacctggtacaggggcacagcatacaaag

SEQ ID NO: 176205 - DNA, 80 bp, synthetic construct
  source 1..80: mol_type = other DNA
ccccagggcttaagattccagaaaatgatgaagatcgcctgtgggactccgcatccaaccccagtgtattctttcaacct

SEQ ID NO: 176206 - DNA, 80 bp, synthetic construct
  source 1..80: mol_type = other DNA
caaacatgggtgttgaaacaacaaaggagttagataatgcaatttataccatttgtgacttgggttcagataatagtttt

SEQ ID NO: 176207 - DNA, 80 bp, synthetic construct
  source 1..80: mol_type = other DNA
tcacggtcactagagattatgaatgtcacgttgatgagcgggataatcatcagaactttgtcgagcctgtccacgcattt

SEQ ID NO: 176208 - DNA, 80 bp, synthetic construct
  source 1..80: mol_type = other DNA
cagcttatctcaagaaccataggcatgaaccagtttgtctattgttgcatggcaatccaggatgtggaaaatcattagtc

SEQ ID NO: 176209 - DNA, 80 bp, synthetic construct
  source 1..80: mol_type = other DNA
aaaagacttgtactgactcagtggcatcccgcagttagaagaagatgtaaaattacaggctacatgcctatagtatactg

SEQ ID NO: 176210 - DNA, 80 bp, synthetic construct
  source 1..80: mol_type = other DNA
agacacgtattgtggtgcccgccagtactccaacagcaatggcaatgcttgcattcgtgagtgcttgtccagatttcagt

SEQ ID NO: 176211 - DNA, 80 bp, synthetic construct
  source 1..80: mol_type = other DNA
gattggaaacatataggatccctctttatcaaagcagacaaggtcaacaagtctttggtttcaggctctacttaggagat

SEQ ID NO: 176212 - DNA, 80 bp, synthetic construct
  source 1..80: mol_type = other DNA
ctccatagctcccatgtgctgtgagtttaatggtctaagaaatgccattacacaaggagtgcctacttatctgctgccag

SEQ ID NO: 176213 - DNA, 80 bp, synthetic construct
  source 1..80: mol_type = other DNA
gggtggcactcttggccggggacggagaggctgacgaaagcatggacagcggcgatgtggcgtgggacacgacatcatcc

SEQ ID NO: 176214 - DNA, 80 bp, synthetic construct
  source 1..80: mol_type = other DNA
gaaaatccaagtgcttaatggctaactatccactatgggctatgttatatggatactttgactactgtgacaaaatttta

SEQ ID NO: 176215 - DNA, 80 bp, synthetic construct
  source 1..80: mol_type = other DNA
atagcaccaatcaacacacccagtaaaacaaagttgtaccctagtgttttctatgacattttccctggtgagaaagaacc

SEQ ID NO: 176216 - DNA, 80 bp, synthetic construct
  source 1..80: mol_type = other DNA
caatgttgccatgcgtgagcaaaatgacaagcaacctagtgatgataattggcttaattttgatggcacactgttaggca

SEQ ID NO: 176217 - DNA, 80 bp, synthetic construct
  source 1..80: mol_type = other DNA
gcgggatccccggttgatgaaccggcagaaggagcggcggccgcctccctcctccgagaacgacggtgagtcccggccct

SEQ ID NO: 176218 - DNA, 80 bp, synthetic construct
  source 1..80: mol_type = other DNA
taaacagcagcaatccgggggcatacactagtgtagtccgcatctacttcaaactcaaacacgttaaagcatgggtgccc

SEQ ID NO: 176219 - DNA, 80 bp, synthetic construct
  source 1..80: mol_type = other DNA
ataaagccaaacatgtcaaagtctggtgccctagaccgcccagggcagttgagtacaccaatgtacatctcaccaattac

SEQ ID NO: 176220 - DNA, 80 bp, synthetic construct
  source 1..80: mol_type = other DNA
tctacgcgtaaagacgctatgctaggtacccatataatttgggaccttgggctgcaatcaagctgtgtcctgtgtgtccc

SEQ ID NO: 176221 - DNA, 80 bp, synthetic construct
  source 1..80: mol_type = other DNA
aacaatatacagaatccagtggataactttgtggatgaagtactcaaggaggttcttgttgtacccgacactaaaccctc

SEQ ID NO: 176222 - DNA, 80 bp, synthetic construct
  source 1..80: mol_type = other DNA
ccaagcccccgttatggagtaaaacaaacccttccatgggctacgtcttctatgacagaaactttggtgacggcaagtgg

SEQ ID NO: 176223 - DNA, 80 bp, synthetic construct
  source 1..80: mol_type = other DNA
gacgaaaatttctacttattcgtgacaccccgaaatgaaactaatcatactgaaatcattaacactaccttcgtttgtcc

SEQ ID NO: 176224 - DNA, 80 bp, synthetic construct
  source 1..80: mol_type = other DNA
cattgcaaatattattagtatttcaggtataatttatgtaatatacaaactcttttgtacacttcaaggtccatattcag

SEQ ID NO: 176225 - DNA, 80 bp, synthetic construct
  source 1..80: mol_type = other DNA
ctatgacagtggtaagatcaccaacagtgcgcgagaccgttctagcattaaacaagccaacatgggaaaattcgggcagc

SEQ ID NO: 176226 - DNA, 80 bp, synthetic construct
  source 1..80: mol_type = other DNA
tactaacctaccacatgtacttatgaatctagccgagacaacccaggcagatttgtgtatcccctatgttgcagatacaa

SEQ ID NO: 176227 - DNA, 80 bp, synthetic construct
  source 1..80: mol_type = other DNA
ggtgcatattccacgggtacgcagactatgtagagagccagctggggtccacacaggaccacgccacggtgggcataatg

SEQ ID NO: 176228 - DNA, 80 bp, synthetic construct
  source 1..80: mol_type = other DNA
tatatataatccttataatgataaaggcataggcaacaaagtatggatagacccttgcacaaaagctgactccacatggc

SEQ ID NO: 176229 - DNA, 80 bp, synthetic construct
  source 1..80: mol_type = other DNA
ggccctcgtcgtccccccctgggagttgctcgtcgtgtgtccccagggaccccttgggacttcctcttttccgcgtcgtg

SEQ ID NO: 176230 - DNA, 80 bp, synthetic construct
  source 1..80: mol_type = other DNA
tcctgacgacctgtttggatatagggtttccaccccacttccagtgaaatctgtatttcatggacagtacagctgatttt

SEQ ID NO: 176231 - DNA, 80 bp, synthetic construct
  source 1..80: mol_type = other DNA
tacaacagccacaacaacttatacatatccaggctctaccactaacacagtaactatgttaacctctaatgactcctggt

SEQ ID NO: 176232 - DNA, 80 bp, synthetic construct
  source 1..80: mol_type = other DNA
gagttccaccagagatttttgcttgataccttgccagaacaccaccaaaccaccagtggtttcaaacacggacacgtttc

SEQ ID NO: 176233 - DNA, 80 bp, synthetic construct
  source 1..80: mol_type = other DNA
ccaccccatgtactaacatcaccaggaccgtcacttgtgatggtttaaattataccgtccataaaagatgcgaccgcagt

SEQ ID NO: 176234 - DNA, 80 bp, synthetic construct
  source 1..80: mol_type = other DNA
gacaaagtgattaacaacgcactacagctttcacagcctacccgtccaatcaccgcatcagacactcctagcacaagcgg

SEQ ID NO: 176235 - DNA, 80 bp, synthetic construct
  source 1..80: mol_type = other DNA
tttgacccaaccaatctgactgattcaagacagagcataacctacgtaccagacaccattcgtccagaagctcgcacaac

SEQ ID NO: 176236 - DNA, 80 bp, synthetic construct
  source 1..80: mol_type = other DNA
aacagttcatgacaacagaagatgaacaatcagcaaacttgttaccaggattccaccccacaccagttatgcacatacca

SEQ ID NO: 176237 - DNA, 80 bp, synthetic construct
  source 1..80: mol_type = other DNA
acatttataacgacaaactaagcatagaaaaaacccaagttgaagcaaactacactaaactaatagacgcaattaaaaac

SEQ ID NO: 176238 - DNA, 80 bp, synthetic construct
  source 1..80: mol_type = other DNA
accgttaaaattaatattaaaccccctacaacactaatagacaaatggtacttccagaaagacatttgtgacacaacctt

SEQ ID NO: 176239 - DNA, 80 bp, synthetic construct
  source 1..80: mol_type = other DNA
ctaaggcttaacaaaattcaaaaagaatacgaagctgtgtacccacagctcccaacacaaaggcccacagacagcacact

SEQ ID NO: 176240 - DNA, 80 bp, synthetic construct
  source 1..80: mol_type = other DNA
tagattcaccactcctgatacatactcttctgctggttacatcacttgttggtatcagactaactttgtagttccccctg

SEQ ID NO: 176241 - DNA, 80 bp, synthetic construct
  source 1..80: mol_type = other DNA
tttgtatccacctacacacctgacactagtactgtccctaagcgagaattccagccagtcgattatttgtttggtagtgg

SEQ ID NO: 176242 - DNA, 80 bp, synthetic construct
  source 1..80: mol_type = other DNA
gaaggcaataatgccaaccaaagcaatgatacctggtacaaaggcaacacatacaaaatggaaaacataaaacaattagc

SEQ ID NO: 176243 - DNA, 80 bp, synthetic construct
  source 1..80: mol_type = other DNA
ctgaatatctacgatcataacagattaccatccagtttttttgagccttacccaatccttgagtcaacgcgactgttaaa

SEQ ID NO: 176244 - DNA, 80 bp, synthetic construct
  source 1..80: mol_type = other DNA
gcttgtgtgcgcatggctaaatatgaggcaagaggcaatcccgagagcactgaccgttttgacgcatgggagataagcat

SEQ ID NO: 176245 - DNA, 80 bp, synthetic construct
  source 1..80: mol_type = other DNA
cccaggaaagaccccggaggcatcgggtggtatagaggggtggcatgggtgagggctgatttcgcccttattgcctgttt

SEQ ID NO: 176246 - DNA, 80 bp, synthetic construct
  source 1..80: mol_type = other DNA
aagaaagcaagtaatgatcttattgttgttatccccttacagatggacaacaccttatttgctactaccctattaggaga

SEQ ID NO: 176247 - DNA, 80 bp, synthetic construct
  source 1..80: mol_type = other DNA
tgccttaagcctgagcccggcctctgataaaaggttgtcacgcacacttttgggcgagattctgaattattacacacatt

SEQ ID NO: 176248 - DNA, 80 bp, synthetic construct
  source 1..80: mol_type = other DNA
tgccccatacaagtcagaattttctggagccatggaaacgcggtttactgtccaaacacaaggtctcccagttcgcatgc

SEQ ID NO: 176249 - DNA, 80 bp, synthetic construct
  source 1..80: mol_type = other DNA
taactaagaaaggtgactttcctagaggtcgaaaaaatataatgatttagcttaatatggatatatacgatagctgataa

SEQ ID NO: 176250 - DNA, 80 bp, synthetic construct
  source 1..80: mol_type = other DNA
tacaccgtctcggacggcgggacgccgagcccgcgccgcggccgctcatccggagacggcggaaaccgcggcgccggagg

SEQ ID NO: 176251 - DNA, 80 bp, synthetic construct
  source 1..80: mol_type = other DNA
catcttaagtaaggcggaagtgttctctccgttcacaaaatggcggcggagcacatccggcttgcccaaaatggccgcta

SEQ ID NO: 176252 - DNA, 80 bp, synthetic construct
  source 1..80: mol_type = other DNA
atagggtcgaggtgggatgaagatacaagaacaatttacaatcatatagatacacttccaaagattatggcacaaagtaa

SEQ ID NO: 176253 - DNA, 80 bp, synthetic construct
  source 1..80: mol_type = other DNA
tgaactgtacaacacattccacgcccgtccgcagcgagaacgccacggacgaagattctcgcgtcccgagggcgggtgcc

SEQ ID NO: 176254 - DNA, 80 bp, synthetic construct
  source 1..80: mol_type = other DNA
taacgactttatactacatcatctggttgaacacagcaaaatgggagctcaagtgtccacccaaaagaccggtgcacacg

SEQ ID NO: 176255 - DNA, 80 bp, synthetic construct
  source 1..80: mol_type = other DNA
tgtgtggtcactacagacaatgggaaattcacaggcctgggtatctatgatagagttatgatactaccaacacatgctga

SEQ ID NO: 176256 - DNA, 80 bp, synthetic construct
  source 1..80: mol_type = other DNA
tactgacatgcatgttcagaatgtaccaattactcaaaatccagtagaaaattacatagatgaagtattaaatgaggtat

SEQ ID NO: 176257 - DNA, 80 bp, synthetic construct
  source 1..80: mol_type = other DNA
acaaccaacaggcagcacaaaatgcacaaagtattagagaaaccattaagtcaaacatggattcatactttaaaaaaatt

SEQ ID NO: 176258 - DNA, 80 bp, synthetic construct
  source 1..80: mol_type = other DNA
ttactgtacctatcacaatatctattagccccatgtgtgctgaattctctggtgccagagccaggaacgtaacccaaggg

SEQ ID NO: 176259 - DNA, 80 bp, synthetic construct
  source 1..80: mol_type = other DNA
gcctacacccaggagcagccatgcttagcaaacacaaaatagtagtacccagttttaaaaccagacccggtggaaaaccc

SEQ ID NO: 176260 - DNA, 80 bp, synthetic construct
  source 1..80: mol_type = other DNA
cagtagtccgtagagctctgcccccggcagacgctccggacgccccgcaggccctgccatggcgtggagatggtggtgga

SEQ ID NO: 176261 - DNA, 80 bp, synthetic construct
  source 1..80: mol_type = other DNA
tggggaccaactactttgggtgtccgtgtttccttttattcttatattgtttcatggtcacagcatatattacatatact

SEQ ID NO: 176262 - DNA, 80 bp, synthetic construct
  source 1..80: mol_type = other DNA
accgagccaaccacctatgagctctgtgtggagaccaccggtgcacaatgtccccggcatggaaaaaaactggtatgaat

SEQ ID NO: 176263 - DNA, 80 bp, synthetic construct
  source 1..80: mol_type = other DNA
acttgtctaaattgaaacacctagacacacttgaaaaccaggtgacaaccctgcaccagtcgtgccccagccaagaagac

SEQ ID NO: 176264 - DNA, 80 bp, synthetic construct
  source 1..80: mol_type = other DNA
ccagttggttccgtcactgaacagggaatgctcaatctggccggaaagcccacaaacaggaccttgatgtacaacttccc

SEQ ID NO: 176265 - DNA, 80 bp, synthetic construct
  source 1..80: mol_type = other DNA
ccaggtcagtgtggagctgtcatagggagcacaggccatataattggcatacatgttggaggtaatggtaaagtgggtta

SEQ ID NO: 176266 - DNA, 80 bp, synthetic construct
  source 1..80: mol_type = other DNA
gcaaacactgggacagaccacccagatccaacctctccgacccccccttctatccctggatgcctcccgctttcaatgta

SEQ ID NO: 176267 - DNA, 80 bp, synthetic construct
  source 1..80: mol_type = other DNA
gccagtggaccattaccacgaggagggttgcgcaattgcgtcgaaagctggagatgttcacttatctaagatttgacatg

SEQ ID NO: 176268 - DNA, 80 bp, synthetic construct
  source 1..80: mol_type = other DNA
tgtgggcccagaaacattaattgagacaagatacgtaatgaatgacaacacaaatgctgaggcagcagtggagaacttcc

SEQ ID NO: 176269 - DNA, 80 bp, synthetic construct
  source 1..80: mol_type = other DNA
ggcctgcggcatgcaataacttacagtgctggcattgtacagctaccacgaatgtcagaccaaaaccaaaagatagaaac

SEQ ID NO: 176270 - DNA, 80 bp, synthetic construct
  source 1..80: mol_type = other DNA
ggcaatgtaagtgaccgcacttcaaagcacccaagtgatgacaattggcttaatttcgatggtactttgttaggtaatgt

SEQ ID NO: 176271 - DNA, 80 bp, synthetic construct
  source 1..80: mol_type = other DNA
cacagctaaaactagaatatttaaaactgttgaaacagttgcctttacttgagaaacaaattgatggtttgagagcagcc

SEQ ID NO: 176272 - DNA, 80 bp, synthetic construct
  source 1..80: mol_type = other DNA
tggatgcctcatggttgctgtcatacccgaacatcagatggcgtacattggggcaggtgggactaatgtgagatatgatc

SEQ ID NO: 176273 - DNA, 80 bp, synthetic construct
  source 1..80: mol_type = other DNA
caatttgttagcacctccaaccataacatctttaccagccatgaataggagatttttctttgacttagatattgtagtgt

SEQ ID NO: 176274 - DNA, 80 bp, synthetic construct
  source 1..80: mol_type = other DNA
catcacaacttctggggctatcccaacaaccagctagacctggccaggtacaagggggcaaaatttacattttacagaca

SEQ ID NO: 176275 - DNA, 80 bp, synthetic construct
  source 1..80: mol_type = other DNA
acccagtggagcatactttaacacaccagacggcctatggggagatgcaatatacatatatactgattcaggtaacacac

SEQ ID NO: 176276 - DNA, 80 bp, synthetic construct
  source 1..80: mol_type = other DNA
taccagacaaagaacatgccagagtactaaatacatttaaaacagaaggcaattacagtcaccctcaaatacctaaagca

SEQ ID NO: 176277 - DNA, 80 bp, synthetic construct
  source 1..80: mol_type = other DNA
tcataggctatctgcctctaatattctgtggcgagaacaccaccgcccagaactttgccacccactcggacgatatgata

SEQ ID NO: 176278 - DNA, 80 bp, synthetic construct
  source 1..80: mol_type = other DNA
cgacgcagacgctttaggagaaagcctaagataaaactgactcagtggcagccagacatggtcagacggtgctttataag

SEQ ID NO: 176279 - DNA, 80 bp, synthetic construct
  source 1..80: mol_type = other DNA
attaagaagagcagtagcacaaggtccagagcatgaattcggaatggctctgctcaaaagaaactgccatatagccacaa

SEQ ID NO: 176280 - DNA, 80 bp, synthetic construct
  source 1..80: mol_type = other DNA
ttcatgcgattaaagcatgtgagagcttggatccccagacctattagaagccagaagtacatgctaaagaactacccaaa

SEQ ID NO: 176281 - DNA, 80 bp, synthetic construct
  source 1..80: mol_type = other DNA
ctcgcccatatgggcgagaagccttattattgacaaggtgtgaagagccgcgtgtgcttggtgtgagtcctccggcccct

SEQ ID NO: 176282 - DNA, 80 bp, synthetic construct
  source 1..80: mol_type = other DNA
caacttcttctacggcaacggcggcgccggtggtagtccgctccacggcgtggtgggtggtttcgcggcgggacattgtg

SEQ ID NO: 176283 - DNA, 80 bp, synthetic construct
  source 1..80: mol_type = other DNA
taccagctccaagacaggctgcttcatctcgttctataaacaataacccatttgaggatgagagcccatataccaactca

SEQ ID NO: 176284 - DNA, 80 bp, synthetic construct
  source 1..80: mol_type = other DNA
accgtcaccgtggcccccatgtgttgtgagttcaacggacttcggtcaatgacagcccccgtgttgcagggattaccagt

SEQ ID NO: 176285 - DNA, 80 bp, synthetic construct
  source 1..80: mol_type = other DNA
attgaacaaatggaagccttcattgaaccgcgacctagtgtattcaaatgctttgctaccagagtcgctagtcaaaccag

SEQ ID NO: 176286 - DNA, 80 bp, synthetic construct
  source 1..80: mol_type = other DNA
ttaacataaacaaattggagaaaggtctacaagatttggcacccctctacgcctgtgaggccaaacaggtgcgtgacatg

SEQ ID NO: 176287 - DNA, 80 bp, synthetic construct
  source 1..80: mol_type = other DNA
ataaggcaataggcttttccgcttctaaggaagcccaagaatcagtattaaccatattatatacacaaaactcatactgg

SEQ ID NO: 176288 - DNA, 80 bp, synthetic construct
  source 1..80: mol_type = other DNA
accacgccacggtgtgcgggcccgcatagggaaaagccagggagagcgatatgggcgaggatgggctcaggcggccccag

SEQ ID NO: 176289 - DNA, 80 bp, synthetic construct
  source 1..80: mol_type = other DNA
ggggagaagatcaacggccgtaccgtcctccaagcgctcggacgcgcatgcgatatggcaggctgccagcactatgtgct

SEQ ID NO: 176290 - DNA, 80 bp, synthetic construct
  source 1..80: mol_type = other DNA
tttctgaacacagcaaaatgggagcacaagtatcaacaaccaaaaccgggtctcacgaaaatggaaacatcgcgacaggg

SEQ ID NO: 176291 - DNA, 80 bp, synthetic construct
  source 1..80: mol_type = other DNA
agatgattttcaaccagatgaagatcctttttatatttgtaatggaaccctgttaggtaatataaccatgtaccctcatc

SEQ ID NO: 176292 - DNA, 80 bp, synthetic construct
  source 1..80: mol_type = other DNA
atctctaatgagttatatgaatatacactggggcaccgcaaaaggctctctaagtaactacaaagatagagaccgaatcg

SEQ ID NO: 176293 - DNA, 80 bp, synthetic construct
  source 1..80: mol_type = other DNA
tctcgaccccgtaaccagggatgtgtctaagatgaaattctatatggataaatacgggctagatctgccatactccacct

SEQ ID NO: 176294 - DNA, 80 bp, synthetic construct
  source 1..80: mol_type = other DNA
gtggaaaggctattcaattcagagatcgcagaactaatgcaagatccactattgatatgctagtaactgacattataaag

SEQ ID NO: 176295 - DNA, 80 bp, synthetic construct
  source 1..80: mol_type = other DNA
tccaccaccatttgaaagcacttcaacatctgaaagacaatacttagaacatgactgtggcatttacagcccatacttta

SEQ ID NO: 176296 - DNA, 80 bp, synthetic construct
  source 1..80: mol_type = other DNA
gtgctcaagtttcatcacaaaaggttggagcccacgaaaactcaaacagagcctatggcgggtctaccattaattacaca

SEQ ID NO: 176297 - DNA, 80 bp, synthetic construct
  source 1..80: mol_type = other DNA
ccgcgagcgggacacccggggcacagaggccagcatcatggcgtagtcccccgccacggtctcgttgagcccggccgaga

SEQ ID NO: 176298 - DNA, 80 bp, synthetic construct
  source 1..80: mol_type = other DNA
gagaaaaaacaaacacagcaaacataaatgcaaaatacaaatttagatttcactttgggggcaaccctgtgtccgaacag

SEQ ID NO: 176299 - DNA, 80 bp, synthetic construct
  source 1..80: mol_type = other DNA
aaacaccaacaaacttctttttaacacaagaatttggcttttacagcccatactacttaacaccatccaaaagagacata

SEQ ID NO: 176300 - DNA, 80 bp, synthetic construct
  source 1..80: mol_type = other DNA
tatgcgagaacttcctcaattctgtaattggctttagctccactaaacaaaaagctgtattagataaaatgtataagtca

SEQ ID NO: 176301 - DNA, 80 bp, synthetic construct
  source 1..80: mol_type = other DNA
tgtcttatagcagactatccactatggtgtatagtctatggctacgtagactactgtgataaagtattaagccacacaac

SEQ ID NO: 176302 - DNA, 80 bp, synthetic construct
  source 1..80: mol_type = other DNA
tagtacatgagacaaacccaaaacaaggctttgtattctatgacactcaatttggagacggtaaaatgccagagggctca

SEQ ID NO: 176303 - DNA, 80 bp, synthetic construct
  source 1..80: mol_type = other DNA
atggtgaggggacttgatacctcaccgccgtttgcctaggctataggctaaacttccctttcccctttccctttattgtt

SEQ ID NO: 176304 - DNA, 80 bp, synthetic construct
  source 1..80: mol_type = other DNA
tagttctaaagaccccaaagtcatagaatactgtgtagaacaaggatgggtgggaaaggtgcagtcaaccatagaaaggg

SEQ ID NO: 176305 - DNA, 80 bp, synthetic construct
  source 1..80: mol_type = other DNA
ggggatactgatatagggttcacatcctgggacattgacatcatgggatttgttcaacagcgtaggaaactggagatgtt

SEQ ID NO: 176306 - DNA, 80 bp, synthetic construct
  source 1..80: mol_type = other DNA
aagtccacgacgtgatagtagacgcaggggtagcccaggtgcggaaaattgctcagcactagatgcacgctgacgttgac

SEQ ID NO: 176307 - DNA, 80 bp, synthetic construct
  source 1..80: mol_type = other DNA
gggctgcttgcggcagggacggcagttgacggcgtggacggaggtgttgattgcggcgtggacttgcagggactgctggt

SEQ ID NO: 176308 - DNA, 80 bp, synthetic construct
  source 1..80: mol_type = other DNA
atgaaaataacaccggatcgacagcgtatggcaccaccatcttcaatgacatgggaaggctctgctttcgggcgttagag

SEQ ID NO: 176309 - DNA, 80 bp, synthetic construct
  source 1..80: mol_type = other DNA
agtctaagtgcataatgagagacctaccactgtgggctatatgctatggctacgtagactgggtagtgaaatccacagga

SEQ ID NO: 176310 - DNA, 80 bp, synthetic construct
  source 1..80: mol_type = other DNA
cacaaggtgaaataatcaacaaatgcaaggtgcaagatgtggggctaaagcccatcaacaccccagaacattcaaagttg

SEQ ID NO: 176311 - DNA, 80 bp, synthetic construct
  source 1..80: mol_type = other DNA
caagtatggttacaacagcatcaatgacttcggcaccattgccgtgcgcattgttaatgagcatgacccagtccccatag

SEQ ID NO: 176312 - DNA, 80 bp, synthetic construct
  source 1..80: mol_type = other DNA
tctgtgtgtcagagtcatggtgctttttgtggttgcggtgattttgtgggccatcttaaccgccttgctgagcgtcttgg

SEQ ID NO: 176313 - DNA, 80 bp, synthetic construct
  source 1..80: mol_type = other DNA
tgttgcagtatgtacagttagctttggtatagtttttgggtacctgaaacgtgtgcagggtgggtgtccaatgtggcagt

SEQ ID NO: 176314 - DNA, 80 bp, synthetic construct
  source 1..80: mol_type = other DNA
aacctacaacccactaactgacagaggcataggcaacagaatctggtaccagtacagtaccaaacccgacactaacttta

SEQ ID NO: 176315 - DNA, 80 bp, synthetic construct
  source 1..80: mol_type = other DNA
ccgtttacaaacggcacctcagtatacttcctgagaaactattagcagctaaacaacactttacaactaatttattttca

SEQ ID NO: 176316 - DNA, 80 bp, synthetic construct
  source 1..80: mol_type = other DNA
cctgttcgagcagtttcagtatcacagaaacaggtggtccaggagcaaccacgacctagacatggccaggtacctgtaca

SEQ ID NO: 176317 - DNA, 80 bp, synthetic construct
  source 1..80: mol_type = other DNA
aacaattagggccgtaatgacgcaagggcctaacacagagtttgcactttccttacttaggaagaatatagtaacagtaa

SEQ ID NO: 176318 - DNA, 80 bp, synthetic construct
  source 1..80: mol_type = other DNA
ttaccattcctattacaatttctatcagtcctatgtgtgctgaattttctggagcaagagcaaacagtcaggggttacca

SEQ ID NO: 176319 - DNA, 80 bp, synthetic construct
  source 1..80: mol_type = other DNA
tgcccccactccacaatttcaaaaaaaagagtggccacttgtctttgtttttgggccccattggcggggagccccgttta

SEQ ID NO: 176320 - DNA, 80 bp, synthetic construct
  source 1..80: mol_type = other DNA
cacattcgtaataactagtgcccagatcacatctactaatcagaatcaagatgctccggttttgacacaccaggtaatgt

SEQ ID NO: 176321 - DNA, 80 bp, synthetic construct
  source 1..80: mol_type = other DNA
atgtgcttcgtatcagcgtgcaacgacttttcagtgaggctgttaaaagacactccatttatagaacagaatgctctctt

SEQ ID NO: 176322 - DNA, 80 bp, synthetic construct
  source 1..80: mol_type = other DNA
tataacactacacaaacactagcacagctaaaaccttatatagacaatacatcaactacaaccacaaacaactggtccag

SEQ ID NO: 176323 - DNA, 80 bp, synthetic construct
  source 1..80: mol_type = other DNA
actgcgacatactcgggttcatatccgcgtgcaatgatttctccgttaggatgctgaaagacacaccattcatttcacag

SEQ ID NO: 176324 - DNA, 80 bp, synthetic construct
  source 1..80: mol_type = other DNA
acaactggtcgtgccttacgaggtgatttggcaaacttctcagatcagagcccatatgatcgacaaccacagaatcaagt

SEQ ID NO: 176325 - DNA, 80 bp, synthetic construct
  source 1..80: mol_type = other DNA
gccataaaaaagagagacaaaaacaaatggagaatgttgatagattttagagaattaaacaaggtaacccaagactttac

SEQ ID NO: 176326 - DNA, 80 bp, synthetic construct
  source 1..80: mol_type = other DNA
atgggcgctcaggtttcaactcaaaggagtggttctcacgaaaaccaaaatattcttacaaatggatcacatcaaacctt

SEQ ID NO: 176327 - DNA, 80 bp, synthetic construct
  source 1..80: mol_type = other DNA
ctgtcatcacggtacacagatttcgcccgactgcggacgccgacggccaatcgcgtggcgtaggagtggcgccccggctt

SEQ ID NO: 176328 - DNA, 80 bp, synthetic construct
  source 1..80: mol_type = other DNA
gtagcagaccaacaaaaccagagaatatttggcacagatttgttcataggtgatggagtttttaaaacaacattgttagg

SEQ ID NO: 176329 - DNA, 80 bp, synthetic construct
  source 1..80: mol_type = other DNA
tagagagatttggattggcagagagccggttgggatcaaaagaaggatgccggaaaattcggaaagtcttaggaccatta

SEQ ID NO: 176330 - DNA, 80 bp, synthetic construct
  source 1..80: mol_type = other DNA
gtggtggaaagctactgtgcaaacatggggtcataggcattgtaacagctggtggtgacaatcacgttgccttcattgac

SEQ ID NO: 176331 - DNA, 80 bp, synthetic construct
  source 1..80: mol_type = other DNA
tcaagcactttctgtttccccggtgatactggatacgctttacccaaggcgaaaaccgggctcatcgttatccgcaaagt

SEQ ID NO: 176332 - DNA, 80 bp, synthetic construct
  source 1..80: mol_type = other DNA
aaaccaaaggaaaggcacaatggccaactacgacagcagagacagagtcggagtagtgtttaacacatttaaaacacaag

SEQ ID NO: 176333 - DNA, 80 bp, synthetic construct
  source 1..80: mol_type = other DNA
cagctcaattagccactttagatataaacccagcaaatataactttagaggatagtgtttttggaattgaaggtctggag

SEQ ID NO: 176334 - DNA, 80 bp, synthetic construct
  source 1..80: mol_type = other DNA
gattatgatgattatgacaactctcaaaagaatttcaaggtgtggaaaataaatttacaagagatggcccagattcgtag

SEQ ID NO: 176335 - DNA, 80 bp, synthetic construct
  source 1..80: mol_type = other DNA
agatcctcctttaactatgccatccactcggatgactaccagctgcaggtgctgcccttcgggggaggcatgagcacaat

SEQ ID NO: 176336 - DNA, 80 bp, synthetic construct
  source 1..80: mol_type = other DNA
caaatgaggccaatggagtacaagcagcagtatataatgcgggcatgggtgtggctgtgggcaacctcaccatattccca

SEQ ID NO: 176337 - DNA, 80 bp, synthetic construct
  source 1..80: mol_type = other DNA
tccaccaccatgggaacccattacatcaaatataggcagacaatacttagaacatgactgtggcatttacagcccatact

SEQ ID NO: 176338 - DNA, 80 bp, synthetic construct
  source 1..80: mol_type = other DNA
tccggacaaagaggtccaaattgatggaataactaccaaagtactggattcatatgacctatataataaggatggagtaa

SEQ ID NO: 176339 - DNA, 80 bp, synthetic construct
  source 1..80: mol_type = other DNA
cgcgcccgccacacagccagccgacacacccgcgacacacccgccacacccagccgcacccggcacacacccacccagcc

SEQ ID NO: 176340 - DNA, 80 bp, synthetic construct
  source 1..80: mol_type = other DNA
ttagggattccgcacccagcaggccttccagagaaaaacagaatcacagttctggacataggggacgcctatttttcagt

SEQ ID NO: 176341 - DNA, 80 bp, synthetic construct
  source 1..80: mol_type = other DNA
cgtgatcaagcggcgcggcgcggacctttcaagcgttcctgggccgccgctcgaggcagttcccctttctggcactccgc

SEQ ID NO: 176342 - DNA, 80 bp, synthetic construct
  source 1..80: mol_type = other DNA
taccaacacatttataatccaaatttcaagactacccaacctgagactataccagatacccatattgaaattagaaggga

SEQ ID NO: 176343 - DNA, 80 bp, synthetic construct
  source 1..80: mol_type = other DNA
tcctccatctatatgttttctcaagagattagaaaaacggactgcacagcaggagagatattatcaattcagatcgtctt

SEQ ID NO: 176344 - DNA, 80 bp, synthetic construct
  source 1..80: mol_type = other DNA
gcacgttttaattttcaggccgggccaccgcctcccgggggtccccgggcggagaccccgccgattctgagggcgctgcc

SEQ ID NO: 176345 - DNA, 80 bp, synthetic construct
  source 1..80: mol_type = other DNA
gcagtacaaagcaaatggatagaactagcaaagtctggctatgaactagttaaaaaagaatataacacagtataccctat

SEQ ID NO: 176346 - DNA, 80 bp, synthetic construct
  source 1..80: mol_type = other DNA
aatataaactcacacacccgggtgaaggtggtattgatttgtcaacaaatgtagaggcagatggacctgttaaggaccca

SEQ ID NO: 176347 - DNA, 80 bp, synthetic construct
  source 1..80: mol_type = other DNA
acaagatttctcacaagacccatctaagtttacacaaccgcttgccgatgttctaacaaaccctgcacttatgtcaccca

SEQ ID NO: 176348 - DNA, 80 bp, synthetic construct
  source 1..80: mol_type = other DNA
agacggtggagaccaaagagaaggtggagatggaggcgccgcaggagagttgcccccagaagacgtcgaagagctcctag

SEQ ID NO: 176349 - DNA, 80 bp, synthetic construct
  source 1..80: mol_type = other DNA
atgagaaggaaacttgagatgtttacatacatccgcttcaatatagaaatcacgtttgtgatcactagtaaacaagatca

SEQ ID NO: 176350 - DNA, 80 bp, synthetic construct
  source 1..80: mol_type = other DNA
cagccttagaatactatatgatgaatacaaaagatttatgaactactggacagcctcaaatgaggacctagatctctgta

SEQ ID NO: 176351 - DNA, 80 bp, synthetic construct
  source 1..80: mol_type = other DNA
cacccagatcacctacatggtgttgtacactattattacggtaattttgtacgccagttttatacccccttccccaaatg

SEQ ID NO: 176352 - DNA, 80 bp, synthetic construct
  source 1..80: mol_type = other DNA
atcccgcctccggcgcctcagaacggcgtcggaggtgctcccccgggccgcgggtggtgcgggtggcgatggactgctcg

SEQ ID NO: 176353 - DNA, 80 bp, synthetic construct
  source 1..80: mol_type = other DNA
agctccacgccgcccccctccaccttcaagtcccaatacatacaataaacacatgatggaaaccaccccccccattaagg

SEQ ID NO: 176354 - DNA, 80 bp, synthetic construct
  source 1..80: mol_type = other DNA
cgtaggaagtggttggactccttttaaaattggagcacaattaattatgattggcttgaccctaccgcatgaaccgaact

SEQ ID NO: 176355 - DNA, 80 bp, synthetic construct
  source 1..80: mol_type = other DNA
cagtgctttaaccattatggtaagaaacagtgcagatgttcctacagtagtagctacccttgccttactaggatgccatc

SEQ ID NO: 176356 - DNA, 80 bp, synthetic construct
  source 1..80: mol_type = other DNA
aaaaaaggggctcgggatatgttatgaccgaaagggcagacgaagaaggactccaaagaaagctaaggctcattcgtctt

SEQ ID NO: 176357 - DNA, 80 bp, synthetic construct
  source 1..80: mol_type = other DNA
atctactggcagcagagatggtggatcagactagcctttcaggtacaagtcatgcatgactttgtactcactggcccctt

SEQ ID NO: 176358 - DNA, 80 bp, synthetic construct
  source 1..80: mol_type = other DNA
cagcagggagtccacctagatccatcccttgtgtaggcccccagcagtggctctttcccgagcgcaagcctaagccccct

SEQ ID NO: 176359 - DNA, 80 bp, synthetic construct
  source 1..80: mol_type = other DNA
attgaaaagttatgtgaagctactagaaaaaaatacttcaatgctacaaagtccgcattccctgcctatgctacacttgt

SEQ ID NO: 176360 - DNA, 80 bp, synthetic construct
  source 1..80: mol_type = other DNA
tctaggcgatcagatcgcagagcgcagatggcattgcactagtttacaattctccgatttatgtgtctcgatttacattc

SEQ ID NO: 176361 - DNA, 80 bp, synthetic construct
  source 1..80: mol_type = other DNA
tagctgatttactgcaatcagtgaggactccagaagttgtaaaatactgtgaagacaacaaatggataatcccagctgaa

SEQ ID NO: 176362 - DNA, 80 bp, synthetic construct
  source 1..80: mol_type = other DNA
tttgttccctatccccttttaaagtaacttagaagcatgaacttacagaccaataggcaatggtcatccagaccattaaa

SEQ ID NO: 176363 - DNA, 80 bp, synthetic construct
  source 1..80: mol_type = other DNA
cccgggcatatacaaagaagtagtatataacccccagaacgacaagggcataggcaacaaggtgtggatagactggtgta

SEQ ID NO: 176364 - DNA, 80 bp, synthetic construct
  source 1..80: mol_type = other DNA
ctattgcagacatgtgaacaaggaaaccccctcaaaagtcacgagctacgtgcgtatatactttaaaccgaagcacgtac

SEQ ID NO: 176365 - DNA, 80 bp, synthetic construct
  source 1..80: mol_type = other DNA
ttggcaactatatacaatagaatagtagaggaaagtaagaacaggaaagagttaaccacctccctacaggctatctttca

SEQ ID NO: 176366 - DNA, 80 bp, synthetic construct
  source 1..80: mol_type = other DNA
gaataataatacttagaatagtgatatatgtagtacagctgttaggtagtcttaggaaaggttataggccagttttctct

SEQ ID NO: 176367 - DNA, 80 bp, synthetic construct
  source 1..80: mol_type = other DNA
aaactatcacattagggatggtgatcagggtatgttaaaacaaaagcactacttcaagtatagggatgatataaagaatt

SEQ ID NO: 176368 - DNA, 80 bp, synthetic construct
  source 1..80: mol_type = other DNA
gtgatggtttgaattatacagttcataaaacatgcggtcgtagctacgaagtaatcaatgtaacgggacacgttggtagc

SEQ ID NO: 176369 - DNA, 80 bp, synthetic construct
  source 1..80: mol_type = other DNA
gattctctcttcctttcttaagtatagcttctgcatattacatgttttatgatgggtatgatggtgatcagtatgattca

SEQ ID NO: 176370 - DNA, 80 bp, synthetic construct
  source 1..80: mol_type = other DNA
ccagagatgaaatgagtatagagagctttttgggtagagctggttgtatacatgaatctactattacaattagaaatgat

SEQ ID NO: 176371 - DNA, 80 bp, synthetic construct
  source 1..80: mol_type = other DNA
gctccaggcaccaggcccgcgcaaggtctcccagcatgcggttgatctggcggcgcagggagtcgtaggcaaattggatc

SEQ ID NO: 176372 - DNA, 80 bp, synthetic construct
  source 1..80: mol_type = other DNA
cacattcatacccatcacattatccataagtccaatgtgttcagagttctctggtgccagaaataataccacacaaggat

SEQ ID NO: 176373 - DNA, 80 bp, synthetic construct
  source 1..80: mol_type = other DNA
gctgcagctgacggacagcagcaacccccgcagccgcctcaactaagagcgcttccagcccctccggtgcctgacacccc

SEQ ID NO: 176374 - DNA, 80 bp, synthetic construct
  source 1..80: mol_type = other DNA
gtcctcacaccacccactgtttcatcacccgaagccatagatagaagatttttcttagattgtgatgttaagattatgcc

SEQ ID NO: 176375 - DNA, 80 bp, synthetic construct
  source 1..80: mol_type = other DNA
tcgatagtgcaacaaacccaggtgatgactacataccaaactgtgactgtactattggcacctactattgtcacagtaag

SEQ ID NO: 176376 - DNA, 80 bp, synthetic construct
  source 1..80: mol_type = other DNA
atgaccacatactaaccgtccttaatggcacagacacagccacagttagagaccaaagatacaaagacatgttaaacatt

SEQ ID NO: 176377 - DNA, 80 bp, synthetic construct
  source 1..80: mol_type = other DNA
agcgtacttggattgataaatttatttaaatagtaacagtaatgtagaaatctacctgagtaggagtagggttttataaa

SEQ ID NO: 176378 - DNA, 80 bp, synthetic construct
  source 1..80: mol_type = other DNA
ttcgggggcaatctgctctatcaacagacccttagaaacccctgcaaacccgacggacaagacaccacgacccataggtg

SEQ ID NO: 176379 - DNA, 80 bp, synthetic construct
  source 1..80: mol_type = other DNA
aagccattaatgttgatattttcacagttagtcacacaaaagtagacaatatatttggtagagcttggtatgcaacacac

SEQ ID NO: 176380 - DNA, 80 bp, synthetic construct
  source 1..80: mol_type = other DNA
ccaggtgcggcatactacggggcaacttccattaacgactttggcatcttggcagtgagggtggtgaacgaacacaatcc

SEQ ID NO: 176381 - DNA, 80 bp, synthetic construct
  source 1..80: mol_type = other DNA
tgttaattggttcagtgacaaattgaaatcaatgctgagctttgtggagaagaataaagcctggctaaccgtagtatctg

SEQ ID NO: 176382 - DNA, 80 bp, synthetic construct
  source 1..80: mol_type = other DNA
cgggctatgggcaaggctcttaatgcgatcgctcttaaaaagctatgtttatcggcagggcctacagaaagaaaaggaaa

SEQ ID NO: 176383 - DNA, 80 bp, synthetic construct
  source 1..80: mol_type = other DNA
cccaaccggcctcccgagagcttgctatgcttggtactcatgtaatatgggattttggtctgcagtcgtcagtgacactc

SEQ ID NO: 176384 - DNA, 80 bp, synthetic construct
  source 1..80: mol_type = other DNA
atccacactgggacacactatacgggggcttagcctatggatttacaccaaacacatcttcagaaaacacaaaccaagca

SEQ ID NO: 176385 - DNA, 80 bp, synthetic construct
  source 1..80: mol_type = other DNA
ttggatggcatgctttggatataatgactggtgtaaaaaagagctaaataactggggcctagaagtagaatacagagtac

SEQ ID NO: 176386 - DNA, 80 bp, synthetic construct
  source 1..80: mol_type = other DNA
tttgtgccactaactagtatggggggctccacatatgttccaattaccgtaacaattgcaccaatgtatgcagagtataa

SEQ ID NO: 176387 - DNA, 80 bp, synthetic construct
  source 1..80: mol_type = other DNA
cgtgggagtttcacttgtcggtgtctgcttataaaagtcactaagcactccgagcgcaagcgaggagtgcgacccttccc

SEQ ID NO: 176388 - DNA, 80 bp, synthetic construct
  source 1..80: mol_type = other DNA
aaacaggtgaagttaccctcccaattgaagtaagagataatcctagacacataaaaaatgtaggacctagtgacatgtat

SEQ ID NO: 176389 - DNA, 80 bp, synthetic construct
  source 1..80: mol_type = other DNA
ttcgctgtcagacatctccgtcgagtcatgggagagttatgatggcagcacatccacgtacgctgccatgcgccctgtgc

SEQ ID NO: 176390 - DNA, 80 bp, synthetic construct
  source 1..80: mol_type = other DNA
atttggataagttgaaaattttagcatatggtgatgatgttatcttttcttataactttaaacttgatatggcagtcctt

SEQ ID NO: 176391 - DNA, 80 bp, synthetic construct
  source 1..80: mol_type = other DNA
accaagcaaaaccaaattacaacctagtgttttttatgatatcttccctggcaacaaagaacctgctgtgctctcagaac

SEQ ID NO: 176392 - DNA, 80 bp, synthetic construct
  source 1..80: mol_type = other DNA
tcaaagaacaagtttgccccatgggactggctgctaggatgtggagttatggcgggtaacatcacagtgtatccacacca

SEQ ID NO: 176393 - DNA, 80 bp, synthetic construct
  source 1..80: mol_type = other DNA
acggggcgccaacccaagcccgaattatagcacttggtgccgcccaaaagaatttcactttaagattgtgtaaggacact

SEQ ID NO: 176394 - DNA, 80 bp, synthetic construct
  source 1..80: mol_type = other DNA
cacacccgggtgaaggtggtattgatttgtcaacaaatgtagaggcagatggacctgttaaagacccagtttataacatg

SEQ ID NO: 176395 - DNA, 80 bp, synthetic construct
  source 1..80: mol_type = other DNA
ctctgattatatcccagattgcgattgcctagagggttgttattactgcaagagtcaagatcgctacttcccaatccaat

SEQ ID NO: 176396 - DNA, 80 bp, synthetic construct
  source 1..80: mol_type = other DNA
aaacacaagatactgatccccagcagactgaccagaccgcggggcaagaaatacatctctgtcagaataagaccccccaa

SEQ ID NO: 176397 - DNA, 80 bp, synthetic construct
  source 1..80: mol_type = other DNA
ttgcacgttttaatcttcaaggaggcccgcagacaccaccggacgagccgggtgagggtgcgccagtgctgagggcccta

SEQ ID NO: 176398 - DNA, 80 bp, synthetic construct
  source 1..80: mol_type = other DNA
tggacttcactaacaaaagcaaacgaccaagcaacacaaataggccaagctagagcaaaacactttgagtaccacctagg

SEQ ID NO: 176399 - DNA, 80 bp, synthetic construct
  source 1..80: mol_type = other DNA
aaaattatcccagaagccaaagacaaggtggaatttctcaccaagctgaaacagttagacatgttagaaaatcagattgc

SEQ ID NO: 176400 - DNA, 80 bp, synthetic construct
  source 1..80: mol_type = other DNA
taacccccgatatcaggtcacatgacgaagggaaagagaaggaaatcaactgtgacaaactgccctcaaatttggcttcc

SEQ ID NO: 176401 - DNA, 80 bp, synthetic construct
  source 1..80: mol_type = other DNA
acatattccctaccgccagatccctcacactttgatggttataaacaacagggagtcgtaatcatggatgacctaaatca

SEQ ID NO: 176402 - DNA, 80 bp, synthetic construct
  source 1..80: mol_type = other DNA
accagcacttatagggtcaacagaagatgtaggcttcatttcagtaagtgacaccttttgcaacggagacatgccgtttc

SEQ ID NO: 176403 - DNA, 80 bp, synthetic construct
  source 1..80: mol_type = other DNA
cttatacagaagaattagggtgcggtcagagtcgtacgtgaggtaaagcccatccggtggcagggcctggccggggctga

SEQ ID NO: 176404 - DNA, 80 bp, synthetic construct
  source 1..80: mol_type = other DNA
aaatacaaaggacattacaaaacttcagcaaatgattgacacctatgggcttgacctgccatatgtaacctacttaaagg

SEQ ID NO: 176405 - DNA, 80 bp, synthetic construct
  source 1..80: mol_type = other DNA
aataaattttgaatccatatcaaggaacgcgtgttttgtattttattgggaatattggcggggataaaccggtttcggat

SEQ ID NO: 176406 - DNA, 80 bp, synthetic construct
  source 1..80: mol_type = other DNA
tgcaaaaagatgtaatcactttccgcgtatctagccaacgttgacgtcacagtagtagtgtttcccgaaaaagtagcgtt

SEQ ID NO: 176407 - DNA, 80 bp, synthetic construct
  source 1..80: mol_type = other DNA
aggtccgagatgtcctgcacgtagaacttggtcaggtccttgctggaagtcaggtacatgaaattaccgagcagcggcgt

SEQ ID NO: 176408 - DNA, 80 bp, synthetic construct
  source 1..80: mol_type = other DNA
cttttgacagcaatggacactacagatgccgatgtggccatctattgtagggataagaaatgggagatgacattaaagga

SEQ ID NO: 176409 - DNA, 80 bp, synthetic construct
  source 1..80: mol_type = other DNA
aaagtcggcgtcggggtgacatgtccacccttaacacgcatggtgccttcggacaacaatccggtgccgtctatgtgggc

SEQ ID NO: 176410 - DNA, 80 bp, synthetic construct
  source 1..80: mol_type = other DNA
agttctttcctctacgtgcggtccatcaccaccttttgtttttaataacactttgtgccatgtattacttgatttgccat

SEQ ID NO: 176411 - DNA, 80 bp, synthetic construct
  source 1..80: mol_type = other DNA
ccaggactggactcagtattcaaaagaacgctgctaggggaggtgatcaattactacgcacattggtcagggagcatcaa

SEQ ID NO: 176412 - DNA, 80 bp, synthetic construct
  source 1..80: mol_type = other DNA
atactacatgttttatgatggttatgatggtgatcaaactgactcaatatatggtgcagtggtaacaaatgacatgggat

SEQ ID NO: 176413 - DNA, 80 bp, synthetic construct
  source 1..80: mol_type = other DNA
tgcttttgactcctggttctggccaatttatgacaactgatgatttccaatcccctagtgctttgccttggtttcaccca

SEQ ID NO: 176414 - DNA, 80 bp, synthetic construct
  source 1..80: mol_type = other DNA
acgccaggcaatattaataaaatggaagcttaccccattccactcactcaaggcgctcccgtaaaggatcaagcaatatt

SEQ ID NO: 176415 - DNA, 80 bp, synthetic construct
  source 1..80: mol_type = other DNA
gtcagcctgcgcttcggccggccttttgtgggttctgtcgcgtggacaccgcgagttttatgtctacgacggctattcgg

SEQ ID NO: 176416 - DNA, 80 bp, synthetic construct
  source 1..80: mol_type = other DNA
gtacacattacaagcagggtctatcataaagcaaaacatattagtgcatggtgtccacgaccacccagggctgtggcata

SEQ ID NO: 176417 - DNA, 80 bp, synthetic construct
  source 1..80: mol_type = other DNA
atttccacgtacccatggcagctatcgaagacaagggaatgtcatttaccagtacctttgttttagctagtactaacctg

SEQ ID NO: 176418 - DNA, 80 bp, synthetic construct
  source 1..80: mol_type = other DNA
ggcccgggtatccatctcctcccaggcgtcctggaagaagatgaagccggtgggtggaccggcgatgcggtggcgtgtga

SEQ ID NO: 176419 - DNA, 80 bp, synthetic construct
  source 1..80: mol_type = other DNA
agtagcccagggtgaaataacgaagaaaacacaagtcaaagagatgggcttacagactgtcaacacacccaccaagacaa

SEQ ID NO: 176420 - DNA, 80 bp, synthetic construct
  source 1..80: mol_type = other DNA
tcctcgcaagaagagaaagaagcagaagccccccaaacgcaggcgcaaatacagcagcagctcagacagcagctcaaaca

SEQ ID NO: 176421 - DNA, 80 bp, synthetic construct
  source 1..80: mol_type = other DNA
gagtcgtgatgcagaaacagcatgatccattggcctcgttcgtccgtctccgttttgtggatgtacgtgttagggtccga

SEQ ID NO: 176422 - DNA, 80 bp, synthetic construct
  source 1..80: mol_type = other DNA
cagagtacaatggtttgcggcccggcggtcaccagggattgccaaccatgaacacgccaggaagcacccaattcctaacg

SEQ ID NO: 176423 - DNA, 80 bp, synthetic construct
  source 1..80: mol_type = other DNA
gccctccacagcgaggactacccagagcagggcaggtatcccttcggggggtccctcaccaccacaacatggagtctgaa

SEQ ID NO: 176424 - DNA, 80 bp, synthetic construct
  source 1..80: mol_type = other DNA
aggcccaaaggtgcctcgatggtttcccccactcgacaaccaagagcaagaaggcgtctcagatacagagacgacaacct

SEQ ID NO: 176425 - DNA, 80 bp, synthetic construct
  source 1..80: mol_type = other DNA
tcgtcgatggaacatggctatcagaaacgtcgagagacagatccagacgcaccacagaacgcagacaatcatgaaaatac

SEQ ID NO: 176426 - DNA, 80 bp, synthetic construct
  source 1..80: mol_type = other DNA
gcccagcactaacacacctcacaggcatattcagtcccccctttttaaattcaggccgcatatctccagagatatttggc

SEQ ID NO: 176427 - DNA, 80 bp, synthetic construct
  source 1..80: mol_type = other DNA
tgctaaatgttgcccatttatttgtggcaaagctgtgtcattcaaagatcgcaatacctgccaggtgtactcacttagtc

SEQ ID NO: 176428 - DNA, 80 bp, synthetic construct
  source 1..80: mol_type = other DNA
aaaagacgcaacaacgacggggggggggcgtacgattaatcctacatattacagtacaggctaccgcgtggtgttgtgta

SEQ ID NO: 176429 - DNA, 80 bp, synthetic construct
  source 1..80: mol_type = other DNA
tccgcaaggaccaggaactgccaaccaaagaagaaatagaaggagaaagtggaaacaaaggtggctacagatcttggcct

SEQ ID NO: 176430 - DNA, 80 bp, synthetic construct
  source 1..80: mol_type = other DNA
tttgtactgcaaactcaggaactggttcaatctcgatttcattcactaccaccgtgaagacaagaaagcagcccagacga

SEQ ID NO: 176431 - DNA, 80 bp, synthetic construct
  source 1..80: mol_type = other DNA
gtgttccttttataccacccatggcagatcttccagataaaggtaagccattcacatccaagtttgtacttgcaagtacc

SEQ ID NO: 176432 - DNA, 80 bp, synthetic construct
  source 1..80: mol_type = other DNA
tgatttgtggtaaagctctcagcttagttgataaacacactaatgtaagatatactattgaccaactggtcactgctata

SEQ ID NO: 176433 - DNA, 80 bp, synthetic construct
  source 1..80: mol_type = other DNA
ttagacagcgtatttaaacatacgctgttgggggagatattaaattactatgcccactggtcgggcagtgttaaactaac

SEQ ID NO: 176434 - DNA, 80 bp, synthetic construct
  source 1..80: mol_type = other DNA
tggatttgtatggcatagatctaccatacataacatatttgaaggatgaactgaggagtccagaaaaagtgagactaggc

SEQ ID NO: 176435 - DNA, 80 bp, synthetic construct
  source 1..80: mol_type = other DNA
agagcagtcccataccaaaattccactgttgattttgctcagaatgccaccgcaatgggccaagtggcgtctattaggac

SEQ ID NO: 176436 - DNA, 80 bp, synthetic construct
  source 1..80: mol_type = other DNA
taagcattctcaggagcaggctgaggggcaggaaaccacgacccagttggagcggctgaaacatgataggcagtgagctg

SEQ ID NO: 176437 - DNA, 80 bp, synthetic construct
  source 1..80: mol_type = other DNA
cagcagatttacaggtggatgccacttcagaaccaggagaggacattatacccacctgcgattgtacagtgggcacatat

SEQ ID NO: 176438 - DNA, 80 bp, synthetic construct
  source 1..80: mol_type = other DNA
caaacaccaggccgttgctggggtgtctatgatcggtaagctccagcgcgcccagaaccaacaccggtgtgcagctaagc

SEQ ID NO: 176439 - DNA, 80 bp, synthetic construct
  source 1..80: mol_type = other DNA
agctgggacgcctacgtcatgctcaattatgtgctttgtatcagcatgtaatgacttctccgtccgattgctgaaggaca

SEQ ID NO: 176440 - DNA, 80 bp, synthetic construct
  source 1..80: mol_type = other DNA
ccacatttacattttacagagacccaaaagtagactacatagtagtatacaacacagtgcctccatttaagcttaacaaa

SEQ ID NO: 176441 - DNA, 80 bp, synthetic construct
  source 1..80: mol_type = other DNA
ttgtgacaaaagttagtgattcatatgacatgtataataaacaaggtatcaagctagagattactgctgtagtgttagat

SEQ ID NO: 176442 - DNA, 80 bp, synthetic construct
  source 1..80: mol_type = other DNA
ttccctgatgtttcgcccctcaagattccccaatctgttcccgcctttgctcaccttgtccagcgacaggggctgcggcg

SEQ ID NO: 176443 - DNA, 80 bp, synthetic construct
  source 1..80: mol_type = other DNA
ttgctgctcgcattaacaacgccccccaacagccccccgctaatcccgacaacaacacccttcggaggctgccggcactg

SEQ ID NO: 176444 - DNA, 80 bp, synthetic construct
  source 1..80: mol_type = other DNA
caggtttggggctatttacacatgtaattacaagataatgaattaccatctgatgacacatgaagaccacttaaacctat

SEQ ID NO: 176445 - DNA, 80 bp, synthetic construct
  source 1..80: mol_type = other DNA
ataaatacagctctcccagctaccaccccggcatgatgatgcttaagacaaaaaataagatactcatacccagctttaac

SEQ ID NO: 176446 - DNA, 80 bp, synthetic construct
  source 1..80: mol_type = other DNA
agttagcatacataggaggaacaaaagctaatgtgagctacggccacacacatccaggtgaaaacggccatgagatacgt

SEQ ID NO: 176447 - DNA, 80 bp, synthetic construct
  source 1..80: mol_type = other DNA
tgccctagatgctgcagaaactggacatactagctccgtccaaccagaggatatgattgaaaccaggtatgttataactg

SEQ ID NO: 176448 - DNA, 80 bp, synthetic construct
  source 1..80: mol_type = other DNA
caaattatcatacacaaactagagaaaacaatggtacacttgaggagaaacattacatcaagacacgcacaaacatcaag

SEQ ID NO: 176449 - DNA, 80 bp, synthetic construct
  source 1..80: mol_type = other DNA
tgcaagaaaaatttcacaatctccttaaaggtaaccagattacaacaatttttaacacctgccttaaggatgaacttagg

SEQ ID NO: 176450 - DNA, 80 bp, synthetic construct
  source 1..80: mol_type = other DNA
tacagagactttgagcggaagatacgcagtgtcagcgctggacgtgcactgtatatccctccctacgaagtgctcctgca

SEQ ID NO: 176451 - DNA, 80 bp, synthetic construct
  source 1..80: mol_type = other DNA
agtacacatttcttgtgcaccccttgtatccagagaaagaggtgtgggaatccataagatggacaaagaaccctcaaaac

SEQ ID NO: 176452 - DNA, 80 bp, synthetic construct
  source 1..80: mol_type = other DNA
tcattcccccaggacttaagatccctgaaaatgacaccgaccgattgtgggattctgcatcaaatcctagtgttttcttt

SEQ ID NO: 176453 - DNA, 80 bp, synthetic construct
  source 1..80: mol_type = other DNA
gagttgcccacacttatgacacagaaagagatagacaaaatgtcttagagtcaagtggagtcattacaatacctgctgga

SEQ ID NO: 176454 - DNA, 80 bp, synthetic construct
  source 1..80: mol_type = other DNA
gcagctcctccaaagaatcgcaaagatgcaatgctcggaacccatgtcatttgggatctaggcttacagtccagctgcac

SEQ ID NO: 176455 - DNA, 80 bp, synthetic construct
  source 1..80: mol_type = other DNA
cagttagaagaggcgcctcctactaatccatacaattcgcccaccttcgccataaaaaagaaagacaaaaacaaatggag

SEQ ID NO: 176456 - DNA, 80 bp, synthetic construct
  source 1..80: mol_type = other DNA
gcgcaggcctcctcgctgagtgcggcggccgtctggcgcgcagggctgctggccccgggtgaggtggcggtcgccgggtg

SEQ ID NO: 176457 - DNA, 80 bp, synthetic construct
  source 1..80: mol_type = other DNA
gcaacaaatccctcagtgattgtcaagagcagtgacccaccggctcaagtatcagtaccctttatgtcacctgctagcgc

SEQ ID NO: 176458 - DNA, 80 bp, synthetic construct
  source 1..80: mol_type = other DNA
gagccccgtcattttccagctggggtgcgccgaccttgaaatgggtcgcgctccgttcgttaccccaggtgccgtaggct

SEQ ID NO: 176459 - DNA, 80 bp, synthetic construct
  source 1..80: mol_type = other DNA
tcaattacaaagtaacaacgtgtctaacattgttcctattactgtttctatcagtccaatgtgtgctgaattttctggag

SEQ ID NO: 176460 - DNA, 80 bp, synthetic construct
  source 1..80: mol_type = other DNA
ccttgtggtatcaaacagacttcataaccacctcaaataatgtgggagaaatactagttacttgcagtggttgcccagat

SEQ ID NO: 176461 - DNA, 80 bp, synthetic construct
  source 1..80: mol_type = other DNA
ttgagtggacatcctcatcttatggctggtggtggaagctgccggacgcattaaaagatatgggtgtatttgggcaaaat

SEQ ID NO: 176462 - DNA, 80 bp, synthetic construct
  source 1..80: mol_type = other DNA
cacccaaaggatccacgactggatgttaaccttgacacgacagtgtttagcaaatataaagggaacacggaagctaaatg

SEQ ID NO: 176463 - DNA, 80 bp, synthetic construct
  source 1..80: mol_type = other DNA
tgtttctcacactaaagtagacaacttatttggaagagcttggttctaccaggaacacaccttcactaatgaaggacagt

SEQ ID NO: 176464 - DNA, 80 bp, synthetic construct
  source 1..80: mol_type = other DNA
ttgcagcagggtgatattcccattaaaaggagaaagtcacctagagatacaggcatactggaatctaacaccagaaaaag

SEQ ID NO: 176465 - DNA, 80 bp, synthetic construct
  source 1..80: mol_type = other DNA
cacaggtggcctgctggccgtggcagagtcctggagctccattaacattagtcatacccgccaggtatgtcctggggtcc

SEQ ID NO: 176466 - DNA, 80 bp, synthetic construct
  source 1..80: mol_type = other DNA
gtggtatgggatgttgggctgcagtctagctgcgttctgtgtataccttggatcagccaaacccactatcgttttgtgca

SEQ ID NO: 176467 - DNA, 80 bp, synthetic construct
  source 1..80: mol_type = other DNA
gtcatcattaccagctatgtcaagaagattttactttgatttggatatacaagtcaagaaagattatcttatagatggga

SEQ ID NO: 176468 - DNA, 80 bp, synthetic construct
  source 1..80: mol_type = other DNA
accacagtaattttgggctagtggtcgtgccagttagcccattaaaatactcaaccggtgcaaccactgcaatcccaatc

SEQ ID NO: 176469 - DNA, 80 bp, synthetic construct
  source 1..80: mol_type = other DNA
gcgacttaaccccattaccaaccaaaaacctgaccacttatgggtttggacatcagaacaaagccgtgtacgtggctgga

SEQ ID NO: 176470 - DNA, 80 bp, synthetic construct
  source 1..80: mol_type = other DNA
tgaaaaatcacttgattggctcagagggtgctgtggagaaaattctcaagaacttagtcaaactcatctctgcgctcgtt

SEQ ID NO: 176471 - DNA, 80 bp, synthetic construct
  source 1..80: mol_type = other DNA
agaggtttatgaacaagtggtctcactctaacgaccagctagacctaatgaggtacaagggctgcaaatttagcttctac

SEQ ID NO: 176472 - DNA, 80 bp, synthetic construct
  source 1..80: mol_type = other DNA
ctggtggaaacgactgcgccacagtacccggcgctggttgtttcgccgccggcgagctcgatacactccatctaactgtg

SEQ ID NO: 176473 - DNA, 80 bp, synthetic construct
  source 1..80: mol_type = other DNA
cgcctccgccgccgcagccgtcgataccgggtcaggtggcgtgggacaaccccaagacaccgccccgcgcggggcacgta

SEQ ID NO: 176474 - DNA, 80 bp, synthetic construct
  source 1..80: mol_type = other DNA
tgcgagtacgaggcctgcaaggcctgggacagacctgccagaacagacctaaacgatacccccttctacccctgggcccc

SEQ ID NO: 176475 - DNA, 80 bp, synthetic construct
  source 1..80: mol_type = other DNA
caattaacaacacagaggctaatatcagaaataaaaacatgtacactgtacagcttggtggtgaacctgatcccacaacc

SEQ ID NO: 176476 - DNA, 80 bp, synthetic construct
  source 1..80: mol_type = other DNA
aacatctttggtgccccctgggcttgacaaagtcaccaaagctcaattcccccaacccagtggggtaaaaaaaaaaaaaa

SEQ ID NO: 176477 - DNA, 80 bp, synthetic construct
  source 1..80: mol_type = other DNA
ggagacgctgtcctacggccacaccggagtcggatactgcccccagcagggcccctgctacacccacccggggccttacg

SEQ ID NO: 176478 - DNA, 80 bp, synthetic construct
  source 1..80: mol_type = other DNA
caactctggccttgtaaaagacgccagaatcatggtcaggtgtccctacaccgagccccaactagtaggggccacagaag

SEQ ID NO: 176479 - DNA, 80 bp, synthetic construct
  source 1..80: mol_type = other DNA
ctataaacaacccagccacaaacccaaaacgtaggatatactacattacattgactggtacttccaacaacaggatacta

SEQ ID NO: 176480 - DNA, 80 bp, synthetic construct
  source 1..80: mol_type = other DNA
gccccagaacccgtacctgcttttcccggagcaggcccctccaaaagtgcctatttttgacccctttggtcagaaaacag

SEQ ID NO: 176481 - DNA, 80 bp, synthetic construct
  source 1..80: mol_type = other DNA
accctacagttatttggagcaacaatggctggataaatttatataaacaatatataataaattgactgtgtaggttcaat

SEQ ID NO: 176482 - DNA, 80 bp, synthetic construct
  source 1..80: mol_type = other DNA
aatagaacaaatggaagcattcatagagcccaggccaagtgtgtttaagtgctttaccaacaaagtggtaaataatacta

SEQ ID NO: 176483 - DNA, 80 bp, synthetic construct
  source 1..80: mol_type = other DNA
tgtggaggtgcgtgacacagctaattaccaacccagtgatgatgcatggcttaattttgatggaactttattaggaaaca

SEQ ID NO: 176484 - DNA, 80 bp, synthetic construct
  source 1..80: mol_type = other DNA
acaccagaatggacacaaactcactttacaaactttaaaaaacaaacagacagcaactatggctactgtacctactgccc

SEQ ID NO: 176485 - DNA, 80 bp, synthetic construct
  source 1..80: mol_type = other DNA
actccggtgtgccccaccaaaagcagaaacccaaatcccaaaagcctgtccccaccaatcacatccagcgacagggaatc

SEQ ID NO: 176486 - DNA, 80 bp, synthetic construct
  source 1..80: mol_type = other DNA
ccatttgtcagtgtagggggtcgccataggcttcgggctccattttaggccttccggactaccaaaatggccgtctcagt

SEQ ID NO: 176487 - DNA, 80 bp, synthetic construct
  source 1..80: mol_type = other DNA
tgagcgacgagagctaccgcctgggccagggctccttcggcgaggtctggccgctcgatcgctatcgcgtggtcaaggtg

SEQ ID NO: 176488 - DNA, 80 bp, synthetic construct
  source 1..80: mol_type = other DNA
gctgcgaactaccaaaatggcggattcagtgacgtcatggccgccattttaagtaaggcggaacaggctgtcaccccgtg

SEQ ID NO: 176489 - DNA, 80 bp, synthetic construct
  source 1..80: mol_type = other DNA
ccccccagaaaataccttacagaccgccctttctacccctggatgcccagggagccccctcagtgtcgtgtcagctttaa

SEQ ID NO: 176490 - DNA, 80 bp, synthetic construct
  source 1..80: mol_type = other DNA
gtactacacagagcctagtatcgctttagaaacttgttggttggtcgttcagccatttcccatggtagacctggcagatg

SEQ ID NO: 176491 - DNA, 80 bp, synthetic construct
  source 1..80: mol_type = other DNA
cccctacccccccctcccttacggttgcctgagcccatccgccaccccagcaccccggggtgacgtggcaccccgcgtgc

SEQ ID NO: 176492 - DNA, 80 bp, synthetic construct
  source 1..80: mol_type = other DNA
atgtggcagtgcacagataatcgtacactaattctcatgaacttaaccacaacatacagtagaaactattattttcaatc

SEQ ID NO: 176493 - DNA, 80 bp, synthetic construct
  source 1..80: mol_type = other DNA
gaattattagtgctatgacaatcatgatcagaaacagttcagatacccccacagtgttagctactttagcactgttggga

SEQ ID NO: 176494 - DNA, 80 bp, synthetic construct
  source 1..80: mol_type = other DNA
taaacaaacacaacacctcaggcacaaaaaccaacacatacacaaactggacaagcacaaacccacacaataatacttta

SEQ ID NO: 176495 - DNA, 80 bp, synthetic construct
  source 1..80: mol_type = other DNA
tctgtgacgtcacattactcgttatctatgcaaccgcatgtgacttgcaatatccgttcggctcaccacaaactgacaac

SEQ ID NO: 176496 - DNA, 80 bp, synthetic construct
  source 1..80: mol_type = other DNA
aagggatggattgtcaatgtgagcagtgaagttcagatagaacgcaacttgaacagagccatgacaatattacaagccct

SEQ ID NO: 176497 - DNA, 80 bp, synthetic construct
  source 1..80: mol_type = other DNA
gccatgacaattttacaagccataaccacctttgctgcggttgccggtgttgtctatgtgatgtaccgtttgttcgcagg

SEQ ID NO: 176498 - DNA, 80 bp, synthetic construct
  source 1..80: mol_type = other DNA
cagtatatgtgggcaattacagggtggtcaatagacatcttgccacccatgcggattggcagaactgtgtatgggaagac

SEQ ID NO: 176499 - DNA, 80 bp, synthetic construct
  source 1..80: mol_type = other DNA
cctttatgaggctatagcagaagaacaatacagaaaaatacaaaagtactataacaccacatacgggcagtaccaaaggc

SEQ ID NO: 176500 - DNA, 80 bp, synthetic construct
  source 1..80: mol_type = other DNA
gtgcgaccctcccccctggtgcaacgccctcggagtccggcgctacgccttcggctgcgccggacacctcggcccccgcc

SEQ ID NO: 176501 - DNA, 80 bp, synthetic construct
  source 1..80: mol_type = other DNA
acaaggacctattactagttatgtaacacaacttggcaatgcatttgggacaggcttcacacaaactcttgaaaccaata

SEQ ID NO: 176502 - DNA, 80 bp, synthetic construct
  source 1..80: mol_type = other DNA
aacctggaaccactcgatcttaccacgagtgctggatttccctatgttactatggggataaaaaagagggacatcttgaa

SEQ ID NO: 176503 - DNA, 80 bp, synthetic construct
  source 1..80: mol_type = other DNA
gaagacgcaaataagtggttttgggaccaattacaaacaaaaaatgacttacattcagaatatggcaaggcaaacttatc

SEQ ID NO: 176504 - DNA, 80 bp, synthetic construct
  source 1..80: mol_type = other DNA
tcacgtgaccaactacgtcacgggcgccattttgttttacaaaatggccgacttccttcctcttttttaaaaaaaagcgg

SEQ ID NO: 176505 - DNA, 80 bp, synthetic construct
  source 1..80: mol_type = other DNA
tccgccacgtattccccgttttcacagagagaatgtcctccgtggctaaaagcgtagatgccgccgtagatgagtcgggc

SEQ ID NO: 176506 - DNA, 80 bp, synthetic construct
  source 1..80: mol_type = other DNA
gtttagagagctttttaggcagggctgcatgtgtacatgttataaccatagaaaacaaacttcccacaacaggccaaact

SEQ ID NO: 176507 - DNA, 80 bp, synthetic construct
  source 1..80: mol_type = other DNA
taagcgccgtggacacagtggcggacgcaacacgccgcagacgccgcgccgcgctgacggcccgcaaatctcccgcagtc

SEQ ID NO: 176508 - DNA, 80 bp, synthetic construct
  source 1..80: mol_type = other DNA
aatccaagttctcggcgtccagcgccagcatgacgcggttttttataagatccgcgtcaaaaagcacgttctcgcggcgc

SEQ ID NO: 176509 - DNA, 80 bp, synthetic construct
  source 1..80: mol_type = other DNA
catcacaagacatagcaaatgctgttgttgcttatggcgtttggccacattacctctctgctgaagatgcaaatgcaata

SEQ ID NO: 176510 - DNA, 80 bp, synthetic construct
  source 1..80: mol_type = other DNA
tagtgtgaatgatactatactgttcaggacaacatttggcaacctcttctcaaaattccacctaaacccaggtgtcgtta

SEQ ID NO: 176511 - DNA, 80 bp, synthetic construct
  source 1..80: mol_type = other DNA
ccccggcatgcgtggaataaacagtgcaaacggttgaagccacaattgtcgttatccgcgcacaaactacgcagagccta

SEQ ID NO: 176512 - DNA, 80 bp, synthetic construct
  source 1..80: mol_type = other DNA
tttccactcctgggactggcgacgtggctaccttagtgagacagctctcagacgcttgcgagaaaaaccgctcgactatg

SEQ ID NO: 176513 - DNA, 80 bp, synthetic construct
  source 1..80: mol_type = other DNA
gtcactaattcctcttacctgtttagggtattgtgcaattcttcagcctgcctattttcaatttgcctaaggtggcaatt

SEQ ID NO: 176514 - DNA, 80 bp, synthetic construct
  source 1..80: mol_type = other DNA
cttgcgaggcccaggggttgtgtgtggccgcgaaagtctgtgcgtccgcttcgcgatggtcgtagatggccttggtggcg

SEQ ID NO: 176515 - DNA, 80 bp, synthetic construct
  source 1..80: mol_type = other DNA
aatgccaatactatggaaatgtaccccatccctttagatgacggagggggctcaaagcctatctttagcatttccctcag

SEQ ID NO: 176516 - DNA, 80 bp, synthetic construct
  source 1..80: mol_type = other DNA
tgaacgcaagaaaatgggcgctcaagtttcaacgcagaagtccggatcgcacgagacaggaaatgtagcgactgagggct

SEQ ID NO: 176517 - DNA, 80 bp, synthetic construct
  source 1..80: mol_type = other DNA
ccaaaaacaggcagttgagaacatagtttcctgtggccccttcatgcccagagatcaggaagccaactcttgggacataa

SEQ ID NO: 176518 - DNA, 80 bp, synthetic construct
  source 1..80: mol_type = other DNA
atctgaatccacagtagagtctttctttgctagggctgcttgtgttacgataatgcaagttgataatttcaatgctacta

SEQ ID NO: 176519 - DNA, 80 bp, synthetic construct
  source 1..80: mol_type = other DNA
ccttccatgttacgcggcaggtgcgtaacgaaggggggccacagccggtggtcgtgcagcgcgttcacgtaagccgatag

SEQ ID NO: 176520 - DNA, 80 bp, synthetic construct
  source 1..80: mol_type = other DNA
tctggacggagggtaatgcaccccccaggatgtcaataccgttcatgagtgttggtaacgcatattgcaacttttatgat

SEQ ID NO: 176521 - DNA, 80 bp, synthetic construct
  source 1..80: mol_type = other DNA
tggatagtagtccccacctggagggtgccagggaggatggagaggtggcatagccttgtcaaatacctaaaatacagaac

SEQ ID NO: 176522 - DNA, 80 bp, synthetic construct
  source 1..80: mol_type = other DNA
gacagggtgttgcgaaacccgtccttgcggcgggaacgcggcgttgcggggacggagggctttatcggcgagaactcgcg

SEQ ID NO: 176523 - DNA, 80 bp, synthetic construct
  source 1..80: mol_type = other DNA
aacggtgcattggaacgcggattccccgtgccaagagtgactcaccgtccttgacacgatggagtcctctgccaagagaa

SEQ ID NO: 176524 - DNA, 80 bp, synthetic construct
  source 1..80: mol_type = other DNA
aagaaaacaaatgacaatgtgatattggttctcccacttgagatggataatactctcttctccaccaccttacttggtga

SEQ ID NO: 176525 - DNA, 80 bp, synthetic construct
  source 1..80: mol_type = other DNA
aggaagaaaaaattctaaaagtaggaaaatatgcaaaaataaaacatacccataccaatggagtcaaattattagcacag

SEQ ID NO: 176526 - DNA, 80 bp, synthetic construct
  source 1..80: mol_type = other DNA
gacaccccggctacatctggagtgaactcccaggaggtacctgcgctgaccgcagttgaaacaggcgccagtggacaagc

SEQ ID NO: 176527 - DNA, 80 bp, synthetic construct
  source 1..80: mol_type = other DNA
ttagaatcaaataccttgattctgctgttaattcggagcacatattctctgtagataacaactgtgaaactattgccaaa

SEQ ID NO: 176528 - DNA, 80 bp, synthetic construct
  source 1..80: mol_type = other DNA
tctttctgcgggtgtttgcacggagccttgtgcgcggacggggttggcggcagggctgagggtggtttgaggtttgcgtg

SEQ ID NO: 176529 - DNA, 80 bp, synthetic construct
  source 1..80: mol_type = other DNA
acatagtagagcaaaacaccccttttgggggctctctcagcaccaccagctggtccctaaaagtactgtacgaccagcac

SEQ ID NO: 176530 - DNA, 80 bp, synthetic construct
  source 1..80: mol_type = other DNA
agactaagatgcctgaaagaagagtagttgctcaaggtccagaggaagaatttggaagatcaattcttaaaaataatact

SEQ ID NO: 176531 - DNA, 80 bp, synthetic construct
  source 1..80: mol_type = other DNA
aaggcgcgggccggtaccaggcagcgtgaggagcgggaggaaaagaggcctccgggaggaaaaggtgagtactccaaatt

SEQ ID NO: 176532 - DNA, 80 bp, synthetic construct
  source 1..80: mol_type = other DNA
cgcggaaaagaggaagtccctaggggaccgcgggggaaacgacagacgaagtacggcacaacccgcgtcgaggacacacg

SEQ ID NO: 176533 - DNA, 80 bp, synthetic construct
  source 1..80: mol_type = other DNA
tttctaattacatatccaaagactataccattcaagactatacaagtaaggcattcgatagatccgatgacaagtacgat

SEQ ID NO: 176534 - DNA, 80 bp, synthetic construct
  source 1..80: mol_type = other DNA
cagactattattatgagacaatggcagccagatgttataaaaacctgctttattactggctggatgcccctcataatctg

SEQ ID NO: 176535 - DNA, 80 bp, synthetic construct
  source 1..80: mol_type = other DNA
accctgttccaccaaaaagaagtgttagaagccatagcccagggaggccccttcgcgtaccacagtgatcaaatgaaagt

SEQ ID NO: 176536 - DNA, 80 bp, synthetic construct
  source 1..80: mol_type = other DNA
gaacccccagactgtcagaaaatgcttaataaggggcataatcccactggtgctgtgcgggcacgagacttggaacagaa

SEQ ID NO: 176537 - DNA, 80 bp, synthetic construct
  source 1..80: mol_type = other DNA
ctacgcggtcgcctttgcctgggttctttccatcgtagccgctgtgcccaccgccgctacgggttcactggactaccgtt

SEQ ID NO: 176538 - DNA, 80 bp, synthetic construct
  source 1..80: mol_type = other DNA
ggaattatcctcgggttctcctcctccttctcccccctcctgatctccgcccgagagcaggtcggtcaggcgtctgcggg

SEQ ID NO: 176539 - DNA, 80 bp, synthetic construct
  source 1..80: mol_type = other DNA
attattctccagactctagcaccaaactaccaattacaatcacgattgctcctatgtgctgtgagtttaacggcttgagg

SEQ ID NO: 176540 - DNA, 80 bp, synthetic construct
  source 1..80: mol_type = other DNA
gtgcagatccaccaaagtcaaggaaagaggcgatgcttggtacccatgtgatatgggacataggactccaatcaagttgt

SEQ ID NO: 176541 - DNA, 80 bp, synthetic construct
  source 1..80: mol_type = other DNA
gttatagaagcaaatagtgttaatgatactgtagtatttagaagtacatttggtaacctattttctacattccacaaaaa

SEQ ID NO: 176542 - DNA, 80 bp, synthetic construct
  source 1..80: mol_type = other DNA
atagacaccattttggaagttaataacctcaccgagaatgaatccaatccaatgcagcgcctagtgataccagtcaaagt

SEQ ID NO: 176543 - DNA, 80 bp, synthetic construct
  source 1..80: mol_type = other DNA
ctgcgttgggttttgttttgtgtaagccaatgttgagcggcactgcacgggggaaagttgagatttacgttagcttgagg

SEQ ID NO: 176544 - DNA, 80 bp, synthetic construct
  source 1..80: mol_type = other DNA
aactatgtagatgaagttcttaatgaagtcttagttgttcccaatatcaatagtagtcatcccacaacatcaaactctgc

SEQ ID NO: 176545 - DNA, 80 bp, synthetic construct
  source 1..80: mol_type = other DNA
cggactagtaacgccagcgttagaacatctacctctaatcaacctggcaatgtttaccagcaaatcccggctgcagcgcc

SEQ ID NO: 176546 - DNA, 80 bp, synthetic construct
  source 1..80: mol_type = other DNA
actagacatgtaattaattacaagactagatctgagagcaccctagagtcattctttggtagatcagcatgcgtcactat

SEQ ID NO: 176547 - DNA, 80 bp, synthetic construct
  source 1..80: mol_type = other DNA
ggtcatggccagtatttagacatggatgttaaattcaccggtgaattaaacatccatgtcttatttctagccgaaagggg

SEQ ID NO: 176548 - DNA, 80 bp, synthetic construct
  source 1..80: mol_type = other DNA
aataagcttgtcaaatcaattaacttcaatcagaaaatttcaataatgggagctcaagttaccagacagcaaaccggttc

SEQ ID NO: 176549 - DNA, 80 bp, synthetic construct
  source 1..80: mol_type = other DNA
gaaatcttcgcaatcccagtagatgtagcctcacaaccactagctactacacttataggtgagattgctagctattatac

SEQ ID NO: 176550 - DNA, 80 bp, synthetic construct
  source 1..80: mol_type = other DNA
tggcaaaggtcctggagatactggcatgatgaacaagggatgtcacaaagttacaccaagtatagatatttgtgcttaat

SEQ ID NO: 176551 - DNA, 80 bp, synthetic construct
  source 1..80: mol_type = other DNA
acttaggcatccacacatttgataattcctcagaagatcaacaaataacgttaataactaactttttaaaaaacgccatt

SEQ ID NO: 176552 - DNA, 80 bp, synthetic construct
  source 1..80: mol_type = other DNA
aactagatacaatggacattttccgcatccccgttcagagtgggaaccatcagagcacacaggtctttggctttcaggtc

SEQ ID NO: 176553 - DNA, 80 bp, synthetic construct
  source 1..80: mol_type = other DNA
aaatgtgtgctacttcactgtacgttggccgtgggagtttcacttagcggtgtctacctcttaaggtcaccaagcactcc

SEQ ID NO: 176554 - DNA, 80 bp, synthetic construct
  source 1..80: mol_type = other DNA
gtccaaaacccaatcactacaagcaatgttgcccaatactctgcggtcaagctttagtattgcgtgacaggagaacctca

SEQ ID NO: 176555 - DNA, 80 bp, synthetic construct
  source 1..80: mol_type = other DNA
agtggcgcccgggtggccaactcccgaggcaggagctcaggcagggccctggcagcaccacctgacctgtctcctggcat

SEQ ID NO: 176556 - DNA, 80 bp, synthetic construct
  source 1..80: mol_type = other DNA
agacgacaaccacctagagtaccacgcaggcatgtacagcagcatattcctaggaccaggcaggagtaactgggaacaaa

SEQ ID NO: 176557 - DNA, 80 bp, synthetic construct
  source 1..80: mol_type = other DNA
aggataaaaagtttaaagaacaaaatcacaaattttatacaattcagatcaaaacaccgtacagaaccagtatgtgtcct

SEQ ID NO: 176558 - DNA, 80 bp, synthetic construct
  source 1..80: mol_type = other DNA
cagtcttgtattaacagccattcttcttgctgcggctgtggcgatcctgtacgccattttactcgtcttgctgagaggta

SEQ ID NO: 176559 - DNA, 80 bp, synthetic construct
  source 1..80: mol_type = other DNA
ggtgtccaaacagcgccagccagagaagtctttgctataccagtagatgttgcctctcaacctttagcaaccactcttat

SEQ ID NO: 176560 - DNA, 80 bp, synthetic construct
  source 1..80: mol_type = other DNA
atactttaataccaatcaataatacagaagccaatatcagaaataaaaacatgtacactgtacaacttggtggtgaacct

SEQ ID NO: 176561 - DNA, 80 bp, synthetic construct
  source 1..80: mol_type = other DNA
ggggttttatatcagaggacttggaaggaatagatgcaaccttagtagtacattccaatggattcactaacaccatgcta

SEQ ID NO: 176562 - DNA, 80 bp, synthetic construct
  source 1..80: mol_type = other DNA
gccctacaattgtcacaaccacaacggccagccctccctccagctgaacaatcagtgcccaataccaaccagagtactcc

SEQ ID NO: 176563 - DNA, 80 bp, synthetic construct
  source 1..80: mol_type = other DNA
gtgtacgtagtagtagctgattggtctgtttaaacagaccaatcagctactactacgtacacttcctggggtgtgtcctg

SEQ ID NO: 176564 - DNA, 80 bp, synthetic construct
  source 1..80: mol_type = other DNA
tgtatcaaaagcactagaacaccatacaggcctttttagcccagtactactcaccccaagtagactaaacccacagttcc

SEQ ID NO: 176565 - DNA, 80 bp, synthetic construct
  source 1..80: mol_type = other DNA
caatgctaggcacccatatcatttgggacgtcgggctacaatcatcatgcgtgctatgcataccttggatcagtcagaca

SEQ ID NO: 176566 - DNA, 80 bp, synthetic construct
  source 1..80: mol_type = other DNA
caccccccagggttgggcagaggagtacgcctgtgccaaggcgtgggacagacccgttcgcacaaactacacagacaccc

SEQ ID NO: 176567 - DNA, 80 bp, synthetic construct
  source 1..80: mol_type = other DNA
caaaccccagtactctgtcagtttcaaactcggctggaaataaaaaaagcctgctccactgtactaggccgtgggagttt

SEQ ID NO: 176568 - DNA, 80 bp, synthetic construct
  source 1..80: mol_type = other DNA
acttcaaacctaagcatattagagtctgggtgccacgaccaccacgcctgtgcccctacattaaatctagtaatgttaac

SEQ ID NO: 176569 - DNA, 80 bp, synthetic construct
  source 1..80: mol_type = other DNA
caaccataccaaacttgatcagcacagtcaggatatatttcaagcccaagcacgttagggcttggattcctagaccgccc

SEQ ID NO: 176570 - DNA, 80 bp, synthetic construct
  source 1..80: mol_type = other DNA
tgcggcgcggtgcggtgaggacggtgggcgcggaggacggcgccggcgaataaaagcgccgtgcggcgcgcacggcgaaa

SEQ ID NO: 176571 - DNA, 80 bp, synthetic construct
  source 1..80: mol_type = other DNA
ttcggtacgcttgttgagagacacaccgttcatatcccaaaatgcactactccaaaacgatccagccactgccattgtca

SEQ ID NO: 176572 - DNA, 80 bp, synthetic construct
  source 1..80: mol_type = other DNA
caaaacctttgggtggctgtggaagctagtgccagtaaatataccagaggaagacaaggaagcagaaaccagttgtctga

SEQ ID NO: 176573 - DNA, 80 bp, synthetic construct
  source 1..80: mol_type = other DNA
tggtttcacacgcatggtatccaatagaggaatcttcttactacccaaaacatgtacaatacaacatacttttgggtgag

SEQ ID NO: 176574 - DNA, 80 bp, synthetic construct
  source 1..80: mol_type = other DNA
acgcccaatcagatcccaaaaatacatggttaaaaattaccctaactttgaccctgacataactccacacagtaccagcc

SEQ ID NO: 176575 - DNA, 80 bp, synthetic construct
  source 1..80: mol_type = other DNA
ggtaaccccttactatatattactccttaactgcaagaaatggggtcgcaagtttccactcaacggtccgggtcacatga

SEQ ID NO: 176576 - DNA, 80 bp, synthetic construct
  source 1..80: mol_type = other DNA
atctactctcagcatcaaaggacccaaaagttatacagtactgtgaggagcaagggtggatagggcgcacaacctccaca

SEQ ID NO: 176577 - DNA, 80 bp, synthetic construct
  source 1..80: mol_type = other DNA
aaacactgggataggccccccagaagccgcctttcagacaccccctactacccctgggtcccaaacaactactctgtaac

SEQ ID NO: 176578 - DNA, 80 bp, synthetic construct
  source 1..80: mol_type = other DNA
tgtgcccttacatcaacagtagcaacgtgaacttcgacccaaaacctgtggcagaggtcaggtctagcatcatcaccacc

SEQ ID NO: 176579 - DNA, 80 bp, synthetic construct
  source 1..80: mol_type = other DNA
agaaaaaggtgaattcaccggcctaggagtatatgatcaaatttgtgttttacctacacatgctcaacccacagatagtg

SEQ ID NO: 176580 - DNA, 80 bp, synthetic construct
  source 1..80: mol_type = other DNA
aataacctaggattctctaccccagatgagaagttccaaaaagaccctccataccgctggatgggctatgaactgtggcc

SEQ ID NO: 176581 - DNA, 80 bp, synthetic construct
  source 1..80: mol_type = other DNA
gcactaaagcaagcaaagacgaatcctttaagtataactacagactggttatgcagagcccatacacagtacctgcctta

SEQ ID NO: 176582 - DNA, 80 bp, synthetic construct
  source 1..80: mol_type = other DNA
tccttttctggattgcccaatctaactctacaagcgatgtatgtaccaactggtgcacgaaaacccagcagtcaagactc

SEQ ID NO: 176583 - DNA, 80 bp, synthetic construct
  source 1..80: mol_type = other DNA
cttgcttcacggcaggcgaagtaagaagagccatccgaggggaaaagctattatcctgctgcaactacccccaagcccat

SEQ ID NO: 176584 - DNA, 80 bp, synthetic construct
  source 1..80: mol_type = other DNA
ccaattacaacaaaccaaagacaaagggcagcaatgaattagaacccaagcatttccttaagtatagagatgatatcaca

SEQ ID NO: 176585 - DNA, 80 bp, synthetic construct
  source 1..80: mol_type = other DNA
atgaaaagtatcatagcaatgtaaaagaactatcccataaatttggactgcccaaactagtagcaagacaaatagtaaac

SEQ ID NO: 176586 - DNA, 80 bp, synthetic construct
  source 1..80: mol_type = other DNA
ttggctcatttgtgctggcacaatggaccagagcaatatgctgattttgtcgggaaaatcagatccatcccgataggaag

SEQ ID NO: 176587 - DNA, 80 bp, synthetic construct
  source 1..80: mol_type = other DNA
gacacgatgcaaaccagacacgtgaaaaactaccactctcggtctgaatccaccattgagaacttcctgtgcaggtcagc

SEQ ID NO: 176588 - DNA, 80 bp, synthetic construct
  source 1..80: mol_type = other DNA
tcaagtatactaaaacaatcctatccaaccagggtcccttcaagggctttaatgaggtttccacagcttttagacacata

SEQ ID NO: 176589 - DNA, 80 bp, synthetic construct
  source 1..80: mol_type = other DNA
acccccgggccgtggaatgagggcctgagtctctttaagctgcacaaggagctgaagcgcgccccatccgaagcccggga

SEQ ID NO: 176590 - DNA, 80 bp, synthetic construct
  source 1..80: mol_type = other DNA
gcagcaaatacatacccatactaaggagacacaggtggtacccaaacctactaaaccaacaggcagtactagaagacatc

SEQ ID NO: 176591 - DNA, 80 bp, synthetic construct
  source 1..80: mol_type = other DNA
agaagaaagatttaatacctaaagacaaaaatcttataaagctcaaacaagctatggagaaatatggacttgacttacct

SEQ ID NO: 176592 - DNA, 80 bp, synthetic construct
  source 1..80: mol_type = other DNA
agtgagaatgttaagagacacacccatgatgaagcaggaagacacactacaaaataatgacccagtggagcaattcatac

SEQ ID NO: 176593 - DNA, 80 bp, synthetic construct
  source 1..80: mol_type = other DNA
ttccttaaaagaggttttagacctgacaagaaatatgaatttttaatccatcctgtttatgacatgaaagatgtttatga

SEQ ID NO: 176594 - DNA, 80 bp, synthetic construct
  source 1..80: mol_type = other DNA
taccctaagcacatccagtacaacatcctgttaggtgaggggccatgtgaaccaggcgactgtggtgggaaattgctttg

SEQ ID NO: 176595 - DNA, 80 bp, synthetic construct
  source 1..80: mol_type = other DNA
cggcgaaaagacagcgcacctggcaagaagagacccagacggagacggggtcggagtcctcggagaacccgcaggagacg

SEQ ID NO: 176596 - DNA, 80 bp, synthetic construct
  source 1..80: mol_type = other DNA
atgcaggactttggcatatacagccccttttacctcacacccaccagaatcagcctagactggcacacggcctacaccta

SEQ ID NO: 176597 - DNA, 80 bp, synthetic construct
  source 1..80: mol_type = other DNA
cagcaccacctctttttctcttaaagtactgtacgaccagcacaccaggggactaaacaagtggtcttttcccaacgacc

SEQ ID NO: 176598 - DNA, 80 bp, synthetic construct
  source 1..80: mol_type = other DNA
attgtctagcatgatcaccagcacgctaactgaaaaattattaaaaaacctcatcaagattgtgtccacactggtgataa

SEQ ID NO: 176599 - DNA, 80 bp, synthetic construct
  source 1..80: mol_type = other DNA
atacagaaccagtcccatagacggttggttgctcgcatacagagacgtgtcctacaatccattaaatgacaaaggagtag

SEQ ID NO: 176600 - DNA, 80 bp, synthetic construct
  source 1..80: mol_type = other DNA
aacatcactctacctcggctacaggggctgcctgtcatgaacacccctggtagtaaccagtaccttactgccgacaactt

SEQ ID NO: 176601 - DNA, 80 bp, synthetic construct
  source 1..80: mol_type = other DNA
tgacgtcacggcagccattttaagtagttgaggcggacggtggcgtgagttgaaaggtcaccatcagcgtcacctactaa

SEQ ID NO: 176602 - DNA, 80 bp, synthetic construct
  source 1..80: mol_type = other DNA
tttgctacagcctaccaagacgttacttacaaccccctaaacgacaaggcggttggcaacaagttctggtttcaatacaa

SEQ ID NO: 176603 - DNA, 80 bp, synthetic construct
  source 1..80: mol_type = other DNA
ggcgccggcgccggtaacgggagttacgctggtgttgacgggaacggagggtttttgggcgtactggtgacgagaggtgt

SEQ ID NO: 176604 - DNA, 80 bp, synthetic construct
  source 1..80: mol_type = other DNA
ttggctcggagcagagccgaacggcggtttctccacatgacagataacgtggtccagtacgtccatcctttgcattccgg

SEQ ID NO: 176605 - DNA, 80 bp, synthetic construct
  source 1..80: mol_type = other DNA
cagaactgtaatatactatgatgtctaagaagtgtttgcggttatttccatggatgacaattttgttttgcataccaaaa

SEQ ID NO: 176606 - DNA, 80 bp, synthetic construct
  source 1..80: mol_type = other DNA
gaatttaccaaaggtatacgcagtgtatctgctggtcgggcactgtatataccagcttatgaagttcttgagcatgaatg

SEQ ID NO: 176607 - DNA, 80 bp, synthetic construct
  source 1..80: mol_type = other DNA
aaacaaatattaaattaacctatatttcatttatatttagacgtccctactgctgaagtcatcggaaacaatctcggaag

SEQ ID NO: 176608 - DNA, 80 bp, synthetic construct
  source 1..80: mol_type = other DNA
gcaggtaagcagatcttcggatttcagctgcagcccggagctagttcagttttcaagcgcacactccttggagagatttt

SEQ ID NO: 176609 - DNA, 80 bp, synthetic construct
  source 1..80: mol_type = other DNA
ctaagacctgttatagttcaaggtcccaacacagaatttgccctatcattattgaggaagaatgtagtgaccattactac

SEQ ID NO: 176610 - DNA, 80 bp, synthetic construct
  source 1..80: mol_type = other DNA
tgaatagccaggaagtaccagccctcactgcagttgaaaccggagcttcaggacaagctatccccgcggatgtgattgag

SEQ ID NO: 176611 - DNA, 80 bp, synthetic construct
  source 1..80: mol_type = other DNA
acataactaacttggcattcacctatggcagctggggcgttgcgatgctgctgtttgccgccgtgatggtgctcgttgat

SEQ ID NO: 176612 - DNA, 80 bp, synthetic construct
  source 1..80: mol_type = other DNA
aaagtaaaacatgggttgaaacatcgaaaggatggtggtggaaactaccagatgcacttaaagatatgggtatttttggt

SEQ ID NO: 176613 - DNA, 80 bp, synthetic construct
  source 1..80: mol_type = other DNA
ctgcaaagtctgccagcagctaagaaaaaaccaactgctatgagtcgctggtgtcctcctgtacacggcgttaatggcag

SEQ ID NO: 176614 - DNA, 80 bp, synthetic construct
  source 1..80: mol_type = other DNA
agatagtaagtaaagtcactacaaaagaaaagaacttatacagtatacacacaccaactaaaaccaaattacagccaagt

SEQ ID NO: 176615 - DNA, 80 bp, synthetic construct
  source 1..80: mol_type = other DNA
aacgggtgtgaagccatatgtttgacaaggtgtgaagagccccgtgtgcttgctttgagtcctccggcccctgaatgtgg

SEQ ID NO: 176616 - DNA, 80 bp, synthetic construct
  source 1..80: mol_type = other DNA
atcacagagaagctacttaaaaatttaattaaattagtgagcagtttggtaatcattgtcagaaattatgaggataccac

SEQ ID NO: 176617 - DNA, 80 bp, synthetic construct
  source 1..80: mol_type = other DNA
aagtctcatctcaaaaggtcggagcccacgagaactctaatagggcgtatggtggctccaccataaattacaccactatc

SEQ ID NO: 176618 - DNA, 80 bp, synthetic construct
  source 1..80: mol_type = other DNA
agaggtggatagaattagataaagcagaagaagagggaggggcatcccatgatccagtgtactctatgaatgggacctta

SEQ ID NO: 176619 - DNA, 80 bp, synthetic construct
  source 1..80: mol_type = other DNA
cactcccggtactctgcgaagagctgctctggccggttgaaggcttccacggcccgctgctgaggattgcgcataacaaa

SEQ ID NO: 176620 - DNA, 80 bp, synthetic construct
  source 1..80: mol_type = other DNA
gaggtacgccacgcggtgcctaacgcggtataccacacccgtacggtctgcagtgcggcgtacaacgtgtggaaaacgcg

SEQ ID NO: 176621 - DNA, 80 bp, synthetic construct
  source 1..80: mol_type = other DNA
ccactacctcactacatgggaccctaataatccaaaccacattaatcctacatactcagacgcccgctacccatattatg

SEQ ID NO: 176622 - DNA, 80 bp, synthetic construct
  source 1..80: mol_type = other DNA
gacgcgtcatgttatacaaacgcggtcgcgttctgaaagcacaatagagtcattctttgcaagaggagcatgtgtcacca

SEQ ID NO: 176623 - DNA, 80 bp, synthetic construct
  source 1..80: mol_type = other DNA
aaacatccttactaatggatcaaatcaaactttcacggtcataaattactacaaagatgcagccagttcatcatcagctg

SEQ ID NO: 176624 - DNA, 80 bp, synthetic construct
  source 1..80: mol_type = other DNA
cccagaacccagaaagtctcgtccaagtcgtaccaggagtcttccccagggagacgtggcggtttccaatcctcatcgtc

SEQ ID NO: 176625 - DNA, 80 bp, synthetic construct
  source 1..80: mol_type = other DNA
gccatctctggtctcaagtatgggctcacaataacacctgctgacaaatctgaccattttgtgaaggttgattggagtaa

SEQ ID NO: 176626 - DNA, 80 bp, synthetic construct
  source 1..80: mol_type = other DNA
tcttagaagaagagctagactaaagagacgcaaaaaaatagtaataactcagtggaacccctccgtggtaaaaaaatgtg

SEQ ID NO: 176627 - DNA, 80 bp, synthetic construct
  source 1..80: mol_type = other DNA
acgtcatggcaaccaacaccgagtcgaagacatcctatgtctcatatgtcaatgccaacccaggtgaagcgggaggtact

SEQ ID NO: 176628 - DNA, 80 bp, synthetic construct
  source 1..80: mol_type = other DNA
agataacaaacattatgcatatggccagagtagattcatttatgcctatcaataacactagtgaacgggttgatgtgccc

SEQ ID NO: 176629 - DNA, 80 bp, synthetic construct
  source 1..80: mol_type = other DNA
cttacacctatgaggcttacattagacatccagaagagtttggttggaagtgaggcctgtcagaggaagaggttaagcag

SEQ ID NO: 176630 - DNA, 80 bp, synthetic construct
  source 1..80: mol_type = other DNA
ccccagattggccgacggggtcgactttgatgttgtcgttatgtccaaacacaataacggcaacgtgactgaaccttggg

SEQ ID NO: 176631 - DNA, 80 bp, synthetic construct
  source 1..80: mol_type = other DNA
attggaagtggagaactttaatgctactgaagcttcagacaaaaagaggcagttcactgtgtggcctataacttatacaa

SEQ ID NO: 176632 - DNA, 80 bp, synthetic construct
  source 1..80: mol_type = other DNA
ccagtgtccaagatgattcaactagacaaaacaccgacacaccgactttgacacaccaaattatgtacgtacccccgggg

SEQ ID NO: 176633 - DNA, 80 bp, synthetic construct
  source 1..80: mol_type = other DNA
acaacaacatctaacaacggatactcacagcactggacaacacccaccacagacgcctacgaatatcacttaggcatgtt

SEQ ID NO: 176634 - DNA, 80 bp, synthetic construct
  source 1..80: mol_type = other DNA
cctgaccaaaaccttgataaatgcaaagaaatacttacaaacaacatgaaaaactggcataaaaaagtaaagtcagaaaa

SEQ ID NO: 176635 - DNA, 80 bp, synthetic construct
  source 1..80: mol_type = other DNA
cacatcattaccactgacaagggagaattcaacttactgggcatatattccaattgtgctgtagtaccaacacatgctga

SEQ ID NO: 176636 - DNA, 80 bp, synthetic construct
  source 1..80: mol_type = other DNA
tactgtacattcccagatcatcagaaacccctgccacgacgaacaagttgcccatgcccatcgacagcctagagcagtac

SEQ ID NO: 176637 - DNA, 80 bp, synthetic construct
  source 1..80: mol_type = other DNA
gtaacagcacaagtgaggggagcacagtcccagagatattaaacgaaactacttcatgcataaccaacaacagctgctca

SEQ ID NO: 176638 - DNA, 80 bp, synthetic construct
  source 1..80: mol_type = other DNA
cagcaagtgttagaggacctcagcagatcagggccctttgcacccaagacaaacgtccctagtgccaccctagtaatgaa

SEQ ID NO: 176639 - DNA, 80 bp, synthetic construct
  source 1..80: mol_type = other DNA
tttatatttacctacaacagaaagccaccatttactgacagccagctaacaggagctagcctacacccaggaatactaat

SEQ ID NO: 176640 - DNA, 80 bp, synthetic construct
  source 1..80: mol_type = other DNA
acttctacgatggttttgcccgtgtgcctataaaggatgagtcagctgattcaggagacacatattacgggttggtgtcc

SEQ ID NO: 176641 - DNA, 80 bp, synthetic construct
  source 1..80: mol_type = other DNA
ttcattatagttaaggaattatttccaacgcggacgtttgttagtgacagcgttttcttgtacatgcggttcattactat

SEQ ID NO: 176642 - DNA, 80 bp, synthetic construct
  source 1..80: mol_type = other DNA
gaattcaatggactgagaaacatcactctgccacgactgcaaggattgcctgtcatgaacacccctggtagtaaccaata

SEQ ID NO: 176643 - DNA, 80 bp, synthetic construct
  source 1..80: mol_type = other DNA
ccactaacagacaaaggcataggaaacagaatatggatagactatctaagcaaagacaacacaaagtacaaccccacaca

SEQ ID NO: 176644 - DNA, 80 bp, synthetic construct
  source 1..80: mol_type = other DNA
catacagtataacctacttataggtgaaggccattgtgttcctggtgactgtggtggtaaactactatgcaaacatggtg

SEQ ID NO: 176645 - DNA, 80 bp, synthetic construct
  source 1..80: mol_type = other DNA
aaagagaattcaaaaatgaagcaccctatgatggtcagttggaacacattatatcacagatggcttatatcactgggtct

SEQ ID NO: 176646 - DNA, 80 bp, synthetic construct
  source 1..80: mol_type = other DNA
caactgtagatgtgtaattagaagcccctacacagtaccccaactactagaccacaacaaccctcttagaggctatgtac

SEQ ID NO: 176647 - DNA, 80 bp, synthetic construct
  source 1..80: mol_type = other DNA
ctccgttaggatgctgcgggacacccccttcatcgaacagaagcaactgctacagggggatgtggaggaagctgtaaaca

SEQ ID NO: 176648 - DNA, 80 bp, synthetic construct
  source 1..80: mol_type = other DNA
cttgggtcctcaaggtaggagagataatcggaggccgccgaggccaccttgtccctgatgtccgccgtacacctgcgcac

SEQ ID NO: 176649 - DNA, 80 bp, synthetic construct
  source 1..80: mol_type = other DNA
tgaaatacaaattcaaattcacctggggcggcaatatggtctcccaacagacaatcagaaacccctgcaagacggacgga

SEQ ID NO: 176650 - DNA, 80 bp, synthetic construct
  source 1..80: mol_type = other DNA
gcgccggacatctcggaccccccctccacccgaaacgcttgcgcgtttcggaccttcggcgtcggtgtggtcggaggctt

SEQ ID NO: 176651 - DNA, 80 bp, synthetic construct
  source 1..80: mol_type = other DNA
ataaattactttaaggatgcagcatccaatggtgcatctcgcctggatttttctcaagacccaagtaagttcacagatcc

SEQ ID NO: 176652 - DNA, 80 bp, synthetic construct
  source 1..80: mol_type = other DNA
ccataaccaccagagaagggtgggaggacgagtacacaaccgccagcatctggggccggcccgttcgctccttctacaca

SEQ ID NO: 176653 - DNA, 80 bp, synthetic construct
  source 1..80: mol_type = other DNA
acaccattaatccacatccctggcgaattcacttccctattagacctatgccgaatagaaaccatactggaagtcaacaa

SEQ ID NO: 176654 - DNA, 80 bp, synthetic construct
  source 1..80: mol_type = other DNA
taaatgttgtccattcatatgtggtaaagctgtgtcatttaaagatagaaatacatgccaagaatactcacttagtcaaa

SEQ ID NO: 176655 - DNA, 80 bp, synthetic construct
  source 1..80: mol_type = other DNA
tattctacccccagacacaacagggacagtgtacctattggcttttgtcagtgcgtgtccagatttcaaattaaggctta

SEQ ID NO: 176656 - DNA, 80 bp, synthetic construct
  source 1..80: mol_type = other DNA
gggcacaaatgagcaaggcagaatccacccccacacaaagagaaaagcccacaccggcccagacaggactccaaggagcc

SEQ ID NO: 176657 - DNA, 80 bp, synthetic construct
  source 1..80: mol_type = other DNA
ggcaggtgggggcctgacgcggatggccaacctgctgtacgacagccccgcaaccctggctgacctggtcccggactttg

SEQ ID NO: 176658 - DNA, 80 bp, synthetic construct
  source 1..80: mol_type = other DNA
atggcagacatcttccaacccgtcagtattctacacctatggggagtcaactgcaagaatatcagtgccctatgtgggaa

SEQ ID NO: 176659 - DNA, 80 bp, synthetic construct
  source 1..80: mol_type = other DNA
ggactcttccttcattattaacgtaggggtctcccagaatcgctgaaaacgggagcgcggcagccgcgacagtaccagtt

SEQ ID NO: 176660 - DNA, 80 bp, synthetic construct
  source 1..80: mol_type = other DNA
caaaacaaacaaagataaaaagtgggctgggtgcagtggctcaggcctgttaatcccagcaatttgggaggcagaggtgg

SEQ ID NO: 176661 - DNA, 80 bp, synthetic construct
  source 1..80: mol_type = other DNA
agattcagaacaaaatggaggaattgaagaaacagccttttagacaaaaggccagggaggatgctaaacaaagagttagc

SEQ ID NO: 176662 - DNA, 80 bp, synthetic construct
  source 1..80: mol_type = other DNA
ctcagagaaagttctcatcaacggatttgccacaaatgttaaagataaatggaaattggtagacccagacaacttaaatt

SEQ ID NO: 176663 - DNA, 80 bp, synthetic construct
  source 1..80: mol_type = other DNA
ctcaagacactcaacaggaattagataatgccatatacactatttgtgacattggttcagacaacagttttgagttaact

SEQ ID NO: 176664 - DNA, 80 bp, synthetic construct
  source 1..80: mol_type = other DNA
cttaaccctgcagctaaggcacacaacccagtgtgaacttagtcgtaatgagcaattgcgggacgggaccaactactttg

SEQ ID NO: 176665 - DNA, 80 bp, synthetic construct
  source 1..80: mol_type = other DNA
gtgatattgggcatgtggtcatgcaatacatgtatgtaccgcctggtgcacccacacctgagaaaagaaatgatttcaca

SEQ ID NO: 176666 - DNA, 80 bp, synthetic construct
  source 1..80: mol_type = other DNA
ctaatggttgcagtcatacctgagcaccagttgtcctatatagggggagatggtacgaatgtcaaatacaaacacaccca

SEQ ID NO: 176667 - DNA, 80 bp, synthetic construct
  source 1..80: mol_type = other DNA
acgctgtaactgaaggtgtatctaagattggaaatgattcgggtggtgagattcttacaaaggtagcagatgatgcttca

SEQ ID NO: 176668 - DNA, 80 bp, synthetic construct
  source 1..80: mol_type = other DNA
catgtacagggttgagttgagtgacactgcacgccttgaagatccgatcctgtgtctctcgttgtctcccgcttcagacc

SEQ ID NO: 176669 - DNA, 80 bp, synthetic construct
  source 1..80: mol_type = other DNA
cggtctcaattttactcattctgggaaatatagctttcgatgttacaagtatgatcatccctctgaacaaaatcaaaact

SEQ ID NO: 176670 - DNA, 80 bp, synthetic construct
  source 1..80: mol_type = other DNA
gcgcgttgcgaggccggggacggtggtgtggacgggaggtgtcgacggagacacggagtgacgtcgggtacggtgacggt

SEQ ID NO: 176671 - DNA, 80 bp, synthetic construct
  source 1..80: mol_type = other DNA
aaacattccacacaggtggatatatcaatacaggacttaaagaaggcaaaaaaaacacaaacccactctcccaagaatta

SEQ ID NO: 176672 - DNA, 80 bp, synthetic construct
  source 1..80: mol_type = other DNA
agaagcccccaaaagtagaggctcaggccatgcgcgccctgtcaccaggcctgccaaagagccagatctaaggccgggag

SEQ ID NO: 176673 - DNA, 80 bp, synthetic construct
  source 1..80: mol_type = other DNA
acgtctttaatgacagtaataatacaaaattaaaagcattctttaaagcagcattccaagatgggtacggtacaacacta

SEQ ID NO: 176674 - DNA, 80 bp, synthetic construct
  source 1..80: mol_type = other DNA
cacagtgtgacatattaggctttgtgtctgcctgtaatgatttctctgtgcggatgttaaaagacacaccatttatctca

SEQ ID NO: 176675 - DNA, 80 bp, synthetic construct
  source 1..80: mol_type = other DNA
ctgtagcgctcgttatccgcattggtactacgcgatggctagtatcatcctggaagtctcttggttggtcgctcagcgtg

SEQ ID NO: 176676 - DNA, 80 bp, synthetic construct
  source 1..80: mol_type = other DNA
actaatggataaaagtaccagacagcgctttacattggatgaaattaccaccctaatcatcaatgaaaagaacaggagag

SEQ ID NO: 176677 - DNA, 80 bp, synthetic construct
  source 1..80: mol_type = other DNA
tggacacctcacagagaggctgtgtaatacaacacatgtctttaaagatacagcttatgatgtaagaggtggcatgccat

SEQ ID NO: 176678 - DNA, 80 bp, synthetic construct
  source 1..80: mol_type = other DNA
ttttgttgatttttacccttgtatcagagtggtggatgcttctggttcctggtcttctctgtgcacaaaaaggggccaat

SEQ ID NO: 176679 - DNA, 80 bp, synthetic construct
  source 1..80: mol_type = other DNA
tcaatagcgacggtggaagtggcgggcacgcgggttccaatcagcagcagcaacaacgttacgatgaactgcgggatgcc

SEQ ID NO: 176680 - DNA, 80 bp, synthetic construct
  source 1..80: mol_type = other DNA
gaggtacagggtcagtacggactgcgcgtacctaccacgcgtttcgtagaacagttgcgcgagctggttcgccgcgatcg

SEQ ID NO: 176681 - DNA, 80 bp, synthetic construct
  source 1..80: mol_type = other DNA
aacagcacatatgacttcagcaactatagtactccaacaaactatgctaacacatacaccaaatggtcagaagacaaaca

SEQ ID NO: 176682 - DNA, 80 bp, synthetic construct
  source 1..80: mol_type = other DNA
aaaccaaaagcactttctcgacagatgagctggagcagacccgtgcacgatgagcgcggaatacagcgcaactggttcga

SEQ ID NO: 176683 - DNA, 80 bp, synthetic construct
  source 1..80: mol_type = other DNA
aggaaggcgggcaccccggcgcgctcggccgcctccactccggggagcacgacggcgctgcccagacccttgccctggtg

SEQ ID NO: 176684 - DNA, 80 bp, synthetic construct
  source 1..80: mol_type = other DNA
aaagcacacacactaacaggcagcaaatacttaaactggaaaacaggaatatatagtggaatatttttatgcaatgaaag

SEQ ID NO: 176685 - DNA, 80 bp, synthetic construct
  source 1..80: mol_type = other DNA
cttctgtgctctctgcgtactgcatcgaaagcacttaccctctcgatgagctggtccagacccatacacaatgctttggc

SEQ ID NO: 176686 - DNA, 80 bp, synthetic construct
  source 1..80: mol_type = other DNA
cataataatatgtggactgaacagaaccagccacaactccaccacacacgcagaggactacactacagggaaccaggcct

SEQ ID NO: 176687 - DNA, 80 bp, synthetic construct
  source 1..80: mol_type = other DNA
ggagagccatcaggggagaaaagatattgtcccactgcaactacccatcagctcatacaggccaggtaccaagtttacag

SEQ ID NO: 176688 - DNA, 80 bp, synthetic construct
  source 1..80: mol_type = other DNA
cactggagccttttatacaaaacaaaacccagtgtttggaatgtgtaaatacaaaccaactaaaaacattatggacaaag

SEQ ID NO: 176689 - DNA, 80 bp, synthetic construct
  source 1..80: mol_type = other DNA
agctacgttcaggttcaccacaaacaataaacagattacccattacaatatctatcgcaccagataaatcagaattttct

SEQ ID NO: 176690 - DNA, 80 bp, synthetic construct
  source 1..80: mol_type = other DNA
gagcctccctcctactaccagggctacaaagtgtctttcaaactagggttccacccagacaagcatgtgtgaaccccgcc

SEQ ID NO: 176691 - DNA, 80 bp, synthetic construct
  source 1..80: mol_type = other DNA
ataatactgacacttacatcaatagtgaaaatatgtattctgttgaattgcagtcatcaatcaacacatcagagaagatc

SEQ ID NO: 176692 - DNA, 80 bp, synthetic construct
  source 1..80: mol_type = other DNA
gccttcatttttgtctgacgttgatgccagcgacgttaacaagacaacaaaaccggacacatcagcatgtagattctaca

SEQ ID NO: 176693 - DNA, 80 bp, synthetic construct
  source 1..80: mol_type = other DNA
tcccttggacttgacaataattataactggggctactgatgttgatggaatggcttggttcactcccgttgggttggcag

SEQ ID NO: 176694 - DNA, 80 bp, synthetic construct
  source 1..80: mol_type = other DNA
cctgcgatttagccgcaacccgtcactcttttttagcggcgacgcgctcaactgtccgcttctcaatgagcccaacgtgt

SEQ ID NO: 176695 - DNA, 80 bp, synthetic construct
  source 1..80: mol_type = other DNA
tgccatacagaggtgagggagtggatctcaaagaagggaccacttcaccactgaccccagtgtccagcataacaacgtac

SEQ ID NO: 176696 - DNA, 80 bp, synthetic construct
  source 1..80: mol_type = other DNA
cgctatcgacagagtgtctaaacaaccaaaagatgatgcagactatcctaacccatacaaaaggcctagatattttccac

SEQ ID NO: 176697 - DNA, 80 bp, synthetic construct
  source 1..80: mol_type = other DNA
aggcctctttcagctctatgccacaggggctaacctaacaaacccctggctcaggtcaggcacaaacagccctgtagtgg

SEQ ID NO: 176698 - DNA, 80 bp, synthetic construct
  source 1..80: mol_type = other DNA
caccacaaactgacaccaattgcattaacttcctggtgttagatgacatctactacaagtttctagataataagcctaaa

SEQ ID NO: 176699 - DNA, 80 bp, synthetic construct
  source 1..80: mol_type = other DNA
cccgcctcagagatgccacccagtgtgccacctttgtggtggcctgctccattcttcagggatcccccacttatgattcc

SEQ ID NO: 176700 - DNA, 80 bp, synthetic construct
  source 1..80: mol_type = other DNA
tgtattgtcactacacagaatggaaaatttacaggcttaggtatatatgacaggacactcataataccaacacatgctga

SEQ ID NO: 176701 - DNA, 80 bp, synthetic construct
  source 1..80: mol_type = other DNA
acaaacgaacaacccttgtgtaacattccaagttctgcattctgtgtatgacaaagcattaggcattaacacatttggta

SEQ ID NO: 176702 - DNA, 80 bp, synthetic construct
  source 1..80: mol_type = other DNA
cacagtaagcacaaataacatggggtcattatgttctagaatagtgacagagaaacacattcataatatgcatattatga

SEQ ID NO: 176703 - DNA, 80 bp, synthetic construct
  source 1..80: mol_type = other DNA
gttgtcccattaaccaatcccacgggaatgtctacaacaatacctataacagtaaccattgcacccatgaacacagaatt

SEQ ID NO: 176704 - DNA, 80 bp, synthetic construct
  source 1..80: mol_type = other DNA
ggtacacaggcagatgacacacggcaacccagtgatgacaattggttgaattttgatggtacacttttaggtaatttgtt

SEQ ID NO: 176705 - DNA, 80 bp, synthetic construct
  source 1..80: mol_type = other DNA
aaagaccagttattgttcaatgattggaaaattagtttatctagtttagttcaacttagaagaaaattagaactgttcac

SEQ ID NO: 176706 - DNA, 80 bp, synthetic construct
  source 1..80: mol_type = other DNA
cagcttcgcaggaagatggaaatgtttacatacttacggtacgacgtggaagtcacatttgtcataaccagctcgcagga

SEQ ID NO: 176707 - DNA, 80 bp, synthetic construct
  source 1..80: mol_type = other DNA
aagtacaaattctatttcacctggggaggtaacatgatgttccaacagacgatcaaaaacccgtgcaagacggacggacg

SEQ ID NO: 176708 - DNA, 80 bp, synthetic construct
  source 1..80: mol_type = other DNA
tggcttaaaagacctgtaagaaccttttttgatgatccacctttttacccatggcttgtacctgaaccacttgtaaactt

SEQ ID NO: 176709 - DNA, 80 bp, synthetic construct
  source 1..80: mol_type = other DNA
cccccatctaatgatgtccagttcccttctcccaccctgtacaccccgacccaaagggactcaatggcattcagatttct

SEQ ID NO: 176710 - DNA, 80 bp, synthetic construct
  source 1..80: mol_type = other DNA
tagcttaggcatgactctaaatttcccagtagcaaggatagaaccagtaaaagtccagttaaagcctgaaaaagatgggc

SEQ ID NO: 176711 - DNA, 80 bp, synthetic construct
  source 1..80: mol_type = other DNA
tcatctgtaacatcattggcaacgctacctttgccatgtttcagaaacaactctggcgcatcgggcttcccatacaatcg

SEQ ID NO: 176712 - DNA, 80 bp, synthetic construct
  source 1..80: mol_type = other DNA
gagcctcaggagggtccactccatagggttgaaccaggagagggaggattgggctccgccccgatatacctagtggttgg

SEQ ID NO: 176713 - DNA, 80 bp, synthetic construct
  source 1..80: mol_type = other DNA
atatctacgcaatgttacacaatattacacaaacacatcgtgttatccgcaattcacctgcataaacgaaactaagggtc

SEQ ID NO: 176714 - DNA, 80 bp, synthetic construct
  source 1..80: mol_type = other DNA
tggaagacctgtttggtgccaacttaaacagatacgcatggcatcgcgggggctagacctctggctggatgagcacgtgt

SEQ ID NO: 176715 - DNA, 80 bp, synthetic construct
  source 1..80: mol_type = other DNA
cgagcaagatatccccaaaagctacgcgcttcgcgctgcgccggacgcctcggaccccccctcgacccgaatcgctcgcg

SEQ ID NO: 176716 - DNA, 80 bp, synthetic construct
  source 1..80: mol_type = other DNA
aacagactctttggaggttttgtttcaaggccccacatataaagacctagaaatagaaattcataacacaccacccccag

SEQ ID NO: 176717 - DNA, 80 bp, synthetic construct
  source 1..80: mol_type = other DNA
acgacctacgaccctacctcacgcagcatcagagccacacgcaccccacggagactcacacgttacataaccttaagctc

SEQ ID NO: 176718 - DNA, 80 bp, synthetic construct
  source 1..80: mol_type = other DNA
atatggatatgtagaattttgtgcaaaaagtacaggagaccaaaacatacacatgaatgccaggctactaataagaagtc

SEQ ID NO: 176719 - DNA, 80 bp, synthetic construct
  source 1..80: mol_type = other DNA
ccactatatgctagtgaaaacaaaagggttagtgacatgcaaaaacaactcaagcagcttacagcttaccaaagaaccca

SEQ ID NO: 176720 - DNA, 80 bp, synthetic construct
  source 1..80: mol_type = other DNA
gtacaagccagctgccacacgagcccgtgatagacctccatgagcagcttgaagcgtttcaaccactggaagagctgctg

SEQ ID NO: 176721 - DNA, 80 bp, synthetic construct
  source 1..80: mol_type = other DNA
caggttacacctagaaaacatgttcgcactcacaggagttcccggtggggctaaaactggcactgtcatttgcaaaatca

SEQ ID NO: 176722 - DNA, 80 bp, synthetic construct
  source 1..80: mol_type = other DNA
agccattttatgtaaggcgtagatggctgaccctgaggttaaagttcaagggtcagctaccgctttacacgaaatggcgg

SEQ ID NO: 176723 - DNA, 80 bp, synthetic construct
  source 1..80: mol_type = other DNA
cagaagtgactttagtcccatgcatagcagcaaaaggtgatggcataggccatgttgttatgcaatacatgtatgttcct

SEQ ID NO: 176724 - DNA, 80 bp, synthetic construct
  source 1..80: mol_type = other DNA
tcttcaatgcctgcatgtaaatctccgtccagcatccaggtaaatcgtcctgaaactctgagaggtccacaagcacaaac

SEQ ID NO: 176725 - DNA, 80 bp, synthetic construct
  source 1..80: mol_type = other DNA
cactgccatcgagaaatacctaaaggatcaggcaagtctaaatgcatggggatgtgcctttagacaggtctgccatacta

SEQ ID NO: 176726 - DNA, 80 bp, synthetic construct
  source 1..80: mol_type = other DNA
aaagggtggattgtaatacacccatcaaatgaattgttagtggaaaaacacattagcagggcttttatcactctacaggc

SEQ ID NO: 176727 - DNA, 80 bp, synthetic construct
  source 1..80: mol_type = other DNA
cgcacgaggagctggttctttgtccgcccgagatggaggagcgtctagcgccgttgttgcagagtgccacgcgcggtgat

SEQ ID NO: 176728 - DNA, 80 bp, synthetic construct
  source 1..80: mol_type = other DNA
aaggtactagtacagggtggtggtggaaattacccgacgcccttaaccaaactgggatgtttgggcaaaatgtacaatac

SEQ ID NO: 176729 - DNA, 80 bp, synthetic construct
  source 1..80: mol_type = other DNA
gaaaaaactctaccattcgtcaccgctgttacttatattgagtggcaggacagaccaatcagagtatactacgtacactt

SEQ ID NO: 176730 - DNA, 80 bp, synthetic construct
  source 1..80: mol_type = other DNA
cgagcacctgtggttccaatccgttattaacagccattctgcttgctgcggttgtggcgatcctctactgcattttactg

SEQ ID NO: 176731 - DNA, 80 bp, synthetic construct
  source 1..80: mol_type = other DNA
ggcgttcagggggtgggggggtcgggaggcgctgcgcgggcgcagccatgcgtaaccgtaagaaggggggctggcgggcg

SEQ ID NO: 176732 - DNA, 80 bp, synthetic construct
  source 1..80: mol_type = other DNA
aatgatgcgagcaatgccatcgagagagcgatggtgcgagtgggggatactatggccagcgggcgagccaactcacaaca

SEQ ID NO: 176733 - DNA, 80 bp, synthetic construct
  source 1..80: mol_type = other DNA
ttatcatcaatcacccacagagtcgccagtccatggtctctcggtaatgcgtgtccagatacgcgttggccagtataaag

SEQ ID NO: 176734 - DNA, 80 bp, synthetic construct
  source 1..80: mol_type = other DNA
tcgggctcgggactggccgggctatgggcaaggctcttaaaaagccatgtttctcggtaaattatacagaaagaaaaggc

SEQ ID NO: 176735 - DNA, 80 bp, synthetic construct
  source 1..80: mol_type = other DNA
ctatacaagggtacgaggcctggaaagatgagtttgaaacatgcgcggcctgggacaggcctgcaagaaaataccacaca

SEQ ID NO: 176736 - DNA, 80 bp, synthetic construct
  source 1..80: mol_type = other DNA
tacaggcgcagactaagacgggggagacgacgaaggggacgcagacgcagaaaagaaactataatagtgagacagtggca

SEQ ID NO: 176737 - DNA, 80 bp, synthetic construct
  source 1..80: mol_type = other DNA
cttagggggcgactctatatttccacagatcattaaaaacccctgtccagacaccggcgtgcgtcccaactccaatagag

SEQ ID NO: 176738 - DNA, 80 bp, synthetic construct
  source 1..80: mol_type = other DNA
acctcacaaaaccagacacagagtttgaccctgtacagtgcaaatgtgttataacagacataccactgtgggccgccttc

SEQ ID NO: 176739 - DNA, 80 bp, synthetic construct
  source 1..80: mol_type = other DNA
cggaagccgttttgttttccacgaacatggtttcgttgtaatataaggagctcatatcaagagtaccgtaaatagtgtac

SEQ ID NO: 176740 - DNA, 80 bp, synthetic construct
  source 1..80: mol_type = other DNA
gggtttctgctttgtcagccaatgctgcatgggacttctagtaccatggcagaggtttacatgagcctgagatgtcccaa

SEQ ID NO: 176741 - DNA, 80 bp, synthetic construct
  source 1..80: mol_type = other DNA
ggcagaggggcttataggtgtccttggctatagaaaatggttccctctggcaatagaggcgatagagctgccggccctta

SEQ ID NO: 176742 - DNA, 80 bp, synthetic construct
  source 1..80: mol_type = other DNA
cgtcacagccgccattttaagtagctgacgtcaaggattgacgtgaaggttaaaggtcatcctcggcggaagctacacaa

SEQ ID NO: 176743 - DNA, 80 bp, synthetic construct
  source 1..80: mol_type = other DNA
tcctcgtacgacggggccctcgctcgtcgtacctcttcccccctccgggagagtggacgtcgtggccctccgtcgcaccg

SEQ ID NO: 176744 - DNA, 80 bp, synthetic construct
  source 1..80: mol_type = other DNA
cgaaggcccagggcaagaaagcgtctcaggttcactggcaaaaagaccccgtctctggcaagaagaagagacccagagcc

SEQ ID NO: 176745 - DNA, 80 bp, synthetic construct
  source 1..80: mol_type = other DNA
attgcacagatctaaagatgtatgagtacaattcgttacacaaacgcttgatccattattcactagaggtgcatgtctcc

SEQ ID NO: 176746 - DNA, 80 bp, synthetic construct
  source 1..80: mol_type = other DNA
gcattttgtacaagattggacaggtcttgggcatacatgttggtggtaatggaagagatggatttgcggccatgttactc

SEQ ID NO: 176747 - DNA, 80 bp, synthetic construct
  source 1..80: mol_type = other DNA
tcttacaactttggagacgggaaaatgcccaacggagccacatacataccctttaagtttagaaacaaatggtaccccac

SEQ ID NO: 176748 - DNA, 80 bp, synthetic construct
  source 1..80: mol_type = other DNA
aaaaacaaggccaagtagtagctagacacaaagtcagggaatttaacataaatccagtgaacacaccaactaaatcaaag

SEQ ID NO: 176749 - DNA, 80 bp, synthetic construct
  source 1..80: mol_type = other DNA
aactggtaagttcctattagcatatacacccccaggcggtgggcatcccactacaagaaaacaggcaatgcttggtgtgc

SEQ ID NO: 176750 - DNA, 80 bp, synthetic construct
  source 1..80: mol_type = other DNA
ctatggatatgtacagaattccattaagcactgctagtaccacagaccccatcttttgcttgagcctctctccagcatcc

SEQ ID NO: 176751 - DNA, 80 bp, synthetic construct
  source 1..80: mol_type = other DNA
ctacagactaagcccagaggcaaaccctatgttaaattcttctgcaagcctccaaaactcatgctaaataagtggtactt

SEQ ID NO: 176752 - DNA, 80 bp, synthetic construct
  source 1..80: mol_type = other DNA
tttctacgatgaagatttcgcgtctctccgtcgtatgtaccagcatggagtggacgaggctgcccatgaggtagagttct

SEQ ID NO: 176753 - DNA, 80 bp, synthetic construct
  source 1..80: mol_type = other DNA
ctgagagaagaatctaccaccagaaagagggttcacacaaacttgaatgctatcttccagggtttaggaacagatgaaac

SEQ ID NO: 176754 - DNA, 80 bp, synthetic construct
  source 1..80: mol_type = other DNA
tctgggacccaggtttggcggggtgttcactagtaatgttaaagtaatgaattaccatttaatgactccagaagatcatt

SEQ ID NO: 176755 - DNA, 80 bp, synthetic construct
  source 1..80: mol_type = other DNA
aagtttacaaaaacagatacagcaacctaaacacaacagaagcacacaacgccagacaagacgcatggaacgaactaacc

SEQ ID NO: 176756 - DNA, 80 bp, synthetic construct
  source 1..80: mol_type = other DNA
agtggaatgaagacgcttaaagtacaatgtaagtaatcttttctaatccacaattctgtggagtggcagatggcgtgcca

SEQ ID NO: 176757 - DNA, 80 bp, synthetic construct
  source 1..80: mol_type = other DNA
gggctagtataaccaccaatacaggagcatttgggcaacagtcaggagcaatctatgtgggaaactacagaattgtcaac

SEQ ID NO: 176758 - DNA, 80 bp, synthetic construct
  source 1..80: mol_type = other DNA
atcagctggccactgctgttggtggcagtgtctctgcaggatataactacacacaccctggtgagaaaggtagagatgtt

SEQ ID NO: 176759 - DNA, 80 bp, synthetic construct
  source 1..80: mol_type = other DNA
tttctaacctgtggcctccacagggtggcagatggcgtgccataactctattagtgagataccacacttgtggaccttat

SEQ ID NO: 176760 - DNA, 80 bp, synthetic construct
  source 1..80: mol_type = other DNA
acaggaatcaggaaggcagacagcactcttcctattaaaactggccagtaggtggccaataacacacttgcacacagaca

SEQ ID NO: 176761 - DNA, 80 bp, synthetic construct
  source 1..80: mol_type = other DNA
ttagatacacaaccccagacaattattcatctgctggatttataacatgctggtaccaaacaaattttgtgttcccgcca

SEQ ID NO: 176762 - DNA, 80 bp, synthetic construct
  source 1..80: mol_type = other DNA
taggtacccggcaagttttatagagaaagggggacgatgggtggtggctacgagccaccgccaccttcgcaatacgagga

SEQ ID NO: 176763 - DNA, 80 bp, synthetic construct
  source 1..80: mol_type = other DNA
gtgtgtattacacaacttacaagaaccacggcactgatggagacaatttcgcctattgggtgatcaacacaagacaggtc

SEQ ID NO: 176764 - DNA, 80 bp, synthetic construct
  source 1..80: mol_type = other DNA
taaattgtataggtagtatagtcattattttgggcaccatatatgttatatataaattaatgattgcaacacaaggacct

SEQ ID NO: 176765 - DNA, 80 bp, synthetic construct
  source 1..80: mol_type = other DNA
tatggtgctgcattgctccgcaagtacttctgtgaacaacagggaactattaccagtattgtggatgtgagagaattagg

SEQ ID NO: 176766 - DNA, 80 bp, synthetic construct
  source 1..80: mol_type = other DNA
ttctccaaattcgactgggaaacggaggcggagatctcgcactggctcaagcggccaatgcgcttctatccctcagacca

SEQ ID NO: 176767 - DNA, 80 bp, synthetic construct
  source 1..80: mol_type = other DNA
aattttttaccaacagtaaacacaaacccactaactacaaccacagcacaagaaaaaacaatactgattcacaaaactga

SEQ ID NO: 176768 - DNA, 80 bp, synthetic construct
  source 1..80: mol_type = other DNA
atttgacgtagagctgacttttgtcattaccgaaaggtacttcactgggaatgcggcaaccactcgcaattatgtttatc

SEQ ID NO: 176769 - DNA, 80 bp, synthetic construct
  source 1..80: mol_type = other DNA
tgggtgccgagaccaccgagactctgtgaatataacaaccgagccaatgtgaattttgaaccaaaaggcgttaccgatgc

SEQ ID NO: 176770 - DNA, 80 bp, synthetic construct
  source 1..80: mol_type = other DNA
atgagacccagtaaggatgccggctacccagtcattaacgctcctagtaaaaccaaactgcagcctagtgtatttcacaa

SEQ ID NO: 176771 - DNA, 80 bp, synthetic construct
  source 1..80: mol_type = other DNA
cgtttagcaaatcgagtattaaaagaatgtcagaacaatcagaaactgctgaaccttctttcgaaggcccaaagagaccc

SEQ ID NO: 176772 - DNA, 80 bp, synthetic construct
  source 1..80: mol_type = other DNA
tgcatagaaggtgtgcctctatgggcagcgctggtgggatacgtagacatgtgtaaaaaagagggcaaggacccgggcat

SEQ ID NO: 176773 - DNA, 80 bp, synthetic construct
  source 1..80: mol_type = other DNA
tacccaacttgacagctgtggaaacggggcacacgtcgcaagtaacgccaggtgacacaatgcaaacgcgacatgtggtg

SEQ ID NO: 176774 - DNA, 80 bp, synthetic construct
  source 1..80: mol_type = other DNA
aaatgatgaattacatacagttcaagtccaagcagagaaccgaaccagtctgtgttttgattcatggttcacctggatca

SEQ ID NO: 176775 - DNA, 80 bp, synthetic construct
  source 1..80: mol_type = other DNA
tattccatacctgggattacagacggggactctttggttcagaggctatcaaaagagtgtcaacaaaaccgactgatgat

SEQ ID NO: 176776 - DNA, 80 bp, synthetic construct
  source 1..80: mol_type = other DNA
gcatcagaggaagcacaagatgagctgctggttaaggttaatcagctagaaaaaggactccaagatcttgccccactgta

SEQ ID NO: 176777 - DNA, 80 bp, synthetic construct
  source 1..80: mol_type = other DNA
tggggggggtggcgcgcgggccccgggcacagcttccatccagccgcgcacacctccgacacacccggcacacgccctcg

SEQ ID NO: 176778 - DNA, 80 bp, synthetic construct
  source 1..80: mol_type = other DNA
gaggttctaaactactactcaaattggtctgggtcaatcaaacttacattcttctgtgtttgtgacagcttcagtactgg

SEQ ID NO: 176779 - DNA, 80 bp, synthetic construct
  source 1..80: mol_type = other DNA
tcagaaattacgtcaatgatcaccagtaccataacagaaaagctgttgaagaatttggtgaaaatagtgtctgcactagt

SEQ ID NO: 176780 - DNA, 80 bp, synthetic construct
  source 1..80: mol_type = other DNA
attataaatctaaatagtagaaaatgggcgcccaggtttcgacacagaaatctggatcacatgagacaggcaacatagct

SEQ ID NO: 176781 - DNA, 80 bp, synthetic construct
  source 1..80: mol_type = other DNA
tgaaagtcatattgagagcagaaagccatacaaggaattaaggcttgaagttggaaagcagagattaaaatatgcccagg

SEQ ID NO: 176782 - DNA, 80 bp, synthetic construct
  source 1..80: mol_type = other DNA
tggctttcatgatgagggaaattatgggcggcaaactatgaaattggcatatttggacaggggattctacaagcactatg

SEQ ID NO: 176783 - DNA, 80 bp, synthetic construct
  source 1..80: mol_type = other DNA
tggataattgaagaagagtgtgaattagactactttaggataaaatatctagagtctgcagtgaactctgagcacatatt

SEQ ID NO: 176784 - DNA, 80 bp, synthetic construct
  source 1..80: mol_type = other DNA
gggctatgggcaaggctcttagggttatcgctctttaaaatatgtttgttggcaggtcgtggagaaagaaaaggaaagtg

SEQ ID NO: 176785 - DNA, 80 bp, synthetic construct
  source 1..80: mol_type = other DNA
cttaccgcgttgcggtggcttcaatgacaagctcagggcagcaagtgtttggatttcagttacaacctgggtcaagttcg

SEQ ID NO: 176786 - DNA, 80 bp, synthetic construct
  source 1..80: mol_type = other DNA
ttagcggactggacacaaaaaatatatgcaaagcaaacagacagcaactttggctatgcctcttacaatttctcaggaga

SEQ ID NO: 176787 - DNA, 80 bp, synthetic construct
  source 1..80: mol_type = other DNA
gtccgcgcgcactcagggtattgaagacatcattgacaaagttgcagcaaatgccctgtccctgtcactaccaagtgtgg

SEQ ID NO: 176788 - DNA, 80 bp, synthetic construct
  source 1..80: mol_type = other DNA
cccactgacgtgacaagcacgatacggatctacttcaagcccaaacacgtgcgagcgtgggttccacgaccaccgagatt

SEQ ID NO: 176789 - DNA, 80 bp, synthetic construct
  source 1..80: mol_type = other DNA
ttgaggagaaaattcgaacttttcacctacatgcgtttcgacatggagataacatttgtcataacgagcaggcaactacc

SEQ ID NO: 176790 - DNA, 80 bp, synthetic construct
  source 1..80: mol_type = other DNA
gttagtaggagtgattaacgtgcaggatggaggtgctaataaaggctttgaagtttgggacatagatgtgatgggcttcg

SEQ ID NO: 176791 - DNA, 80 bp, synthetic construct
  source 1..80: mol_type = other DNA
gacaactcttctgtacagtacagatcttcatcccagcctctgttaaaatcatgccaccatttatcccactctggtgtccc

SEQ ID NO: 176792 - DNA, 80 bp, synthetic construct
  source 1..80: mol_type = other DNA
atggatggacatcttatggcttttgattattcaaattttgatgcttccctatctccagtttggtttgaatgcttggaaag

SEQ ID NO: 176793 - DNA, 80 bp, synthetic construct
  source 1..80: mol_type = other DNA
tttatgtttcctccagacacccctaaacccatacagggtgcccaagcctggcaagatgagctgcaaacagcagccatatg

SEQ ID NO: 176794 - DNA, 80 bp, synthetic construct
  source 1..80: mol_type = other DNA
gacggagcgtcgcgggatggcgggctgttgcgtgccggtgacgggagactcttgcggcgtggacggtggtgaggacggtg

SEQ ID NO: 176795 - DNA, 80 bp, synthetic construct
  source 1..80: mol_type = other DNA
tcaatacccctagcagtaccaagttaagacctagtgtgttttatgatgtgttcccaggaaggaaagaacctgccgccttg

SEQ ID NO: 176796 - DNA, 80 bp, synthetic construct
  source 1..80: mol_type = other DNA
gtcggtcgaacactaaacctaccaccttattcatacttgcatcacaggtggatagataattttatttgattgaacaatat

SEQ ID NO: 176797 - DNA, 80 bp, synthetic construct
  source 1..80: mol_type = other DNA
tgatggtagtctacaccccatatggttcaaagcactaggaaaggtattgacacaactgggcttcccaggaaatctcatgg

SEQ ID NO: 176798 - DNA, 80 bp, synthetic construct
  source 1..80: mol_type = other DNA
gatacagtgatagggtggaacaaattactataggcaattcaaccattaccactcaggaagcagccaatgccattgttggg

SEQ ID NO: 176799 - DNA, 80 bp, synthetic construct
  source 1..80: mol_type = other DNA
agttgctcatagatggtatccccacaaagatccttaaacaacagataataactgatgctaatgatgtggacacagaggtg

SEQ ID NO: 176800 - DNA, 80 bp, synthetic construct
  source 1..80: mol_type = other DNA
ctacgaggtgatatggctaatttgacaaatcagagtccttatgaccagcaaccccgaaatcaagtgatgaaattggctta

SEQ ID NO: 176801 - DNA, 80 bp, synthetic construct
  source 1..80: mol_type = other DNA
tagatgcatccacttgcatggatccttcagagacagcagggatatcgacaggctcggccagcgcaataccaagggtacca

SEQ ID NO: 176802 - DNA, 80 bp, synthetic construct
  source 1..80: mol_type = other DNA
tttgagggttgcacatacttatgatactagtggtgatagagttaatttcttgtcatcaaatggtatggtaaccataccag

SEQ ID NO: 176803 - DNA, 80 bp, synthetic construct
  source 1..80: mol_type = other DNA
agatgtggtgtcatatggaaacattttgcttagtggaaatcaaacagcaagaatgctcaaatacaattacccaacaaaat

SEQ ID NO: 176804 - DNA, 80 bp, synthetic construct
  source 1..80: mol_type = other DNA
cacagaccccaaactcataggctcatcagaaaacacaatgtacatccccataggcatagaatttatgaacggagacatgc

SEQ ID NO: 176805 - DNA, 80 bp, synthetic construct
  source 1..80: mol_type = other DNA
tttaaacaagaaactacagacaatgccatacatggctcctatggcaaaccagtatacaatgctgtagactatcacattgg

SEQ ID NO: 176806 - DNA, 80 bp, synthetic construct
  source 1..80: mol_type = other DNA
aacagcacctatgacttccaaaattacagtaataataccaactacactaacacatataagaaatggtcagaagacagaga

SEQ ID NO: 176807 - DNA, 80 bp, synthetic construct
  source 1..80: mol_type = other DNA
tgtaaacacggaagtagctgacccgcgtgacttgtcacgtgatgtgacgtcacggcggccattttgtatcacaaaatggc

SEQ ID NO: 176808 - DNA, 80 bp, synthetic construct
  source 1..80: mol_type = other DNA
gtatcgtcgttccccctgggacacccaccgagtgtaaaatactctgctttgtatcagcatgtaatgatttttctgtgcgt

SEQ ID NO: 176809 - DNA, 80 bp, synthetic construct
  source 1..80: mol_type = other DNA
tgcctcgagtaggtgcctccagagccccttttgcccccctggcggcccagcccgacccccgggcgcccccaaactttgtc

SEQ ID NO: 176810 - DNA, 80 bp, synthetic construct
  source 1..80: mol_type = other DNA
ctctgcccctacagtgccactggccataaaaaataatcactgggacaactcaccgtcaccaaatatgtatggtattaata

SEQ ID NO: 176811 - DNA, 80 bp, synthetic construct
  source 1..80: mol_type = other DNA
cgggaattgagttaagataggggcgaagggtgggggtgggtgcaagaatagggactgagaatagagaggggagtgggcta

SEQ ID NO: 176812 - DNA, 80 bp, synthetic construct
  source 1..80: mol_type = other DNA
cttttatcaaactaggatagttgtcccatcaggcacccctacctcaatgtttatgctagcatttgtgagtgcttgccctg

SEQ ID NO: 176813 - DNA, 80 bp, synthetic construct
  source 1..80: mol_type = other DNA
ttacaaaggcataggcattaacgcccaaactcaacatataaccatagcacaaacactctacacacaaggcaactactatc

SEQ ID NO: 176814 - DNA, 80 bp, synthetic construct
  source 1..80: mol_type = other DNA
tgactgcaccacaggcacctattattgtaaaagcaaggacagatactatccagtgaacctaacacaccacagttggtatg

SEQ ID NO: 176815 - DNA, 80 bp, synthetic construct
  source 1..80: mol_type = other DNA
tcaccgtgccagcaacacagggccttcctaccatgctgacaccaggatcatcacaattcctgacttcggatgactttcaa

SEQ ID NO: 176816 - DNA, 80 bp, synthetic construct
  source 1..80: mol_type = other DNA
tgtaccaaaatctttcaaaccctgtgatatagataacaaaattggaaatgcaaaatgctgtcccttcatatgcggaaaag

SEQ ID NO: 176817 - DNA, 80 bp, synthetic construct
  source 1..80: mol_type = other DNA
ccaagcaaggatgggttactgaactaccgccctcatcacttgtggtgatggaaagacacctcaatcgagcaatgacgatt

SEQ ID NO: 176818 - DNA, 80 bp, synthetic construct
  source 1..80: mol_type = other DNA
cttcctggggtgtgtcttcgaagagtatataagcatagacggtgacgaatggtagagtttttcctcgcccgtccgcggcg

SEQ ID NO: 176819 - DNA, 80 bp, synthetic construct
  source 1..80: mol_type = other DNA
atacgtgaactcatcagctactgactcgatggcaaaacacaataattggggtattgtgattcttccatttgtgccccttc

SEQ ID NO: 176820 - DNA, 80 bp, synthetic construct
  source 1..80: mol_type = other DNA
ttgtgtccctggattactcagcagacgcctctacatacgtgcccattaccgtcactgttgcgccgatgtgtgcagagtac

SEQ ID NO: 176821 - DNA, 80 bp, synthetic construct
  source 1..80: mol_type = other DNA
ggatacacttctctaacactcacccacttactttattagtttgttttattggcaaaatactactagtgcaatgggtgctc

SEQ ID NO: 176822 - DNA, 80 bp, synthetic construct
  source 1..80: mol_type = other DNA
tacaagaccaactactccaccagctccgagagcagcgagtactccgactccagctccagcacctcgcaacgcaagtcctc

SEQ ID NO: 176823 - DNA, 80 bp, synthetic construct
  source 1..80: mol_type = other DNA
tatgcaggatctccagatccagcatggacagttccatttccgtactaatgtggtgtttgtggcaatttttgaccacaatg

SEQ ID NO: 176824 - DNA, 80 bp, synthetic construct
  source 1..80: mol_type = other DNA
aaaaacatttactttaaagccaaacaagaagcaactaatacagacatgcccaatcaatataactttaaaacttacaaaga

SEQ ID NO: 176825 - DNA, 80 bp, synthetic construct
  source 1..80: mol_type = other DNA
ataaactactacaaggattcggctagttcaggtttggctaaacaagacttcactcaagatccatccaaatttactcaacc

SEQ ID NO: 176826 - DNA, 80 bp, synthetic construct
  source 1..80: mol_type = other DNA
ctttagagtctcctttcaactaaaagccccccaataaaatttcaaggccgtgggactttcacttgtcggtgtctgcttct

SEQ ID NO: 176827 - DNA, 80 bp, synthetic construct
  source 1..80: mol_type = other DNA
aggtcatatttcaatgaacaacagggtcaaataatgactaaagctgatgttaaagagaaaaacctctatagcatacatac

SEQ ID NO: 176828 - DNA, 80 bp, synthetic construct
  source 1..80: mol_type = other DNA
aatgtcaagaaacatgaatggtatgagatacaagaatcagaatattaccctaaacatgtccagtataacattttaattgg

SEQ ID NO: 176829 - DNA, 80 bp, synthetic construct
  source 1..80: mol_type = other DNA
aacttgaccgattaagaatacctgtgtccgcacaaagcgctgtagacactctatgtgcagcctttagagtggatcctggc

SEQ ID NO: 176830 - DNA, 80 bp, synthetic construct
  source 1..80: mol_type = other DNA
caaatgttgcccatttatctgtggcaaggctgtaacttttaaggataggaacaattgccaagcttattctctcagtcgga

SEQ ID NO: 176831 - DNA, 80 bp, synthetic construct
  source 1..80: mol_type = other DNA
taaacatgggagcccaagtctcaacccagaagtccgggtctcatgaaaccagcaatgtggctaccggcgggtcaacaata

SEQ ID NO: 176832 - DNA, 80 bp, synthetic construct
  source 1..80: mol_type = other DNA
gaagccaaatagaggacaaggagagaaaagccgggtgtgcgcaactagaggcctgcggccccggaatgtggctaaccata

SEQ ID NO: 176833 - DNA, 80 bp, synthetic construct
  source 1..80: mol_type = other DNA
ggaccgtggctgtacgtattgtgaatgagcacgacccagttaaaatagagtcaaaagtgagagtttacttaaagcccaaa

SEQ ID NO: 176834 - DNA, 80 bp, synthetic construct
  source 1..80: mol_type = other DNA
caattacaatggatcaggcagtatatggaactgaagggttggaaccgctggacttaaacactagtgcagggttgccatat

SEQ ID NO: 176835 - DNA, 80 bp, synthetic construct
  source 1..80: mol_type = other DNA
tggtgaaggccacgtggcttttatagatttgagagacttccatgttgctgacacccaggggatcactgattatatacaca

SEQ ID NO: 176836 - DNA, 80 bp, synthetic construct
  source 1..80: mol_type = other DNA
gagtgtgtatggtattgaggggttagaagctttggatttacacactagtgcaggatatccatacactgctcatggaatta

SEQ ID NO: 176837 - DNA, 80 bp, synthetic construct
  source 1..80: mol_type = other DNA
aaatcgacgctctccacagaagaagtcccggaagcgaagatacagcagcacctcagaaagcagctcaaacagcaacagcg

SEQ ID NO: 176838 - DNA, 80 bp, synthetic construct
  source 1..80: mol_type = other DNA
tgatgtaaaagttgaaagaaacattaacagagccatgaccatattacaagcagttacaacatttgcagcagtggctggag

SEQ ID NO: 176839 - DNA, 80 bp, synthetic construct
  source 1..80: mol_type = other DNA
tccgggcccgcgtttgcgtctaggtgattcgccgttaacctgcggtcgtcgccgtcctcctcaccggacggcctcacgag

SEQ ID NO: 176840 - DNA, 80 bp, synthetic construct
  source 1..80: mol_type = other DNA
caactctaatcctcccatatgtcaatgctgtacccatggattctatgcttagacacaataattggagcttagttataatt

SEQ ID NO: 176841 - DNA, 80 bp, synthetic construct
  source 1..80: mol_type = other DNA
cagggccagcacctatgactgggaaaattacagcaaggaagcaaactatcataacacatatacaaaatttgaccaaaaga

SEQ ID NO: 176842 - DNA, 80 bp, synthetic construct
  source 1..80: mol_type = other DNA
gatgaccccacatttgataccttatactccaaatgcacctactttcaaactttacacacaccagcacaactaaatgccac

SEQ ID NO: 176843 - DNA, 80 bp, synthetic construct
  source 1..80: mol_type = other DNA
tttatagagtgtaatagaatcaccgtcattcccacacggcgttcccccataaagtcacgtcacactcgagtaagcgtgaa

SEQ ID NO: 176844 - DNA, 80 bp, synthetic construct
  source 1..80: mol_type = other DNA
taaaacaaaatggtgagttttatactggcaacaacccagtatttggaatgtgcacctacaagcccactttcgaaatatta

SEQ ID NO: 176845 - DNA, 80 bp, synthetic construct
  source 1..80: mol_type = other DNA
aagcactggtcccgatattacgcacggccggaattaacatgactgcagagcagtggaacacggtaccgtatttcaaagag

SEQ ID NO: 176846 - DNA, 80 bp, synthetic construct
  source 1..80: mol_type = other DNA
agggggggaaaaccatgttgcgtttatagacttgaggaactacagttcacttagtgaacatcaaggtatcacagattatg

SEQ ID NO: 176847 - DNA, 80 bp, synthetic construct
  source 1..80: mol_type = other DNA
atgactacaatgagagggttaataactataacatttggaaaaaacaattggaggatcagactttagatgacctagatgat

SEQ ID NO: 176848 - DNA, 80 bp, synthetic construct
  source 1..80: mol_type = other DNA
acagtcaagaggtcagagactactgtgagaggaaagggtggatagtaaaattaaacaatgatttggtagtggagagaaac

SEQ ID NO: 176849 - DNA, 80 bp, synthetic construct
  source 1..80: mol_type = other DNA
atcttagccagaatgataaccacagaatctgacatatattcacttccaccgtctcctaaatattttgatggctatgatca

SEQ ID NO: 176850 - DNA, 80 bp, synthetic construct
  source 1..80: mol_type = other DNA
agcgtggaggctcagctagggtctctgcctctccatcatagacatcttccttgaatctcattctctcaccgcatacctca

SEQ ID NO: 176851 - DNA, 80 bp, synthetic construct
  source 1..80: mol_type = other DNA
tctgcttttgcatgagtggtatgaaaaattttgaattgtttagatataaaaatattaaacaattagttttttagttttat

SEQ ID NO: 176852 - DNA, 80 bp, synthetic construct
  source 1..80: mol_type = other DNA
cctacagacgaacaagactcagaccgaaggccaagagacgcctccacttcggaggacgaaagcatccttaccttacaaga

SEQ ID NO: 176853 - DNA, 80 bp, synthetic construct
  source 1..80: mol_type = other DNA
ccgtccctcagcccgggcccgccaaagccccgcgtccccgtcgtgtccccgccgcaaaagtccgcccgtccctcagcccg

SEQ ID NO: 176854 - DNA, 80 bp, synthetic construct
  source 1..80: mol_type = other DNA
taagattgatcttcaagctggcgccaacatgtgcaaagtcaacgcactcttctatgacagcaccacccgttcccacaacc

SEQ ID NO: 176855 - DNA, 80 bp, synthetic construct
  source 1..80: mol_type = other DNA
ttgccataactttcatcggtgcagccatggacctctccgcgtcgccttttgtggcctctggtgtaagaggagttgccagt

SEQ ID NO: 176856 - DNA, 80 bp, synthetic construct
  source 1..80: mol_type = other DNA
cccaggcagtgaaattcaagtgaatgggatacacaccaaagtacttgactcctatgacttatttaataaagaaggtgtta

SEQ ID NO: 176857 - DNA, 80 bp, synthetic construct
  source 1..80: mol_type = other DNA
atactggcttgcctaatcataaaccaaaggtgccgaccataagagaggcaaaggtgcaaggcccagtctttgactatgcc

SEQ ID NO: 176858 - DNA, 80 bp, synthetic construct
  source 1..80: mol_type = other DNA
tatgaccagtgtttcacgggaaatctttcatgatttgtttaaacaaattttcttaaaatttctgaggtttgtttatttct

SEQ ID NO: 176859 - DNA, 80 bp, synthetic construct
  source 1..80: mol_type = other DNA
taggagtctaaattggggacacagatgtttggaacgtcaccttgcagtgttaacttggctttcatgaatctctttgatct

SEQ ID NO: 176860 - DNA, 80 bp, synthetic construct
  source 1..80: mol_type = other DNA
gatctgcatgcattgctgttatacatacaaacctcaaacacacagaagaagaacaaaatgtatataacaaggaaaattac

SEQ ID NO: 176861 - DNA, 80 bp, synthetic construct
  source 1..80: mol_type = other DNA
gatttagcaacactatcggccacactagttcttcttgggtgctcagactcaccctggcgtttcctgaaacaaaaagtatg

SEQ ID NO: 176862 - DNA, 80 bp, synthetic construct
  source 1..80: mol_type = other DNA
tcagaagattctaacgaagagcctgatgcggaactagttagagtacaccccaagagttcactggccggtagaaaggggta

SEQ ID NO: 176863 - DNA, 80 bp, synthetic construct
  source 1..80: mol_type = other DNA
tacttcaaacctaagcatgtcagagcatgggtacccaggccaccgagactgtgccagtacgagaagcagggtagcgttga

SEQ ID NO: 176864 - DNA, 80 bp, synthetic construct
  source 1..80: mol_type = other DNA
atattttcacaacccgaaggtgtccccgaggtgagagtccatttgcacttaaagtcagtttcagtgttgtttggccaggc

SEQ ID NO: 176865 - DNA, 80 bp, synthetic construct
  source 1..80: mol_type = other DNA
ataggcaacagaatatactgccaatggtgcagtgaatcctctacatcttttgattccacaaagtcaaaatgtgtactttc

SEQ ID NO: 176866 - DNA, 80 bp, synthetic construct
  source 1..80: mol_type = other DNA
tggattataccagcagaatgcaaagttgaaagggaccttaatatagcaaacactattattacaataattgccaatatcat

SEQ ID NO: 176867 - DNA, 80 bp, synthetic construct
  source 1..80: mol_type = other DNA
caccacacgttataaagccatcacggtagccgtggccgtctgtcagacattgcgcactttctggccgcagatctcgcagt

SEQ ID NO: 176868 - DNA, 80 bp, synthetic construct
  source 1..80: mol_type = other DNA
tgtttaaagctgagtaccaagggatttcagattacatcctgaatctaggaaaagccttcgggacaggattcacagagcac

SEQ ID NO: 176869 - DNA, 80 bp, synthetic construct
  source 1..80: mol_type = other DNA
ggcacaaaagagaatggtgacatcaaacgtttcaccaactggaagatcaacacacgccaggttgttcagctaaggcgcaa

SEQ ID NO: 176870 - DNA, 80 bp, synthetic construct
  source 1..80: mol_type = other DNA
taaccactagtaatggtaaattcactggcttaggtatctatgacaattatatgataatacccacacatgctgatgtgggg

SEQ ID NO: 176871 - DNA, 80 bp, synthetic construct
  source 1..80: mol_type = other DNA
ggccactgtaaaccccggccttggggtagccgacggtggctaacctcagcgcgtactcctgtttctcagtcgtcaggtga

SEQ ID NO: 176872 - DNA, 80 bp, synthetic construct
  source 1..80: mol_type = other DNA
aggactttaaaactctaaaaatcaaaactttagaggcgaatgggcgccattttgtccccacgcgcgcataatggcggacc

SEQ ID NO: 176873 - DNA, 80 bp, synthetic construct
  source 1..80: mol_type = other DNA
atggggttcacaaatggatctgacagacccactttgtgttgaagattctgttgaggactgcaaacagacaattacaccaa

SEQ ID NO: 176874 - DNA, 80 bp, synthetic construct
  source 1..80: mol_type = other DNA
gctttttcagcagcaggtcatgagagacattgtacagactgggccctggagctataaggacgaaagcaaaaactgtgttc

SEQ ID NO: 176875 - DNA, 80 bp, synthetic construct
  source 1..80: mol_type = other DNA
ccaaaaatacaccagctataaggaattgctcaggccaaagttgttcctcaggtggctttaggcctaatgtaggcaattgc

SEQ ID NO: 176876 - DNA, 80 bp, synthetic construct
  source 1..80: mol_type = other DNA
tgcgagggttcgtagatgtagaggcgcgtaccgccccccatgcagagcaccagctccgtctcttcgtagtgatcttccac

SEQ ID NO: 176877 - DNA, 80 bp, synthetic construct
  source 1..80: mol_type = other DNA
taaaagccgtggatggggaataccaaaaataaatagtatatgttataatgttagtgtacgttccgtccaccaaacacatt

SEQ ID NO: 176878 - DNA, 80 bp, synthetic construct
  source 1..80: mol_type = other DNA
atgtgctgtgaattcaacgggttgaggaatattacgataccagcagctcagggattaccagttatgaacacaccaggcag

SEQ ID NO: 176879 - DNA, 80 bp, synthetic construct
  source 1..80: mol_type = other DNA
ttgaggcgtgctctaataaatgctattgtaaaaaatgttgctatcattgccagctatgttttcttaaaaagggccttggg

SEQ ID NO: 176880 - DNA, 80 bp, synthetic construct
  source 1..80: mol_type = other DNA
atatcgacttagaagttttaagagcaataactcctatctcaacatcaaacaacttagcacatagattaagagacagagct

SEQ ID NO: 176881 - DNA, 80 bp, synthetic construct
  source 1..80: mol_type = other DNA
gaactcaccaaaggagaagctgcccacgagttcacaaaggaccaagtgtcaggtgaacacaaagtgcaagccaaggtctg

SEQ ID NO: 176882 - DNA, 80 bp, synthetic construct
  source 1..80: mol_type = other DNA
taatgataccataccagattgtagttgtacaataggtacttattattgcagaagtagagataggtactatcccatagagg

SEQ ID NO: 176883 - DNA, 80 bp, synthetic construct
  source 1..80: mol_type = other DNA
taggagctataacacaaaacccagtagaaaagtatacagaagccattttgaatgaagtattggtggtcccaaatatcagt

SEQ ID NO: 176884 - DNA, 80 bp, synthetic construct
  source 1..80: mol_type = other DNA
cggcgccccccgccgatcctcagcaggctaacccacaatggcctggtggggacggtggagaagatggcgctggaggcccc

SEQ ID NO: 176885 - DNA, 80 bp, synthetic construct
  source 1..80: mol_type = other DNA
caaaggaaaagctacaaagacatttagagtaagaccacccacactatatacagataagtggtattttcaaagagacttct

SEQ ID NO: 176886 - DNA, 80 bp, synthetic construct
  source 1..80: mol_type = other DNA
catgaaaggagttgggccagctgagcctggagattgtggtgggattctacgatgtgtacacggtccaattggtttgttaa

SEQ ID NO: 176887 - DNA, 80 bp, synthetic construct
  source 1..80: mol_type = other DNA
tgcaactggtgggggtaaatttgttataaccagaatagcaaaagaggaatagcgtcgtttatgtaaagagtttagatctc

SEQ ID NO: 176888 - DNA, 80 bp, synthetic construct
  source 1..80: mol_type = other DNA
tttatgacaaaatataccaaactccctgttattactctggattagcagttggtatcaacccatacaaggattggcacttt

SEQ ID NO: 176889 - DNA, 80 bp, synthetic construct
  source 1..80: mol_type = other DNA
cagaacgggacccttcagctacagagacgagatacccagcactacactgactgcacagtacaagttctactttaactggg

SEQ ID NO: 176890 - DNA, 80 bp, synthetic construct
  source 1..80: mol_type = other DNA
agcgcaggatatggcagcctgggcgtgcgggaaagagagagaaggccgggcgtacgtcagaatcctcgttagataccacg

SEQ ID NO: 176891 - DNA, 80 bp, synthetic construct
  source 1..80: mol_type = other DNA
atccagctctccttcgatccggtcctctatctcatctcccagatcagggccatcaagcccatccctctccgcgacgggac

SEQ ID NO: 176892 - DNA, 80 bp, synthetic construct
  source 1..80: mol_type = other DNA
tttcaacaattgggtgattaccaccagacgggtggcccagcttcgcaggaaattggagatgttcacttacttaagatttg

SEQ ID NO: 176893 - DNA, 80 bp, synthetic construct
  source 1..80: mol_type = other DNA
acatgctcataggggctgggtttgcaatgccgggcgactgtggaggaattctgcgatgcacccacggtgtaatgggcttg

SEQ ID NO: 176894 - DNA, 80 bp, synthetic construct
  source 1..80: mol_type = other DNA
atgtttgtccccccaggaatagaccctcctacctcaaccactgacaggagatgggattcagcttctaatccaagtgtctt

SEQ ID NO: 176895 - DNA, 80 bp, synthetic construct
  source 1..80: mol_type = other DNA
atggagcaactactgctattccaatcactatcacagtagcaccgatgtgttcagagttttctgggctcagacaggctgtc

SEQ ID NO: 176896 - DNA, 80 bp, synthetic construct
  source 1..80: mol_type = other DNA
cgggttctagctgcaggcggcacgtaaagcttagaaacgacggctgtacggtttggttcccgtgaagctgaagcgtcact

SEQ ID NO: 176897 - DNA, 80 bp, synthetic construct
  source 1..80: mol_type = other DNA
cattttgacccccgcttattaactgcacttggcaattttatctacaataggcatggaaatacccttgaaggagcaggaga

SEQ ID NO: 176898 - DNA, 80 bp, synthetic construct
  source 1..80: mol_type = other DNA
accagtgtgtgttttactacatggtaaccccggctgtggtaaatctctcgccacatccgtcattgcacgtggtctcacaa

SEQ ID NO: 176899 - DNA, 80 bp, synthetic construct
  source 1..80: mol_type = other DNA
aggtccagggcccagtctttgattatgcggtagccatggctcggcgcaacattctcactgccacaacatccaaggtggag

SEQ ID NO: 176900 - DNA, 80 bp, synthetic construct
  source 1..80: mol_type = other DNA
aagccaccttcatgtggactaattgcagaggagaatttttgtattgtaagatgaattggtttctgaattgggtagaagac

SEQ ID NO: 176901 - DNA, 80 bp, synthetic construct
  source 1..80: mol_type = other DNA
aaaaaaagtacaacaagaaataacagcagtaacacagcaaggcactagtgtattttatcacttagtaggtatatatggca

SEQ ID NO: 176902 - DNA, 80 bp, synthetic construct
  source 1..80: mol_type = other DNA
atttcaggtcaacaatgagctatggcagggggttaaagcttgtgttaagtcaaagtttagagaaatatttggtgttaatg

SEQ ID NO: 176903 - DNA, 80 bp, synthetic construct
  source 1..80: mol_type = other DNA
ccaggaagtgatgtcataccggattttgattgtgtggaagggtgttactattgcaaatctcaagacaggtatttccgtgt

SEQ ID NO: 176904 - DNA, 80 bp, synthetic construct
  source 1..80: mol_type = other DNA
ggtgtttcattacggattagtacatgcgtgtttttcataaattctgatacggcggttcggttgcggcttgattcacaaaa

SEQ ID NO: 176905 - DNA, 80 bp, synthetic construct
  source 1..80: mol_type = other DNA
gatggtccgaattttcaaggaacggtgtctatggcattaacactttaaacaacatgggcacgctctatgcgaggcacgtc

SEQ ID NO: 176906 - DNA, 80 bp, synthetic construct
  source 1..80: mol_type = other DNA
tcgatggtgtagagtgtggagacaatgtgtaaacgatgggctttgaggggggctgttgtggtgctggttggtgaaggagc

SEQ ID NO: 176907 - DNA, 80 bp, synthetic construct
  source 1..80: mol_type = other DNA
atggcgggctgttgcgtggcggggacagtggtgaggacgggagtggcgccggagacaggggcctttcgcggcgggaaaca

SEQ ID NO: 176908 - DNA, 80 bp, synthetic construct
  source 1..80: mol_type = other DNA
gctgggctgtgatgcgtcgccatggcaatggctcaagcagaaagtatgtgacataatggaactcccatatgtttacaaac

SEQ ID NO: 176909 - DNA, 80 bp, synthetic construct
  source 1..80: mol_type = other DNA
gggcgacggaggcgtccgcgtgtgtaaacggcgtggtcgctgacgcgggtttgcttcctatatatacagagtggacgtcg

SEQ ID NO: 176910 - DNA, 80 bp, synthetic construct
  source 1..80: mol_type = other DNA
gccgcaaacgcggcgccgcgcaaaagctccgtgcaaacacccgcagaaagatccctgagcttacgccccgcagaactccc

SEQ ID NO: 176911 - DNA, 80 bp, synthetic construct
  source 1..80: mol_type = other DNA
ttatggacttcaaaaaaccctcaccaaaacacactatacgctggtagcacatatgtaacacaaaccaataatgcagctca

SEQ ID NO: 176912 - DNA, 80 bp, synthetic construct
  source 1..80: mol_type = other DNA
aaatcaaagcaggaaaaacccgcatcatcgaagccagtagtattaatgacacagcccattttcgtatggtctttggtaat

SEQ ID NO: 176913 - DNA, 80 bp, synthetic construct
  source 1..80: mol_type = other DNA
cagaaattacctctccgacaagcccatctacccctggctccctcgccccgaacccgaaataaaagtgagctttaagctcg

SEQ ID NO: 176914 - DNA, 80 bp, synthetic construct
  source 1..80: mol_type = other DNA
ttttggcttctaccaactctcataccataacacccccaacagtctcccatagtgatgcgctgactaggagatttgcttat

SEQ ID NO: 176915 - DNA, 80 bp, synthetic construct
  source 1..80: mol_type = other DNA
actatggtggtaccctggattagtaatacagcttaccggcgcactattaaagatgactttactgaaggaggatacatcag

SEQ ID NO: 176916 - DNA, 80 bp, synthetic construct
  source 1..80: mol_type = other DNA
tccgccgggtggccctgtggtaagtctgggaggcagagggtcggcctaggcccggggaagtggacgtggatcgccccggt

SEQ ID NO: 176917 - DNA, 80 bp, synthetic construct
  source 1..80: mol_type = other DNA
gtacctacctccaacgagtcagactttatagataactttttacaagtagcctttccagacaacaaaccaagacacgccaa

SEQ ID NO: 176918 - DNA, 80 bp, synthetic construct
  source 1..80: mol_type = other DNA
gagcccaaggtccaacttctaggaaagaggcaatgcttggtactcacgtagtgtgggatattggtttgcaatctacaata

SEQ ID NO: 176919 - DNA, 80 bp, synthetic construct
  source 1..80: mol_type = other DNA
cgccagcacgtcccatctcccgacatttatcaccgccaccactaacaacgtcacccccgcacggtacatagttaccctct

SEQ ID NO: 176920 - DNA, 80 bp, synthetic construct
  source 1..80: mol_type = other DNA
tggagttgactatattggttcttgacagaaatgaaaaatttagggatataagaggatttatatcagaggatttggaaggt

SEQ ID NO: 176921 - DNA, 80 bp, synthetic construct
  source 1..80: mol_type = other DNA
ttacctacaaccccctactagacaaaggagtaggcaacatggtgtggtttcaatacaccagcaaagctgacacacagttt

SEQ ID NO: 176922 - DNA, 80 bp, synthetic construct
  source 1..80: mol_type = other DNA
gagatgcagagctcggaattcgccgaaaaagtcgttctggcagtgctccagatcgatctcggtcagcgagtgcggcgaat

SEQ ID NO: 176923 - DNA, 80 bp, synthetic construct
  source 1..80: mol_type = other DNA
gaagtgtgacgttgcggcgtgggtgcggcgcgcttcgcgcgccgcccaccaggtggcgctgcgcgccccccccgcgcatg

SEQ ID NO: 176924 - DNA, 80 bp, synthetic construct
  source 1..80: mol_type = other DNA
tattgcatacagagctttttttaaatggggtggcaatcctctgcctccacagcccatcgacgacccctgccaaaaagaca

SEQ ID NO: 176925 - DNA, 80 bp, synthetic construct
  source 1..80: mol_type = other DNA
aggtcggagcaccaggtgtagaaaaccgtggtaacggagaggaggcctacgtagcccatggtcaataccacgtcgtcggg

SEQ ID NO: 176926 - DNA, 80 bp, synthetic construct
  source 1..80: mol_type = other DNA
gtaacaggggtcgccatagacttcggcctccattttaccttgtaaaaactaccaaaatggccgttccagtgacgtcacag

SEQ ID NO: 176927 - DNA, 80 bp, synthetic construct
  source 1..80: mol_type = other DNA
agcgcgcggccgaccgggccgcgggtgtttgcacggagcttttgcgctgcgctttgtgcacgctgccggtgcgtgtggtc

SEQ ID NO: 176928 - DNA, 80 bp, synthetic construct
  source 1..80: mol_type = other DNA
cagcaaatgcctattgaagagtgtgtatatggaacagataatttagaagctttagatttaaataccagtgcagggttccc

SEQ ID NO: 176929 - DNA, 80 bp, synthetic construct
  source 1..80: mol_type = other DNA
ggtggaattcgctgggctctatatatacaaaccggcgacgccaagtacggtattcgtaatcagcatttgagtatacggtt

SEQ ID NO: 176930 - DNA, 80 bp, synthetic construct
  source 1..80: mol_type = other DNA
agtgggcctagtcaacatgtgcttgaagacaggcactttatcaaacacaggcccctcatcagctcagcaggaccgagtga

SEQ ID NO: 176931 - DNA, 80 bp, synthetic construct
  source 1..80: mol_type = other DNA
atcaatgattgagacccgatatgtaattaataaccacactaacaatgaagccctggtagaaaactttctgggtaggtcct

SEQ ID NO: 176932 - DNA, 80 bp, synthetic construct
  source 1..80: mol_type = other DNA
acagatgtggcgcctccaatgaggccactgtaaaccccggccttggggtagccgacggtggctaacctcagcgcgtactc

SEQ ID NO: 176933 - DNA, 80 bp, synthetic construct
  source 1..80: mol_type = other DNA
gataagccaaacaaattaccgctttgtctcgcacgatgtgtacacggacgctggtaatatcacctgttggtatcagacca

SEQ ID NO: 176934 - DNA, 80 bp, synthetic construct
  source 1..80: mol_type = other DNA
tgcagcttgcaaagcctttaacagaccccctagatctatactaacagaccctcctttctacccttactgcaaaaacaact

SEQ ID NO: 176935 - DNA, 80 bp, synthetic construct
  source 1..80: mol_type = other DNA
gctcagggtgaaataatcaacaagtgcaaagtgcaggatgttggtctcaaacccatcaacacaccagaacactccaagct

SEQ ID NO: 176936 - DNA, 80 bp, synthetic construct
  source 1..80: mol_type = other DNA
gaaatcgctgaggtggattcagtagtgccagtgaataacttatcacgctatgtttccaccatggaggcataccagatacc

SEQ ID NO: 176937 - DNA, 80 bp, synthetic construct
  source 1..80: mol_type = other DNA
cttgcaatcatcttgccacctcgttatcccatggattagttcccattactatagaaggacaaagaaggacagctacactg

SEQ ID NO: 176938 - DNA, 80 bp, synthetic construct
  source 1..80: mol_type = other DNA
gagctaccccaacacccaactggacctagccaggttcctaggcagtacctggtacttctacagacagccccacactgact

SEQ ID NO: 176939 - DNA, 80 bp, synthetic construct
  source 1..80: mol_type = other DNA
ggaaagccaacgaggatgtaatcatcatccagtatatggatgatatccttgtagccagtgacagaagtgacctagagcat

SEQ ID NO: 176940 - DNA, 80 bp, synthetic construct
  source 1..80: mol_type = other DNA
tgctatagtccccatcactatatcaataagtccaatgtttgctgaattctctggagcacgtgcaaaaccagaagctgcct

SEQ ID NO: 176941 - DNA, 80 bp, synthetic construct
  source 1..80: mol_type = other DNA
aggcgatcgaggccatgaaataagacaatctactcagtggggtgaccaccaaccagatgaaaatccattttacctgtgca

SEQ ID NO: 176942 - DNA, 80 bp, synthetic construct
  source 1..80: mol_type = other DNA
tttttatttgggggcaatcctatatctcaacaggtcattaaagatccctctaaacaacccgacttccaaatacccggagc

SEQ ID NO: 176943 - DNA, 80 bp, synthetic construct
  source 1..80: mol_type = other DNA
ggtggttgtgcctgcatcaacaccaaacaccatggatataatagggtttgtatcagcttgtaatgatttcactgtcagat

SEQ ID NO: 176944 - DNA, 80 bp, synthetic construct
  source 1..80: mol_type = other DNA
tacatattcctggggaagtaactaacatgatggagttggccgaaattgactcaatgattccaatgaactcggtcacaggt

SEQ ID NO: 176945 - DNA, 80 bp, synthetic construct
  source 1..80: mol_type = other DNA
ggtagcaacataactctaaaaaaatgcaatcagactgagaaatggcacaatgtagactggattcattatgagtaccccac

SEQ ID NO: 176946 - DNA, 80 bp, synthetic construct
  source 1..80: mol_type = other DNA
ggtatcgaagacctaatacaacaagttgcttcaaacgcactacaactgtcccaaccaacgcgcccagcattgccaccttc

SEQ ID NO: 176947 - DNA, 80 bp, synthetic construct
  source 1..80: mol_type = other DNA
gcgctgtccacaatcattaaggctcccgagtccgggtgactgatggttgaggctgggaactccttgagggaggccacctt

SEQ ID NO: 176948 - DNA, 80 bp, synthetic construct
  source 1..80: mol_type = other DNA
gtcacgtacgtgaaggatgagttgcgtaaaccgtctaagatcaaggcaggaaagtccagactgatagaggctagttcgct

SEQ ID NO: 176949 - DNA, 80 bp, synthetic construct
  source 1..80: mol_type = other DNA
actggaatggatagcaaacaaaatttcaaaattaatagactggatcaaaaacaaattactaccccaggccaaggacaaac

SEQ ID NO: 176950 - DNA, 80 bp, synthetic construct
  source 1..80: mol_type = other DNA
ttgcctccctctccaaagtactttgatgggtatgatcagcaaagtgtggttattatggatgatataatgcaaaaccccag

SEQ ID NO: 176951 - DNA, 80 bp, synthetic construct
  source 1..80: mol_type = other DNA
acctgcgggccgccagaaactatgcctaccactctgacgactccacaaagcagccggacccctttgggggcgcgctgagc

SEQ ID NO: 176952 - DNA, 80 bp, synthetic construct
  source 1..80: mol_type = other DNA
gaccgctctaccaatgttagatacagcatagatcagctggttactgcaattatatctgattttaacaataagcttaagat

SEQ ID NO: 176953 - DNA, 80 bp, synthetic construct
  source 1..80: mol_type = other DNA
cttgctgagttccttgaagacctctaggctgcgccgttgatccacacaccaggcttctgcgatttgcgccagcgcccggt

SEQ ID NO: 176954 - DNA, 80 bp, synthetic construct
  source 1..80: mol_type = other DNA
cgaaccagacgtagggggggacgcaaaaggagacacagacagactcttatactcagacagtggcaaccagatgttatgaa

SEQ ID NO: 176955 - DNA, 80 bp, synthetic construct
  source 1..80: mol_type = other DNA
atatacttctattggaagaacaaatttcccactacaacatgggaaagtcattgccaaaagacagacactccatacatatg

SEQ ID NO: 176956 - DNA, 80 bp, synthetic construct
  source 1..80: mol_type = other DNA
aacatggaggtagcagctgcacattatgcagcccaactctcaactctaaacataaacccagaaccgcttactatggaaga

SEQ ID NO: 176957 - DNA, 80 bp, synthetic construct
  source 1..80: mol_type = other DNA
ttgaatgtggacattttcacagtttcacatacaaaagtggacaacctctttgggcgagcatggttttttgaagagcacac

SEQ ID NO: 176958 - DNA, 80 bp, synthetic construct
  source 1..80: mol_type = other DNA
atgatcagcacctaagacatatgaacagatggtccgtgtccaatgatatcctagatctagctcgctacaacggggccaaa

SEQ ID NO: 176959 - DNA, 80 bp, synthetic construct
  source 1..80: mol_type = other DNA
ccttccccgggaatgtgtgaatacgggcgtatgactttagaaatgggggcgtgtgctgcgccagcaggtaaggcaggcac

SEQ ID NO: 176960 - DNA, 80 bp, synthetic construct
  source 1..80: mol_type = other DNA
gacatcccggcgaccgattggaatgaccgccacacaaacatagtcaaatcgttcctcaaagcccaacaaaaaccttgcat

SEQ ID NO: 176961 - DNA, 80 bp, synthetic construct
  source 1..80: mol_type = other DNA
atagcaaaatacaataccctgtgttacaatgtcagtgtacattctgcctaccaaacacactgttgtacaaccacgttatc

SEQ ID NO: 176962 - DNA, 80 bp, synthetic construct
  source 1..80: mol_type = other DNA
ttgtaaagtaggatgtcatgtttgggaataataatttctctataattttagttcctgggcatggtctacataatcatata

SEQ ID NO: 176963 - DNA, 80 bp, synthetic construct
  source 1..80: mol_type = other DNA
ggaaagatgcaatgttaggtactcatataatttgggatattggcttgcagtcaactatagtgatgaacataccctggacc

SEQ ID NO: 176964 - DNA, 80 bp, synthetic construct
  source 1..80: mol_type = other DNA
accagataatgtatattccccctggagggcccatccccaagtcagtaactgattacacatggcagacctccactaaccct

SEQ ID NO: 176965 - DNA, 80 bp, synthetic construct
  source 1..80: mol_type = other DNA
aacctaacatatccaagtaacttagaagatttgaacactgcacaatagggactattgcaaccagcaatagtcagtgcaag

SEQ ID NO: 176966 - DNA, 80 bp, synthetic construct
  source 1..80: mol_type = other DNA
agacaatagtgttaatggcaactcattgcatgaattttaaaagaaggggaggaataggggatatgacccctgcagagaga

SEQ ID NO: 176967 - DNA, 80 bp, synthetic construct
  source 1..80: mol_type = other DNA
tttccctttttacctgatatgtcacttatggttacaagttttggtataaagcttgtgactatgggtgcccaagtgagcag

SEQ ID NO: 176968 - DNA, 80 bp, synthetic construct
  source 1..80: mol_type = other DNA
acgtcataagtcacatgtctaggggtccacttaaacacggaagtaggccccgacatgtgactcgtcacgtgtgtgcacgt

SEQ ID NO: 176969 - DNA, 80 bp, synthetic construct
  source 1..80: mol_type = other DNA
cccggttgcggccccgtaccgctcttctggggcgacgataggtcgaaagccaccgttttcatgcccgtcgtgctcttgac

SEQ ID NO: 176970 - DNA, 80 bp, synthetic construct
  source 1..80: mol_type = other DNA
ttaccactggccttaaaattccatttccaaataatagtaaccctacaactgctggaaatggtactgcaacttcacttact

SEQ ID NO: 176971 - DNA, 80 bp, synthetic construct
  source 1..80: mol_type = other DNA
ccccaccagacggactctggggagatgcagtatttgatactgcagagacagaaaaactaactaaaaacatggattcttat

SEQ ID NO: 176972 - DNA, 80 bp, synthetic construct
  source 1..80: mol_type = other DNA
tgaaaatatcttctaaaatactagatcttcttgataaaaccgaatgtaacttaacaggaattggatcacgagatgatgat

SEQ ID NO: 176973 - DNA, 80 bp, synthetic construct
  source 1..80: mol_type = other DNA
tatagaagatagtgctgaagactgtaaacaagcaatctccccagatgaactgggtttgacatccgctcaagatgatgggc

SEQ ID NO: 176974 - DNA, 80 bp, synthetic construct
  source 1..80: mol_type = other DNA
cgcagtccgaccgcctgggtggactccccaggcatcggaggggccccgtcatagatctcccagacggtggcgtatatgag

SEQ ID NO: 176975 - DNA, 80 bp, synthetic construct
  source 1..80: mol_type = other DNA
ccccttagggggtgagaagccaaattattttctaaatttccgggcagttaatgtggatatattcactgtaagtcacacaa

SEQ ID NO: 176976 - DNA, 80 bp, synthetic construct
  source 1..80: mol_type = other DNA
gatgggccccttaggagcaccctgctggcaaacattgctagatactacactcattggtcaggctctatggaaatgacctt

SEQ ID NO: 176977 - DNA, 80 bp, synthetic construct
  source 1..80: mol_type = other DNA
catttgttttctgtggttccgctatggctacgggtaaattcctactagcctacgccccgcccggagcgaacgctcctaag

SEQ ID NO: 176978 - DNA, 80 bp, synthetic construct
  source 1..80: mol_type = other DNA
cctaaactcatgataaacaagtggtactttgcaaaagatatatgccagctaggcctcttccaactatatgccacaggggc

SEQ ID NO: 176979 - DNA, 80 bp, synthetic construct
  source 1..80: mol_type = other DNA
cttaggacacattgttgtgcaatacatgtttgtaccaccaggagctcccctccccaccagtagaactgacaatacttggc

SEQ ID NO: 176980 - DNA, 80 bp, synthetic construct
  source 1..80: mol_type = other DNA
gttggcacagccataccctatggagaaataacactcagtggtaatcccacatgtagacttctcaagtacgactatcccac

SEQ ID NO: 176981 - DNA, 80 bp, synthetic construct
  source 1..80: mol_type = other DNA
ccagttggagctgtcaccgagcaagggatgctaaacctggggggaaggcctactaaccgaaccttgatgtacaactttcc

SEQ ID NO: 176982 - DNA, 80 bp, synthetic construct
  source 1..80: mol_type = other DNA
cccctcgcctctatgaggacaagtggtacccccagtcagagctctgtgacacaaccctgctaaccgtctatgcaaccgca

SEQ ID NO: 176983 - DNA, 80 bp, synthetic construct
  source 1..80: mol_type = other DNA
gcgaaacgccgttgacctggaccgaccgccgctttggtcgggatcgctcccgcatttgcccgtctacgatgtgcgttccc

SEQ ID NO: 176984 - DNA, 80 bp, synthetic construct
  source 1..80: mol_type = other DNA
atgagcatgacccagttaaaatagaatcaaaagtgagggtctacttaaagcctaaacatgtgagagtgtggtgtcctagg

SEQ ID NO: 176985 - DNA, 80 bp, synthetic construct
  source 1..80: mol_type = other DNA
agcatcatcttaatcttaggaactgtttatgcactgtacaagttgatgtgtatagcacaaggcccttacactggattacc

SEQ ID NO: 176986 - DNA, 80 bp, synthetic construct
  source 1..80: mol_type = other DNA
taactttcgtcatcacgagtgcgcaggtaacatccacgaaccagagccaagacgcgccagtgctcacccaccaagtgatg

SEQ ID NO: 176987 - DNA, 80 bp, synthetic construct
  source 1..80: mol_type = other DNA
gcaagaagcttgcactttatgaagagcagtgcaaggggttttctaaatctgatgctcaagcacaacagcagcttattctg

SEQ ID NO: 176988 - DNA, 80 bp, synthetic construct
  source 1..80: mol_type = other DNA
aggggcccctaagttatttcaagacaagtggtatccacagaacgagctctgtgatgtaactcttgtaactgtacaggcaa

SEQ ID NO: 176989 - DNA, 80 bp, synthetic construct
  source 1..80: mol_type = other DNA
ccactccagccaagaaatccagacggaccaagaagaagcgctaccgcaagcgtcgctccaagaacaactactccagcagc

SEQ ID NO: 176990 - DNA, 80 bp, synthetic construct
  source 1..80: mol_type = other DNA
aacactcagattctcgactccgagaagagaaaccgtgggagagctcgcaagaaacagagagcgaagcccaagaagaagag

SEQ ID NO: 176991 - DNA, 80 bp, synthetic construct
  source 1..80: mol_type = other DNA
tagagtctttcctgggtagagcggcattggtgaccatacttaaactgcaaaatgcggctcccaccagcgacaacgccaag

SEQ ID NO: 176992 - DNA, 80 bp, synthetic construct
  source 1..80: mol_type = other DNA
acgtcattattgacgtcaatgggcgcgggtcgttgggcggtcagccaggcgggccatttaccgtaagttatgtaacgcgg

SEQ ID NO: 176993 - DNA, 80 bp, synthetic construct
  source 1..80: mol_type = other DNA
gtcgaacacacgggtgtctcctccgtcaccctgctcaagatctttagccaggtcccccccgacgaacgcgaagaagacac

SEQ ID NO: 176994 - DNA, 80 bp, synthetic construct
  source 1..80: mol_type = other DNA
ttgaacagagcaatgaccatattacaggccgtgacaacatttgctgcggtagctggagtagtctatgttatgtacaagtt

SEQ ID NO: 176995 - DNA, 80 bp, synthetic construct
  source 1..80: mol_type = other DNA
ctatacactaaacaatatgggcaagttgtatgtcaggcatgtcaatggagccagcccgggcccagtgaagagtactattc

SEQ ID NO: 176996 - DNA, 80 bp, synthetic construct
  source 1..80: mol_type = other DNA
tgggaggtaatggttcccatggctttgctgcagcattgaagaggtcatactttaccagtgagcagggcgaaatacagtgg

SEQ ID NO: 176997 - DNA, 80 bp, synthetic construct
  source 1..80: mol_type = other DNA
caaaccccgccatgggctacgtgttctatgacagaaactttggtgacggaaaatggactgacggacggggcaaaatagag

SEQ ID NO: 176998 - DNA, 80 bp, synthetic construct
  source 1..80: mol_type = other DNA
cggggaaaagaggaagacgtccccaggggacggcagcgcgggtccctggtgacacacgaagagacaagacgcggaaaaga

SEQ ID NO: 176999 - DNA, 80 bp, synthetic construct
  source 1..80: mol_type = other DNA
gagtgctatacaaagtgggtcaagttattgggatacatttaggtggtaatggaagacagggtttttcagccatgctactc

SEQ ID NO: 177000 - DNA, 80 bp, synthetic construct
  source 1..80: mol_type = other DNA
tccttatggcagaacagtctgttgatgcagtagatataagatcccagacagtacaggcaaaacatctatgtatgctgtgt

SEQ ID NO: 177001 - DNA, 80 bp, synthetic construct
  source 1..80: mol_type = other DNA
acacctgcaaatgcaccatgtaaccacagatctaaactgaaagttgcagctttagatggcaaggaaacttgggtttcagg

SEQ ID NO: 177002 - DNA, 80 bp, synthetic construct
  source 1..80: mol_type = other DNA
gcctttgccacagaagcccaccttagacccagaaccactactcctacaggagagcccataattaatgacagtactaccac

SEQ ID NO: 177003 - DNA, 80 bp, synthetic construct
  source 1..80: mol_type = other DNA
catcagtaaacacttccacctaccctacattgagagacaatcaaatgacttatggtttaagaaattcaatgacatgtgca

SEQ ID NO: 177004 - DNA, 80 bp, synthetic construct
  source 1..80: mol_type = other DNA
cagtcgctcgccttagtaggggagagagctttttatgaccctagaacagcaggcagtaaatctagatttgatgatttagt

SEQ ID NO: 177005 - DNA, 80 bp, synthetic construct
  source 1..80: mol_type = other DNA
gctcaagtttcgtcccaaaaagttggagctcacgagaattcgaatagggcgtacggcggttccaccattaattacaccac

SEQ ID NO: 177006 - DNA, 80 bp, synthetic construct
  source 1..80: mol_type = other DNA
acaacaacaacgtatggtacactaaagaccagagagctgtaactaacatacacagtgcatatggggtaccagacaaccac

SEQ ID NO: 177007 - DNA, 80 bp, synthetic construct
  source 1..80: mol_type = other DNA
ttcctggcagtcagggcggacagggagcagtattggttacatgctcagcttgcccagatatggcagtgcggatgctccgt

SEQ ID NO: 177008 - DNA, 80 bp, synthetic construct
  source 1..80: mol_type = other DNA
tacaacctggtcaagcaccagcactagatatgctatacctaatgataacacctacaaaaactggggaaactggtggaaat

SEQ ID NO: 177009 - DNA, 80 bp, synthetic construct
  source 1..80: mol_type = other DNA
cgagtatattttggacagagggctgtgccccggcgcgaatgtcagtgccatttattagtattgggaacgcctacagtaat

SEQ ID NO: 177010 - DNA, 80 bp, synthetic construct
  source 1..80: mol_type = other DNA
taacaacaacaacaaccagagatggcctggggatggtggagaaggaggcgccgccggtggttccgtagcctctggagaag

SEQ ID NO: 177011 - DNA, 80 bp, synthetic construct
  source 1..80: mol_type = other DNA
cccagattttgatcctaatgagattatagagtatgtgttgtcagggacctacaaggatgaccccgattttaatatttcct

SEQ ID NO: 177012 - DNA, 80 bp, synthetic construct
  source 1..80: mol_type = other DNA
agggacacatggggcactacacagtgccttcctgataatgatgattacagtgaactagcattgaatgtaacagaagcttt

SEQ ID NO: 177013 - DNA, 80 bp, synthetic construct
  source 1..80: mol_type = other DNA
actaatgtgagatatgaccaaacacaccctggtgaagcaggccacaccattacagcatctaagcagtggggtgagcataa

SEQ ID NO: 177014 - DNA, 80 bp, synthetic construct
  source 1..80: mol_type = other DNA
tccaaagtagccgacgcgtaacaggtcgcagtaggtgaaaaaccaaccgttcggccagctgagacgcagcaccgtgccgc

SEQ ID NO: 177015 - DNA, 80 bp, synthetic construct
  source 1..80: mol_type = other DNA
aagccagtgtacaatgcagtagactaccacgtaggcaagtacagctgcatattcctaagcccatacagaaccaacttgca

SEQ ID NO: 177016 - DNA, 80 bp, synthetic construct
  source 1..80: mol_type = other DNA
cccagaacaattttatagtccactcagaggacataactccaagaggagccccctatggaggcaacctcacacacataaca

SEQ ID NO: 177017 - DNA, 80 bp, synthetic construct
  source 1..80: mol_type = other DNA
cgccacagggccagcaggtcgcgcgccaacatgaactcgcgacccacgtcgccgccggtctcgaagcggacatagcccag

SEQ ID NO: 177018 - DNA, 80 bp, synthetic construct
  source 1..80: mol_type = other DNA
aaacctacccccaatcaacacaccttcttcatccaaactatatcccagtgtattctatgatacatttcctgggaaaaaag

SEQ ID NO: 177019 - DNA, 80 bp, synthetic construct
  source 1..80: mol_type = other DNA
tagtagcagggttaatagtgttaagaatagcagtatacattgtgcagatgctagcaagacttaggaagggctataggcca

SEQ ID NO: 177020 - DNA, 80 bp, synthetic construct
  source 1..80: mol_type = other DNA
aggaatcacaaagtagaaaacatgtgaaggacaatctttatgccatcttccagggtttaggtagcagtgaaacaccaggc

SEQ ID NO: 177021 - DNA, 80 bp, synthetic construct
  source 1..80: mol_type = other DNA
gccagacggagacggggtcgcagtcctcggagaacccggcggagacgacgagggagctcctcctcagaaaactccgagag

SEQ ID NO: 177022 - DNA, 80 bp, synthetic construct
  source 1..80: mol_type = other DNA
gtgcaaagttcctcttgtaactttgcggtcaactgccgctgacctcaaacatccgttctgctcaccacaaacgaacaacc

SEQ ID NO: 177023 - DNA, 80 bp, synthetic construct
  source 1..80: mol_type = other DNA
gccaaactacagggcgacgagcgtgagcagcatggccctggtactgtagcggacacgcgtcccagtggtccatcgaactc

SEQ ID NO: 177024 - DNA, 80 bp, synthetic construct
  source 1..80: mol_type = other DNA
gtttgggtacccgcgaaggtaggtgtcggggccggagcggaggccgtggaaggattgacaggcgtcggcgtgaggatggc

SEQ ID NO: 177025 - DNA, 80 bp, synthetic construct
  source 1..80: mol_type = other DNA
ttttcagatgccattgagtgaaacatatctacattgcggaaagccggggtcaaaggcatgggtcaatgaaactattacga

SEQ ID NO: 177026 - DNA, 80 bp, synthetic construct
  source 1..80: mol_type = other DNA
acctggagagacaaaactctcagaaccacacccaggctacatagatctgtgagcaacagatgtatgttgctttaagaggt

SEQ ID NO: 177027 - DNA, 80 bp, synthetic construct
  source 1..80: mol_type = other DNA
ggtgaatgctgggaagtgtctaaaaatggtagagattgggaaaccttgaagctacaagacttggttaagagaatcacaga

SEQ ID NO: 177028 - DNA, 80 bp, synthetic construct
  source 1..80: mol_type = other DNA
acagcgcattaccatattaccatctgaaagtacagtagaacaacttgcaaactttctacaaactaatgtaactccaaata

SEQ ID NO: 177029 - DNA, 80 bp, synthetic construct
  source 1..80: mol_type = other DNA
taaaactagatgaaacaacatactttcacacaccagacggtctatggggagacgctatatacaattacaatgcttatgga

SEQ ID NO: 177030 - DNA, 80 bp, synthetic construct
  source 1..80: mol_type = other DNA
actatacatgctaacatatggctacctagactatgtagtaaaatgcacaggcaataaatcagcctggacagacatgagag

SEQ ID NO: 177031 - DNA, 80 bp, synthetic construct
  source 1..80: mol_type = other DNA
cctctaacagattctatactttggagagcaagacttggagtgctgaatccaagggctggtggtggaaactacccgatgca

SEQ ID NO: 177032 - DNA, 80 bp, synthetic construct
  source 1..80: mol_type = other DNA
ccccatttattgaacagagtgcactacttcaaggagacgcggtggaggcaattgagagcgcggttgccagggtagcagac

SEQ ID NO: 177033 - DNA, 80 bp, synthetic construct
  source 1..80: mol_type = other DNA
gtgcagcccccccgagaacacgaaaggatgccatgttagggacacacgtaatctgggacatcggtttacaatccagcgcc

SEQ ID NO: 177034 - DNA, 80 bp, synthetic construct
  source 1..80: mol_type = other DNA
tgcaggtgttaatggtgagctcatcttaaccataccactcaacatgaataacacactattctccactactctgttaggtg

SEQ ID NO: 177035 - DNA, 80 bp, synthetic construct
  source 1..80: mol_type = other DNA
catggttgaatcttttatacctatgaataatttaacagggcacctgggacaagtttccatatacaacgttcaagtcccta

SEQ ID NO: 177036 - DNA, 80 bp, synthetic construct
  source 1..80: mol_type = other DNA
tggacaaattagaaatgaacgccttactaaacaaccaagtgatgataattggttaaattttgatggcacgctgcttggca

SEQ ID NO: 177037 - DNA, 80 bp, synthetic construct
  source 1..80: mol_type = other DNA
gtcactgtggcccccatgtgcgcagagtacaacgggctacgattagctggtcaccagggcttgcccacaatgaacacccc

SEQ ID NO: 177038 - DNA, 80 bp, synthetic construct
  source 1..80: mol_type = other DNA
ggtacaccgccgctagtgaggggcctacgagcgctcccggcagcccccagcggttctagcaacccatcatgtggtggaac

SEQ ID NO: 177039 - DNA, 80 bp, synthetic construct
  source 1..80: mol_type = other DNA
agaaatcatacaacaagcagccagcaacgcactgcaattgtcacaaccgaataggccagcattgccccctgcagaacaga

SEQ ID NO: 177040 - DNA, 80 bp, synthetic construct
  source 1..80: mol_type = other DNA
cacaaacacgtgatgaaatgagtattgagagttttctgggtatatcagggtgcatccacatgtcaaaactggtatttaac

SEQ ID NO: 177041 - DNA, 80 bp, synthetic construct
  source 1..80: mol_type = other DNA
attttgggggcaaccctgtatccgaacagattgttgcagacccatgcaaacagccaacctttgaaatgcccggaaccagt

SEQ ID NO: 177042 - DNA, 80 bp, synthetic construct
  source 1..80: mol_type = other DNA
aaccagatatgttataaacaaccatgtgaataatgaagctctcattgaaaacttcttaggacgatcttcgctttgggcag

SEQ ID NO: 177043 - DNA, 80 bp, synthetic construct
  source 1..80: mol_type = other DNA
aagccttcgccatcgccttctgcgcgtttcagcactttaagctcgcgctggttgtcgtgatcgtagctggaaatacaaac

SEQ ID NO: 177044 - DNA, 80 bp, synthetic construct
  source 1..80: mol_type = other DNA
acacaatacaattccactccatacttacaaacaggtaaaaattatccaaaaaaccaggaagagaagtggcaagaaaaatt

SEQ ID NO: 177045 - DNA, 80 bp, synthetic construct
  source 1..80: mol_type = other DNA
tatcgggccagaaccctccaccacacccaggcacacactacacacaccctcggacagctcctaagaaggcaccggtcgcc

SEQ ID NO: 177046 - DNA, 80 bp, synthetic construct
  source 1..80: mol_type = other DNA
agaatagagcctgctcaggaagaacatgagaaatatcacagcaatgtaaaagagctatcccataaatttggattacccac

SEQ ID NO: 177047 - DNA, 80 bp, synthetic construct
  source 1..80: mol_type = other DNA
ttgaagttatgttatgttggcctgtggtaacagcactggttgcattttttggtgggctggtaactactggggtggaactt

SEQ ID NO: 177048 - DNA, 80 bp, synthetic construct
  source 1..80: mol_type = other DNA
ccatataccagtctctatagacagtggattgatgaattcatttaatataatataatgtttgcagtagaacaaaatattat

SEQ ID NO: 177049 - DNA, 80 bp, synthetic construct
  source 1..80: mol_type = other DNA
aacaacacaatagctgctaaaaacacaactggcatgtacactgtccgagttagtcagcagactcaaccagctcaagaaat

SEQ ID NO: 177050 - DNA, 80 bp, synthetic construct
  source 1..80: mol_type = other DNA
cggagtcagattcaagtgctgcacaagcgtttcctggaaggcctgctagactgcgcctccctcctgcgcctggatcccag

SEQ ID NO: 177051 - DNA, 80 bp, synthetic construct
  source 1..80: mol_type = other DNA
ttgggacgcgcaacacccaataccaggccccttaccagcggggcagctcagggaaccaagaggatctgacatagcaggga

SEQ ID NO: 177052 - DNA, 80 bp, synthetic construct
  source 1..80: mol_type = other DNA
agttaacataaacactagagtagttataaaatgcccctatacaattcccatgctagcagacaactctaatgaaaaccagg

SEQ ID NO: 177053 - DNA, 80 bp, synthetic construct
  source 1..80: mol_type = other DNA
ttggaagaaaatatcacacagctattagaagcagctcaaatacaacaagagaaaaacatgtatgaattacagaaattaaa

SEQ ID NO: 177054 - DNA, 80 bp, synthetic construct
  source 1..80: mol_type = other DNA
gggccgactaagaatgggtttctttccaaactgcactcataatgaccaattagaattagataatgccatatacaccatat

SEQ ID NO: 177055 - DNA, 80 bp, synthetic construct
  source 1..80: mol_type = other DNA
gtgggggtgtggtaaataattcctagggaatgttagatcttaccaagtaagcacccgaagatgaacagcacaattccaag

SEQ ID NO: 177056 - DNA, 80 bp, synthetic construct
  source 1..80: mol_type = other DNA
ttggatgacacaaacactgctgattcaaaatgcaaacccagactgtaagctagtgttgaaaggtttgggaatgaacccta

SEQ ID NO: 177057 - DNA, 80 bp, synthetic construct
  source 1..80: mol_type = other DNA
aacgagaagacggcgctgcagaaagcgcctcaggttcaccggccaaaagaccccgtatctggccagaagagagccagacg

SEQ ID NO: 177058 - DNA, 80 bp, synthetic construct
  source 1..80: mol_type = other DNA
cctacttaagtgatcgtgaggccactgcggtggaccaaccgacacagcctgacgtggcaacgtgtcgcttttacactctc

SEQ ID NO: 177059 - DNA, 80 bp, synthetic construct
  source 1..80: mol_type = other DNA
ctaacaaagaccactttgacaaaaacctttttaaccaactttcatattataacacatttcaaacaatagcccaacttaaa

SEQ ID NO: 177060 - DNA, 80 bp, synthetic construct
  source 1..80: mol_type = other DNA
ggatgaaaccactgatgtaggacctgattacattcctgattgtgattgcctaaccgcatgctattactgcaaatcaaagg

SEQ ID NO: 177061 - DNA, 80 bp, synthetic construct
  source 1..80: mol_type = other DNA
atactttacaaacaggaataggaacaaattctcaaaataaaaccaactctataacaatagcaggagacagtaactacaat

SEQ ID NO: 177062 - DNA, 80 bp, synthetic construct
  source 1..80: mol_type = other DNA
tagaatactatgaaaacaacaccaaaaaagcagacaccaacttatttgactactacacaggcatgtttagcagcatattc

SEQ ID NO: 177063 - DNA, 80 bp, synthetic construct
  source 1..80: mol_type = other DNA
ctaagggatactacccacatctctcaaactgctctaccacagggaatagaggatttgatcgagaaggtcgcgagcaatgc

SEQ ID NO: 177064 - DNA, 80 bp, synthetic construct
  source 1..80: mol_type = other DNA
tgctaccgtacgtcaattcattagctatcgattgcatggccaaacacaataactgggggctagtaatcctacccttggaa

SEQ ID NO: 177065 - DNA, 80 bp, synthetic construct
  source 1..80: mol_type = other DNA
cgtgtggataccaccccctgctggaccaagagagcaagaaagatacgctcgggaagccgaggtgcgcttccttcgtggta

SEQ ID NO: 177066 - DNA, 80 bp, synthetic construct
  source 1..80: mol_type = other DNA
tgtctacctctaaaggtcactaagcactccgagcgtaagcgaggagtgcgaccctccccccctggggcaactccctcgaa

SEQ ID NO: 177067 - DNA, 80 bp, synthetic construct
  source 1..80: mol_type = other DNA
tgatggaaattgctgaggtggattctgtggttcccgtaaacaatgtggaggaagctgtcaattctatggaggcgtacagg

SEQ ID NO: 177068 - DNA, 80 bp, synthetic construct
  source 1..80: mol_type = other DNA
aaactagcgagcggctggatcgctcgctgcgccaggatcccgggaacagctccgtcacgcgtgtacccgaaaaacccttc

SEQ ID NO: 177069 - DNA, 80 bp, synthetic construct
  source 1..80: mol_type = other DNA
tgattttggtgtacatctcgttgctttcgtggagcttgttgaacaccgggttgtcctcgaaagcttgaatgctgagggat

SEQ ID NO: 177070 - DNA, 80 bp, synthetic construct
  source 1..80: mol_type = other DNA
ggctcagtctcggactttactggccgggatagtgcagcaacagcaacagctgttagacgtggtcaagagacaacaagaaa

SEQ ID NO: 177071 - DNA, 80 bp, synthetic construct
  source 1..80: mol_type = other DNA
ctagcgcaagtgtacaatcaaatacttgctgaagacaagaggcgcaggcaagttattgatgtcatggcagcaatttttca

SEQ ID NO: 177072 - DNA, 80 bp, synthetic construct
  source 1..80: mol_type = other DNA
tcaaccaaaataaaaatatgagtaacataatagccaatattttaataaaaaacatgactacatatcacgcaaaattaaat

SEQ ID NO: 177073 - DNA, 80 bp, synthetic construct
  source 1..80: mol_type = other DNA
ctgcaaatagtgaataaaccacgcaacaatataacacaatgggagctcaagtgtcagcccaacacaacggcactcaccag

SEQ ID NO: 177074 - DNA, 80 bp, synthetic construct
  source 1..80: mol_type = other DNA
accctcagcattccagagagaagacggaggtgccgaaagcgactccggttcaccggccaaaagaccccggtactcgttcg

SEQ ID NO: 177075 - DNA, 80 bp, synthetic construct
  source 1..80: mol_type = other DNA
tatgctgagtgggtaataacaacacgccaggcggcccagcttaggaggaagctcgagttctttacgtacataagatttga

SEQ ID NO: 177076 - DNA, 80 bp, synthetic construct
  source 1..80: mol_type = other DNA
ctctgttggcagagtccgggcgatcctctgagaccctccgggcccggacggccgccctcagccccccagacagaccccag

SEQ ID NO: 177077 - DNA, 80 bp, synthetic construct
  source 1..80: mol_type = other DNA
tttgtgctgtccgccatcttgtgacttccttccgctttttgtaaaaaaaagaggaagtatgacgtagcggcggggggggg

SEQ ID NO: 177078 - DNA, 80 bp, synthetic construct
  source 1..80: mol_type = other DNA
atgttccaataacagtgacaatagcccctatgtacgctgaatacaacggattgagactggcgtcaacacaaggtgttccg

SEQ ID NO: 177079 - DNA, 80 bp, synthetic construct
  source 1..80: mol_type = other DNA
gtagctgacgtcgaggattgacgtaaagttcaaaggtcatcctcgccggaagctatataagatggcggacaacaacttcc

SEQ ID NO: 177080 - DNA, 80 bp, synthetic construct
  source 1..80: mol_type = other DNA
ttttccctaatgccacagcagactcaacttctactctagataatgcaatatacacaatatgtgatataggtagtgacaac

SEQ ID NO: 177081 - DNA, 80 bp, synthetic construct
  source 1..80: mol_type = other DNA
atgatccaagactagagactgattttcatactgcactgttttcaaaatactcaggtaatcagcaaattgaaatgtcagat

SEQ ID NO: 177082 - DNA, 80 bp, synthetic construct
  source 1..80: mol_type = other DNA
taactacgcaaagcctagtatcatcttcgatgtattagggctggtcgctccctgcatacccagcagtagacctggcagat

SEQ ID NO: 177083 - DNA, 80 bp, synthetic construct
  source 1..80: mol_type = other DNA
aacacaacaaatttgactcaacacccatctgccccaacgatccctttcacccccgatttttcaaatgttgattctttcca

SEQ ID NO: 177084 - DNA, 80 bp, synthetic construct
  source 1..80: mol_type = other DNA
ttgaggcagcaagtctcaacgacacagccaacttcagaatgttatttggaaacttatattcaacatttcatgcaaatcca

SEQ ID NO: 177085 - DNA, 80 bp, synthetic construct
  source 1..80: mol_type = other DNA
atgccacttcatgccttccgggctgagggagttttgcggggcgtaagcgcgccggccgggccgaggaagttttgcgctga

SEQ ID NO: 177086 - DNA, 80 bp, synthetic construct
  source 1..80: mol_type = other DNA
acagccaaataacaggggccagcctgcacccaggagtactaatgactaagaaaagaaagcgcatactacccagctttaaa

SEQ ID NO: 177087 - DNA, 80 bp, synthetic construct
  source 1..80: mol_type = other DNA
ccgactcgggagacacctactatggcttagtttccatcaatgatttcggtactctagctgtgagagtggtgaacgagttt

SEQ ID NO: 177088 - DNA, 80 bp, synthetic construct
  source 1..80: mol_type = other DNA
catttgccccagaagcatccactcaaataccaataaccgtcactattgcccccatgtttaccgagttcaacgggttgaga

SEQ ID NO: 177089 - DNA, 80 bp, synthetic construct
  source 1..80: mol_type = other DNA
cccgtgtgatgtgtgtgattgacgttcgggaaacatgtccccatcatcagcgtcacaactgacgtgggttggtcactgac

SEQ ID NO: 177090 - DNA, 80 bp, synthetic construct
  source 1..80: mol_type = other DNA
atctgaaacattattggaggcggcacaaggagacaatattactataacacacaacctaaccatcacatcgtgctacaaaa

SEQ ID NO: 177091 - DNA, 80 bp, synthetic construct
  source 1..80: mol_type = other DNA
gcttcattgagcgtcgggtggctgatttccgcatccttgcatacggtgatgacgtcatctacgcctctgacccccctgtc

SEQ ID NO: 177092 - DNA, 80 bp, synthetic construct
  source 1..80: mol_type = other DNA
tttatgacaaaacacatccgggagagaagggtatagatcttagtgaagcagattcaacaggcccaatgaaagaccccctc

SEQ ID NO: 177093 - DNA, 80 bp, synthetic construct
  source 1..80: mol_type = other DNA
acgacagggcaccttacccactgttctggttaccaacatgacgaaatcatactgcatggccattctatcaagtatttgga

SEQ ID NO: 177094 - DNA, 80 bp, synthetic construct
  source 1..80: mol_type = other DNA
tacttgacttagccagatacctagggtgcacctggtggttctatagagacaaacacacagactacatagttcagtatgac

SEQ ID NO: 177095 - DNA, 80 bp, synthetic construct
  source 1..80: mol_type = other DNA
aactatctgtataaatatggctctttctatcagcaagtactcgtacccagctatatcaaaaaaatcacacacaatcccga

SEQ ID NO: 177096 - DNA, 80 bp, synthetic construct
  source 1..80: mol_type = other DNA
cagccaaaaacagcaacaggagtatgtagaaaccctcagaataatggctgattcatccaggaaatttctaccattatatg

SEQ ID NO: 177097 - DNA, 80 bp, synthetic construct
  source 1..80: mol_type = other DNA
ggaaagtaagggatgattctcatgatttggagaagacacacttcataaaaacacgcaactcaatcaagactgcaggaccc

SEQ ID NO: 177098 - DNA, 80 bp, synthetic construct
  source 1..80: mol_type = other DNA
aggtaccatctatgccctatacaaattgatgtgtatgacacaagggccttacacaggacttgccgcgcctcctgtaaaga

SEQ ID NO: 177099 - DNA, 80 bp, synthetic construct
  source 1..80: mol_type = other DNA
ctctttgagcacaaactgcgacacgtgcttttggtgcgccacgtagccgatgctgatgccgatcatgtgcttaagcagaa

SEQ ID NO: 177100 - DNA, 80 bp, synthetic construct
  source 1..80: mol_type = other DNA
gatcagaactacagaaattggaaagtgtttaaacttacctgaatacagtgtccttagaaggcgctggttagacatgtttt

SEQ ID NO: 177101 - DNA, 80 bp, synthetic construct
  source 1..80: mol_type = other DNA
acttccttattctccaaatacaagggtaatgtagactgcacattgaatgaacacatgagggtggctatagcgcattattc

SEQ ID NO: 177102 - DNA, 80 bp, synthetic construct
  source 1..80: mol_type = other DNA
aacaccatgaatttgtcttgacgttcgatcaggtggtaaccccccactagtttggtcgatgaggctgagaactccccacg

SEQ ID NO: 177103 - DNA, 80 bp, synthetic construct
  source 1..80: mol_type = other DNA
caacaggtgaaaacaccaaaaacattaaaatagcaggagacagtaactacaactggtacccctataaccttgaaaacaaa

SEQ ID NO: 177104 - DNA, 80 bp, synthetic construct
  source 1..80: mol_type = other DNA
gatatccatgattccatattggtgtcttactcatcagatttagtcatataccgaacaaacactataggtgatgactacat

SEQ ID NO: 177105 - DNA, 80 bp, synthetic construct
  source 1..80: mol_type = other DNA
cgaatttatgatgggatctaacacagattctaacactggaggcattacctatgacaaagccaacccaggtgaagttgggg

SEQ ID NO: 177106 - DNA, 80 bp, synthetic construct
  source 1..80: mol_type = other DNA
ggcttctacagctccatctttctctcccgagagagactgagcccagacttcccgggcatatacaaagaagtagtatataa

SEQ ID NO: 177107 - DNA, 80 bp, synthetic construct
  source 1..80: mol_type = other DNA
tacctacaatgccaaaagccacaaaaatgacttacatgaactaagaagagcctactttaaacaactaaccactgaggggc

SEQ ID NO: 177108 - DNA, 80 bp, synthetic construct
  source 1..80: mol_type = other DNA
tgctgacacgctcgcgcgtgtcagaccacttcgggctcgcgggggtcgggaattttgctaaacagactccgagttgctct

SEQ ID NO: 177109 - DNA, 80 bp, synthetic construct
  source 1..80: mol_type = other DNA
atgtagaaatgaagcccactgaaaacatgctagtagctgtagatcattatgcaggtcagttattatcattagatatacct

SEQ ID NO: 177110 - DNA, 80 bp, synthetic construct
  source 1..80: mol_type = other DNA
agacgttcgttgaagacttcgtgtcgcgtgtagtagaactgtgtctcggggctggtgctggccacgtcgtcgtcgtgtag

SEQ ID NO: 177111 - DNA, 80 bp, synthetic construct
  source 1..80: mol_type = other DNA
ggtgtcttcatttaaactaattaatctactttaatggtatatttaggttacaaaaaacttaggattcacggatccaacag

SEQ ID NO: 177112 - DNA, 80 bp, synthetic construct
  source 1..80: mol_type = other DNA
ttcctggctaggatgatcaccaatgagagtgatatatactctttacctcctgacccaaagtattttgatggctatgacca

SEQ ID NO: 177113 - DNA, 80 bp, synthetic construct
  source 1..80: mol_type = other DNA
tcaccagcacaattacagataaattgttaaagactctgatcaaaatagtatctacattggtgataatcagcagaaattac

SEQ ID NO: 177114 - DNA, 80 bp, synthetic construct
  source 1..80: mol_type = other DNA
agtaaaagttaacaatgactggcaaaaaaaattctttgacaacagagactccttatttctctttgccacttaccacccag

SEQ ID NO: 177115 - DNA, 80 bp, synthetic construct
  source 1..80: mol_type = other DNA
ttgatacatggctgcttttagcctaattgtgtattgctctcgttgccaaaacctggtgtaagggccggcacccgcaacat

SEQ ID NO: 177116 - DNA, 80 bp, synthetic construct
  source 1..80: mol_type = other DNA
cgacggcatgcctaatggccgtcctctggacgctggtacccgccaagcacgcggtgagggccgtcactccagccatcatg

SEQ ID NO: 177117 - DNA, 80 bp, synthetic construct
  source 1..80: mol_type = other DNA
ttgcaaagctagagtatgtatcgggagcctcaagcgttgtcccgatcaccgtaaccatagcccccatgacagcagagtac

SEQ ID NO: 177118 - DNA, 80 bp, synthetic construct
  source 1..80: mol_type = other DNA
agtgttgaaagagttctactacacaaccataggctattcctctaatgcagacaaagtagagtctgtattcactaacactc

SEQ ID NO: 177119 - DNA, 80 bp, synthetic construct
  source 1..80: mol_type = other DNA
catctagcggcagaaacaaaaactgcagacaaaatgccaagtacaagtagaccaacagcaccatctagtggaacaggagg

SEQ ID NO: 177120 - DNA, 80 bp, synthetic construct
  source 1..80: mol_type = other DNA
atctcacagataaggttagcagagcacgcgagaagctcagatccagaagtaagatatatgtggactaactgtaggggaga

SEQ ID NO: 177121 - DNA, 80 bp, synthetic construct
  source 1..80: mol_type = other DNA
gttacgctggggttgacggggacgggatgtgcggggccgggggggttggcagcgtggacttgcggacttttgacggtgac

SEQ ID NO: 177122 - DNA, 80 bp, synthetic construct
  source 1..80: mol_type = other DNA
agtactaacccaagctacacagaactacaatccaaatggacaactgctatctatgctaagaaaacagacagcaactttgg

SEQ ID NO: 177123 - DNA, 80 bp, synthetic construct
  source 1..80: mol_type = other DNA
atgacaacccagatactaccgctgcaaacgaattgttcgccacgtggaacattgggtaccattacgcttaccagttgcgc

SEQ ID NO: 177124 - DNA, 80 bp, synthetic construct
  source 1..80: mol_type = other DNA
cactaaattggtgtgctcagagcccctggtgaagatgcgagtttgcaatgtcccccgcctcatcaacaactttgtagccc

SEQ ID NO: 177125 - DNA, 80 bp, synthetic construct
  source 1..80: mol_type = other DNA
gggagaaatactaaactactacgctcactggtctggcagtttacgattcacattcttgttttgcggtaccgcaatgacaa

SEQ ID NO: 177126 - DNA, 80 bp, synthetic construct
  source 1..80: mol_type = other DNA
acacaaccataggctactcctccaaccctacaaaagtacaagatgtctttgataaaaccctctatgcccactgttcctac

SEQ ID NO: 177127 - DNA, 80 bp, synthetic construct
  source 1..80: mol_type = other DNA
caactggaaagctgatcctgacatattcaccaccgggagcatcccccccaaagagcagaaaggatgccatgctcggtact

SEQ ID NO: 177128 - DNA, 80 bp, synthetic construct
  source 1..80: mol_type = other DNA
ggaatgatcactaatgttcttcatatggccagagtggattcctttatgcccatcaataacatacaagaccatgaaggaaa

SEQ ID NO: 177129 - DNA, 80 bp, synthetic construct
  source 1..80: mol_type = other DNA
tactatgcagacaagacacgtgtgcaacttccactcccgatcagagtccacactagagaacttctttggtagggccgcat

SEQ ID NO: 177130 - DNA, 80 bp, synthetic construct
  source 1..80: mol_type = other DNA
gccaacctgagacccagacagtacaatgcagatggcagttctaacagccaatatgcacagctacaacccacgtggaccag

SEQ ID NO: 177131 - DNA, 80 bp, synthetic construct
  source 1..80: mol_type = other DNA
taccagtactgctcacccccggatctggacaatttatgacaactgacgactaccaatctcccagtgctttaccttggttt

SEQ ID NO: 177132 - DNA, 80 bp, synthetic construct
  source 1..80: mol_type = other DNA
tagagcagcatgtccacctcgaaggtgtcggtgcgtacggccgtgagtgcgaatcccgggtggatgtgcgccttggtctg

SEQ ID NO: 177133 - DNA, 80 bp, synthetic construct
  source 1..80: mol_type = other DNA
agggtccctatcctcctgactatacgcctcacggaggcgtctgaggtcatgttcaacatgaatgtggacgagagcgcctc

SEQ ID NO: 177134 - DNA, 80 bp, synthetic construct
  source 1..80: mol_type = other DNA
aaaagaaggatctcataccaaaggacagaaacctgacaaaactcaaaactgctatggaaaaatatgggttagatctacca

SEQ ID NO: 177135 - DNA, 80 bp, synthetic construct
  source 1..80: mol_type = other DNA
gttaccgaggcgtgcataattcttttggagccaggtgtgggccgtgaggcccggaagaccgaccagggtcttgtactggg

SEQ ID NO: 177136 - DNA, 80 bp, synthetic construct
  source 1..80: mol_type = other DNA
tcaatggaagttcccccccctcctgctataactgatctcttacgctctgttagaacaccagaggttgttaaatactgtga

SEQ ID NO: 177137 - DNA, 80 bp, synthetic construct
  source 1..80: mol_type = other DNA
gactaggcatgtacataacttccataccagatctgaatctagcattgagaactttctcagtagggcggcttgtgtgtaca

SEQ ID NO: 177138 - DNA, 80 bp, synthetic construct
  source 1..80: mol_type = other DNA
cttgcaatgacttctctgttaggctcctcagggacacccccttcttaacacaaactgccctgtatcaaaatgacccgaac

SEQ ID NO: 177139 - DNA, 80 bp, synthetic construct
  source 1..80: mol_type = other DNA
gacctagaagatctactcgccgccgtggaagaagacgaacagtaaggaggcgccgcgttaggcgactgaggcggaggagg

SEQ ID NO: 177140 - DNA, 80 bp, synthetic construct
  source 1..80: mol_type = other DNA
agtggcagaattttttcagtcctttccatcaggtgaaccatcaagttctaaattgtcaggttttttccagtcagttacca

SEQ ID NO: 177141 - DNA, 80 bp, synthetic construct
  source 1..80: mol_type = other DNA
ttcaccaccaactgtggcacatagtgatgctttgagtaggaggtttgcatttgacatggaaatctgcccaatgtctcaat

SEQ ID NO: 177142 - DNA, 80 bp, synthetic construct
  source 1..80: mol_type = other DNA
ctggcgccatccgctccaacctggatttggccaagcaacttcttaccctctcccacgctgccaactctgtcacccacatc

SEQ ID NO: 177143 - DNA, 80 bp, synthetic construct
  source 1..80: mol_type = other DNA
aatcatcatttattagcaccacccacaataacctcgttgccagctatgaataggagatttttcttagatctagatattgt

SEQ ID NO: 177144 - DNA, 80 bp, synthetic construct
  source 1..80: mol_type = other DNA
ttattggatacagcaaaagcgctgcaaccatgtacacaatgtgacaaacctgctcattattcccgctgctgtccactttt

SEQ ID NO: 177145 - DNA, 80 bp, synthetic construct
  source 1..80: mol_type = other DNA
tcaagaatgcaaaaagagttgagcctgttgcagttatgttccacggaaatccaggaacgggtaaatctttggcaacaaat

SEQ ID NO: 177146 - DNA, 80 bp, synthetic construct
  source 1..80: mol_type = other DNA
ttcgccatagggcctttatcttctcgccattggtccgtgtggggggttgccataggcttcggcctcacttttaggccttc

SEQ ID NO: 177147 - DNA, 80 bp, synthetic construct
  source 1..80: mol_type = other DNA
tttattaaatatagtaactatttataacactacacaaacagcagcacagctatctaaattcatgccaacaataaacacaa

SEQ ID NO: 177148 - DNA, 80 bp, synthetic construct
  source 1..80: mol_type = other DNA
gattgtacccaggctacatactattgtaaacataaaaatagatatttcccaataacagtgacaagtcatgactggtatga

SEQ ID NO: 177149 - DNA, 80 bp, synthetic construct
  source 1..80: mol_type = other DNA
tgagaggaaaatactggctataccactagatatgagcaatacacttttctctacaacacttatgggggaagttctaaact

SEQ ID NO: 177150 - DNA, 80 bp, synthetic construct
  source 1..80: mol_type = other DNA
gcacttgaggacaagggtaaatcatttacaagtcagtacgttttggctagtacaaatcttgacacccttacacctcccac

SEQ ID NO: 177151 - DNA, 80 bp, synthetic construct
  source 1..80: mol_type = other DNA
caaaggtcaagcacttctgtttccccggtcgatgaggatatgctttacccgaggcaaaaaccttagagatcgttatccac

SEQ ID NO: 177152 - DNA, 80 bp, synthetic construct
  source 1..80: mol_type = other DNA
tagcacagcacgctgccgtcggctgccacgccggccacgctgcggtcccaactgaagaggttggcgagtccgatggtgcc

SEQ ID NO: 177153 - DNA, 80 bp, synthetic construct
  source 1..80: mol_type = other DNA
tagagggtctagaagctttggatctccatacaagcgcagggtatccatacacagcatgtggtattaagaagaaagaccta

SEQ ID NO: 177154 - DNA, 80 bp, synthetic construct
  source 1..80: mol_type = other DNA
ggaggaaggtaaatagcatctgattcttgctgcattcttttaatacctgctttgccaaagagtcctcgtctgatgtccca

SEQ ID NO: 177155 - DNA, 80 bp, synthetic construct
  source 1..80: mol_type = other DNA
tgtcataatgggtgctcaggtatctgctcagaacaatggaacccacgaaaacaaaaacacagccactggtggctcaacca

SEQ ID NO: 177156 - DNA, 80 bp, synthetic construct
  source 1..80: mol_type = other DNA
tactgctgtctctagtacccatacaagatcctcaatactctccaacaacgcatcatacaccacatcattggataatacaa

SEQ ID NO: 177157 - DNA, 80 bp, synthetic construct
  source 1..80: mol_type = other DNA
gtactaagtatggattaacaataacacctgctgataaatctgattgcttcaaacaacttgattacaacaatgtgactttt

SEQ ID NO: 177158 - DNA, 80 bp, synthetic construct
  source 1..80: mol_type = other DNA
atataaacatcaaagagctggtgcagctccgacgcaagtgtgagatgttcacttacctacggtttgacatggaggtcacc

SEQ ID NO: 177159 - DNA, 80 bp, synthetic construct
  source 1..80: mol_type = other DNA
gttggccgtaggttatacctcccaccatatagcctactgcaacgagcttggattgacaaattcatttgaacaattaccag

SEQ ID NO: 177160 - DNA, 80 bp, synthetic construct
  source 1..80: mol_type = other DNA
aggatgcccagaaggtacccgtaggtaacaagtgacactatggatctgatctggggccaactacctctatctaggtgagt

SEQ ID NO: 177161 - DNA, 80 bp, synthetic construct
  source 1..80: mol_type = other DNA
caggagatggaggagactacgcacccgcagacctagacgacctctacgccgccgtcgacgccgaaaacgcagagtaagga

SEQ ID NO: 177162 - DNA, 80 bp, synthetic construct
  source 1..80: mol_type = other DNA
acaacagtcaaagtaccaagttacaaacatttgaaaagtggctatactcatctagcacacactatcagacatttgccacc

SEQ ID NO: 177163 - DNA, 80 bp, synthetic construct
  source 1..80: mol_type = other DNA
aaaacacattcaatacaatatattaattggtgagggaccatgtcaacctggagactgtgggggcaagctcctttgcaagc

SEQ ID NO: 177164 - DNA, 80 bp, synthetic construct
  source 1..80: mol_type = other DNA
tccccctcagtagaagcatgtggattttccgataggctcaaacaaatcactatcggtaactccacaattactacccaaga

SEQ ID NO: 177165 - DNA, 80 bp, synthetic construct
  source 1..80: mol_type = other DNA
aaggcctttatcttcttgccattggtccgtcttcggggtcgccgtaggctttgggctccattttaggccttccggactac

SEQ ID NO: 177166 - DNA, 80 bp, synthetic construct
  source 1..80: mol_type = other DNA
tatgtggcaagtgggttcctcaaaggccgtggccgcctcaacggtgacacaggcacccacggaatataccggggaaagga

SEQ ID NO: 177167 - DNA, 80 bp, synthetic construct
  source 1..80: mol_type = other DNA
cccggctcaggcgcggtgctgctccggcatgtcttacaagtgggtcactctgagaaaggcttgcaaaggtcgtgctctcc

SEQ ID NO: 177168 - DNA, 80 bp, synthetic construct
  source 1..80: mol_type = other DNA
ttgctaactgctcttggcggacatatctatgctagacatggagacacccttgaaagagccagagagctcattagggtcct

SEQ ID NO: 177169 - DNA, 80 bp, synthetic construct
  source 1..80: mol_type = other DNA
gcttgtttcgtagatattaaaattgcattacccaaatatagtaatcctaattctactgaatgttatttaatttgcacaca

SEQ ID NO: 177170 - DNA, 80 bp, synthetic construct
  source 1..80: mol_type = other DNA
ggtgtagtctttaatacatttagaacagaagaacacattaaagagcccggaattaaagtatgtacagacaatagtaactc

SEQ ID NO: 177171 - DNA, 80 bp, synthetic construct
  source 1..80: mol_type = other DNA
ggtacagcatgcccaagcatgccctttgccagtgattacagtcaaggtgcatttaccccactggacattaatgcccccac

SEQ ID NO: 177172 - DNA, 80 bp, synthetic construct
  source 1..80: mol_type = other DNA
taggaacttcctttaaagaccaagaatccacacaagagtttgaaaaatggttatatctaacaccatctcactatcaaact

SEQ ID NO: 177173 - DNA, 80 bp, synthetic construct
  source 1..80: mol_type = other DNA
gaggtttgatttggaagtgaccctagttattaccagttaccaagaaccgggaacaatcaccacccaagacatgcctgttt

SEQ ID NO: 177174 - DNA, 80 bp, synthetic construct
  source 1..80: mol_type = other DNA
ggctcttccgatctgggggttgtactctattattccggtaattttgtacgccagttttatctccccttcccccgactgta

SEQ ID NO: 177175 - DNA, 80 bp, synthetic construct
  source 1..80: mol_type = other DNA
tagacagcataacaaaagcaaacaacttatacacagaaggacaaagcatagtcctactagaaaacatgcccctgtggtgc

SEQ ID NO: 177176 - DNA, 80 bp, synthetic construct
  source 1..80: mol_type = other DNA
agtacgtgtcgctgacactctcccaacaggtccctcaaataatgaagctatacccaatttaacagcagtggagactggcc

SEQ ID NO: 177177 - DNA, 80 bp, synthetic construct
  source 1..80: mol_type = other DNA
cggctagttatattaggacgtagacccggcccaggaagtgcacgacatagcattcggttggcctttgtgctacgtcacta

SEQ ID NO: 177178 - DNA, 80 bp, synthetic construct
  source 1..80: mol_type = other DNA
tttgtagataaattcaccccagcaaccaacacttcttcaaacaagaatgagtttgccccagttgactggcttttgggctc

SEQ ID NO: 177179 - DNA, 80 bp, synthetic construct
  source 1..80: mol_type = other DNA
tagcgggcacgtactgcacaatgtgcggttctttttcctcaaagagtaggtagagcgcgctgcagatcagccgccgggcg

SEQ ID NO: 177180 - DNA, 80 bp, synthetic construct
  source 1..80: mol_type = other DNA
caacaacatcaaaaagagttgaaccagttgcaattatgtttcatggggatccaggatcagggaaatcagtctgcacaaat

SEQ ID NO: 177181 - DNA, 80 bp, synthetic construct
  source 1..80: mol_type = other DNA
tacacatccgttctgctcaccacaaactgacaatccttgcatcaccttccaggtcttgcaagacttctattaccccatta

SEQ ID NO: 177182 - DNA, 80 bp, synthetic construct
  source 1..80: mol_type = other DNA
gcttggggatgaaccccaccttagaggaaatgctgacggcctgccaagggataggaggcccgggacaaaaggcaagacta

SEQ ID NO: 177183 - DNA, 80 bp, synthetic construct
  source 1..80: mol_type = other DNA
tagaatcattagtgcccttacgatcatggtcaggaacagtgctgacacccctacaattcttgccacccttgcgttattgg

SEQ ID NO: 177184 - DNA, 80 bp, synthetic construct
  source 1..80: mol_type = other DNA
taagagcccacatagacgcaaacaaagcaaaagacgctcaaactaatcaaggctcaccaacctataacagtgagccattc

SEQ ID NO: 177185 - DNA, 80 bp, synthetic construct
  source 1..80: mol_type = other DNA
ggacgtgtggggtatggagcagcattgctacgcaagtacttcgcacagtctcaaggcgagattactgccaaacatgatgt

SEQ ID NO: 177186 - DNA, 80 bp, synthetic construct
  source 1..80: mol_type = other DNA
aagatactcgacttcaggttgacttcaatgaagctctgttttcaaaatataaagggaatgttgactgtcctatgaatgat

SEQ ID NO: 177187 - DNA, 80 bp, synthetic construct
  source 1..80: mol_type = other DNA
cgaaggagaagacggtggcgcaggtggcgacgcagaccatggaggcgccgctggaggaccagaagacgcagacctgctag

SEQ ID NO: 177188 - DNA, 80 bp, synthetic construct
  source 1..80: mol_type = other DNA
taaaagatgcgcgtcaaccgtcaaagacgcaacaaccttacgtaccgacaaacggtatatgtaattctgaccttctacat

SEQ ID NO: 177189 - DNA, 80 bp, synthetic construct
  source 1..80: mol_type = other DNA
gctatacccttggatatgagtaatacactgttctctactacactgatgggtgaagtcctaaattacttctcaaactggtc

SEQ ID NO: 177190 - DNA, 80 bp, synthetic construct
  source 1..80: mol_type = other DNA
ggcaataggcttctccgcaacggaagaggcccgtaagtcagtattaaaaactttatacaccaataactcttactgggaat

SEQ ID NO: 177191 - DNA, 80 bp, synthetic construct
  source 1..80: mol_type = other DNA
attccactagacatacagttagatgggccacttagaaacactctagtaggaaacatatccagatattatactcactggtc

SEQ ID NO: 177192 - DNA, 80 bp, synthetic construct
  source 1..80: mol_type = other DNA
gaagcctggtaccgaacacacgctgcttgctgtggttgcggggatattattggccattttaatcgtctggttgagcgcta

SEQ ID NO: 177193 - DNA, 80 bp, synthetic construct
  source 1..80: mol_type = other DNA
ggatctccgaagaggctactttggtgaaaaagctctcaaaagaatgtcagaacaacaaattacttctgaatttattacag

SEQ ID NO: 177194 - DNA, 80 bp, synthetic construct
  source 1..80: mol_type = other DNA
agtttttgctaagcccaaacacacggccgcatggatcccccgtccacctagagcaacccagtacttgcataaattcagca

SEQ ID NO: 177195 - DNA, 80 bp, synthetic construct
  source 1..80: mol_type = other DNA
tgcaaatcgtgactacacagcgttacaaaaagaatggacaactactatatatgctaaaaaaacagatagcaactttggct

SEQ ID NO: 177196 - DNA, 80 bp, synthetic construct
  source 1..80: mol_type = other DNA
caattattgtaccttatgtaaatgctgttccaatggattctatgctcagacacaataattggagtttattaattattcca

SEQ ID NO: 177197 - DNA, 80 bp, synthetic construct
  source 1..80: mol_type = other DNA
atacaaagggtccaaaaaccgacccaatatataacatggatggtacattattgggtaatgtactaattttcccccatcag

SEQ ID NO: 177198 - DNA, 80 bp, synthetic construct
  source 1..80: mol_type = other DNA
ccagacagtcagaaactgctccatcaggggcatagttcctatgcgcccaatcagagtctacgtcgtccacttcctgggca

SEQ ID NO: 177199 - DNA, 80 bp, synthetic construct
  source 1..80: mol_type = other DNA
ggtgtccgagtcctcgtcgccgctggcctcctcgaagccggcaaacatggcttcggacagggaggtcggcgtcggtgtgg

SEQ ID NO: 177200 - DNA, 80 bp, synthetic construct
  source 1..80: mol_type = other DNA
tggtatttatgacaatgcaccaacacggaagcaaaatcttaagaaaatactcaccatgagcactaaatacaagtggacta

SEQ ID NO: 177201 - DNA, 80 bp, synthetic construct
  source 1..80: mol_type = other DNA
taaatctcagtgggaatcctacctgtaggttactgaaatacaactacccaactaaaccagggcagtgtggagctgtcatt

SEQ ID NO: 177202 - DNA, 80 bp, synthetic construct
  source 1..80: mol_type = other DNA
agcacaacaactgggggatcgtgattctaccctttgtgccacttaagtacgaggccggcgcgtcaacagcaatccccata

SEQ ID NO: 177203 - DNA, 80 bp, synthetic construct
  source 1..80: mol_type = other DNA
gcagcgagataggaaacacaaccacatccacagaccagaacacaatggacacatccatactaaatgacaattccgcatgc

SEQ ID NO: 177204 - DNA, 80 bp, synthetic construct
  source 1..80: mol_type = other DNA
caaatcatgtatgtaccacccgggggtccggagccacgtgactacgaggacttcgcttggcagacatcaacaaatccaag

SEQ ID NO: 177205 - DNA, 80 bp, synthetic construct
  source 1..80: mol_type = other DNA
tgttgactgcagctaaacactatgcagcccaactattcccattagatattaaccctgaacccataacaatggaacaagct

SEQ ID NO: 177206 - DNA, 80 bp, synthetic construct
  source 1..80: mol_type = other DNA
gtggaggtcaacacatcgaaacacgcaggagaccaagtatttgggtttaaactagatccgggtctgatgcagtgctaaac

SEQ ID NO: 177207 - DNA, 80 bp, synthetic construct
  source 1..80: mol_type = other DNA
gatccctttatccgctttcacaccgattttcgtggcgaggtggttaacaccatgttcgaaaacgcctccacttggacttt

SEQ ID NO: 177208 - DNA, 80 bp, synthetic construct
  source 1..80: mol_type = other DNA
acagtggcagccgggaatggtcagacggtgtaatataataggctacatggctgctctcataagcggacggggtagttttg

SEQ ID NO: 177209 - DNA, 80 bp, synthetic construct
  source 1..80: mol_type = other DNA
gtgctttgctgacattagaatgctggaattattcaaagctgagtatcagggtatatcagattacattgttaatcttggca

SEQ ID NO: 177210 - DNA, 80 bp, synthetic construct
  source 1..80: mol_type = other DNA
gcatttcctaacccccagagacactatcactacagcaggtcctagtgatttgtgtgtccataccaaagaagctaagtaca

SEQ ID NO: 177211 - DNA, 80 bp, synthetic construct
  source 1..80: mol_type = other DNA
aggttgtgtgagtatacacacaaagataacgtcgattatgagccaaagggggtcacaacatcaaggacctcaatcaccat

SEQ ID NO: 177212 - DNA, 80 bp, synthetic construct
  source 1..80: mol_type = other DNA
cgacgtgggatcagatactaggtatgacagctgggagataaacatcagggaaatggtgcagctgagaaggaagtgtgaaa

SEQ ID NO: 177213 - DNA, 80 bp, synthetic construct
  source 1..80: mol_type = other DNA
ccttagatgacaagggtaaaactgaagccatattcagtatttccctcagcccggcctcggataaaaggttacaatacacc

SEQ ID NO: 177214 - DNA, 80 bp, synthetic construct
  source 1..80: mol_type = other DNA
cagacatgctctcagttaacgagcagagggaatgaaagctcacggcgaaacttgggccagcccggggggacctcccctgc

SEQ ID NO: 177215 - DNA, 80 bp, synthetic construct
  source 1..80: mol_type = other DNA
tttgaccacccccccccatgcaacttagaaaatatacacatagcccaataggatgcggccaaaccaggttcgtcacgggc

SEQ ID NO: 177216 - DNA, 80 bp, synthetic construct
  source 1..80: mol_type = other DNA
caggaacacccttgcggattgacattcttggtggtgtttcgttgttgtcggtagttgttgttgacgatgaggataaataa

SEQ ID NO: 177217 - DNA, 80 bp, synthetic construct
  source 1..80: mol_type = other DNA
aaggtgtgcctagattggaaagaagaggaaatcgtgctgaacaagaaatggaaagttttcggaggatacttgacagagca

SEQ ID NO: 177218 - DNA, 80 bp, synthetic construct
  source 1..80: mol_type = other DNA
atggccacctgtaatattccctgaacacgtttctgtcctgatcaagaggttgcacaatagtagtgaagctttaacacatg

SEQ ID NO: 177219 - DNA, 80 bp, synthetic construct
  source 1..80: mol_type = other DNA
attaaacagtgtaaaatgggagctcaagtgtcaacgcaaaagaccggtgcacacgagactagcttgagtgcaacaggaaa

SEQ ID NO: 177220 - DNA, 80 bp, synthetic construct
  source 1..80: mol_type = other DNA
acgcacggataccatctaggttatcgtcaaaatgtatatactcaatattactacagatggttgcgtatccttacctcgca

SEQ ID NO: 177221 - DNA, 80 bp, synthetic construct
  source 1..80: mol_type = other DNA
acaacctacgcacgctttgttatattattgaattaaatacagcaagatgggcgcgcaagtgtcaacacagaaaacaggtg

SEQ ID NO: 177222 - DNA, 80 bp, synthetic construct
  source 1..80: mol_type = other DNA
aggcagctaatgtatgttgtgcatatggggagtggccaagttatttatcagacaaggaagcggtagctattgataagcca

SEQ ID NO: 177223 - DNA, 80 bp, synthetic construct
  source 1..80: mol_type = other DNA
tttactctaccatcagtgaacaatgcagaaccaggaaaaagatacatatataaagtcttaccgcaggggtggaaaggatc

SEQ ID NO: 177224 - DNA, 80 bp, synthetic construct
  source 1..80: mol_type = other DNA
acgttctgcaacgctacggtgacgatacaaaggagaactactatctaactgtactatcaggaactacaacatcgtctcct

SEQ ID NO: 177225 - DNA, 80 bp, synthetic construct
  source 1..80: mol_type = other DNA
tcctgagcctggtatcacagaaccagacagaaaaaaaataaaaaaacaggtacaacaaaggctggaatttcttgaaaagt

SEQ ID NO: 177226 - DNA, 80 bp, synthetic construct
  source 1..80: mol_type = other DNA
tacacaacaaaaacagacaccaattacccagcaaaaagaatgaaagaagcaaacagagcttactttctagcagccaaaaa

SEQ ID NO: 177227 - DNA, 80 bp, synthetic construct
  source 1..80: mol_type = other DNA
aattagtacagggaaaacacgtatcattgaggctagtagtctaaatgatactgtccactttaggattacctttggtaatt

SEQ ID NO: 177228 - DNA, 80 bp, synthetic construct
  source 1..80: mol_type = other DNA
tcgccgctatcgaaggagacgtgggcgcagacgggtaaggagacgccgtcgcccccagaaactagtactgactcagtgga

SEQ ID NO: 177229 - DNA, 80 bp, synthetic construct
  source 1..80: mol_type = other DNA
gccgcatgtcaatcccattcattagcgtgggtaatgcatatagtttgttctacgatggatggtcacacttcacacaggac

SEQ ID NO: 177230 - DNA, 80 bp, synthetic construct
  source 1..80: mol_type = other DNA
cagtacctgcgggagaacaaatgaccttgtcagtgccattttattcatcaaaaccacttaggacaatcagggactctggt

SEQ ID NO: 177231 - DNA, 80 bp, synthetic construct
  source 1..80: mol_type = other DNA
aagcatagctggtattatatttgtgatttataaacttttttgcacactacagggaccatactcaggtgagcctaaaccta

SEQ ID NO: 177232 - DNA, 80 bp, synthetic construct
  source 1..80: mol_type = other DNA
caaacatcacaaactagggatgaaatgagtcttgagagtttcttagggaggtctggctgtatacatatatcacatctaaa

SEQ ID NO: 177233 - DNA, 80 bp, synthetic construct
  source 1..80: mol_type = other DNA
atagcagactggttttggacacaggaagccaacaaagagaatgtagttacaggctcatactcaatgcctactaacaaagc

SEQ ID NO: 177234 - DNA, 80 bp, synthetic construct
  source 1..80: mol_type = other DNA
ctaatggtgatcccatttgcacccctggattacaatgcccaagcatctgagtacgtacctgtaactgtcacaatagcccc

SEQ ID NO: 177235 - DNA, 80 bp, synthetic construct
  source 1..80: mol_type = other DNA
gtgtattttcaggtaattctagtgacaagaccaattacactagttatgttaatgcaaacccaggagaggcaggtggtact

SEQ ID NO: 177236 - DNA, 80 bp, synthetic construct
  source 1..80: mol_type = other DNA
caacccttgtgtaacgttccaagtgttgaacaacttctacaattccgttataggttcctcaattaaccttgcagacacta

SEQ ID NO: 177237 - DNA, 80 bp, synthetic construct
  source 1..80: mol_type = other DNA
atcactatcggaaactccacgatcacaacacaggactctataaacacagttctagcgtacggtgaatggcctcagtatct

SEQ ID NO: 177238 - DNA, 80 bp, synthetic construct
  source 1..80: mol_type = other DNA
ctttctaggacgttcagctttgtgggctgaatttgaattggaatctagattcaaaagatgggatataaattttcaggaac

SEQ ID NO: 177239 - DNA, 80 bp, synthetic construct
  source 1..80: mol_type = other DNA
ggttatcactacacgcaaagtcgcacagttgaggcgcaaattggaaaagttcacctacctacggttcgacatggagatca

SEQ ID NO: 177240 - DNA, 80 bp, synthetic construct
  source 1..80: mol_type = other DNA
cccccgactttccagggttctacacagaggtcatatataacccagcaaacgataaaggcgtaggcaacaaaatatggatg

SEQ ID NO: 177241 - DNA, 80 bp, synthetic construct
  source 1..80: mol_type = other DNA
catacaaccaccaacctaacaaacagctcatgagattggcatataaagatagagggttttacaagcattatggcatcatt

SEQ ID NO: 177242 - DNA, 80 bp, synthetic construct
  source 1..80: mol_type = other DNA
aatcccaggtgtcattcgcgcgtcatccccgcgcacccccagtcccattaacatagcgggcacaatggtgcaggcaccgt

SEQ ID NO: 177243 - DNA, 80 bp, synthetic construct
  source 1..80: mol_type = other DNA
caagcaggacgcttgtttgctaagatgacctacaagatgagagcatgccaggtcgttgccgaatcattgattgcgaacgg

SEQ ID NO: 177244 - DNA, 80 bp, synthetic construct
  source 1..80: mol_type = other DNA
atgacaaaataactgcatatcttccaaattataacactacacaaacactagcacagctaaaaccatatgtagacaacatg

SEQ ID NO: 177245 - DNA, 80 bp, synthetic construct
  source 1..80: mol_type = other DNA
gctggagaatttcagtccgagatttggtgcagctaagacgcaaatgtgaaatgttcacttacatgaggttcgacctcgaa

SEQ ID NO: 177246 - DNA, 80 bp, synthetic construct
  source 1..80: mol_type = other DNA
ctaacagggtttacatgttccccccggagcgaaaagtcaaaccaatcttaggcagacaggcctgggaggacgagtacacc

SEQ ID NO: 177247 - DNA, 80 bp, synthetic construct
  source 1..80: mol_type = other DNA
acaaccagctgttcttagtgataatgatcctagacttgaagtaaaattaacagaatccctattttcaaagtacaaaggga

SEQ ID NO: 177248 - DNA, 80 bp, synthetic construct
  source 1..80: mol_type = other DNA
agcacactctaaagagatacctgctctcaccgcagtggaaacgggagccacaaacccgttagttccatcggacacggtac

SEQ ID NO: 177249 - DNA, 80 bp, synthetic construct
  source 1..80: mol_type = other DNA
gttaccttcaagacaacgaggccacggccgaagatcaaccaacgcaaccagatgtcgccacatgtaggttttacaccctg

SEQ ID NO: 177250 - DNA, 80 bp, synthetic construct
  source 1..80: mol_type = other DNA
aacttttcgccgccgcccaacaagacgatatgtgagtagagggcggcgccgccgatacaggcgcagacggagacggtggc

SEQ ID NO: 177251 - DNA, 80 bp, synthetic construct
  source 1..80: mol_type = other DNA
attgacaaggtgtgaagagccccgtacgctagttatgagtcctccggcccctgaatgcggctaatccaaccctgcagcca

SEQ ID NO: 177252 - DNA, 80 bp, synthetic construct
  source 1..80: mol_type = other DNA
tactgtgcttcgtgtctgcttgcaacgacttctctgtcaggctgctgaaagacaccccatttgttgaacaaacaacgctg

SEQ ID NO: 177253 - DNA, 80 bp, synthetic construct
  source 1..80: mol_type = other DNA
ttggtttagagcgctggaacttgttcttagagagattggttacagtgaggaagcagtttcactcatcgaaggaatcaatc

SEQ ID NO: 177254 - DNA, 80 bp, synthetic construct
  source 1..80: mol_type = other DNA
accacaggaggagagcagctcccaggagagcaagaagaaagctcctcttcagcggaagaaaacaaccttatctcgttcga

SEQ ID NO: 177255 - DNA, 80 bp, synthetic construct
  source 1..80: mol_type = other DNA
gtcagcgcctacgtcataagtcacgtggggagggctgcgtcacaacccggaagcaatcctcaccacgtgatttgtcacgt

SEQ ID NO: 177256 - DNA, 80 bp, synthetic construct
  source 1..80: mol_type = other DNA
acaactcagtattcagttcatcaacagagtggcagacctgaaggaggacccgtaggaacggtattcaacacatttaaaac

SEQ ID NO: 177257 - DNA, 80 bp, synthetic construct
  source 1..80: mol_type = other DNA
ctaacaggctccacctcagacatagggttcatacccataggaataaacttcatgaacggagacatgcccaccataacccc

SEQ ID NO: 177258 - DNA, 80 bp, synthetic construct
  source 1..80: mol_type = other DNA
agctacgaggcttttactcgacaccccgaggagtttgggtaccagtcaggcatgccagaagaagaatggaaggcaagact

SEQ ID NO: 177259 - DNA, 80 bp, synthetic construct
  source 1..80: mol_type = other DNA
gagacgcaccaagggtcgcagctttaaaaaaaactagtactgactcagtggcacccctctagcataaggcgctgcttaat

SEQ ID NO: 177260 - DNA, 80 bp, synthetic construct
  source 1..80: mol_type = other DNA
gagaccagtaaggaggcgccggtgggggaggcgtagatacagacggaggtacagacgcaggacttggctcagacgcagac

SEQ ID NO: 177261 - DNA, 80 bp, synthetic construct
  source 1..80: mol_type = other DNA
caggccttgtacccttttactggcaaagcagatggtacccgaagctagcctggcagctacaagtaatgcatgacttatac

SEQ ID NO: 177262 - DNA, 80 bp, synthetic construct
  source 1..80: mol_type = other DNA
atgccaatccaggagaaaagggtggagtttttgtatcacaatacaaccctggggacaccactgacgaagcccggaagttc

SEQ ID NO: 177263 - DNA, 80 bp, synthetic construct
  source 1..80: mol_type = other DNA
aaatggaggcgtacccaataccgttacaggcttcaaaaccaaatgcctcagagtccattttctccatctcacttagccca

SEQ ID NO: 177264 - DNA, 80 bp, synthetic construct
  source 1..80: mol_type = other DNA
gtagagagggagttaaacttagtaaacctatccatatcaatattagcaaatataattagtatagttggaatcatatatat

SEQ ID NO: 177265 - DNA, 80 bp, synthetic construct
  source 1..80: mol_type = other DNA
acagaaccagatgggctatggggagatgcagtattcgataccacaaaaacagacataattaccaaaaacatggactctta

SEQ ID NO: 177266 - DNA, 80 bp, synthetic construct
  source 1..80: mol_type = other DNA
gacgaagcagcagacggcggatatgggaatttcagaatgaggtggcggattcaggcgaaaagggtgtgggctgtgcgagt

SEQ ID NO: 177267 - DNA, 80 bp, synthetic construct
  source 1..80: mol_type = other DNA
cccgttaaagatgttcttgaaaagggaattccaactttgcagtcaccaacagttgaagcatgtggttactctgatagaat

SEQ ID NO: 177268 - DNA, 80 bp, synthetic construct
  source 1..80: mol_type = other DNA
ggcaaaccccactggcgacagtggccctgcctgcgtggctgcctgcgcgcccacttgggtgcgaagccgatgaacagaca

SEQ ID NO: 177269 - DNA, 80 bp, synthetic construct
  source 1..80: mol_type = other DNA
aaactcatcagttgatttcgcccaaaacgcagtagcaatgaaccaagtagccacaattaggacgtatgggtttggacatc

SEQ ID NO: 177270 - DNA, 80 bp, synthetic construct
  source 1..80: mol_type = other DNA
acggcgcagagggaggtggagaaggaggtacaggaggtggaaaagaaagggcagacgtagaagaaaagcaaaaataataa

SEQ ID NO: 177271 - DNA, 80 bp, synthetic construct
  source 1..80: mol_type = other DNA
gaacttctatcaaggagatgtacatgatgctgttgttggggcaatgactcgcgtggccgatacggtggccagtgggccgg

SEQ ID NO: 177272 - DNA, 80 bp, synthetic construct
  source 1..80: mol_type = other DNA
cagcctctcgcagccagaccgctagccgacgcacccgcccgcgaaaatagcgtgatgttcgggacggcttcgcgtcaccg

SEQ ID NO: 177273 - DNA, 80 bp, synthetic construct
  source 1..80: mol_type = other DNA
atcactatcggaaactccaccataacaacgcaagactcactacatactgttgtggcgtatggtgagtggcccgagtactt

SEQ ID NO: 177274 - DNA, 80 bp, synthetic construct
  source 1..80: mol_type = other DNA
caaccagggggaggaaatcctctctcagctataccgccctcttgaagcgtgcgataatagatgctactgtaagaaatgct

SEQ ID NO: 177275 - DNA, 80 bp, synthetic construct
  source 1..80: mol_type = other DNA
ctacctctagaaatggacaacaccctcttttcatccacacttttgggcgaagttttaaattacttcgcaaattggtctgg

SEQ ID NO: 177276 - DNA, 80 bp, synthetic construct
  source 1..80: mol_type = other DNA
tagactacctcagcaaggcagaccccaatctagacccggtaaagagcaaatgccacatagcagacctgccactatggatg

SEQ ID NO: 177277 - DNA, 80 bp, synthetic construct
  source 1..80: mol_type = other DNA
gtgtttaaacgcacgttgttgggggagatactgaattactatgcccactggtcaggcagtgtcaaactaacctttgtatt

SEQ ID NO: 177278 - DNA, 80 bp, synthetic construct
  source 1..80: mol_type = other DNA
cttaggagtaataactcagctacactcattctaccctatgttaatgctgtacccatggattcaatgcttagacacaacaa

SEQ ID NO: 177279 - DNA, 80 bp, synthetic construct
  source 1..80: mol_type = other DNA
gtaacgcaggtgtgtatttttgcgcatcaagaaacagacactacccagttatatttgaagggcctggtatagtggaagtt

SEQ ID NO: 177280 - DNA, 80 bp, synthetic construct
  source 1..80: mol_type = other DNA
ggaccgtcggcggtaacgttacttttcagggtctcaagaataaaacggaagactttttatcttggctactcgggtctggc

SEQ ID NO: 177281 - DNA, 80 bp, synthetic construct
  source 1..80: mol_type = other DNA
tgctggaagagaattgtattctcagcctccagagcacggagtcgaacaaccgtgccatgtctacgctcatgacgctatgg

SEQ ID NO: 177282 - DNA, 80 bp, synthetic construct
  source 1..80: mol_type = other DNA
tgtgcattaactcagcttatgcaatgttttacgacggatttgcaggatttgagaagaaggccacagatttgtatgggatc

SEQ ID NO: 177283 - DNA, 80 bp, synthetic construct
  source 1..80: mol_type = other DNA
tcactccacccatagacataccaggggaggtgcgcaacatgatggaattggcggaaatagacaccatgatacccctcaac

SEQ ID NO: 177284 - DNA, 80 bp, synthetic construct
  source 1..80: mol_type = other DNA
cgcggcgacgaggaattcatctatcacgcgggtccattggagccgccttccaagatacgcggtcatgagttggtgcagct

SEQ ID NO: 177285 - DNA, 80 bp, synthetic construct
  source 1..80: mol_type = other DNA
tgccaactaataaaagtaaataaaacagacatcgaagcagaagaatggaccaatgttaccatacaaagcaatttcacgat

SEQ ID NO: 177286 - DNA, 80 bp, synthetic construct
  source 1..80: mol_type = other DNA
aacaaggcctttatgtttgagcctgagggtcctaaacccatacagggctacaacgattggctagaggagtacacctgctg

SEQ ID NO: 177287 - DNA, 80 bp, synthetic construct
  source 1..80: mol_type = other DNA
tgctcagtggccatgctcatcaggatatgccggattttcaaaagcatgcgccagggcactgactatgtccctgtctcgga

SEQ ID NO: 177288 - DNA, 80 bp, synthetic construct
  source 1..80: mol_type = other DNA
acacttacaataaaatacaaagctaaatttatattcgggggcaatcctatatctgaacagattgtcaaggacccctgcac

SEQ ID NO: 177289 - DNA, 80 bp, synthetic construct
  source 1..80: mol_type = other DNA
aagcatatatgtttccccctgctagaaaaaatagacgcttaaccccttatgaggcacaaacagacctagaaatagctaaa

SEQ ID NO: 177290 - DNA, 80 bp, synthetic construct
  source 1..80: mol_type = other DNA
aggacccatactcggcagcgggctatgtcacctgttggtaccaaaccggggtagtatcaccagctgggaatcagcccaag

SEQ ID NO: 177291 - DNA, 80 bp, synthetic construct
  source 1..80: mol_type = other DNA
aacccctgcaaatcagaaggcagtgcacacacctacccagatagatggcgtcgagacgtacaagttgttgacccgacaac

SEQ ID NO: 177292 - DNA, 80 bp, synthetic construct
  source 1..80: mol_type = other DNA
ttttatttaacaatgtgcggtggctctctattcagtccaagaggtttgcaccgctatatgctcatgaggctaaaaggatt

SEQ ID NO: 177293 - DNA, 80 bp, synthetic construct
  source 1..80: mol_type = other DNA
aaaccaggcacgtgatacagagtaggtccagatcagagagtaccatagaatccttctttgcgagaggagcgtgtgttaca

SEQ ID NO: 177294 - DNA, 80 bp, synthetic construct
  source 1..80: mol_type = other DNA
gtggatttctaacactgattatcgacgcagtgccaaggacgactttactgaagggggatacattactgcattttaccaaa

SEQ ID NO: 177295 - DNA, 80 bp, synthetic construct
  source 1..80: mol_type = other DNA
caataaatcccataaacaatatcagtaaaaaagtcatcaaatggttattaagaattgtgtctgctatggtcataatcatt

SEQ ID NO: 177296 - DNA, 80 bp, synthetic construct
  source 1..80: mol_type = other DNA
taccagaagggcttcaacaggtggtcccacaccaacgaggacctagacctggcccgctacaaggggtgtaaatggacctt

SEQ ID NO: 177297 - DNA, 80 bp, synthetic construct
  source 1..80: mol_type = other DNA
ttcaaccggacttctgcggggttcctctttttaaactgtacgttacccttgcagagttgcggtttccgatctgctcacca

SEQ ID NO: 177298 - DNA, 80 bp, synthetic construct
  source 1..80: mol_type = other DNA
aattgtatatcatctgtccctttcattgtaccaatggcacatcttgaagagaaaggaaagttttataccagtaagttagt

SEQ ID NO: 177299 - DNA, 80 bp, synthetic construct
  source 1..80: mol_type = other DNA
cctggcacaagcattgcacaagacatgccaccattaacacatcagataatgtacatacctcctggcggtccagtgccaaa

SEQ ID NO: 177300 - DNA, 80 bp, synthetic construct
  source 1..80: mol_type = other DNA
ctgcgcatgcacacgcacggtgcgttcggccaccaagctggcgtagtgtatgtgggtaactatagagtagttaatagaca

SEQ ID NO: 177301 - DNA, 80 bp, synthetic construct
  source 1..80: mol_type = other DNA
agatggagaggctcaggatacctgtttcagtacagaatgaagtcgattcactttgtgcatcgttcagggtagatccaggc

SEQ ID NO: 177302 - DNA, 80 bp, synthetic construct
  source 1..80: mol_type = other DNA
agggacacctgggaacaatggtggacagactattggcaagtaacttggatcccagattgggactttgtgtctacaccgca

SEQ ID NO: 177303 - DNA, 80 bp, synthetic construct
  source 1..80: mol_type = other DNA
cccttaaccattgcaatttcgcactatttgttattcctatagccccgcttgattacatggacggggcaaccactgctata

SEQ ID NO: 177304 - DNA, 80 bp, synthetic construct
  source 1..80: mol_type = other DNA
atgtctcaatatcgaccttccgcaatttagtgaattaggagaaataactagtgcctactcaaaaccaaactcaaataacc

SEQ ID NO: 177305 - DNA, 80 bp, synthetic construct
  source 1..80: mol_type = other DNA
gcccccccccctcccctgggcgatcgcttctgcgttttccccggggacttcctcttttctgcgtgttgtctcttcgtgtg

SEQ ID NO: 177306 - DNA, 80 bp, synthetic construct
  source 1..80: mol_type = other DNA
gaataatatcagcaatggttataataattaggaattcatcagatccacagactataatagctactttaacactaattggc

SEQ ID NO: 177307 - DNA, 80 bp, synthetic construct
  source 1..80: mol_type = other DNA
ctgtgttcaatacctttaaaacagaagaacacataaaatgtcctactgccaaagaacaaaaacaagcagaccctacagac

SEQ ID NO: 177308 - DNA, 80 bp, synthetic construct
  source 1..80: mol_type = other DNA
cactgataagatattactactacaatgggtgcccaagtctcaacccagaaaactggtgcacacgagaatcaaaatatagc

SEQ ID NO: 177309 - DNA, 80 bp, synthetic construct
  source 1..80: mol_type = other DNA
cagcacccaatttggctacaactcctataaaccaacaaaagagaatataaaatcagcaaattcagcatactggcaagcac

SEQ ID NO: 177310 - DNA, 80 bp, synthetic construct
  source 1..80: mol_type = other DNA
ctaaaaagatatgtagaacaaacagaaccaacaacaacagtgccaaatccatggcaaagtaaatatgtaaacaccactaa

SEQ ID NO: 177311 - DNA, 80 bp, synthetic construct
  source 1..80: mol_type = other DNA
ttagagactggcatgatatgagattggtcaccaatgttagcaagtttccaatgctagatattgaagtgggtccagtagtt

SEQ ID NO: 177312 - DNA, 80 bp, synthetic construct
  source 1..80: mol_type = other DNA
acttccacccatcgaggagtcatcgtcgctccaaaatcctttggggtcgctagttggaaaagtctctgacacgatccagg

SEQ ID NO: 177313 - DNA, 80 bp, synthetic construct
  source 1..80: mol_type = other DNA
tgaacatggatgttgaggccctggagctaaacaatatgttttcagagaggatctcatcggtcctgaccacggtcatggcc

SEQ ID NO: 177314 - DNA, 80 bp, synthetic construct
  source 1..80: mol_type = other DNA
taactttgatggtaccttactgggtaatgttctcatatttccacatcaatttattaatttaaggagtaataattctgcaa

SEQ ID NO: 177315 - DNA, 80 bp, synthetic construct
  source 1..80: mol_type = other DNA
ttaacaatgagatgtaggagaccaggaaataagacagtacggccaatcaccataatgtctggattggtctttcactcgca

SEQ ID NO: 177316 - DNA, 80 bp, synthetic construct
  source 1..80: mol_type = other DNA
ccacaggggcatgtctgttatctcgcatttgcttttgttttttacaaaaatggtgtcgtcttttgtgaggtagtctatcc

SEQ ID NO: 177317 - DNA, 80 bp, synthetic construct
  source 1..80: mol_type = other DNA
cttaggatccaagagacaaatgtccgcgcaatcgacacaaaccacaccaaggatcagccagaacaacaccacccaaacca

SEQ ID NO: 177318 - DNA, 80 bp, synthetic construct
  source 1..80: mol_type = other DNA
ctgcttgtgtttacattgtgaagtacaaaacacgtgatgacactccagacaaaatgtacgacagctgggttatcaatacc

SEQ ID NO: 177319 - DNA, 80 bp, synthetic construct
  source 1..80: mol_type = other DNA
tagattacaccaattataatcaagaaaacaataatttcagaacttggcaaataaacctaaaagaaatggcacagatcagg

SEQ ID NO: 177320 - DNA, 80 bp, synthetic construct
  source 1..80: mol_type = other DNA
atataactagctgcacttccgaatggctgagttttccacgcccgtccgcagcggtgaagccacggacgggattcagcgcg

SEQ ID NO: 177321 - DNA, 80 bp, synthetic construct
  source 1..80: mol_type = other DNA
gctagacgacccagagtaaggagatggcgtcgaaaacgggcgtgggctaggagaaagtacatcagggagaggaggtggcg

SEQ ID NO: 177322 - DNA, 80 bp, synthetic construct
  source 1..80: mol_type = other DNA
agctgggatgcttaacacttcacaagcacttcaagcatgccagaattgtcccaagcctaaatactacaaccagtgttgcc

SEQ ID NO: 177323 - DNA, 80 bp, synthetic construct
  source 1..80: mol_type = other DNA
tctggattgagggtggttcctactatcctagcagataccaaactggagtcttaaaaggtgtaggacctgcagaaccaggg

SEQ ID NO: 177324 - DNA, 80 bp, synthetic construct
  source 1..80: mol_type = other DNA
actgcttgggcagcttggtgctaattcttgggacaatttacgcactttacaaactaatgtgcatgacccagggcccatac

SEQ ID NO: 177325 - DNA, 80 bp, synthetic construct
  source 1..80: mol_type = other DNA
ggccattgtatctatcagatgaggaggccacggcggaggaccaacctacacagccagacgtcgcaacatgtaggttctac

SEQ ID NO: 177326 - DNA, 80 bp, synthetic construct
  source 1..80: mol_type = other DNA
ttgctactaaagtcaaagattcatatgatttatataacaaacagggtattaaattagaaatcactgttgtaatattagat

SEQ ID NO: 177327 - DNA, 80 bp, synthetic construct
  source 1..80: mol_type = other DNA
ggtggtcctgcggggggtgacggtcaggcagctcctgtatttaactttgcggacagaggccagagccgtttgctccatct

SEQ ID NO: 177328 - DNA, 80 bp, synthetic construct
  source 1..80: mol_type = other DNA
ccacgggggaggcatgagcactgtgactttctctctaaaagtgctctatgaccaataccagaggtttatgaacaagtggt

SEQ ID NO: 177329 - DNA, 80 bp, synthetic construct
  source 1..80: mol_type = other DNA
caaagacataatatgtctcatagtggcagtgatgatgcatcaccaccacagcactcgccaggaccctctgcatatcttgt

SEQ ID NO: 177330 - DNA, 80 bp, synthetic construct
  source 1..80: mol_type = other DNA
cacacgtcacaggtagagccgagcgatacaatgcaaactcggcacgtgaaaaactaccattcccgatctgagtcgacaat

SEQ ID NO: 177331 - DNA, 80 bp, synthetic construct
  source 1..80: mol_type = other DNA
acttttcgcctaggcttcaaataaacaaggccgtgcactgttcacttgtcggtgtctacctgtataagtcactaagcact

SEQ ID NO: 177332 - DNA, 80 bp, synthetic construct
  source 1..80: mol_type = other DNA
ccaaatgacaacgtgctcatcaatggtcaaaaagttcaaattaaggataagttcaaattagtggacccagacaacattaa

SEQ ID NO: 177333 - DNA, 80 bp, synthetic construct
  source 1..80: mol_type = other DNA
gcggagacccaggcaacctccactccaacacatggggaaccctcattctctatgttgacctcccccagaatgacagtgtc

SEQ ID NO: 177334 - DNA, 80 bp, synthetic construct
  source 1..80: mol_type = other DNA
taaagtgataaacaatgctttgcaactctcacaaccaaccagaccagtcacggcatcagacacccccagctcaagcgggg

SEQ ID NO: 177335 - DNA, 80 bp, synthetic construct
  source 1..80: mol_type = other DNA
tctaataatatctggacagggcacttttgccacaaacttttccagtcacttagaggatagaatcagcaagggaccctttg

SEQ ID NO: 177336 - DNA, 80 bp, synthetic construct
  source 1..80: mol_type = other DNA
cagataaactaccacgtgcggctggggacactttgaaggggaagcttcatgtgccttacctccttactgaagccaaatgt

SEQ ID NO: 177337 - DNA, 80 bp, synthetic construct
  source 1..80: mol_type = other DNA
aacgttgagactaccacatgtaccaacaccaccacgaccgttacttgtgatggtttcaattatacagtccataaaagatg

SEQ ID NO: 177338 - DNA, 80 bp, synthetic construct
  source 1..80: mol_type = other DNA
tcacaatggaccactcccacaacagatagttatgaatatcacttaggtatgtttagccccatatttctagcacctgacag

SEQ ID NO: 177339 - DNA, 80 bp, synthetic construct
  source 1..80: mol_type = other DNA
gtccttgcacttagccaagcctgaggaaacctcccccgccgtctccccagtatgccccatcgcttccccagcggcctcca

SEQ ID NO: 177340 - DNA, 80 bp, synthetic construct
  source 1..80: mol_type = other DNA
tagataatagtaagagatatgatgagtataagtttcagaaatggcaaattacattaaaagagatggcacaaatcagacgc

SEQ ID NO: 177341 - DNA, 80 bp, synthetic construct
  source 1..80: mol_type = other DNA
ccacagaaagctcgcaggcttctaactgctatgtggacaccccccactcacaatgtacaaggccaagaaaggcagtggta

SEQ ID NO: 177342 - DNA, 80 bp, synthetic construct
  source 1..80: mol_type = other DNA
ggacagggttcacagaacacatcagtgaaaaggtaacagaactgcagaacatgtcactaggttacttaaatactaaggtt

SEQ ID NO: 177343 - DNA, 80 bp, synthetic construct
  source 1..80: mol_type = other DNA
gatgagagattatcttacactatgttaggagagatactcaattactacacacactgggcaggttcgatcaaatatacctt

SEQ ID NO: 177344 - DNA, 80 bp, synthetic construct
  source 1..80: mol_type = other DNA
gccattttgagtaagcaggaagcgcacctgccgaatacaaaatggcggcggagcacttcctgcttgcccgtaatggtggc

SEQ ID NO: 177345 - DNA, 80 bp, synthetic construct
  source 1..80: mol_type = other DNA
agttccctcttaattacatttgtgccagatcttgtagagcaagatggcctattcaacaagggagatactgttagccctgt

SEQ ID NO: 177346 - DNA, 80 bp, synthetic construct
  source 1..80: mol_type = other DNA
ggtggcgtggggtgcgggctgctctggggtctgcgcaccgaggcggcacgccaggtcggctagcagcacgaccacgctta

SEQ ID NO: 177347 - DNA, 80 bp, synthetic construct
  source 1..80: mol_type = other DNA
caattcgacgctaaagttgtccaaacggacgacggacagtttgagttctttgtgtaccaggaacgaggtgtgaatgtcgt

SEQ ID NO: 177348 - DNA, 80 bp, synthetic construct
  source 1..80: mol_type = other DNA
agtggccctcatatattaaaccgcaggaagccaatccagttgatgcacccacagagccggatgtaagtagcaatagattc

SEQ ID NO: 177349 - DNA, 80 bp, synthetic construct
  source 1..80: mol_type = other DNA
gtgtgggaaatcaattacacagacaccgtccaactcaggcggaaattggaaatgttcacgtactcgcgctttgatacaga

SEQ ID NO: 177350 - DNA, 80 bp, synthetic construct
  source 1..80: mol_type = other DNA
gctagctagtaacctaacaaatggagagacagcgcaccagttcaccaagaataccgtgtcaagcgctcagggtgtggtac

SEQ ID NO: 177351 - DNA, 80 bp, synthetic construct
  source 1..80: mol_type = other DNA
catataaacaccaccaaacgatgcccccaggacgtgactcttcttccaataatccgtgcagcttaccctgggattgattc

SEQ ID NO: 177352 - DNA, 80 bp, synthetic construct
  source 1..80: mol_type = other DNA
tagattggatgaaatcaatgctacctcaagctcagctaaaagtcaaatacctaaatgagataaagaaacttagtttatta

SEQ ID NO: 177353 - DNA, 80 bp, synthetic construct
  source 1..80: mol_type = other DNA
actactacttttccaccaacctgggaacaaagacaacacctaagccacgacacaggcatattcagtccatactttttaac

SEQ ID NO: 177354 - DNA, 80 bp, synthetic construct
  source 1..80: mol_type = other DNA
gttttgtccaattgattacttgtttgggtcaggtgtgttgtttggaaacgcatttgtttacccacatcagatcgttaact

SEQ ID NO: 177355 - DNA, 80 bp, synthetic construct
  source 1..80: mol_type = other DNA
ttcaggagaacctaaacctaaaacaaaaactccagaacgtagagtagtaacacaggggccagtagaagaatttggcagaa

SEQ ID NO: 177356 - DNA, 80 bp, synthetic construct
  source 1..80: mol_type = other DNA
caagtcactcaaactagacaacagttaattcaaaaaatacaacaaaatgcagaaaatgtattaaagaaagtaaaccagga

SEQ ID NO: 177357 - DNA, 80 bp, synthetic construct
  source 1..80: mol_type = other DNA
gcaataacaactacaattggccatggctgtaaataaaatgtcataacctggagtctgcatgtctgttgttttattcagta

SEQ ID NO: 177358 - DNA, 80 bp, synthetic construct
  source 1..80: mol_type = other DNA
ggcctttactcgatacccagaggagtttgggtaccagtcaggcatgccagaggaggagtggaaggcaaaactgaaagcaa

SEQ ID NO: 177359 - DNA, 80 bp, synthetic construct
  source 1..80: mol_type = other DNA
gtctggacgacgctggcgagccgggccagctcgccttcttttatcctctgtttggggtctctgtgtaataccttaaggtt

SEQ ID NO: 177360 - DNA, 80 bp, synthetic construct
  source 1..80: mol_type = other DNA
gtggccggagtatctatctgacaaagaagcaactgccgaggatcagcccacccagccagacgtggctacttgccgcttct

SEQ ID NO: 177361 - DNA, 80 bp, synthetic construct
  source 1..80: mol_type = other DNA
taggacaaaacccagatggtaaagatctaagtacattttgccaaatggtgtcaactacagactttgtagtccccatggcc

SEQ ID NO: 177362 - DNA, 80 bp, synthetic construct
  source 1..80: mol_type = other DNA
tgatgaaaacagaggctggatgcagcgcatcaggcgaaggcggagaagacgggccgcattgtccggccatcttttagaca

SEQ ID NO: 177363 - DNA, 80 bp, synthetic construct
  source 1..80: mol_type = other DNA
acccacgaggtgttgtggacttgtatttcggtacacttccatgccggttttatcttcccctccccgtaacacttagaaga

SEQ ID NO: 177364 - DNA, 80 bp, synthetic construct
  source 1..80: mol_type = other DNA
gtggctggcctccttcctgcggcacaactttggcttctactgcggcatgttcatcgcctccatcatcctgatcctgccct

SEQ ID NO: 177365 - DNA, 80 bp, synthetic construct
  source 1..80: mol_type = other DNA
atgtcaactttgacccgaccaatataactgattcaagagcaagcatcacgtacgtgcctgacaccattcgcccagaggta

SEQ ID NO: 177366 - DNA, 80 bp, synthetic construct
  source 1..80: mol_type = other DNA
gcagctgataaaagacatagctgtgtggccgcgtgttgggcagcatggtgccaatatagtagaagagctgcttctcaagg

SEQ ID NO: 177367 - DNA, 80 bp, synthetic construct
  source 1..80: mol_type = other DNA
ttgaacgggaaattaattacctccaatacatcctgaattgcttgggtagccttattctgattcttggtacaatctatgct

SEQ ID NO: 177368 - DNA, 80 bp, synthetic construct
  source 1..80: mol_type = other DNA
tgatacggtcgcggtcttcttctccgatgacgaaacctgcgcacatcgaagaaaagacgagcgcgcgaaccgatagccgt

SEQ ID NO: 177369 - DNA, 80 bp, synthetic construct
  source 1..80: mol_type = other DNA
gtagcggcggttctgatagggcgaccgctaaggcgagctgcgtgtgcgtgccgtgtgtgttccccgccgcgaaaggcccc

SEQ ID NO: 177370 - DNA, 80 bp, synthetic construct
  source 1..80: mol_type = other DNA
tgacgtaagaccataatttagatttgtatttccacctacctttatactagaactttttccatcaaggcatagtgccaaaa

SEQ ID NO: 177371 - DNA, 80 bp, synthetic construct
  source 1..80: mol_type = other DNA
atgcaggcatgggtgttggtgtcggtaatctaactatttatccacatcagtggataaatctgcgcaccaataattgtgct

SEQ ID NO: 177372 - DNA, 80 bp, synthetic construct
  source 1..80: mol_type = other DNA
caccaacccttcataccttaccataataaatgaaagttctacctgtgtaggcgcagacaattgcacaggattgggggacg

SEQ ID NO: 177373 - DNA, 80 bp, synthetic construct
  source 1..80: mol_type = other DNA
tcaaggacaaaatctgcagctggcttcaaatccagcgtcccgcaagcaaacagagtgattactggttaaagaagtttaca

SEQ ID NO: 177374 - DNA, 80 bp, synthetic construct
  source 1..80: mol_type = other DNA
ctcagaaatagttgaggcattctttaaaaatgcagaaaacatgtggaacgcaagaaaagatcaaacattttcagaagcaa

SEQ ID NO: 177375 - DNA, 80 bp, synthetic construct
  source 1..80: mol_type = other DNA
agaacactccaaggaagtaccagcactgacagcggtagagactggagcgaccaacccacttgagccttctgacacggtcc

SEQ ID NO: 177376 - DNA, 80 bp, synthetic construct
  source 1..80: mol_type = other DNA
gagagaacagatatacgagcagggttctgaacagcagaccccaattgtcgtctctcatgcttcgctgaaggtaccagttg

SEQ ID NO: 177377 - DNA, 80 bp, synthetic construct
  source 1..80: mol_type = other DNA
caacaaacacaaacgagggaaaccttaattaacaaaatagttcaaaatgccaaaaatgtactaactaaagtaaaccaaga

SEQ ID NO: 177378 - DNA, 80 bp, synthetic construct
  source 1..80: mol_type = other DNA
tagcaaagcccaccacaaggaaggatgccatgttgggtacacatgtggtgtgggatgtgggcctacaatctacaatctct

SEQ ID NO: 177379 - DNA, 80 bp, synthetic construct
  source 1..80: mol_type = other DNA
tctcaggagtctctatgtcaaaggtggtctgatagtattggctcctggcggtgtccagtgtgatgggggacgtggaggca

SEQ ID NO: 177380 - DNA, 80 bp, synthetic construct
  source 1..80: mol_type = other DNA
ggaatcaagcacctcttccagcaactagtcagaacgcagcagggagtccacgtaaacccttccctcttgtaggcccaaag

SEQ ID NO: 177381 - DNA, 80 bp, synthetic construct
  source 1..80: mol_type = other DNA
ataggcaacagaatatggatacagtgggtatcagagccatcttgtaactatgacccatctaaaagcaaatgtatgctaca

SEQ ID NO: 177382 - DNA, 80 bp, synthetic construct
  source 1..80: mol_type = other DNA
agcgcgcccgtgggcagtaggtccgtgcggccccaggcgctgctgttgttgggtaccttgtcagtgccgcgagtaggtcg

SEQ ID NO: 177383 - DNA, 80 bp, synthetic construct
  source 1..80: mol_type = other DNA
gcaaagtgtggtcataatggatgatattatgcaaaatcctggtggtgaagatatgtcactattttgtcagatggtttcaa

SEQ ID NO: 177384 - DNA, 80 bp, synthetic construct
  source 1..80: mol_type = other DNA
ggggagactatgacgttttgattacggatacagatggaggtaaccatcagcaaccacaagagaagaccgacgaacacaag

SEQ ID NO: 177385 - DNA, 80 bp, synthetic construct
  source 1..80: mol_type = other DNA
agatcgcaacgcggcgagtgacgaattagacagggaccgtggcgcatgataagctgaaacagcctgaaactgcccaaacc

SEQ ID NO: 177386 - DNA, 80 bp, synthetic construct
  source 1..80: mol_type = other DNA
atctgttactatcgctgtggccggcttctgatatgcccacgcggctttgaactcttgccagaattcactgaggaagagga

SEQ ID NO: 177387 - DNA, 80 bp, synthetic construct
  source 1..80: mol_type = other DNA
agctggtgacctaacacccgcccatcaccaccggacagattctgaacttgtcctgtggtgtttggtgtggttttggggta

SEQ ID NO: 177388 - DNA, 80 bp, synthetic construct
  source 1..80: mol_type = other DNA
accacctggagcttaaaagtactgtgggacgagcacaccagattccacaacacctggagctacccaaacactcagctaga

SEQ ID NO: 177389 - DNA, 80 bp, synthetic construct
  source 1..80: mol_type = other DNA
acatgcacaagcataaacaactgcacaggattgagaaaagaagagatagtcacttgtcagttcaacatgacaggattaga

SEQ ID NO: 177390 - DNA, 80 bp, synthetic construct
  source 1..80: mol_type = other DNA
tgcccccaggtggtccggtccccacgaaagtggatgattatgcctggcagacttcaaccaaccctagcgtgttttggact

SEQ ID NO: 177391 - DNA, 80 bp, synthetic construct
  source 1..80: mol_type = other DNA
tagaaaaaaggaaaaggcaccaaggccccaacaaatatggcaacgaatagagacaataccatcacatcagcagaggtctc

SEQ ID NO: 177392 - DNA, 80 bp, synthetic construct
  source 1..80: mol_type = other DNA
actaataatgacttaatcagaattgaacctattggtatttggatccagggcgaaccggggcaaggcaaatctttcctaac

SEQ ID NO: 177393 - DNA, 80 bp, synthetic construct
  source 1..80: mol_type = other DNA
cttcctcttttccgcgtcttgccccttcctctggccgttgttttgcgtgtgtctgttctttcctcttttccgcgtcttgt

SEQ ID NO: 177394 - DNA, 80 bp, synthetic construct
  source 1..80: mol_type = other DNA
caccaggggagtccatagttgtcgacggtaaggagatcaaaatagtcgacgcacagtcattagtggaccaagctggtaca

SEQ ID NO: 177395 - DNA, 80 bp, synthetic construct
  source 1..80: mol_type = other DNA
gggcgggggggaaacaacagacgaagtagggcacaacgcgcgtcgagcacacgcgtccggccgaagagaagggggggggg

SEQ ID NO: 177396 - DNA, 80 bp, synthetic construct
  source 1..80: mol_type = other DNA
tggtgtactccggttgaaaatgcctataagagagagatccactttctccggggctgccaactgcttcatactagcttttg

SEQ ID NO: 177397 - DNA, 80 bp, synthetic construct
  source 1..80: mol_type = other DNA
caaaggcctaggtaatatagtgtggatagactacctctcaaagtcagacgctgtctggcgaccccctcagagcaaatgca

SEQ ID NO: 177398 - DNA, 80 bp, synthetic construct
  source 1..80: mol_type = other DNA
cgccctgatgcccacctcaggctgtgcccaggtgacgggctgttcggatgccttctaccccttctatgccaatgcgtcca

SEQ ID NO: 177399 - DNA, 80 bp, synthetic construct
  source 1..80: mol_type = other DNA
atacgaaaaccactataaaaataacttatataagaaaattaaattttataacactacagaaacaatagcacaactaaaac

SEQ ID NO: 177400 - DNA, 80 bp, synthetic construct
  source 1..80: mol_type = other DNA
cggcacactccaaagaaattcccgcgcttaccgcggtagagacgggagctactaacccattagtgccctcggatacagta

SEQ ID NO: 177401 - DNA, 80 bp, synthetic construct
  source 1..80: mol_type = other DNA
ttaccacggggcttaagattccatttccaaacaataccaaccctgcaactgctggaaatggtacacctactacacttaca

SEQ ID NO: 177402 - DNA, 80 bp, synthetic construct
  source 1..80: mol_type = other DNA
catttctctatggtatcaaacagattttgtgggtgggagtgatcctacgggtacaatcgtagcaacatgctctggatgcc

SEQ ID NO: 177403 - DNA, 80 bp, synthetic construct
  source 1..80: mol_type = other DNA
tgcaatttggctattcagagtatgtagagagccagctaggaccctttcaagaccacgagccagtaggcctagtagtagtt

SEQ ID NO: 177404 - DNA, 80 bp, synthetic construct
  source 1..80: mol_type = other DNA
gggtttttgggcgtgctaaacgccgacggcggccacggcggttgcgccggtgacggagggcttttgcgctgggaacagtg

SEQ ID NO: 177405 - DNA, 80 bp, synthetic construct
  source 1..80: mol_type = other DNA
gcacagtacaaactaacaaatactttgcacagctagatggcctatggggagaccccatatatgccaacagcctaaactcc

SEQ ID NO: 177406 - DNA, 80 bp, synthetic construct
  source 1..80: mol_type = other DNA
tgtgatgtagcaattaccgtattatgtatgtgtcgttcatcgcagagtttagtgtactaatatgaagcgtgacgtgaaaa

SEQ ID NO: 177407 - DNA, 80 bp, synthetic construct
  source 1..80: mol_type = other DNA
gaaaaattacaaaactaactttaacactgtacaacttaagtgggaaaaaacttgtaaagaagcctatgaattagtagcag

SEQ ID NO: 177408 - DNA, 80 bp, synthetic construct
  source 1..80: mol_type = other DNA
ccacgcccccattttccaatgctaggtaaacccgccttactgttccctgagagggtcccttaccagcccacgaaagaaga

SEQ ID NO: 177409 - DNA, 80 bp, synthetic construct
  source 1..80: mol_type = other DNA
caccccccggccccggcgcaacccccgtccccgtccccagcgtaactcccgttaccagcgccgtcaaccccaccgcagaa

SEQ ID NO: 177410 - DNA, 80 bp, synthetic construct
  source 1..80: mol_type = other DNA
ttttacctactataaatacaaatccactaacctcagaaaatgctaatacaacaaccatagaagttaacaccacacaaggc

SEQ ID NO: 177411 - DNA, 80 bp, synthetic construct
  source 1..80: mol_type = other DNA
accccctgttctccttccagcaaccaacaaggtctacatgttcccaacagagcctacagttaagcctatagtaggcagac

SEQ ID NO: 177412 - DNA, 80 bp, synthetic construct
  source 1..80: mol_type = other DNA
tctatcgtgtaaatttctccctctatatgctagtgaagcaaagagaatcaaggttttgtacaacaagtgcaacaatgtga

SEQ ID NO: 177413 - DNA, 80 bp, synthetic construct
  source 1..80: mol_type = other DNA
acactctaactgcaaacaatgcccagtctgatacaatagaggtaaacactgtatcaggcacacaagcaaactcatttacg

SEQ ID NO: 177414 - DNA, 80 bp, synthetic construct
  source 1..80: mol_type = other DNA
tcatcaactgggaatgtcccatcattgttagaaccaccattctacaaagagatcagagaaaatcgattaatttatgacga

SEQ ID NO: 177415 - DNA, 80 bp, synthetic construct
  source 1..80: mol_type = other DNA
aacaccaccgtccccgcagaactccgccaccgccggtcccgcgagtccccgtccccaacgtaaccgccgaccccgccggc

SEQ ID NO: 177416 - DNA, 80 bp, synthetic construct
  source 1..80: mol_type = other DNA
agactctgggccctgattaggaaactgcgccaagacagacaccatgcctctgtaaatgtcctcatgccaggaagcgacta

SEQ ID NO: 177417 - DNA, 80 bp, synthetic construct
  source 1..80: mol_type = other DNA
cattgccaataacagtaaccattgctccggaaaagtcagagttttctggggctatgcaaacccaaaagcaagggctacca

SEQ ID NO: 177418 - DNA, 80 bp, synthetic construct
  source 1..80: mol_type = other DNA
cggagaccaacaactcccgggggtgagggacggcgggcagacaaaagaggaagctgcaagcagtcaagacgcgaaaaaga

SEQ ID NO: 177419 - DNA, 80 bp, synthetic construct
  source 1..80: mol_type = other DNA
cgtggctcaccagaaacatgtcgcgtccgccgttttcactgaaattattgacaccttgaccaagagcttcgactccaagc

SEQ ID NO: 177420 - DNA, 80 bp, synthetic construct
  source 1..80: mol_type = other DNA
gaacgcgttgatctgcgtgtccacctgctctagctcggtgtagtcgcggcggttgcgcgccacggcgtacgccacgaaag

SEQ ID NO: 177421 - DNA, 80 bp, synthetic construct
  source 1..80: mol_type = other DNA
aggacaaaggtcgagcattcaccagtgactacgttatcgctagcactaacatgactgttctcaccccacccactgtttca

SEQ ID NO: 177422 - DNA, 80 bp, synthetic construct
  source 1..80: mol_type = other DNA
agaagcagggcagcgtcgatttcaaggtccagggagtgactgacgcacgcacgtcacttaccacaacaggtgctttcggc

SEQ ID NO: 177423 - DNA, 80 bp, synthetic construct
  source 1..80: mol_type = other DNA
gggagacatcgaaggtaacttcagtgggcccgtcgtcgtggagttggactacgaagacatcgatattactggcgaacggc

SEQ ID NO: 177424 - DNA, 80 bp, synthetic construct
  source 1..80: mol_type = other DNA
aaaaaagactgtaaaaaacagcaaaggagcttctattttgcacgacaagcacaaggtgctaagagggccagaatgggtga

SEQ ID NO: 177425 - DNA, 80 bp, synthetic construct
  source 1..80: mol_type = other DNA
tatacaacacagtgcctccatttaagcttaacaaatacagctgccctatgctacacccaggcatgatgattcagtataaa

SEQ ID NO: 177426 - DNA, 80 bp, synthetic construct
  source 1..80: mol_type = other DNA
ccaggttggaggttaacctgcgtgactccctgttttcaaaatacagggggaatgttgaaactgacatcacagagaacatg

SEQ ID NO: 177427 - DNA, 80 bp, synthetic construct
  source 1..80: mol_type = other DNA
ggaatggccacaatacttaagtgatttggatgctagtgcaattgacaaacctacacatccagagacatccacagatcgct

SEQ ID NO: 177428 - DNA, 80 bp, synthetic construct
  source 1..80: mol_type = other DNA
tgacgtgctggtaccaaaccgggattgtcgtgccggctggaacacccacgtcatgctcaataatgtgctttgtgtcggca

SEQ ID NO: 177429 - DNA, 80 bp, synthetic construct
  source 1..80: mol_type = other DNA
ccaaggaagatgcccagaatgaacttattgtgaatatagacaaacttaagaaaggtctagaccaattagcacctctgtat

SEQ ID NO: 177430 - DNA, 80 bp, synthetic construct
  source 1..80: mol_type = other DNA
cattgaatgattacaattatgagatggattactcccagtatgatggctctctcagctcaatgttgctgtgggaagctgta

SEQ ID NO: 177431 - DNA, 80 bp, synthetic construct
  source 1..80: mol_type = other DNA
gataaacactcagcctcctttcttagacacgcacctcaccgcggccagcatacacccgggcattatgatgctcagcaaga

SEQ ID NO: 177432 - DNA, 80 bp, synthetic construct
  source 1..80: mol_type = other DNA
ctcttgtaggcccccagcagtggcttttcccagagagaaaacccaaacctcctcctacctcggaggactgggccttagag

SEQ ID NO: 177433 - DNA, 80 bp, synthetic construct
  source 1..80: mol_type = other DNA
tggagacaaaaattaacatttccaaaagaaggtcatggcatgttgtcacaattttttgcttactttacaggtgaattgaa

SEQ ID NO: 177434 - DNA, 80 bp, synthetic construct
  source 1..80: mol_type = other DNA
gctcatgcacaaccggagtttactattgcgcgtctcgagtcaagcactatccaatcaccgtgaccagaccaaccttccag

SEQ ID NO: 177435 - DNA, 80 bp, synthetic construct
  source 1..80: mol_type = other DNA
ctgtttcatgaaaacaaacctctacaaggctttgtattctatgacacacaatttggagatggaaaaatgccagacggctc

SEQ ID NO: 177436 - DNA, 80 bp, synthetic construct
  source 1..80: mol_type = other DNA
actaagtttcacagtggtactttgctggtggtggtaataccagaacaccaattagcatcggcaaagggaggcaatgtgtc

SEQ ID NO: 177437 - DNA, 80 bp, synthetic construct
  source 1..80: mol_type = other DNA
tgaaaagagggttccgtgtggatgaaagatacagttttcttgtacacccggttttcccagaaaaagagatttttgaatcg

SEQ ID NO: 177438 - DNA, 80 bp, synthetic construct
  source 1..80: mol_type = other DNA
atgtctgacgagggaccaggtacaggacctggaaatggcctaggacagaaggaagacacatctggaccagacggctccag

SEQ ID NO: 177439 - DNA, 80 bp, synthetic construct
  source 1..80: mol_type = other DNA
caagtttaaatgcactaaatacatttagaacagaaggatgcataagtcacccacaactaaaaaaaccaaacccacaaata

SEQ ID NO: 177440 - DNA, 80 bp, synthetic construct
  source 1..80: mol_type = other DNA
attttgtccagtagactatttactaggatgtggtgttttggtagggaacgcttttgtgttcccccaccagattattaact

SEQ ID NO: 177441 - DNA, 80 bp, synthetic construct
  source 1..80: mol_type = other DNA
atcatacgtttcatatgtcaatgccaacccaggggaaaagggtggtttatttacagatcagtacaacccctctactggcg

SEQ ID NO: 177442 - DNA, 80 bp, synthetic construct
  source 1..80: mol_type = other DNA
ccggggctgggcggtacgcagaagaagatctagaagaacttttcgccgccgcggcaaaagacgatatgtgagtagaaggc

SEQ ID NO: 177443 - DNA, 80 bp, synthetic construct
  source 1..80: mol_type = other DNA
atggaacatatggcaaaccaacaaataatgccttagactaccacctaggaaaatatagccctatatttctttcgcctcac

SEQ ID NO: 177444 - DNA, 80 bp, synthetic construct
  source 1..80: mol_type = other DNA
aaaaaaaaaatcgctatagataacatatttgccctcacatatcgtggggaccaaatactttgggtgtccgtgtttccttt

SEQ ID NO: 177445 - DNA, 80 bp, synthetic construct
  source 1..80: mol_type = other DNA
ggtcccataacagattatcttactcaattaggtaatgcatttggagagggctttacccagaacataagagatggattcaa

SEQ ID NO: 177446 - DNA, 80 bp, synthetic construct
  source 1..80: mol_type = other DNA
cctggtggccatagagagcctcgctcagtacaagtcgttagcccgctcaccatgggaccagagttcatattccaccgctg

SEQ ID NO: 177447 - DNA, 80 bp, synthetic construct
  source 1..80: mol_type = other DNA
gataaatcaacagagtttaaaccaatgtcatgggacaatgtcaccttcctgaagcggaaattccgtcccgatgaccgcta

SEQ ID NO: 177448 - DNA, 80 bp, synthetic construct
  source 1..80: mol_type = other DNA
gtgtggtaaagcagtggtactacaaaatagaaggaccaaagccaattattcaattaacatggtggtggcgcaaatgagag

SEQ ID NO: 177449 - DNA, 80 bp, synthetic construct
  source 1..80: mol_type = other DNA
tgctagcagaacagtattacgaagtgtttggaacttccgtgttggacgttcctacaaaccatcagtcagaaatagaaaca

SEQ ID NO: 177450 - DNA, 80 bp, synthetic construct
  source 1..80: mol_type = other DNA
acatcccaggagaggttaggaatatgatggaattggccgaaatagacaccctcatccctatgaattctgtggacggtaaa

SEQ ID NO: 177451 - DNA, 80 bp, synthetic construct
  source 1..80: mol_type = other DNA
cctgtgtggtaaggctctaactttaaagaataggaaaaatgatgtgcactactccatcaacatggtagtagcccaacttc

SEQ ID NO: 177452 - DNA, 80 bp, synthetic construct
  source 1..80: mol_type = other DNA
aatgtatcagtgacttactcaagtccgttgattctgaggagatcagagagtactgtaaacagaaaaattggcttattcca

SEQ ID NO: 177453 - DNA, 80 bp, synthetic construct
  source 1..80: mol_type = other DNA
ctgttacaccactcaccaaacagcggttaggaatcaacgatgtcccgcggcccagccacacattacatacgcatggagca

SEQ ID NO: 177454 - DNA, 80 bp, synthetic construct
  source 1..80: mol_type = other DNA
ttaacctacttggagtgcatgataactgtgctgtggttcccacgcatgccgaatgcggggaatttgtcaatgtggatggt

SEQ ID NO: 177455 - DNA, 80 bp, synthetic construct
  source 1..80: mol_type = other DNA
ttcctatttttcctttatttttgcttatggtgacaatatatatagtttatatatattggcatcatgggcgcacaggtttc

SEQ ID NO: 177456 - DNA, 80 bp, synthetic construct
  source 1..80: mol_type = other DNA
cccgacactaaagagactggtcctatacacacaaccaagccaacttcattgagtgcacttgagattggagcaaccgccca

SEQ ID NO: 177457 - DNA, 80 bp, synthetic construct
  source 1..80: mol_type = other DNA
acgtgatgaagctcaggaggggcctacacatagaccccctccttacatagctcctccacagtatgtaccagacctactgt

SEQ ID NO: 177458 - DNA, 80 bp, synthetic construct
  source 1..80: mol_type = other DNA
cccactgcatacatggatgtaacttataatccaaatgtagataaaggaaaaggcaacaaaatatggcttcaatcagtaac

SEQ ID NO: 177459 - DNA, 80 bp, synthetic construct
  source 1..80: mol_type = other DNA
ctgcgttcgggcctgacctgcctggctggcctgctgttgttgtggaaggtgaccaacgcggatagcgtcttcgctccgcg

SEQ ID NO: 177460 - DNA, 80 bp, synthetic construct
  source 1..80: mol_type = other DNA
acaacaagggccgtacacgggtctacctgtgcgaaagcctaacgttccaaccattagaacagccaaagttcaaggaccag

SEQ ID NO: 177461 - DNA, 80 bp, synthetic construct
  source 1..80: mol_type = other DNA
accactatgttcacatcctccaatggcaacgtcaacacatccacaggattcactgcaagctctgtaaaaggcacagacgt

SEQ ID NO: 177462 - DNA, 80 bp, synthetic construct
  source 1..80: mol_type = other DNA
ggacacaggccccgaactcatgtgggccccaagccttcgcaactcactgcgcgtgtcccccgaagcgctcgagctggcag

SEQ ID NO: 177463 - DNA, 80 bp, synthetic construct
  source 1..80: mol_type = other DNA
gcacagcaacactacgcacattaactcccgtgcctaacagggttggggctgacagcatcatgttaactgccacgtttgga

SEQ ID NO: 177464 - DNA, 80 bp, synthetic construct
  source 1..80: mol_type = other DNA
aaagacaggtatattcccatcaaagtagaataccacaactactacactatccagaaatcagattattatccaaaacatat

SEQ ID NO: 177465 - DNA, 80 bp, synthetic construct
  source 1..80: mol_type = other DNA
cctcgggcaccccagagcccctcgggcccgcctccaggcgccctcctggtctccgctcccctctgagccccgttaaacct

SEQ ID NO: 177466 - DNA, 80 bp, synthetic construct
  source 1..80: mol_type = other DNA
tgccaggatagtggaggaaggagcgcctagtgtacacttggttatccgtatctacatgcgcatgaaacacgtgcgggtgt

SEQ ID NO: 177467 - DNA, 80 bp, synthetic construct
  source 1..80: mol_type = other DNA
atacagcatctgcagggacttactatccgcgaactccccgacccgccgactgatctcccagaatctgacagcaatcaggg

SEQ ID NO: 177468 - DNA, 80 bp, synthetic construct
  source 1..80: mol_type = other DNA
aaatggccgacttccttccgcttttttaaaaaaaaggcgccaaaaaacggctgcggcgtgggcgcgcgcgctacgcgcgc

SEQ ID NO: 177469 - DNA, 80 bp, synthetic construct
  source 1..80: mol_type = other DNA
taatagagtcgctcaactccacgttcatcccccagtttacggaggtgaccatcgagtaccttccgaggagcgacgagtat

SEQ ID NO: 177470 - DNA, 80 bp, synthetic construct
  source 1..80: mol_type = other DNA
caaaatggcggtggagcacttccgctttacacaaaatggccgccaacttcttccgggtcaaaggtcgcagctacgtcatg

SEQ ID NO: 177471 - DNA, 80 bp, synthetic construct
  source 1..80: mol_type = other DNA
gactgtggccaatacagtggagagtgaaataaaagcagaacttggtgtgatacccagtctaaatgctgctgagacaggag

SEQ ID NO: 177472 - DNA, 80 bp, synthetic construct
  source 1..80: mol_type = other DNA
tgctaggagaacagtattacgatgtgtttggaacttccgtgttggacgttcctacaaaccatactgaacaaataaaaaca

SEQ ID NO: 177473 - DNA, 80 bp, synthetic construct
  source 1..80: mol_type = other DNA
atggagatcgcggaggtcgactctgtagttccagtcaacaatactgagggcaaagtgtcgtcgattgaggcataccagat

SEQ ID NO: 177474 - DNA, 80 bp, synthetic construct
  source 1..80: mol_type = other DNA
agactcgcagggctatgagctggagcagacccgttcacaatgcgccgggaatcgagcgcaactggtacgagtcctgtttc

SEQ ID NO: 177475 - DNA, 80 bp, synthetic construct
  source 1..80: mol_type = other DNA
gtcgagctccgagaaagagcagaagccgaagaagactcaacttcggaaagcccgtcgctcacttcgtcgcaagagagaga

SEQ ID NO: 177476 - DNA, 80 bp, synthetic construct
  source 1..80: mol_type = other DNA
ctgataggttaacctcgaaagtgatcaagtggctggtacgtatcatcagtgctcttactatcatgctcaggaatagtgct

SEQ ID NO: 177477 - DNA, 80 bp, synthetic construct
  source 1..80: mol_type = other DNA
cctggtaaaacatcccagatatactggaatcaatgatacaaaaaagattaatttgacacagccaggaggaggagacccag

SEQ ID NO: 177478 - DNA, 80 bp, synthetic construct
  source 1..80: mol_type = other DNA
cgtaacattagacaagtgcagacagatcagggtcattttacaatgctcggtgttcgtgaccggttagccatcttgccgcg

SEQ ID NO: 177479 - DNA, 80 bp, synthetic construct
  source 1..80: mol_type = other DNA
gccatcagttcggtccatgggatggtgtaatgcgaagcatgcccctctatgtccaggtgcagcttaacctcgctgagact

SEQ ID NO: 177480 - DNA, 80 bp, synthetic construct
  source 1..80: mol_type = other DNA
ttgttggatttactccactgacattctaaacactcaatctcatagaagtggtgaaattaattggataatttaactacaat

SEQ ID NO: 177481 - DNA, 80 bp, synthetic construct
  source 1..80: mol_type = other DNA
gtgggcgacgcggttgataacgagaatgtcaccctgaaccatctggccgtggtgcgggccatggtcatgggcgaagacac

SEQ ID NO: 177482 - DNA, 80 bp, synthetic construct
  source 1..80: mol_type = other DNA
atggctaatttgactttcaaacagcgcagggagtcgcaaggagaaggacccccggcaaaaaagaagaggaaaaatccgcg

SEQ ID NO: 177483 - DNA, 80 bp, synthetic construct
  source 1..80: mol_type = other DNA
ggggagttcaccaaaacttataaccccagtacagaagttgatgaaggcagaaagttcgcagctctcgattacctactcgg

SEQ ID NO: 177484 - DNA, 80 bp, synthetic construct
  source 1..80: mol_type = other DNA
atgcttcagaaggatgccaagattatcttcatctcgtctgtgaactcggctgaccaggccaccagctttctttataagct

SEQ ID NO: 177485 - DNA, 80 bp, synthetic construct
  source 1..80: mol_type = other DNA
actggctacatgttctggatgtcctgatatatctgtcaggatgctccgggatactccaatggcaaagcaaccccagaata

SEQ ID NO: 177486 - DNA, 80 bp, synthetic construct
  source 1..80: mol_type = other DNA
ctcccctcaccgtaacattagaagcaatacacgcatgatcaatagtaggcatgatatgccaatcatgtcatgatcaagca

SEQ ID NO: 177487 - DNA, 80 bp, synthetic construct
  source 1..80: mol_type = other DNA
ctaccctgaccatggaacgcgaccttgagaggggcccaccgggcccgccacggccccctctaggaccccccctctcctct

SEQ ID NO: 177488 - DNA, 80 bp, synthetic construct
  source 1..80: mol_type = other DNA
aggacttcacgctccatgagaacggaacgtgtacccgctgcggtggttatttgcctcttgatactgaccctcaatctgat

SEQ ID NO: 177489 - DNA, 80 bp, synthetic construct
  source 1..80: mol_type = other DNA
cacaggaccgttcatggtcagagaccaagaccgcaacagttgggacataactataggctacaaattcttatggagatggg

SEQ ID NO: 177490 - DNA, 80 bp, synthetic construct
  source 1..80: mol_type = other DNA
ggcaaggctcttaaggtaatcgctcttaaaaatgcccttcttcggcagggcctggagaaagaaaaaggaaaggcaactgc

SEQ ID NO: 177491 - DNA, 80 bp, synthetic construct
  source 1..80: mol_type = other DNA
tgcagaaaaacttagcaaaccagtggacatacaaaattcatcagggaaataaagtcctaaaagtaggaaaatatgcaaag

SEQ ID NO: 177492 - DNA, 80 bp, synthetic construct
  source 1..80: mol_type = other DNA
ggtggcgccgccggtggccccgaaggagatggaggcgctggaggacccgccgccgcagacgactaccagccagaagacct

SEQ ID NO: 177493 - DNA, 80 bp, synthetic construct
  source 1..80: mol_type = other DNA
gactcatgtatccgagatgacaactgcacaggtatagaatttgagaacatggtaacatgtcgattcaatatgacaggatt

SEQ ID NO: 177494 - DNA, 80 bp, synthetic construct
  source 1..80: mol_type = other DNA
cgcaatttacgaatgatgtgttactaatggttgcgtttgttgttgcggctggagatgtaataattgttgcggtcatgtct

SEQ ID NO: 177495 - DNA, 80 bp, synthetic construct
  source 1..80: mol_type = other DNA
agttttaggccggccatgggggcttacaagaataacatgccaatgacccggcccccacttttaaattctgttgcagcaga

SEQ ID NO: 177496 - DNA, 80 bp, synthetic construct
  source 1..80: mol_type = other DNA
tagaaaactctaccattcgtcaccggatctgcttctatttaaacagaccaatcagatactactacgtacacttcctgggg

SEQ ID NO: 177497 - DNA, 80 bp, synthetic construct
  source 1..80: mol_type = other DNA
tatattacttacttgaaagatgaactcagagcaccagaaaagattaggtgtggcaaaactaggtgtattgaggcagcgag

SEQ ID NO: 177498 - DNA, 80 bp, synthetic construct
  source 1..80: mol_type = other DNA
gcaaatgaccaagtgggggattcactctacagcgccatgactgtggatgatttcggtgtcctcgccataagagtggtcaa

SEQ ID NO: 177499 - DNA, 80 bp, synthetic construct
  source 1..80: mol_type = other DNA
tggtgacgctggcaatctccactccaacacgtgggggactctcgtcttctacgtggaccttcccagctctcagtcagtct

SEQ ID NO: 177500 - DNA, 80 bp, synthetic construct
  source 1..80: mol_type = other DNA
tcacataacagtttcaagcaggtctctgggatgtgaagggaggtgccctggagcaggagatgcatgattaggcgcccttt

SEQ ID NO: 177501 - DNA, 80 bp, synthetic construct
  source 1..80: mol_type = other DNA
acaaaatccagttgagaattatgtggaagaagtccttaatgaggtcttggtagtacctaacatcaaagaaagccacccta

SEQ ID NO: 177502 - DNA, 80 bp, synthetic construct
  source 1..80: mol_type = other DNA
ctaacataccccacagaaatgacaaatcttggaccatctgatctttatgtgcatactggtaatctcatatatagaaattt

SEQ ID NO: 177503 - DNA, 80 bp, synthetic construct
  source 1..80: mol_type = other DNA
tgctgatatacacagatcttcagtttattcccttccacctgatcccaaacattttgatggttatcaacagcaagcagtag

SEQ ID NO: 177504 - DNA, 80 bp, synthetic construct
  source 1..80: mol_type = other DNA
aaacaaaaagtgtgcacatggttagggcttagatacatacacaaggaatcagatggttggattaagaaattcactgaaat

SEQ ID NO: 177505 - DNA, 80 bp, synthetic construct
  source 1..80: mol_type = other DNA
ccacgtgggagatccaggtggagttgtactctattattccggtaattttgtacgccagttttatctccctttcccctttt

SEQ ID NO: 177506 - DNA, 80 bp, synthetic construct
  source 1..80: mol_type = other DNA
tctcaagttgtccctagtgataccatgcagaccaggcatgttgtcaaccatcacattagatcggagtcttcaatagagaa

SEQ ID NO: 177507 - DNA, 80 bp, synthetic construct
  source 1..80: mol_type = other DNA
ttactgagggtggttatatctcaatgttttaccaaactaaaattgtggtccctgcatcaaccccaacccaaatggatatc

SEQ ID NO: 177508 - DNA, 80 bp, synthetic construct
  source 1..80: mol_type = other DNA
gtttgtctacaagttcctggcctttaagctgaagaactgcaactacccctcctcgcccgtgtttgtgatatccaacaacg

SEQ ID NO: 177509 - DNA, 80 bp, synthetic construct
  source 1..80: mol_type = other DNA
tgtagagtatacacacacacatgtaactaactacaagcctaaagaagggagagagaagactgccatagtacccagagcaa

SEQ ID NO: 177510 - DNA, 80 bp, synthetic construct
  source 1..80: mol_type = other DNA
tctcccgttctgggctggtgggagtagtcaaccttactgatggtggtactgataccacagggtatgccacctgggatata

SEQ ID NO: 177511 - DNA, 80 bp, synthetic construct
  source 1..80: mol_type = other DNA
atgtgctgtgagttcaatgggctcagggcgcagacgaaccctgtcttacaagggctgcccgttctcaacactccaggatc

SEQ ID NO: 177512 - DNA, 80 bp, synthetic construct
  source 1..80: mol_type = other DNA
caaggtcattagcaatgcactgcagttatcacaacctactaaaccaatcaatgaagcggcgtcaacgccagcaaccagcg

SEQ ID NO: 177513 - DNA, 80 bp, synthetic construct
  source 1..80: mol_type = other DNA
cgatcggtccttggcctatctttatcatgacttgtccctttgggcaatgtgagcctggtggtaaatgtcctaaccagaaa

SEQ ID NO: 177514 - DNA, 80 bp, synthetic construct
  source 1..80: mol_type = other DNA
gttgatgcccatggtgtttgattaaattataatgctccactctttcagctatggactttatgattaggcactaatttaat

SEQ ID NO: 177515 - DNA, 80 bp, synthetic construct
  source 1..80: mol_type = other DNA
attaaagtggggcctcctaaactttttgaagacaagtggtacccccagtcagatctatgcaaggtgccccttgtcagttg

SEQ ID NO: 177516 - DNA, 80 bp, synthetic construct
  source 1..80: mol_type = other DNA
ccacgtcctgcgtcaggcgggcgttacgggcatctacaagcactttttctgcgacccgcagtgcgccggcaacatccgcg

SEQ ID NO: 177517 - DNA, 80 bp, synthetic construct
  source 1..80: mol_type = other DNA
gattcctaaatacagggtgatcaatccaggagggaacgagaggaagacaatgggatatatgtacctgattgcttatggat

SEQ ID NO: 177518 - DNA, 80 bp, synthetic construct
  source 1..80: mol_type = other DNA
cactgtgggcaactgtgacaatggaaaatgggtttaggatttggaaagtaaactaccaggaaaatgcacatatccgaaag

SEQ ID NO: 177519 - DNA, 80 bp, synthetic construct
  source 1..80: mol_type = other DNA
agttaaggatgtattgacaaaaggtatacccaccctacaatcaccatccgtagaggcttgtggatattcagacaggatta

SEQ ID NO: 177520 - DNA, 80 bp, synthetic construct
  source 1..80: mol_type = other DNA
caataactggagcagatctaatgtagacttagagttagtaagatacctaggagcagaattcaaactgtacagggggacag

SEQ ID NO: 177521 - DNA, 80 bp, synthetic construct
  source 1..80: mol_type = other DNA
tttataacaggacacacaaatgtacactttaacttttgtacatacaacccaaacatacaagaactcacaacacttagaac

SEQ ID NO: 177522 - DNA, 80 bp, synthetic construct
  source 1..80: mol_type = other DNA
gacggctcacactacatacccatacagatgaggcacaggtggtaccctaacctactgaaccaacagcctgtgctagagga

SEQ ID NO: 177523 - DNA, 80 bp, synthetic construct
  source 1..80: mol_type = other DNA
ctacaaaatttgcaattaccacctagctacacaagaagacttgcaaaatgccgtgagtgtcatgtggaacagagacctct

SEQ ID NO: 177524 - DNA, 80 bp, synthetic construct
  source 1..80: mol_type = other DNA
caatctgtaacaaaaaaaacatcagactttgatgagcgcaattgccgctgtgttatttcagaccttccaatgtgggctat

SEQ ID NO: 177525 - DNA, 80 bp, synthetic construct
  source 1..80: mol_type = other DNA
aattgcaccatataaatcagagttctctggtgccatggaaacacgttatacagtgcagcaacagggtttacctgttcgta

SEQ ID NO: 177526 - DNA, 80 bp, synthetic construct
  source 1..80: mol_type = other DNA
gtgtgaaaatagtaccagtaatacaggaaataatatcggtagtacaggaaatagtaccagcaaatgctatataaaaacct

SEQ ID NO: 177527 - DNA, 80 bp, synthetic construct
  source 1..80: mol_type = other DNA
gggcgttaggagtgtttgctgtacctgagtattgcttagcaggtgacagtgacgtgaaaaactcatacaccacctacaaa

SEQ ID NO: 177528 - DNA, 80 bp, synthetic construct
  source 1..80: mol_type = other DNA
gcaagaagcaaagctgcagggtgaacccggtaaggccattgagtccgcaatatctagagtggccgacaccataagtagtg

SEQ ID NO: 177529 - DNA, 80 bp, synthetic construct
  source 1..80: mol_type = other DNA
ggtggtgagcgtatttctcatgctaaccttccaagtgatgataattggctcaactttgatggcactttattaggtaatgc

SEQ ID NO: 177530 - DNA, 80 bp, synthetic construct
  source 1..80: mol_type = other DNA
ctcaactaggacccaatgtggaccatgaaacagcaggcttaataattatgatctgtccatacactcaaccacctatgtat

SEQ ID NO: 177531 - DNA, 80 bp, synthetic construct
  source 1..80: mol_type = other DNA
ctcgctttcctcgcgccggtccacctaggcccccgccggggctagagcagccgaaccccccggagcagggcccggccggg

SEQ ID NO: 177532 - DNA, 80 bp, synthetic construct
  source 1..80: mol_type = other DNA
ttgcttgatacagcaaaagccttacaaccttgcaccaagtgtgacaaacccacccattactcacgctgttgtccactcct

SEQ ID NO: 177533 - DNA, 80 bp, synthetic construct
  source 1..80: mol_type = other DNA
atgccatttacctatacgaaacaaacacaggcaacataacaccaactcaaaacctaaatacagtcatagacagacttgct

SEQ ID NO: 177534 - DNA, 80 bp, synthetic construct
  source 1..80: mol_type = other DNA
cttcactgattcaaacaatatgcaacactcatcatatctttaaagatgaaatctacacagttaaaggggggatgccatct

SEQ ID NO: 177535 - DNA, 80 bp, synthetic construct
  source 1..80: mol_type = other DNA
aatggttttcaactacaacatccatacatccttgatgctggaattccacttagtcaactattggtatgtccacatcagtg

SEQ ID NO: 177536 - DNA, 80 bp, synthetic construct
  source 1..80: mol_type = other DNA
ttttacgaaatccttgtgtgcctgttttatatcccttccctaacttgaaacgtagaagcaatgcgcaacactgatcaata

SEQ ID NO: 177537 - DNA, 80 bp, synthetic construct
  source 1..80: mol_type = other DNA
ttgtacgagttgaaatcggccaggatcgagtgataggatatggcagtgacggcattttcgggactgagtacaaaattgcc

SEQ ID NO: 177538 - DNA, 80 bp, synthetic construct
  source 1..80: mol_type = other DNA
cctttccaataaatttctaccactttatgcaaatgaggcaaaaagaattaaagcccttgcccacaaagcatccaatatag

SEQ ID NO: 177539 - DNA, 80 bp, synthetic construct
  source 1..80: mol_type = other DNA
ggcaatgtaaaagaactagttcataaatttggaatcccactgttagtggcaaaacaaatagtaaactcctgtgataaatg

SEQ ID NO: 177540 - DNA, 80 bp, synthetic construct
  source 1..80: mol_type = other DNA
gccaatccttgtcaatggacccaagcaaatttaccgaaccagtcaaagatttgatgctaaagggtgcaccggctctgaat

SEQ ID NO: 177541 - DNA, 80 bp, synthetic construct
  source 1..80: mol_type = other DNA
gcataatccccatgattatctgtggccacctccgcagcaacagaaactatgcgttacacagcgatgacatagtagaacaa

SEQ ID NO: 177542 - DNA, 80 bp, synthetic construct
  source 1..80: mol_type = other DNA
ctttaacacaattatcaataatattataatcagaacattagtgttggacacttacaaaggaattgaattggacaaactca

SEQ ID NO: 177543 - DNA, 80 bp, synthetic construct
  source 1..80: mol_type = other DNA
atcatgagtgtagacaactacaacgagaatctgactggtcaacagaagtctacattgtttgccacctggaacgtgaccta

SEQ ID NO: 177544 - DNA, 80 bp, synthetic construct
  source 1..80: mol_type = other DNA
aggctgtaaggacttttgcttaagaatggcccgtgacacaaatttacacttacaaagtggcaatataacacaaaacccag

SEQ ID NO: 177545 - DNA, 80 bp, synthetic construct
  source 1..80: mol_type = other DNA
ctgtgagaagaaaggatggattgtaaagatggataacaacttggtcattgaacgcaatctcaatagagcaatgacaatct

SEQ ID NO: 177546 - DNA, 80 bp, synthetic construct
  source 1..80: mol_type = other DNA
cccttgtgttagatgcatataaacatatagaccttgataagctcaaaataattgcctatggggatgatgttatattttct

SEQ ID NO: 177547 - DNA, 80 bp, synthetic construct
  source 1..80: mol_type = other DNA
actataaacctaaagacagagaaaagcaagttagtacttttattaagcctagagctgacttgagggaaattagaacattt

SEQ ID NO: 177548 - DNA, 80 bp, synthetic construct
  source 1..80: mol_type = other DNA
cggccgttgtaggacacgttgcggcgatgcagagcgtccgcgacggtcttttttgcctgggctgcgtcacttcgcccagg

SEQ ID NO: 177549 - DNA, 80 bp, synthetic construct
  source 1..80: mol_type = other DNA
agggtcggcggcaggggtcccaggtcccctcctgcagggtccccaggccgtgggtcatgtagaaactgttaaagagactc

SEQ ID NO: 177550 - DNA, 80 bp, synthetic construct
  source 1..80: mol_type = other DNA
cagaagaaaagcaaaaatcataaaagattatggaggaggaaaagaggtggatagcagtaccaacatggaggataccaggc

SEQ ID NO: 177551 - DNA, 80 bp, synthetic construct
  source 1..80: mol_type = other DNA
tcgttttgataataatataataaaaactcatggacgtgaaatctggcttggttgtggtgatttcattctcattattgttg

SEQ ID NO: 177552 - DNA, 80 bp, synthetic construct
  source 1..80: mol_type = other DNA
tgtgaggtagtctatccagattatgttgcctgtgcctttgtctgtgaaggggttgtatataatgtcagagtaggcccctg

SEQ ID NO: 177553 - DNA, 80 bp, synthetic construct
  source 1..80: mol_type = other DNA
actgtcaatatcacacaaaatccagttgagaagtacactgaagcaattctaaatgaagtcctaacagtcccaaatataca

SEQ ID NO: 177554 - DNA, 80 bp, synthetic construct
  source 1..80: mol_type = other DNA
agcacaaagccaacacaagatgtgtgggagtacagagtaggaatgtactcacccatattcctaagtccttacaggacaag

SEQ ID NO: 177555 - DNA, 80 bp, synthetic construct
  source 1..80: mol_type = other DNA
cgcaggccctcatagtcgcgtcgcacgcacaggtcggccaagtcgcgcgtgcaaaagacctcgggtaccaagcagcgttt

SEQ ID NO: 177556 - DNA, 80 bp, synthetic construct
  source 1..80: mol_type = other DNA
gagtgccatgtcttccagtcacacggatccatcagtaacacagccaagtaagccacatcggaaacctcaagacggatttc

SEQ ID NO: 177557 - DNA, 80 bp, synthetic construct
  source 1..80: mol_type = other DNA
tggagtaagactactggcgcatgtagtccagaaaataggaaaggaagcattagttatctggggagaaataccaatgttcc

SEQ ID NO: 177558 - DNA, 80 bp, synthetic construct
  source 1..80: mol_type = other DNA
tccaagacttgatgtagaactcaaagaggcagtgatgtcgaagtataagggtaacaaaaactgtcagatgaatgagtatg

SEQ ID NO: 177559 - DNA, 80 bp, synthetic construct
  source 1..80: mol_type = other DNA
gatctgaatccacagtagagaactttctgtgtagatccgcgtgtgtatattacacaacctacaagaaccatggaaccgat

SEQ ID NO: 177560 - DNA, 80 bp, synthetic construct
  source 1..80: mol_type = other DNA
atgtaacttttctcaagaggggattcaggcaggatgagaaatacagttttcttatacatcccacttttccagttgaagaa

SEQ ID NO: 177561 - DNA, 80 bp, synthetic construct
  source 1..80: mol_type = other DNA
acagtcttattggaagaagctcaaattcaacaagaaaagaatatgtatcagttacaaaaattgaatagctgggatgtttt

SEQ ID NO: 177562 - DNA, 80 bp, synthetic construct
  source 1..80: mol_type = other DNA
aaaagacctcgcacctccactcagtaaaagaccttactctctccagtaatcaatgtatcccaaataaatgttaatgattt

SEQ ID NO: 177563 - DNA, 80 bp, synthetic construct
  source 1..80: mol_type = other DNA
acctttgtgataacatcacatcaagatcaagggacacagtttaaccaagatgcacctgtcatgtgccaccaagtaatgta

SEQ ID NO: 177564 - DNA, 80 bp, synthetic construct
  source 1..80: mol_type = other DNA
catacaggggagaaggtgtggatttgaaaggcggatcaatagagccactgacccccgtgaatagcatcacaacatatgga

SEQ ID NO: 177565 - DNA, 80 bp, synthetic construct
  source 1..80: mol_type = other DNA
aagggatatgcgtacaacgacgaaaaagtgcgaaagcgatgtggaggggggagtactggtgcgcgagttacgatgtcagt

SEQ ID NO: 177566 - DNA, 80 bp, synthetic construct
  source 1..80: mol_type = other DNA
gcaatgaaatcacagcagcaaggtctacctactaggagtcctgcaggatcacaacaatttatgactactgaagatgagca

SEQ ID NO: 177567 - DNA, 80 bp, synthetic construct
  source 1..80: mol_type = other DNA
ccccagattcacaatacctttcatgagcattgcctcagcatattacatgttttatgatggatatgaggatgatacaccaa

SEQ ID NO: 177568 - DNA, 80 bp, synthetic construct
  source 1..80: mol_type = other DNA
aggtaccgtgattacattgggagaacaggggtacaaagtgtcgttggatctgaggtagggaaccaggctggcaatggctg

SEQ ID NO: 177569 - DNA, 80 bp, synthetic construct
  source 1..80: mol_type = other DNA
ccaggaaagcaagcaacgatctcattgttgttatccccttacagatggacaataccttatttgctaccaccttattaggg

SEQ ID NO: 177570 - DNA, 80 bp, synthetic construct
  source 1..80: mol_type = other DNA
acagcaaggacacatcatgtcaaaatgcccagaaagacaggcgggttttttagggttcggcccctggggaaagaagcctc

SEQ ID NO: 177571 - DNA, 80 bp, synthetic construct
  source 1..80: mol_type = other DNA
aagtgctgcctttgtggaaaggcactgagcttggttgatagacacacaaacgtcagatatacaatagatcagttagttac

SEQ ID NO: 177572 - DNA, 80 bp, synthetic construct
  source 1..80: mol_type = other DNA
gcgaatccaggcgaaaaaggaggtgaattcaaagggagtttcacccttgataccaacgccactaaccctgcacggaactt

SEQ ID NO: 177573 - DNA, 80 bp, synthetic construct
  source 1..80: mol_type = other DNA
agcgtctgacaaacgattgagtcacaccatgttgggggagatattgaattactacacccattggacaggttccatcaggt

SEQ ID NO: 177574 - DNA, 80 bp, synthetic construct
  source 1..80: mol_type = other DNA
cacaatcatcccactcaacccaatcaattggctcaaaggggcggacgtctccgggatcgctgcgatgctatcgtgcttca

SEQ ID NO: 177575 - DNA, 80 bp, synthetic construct
  source 1..80: mol_type = other DNA
gtcgaccattaaaacacctgtgaatacaaccacaatcaaagaattgctcaaccacgcaattgacggagatgagcagggac

SEQ ID NO: 177576 - DNA, 80 bp, synthetic construct
  source 1..80: mol_type = other DNA
cgtctcgccccaactcgtatggcactcgtgggacttcagaagaggactctttggccaggcaggtattaaaagaatgcaac

SEQ ID NO: 177577 - DNA, 80 bp, synthetic construct
  source 1..80: mol_type = other DNA
gggggtgacagagaaccttgagagcattctgtaggttaaacgcgaggagaaggttattcttgtttacgatccatgcctcc

SEQ ID NO: 177578 - DNA, 80 bp, synthetic construct
  source 1..80: mol_type = other DNA
gtagggcgattgccaggcaagccaacaccagcacctactcacttcctccagacccatcacacttcgacgggtacaaacaa

SEQ ID NO: 177579 - DNA, 80 bp, synthetic construct
  source 1..80: mol_type = other DNA
gtgtacggggccggggggtgtgcggggacggccacggtggccttttgcggcgtgtacttgcgtgcttttgcggatacggt

SEQ ID NO: 177580 - DNA, 80 bp, synthetic construct
  source 1..80: mol_type = other DNA
ggttaccgtcgtactgtgattaccgttggcggactgcaccgggatgataggctgcttgtggggaacctggggtggactgc

SEQ ID NO: 177581 - DNA, 80 bp, synthetic construct
  source 1..80: mol_type = other DNA
ggggaggaggtttatgaaaagtttagggagaaaatcagatccacaagtgttggcaaggttctctacaccccaccttactc

SEQ ID NO: 177582 - DNA, 80 bp, synthetic construct
  source 1..80: mol_type = other DNA
agcccgatgtatcgttatccgcatgattactaagcagagcctagtaacatcttactttatatatgggttggtcgctcagt

SEQ ID NO: 177583 - DNA, 80 bp, synthetic construct
  source 1..80: mol_type = other DNA
ctcacagcgttcaaagagatacctatgcccgttgaacgaaaaacaacattataatggactggcgggtcacggttacgtgg

SEQ ID NO: 177584 - DNA, 80 bp, synthetic construct
  source 1..80: mol_type = other DNA
gcaaggatgtttacgagcagttcctaaaccaaattagaaccacatcagtgggtagggccttaaatttaccaccctacacc

SEQ ID NO: 177585 - DNA, 80 bp, synthetic construct
  source 1..80: mol_type = other DNA
gattaaggggatccaaggtgacccctgttagctatttgatctttgactgacacataaacatggtttaaggaatgaacact

SEQ ID NO: 177586 - DNA, 80 bp, synthetic construct
  source 1..80: mol_type = other DNA
tgtgttcacaccaaggatgcagtgtacacctgtgcccatttgacacaaccaaatgacaacaccattctgttggctctgac

SEQ ID NO: 177587 - DNA, 80 bp, synthetic construct
  source 1..80: mol_type = other DNA
ttaagacagagcctgtcaccgacacacgagccaccattacactaaccagagatgaacacttaccagacatgcactcgcat

SEQ ID NO: 177588 - DNA, 80 bp, synthetic construct
  source 1..80: mol_type = other DNA
gaaatgaacgtaataaagagctgtagcgacgtatgcgctacatcgcgtggcataagaacgtgacggacgaaaaggacctg

SEQ ID NO: 177589 - DNA, 80 bp, synthetic construct
  source 1..80: mol_type = other DNA
tatttgggagggcatggttcaacagtgatcatgaatttactaatggtaacctctggagaagtcagctgactttcccaaaa

SEQ ID NO: 177590 - DNA, 80 bp, synthetic construct
  source 1..80: mol_type = other DNA
gtgctgggcaacgagacccacagcctggcgaccgagaccacggcgctggtggccgacgtgcacgacctgcgccactcgga

SEQ ID NO: 177591 - DNA, 80 bp, synthetic construct
  source 1..80: mol_type = other DNA
gcgcaagtttcatcacagaaagtgggtgcacacgagaacactaatgttgcaaccggcggatcaaccgtgaactacacaac

SEQ ID NO: 177592 - DNA, 80 bp, synthetic construct
  source 1..80: mol_type = other DNA
tgatgacacgaaaacatactttttaacaccagatggactatggggagacagcatatatgtatataataatgaacctccaa

SEQ ID NO: 177593 - DNA, 80 bp, synthetic construct
  source 1..80: mol_type = other DNA
tcaaattcgagaatatgtcgaagattcaaacatatcctggtaattattatatcacatttagaagaaaagaccgccatcaa

SEQ ID NO: 177594 - DNA, 80 bp, synthetic construct
  source 1..80: mol_type = other DNA
cactgaacaccactgggtccaccaacccaattttctgtctaagtctgtctcctgcttctgaccaacgccttcagtatacc

SEQ ID NO: 177595 - DNA, 80 bp, synthetic construct
  source 1..80: mol_type = other DNA
ccatctcaaatcacgggggcgcacgtcgcggtgatttggctacactgaacacacgcggtgctttcggccaacaatccgga

SEQ ID NO: 177596 - DNA, 80 bp, synthetic construct
  source 1..80: mol_type = other DNA
ttaacactgccattacagaaggagccttccacgctcctcaaatacaaaaagacaaagcaccactaggtacatcctacttt

SEQ ID NO: 177597 - DNA, 80 bp, synthetic construct
  source 1..80: mol_type = other DNA
aaataggctgctccgcgtggagctggacggcatcatgcgtgaccacctggccagggcggaggagatccgccaggacctgg

SEQ ID NO: 177598 - DNA, 80 bp, synthetic construct
  source 1..80: mol_type = other DNA
acttcactggtgagctgaacatacatgtcctattcctaagtgagagaggttttctgagagtggcacatacctatgatact

SEQ ID NO: 177599 - DNA, 80 bp, synthetic construct
  source 1..80: mol_type = other DNA
ggcgcacaggtttccaagcagagtgtgggagcacatgaaaccatggtacaggaataaaaggaaacacggacacccaaagt

SEQ ID NO: 177600 - DNA, 80 bp, synthetic construct
  source 1..80: mol_type = other DNA
ggagctatggaaataggagccactgcagatattacacctgctgacactatcgaaaccaggtatgtcatcaacaatcatac

SEQ ID NO: 177601 - DNA, 80 bp, synthetic construct
  source 1..80: mol_type = other DNA
ctccgtggatttcaaacacagctttcaggcgctgtgagaaagatgatttcactgaaggtggatacatcactgccttctac

SEQ ID NO: 177602 - DNA, 80 bp, synthetic construct
  source 1..80: mol_type = other DNA
ggcaccccagccgcgccgccaccgccagacggagaaccccgggtctgagccatggcctggagatggtggtggagacggcg

SEQ ID NO: 177603 - DNA, 80 bp, synthetic construct
  source 1..80: mol_type = other DNA
aagaactaggcccctacacagacgcagagtcagtgggcgtaatctgctgcatatgcccctacactaaaccccccatgaaa

SEQ ID NO: 177604 - DNA, 80 bp, synthetic construct
  source 1..80: mol_type = other DNA
tttactaatctggttgcacgttttcatcttcaaggcggtgctgcctcgcagggtggtcctaggaatccgcccccgctgag

SEQ ID NO: 177605 - DNA, 80 bp, synthetic construct
  source 1..80: mol_type = other DNA
aatatcactgttgtccgaattcttggaaaagacaagattaaatattatgggttcagattcctggaatatcaaggagttaa

SEQ ID NO: 177606 - DNA, 80 bp, synthetic construct
  source 1..80: mol_type = other DNA
gccgtttactgctctcataaatgtttttgcggttgtggcgatcctgttaggcatctcgctagtatttctgctgctgtggg

SEQ ID NO: 177607 - DNA, 80 bp, synthetic construct
  source 1..80: mol_type = other DNA
gtggtaatggcaaacaaggtttctcagcacaactaaagaaacagtattttgtccagaagcagggtgagatagttagtaaa

SEQ ID NO: 177608 - DNA, 80 bp, synthetic construct
  source 1..80: mol_type = other DNA
atgcccttacacatacccaaaactatacaatgatactaatccagactatggctacgtacctgtatcctacaactttactg

SEQ ID NO: 177609 - DNA, 80 bp, synthetic construct
  source 1..80: mol_type = other DNA
gcagactaaacccacagtttccaggcctatacacaacaataatatacaatcctcttacagacaaaggagaaggaaacaaa

SEQ ID NO: 177610 - DNA, 80 bp, synthetic construct
  source 1..80: mol_type = other DNA
acatcagacagatagtcaacacgtggcacaagattggaagaaatgtgtatttgcctccaagagagggtgaactctcctgt

SEQ ID NO: 177611 - DNA, 80 bp, synthetic construct
  source 1..80: mol_type = other DNA
tttcattgctctctgagcggttaaaagcgtgcgtgtttatgctgtggggtgcgaaggcgggagacaaagcttcactaatc

SEQ ID NO: 177612 - DNA, 80 bp, synthetic construct
  source 1..80: mol_type = other DNA
ttattattccacttgtaccattacgctcaggatcaaccccacctattaatgaacttcctatcacaatctccattgcacca

SEQ ID NO: 177613 - DNA, 80 bp, synthetic construct
  source 1..80: mol_type = other DNA
gcaagagaaccataacaagtactgggaggcaagaaatagtcaaacattcagcgaatcaaaggcactaagccacaaaacag

SEQ ID NO: 177614 - DNA, 80 bp, synthetic construct
  source 1..80: mol_type = other DNA
cagcgtgggcaaaacgtcgatacaacgacgagtggggcgccacaaccaccacagagactgccatcggtgacaactccgca

SEQ ID NO: 177615 - DNA, 80 bp, synthetic construct
  source 1..80: mol_type = other DNA
ggaaaaacccggattgtggaggcagccccaatacaagcaattgtagttgggcaccgactcgttggttctctcatcaacca

SEQ ID NO: 177616 - DNA, 80 bp, synthetic construct
  source 1..80: mol_type = other DNA
acaattatatgctacactagatgggcacttactagcttttgattacacaaactatgatggcagtttacaccccatatggt

SEQ ID NO: 177617 - DNA, 80 bp, synthetic construct
  source 1..80: mol_type = other DNA
tgttggattcactccgttgacatacaaatccctaaacactttgtgctttattttgaacttgaacgcacgaaaatgggagc

SEQ ID NO: 177618 - DNA, 80 bp, synthetic construct
  source 1..80: mol_type = other DNA
gcaatgtacagagaatcatacactaaatctcatcaatctaactgaaatatataatagaacctactattttcaatctttta

SEQ ID NO: 177619 - DNA, 80 bp, synthetic construct
  source 1..80: mol_type = other DNA
gcagcagttagaagaattatataaaactctatttgttaaaaagggctgcggacactactggcaaacattcatgaccaata

SEQ ID NO: 177620 - DNA, 80 bp, synthetic construct
  source 1..80: mol_type = other DNA
tttgaaaggggtctcctagagagcttggccgtcgggccttataccccgacttgcgatgtgtataagagacagtttattgt

SEQ ID NO: 177621 - DNA, 80 bp, synthetic construct
  source 1..80: mol_type = other DNA
aagcaggtacaaatttagaaataaccattattagattggctagaaatgagaagtttagagacattaggccacacattcca

SEQ ID NO: 177622 - DNA, 80 bp, synthetic construct
  source 1..80: mol_type = other DNA
cctctaagtatctaaatcacaaaacaggattattttcctccatattcctcagtagacaaagactatcaccagactttcca

SEQ ID NO: 177623 - DNA, 80 bp, synthetic construct
  source 1..80: mol_type = other DNA
tcagggtaggttgggtgatgacgccaaatttttttgccctactggctctttggtctccttccaaaattcatggggatcac

SEQ ID NO: 177624 - DNA, 80 bp, synthetic construct
  source 1..80: mol_type = other DNA
accatttagctacaaagacacactgactcacagcagcctagtaatgaaatattcattctactttacttggggtggcgacc

SEQ ID NO: 177625 - DNA, 80 bp, synthetic construct
  source 1..80: mol_type = other DNA
gtcttaagcaagttggggtttaaacatcccacattgatacaatcaatttgtaatacacatcacatcttcagagatgagat

SEQ ID NO: 177626 - DNA, 80 bp, synthetic construct
  source 1..80: mol_type = other DNA
ttacttaagcataactgcctttgacactaatactgaacaaacaattaaaaactttttaaaaaaagccttcccaatgtcag

SEQ ID NO: 177627 - DNA, 80 bp, synthetic construct
  source 1..80: mol_type = other DNA
atcaaacaggagtggtcattccaccaggcacaccatccacttgctccattttgtgctttgtgtctgcatgcaacgacttc

SEQ ID NO: 177628 - DNA, 80 bp, synthetic construct
  source 1..80: mol_type = other DNA
tcttatgtcccccaccacaaggtgggatgggcctggtggacttgcagtagagtaatattccccctaaaagaaggagcata

SEQ ID NO: 177629 - DNA, 80 bp, synthetic construct
  source 1..80: mol_type = other DNA
tacacgacaatgtcttggaaatcatacattacttcttattaatttgacaactcactggaaaccaaatgtatgctacaatg

SEQ ID NO: 177630 - DNA, 80 bp, synthetic construct
  source 1..80: mol_type = other DNA
ggagaatcacatttagaaatacaggcctattggaatttgacaccagagaagggatggctttcaacatatgcagtcagaat

SEQ ID NO: 177631 - DNA, 80 bp, synthetic construct
  source 1..80: mol_type = other DNA
atgtttaacccaccaggcccaaaaccaataacaggttatgaggcctggaaagatgagtttgaaacctgtaaggagtggga

SEQ ID NO: 177632 - DNA, 80 bp, synthetic construct
  source 1..80: mol_type = other DNA
cagggccaaagagacctctcctattcttatccccagaataccatggccccgcgcaagaaagcgactcaggttcactggca

SEQ ID NO: 177633 - DNA, 80 bp, synthetic construct
  source 1..80: mol_type = other DNA
tagcatatataggtagtgagaaggtagatgttgcttatgaacatacacaccctggagaaaatggtcacaagataggtgtt

SEQ ID NO: 177634 - DNA, 80 bp, synthetic construct
  source 1..80: mol_type = other DNA
aggcctgtaaaatatgggacagaccccccagaggcaacctaagagacacccccttttacccctgggcccccaaggaaaac

SEQ ID NO: 177635 - DNA, 80 bp, synthetic construct
  source 1..80: mol_type = other DNA
aggcaatcaaacaatgactggaagcaaatatctaaactacagaacaggaatatacagtgccatattcctgtcagcaggca

SEQ ID NO: 177636 - DNA, 80 bp, synthetic construct
  source 1..80: mol_type = other DNA
gaagctatcaacaggagattcttcttagacacagaaataaagattttgcaaggctacagtacccacgcaggccttctgaa

SEQ ID NO: 177637 - DNA, 80 bp, synthetic construct
  source 1..80: mol_type = other DNA
cgccagagtaaaccacacagacaggccttactacccctgggcgcctactccccccccccaattccatgtatcctttaaac

SEQ ID NO: 177638 - DNA, 80 bp, synthetic construct
  source 1..80: mol_type = other DNA
gataaggtggccgagcaaagggccttcgggggcggtctcagtaccgtgtccttctccctcaaggtgctatatgaccagaa

SEQ ID NO: 177639 - DNA, 80 bp, synthetic construct
  source 1..80: mol_type = other DNA
ttttgtatcgtattacgacattgctgtttccagaactttactgcaaccaccaccaaaggctattaagggtggacagattt

SEQ ID NO: 177640 - DNA, 80 bp, synthetic construct
  source 1..80: mol_type = other DNA
atgaggcggggtgcgcaccatcgtaccatgtggtccggggggatattgccttggcggaagagggagtgatagtaaacgcg

SEQ ID NO: 177641 - DNA, 80 bp, synthetic construct
  source 1..80: mol_type = other DNA
agactgctttattttctaaatataagggtaacaagaactttgagatgaatgatcacataaaagtagcagttgcacactat

SEQ ID NO: 177642 - DNA, 80 bp, synthetic construct
  source 1..80: mol_type = other DNA
acagtgaagctcttagtcatgaggtttgttatcaagaatggaagtctttctgcggttttcatttcaaatgttttatgcca

SEQ ID NO: 177643 - DNA, 80 bp, synthetic construct
  source 1..80: mol_type = other DNA
aaactaacctttgtattctgtggttcagccatggctaccggcaagtttctgctggcttactctcctccaggtgcgaatgc

SEQ ID NO: 177644 - DNA, 80 bp, synthetic construct
  source 1..80: mol_type = other DNA
ttcaaaataaagctagatgattaacttgcaaggccgtgggagtttcacttgtcggtgtctacctctaaaggtcactaagc

SEQ ID NO: 177645 - DNA, 80 bp, synthetic construct
  source 1..80: mol_type = other DNA
cgagcaggcggcctacgcctactcgttagtttcgggcctgctcttctcggccatgtactacttctacgtgtcgccctaca

SEQ ID NO: 177646 - DNA, 80 bp, synthetic construct
  source 1..80: mol_type = other DNA
cgtcgccgaggacgcagagtaaggaggcggaggtggggcaggagacggtggcgacgcagacggtacgccaccagacgaaa

SEQ ID NO: 177647 - DNA, 80 bp, synthetic construct
  source 1..80: mol_type = other DNA
gaaatgcgtggtcaccggatacctccctctgctcatctgtggcactgggaccaccggcaccacctacagaaactatggca

SEQ ID NO: 177648 - DNA, 80 bp, synthetic construct
  source 1..80: mol_type = other DNA
tggcagaactacacacatgggccaggagtaagatatcccaagttctttggctggctatggaagctagtgccaataaatat

SEQ ID NO: 177649 - DNA, 80 bp, synthetic construct
  source 1..80: mol_type = other DNA
cacccagaggtagactttattataaagataaataccatgcctcctttcctagacacagaactcacagcccccagcataca

SEQ ID NO: 177650 - DNA, 80 bp, synthetic construct
  source 1..80: mol_type = other DNA
caaaatgccaacccagattgtaaattagtactaaaggggttgggaatgaatcctactttagaggaaatgttgacagcctg

SEQ ID NO: 177651 - DNA, 80 bp, synthetic construct
  source 1..80: mol_type = other DNA
taggtcaggttgtatacatatgtctaaattaactgtagattatgataattatgatgaaaagaatttctttaaatggcaaa

SEQ ID NO: 177652 - DNA, 80 bp, synthetic construct
  source 1..80: mol_type = other DNA
caccagtcatgcccaagccaggaagaccaggaagtaatattcaataatatacggtggctggccattaaagcgagaaagtt

SEQ ID NO: 177653 - DNA, 80 bp, synthetic construct
  source 1..80: mol_type = other DNA
tggtatctcggtacccttgtgcgcctgttttatccacccttttcccatttaacttagaagcacgcgccaagacggtcaaa

SEQ ID NO: 177654 - DNA, 80 bp, synthetic construct
  source 1..80: mol_type = other DNA
acccaatggcgaaaacgacagaggaaacaataatccagatgaggatccactatttaattgtaatggtaccctgttgggta

SEQ ID NO: 177655 - DNA, 80 bp, synthetic construct
  source 1..80: mol_type = other DNA
ggatgcagtcaagagacaacaagaattgttgcgattgacagtctggggaactaaaaacctccagacacgcgtcactgcca

SEQ ID NO: 177656 - DNA, 80 bp, synthetic construct
  source 1..80: mol_type = other DNA
atgctctagcgattgactcaatggtcaaacacaacaactggggcattgccattctacccctgtcaccgctggactttgcc

SEQ ID NO: 177657 - DNA, 80 bp, synthetic construct
  source 1..80: mol_type = other DNA
atgaattgcgggtcaacatagataagctcaagaaaggtctagatcagttggccccactgtatgctaaggaaaataaacta

SEQ ID NO: 177658 - DNA, 80 bp, synthetic construct
  source 1..80: mol_type = other DNA
aacacaaccctgaaattacttctagcatacacaccaccaggcataaggaagcctgagaatagaaaacaggcaatgcttgg

SEQ ID NO: 177659 - DNA, 80 bp, synthetic construct
  source 1..80: mol_type = other DNA
tagccatctgccccccgtctcgggcacccgggagcgatctacggagacctgacagcagttgggcaacacaagatagggaa

SEQ ID NO: 177660 - DNA, 80 bp, synthetic construct
  source 1..80: mol_type = other DNA
ttttatagacctgagaaactatagctcacttagtgaacatcaaggtgtaacagattacatcacccaattaggtagtgctt

SEQ ID NO: 177661 - DNA, 80 bp, synthetic construct
  source 1..80: mol_type = other DNA
actaaacttattactagattggtactggaaacaaataacagcagacgacgacatacatggacaatatggaaatgcaacaa

SEQ ID NO: 177662 - DNA, 80 bp, synthetic construct
  source 1..80: mol_type = other DNA
ctggtcaggcagtttacgatttacgtttttgttttgtggaaccgcaatgaccactggcaagctcctactagcttactcac

SEQ ID NO: 177663 - DNA, 80 bp, synthetic construct
  source 1..80: mol_type = other DNA
tcaactattacaacccaagaagccgctaatgcaattgtagcatatggggaatggcccagtttcctgaaggatgaggatgc

SEQ ID NO: 177664 - DNA, 80 bp, synthetic construct
  source 1..80: mol_type = other DNA
ggcaagatttcactcaagatcctagtaagttcacagagccggtaaaggatgtaatgataaagactttgcctgctttgaac

SEQ ID NO: 177665 - DNA, 80 bp, synthetic construct
  source 1..80: mol_type = other DNA
ttagaagtatcaaaagtaccgctcaatagccgccacgctcccagtgtggtttcgagcaagcacttctgttttcccggttg

SEQ ID NO: 177666 - DNA, 80 bp, synthetic construct
  source 1..80: mol_type = other DNA
tccagaaaaaatattcgctgatgaacccgccaaacaccaaattcccaaggccgcgcatatcatccagatcacaatgatcg

SEQ ID NO: 177667 - DNA, 80 bp, synthetic construct
  source 1..80: mol_type = other DNA
aaacatccttactaatggatcaaatcaaacttttactgttataaactattataaggacgcagccagctcatcatctgcag

SEQ ID NO: 177668 - DNA, 80 bp, synthetic construct
  source 1..80: mol_type = other DNA
gtagtccaacagttgcgccaggaaaagaagaatagaaagtgtgtagaacacaaccttactgccatattccaaggcctggg

SEQ ID NO: 177669 - DNA, 80 bp, synthetic construct
  source 1..80: mol_type = other DNA
tatagcagatgaacctgaatgcagtgaagctactcttgtcataaattcaaacaattttaaagacactattctcacagttg

SEQ ID NO: 177670 - DNA, 80 bp, synthetic construct
  source 1..80: mol_type = other DNA
cttaacactcattattataccactagttggacttcgatcaggaggaaatagtgcaaacacactacccataaccatttcaa

SEQ ID NO: 177671 - DNA, 80 bp, synthetic construct
  source 1..80: mol_type = other DNA
acataccttatctaggcagctacaaaagtcttgtaaattgaatggaattttcaccaacccaacagctagtgaattcatgg

SEQ ID NO: 177672 - DNA, 80 bp, synthetic construct
  source 1..80: mol_type = other DNA
ggcttgggatcagcttattacatgttttatgatgggtatgatggcaccaaagctagcaacacaaactatgggatctctct

SEQ ID NO: 177673 - DNA, 80 bp, synthetic construct
  source 1..80: mol_type = other DNA
atgtgtttggcaattggtttgacctcagctcctggatcacctacatacaatatggagtatacttagtagtaggagtaata

SEQ ID NO: 177674 - DNA, 80 bp, synthetic construct
  source 1..80: mol_type = other DNA
ttgggtgaccgtgtttctcttttttctttatgtaggcactttatggttacaacataagtaaccatgggtgcacaggtcag

SEQ ID NO: 177675 - DNA, 80 bp, synthetic construct
  source 1..80: mol_type = other DNA
ggtcgccataggcttcggccgcagttttaggccttccggactaccaaaatggccgttccagtgacgtcacggcggccatt

SEQ ID NO: 177676 - DNA, 80 bp, synthetic construct
  source 1..80: mol_type = other DNA
attattcaaattggtctggatcaataaagctcacattcttctgcgtctgtgatagtttcagcactggtaaattcttaata

SEQ ID NO: 177677 - DNA, 80 bp, synthetic construct
  source 1..80: mol_type = other DNA
agctcaagtatcatcccagaaggtaggagcacatgagaataccaatgtagccactggtgggtctactgtgaattacacaa

SEQ ID NO: 177678 - DNA, 80 bp, synthetic construct
  source 1..80: mol_type = other DNA
atgtactatcattcttttggtaggtcgggtttcttgatccatgtccagtgtaatgcaaccaaattccacacaggctgctt

SEQ ID NO: 177679 - DNA, 80 bp, synthetic construct
  source 1..80: mol_type = other DNA
acccaaaggtcgtagcactataaaagtcaaaatacacccccctaaactcatgatagacaagtggtacccacaaactgaat

SEQ ID NO: 177680 - DNA, 80 bp, synthetic construct
  source 1..80: mol_type = other DNA
actcgcgggccgctcgctatgccgactgacgttgacgttaatatataacgacgtcgtcgacgacgcgggttctgctcccg

SEQ ID NO: 177681 - DNA, 80 bp, synthetic construct
  source 1..80: mol_type = other DNA
aaggtgccccccctagccaaggcactgacgtggtccaacatcagctggatgatttggggtatccactccatgatctcaac

SEQ ID NO: 177682 - DNA, 80 bp, synthetic construct
  source 1..80: mol_type = other DNA
ggaacggacgacggcagcgcgggtgccggtttcgctgagcgagaaccggtcgctcataacggaaatacacgaagagcgcg

SEQ ID NO: 177683 - DNA, 80 bp, synthetic construct
  source 1..80: mol_type = other DNA
tgtcaccaccaacagtcacaatacctgaggctataaaacggcgattctttctggatgccgatctcatcacaacatctaag

SEQ ID NO: 177684 - DNA, 80 bp, synthetic construct
  source 1..80: mol_type = other DNA
ctagtagagaacatgaaaacataccaccaaaaatttatagacgagggttttccaacctcctggtatggaagcatagcaaa

SEQ ID NO: 177685 - DNA, 80 bp, synthetic construct
  source 1..80: mol_type = other DNA
taaaaactttttaaaaaaagccttcccaatgtcaggcacaaaactaacctctgcaaaccaactaaacacctttaaaacag

SEQ ID NO: 177686 - DNA, 80 bp, synthetic construct
  source 1..80: mol_type = other DNA
tgctccacaagcaacaagtaaactaggaaaacaccacacatggacaaagcctaccacagatcactatgaataccacctag

SEQ ID NO: 177687 - DNA, 80 bp, synthetic construct
  source 1..80: mol_type = other DNA
ccaaaaatgcactggctcctttgaactccactaacggagtgcctgatatacagccgagcggtccagcacactccaaggag

SEQ ID NO: 177688 - DNA, 80 bp, synthetic construct
  source 1..80: mol_type = other DNA
ttttagggtccaaaaactaccaaaatggcggattcagtgacgtcacggcggccattttaagtaaggcggaaatggctgtc

SEQ ID NO: 177689 - DNA, 80 bp, synthetic construct
  source 1..80: mol_type = other DNA
caagctgcacggtcgagagaagcggctgcagttggaccgcctagtatttgaggcggcacagcggggtctctttgactaca

SEQ ID NO: 177690 - DNA, 80 bp, synthetic construct
  source 1..80: mol_type = other DNA
gcgttgttgagcctctgcttggcgtaagtgaccaggttgccaggcaccacatctatgacgttgctctcttcgtgggcccg

SEQ ID NO: 177691 - DNA, 80 bp, synthetic construct
  source 1..80: mol_type = other DNA
atcgggccatggcagtccaccctggttgggcaaatttgccgatactatacacagtggtccggttctctaaaagtaacatt

SEQ ID NO: 177692 - DNA, 80 bp, synthetic construct
  source 1..80: mol_type = other DNA
atcgcacatgctcataggagccgggtttgcaatgccgggcgactgtggaggaatcctacggtgtacccacggggtaatgg

SEQ ID NO: 177693 - DNA, 80 bp, synthetic construct
  source 1..80: mol_type = other DNA
ttgcatccggcgctttggttactcgggagactaatgggtggtgtggtatggcacaggctggtggtgagtctggggatgtc

SEQ ID NO: 177694 - DNA, 80 bp, synthetic construct
  source 1..80: mol_type = other DNA
taattaatgaggaagcagcagactgggaccaacagcatccatcgccaggcccaatgccagcagggcaactcagggaacca

SEQ ID NO: 177695 - DNA, 80 bp, synthetic construct
  source 1..80: mol_type = other DNA
tcaaggtatcacagattatgtcacacaattgggaaatgcatttggagatgggtttactagctccattagagaaactctgg

SEQ ID NO: 177696 - DNA, 80 bp, synthetic construct
  source 1..80: mol_type = other DNA
aaaaacaccataatgtctgttggacacatcactatggctggtataatcaacttgagtaacacacctactgctagaatgat

SEQ ID NO: 177697 - DNA, 80 bp, synthetic construct
  source 1..80: mol_type = other DNA
cgattagagacatggtgcaactacgcaggaagtgcgaaatgttcacctacatgaggtttgatttagaagtcacattggta

SEQ ID NO: 177698 - DNA, 80 bp, synthetic construct
  source 1..80: mol_type = other DNA
ggtacaggtggtaccaatgtcaagtacaaacatacacaccctggtgaacagggacacactctcagggcctcaaacgctag

SEQ ID NO: 177699 - DNA, 80 bp, synthetic construct
  source 1..80: mol_type = other DNA
aactacctgtcagacaaacccatctacccctggcttccccgctcccagccagaaattaaagtcagttttaaactcggttt

SEQ ID NO: 177700 - DNA, 80 bp, synthetic construct
  source 1..80: mol_type = other DNA
gagaagcaaattgagaatctgcgctgtgcagacacaaaaacccaagagaaaattaaagtagaagttgacaccctccatga

SEQ ID NO: 177701 - DNA, 80 bp, synthetic construct
  source 1..80: mol_type = other DNA
agggacatgggaggagctggtggggaacgccctcatacttactgtataaatgtacccgcttcccgcactgtatttagccg

SEQ ID NO: 177702 - DNA, 80 bp, synthetic construct
  source 1..80: mol_type = other DNA
gacaatcattttcaatggacccgagcaagtttactgaaccagtgaaggatatcatgttaaaaggagcaccagcattaaac

SEQ ID NO: 177703 - DNA, 80 bp, synthetic construct
  source 1..80: mol_type = other DNA
ataggcttcgggctccattttaggccttccggactaccaaaatggccgtctcagtgacgtcacaggcgccattttaagta

SEQ ID NO: 177704 - DNA, 80 bp, synthetic construct
  source 1..80: mol_type = other DNA
gttatgccaagtggagactatgcttgaagttaacaacctggagtcgaatgaaaatgatccaatgcaacgactcctcatcc

SEQ ID NO: 177705 - DNA, 80 bp, synthetic construct
  source 1..80: mol_type = other DNA
acttctttattctccaagtacaaaggtaatgtggattgcacactgaatgaacacatgagagtggctatagcacattactc

SEQ ID NO: 177706 - DNA, 80 bp, synthetic construct
  source 1..80: mol_type = other DNA
gggcaattcgggctcgggactggccgggccccgggcaaggctcttaaaaaatgcacttttccagagtctcccgcaagaaa

SEQ ID NO: 177707 - DNA, 80 bp, synthetic construct
  source 1..80: mol_type = other DNA
ggataatagtctagaatatgatgactaccactttgataagtggccgataaccatacaagaaatgtcacaaattaggagaa

SEQ ID NO: 177708 - DNA, 80 bp, synthetic construct
  source 1..80: mol_type = other DNA
ctaccagaccaagaaggtgcaagaaaatctattataacaacaaaactacaaccagactctttaacaggctcagactttta

SEQ ID NO: 177709 - DNA, 80 bp, synthetic construct
  source 1..80: mol_type = other DNA
gggcacacttctcaagttacacccagtgacaccatgcagactaggcacgttcataacttccacactaggtcagagtcctc

SEQ ID NO: 177710 - DNA, 80 bp, synthetic construct
  source 1..80: mol_type = other DNA
tcgaggaatattttaccaaggaccaggacagtgccaacagatacatgtcatggaccattaacgccagaaggatggtgcaa

SEQ ID NO: 177711 - DNA, 80 bp, synthetic construct
  source 1..80: mol_type = other DNA
accgcatcccagttcaatcgaacatggacacgggtggtcaggtattcggtttcccactacagcctggtgctagcagtgtc

SEQ ID NO: 177712 - DNA, 80 bp, synthetic construct
  source 1..80: mol_type = other DNA
cggggccacctctttggttctgtacatattttgttattgtacataaccatggagttggctgtggtgcactccatctggta

SEQ ID NO: 177713 - DNA, 80 bp, synthetic construct
  source 1..80: mol_type = other DNA
ccagagagagggcgtgccgccctggagatggccctgtgccatcacatgtatttcctccttgggtggaacgacggcgtcgt

SEQ ID NO: 177714 - DNA, 80 bp, synthetic construct
  source 1..80: mol_type = other DNA
caaaagatgaatggcaatacacatacaacaaacccatgcaaaaaatatactatgaagcagcaaacaaaagtgacagtggc

SEQ ID NO: 177715 - DNA, 80 bp, synthetic construct
  source 1..80: mol_type = other DNA
gggtccctgagcaccactacgtggtccctaaaggtgctgtttgacgagcaccagaaacacagaaacaggtggggctaccc

SEQ ID NO: 177716 - DNA, 80 bp, synthetic construct
  source 1..80: mol_type = other DNA
tcctaaattgggcagcacaaatctacccagggataaagaccaaacacttgtgtagattaattagaggaaaaatgacactc

SEQ ID NO: 177717 - DNA, 80 bp, synthetic construct
  source 1..80: mol_type = other DNA
tggtctacgtgataatataagtaactctacttccgaatggctgagttttctacgcccgtccgcagcgagaacaccacgga

SEQ ID NO: 177718 - DNA, 80 bp, synthetic construct
  source 1..80: mol_type = other DNA
atatcacagaggcttttgatgcttgggacaatacagtaacagagcaggcaatagaggatgtatggaatctttttgaaacc

SEQ ID NO: 177719 - DNA, 80 bp, synthetic construct
  source 1..80: mol_type = other DNA
gggagtggctataccttttaacttcctcaaaaatgatatgtcagaccaaggcattgtcactgaaattacacctatccaac

SEQ ID NO: 177720 - DNA, 80 bp, synthetic construct
  source 1..80: mol_type = other DNA
aagctttaccagcacccacaggccaaaacacacaagtaagcaaccaccggttggacactggtaaagttccagcactccaa

SEQ ID NO: 177721 - DNA, 80 bp, synthetic construct
  source 1..80: mol_type = other DNA
tggttctttaaggagcacacatttactgatgaaggacagtggaggattgaactcacattcccaaaggaaggccatgggtc

SEQ ID NO: 177722 - DNA, 80 bp, synthetic construct
  source 1..80: mol_type = other DNA
caagtacaacacaccgacacatacactaactatgggaaatttggacaacaatccggtgcagtctatgtgggcaactacag

SEQ ID NO: 177723 - DNA, 80 bp, synthetic construct
  source 1..80: mol_type = other DNA
agaataaggtggtacccaatactattccaccaactagagtggatggaggccatagtacagagcggaccgtttgcttacaa

SEQ ID NO: 177724 - DNA, 80 bp, synthetic construct
  source 1..80: mol_type = other DNA
actcggacgatatgatctcaaacggaccgtacggagggggtatgactactacaaaatttactctcagaatcctatatgac

SEQ ID NO: 177725 - DNA, 80 bp, synthetic construct
  source 1..80: mol_type = other DNA
tggtacccctataatgtacaacagtttactagccaagtagaaaacataagaaagcaatactttaagtgggaaacagatga

SEQ ID NO: 177726 - DNA, 80 bp, synthetic construct
  source 1..80: mol_type = other DNA
ctctgctataagtgcaaactacagactcactgtgagatgtccctacacagaccccatgctagtagacagaaacaatgaac

SEQ ID NO: 177727 - DNA, 80 bp, synthetic construct
  source 1..80: mol_type = other DNA
ccatcacatgcactacagctatgaataggagattttacctagatcttgacattgtagttaaagaagattttaaaataaat

SEQ ID NO: 177728 - DNA, 80 bp, synthetic construct
  source 1..80: mol_type = other DNA
ggagctaaaacctggcaccaatcaatttctgacgactgacaatgaggtctccgtgccaatcttacctggtttccaaccta

SEQ ID NO: 177729 - DNA, 80 bp, synthetic construct
  source 1..80: mol_type = other DNA
ctttcatgatttgtttaaacgaattttcttaaaatttctgaggtttgtttatttctttttatcagtaaataaaaaaaaaa

SEQ ID NO: 177730 - DNA, 80 bp, synthetic construct
  source 1..80: mol_type = other DNA
gcgggaccgcgctgagacacgggaagcagacggggtgttgcggtggtgtgcggcgaaggtggcgaggacgagtgtgtttg

SEQ ID NO: 177731 - DNA, 80 bp, synthetic construct
  source 1..80: mol_type = other DNA
gaaaacaaagtgggatcaacaacatatggtatatctgctacaaatgacatgggcaccttgtgcttccgtgcattggaaga

SEQ ID NO: 177732 - DNA, 80 bp, synthetic construct
  source 1..80: mol_type = other DNA
aatagttagttcaagaaatgttaaagacattgggtatccaacaatccatacccctagtaaaaccaaattacatccaagtg

SEQ ID NO: 177733 - DNA, 80 bp, synthetic construct
  source 1..80: mol_type = other DNA
ccgacctgggtgggtgcggtccgctggccccaccctggaggtcgccgccgggtctgctggtccggtgcacctgaaaggca

SEQ ID NO: 177734 - DNA, 80 bp, synthetic construct
  source 1..80: mol_type = other DNA
tagtagctatccatgtaggtggcaatggtagagtagggtacggtgctgctcttttgaggaagtactttgcagagtcacaa

SEQ ID NO: 177735 - DNA, 80 bp, synthetic construct
  source 1..80: mol_type = other DNA
cttgtgtaaacttccttgttctgtcaaccgtctacaacaacttcctctctattgctccagacgacctgtcccctgtaaca

SEQ ID NO: 177736 - DNA, 80 bp, synthetic construct
  source 1..80: mol_type = other DNA
caatcactattgcccccgataaatctgaattctctggcccaatgcaaaaccagaagcaaggtataccaacccgcataccc

SEQ ID NO: 177737 - DNA, 80 bp, synthetic construct
  source 1..80: mol_type = other DNA
aacattgggaagattgatatatatagtctacaaattactaagaaacctgctggcaataatgatttgttgcttaccattcc

SEQ ID NO: 177738 - DNA, 80 bp, synthetic construct
  source 1..80: mol_type = other DNA
ctggcatgctcatgcagcgaaaacacaaggtgctaatacccagctacgacactgaaccaaagggcaggccaaaaataact

SEQ ID NO: 177739 - DNA, 80 bp, synthetic construct
  source 1..80: mol_type = other DNA
tgtgcgcccatttaacacaaccaggggacgacactattctgttggccatctcagcagatcttcaagtagatagtgttagg

SEQ ID NO: 177740 - DNA, 80 bp, synthetic construct
  source 1..80: mol_type = other DNA
cccaggggacggcacgcaaaacaacggccagagacaagacgcggaaaagaggaagtccccaggggaaaacacagacacac

SEQ ID NO: 177741 - DNA, 80 bp, synthetic construct
  source 1..80: mol_type = other DNA
gtctctggaaaagccaacactatggaaatgtacagaatcccactaaataccacaggaagaaacgatccaatcttttgctt

SEQ ID NO: 177742 - DNA, 80 bp, synthetic construct
  source 1..80: mol_type = other DNA
tgttgacccaccagcttatgtatgtgcctcccggtggcccttttccaaagaaattgcgcgattatgcctggcagacatcc

SEQ ID NO: 177743 - DNA, 80 bp, synthetic construct
  source 1..80: mol_type = other DNA
gtcaacattgcctatgaccttacacacccaggggaaacaggtcatgtcctaggtaggaacacatccagaggcaataataa

SEQ ID NO: 177744 - DNA, 80 bp, synthetic construct
  source 1..80: mol_type = other DNA
tataaagattcacttaactccgttaacatgctatgtttttataacgaaaaatatgaacaagtgtataacaagttacacat

SEQ ID NO: 177745 - DNA, 80 bp, synthetic construct
  source 1..80: mol_type = other DNA
caaaatgttggacctagtgatctacatgtccatactaaggatgcaatttatacctgtgcccacctaacacaacccagtga

SEQ ID NO: 177746 - DNA, 80 bp, synthetic construct
  source 1..80: mol_type = other DNA
gtatcgacgctagtttattcaggataaatttgtgctactttgtgtagctctcaaaaattgtaaggccccacttttccact

SEQ ID NO: 177747 - DNA, 80 bp, synthetic construct
  source 1..80: mol_type = other DNA
atcagaatcatatcagcagtcacaatcatcattagaaatagtgcagatccacatacaattgttgcaactttagccttgat

SEQ ID NO: 177748 - DNA, 80 bp, synthetic construct
  source 1..80: mol_type = other DNA
aagtcaatagttatctcattccattgacagccaatcagcaaaacacccagatttttggaaccaatttatttattggtgat

SEQ ID NO: 177749 - DNA, 80 bp, synthetic construct
  source 1..80: mol_type = other DNA
ctgtagatcattacacagcccaattatatgtgttagacattgaacctaaaccccttacattagagcaagcagtgtatggt

SEQ ID NO: 177750 - DNA, 80 bp, synthetic construct
  source 1..80: mol_type = other DNA
ttcacaaccttatggaaattgcagaggtcgactcagtggtccctgttaacaacattgcagctaacctacaaagtatggat

SEQ ID NO: 177751 - DNA, 80 bp, synthetic construct
  source 1..80: mol_type = other DNA
ctcttcgaggtcaaaaacgttgctggaacgcagctctttctgcgagtaaagttccagtaccctgaagtcggtattttcca

SEQ ID NO: 177752 - DNA, 80 bp, synthetic construct
  source 1..80: mol_type = other DNA
cgaggaggggggtcccgaggccactcagcacttggttgtcaatgtggacatccatagctctctcatgcgtttggctacag

SEQ ID NO: 177753 - DNA, 80 bp, synthetic construct
  source 1..80: mol_type = other DNA
gaccaataggcggtggccatccaggtcactaatggtcaagcacttctgtttccccggcgcccttgtatacgcttcacccg

SEQ ID NO: 177754 - DNA, 80 bp, synthetic construct
  source 1..80: mol_type = other DNA
gtcagaacactcaataaaagggaaattgaacatggcaacagcgacacagctgtgtcggaactgtccacagcctgcaaact

SEQ ID NO: 177755 - DNA, 80 bp, synthetic construct
  source 1..80: mol_type = other DNA
gaagaagaaacaacatcgacggaggagagactactccagcagcgaagaaagcaaaaacacctccgaaagctcatcaacag

SEQ ID NO: 177756 - DNA, 80 bp, synthetic construct
  source 1..80: mol_type = other DNA
gtctaccttgattgagcaaatggaagcatttattgaaccgcgcccgagtgtttttaaatgctttgccaataaagtgggtg

SEQ ID NO: 177757 - DNA, 80 bp, synthetic construct
  source 1..80: mol_type = other DNA
atgtcagcaaagctgccacggtcatttcgtacgtcggttggtgcaggcgttgaagcgggctatgtatagcgtggagctgg

SEQ ID NO: 177758 - DNA, 80 bp, synthetic construct
  source 1..80: mol_type = other DNA
ccgattgaagccaaagtaagagtgtatctgaaacccaagcatattagggtttggtgtccccggcccccgcgtgcagcaga

SEQ ID NO: 177759 - DNA, 80 bp, synthetic construct
  source 1..80: mol_type = other DNA
acagttactaccaccaagggagagttcactgcattgggaattcatgatagagtctgtgtggtacccacgcattctcagcc

SEQ ID NO: 177760 - DNA, 80 bp, synthetic construct
  source 1..80: mol_type = other DNA
ttaaaactgggtacaggttgttcccacctgtatcacccacgtggtgtggtgctcttgtattccggtacacttgcacgcca

SEQ ID NO: 177761 - DNA, 80 bp, synthetic construct
  source 1..80: mol_type = other DNA
taccagggactagtattgctcaggacatgccaccactgacacaccaaattatgtacattccacctgggggccccgtacca

SEQ ID NO: 177762 - DNA, 80 bp, synthetic construct
  source 1..80: mol_type = other DNA
ggggatggagatcaggacctcctcctcctcctcccccaggtctagcctaatggcagaagcagtcccagagattcctccag

SEQ ID NO: 177763 - DNA, 80 bp, synthetic construct
  source 1..80: mol_type = other DNA
ttcagataactcgtggtaactccactattacatcacaagatatagctaatgctgtagttggatatggtgtttggccacaa

SEQ ID NO: 177764 - DNA, 80 bp, synthetic construct
  source 1..80: mol_type = other DNA
gtgttacttttataccacctatggctgatttgccagataagggcaaagcttttgactctagatttgtcttatgtagcaca

SEQ ID NO: 177765 - DNA, 80 bp, synthetic construct
  source 1..80: mol_type = other DNA
gagatacaggagtcaatctattacccaaaacatatacagtatgacatcctaatcggtgaaggaccatgctctccagggga

SEQ ID NO: 177766 - DNA, 80 bp, synthetic construct
  source 1..80: mol_type = other DNA
cccccgcccccacttgaaacttagaagcaaaaacataccgaccaatagttggcaaggcaagccagccatgccttggtcaa

SEQ ID NO: 177767 - DNA, 80 bp, synthetic construct
  source 1..80: mol_type = other DNA
cccctaaagtaacttagaagctgagcacaatgaccaataggcgacatttctccagaatgtcaaaggtcaagcacttctgt

SEQ ID NO: 177768 - DNA, 80 bp, synthetic construct
  source 1..80: mol_type = other DNA
tactaactgctatgaaagacaatgcaactaaaatgtatgacagaagaaaaagagatacatatctaggcagtaaatactta

SEQ ID NO: 177769 - DNA, 80 bp, synthetic construct
  source 1..80: mol_type = other DNA
gagcaaaggttaaaattagaatccccccacccaaactgttcgttgacaagtggtatgcacaagaggacctgtgttccgtt

SEQ ID NO: 177770 - DNA, 80 bp, synthetic construct
  source 1..80: mol_type = other DNA
taaagacttagtcaatactgctactggagctatggaaaatttgaacattactaacacaatctctgaaataatagaccaac

SEQ ID NO: 177771 - DNA, 80 bp, synthetic construct
  source 1..80: mol_type = other DNA
gcactgtgccaataactatatcaataagtccaatgtatgctgagttctcaggtgctagagcaaaaagtcagggcatacct

SEQ ID NO: 177772 - DNA, 80 bp, synthetic construct
  source 1..80: mol_type = other DNA
catccacattaaatgttgtatcatatgaattttgatgtagttttcagagtctacttttatagtagggaagttagacactg

SEQ ID NO: 177773 - DNA, 80 bp, synthetic construct
  source 1..80: mol_type = other DNA
aagttaaaaataaatgggataaaatacaagaagacaactataaattagtagctaacgaatacaacaacatatacacaacc

SEQ ID NO: 177774 - DNA, 80 bp, synthetic construct
  source 1..80: mol_type = other DNA
acaacaataatacaaaattaactgagttttttaacaaggctctacccacaacaggcacaaaaaacacagaaattaatgta

SEQ ID NO: 177775 - DNA, 80 bp, synthetic construct
  source 1..80: mol_type = other DNA
cttcaaggtgcagggagtaactgatgctcgtacctcgctcaccactacaggggcgttcgggcagcaatcaggagcagttt

SEQ ID NO: 177776 - DNA, 80 bp, synthetic construct
  source 1..80: mol_type = other DNA
ttcactctaatgattataccttttgcacccttgagctatagtacgggcgcaaccacctacgtgcctatcacggtgactgt

SEQ ID NO: 177777 - DNA, 80 bp, synthetic construct
  source 1..80: mol_type = other DNA
ttagaaccacagcctgtacacatgtgccagacgcctgggcctctaaggccctcgggtccccctggaccccggcctcagca

SEQ ID NO: 177778 - DNA, 80 bp, synthetic construct
  source 1..80: mol_type = other DNA
gccaaggggggtcactgatgctcgggcatccatcaaattagagaaaccaagcactggtggtaggctggtgacaaatggtg

SEQ ID NO: 177779 - DNA, 80 bp, synthetic construct
  source 1..80: mol_type = other DNA
cacacaacccacctacgagctgcccgcagccggtacaatccctcgtagagtacaagttatcgacccgaaaatcgtcggac

SEQ ID NO: 177780 - DNA, 80 bp, synthetic construct
  source 1..80: mol_type = other DNA
tataagtaactgcacttccgaatggctgagttttccacgcccgtccgcggcgagaacaccacggaggggagtccgcgcgt

SEQ ID NO: 177781 - DNA, 80 bp, synthetic construct
  source 1..80: mol_type = other DNA
cataaacccccttttattatcttccccgctacaaataaggtagagatgtttcccaccaataaaaagaaaaccccctctaa

SEQ ID NO: 177782 - DNA, 80 bp, synthetic construct
  source 1..80: mol_type = other DNA
caaccccatgacagacaaaggcataggtaacgcagtgtggatagactactgcagcaaaaaaggaacacactacgacccca

SEQ ID NO: 177783 - DNA, 80 bp, synthetic construct
  source 1..80: mol_type = other DNA
ggactcatggcactaaacaagagagccagatggatccccagcctaaaaagcagaccgggtagaaagcacgtagttaaaat

SEQ ID NO: 177784 - DNA, 80 bp, synthetic construct
  source 1..80: mol_type = other DNA
accaatggttacctttcttaaagatgagcttaggaaaagagagaaaatcaccgctggaaagactcgcgtgattgaggcta

SEQ ID NO: 177785 - DNA, 80 bp, synthetic construct
  source 1..80: mol_type = other DNA
atggggacaactttgcctactgggtgatcagtacacggcaagtcgcccaactacgccggaaacttgagatgttcacgtac

SEQ ID NO: 177786 - DNA, 80 bp, synthetic construct
  source 1..80: mol_type = other DNA
tgggatacttactatgtcaacctatgcttactggtacatcaagtggtaagattgaggtgtacttaagtttgagatgtcct

SEQ ID NO: 177787 - DNA, 80 bp, synthetic construct
  source 1..80: mol_type = other DNA
taccaacacatgctgattgtggggatgaggtattaatagatggtagaaccattaaggttttgaaaagacaaattattaca

SEQ ID NO: 177788 - DNA, 80 bp, synthetic construct
  source 1..80: mol_type = other DNA
tcccccaccggcccttctctttccccctactcctctccaaccttcgctccaccctagaccccagcttctggcctctccgg

SEQ ID NO: 177789 - DNA, 80 bp, synthetic construct
  source 1..80: mol_type = other DNA
tgggaccaaaactctttgggtgtccgtgtttcctgtttttcttgaatttttcttatggtcacagcatatatatattatat

SEQ ID NO: 177790 - DNA, 80 bp, synthetic construct
  source 1..80: mol_type = other DNA
ggggggcgggggctttattaaacagactccgagatgccattagacactaaggggggggacagcaacgaaagtgagtgggg

SEQ ID NO: 177791 - DNA, 80 bp, synthetic construct
  source 1..80: mol_type = other DNA
cacggcggccattttaggccttccggactaccaaaatggcgctttcagtgacgtcacggcggccattttaagtaagcagg

SEQ ID NO: 177792 - DNA, 80 bp, synthetic construct
  source 1..80: mol_type = other DNA
gagctgcatttggatcaggttttactagtcaaattggggagaagatttcagaactgacgagtatggtcacaagcacagtc

SEQ ID NO: 177793 - DNA, 80 bp, synthetic construct
  source 1..80: mol_type = other DNA
cctgcgtcactatcttagaagttgagaacttcaatgctggtaccactgaagaaaagaaaaagcagtttaccaaatggccc

SEQ ID NO: 177794 - DNA, 80 bp, synthetic construct
  source 1..80: mol_type = other DNA
aaagaaaaggggggactggaagggatttattacaatcaaagaagacatagaatattagatatgtacttagaaaatgagga

SEQ ID NO: 177795 - DNA, 80 bp, synthetic construct
  source 1..80: mol_type = other DNA
atggtggaaacgccggcgcaagtggtggtggagacggcgctttgccagagggaggtttcgaagacgatggactagacgat

SEQ ID NO: 177796 - DNA, 80 bp, synthetic construct
  source 1..80: mol_type = other DNA
aggaagggcaggagtgatgtaacttgttaggagacgccctcaatcgtattaaaagccgtgtattcccccgcactaaagaa

SEQ ID NO: 177797 - DNA, 80 bp, synthetic construct
  source 1..80: mol_type = other DNA
aagatgtttctgtctttttccaaaataaaattttgggtaagagtcctttagttgatgactttttggacattgaaatggct

SEQ ID NO: 177798 - DNA, 80 bp, synthetic construct
  source 1..80: mol_type = other DNA
agtgcctacgggaagcctagtagcactttggaagttgttgggctggtcgctcaattgctgaccccgagcaatagacttgg

SEQ ID NO: 177799 - DNA, 80 bp, synthetic construct
  source 1..80: mol_type = other DNA
cgacgagaaacgcggactagcacctaacacgtgaggaaactgcgcgtggttctgcgtcgttaagcgcgtcgtcaacccgt

SEQ ID NO: 177800 - DNA, 80 bp, synthetic construct
  source 1..80: mol_type = other DNA
gcatgcgtgatatattgtactcaatatgtcactgttttctatggcatccctgcatggaggaacgcaacagtacccctctt

SEQ ID NO: 177801 - DNA, 80 bp, synthetic construct
  source 1..80: mol_type = other DNA
gttggggctgacagcatcatgttaactgccacgtttggatgccaaaatggggcactagctataaacaccttctccgccac

SEQ ID NO: 177802 - DNA, 80 bp, synthetic construct
  source 1..80: mol_type = other DNA
tcacgccatccacacttcagtgagggtgtatatgaaacctaaacacattcgctgctggtgccccaggccaccacgagcag

SEQ ID NO: 177803 - DNA, 80 bp, synthetic construct
  source 1..80: mol_type = other DNA
tggatcaggatttaccagtcaaattggagaaaagatctcagagttgactagcatggttactagtacagtcactgagaagt

SEQ ID NO: 177804 - DNA, 80 bp, synthetic construct
  source 1..80: mol_type = other DNA
cacaggcgtgcgcacagagacgccgaaatccgcctccaccgtcagccccgccaacagaggagcgatcaccacgctcgagg

SEQ ID NO: 177805 - DNA, 80 bp, synthetic construct
  source 1..80: mol_type = other DNA
aaagctagtactaaaacagtggaatccctctacaataagacgctgtactattactggaatgattccactaattgtctgcg

SEQ ID NO: 177806 - DNA, 80 bp, synthetic construct
  source 1..80: mol_type = other DNA
ggtttattgagaatatgtttttcgtctcagccaatccctgggtgagtttcaccagttttgatttaaacgtggccaatatg

SEQ ID NO: 177807 - DNA, 80 bp, synthetic construct
  source 1..80: mol_type = other DNA
atgtgatggccaccaatactgaatcaaagacatcatatgtttcatacgtgaatgcaaaccctggggaggcgggcggtaca

SEQ ID NO: 177808 - DNA, 80 bp, synthetic construct
  source 1..80: mol_type = other DNA
gcgactcggatcggccgttcttcagatgatcagcccccaagacctcaaagacctcctgcaataaggtccatgcgagccct

SEQ ID NO: 177809 - DNA, 80 bp, synthetic construct
  source 1..80: mol_type = other DNA
tgtctgcgtctggtcacgcctgtcggtttcgtggccgtggcagtgaccgacgagcagtgttgtttattgctgcagtcggc

SEQ ID NO: 177810 - DNA, 80 bp, synthetic construct
  source 1..80: mol_type = other DNA
ttttgaaaaaaggcgccaaaaaaccgtcggcggtggggccgcgcgctgcgcgcgcggcccccgcgccgacggttttttgg

SEQ ID NO: 177811 - DNA, 80 bp, synthetic construct
  source 1..80: mol_type = other DNA
gctggggtcctcctcagagatattaaattcatgcctactggtattacagtgcccttacacctttcccccaatgtatgaca

SEQ ID NO: 177812 - DNA, 80 bp, synthetic construct
  source 1..80: mol_type = other DNA
gtggcacagcttagaagaaaaatggagatgttcacgtacctacgttttgatgtggaggtgacatttgtcatcaccagctc

SEQ ID NO: 177813 - DNA, 80 bp, synthetic construct
  source 1..80: mol_type = other DNA
tggcaccagctagcacacaaaataagtgttacatcatgtgtatggtctctgcgtgcaatgacttctcggtacgtctgcta

SEQ ID NO: 177814 - DNA, 80 bp, synthetic construct
  source 1..80: mol_type = other DNA
accaattaatgagaggccaaaacaagcatggtgttggtttgaaggagaatggaaaaaggccatccaggaggtgaaagaca

SEQ ID NO: 177815 - DNA, 80 bp, synthetic construct
  source 1..80: mol_type = other DNA
tcattaaccacatctttgattggcagagcaattgcagatagttgtggttcttctgtatactcactccctccagatccaaa

SEQ ID NO: 177816 - DNA, 80 bp, synthetic construct
  source 1..80: mol_type = other DNA
catttgattacacaaattatgatgggagcttggaccctgtctggtttgaagctcttggaatggtgttggacaatttaggt

SEQ ID NO: 177817 - DNA, 80 bp, synthetic construct
  source 1..80: mol_type = other DNA
cccagtaataggcacttctgctttagaaaacggtacaaactacaatgcatcaggcatatctacacttgaaacatttctat

SEQ ID NO: 177818 - DNA, 80 bp, synthetic construct
  source 1..80: mol_type = other DNA
tgctacgtcactaacccacgtgtcctctacaggccaatcgcagtctatgtcgtgcacttcctgggcatggtctacataat

SEQ ID NO: 177819 - DNA, 80 bp, synthetic construct
  source 1..80: mol_type = other DNA
acttaagatcagggtgacggttaggccccccaccctgctagaggacaagtggtatacgcaacaggacctctgtgaggtta

SEQ ID NO: 177820 - DNA, 80 bp, synthetic construct
  source 1..80: mol_type = other DNA
atggtggtgggcccgaaggcgaccgaaccgccgatggacccgcagacgctggaggagactacgcacccggagacctagac

SEQ ID NO: 177821 - DNA, 80 bp, synthetic construct
  source 1..80: mol_type = other DNA
ctctggagcacgagcccgacctgtggctcaaggactgcccgtgtacattacacctggatctggacagtttatgactactg

SEQ ID NO: 177822 - DNA, 80 bp, synthetic construct
  source 1..80: mol_type = other DNA
gatcaatttatcacaaggtctaacggatgatgataaggttctcttatcttgtgggttgtcactaaatgggcccacaattt

SEQ ID NO: 177823 - DNA, 80 bp, synthetic construct
  source 1..80: mol_type = other DNA
actgggagtaccactactgttggcaccatcttagcaacttgctcaggctgtcctgacatttctgtacgcatgttacgcga

SEQ ID NO: 177824 - DNA, 80 bp, synthetic construct
  source 1..80: mol_type = other DNA
gtgacaccacgcatattgaacagaaggcgttggctcagggtctaggacagatgctagagagcatgattgacaacacagtt

SEQ ID NO: 177825 - DNA, 80 bp, synthetic construct
  source 1..80: mol_type = other DNA
aaatttccttgggagatctgctctatgggctgaatttcagttgaactctggatttcaaaagtggagcattaactttcagg

SEQ ID NO: 177826 - DNA, 80 bp, synthetic construct
  source 1..80: mol_type = other DNA
agactttaatgctgttaatacgtttagaacaatatctaacttttcccacccacaactagaacttccaactaaaaccacca

SEQ ID NO: 177827 - DNA, 80 bp, synthetic construct
  source 1..80: mol_type = other DNA
caagtagagttcaatgaatttatgcaggtggctgtcgatcactactctgcacagctatacactttggatatcaacccagc

SEQ ID NO: 177828 - DNA, 80 bp, synthetic construct
  source 1..80: mol_type = other DNA
aatgtatttgaaaacaaactatatcccactacaacaactaacaaagacaactggcaatacacatacacatccctcatgaa

SEQ ID NO: 177829 - DNA, 80 bp, synthetic construct
  source 1..80: mol_type = other DNA
ttcccccaccagtggatcaacctacgcactaataacagcgccaccattgtggtcccctacatcaacgctctgccattcga

SEQ ID NO: 177830 - DNA, 80 bp, synthetic construct
  source 1..80: mol_type = other DNA
acagagcatcagaaacccgtgcaagacggacggacgcgaccccgactccaatagattccctagagacgtacaagttgttg

SEQ ID NO: 177831 - DNA, 80 bp, synthetic construct
  source 1..80: mol_type = other DNA
ctggcccgcggtgttgcggggacggggcttgcgcttggacgggggttgcgctggagccggtggttgcgctgaggccggtg

SEQ ID NO: 177832 - DNA, 80 bp, synthetic construct
  source 1..80: mol_type = other DNA
cagcgtttttgggactgaaggccttgaagcgcttgatttaaacactagtgcaggatttccctacatcagtatgggcatta

SEQ ID NO: 177833 - DNA, 80 bp, synthetic construct
  source 1..80: mol_type = other DNA
cttcaaaacacaagcagtcactgaccagcgtgacgatcaccggttgagtaaagatgatcaccttccgggaatgcacacca

SEQ ID NO: 177834 - DNA, 80 bp, synthetic construct
  source 1..80: mol_type = other DNA
catgattgatagtacagtaagggaaaccatgggcgcggcgacctccagggacgcccttccaaacaccgagtctagcggac

SEQ ID NO: 177835 - DNA, 80 bp, synthetic construct
  source 1..80: mol_type = other DNA
gctccttgattctatgccgcaccatgtccactcgaaccttaatctgtttgactgtagaggaggataacaacacatataag

SEQ ID NO: 177836 - DNA, 80 bp, synthetic construct
  source 1..80: mol_type = other DNA
agacgtaggagaaggagaaaactgactcttaaacagtggaaccctagcactattagaaaatgttctataaggggcacagt

SEQ ID NO: 177837 - DNA, 80 bp, synthetic construct
  source 1..80: mol_type = other DNA
ctgcccgcattacgccgtgcctttcacgacgccgggaaagccgggctgcggcggtgctccgagcggcgttgcgtggttgg

SEQ ID NO: 177838 - DNA, 80 bp, synthetic construct
  source 1..80: mol_type = other DNA
tggcatgtgtagctacaaaccaaaaaaagaggagcttaaaaaagtcagaaaatggtactggacacaacaaaacacagaaa

SEQ ID NO: 177839 - DNA, 80 bp, synthetic construct
  source 1..80: mol_type = other DNA
cacagaccgctttgatgcatgggaggtgggtgtgcgcgacatggtacagatgcgccgcaagtgtgagatgtttacaacct

SEQ ID NO: 177840 - DNA, 80 bp, synthetic construct
  source 1..80: mol_type = other DNA
ggggaggagaagtacaatgattttattcaaaaagtgcggtctacatcagttggaagaaccctatatcttcctccttattc

SEQ ID NO: 177841 - DNA, 80 bp, synthetic construct
  source 1..80: mol_type = other DNA
ataggactagaagatgtggttaactgtacctttaacatgacaggactaagacaagatgagagaaaacaatataatgacac

SEQ ID NO: 177842 - DNA, 80 bp, synthetic construct
  source 1..80: mol_type = other DNA
aatttctcagtgaatacaatagtagaacagctgagacacgagaatgccaccaggaaaaaggttaaacacaaccttgatgc

SEQ ID NO: 177843 - DNA, 80 bp, synthetic construct
  source 1..80: mol_type = other DNA
tcgaccgcaccccaaccggcgccatcttggtgaccttctcgacggttctctcgctcgtcatgccgttctgagctccgaca

SEQ ID NO: 177844 - DNA, 80 bp, synthetic construct
  source 1..80: mol_type = other DNA
tttgcctccccttccctttatgtaacgcaagaagcttaaacacaacgaccaacaggtggtaacaagccatgttgcctacg

SEQ ID NO: 177845 - DNA, 80 bp, synthetic construct
  source 1..80: mol_type = other DNA
tgcatttacagctgcacttacagctgcagctgcagtagcgcacccatcggcaagttaaaatgtcgattatggaatctttg

SEQ ID NO: 177846 - DNA, 80 bp, synthetic construct
  source 1..80: mol_type = other DNA
cccgaagatcgtcactaaccacgtgactcccgcaggccaaccacagtctatgtcgtgcacttcctgggcatggtctacgt

SEQ ID NO: 177847 - DNA, 80 bp, synthetic construct
  source 1..80: mol_type = other DNA
ggtgctggcggtggtggtggcggcggcagcggccgcatgtcgctgccgctggacacgtctgaagcggtggcctttctcaa

SEQ ID NO: 177848 - DNA, 80 bp, synthetic construct
  source 1..80: mol_type = other DNA
taaattccaccaagggactctccttgtagtagccattccagagcaccaaattggaaagaaaggcacaggcacgtccgcgt

SEQ ID NO: 177849 - DNA, 80 bp, synthetic construct
  source 1..80: mol_type = other DNA
atcttccatgtgtttatcgtagtgatcgaaatcgactgatctcgggttctttttgttggtttcttttcggttaatcatgt

SEQ ID NO: 177850 - DNA, 80 bp, synthetic construct
  source 1..80: mol_type = other DNA
ataactaagtgtacttccgaatggctgagttttccacgcccgtccgcagcgagggagccacggaggggatcccgaccgtc

SEQ ID NO: 177851 - DNA, 80 bp, synthetic construct
  source 1..80: mol_type = other DNA
caccaggggctggtgcacctgattcaagaaagagtgcaatgctggggacgcacgtcgtgtgggacgtcggcctgcagtcc

SEQ ID NO: 177852 - DNA, 80 bp, synthetic construct
  source 1..80: mol_type = other DNA
atttaagttccacaggtacagaaacaagttttagaactggaaacaatagtatatatggacaaccaaattataaaccaatt

SEQ ID NO: 177853 - DNA, 80 bp, synthetic construct
  source 1..80: mol_type = other DNA
tattgtaaaaatcttagttaggatcttgtgttatatggtactctactgtcacaaacctaacattctcacaacagcctgtt

SEQ ID NO: 177854 - DNA, 80 bp, synthetic construct
  source 1..80: mol_type = other DNA
gagcttctgcgcggcgctccgcttttcgggcggcttgcgcttcggccgggaggcttttgggcgtgctgcgcgccggcgct

SEQ ID NO: 177855 - DNA, 80 bp, synthetic construct
  source 1..80: mol_type = other DNA
gaaatataaacacattgtctacttgtttgtcgggtttaccccactcactcagtccaccctcagcataataaacattgtgt

SEQ ID NO: 177856 - DNA, 80 bp, synthetic construct
  source 1..80: mol_type = other DNA
aacagctactcatattttagaggctcaatagtgctgaggttaagtgtatacgccagcactttcaatagaggtcggctacg

SEQ ID NO: 177857 - DNA, 80 bp, synthetic construct
  source 1..80: mol_type = other DNA
aaaaaccgtcggcggtgtggccgcgcgctgcgcgcgcggccgcgcggtcacgcggccgcgcttacgcgcgccgcgtatgt

SEQ ID NO: 177858 - DNA, 80 bp, synthetic construct
  source 1..80: mol_type = other DNA
gccgtagggactggccaggcaccgaactcaatattggtagacactacgtcgtaaatgcgttgttcctcatctaagattaa

SEQ ID NO: 177859 - DNA, 80 bp, synthetic construct
  source 1..80: mol_type = other DNA
ccgcacgcgccttggatcgtgctcttgaccatgctgttgacgcgactgacgcagtcgccggtgccgcttccaagggcatc

SEQ ID NO: 177860 - DNA, 80 bp, synthetic construct
  source 1..80: mol_type = other DNA
ggcacccctggatcaggtaaatcattaacaacctccttaattggaagagcaattgctgacaattatgggtcatcagtgta

SEQ ID NO: 177861 - DNA, 80 bp, synthetic construct
  source 1..80: mol_type = other DNA
ccgaagtccgtcactaaaccacgtgactcctctcgtccaatcaggtgctatatcgtccacttcctgggccaagtctacgt

SEQ ID NO: 177862 - DNA, 80 bp, synthetic construct
  source 1..80: mol_type = other DNA
atctccagaagtaccaggtctatatgtagacaccatctacaacccactaacagacaaaggcataggaaaccacatatgga

SEQ ID NO: 177863 - DNA, 80 bp, synthetic construct
  source 1..80: mol_type = other DNA
ctacccaaattttgacggagccaacctcacaccaacgtctactagtagggctaacatcactacagcaggagcttttggac

SEQ ID NO: 177864 - DNA, 80 bp, synthetic construct
  source 1..80: mol_type = other DNA
gtcctcggcttcggaacgaatggtgcgttccgaggcttcccagaaagtgagttgacaagtaacattcttctcgtcctgta

SEQ ID NO: 177865 - DNA, 80 bp, synthetic construct
  source 1..80: mol_type = other DNA
ggaacaatttgtggaacatgctctccaagaggtcctagttgttccagacacccaggcatcaggtcctatacacacaacca

SEQ ID NO: 177866 - DNA, 80 bp, synthetic construct
  source 1..80: mol_type = other DNA
ctcaatgatgtctggttcgcaagacaccagactgactgcccttgttgccaccgaccccctcggtgtgcagcatggcaaca

SEQ ID NO: 177867 - DNA, 80 bp, synthetic construct
  source 1..80: mol_type = other DNA
gtccatcgtcaccggcgtaaggattagttcgcacgcggccttttgtccgtgcaccgtggcggcggcattgcgctcggaca

SEQ ID NO: 177868 - DNA, 80 bp, synthetic construct
  source 1..80: mol_type = other DNA
ttactagtgattacgtactggcaagtaccaacatgtcaacgcttacaccaccaactgtgcaattacctgaagcactgaac

SEQ ID NO: 177869 - DNA, 80 bp, synthetic construct
  source 1..80: mol_type = other DNA
tctataggcatgggctgcatagccgcagcagactcctggaccccagaggcctctctgatcagatgcccgtccgtcagagc

SEQ ID NO: 177870 - DNA, 80 bp, synthetic construct
  source 1..80: mol_type = other DNA
gcggtcccaggcctcttaccacccccgaggactggcgcaccgagtaccttgcctgcaagcactgggacagaccccctcgc

SEQ ID NO: 177871 - DNA, 80 bp, synthetic construct
  source 1..80: mol_type = other DNA
caaaccacgtggcattcacagatctcaggccatatgtctttgatgagcaccaaggaattgtctctgattatgttacccaa

SEQ ID NO: 177872 - DNA, 80 bp, synthetic construct
  source 1..80: mol_type = other DNA
ccctggactgctggcgcacaattcagatatacagatccagacacctacacacacccaggttacatatcatgctggtacca

SEQ ID NO: 177873 - DNA, 80 bp, synthetic construct
  source 1..80: mol_type = other DNA
aaccaaggagatattcatacctggacaagtcagaaacttgattgaaatgtgccaagttgatacactcattcccgttaaca

SEQ ID NO: 177874 - DNA, 80 bp, synthetic construct
  source 1..80: mol_type = other DNA
ctgtatcccagctccagggcgtgctccacccgctcgttgagctcctcgagatccggacgcaggggctcgctggtgtgggc

SEQ ID NO: 177875 - DNA, 80 bp, synthetic construct
  source 1..80: mol_type = other DNA
tgaattcaacttagtatttaaggttgcacttttaccagacgtcatgtctacacgatgaaaaccctcaataacatggcaga

SEQ ID NO: 177876 - DNA, 80 bp, synthetic construct
  source 1..80: mol_type = other DNA
atataaggaccattgtgaatgttggtcccagtgacatgtacgtgcatgtaggaaacttaatctacaggaacttacattta

SEQ ID NO: 177877 - DNA, 80 bp, synthetic construct
  source 1..80: mol_type = other DNA
acaaaatccaagagtggttttgggagcaagaaactaacaaaaaaaatttagtcacaggctcctatcaaatgcccactaac

SEQ ID NO: 177878 - DNA, 80 bp, synthetic construct
  source 1..80: mol_type = other DNA
tgggtgcggattcaccagccaaattagtgataagattactgagattacatcaatggtgagcaacgtcatcacagagaagt

SEQ ID NO: 177879 - DNA, 80 bp, synthetic construct
  source 1..80: mol_type = other DNA
ctactacacaaacctcagcaacctgcctgaacattcagcaaccagacaacaaatacaagaatcatttcaccccacctcaa

SEQ ID NO: 177880 - DNA, 80 bp, synthetic construct
  source 1..80: mol_type = other DNA
gaccgttagcaaccaagacctagacctagctaggtacctgggaacaaaattcaccttcttcagacaccccactgtagact

SEQ ID NO: 177881 - DNA, 80 bp, synthetic construct
  source 1..80: mol_type = other DNA
atctaccatatgtcacatacttgaaggatgagttgagagctcctgagaaaatcaaagcaggaaagacacgggctattgaa

SEQ ID NO: 177882 - DNA, 80 bp, synthetic construct
  source 1..80: mol_type = other DNA
tggatttattccactaacacaacatacttggaaattactcaactttgtgttgttaatcagacactgttaccacaatgggt

SEQ ID NO: 177883 - DNA, 80 bp, synthetic construct
  source 1..80: mol_type = other DNA
gaaaggcttactagagctagctccattgtatgcagtggaagccaaacaagtgaaagagatccagacagaaatcagaagaa

SEQ ID NO: 177884 - DNA, 80 bp, synthetic construct
  source 1..80: mol_type = other DNA
cctggagctgtcacgagctacgtgaggatctacttcaaaccaaagcacgtgagagcttgggttccaaggccgcccagatt

SEQ ID NO: 177885 - DNA, 80 bp, synthetic construct
  source 1..80: mol_type = other DNA
cggaccatcaccactaccagtgaccagtaccgtaagggtatattttaaacccaagcacgtgaaggcctgggtcccaaggg

SEQ ID NO: 177886 - DNA, 80 bp, synthetic construct
  source 1..80: mol_type = other DNA
tgctaggcacggcgagctggtggggtgaagcacgggcagccgaaggtccaccccgaaaaggaaacggtgaaggtcaccta

SEQ ID NO: 177887 - DNA, 80 bp, synthetic construct
  source 1..80: mol_type = other DNA
attataaaccacaagatggtgatgttcaaatcttcttgaaatccagacctagtttgacaacatttggacccagtgacatg

SEQ ID NO: 177888 - DNA, 80 bp, synthetic construct
  source 1..80: mol_type = other DNA
tcttttagtactactacctggagcctaaaagccctatatgacgaacaccaaaaattccacaacagatggtcctaccccaa

SEQ ID NO: 177889 - DNA, 80 bp, synthetic construct
  source 1..80: mol_type = other DNA
ggccccctccaggtagaaggccatttttccaccctgtagcggaagccgattattttgaataccaccaagaaggtggccca

SEQ ID NO: 177890 - DNA, 80 bp, synthetic construct
  source 1..80: mol_type = other DNA
tcaaacagaagaaaagatgtgaaccggttgccgttgttatacatggtgagcctggcactggaaaatcaatgacaacaaat

SEQ ID NO: 177891 - DNA, 80 bp, synthetic construct
  source 1..80: mol_type = other DNA
tggttgggcgtgcctaaacccccctcacgccaaggggatagttggttaaagaaattcactgaatgctgcaatgcagccaa

SEQ ID NO: 177892 - DNA, 80 bp, synthetic construct
  source 1..80: mol_type = other DNA
cagtaccagtgttggtaaggctcttatcattccatcatactcagttctcagacgtaggtggctggatttgttttgaatca

SEQ ID NO: 177893 - DNA, 80 bp, synthetic construct
  source 1..80: mol_type = other DNA
gagaccctgcgagactacttggaagctttccgaaattcggataatcacttttatctcccaacgacagggcctttaaacac

SEQ ID NO: 177894 - DNA, 80 bp, synthetic construct
  source 1..80: mol_type = other DNA
gtagtagaccccagatgggatactgtaaaaaaacagagcacaggcagtcagtggtctaatacttttgtagactcacattg

SEQ ID NO: 177895 - DNA, 80 bp, synthetic construct
  source 1..80: mol_type = other DNA
aaacaaacaagtgctaccaatggctttcttactaaaaacaacccagtatttggcatgtgtagctacaaaccaaaaaaaga

SEQ ID NO: 177896 - DNA, 80 bp, synthetic construct
  source 1..80: mol_type = other DNA
cccttcacagcgaggactacactacccagataagacccttcgggggcagcttcagcacaaccacctggtccctaaaagtg

SEQ ID NO: 177897 - DNA, 80 bp, synthetic construct
  source 1..80: mol_type = other DNA
acaccctggtgaatctggtagagatgttggacaagacagaaggagcaatgacaaacaacccagtgatgataattggctaa

SEQ ID NO: 177898 - DNA, 80 bp, synthetic construct
  source 1..80: mol_type = other DNA
ggccaaacaatgccacactccgggagatcaggacgagggccgccaccaacctcacccaccacccacatctagtggacact

SEQ ID NO: 177899 - DNA, 80 bp, synthetic construct
  source 1..80: mol_type = other DNA
caaattgacattcacattctgtgggtcggcgatggccacaggaaaactgcttctggcatattctccccctggtgctgacg

SEQ ID NO: 177900 - DNA, 80 bp, synthetic construct
  source 1..80: mol_type = other DNA
caccactttcaaaaaactagactatagcaatgttactttcttaaaaagaggatttaaacaggatgaaaaatataatttct

SEQ ID NO: 177901 - DNA, 80 bp, synthetic construct
  source 1..80: mol_type = other DNA
aggatcgcgagccccatcgggcccgccactgcccgttctccccgtggacgactggctcaactttcgggttgacctgtttg

SEQ ID NO: 177902 - DNA, 80 bp, synthetic construct
  source 1..80: mol_type = other DNA
caaaaaccgccatattagtgacgtcacagccgccattttaagtaagcatggcgggcggtgacgtgcaatgtcaaaggtca

SEQ ID NO: 177903 - DNA, 80 bp, synthetic construct
  source 1..80: mol_type = other DNA
gtcgccattagagtggggcctcctaaactatttgaagacaagtggtacccccagtcagatctgtgcaaggtgccccttgt

SEQ ID NO: 177904 - DNA, 80 bp, synthetic construct
  source 1..80: mol_type = other DNA
tagtctactcaccagacccagaggcagaaagaaaatatcagttaaaataggcccccctaggctatttacagatcactggt

SEQ ID NO: 177905 - DNA, 80 bp, synthetic construct
  source 1..80: mol_type = other DNA
aacttatacaggttgatacattgattcccctaaacaatataggtgttaatgacaccatgagtgagtatcgagttccactt

SEQ ID NO: 177906 - DNA, 80 bp, synthetic construct
  source 1..80: mol_type = other DNA
cctcttgaatgtagctaaggcactcctcccatgcactgactgccccaagccagagttctataagcaatgctgtccgctaa

SEQ ID NO: 177907 - DNA, 80 bp, synthetic construct
  source 1..80: mol_type = other DNA
aagttaatataaaaccccccactacattcatagacaagtggtacttccagaaagacatatgtgacctcacattactaaac

SEQ ID NO: 177908 - DNA, 80 bp, synthetic construct
  source 1..80: mol_type = other DNA
cgtgcgcctcgtgagggaaataaccaggatcaccacccccgccaccaggaccagaatgagcatgccgccgaaggggtttt

SEQ ID NO: 177909 - DNA, 80 bp, synthetic construct
  source 1..80: mol_type = other DNA
agttggtaatcatccagattacttaaggtcaagcacttctgtttccccggtcaatgttgatatgctccaacagggcaaaa

SEQ ID NO: 177910 - DNA, 80 bp, synthetic construct
  source 1..80: mol_type = other DNA
tcagatgaaaaaaaaaaagaagtacttgaaactctgtacaagcaaaatgcatactgggcctcacacttaactccttactt

SEQ ID NO: 177911 - DNA, 80 bp, synthetic construct
  source 1..80: mol_type = other DNA
aaagaggctctttatggcacagatggacttgaacccatagacttgaatactagtgctggctatccctatgtaaatctagg

SEQ ID NO: 177912 - DNA, 80 bp, synthetic construct
  source 1..80: mol_type = other DNA
caggttgatccatcgatagggaacgctgccagcggcgcccagcaggtactgcgccttgtcgttcactttgccgcagcgta

SEQ ID NO: 177913 - DNA, 80 bp, synthetic construct
  source 1..80: mol_type = other DNA
gataaacccagtagaccagatacatcatcaaatagattttatacccttgaaagtaaagtatggaccccaacttcccaggg

SEQ ID NO: 177914 - DNA, 80 bp, synthetic construct
  source 1..80: mol_type = other DNA
aacaggcacaaatcagaaggaaattggagttcttcacttatgtcagatttgacatggaagtgaccattgtaacaaacaac

SEQ ID NO: 177915 - DNA, 80 bp, synthetic construct
  source 1..80: mol_type = other DNA
cgggctgacggacgggggcgggggttgcgtgggtgacgttggagaccaggggcttttgcgtggacggggacttttgcggg

SEQ ID NO: 177916 - DNA, 80 bp, synthetic construct
  source 1..80: mol_type = other DNA
caatgtaacgccacaaaatttcacagtggcactttactggttgtaattattccagaacatcagttggcatcagcagaggg

SEQ ID NO: 177917 - DNA, 80 bp, synthetic construct
  source 1..80: mol_type = other DNA
atgatatgcccttacacagaccccccactgcttagaacagacctacaaaaaaagaaatggggctacgtagcctatgacac

SEQ ID NO: 177918 - DNA, 80 bp, synthetic construct
  source 1..80: mol_type = other DNA
gacacaagacttaccccagtaacatcagacggtagtgaatattataaagcatttctaaatgctgcatttaaaaaagacag

SEQ ID NO: 177919 - DNA, 80 bp, synthetic construct
  source 1..80: mol_type = other DNA
ctttcaaagagacttctgtggtgtgccccttctaactgtcaacgcaaccgcatgcaacttgcggtatccgttcggctcac

SEQ ID NO: 177920 - DNA, 80 bp, synthetic construct
  source 1..80: mol_type = other DNA
gaagagtaaggaggcgcagacggtggaggcgggggagacgcagacgaaagtttttcagacgcaggagacgactgagacga

SEQ ID NO: 177921 - DNA, 80 bp, synthetic construct
  source 1..80: mol_type = other DNA
gcgggtttaccaatcagataagtgaaaaggttgcagagataacatcaatggtgagtagtgttgtcacagagaaattatta

SEQ ID NO: 177922 - DNA, 80 bp, synthetic construct
  source 1..80: mol_type = other DNA
atttgcacggacaggcattgtaccttggaattgtgctgttcatcttcgggtgcttacttgtcttaggtctctggatctac

SEQ ID NO: 177923 - DNA, 80 bp, synthetic construct
  source 1..80: mol_type = other DNA
aactggatagcaatgcacccaaattaagtgctccaatcttctgtctctcactttcccccgctagcgaccaaagactacag

SEQ ID NO: 177924 - DNA, 80 bp, synthetic construct
  source 1..80: mol_type = other DNA
ccaggagcacctagaccaactgcatgggacgactacacgtggcaatcatcatccaatccctcaattttctacacttatgg

SEQ ID NO: 177925 - DNA, 80 bp, synthetic construct
  source 1..80: mol_type = other DNA
aacctggccgaggcggccacccggcgtctacacctatcgtccctgctcccccaggcaatgcagcggcgcaagcctgccat

SEQ ID NO: 177926 - DNA, 80 bp, synthetic construct
  source 1..80: mol_type = other DNA
gtgcggccgcgctagcgcttcactttctcacgtcacgaaaaggagtgacggacggtcagtacgccacgtctctgcggcgg

SEQ ID NO: 177927 - DNA, 80 bp, synthetic construct
  source 1..80: mol_type = other DNA
ggtcaaactgttgtacaatgagcaatttgctgttcagggtctactgaggtatcatacttatgcaagatttggaattgaga

SEQ ID NO: 177928 - DNA, 80 bp, synthetic construct
  source 1..80: mol_type = other DNA
gtaggccccgccacgtcacttgtcacgtgactgcacgtcacagccgccattttgttttacaaaatggccgacttccttcc

SEQ ID NO: 177929 - DNA, 80 bp, synthetic construct
  source 1..80: mol_type = other DNA
gacaccatgcacaagatatccaggacgggacccttcagctacagagacgaggctccttccatcaccctgactgccgaata

SEQ ID NO: 177930 - DNA, 80 bp, synthetic construct
  source 1..80: mol_type = other DNA
ggggggcaatcttctccacgaacagaccattagaaacccatgcccgacggacggacatccctcttccagtagactccctc

SEQ ID NO: 177931 - DNA, 80 bp, synthetic construct
  source 1..80: mol_type = other DNA
atccccgagcgtgcggaaaacccgtcctcagcgccgtcccgcgaacaaatcccgtggaaagcgccgtcgcgctgacggcc

SEQ ID NO: 177932 - DNA, 80 bp, synthetic construct
  source 1..80: mol_type = other DNA
acgcgacactctcagccggacaaccggcgtcactgacagaagccgagccaaatacagagaaagcaacgctacaccgtcac

SEQ ID NO: 177933 - DNA, 80 bp, synthetic construct
  source 1..80: mol_type = other DNA
actggaagtggagaacttcaatgccaccggagcagcggaccataagaagcagttcactgtatggcccattacttacacaa

SEQ ID NO: 177934 - DNA, 80 bp, synthetic construct
  source 1..80: mol_type = other DNA
ccttttagcatatgcaccaccaggtgcaaatgcccctaaaaatcgtaaggatgcaatgctgggtacacatatgatctggg

SEQ ID NO: 177935 - DNA, 80 bp, synthetic construct
  source 1..80: mol_type = other DNA
ggtatagtgattctgccatttgtgccactgaagttcgagagtggtgcctcaactaagataccaattactgtcaccattgc

SEQ ID NO: 177936 - DNA, 80 bp, synthetic construct
  source 1..80: mol_type = other DNA
gctggatgctctacgcgaagcggtgccaccgttacagtcaccgagtgctgaggcatgtggttacagtgacagagtggcgc

SEQ ID NO: 177937 - DNA, 80 bp, synthetic construct
  source 1..80: mol_type = other DNA
ggctcctctggaagatcctgcagatgtgaaactgggtggtggtgtcacctgctgacagcggtgggtttttcttcccttga

SEQ ID NO: 177938 - DNA, 80 bp, synthetic construct
  source 1..80: mol_type = other DNA
gtgcccttaaacccgggagcatcctcgtccacgtgactgtgacgtgtgtgacacgtcaccgccgccattttagttcacaa

SEQ ID NO: 177939 - DNA, 80 bp, synthetic construct
  source 1..80: mol_type = other DNA
agtattatgtacacgggggccaagtcagacaggtgggctcaccctctggtgggcacaattcacgccagtaatttatattg

SEQ ID NO: 177940 - DNA, 80 bp, synthetic construct
  source 1..80: mol_type = other DNA
aacttgcaaggccgtgggagtttcacttgtcggtgtctacctctaaaagtcactaagcactccgagcgaagcgaggagtg

SEQ ID NO: 177941 - DNA, 80 bp, synthetic construct
  source 1..80: mol_type = other DNA
gtcaggtctgtctttacgagctggacgaggacgagatgggcgaggagatgctgggcatgttggccggaaagcccgaggat

SEQ ID NO: 177942 - DNA, 80 bp, synthetic construct
  source 1..80: mol_type = other DNA
gagcttgaggaagtcattgtcgagaaaacgaaacagacagtggcttcaattgcttctggatctaaacacacccaaagtgt

SEQ ID NO: 177943 - DNA, 80 bp, synthetic construct
  source 1..80: mol_type = other DNA
tcatcagaatccaggtgtaataactggctcagcagttgggtgtgatccagacgtcttttggtccataattccatgcctca

SEQ ID NO: 177944 - DNA, 80 bp, synthetic construct
  source 1..80: mol_type = other DNA
tagtcactatcaaacctttgccactgaggcacaagtaggcagaatacctagctttaatccagatggctccaaaaatacag

SEQ ID NO: 177945 - DNA, 80 bp, synthetic construct
  source 1..80: mol_type = other DNA
gatcagcaacacaagctatagacgcacagtcaaggatgatttcactgaaggtgggtacatcagtatgttttaccagactc

SEQ ID NO: 177946 - DNA, 80 bp, synthetic construct
  source 1..80: mol_type = other DNA
catgatggcaagcaactcggcagatcaaactggcgggattacctacgagaaggccaatcctggagaggctggcggcaagt

SEQ ID NO: 177947 - DNA, 80 bp, synthetic construct
  source 1..80: mol_type = other DNA
aaagaggattcaaacaggatgtaaagtacccttttttagtgcaccctacatttccagttcaagagatacatgaatcaatc

SEQ ID NO: 177948 - DNA, 80 bp, synthetic construct
  source 1..80: mol_type = other DNA
gactttgtaaatccaagcacattttcaagaatgtgtattatgaagtggagggtggggttccatcaggatgttcaggaact

SEQ ID NO: 177949 - DNA, 80 bp, synthetic construct
  source 1..80: mol_type = other DNA
aaaggaaagtgcttctgcaaactgtgcgagctacacagaagactaggcggcttctaggtatgtggcagccccccgtgcac

SEQ ID NO: 177950 - DNA, 80 bp, synthetic construct
  source 1..80: mol_type = other DNA
catcataacataaaggaccacctacctgggacgcgcagttgggcggcggactggggcggcatgctgcggcgatgctgtcg

SEQ ID NO: 177951 - DNA, 80 bp, synthetic construct
  source 1..80: mol_type = other DNA
ttggaatggctctactcaagcgcaattgccatactgtcactacagatagaggtgaattcaacctcctaggtattcatgac

SEQ ID NO: 177952 - DNA, 80 bp, synthetic construct
  source 1..80: mol_type = other DNA
tcagatttgtatgtgcattctagcaattttgtttataaaaacctacacttaagtgaaccagaaaatctgaatgattcagt

SEQ ID NO: 177953 - DNA, 80 bp, synthetic construct
  source 1..80: mol_type = other DNA
actccctggttgaataccagcaacataacttgcaatggcagtttgtacaccgtttataaacactctaatttaaattacga

SEQ ID NO: 177954 - DNA, 80 bp, synthetic construct
  source 1..80: mol_type = other DNA
gccagagataaactagatttttgtaaaagattgaaacaacttgatattctggaaagacaaatagacaccttacacatgaa

SEQ ID NO: 177955 - DNA, 80 bp, synthetic construct
  source 1..80: mol_type = other DNA
actatacccacagatatagtccaaactaccatactaacaagggtaacaccacagaacttgaagaaaagcattacatcaac

SEQ ID NO: 177956 - DNA, 80 bp, synthetic construct
  source 1..80: mol_type = other DNA
aaatgatagtgtgctcatatgttacagctcagacttagtcatctaccgcacaaactctaaaggagatgattatgttccaa

SEQ ID NO: 177957 - DNA, 80 bp, synthetic construct
  source 1..80: mol_type = other DNA
cacccacccaggcgagaagggtcatgtgattggcagtaactcagacagaaacaatcaccaaccagatgagagtgctttct

SEQ ID NO: 177958 - DNA, 80 bp, synthetic construct
  source 1..80: mol_type = other DNA
gcgcgtaccggcgcttcaagctgctgagacaggagcaacatcaaacgccactgatgaaagtctgattgagacgagatgcg

SEQ ID NO: 177959 - DNA, 80 bp, synthetic construct
  source 1..80: mol_type = other DNA
aacaacaatggcctcatgcaaatcatgtttgttccaccaggactagatgctccctcagacaaggatgatcgcttatggga

SEQ ID NO: 177960 - DNA, 80 bp, synthetic construct
  source 1..80: mol_type = other DNA
gattttactaagaaagttttggcaccaaaagtcccgttagagccccagcaggtaacgctgccgttcacataggctcccgg

SEQ ID NO: 177961 - DNA, 80 bp, synthetic construct
  source 1..80: mol_type = other DNA
cgggttgtctaacagcgaaactcccattgaatttgatagaacaagcacaacaccagaagttggagcggtgcagaaagctg

SEQ ID NO: 177962 - DNA, 80 bp, synthetic construct
  source 1..80: mol_type = other DNA
agtaaaggatgtacttgagaaaggcataccaaccttacaatcacctacagttgaggcttgtggatattctgatagaatca

SEQ ID NO: 177963 - DNA, 80 bp, synthetic construct
  source 1..80: mol_type = other DNA
agactagacatgtgatacaaactagaagtagaagtgaaagtacagtggagtctttctttgcgcgaggtgcatgtgtaacc

SEQ ID NO: 177964 - DNA, 80 bp, synthetic construct
  source 1..80: mol_type = other DNA
cttctttgctcgaggagcttgtgtcacgataatgggagtagacaactataatgaaaacttgactggcgaccagaggtcca

SEQ ID NO: 177965 - DNA, 80 bp, synthetic construct
  source 1..80: mol_type = other DNA
aaaaggctgggaatatagctatacaaaacttatggctccaatatactaccaagccataaaaaacagtacatataactggc

SEQ ID NO: 177966 - DNA, 80 bp, synthetic construct
  source 1..80: mol_type = other DNA
cttctcccaagtcacgggtcccgtgttgaggacggtgtagagcagtccgtgcgtcggtacgtgtaggaggatctggttgc

SEQ ID NO: 177967 - DNA, 80 bp, synthetic construct
  source 1..80: mol_type = other DNA
gcgcagacggaggtggccgcggagacggagacgtcgcagacctgctcgccgccttagaaggagacgtcgacgccgacggg

SEQ ID NO: 177968 - DNA, 80 bp, synthetic construct
  source 1..80: mol_type = other DNA
acaatatgaggacggtgcctccacagcaatccccataacagtcacggttgctcccatgtgttgtgagttcaatgggctca

SEQ ID NO: 177969 - DNA, 80 bp, synthetic construct
  source 1..80: mol_type = other DNA
tagtgtgtatggaattgaaggcttggaagcgctagacctccatactagtgctggttatccatacacagctcatggaatta

SEQ ID NO: 177970 - DNA, 80 bp, synthetic construct
  source 1..80: mol_type = other DNA
ctaaacttaatagctccatatccaaatagagacctggccatcgtctcaacaggtgcacatggagcagaaacaattccaca

SEQ ID NO: 177971 - DNA, 80 bp, synthetic construct
  source 1..80: mol_type = other DNA
aaaactatggagcctttggccaacaatccggggcggtctacgtgggtaattataggttggttaacagacacttggctaca

SEQ ID NO: 177972 - DNA, 80 bp, synthetic construct
  source 1..80: mol_type = other DNA
caaaggaagcttcactcctgacaacaacgtcaccagtcccgcacgggaattctgcccagttgattatctcttcgggagtg

SEQ ID NO: 177973 - DNA, 80 bp, synthetic construct
  source 1..80: mol_type = other DNA
ctggcaagctcggccagcagtctggtgcagtttatgtagggaattatagggtagtgaacaggcacttggccacgcatgcg

SEQ ID NO: 177974 - DNA, 80 bp, synthetic construct
  source 1..80: mol_type = other DNA
gctacgcgcaaacacgcagcgagccacgttcaccgtcagccgctgcaccggcatgtcacactcgccaaagtggcacgacg

SEQ ID NO: 177975 - DNA, 80 bp, synthetic construct
  source 1..80: mol_type = other DNA
gatggaccagagatccaaagaacacccaagatcatgtctattcattatgtctcctaatgtggcataatggagaaaagcct

SEQ ID NO: 177976 - DNA, 80 bp, synthetic construct
  source 1..80: mol_type = other DNA
aggaggagaggctagaggtccgcgagatttggggtaggcggagcctcaggagggtcccctccatagggttgaaccaggag

SEQ ID NO: 177977 - DNA, 80 bp, synthetic construct
  source 1..80: mol_type = other DNA
gagacacaatcacagactttatagttacctatgacataaatccacccatgaaaaacacagaactaagcagccctaacact

SEQ ID NO: 177978 - DNA, 80 bp, synthetic construct
  source 1..80: mol_type = other DNA
acaatgccggtatgggtattgcagcagggaacctcaccatttatccacaccaatgggtcaatttaagaactaacaattgc

SEQ ID NO: 177979 - DNA, 80 bp, synthetic construct
  source 1..80: mol_type = other DNA
accagtgcggtgcggatatatttcaagttaaaacatgtgaaagcatgggtgccacgtccaccccgactgggcaattacga

SEQ ID NO: 177980 - DNA, 80 bp, synthetic construct
  source 1..80: mol_type = other DNA
ttaagccaggcaacacagacagcaactatggctactgcacctacacagtaagtgacagcacatatcaagccattaaaaag

SEQ ID NO: 177981 - DNA, 80 bp, synthetic construct
  source 1..80: mol_type = other DNA
accttattcaggattaccacagcccaaaccctcaaaacccgaactcagaaaagccatgatacaaggcccagaacatgaat

SEQ ID NO: 177982 - DNA, 80 bp, synthetic construct
  source 1..80: mol_type = other DNA
taaatcaggctatggtgacaagatgtgagccagttgtttgctatttgattggcaaaagagggggaggaaagagtttgact

SEQ ID NO: 177983 - DNA, 80 bp, synthetic construct
  source 1..80: mol_type = other DNA
cgccactgccgccgtccactgccttctcccctgctcgccggggagtaggtgaggcttacaggagagggccggagccgtgg

SEQ ID NO: 177984 - DNA, 80 bp, synthetic construct
  source 1..80: mol_type = other DNA
cccctaagggaccctttggagggggacacagtacagctaggctctctttaaaagtgctatacgaagagaaccagaagcac

SEQ ID NO: 177985 - DNA, 80 bp, synthetic construct
  source 1..80: mol_type = other DNA
tcagcttagaaatgaatgaatacatgactgtcgcagcatcccattatgcatcacagcttgagacactagacatatctaac

SEQ ID NO: 177986 - DNA, 80 bp, synthetic construct
  source 1..80: mol_type = other DNA
tggcccgactcaccgggagcggaagcccagagctccgacgaggaagaaaaagaggtccagacgccgatcctccagcacca

SEQ ID NO: 177987 - DNA, 80 bp, synthetic construct
  source 1..80: mol_type = other DNA
ggtggatgcccgccattatctgcggcaccggcaacacccaatttaactttgtaattcatgaagaggacataccccctaga

SEQ ID NO: 177988 - DNA, 80 bp, synthetic construct
  source 1..80: mol_type = other DNA
tttccactgggcgctagcactccgattctgcggaatccttgtgcgcctgttttacaaccctcccccgacttgcaacttag

SEQ ID NO: 177989 - DNA, 80 bp, synthetic construct
  source 1..80: mol_type = other DNA
gaaattcctgaaaacaaaattatgtgattggttgggtgtccaaaaaccaccttccagacaaggggatagttggcttaaaa

SEQ ID NO: 177990 - DNA, 80 bp, synthetic construct
  source 1..80: mol_type = other DNA
catacatacctatagaatacagatttaaatggtatatatgtgcctttcatcaacaaaactttatgaatagtatggcacaa

SEQ ID NO: 177991 - DNA, 80 bp, synthetic construct
  source 1..80: mol_type = other DNA
gggatgcatcactttgagccactaagcccccgttgctcgccttgcctgcctcaccatgacacactaagcccctgctaatc

SEQ ID NO: 177992 - DNA, 80 bp, synthetic construct
  source 1..80: mol_type = other DNA
gtgcagaataataggctacatggctgctttaatcagtggacaagggtcttttagcaaaaactatagcagccatctagagg

SEQ ID NO: 177993 - DNA, 80 bp, synthetic construct
  source 1..80: mol_type = other DNA
catgtgcgctcactgtgtcagctggcttggcacaatggcaaagaggtctatgaagatttcattcaaaagatcaagacagt

SEQ ID NO: 177994 - DNA, 80 bp, synthetic construct
  source 1..80: mol_type = other DNA
gcggacgcacaccttctccaggcagaacgccaccagctgccgccgaacgtaccacaggtacacgtgcagacctgcgaaca

SEQ ID NO: 177995 - DNA, 80 bp, synthetic construct
  source 1..80: mol_type = other DNA
gtacgtgcttcgcgtggagatgggcaggcagtttggcttcgaggtgcatagaagccggccctccttccgtcagttccagg

SEQ ID NO: 177996 - DNA, 80 bp, synthetic construct
  source 1..80: mol_type = other DNA
tatctcagggtgaagaggagtgaaaagagggaggtgggccaggcaagcggtggtgcttccgccgcccgctctgaagctga

SEQ ID NO: 177997 - DNA, 80 bp, synthetic construct
  source 1..80: mol_type = other DNA
acttggaacagaaactatgccatgcgcagcgaggactacccagaacagggcagataccctttcggagggtccatgagcac

SEQ ID NO: 177998 - DNA, 80 bp, synthetic construct
  source 1..80: mol_type = other DNA
actcaccaggatctaaatatggtgcagtcgtgacaaatgcgatgggcactttgtgtgtgcgcgtcgttacagaacagcaa

SEQ ID NO: 177999 - DNA, 80 bp, synthetic construct
  source 1..80: mol_type = other DNA
aaacgagaccgtgggagagcagccaggaagaagagacagaagcccaatcagaagaggaagaagagagacccctccgagag

SEQ ID NO: 178000 - DNA, 80 bp, synthetic construct
  source 1..80: mol_type = other DNA
cacaacacctagttcgcatagcctgaacaccggtctagtccctgcacttcaagccgctgagacaggggcttcgtccacag

SEQ ID NO: 178001 - DNA, 80 bp, synthetic construct
  source 1..80: mol_type = other DNA
atcgctattgtatgtattgcctttgtaccaagtgtctctgctgctagttgcgttgctacctgtgttgtcaagtggtgctg

SEQ ID NO: 178002 - DNA, 80 bp, synthetic construct
  source 1..80: mol_type = other DNA
agcaggaggagtggcaggagcaggaggaagggcaggagcaggaggtggaggccggtgtcgaggaggcagtggaggccgcg

SEQ ID NO: 178003 - DNA, 80 bp, synthetic construct
  source 1..80: mol_type = other DNA
gaatagtcgtcccggcgggcactccgacatcgtgctccatcatgtgttttgtatcggcatgcaatgatttctctgtgaga

SEQ ID NO: 178004 - DNA, 80 bp, synthetic construct
  source 1..80: mol_type = other DNA
tctacttatcttttttgacactacatttaactgttatgtaacaatgtttgcttattttcatgttcaataaacgctatgtt

SEQ ID NO: 178005 - DNA, 80 bp, synthetic construct
  source 1..80: mol_type = other DNA
cactcgttgacacactcacgaaccccgccttgatgtcaccgagtgttgaagcttgtgggttttccgataggcttaaacaa

SEQ ID NO: 178006 - DNA, 80 bp, synthetic construct
  source 1..80: mol_type = other DNA
ggcttcagtgcctagcagcaggaaggatgccatgctgggcacccacattgtgtgggatattggtctgcagtcgagctgtg

SEQ ID NO: 178007 - DNA, 80 bp, synthetic construct
  source 1..80: mol_type = other DNA
ctctcgtcctgtccgtgcagttggcgacacaccttatccaaacacaaaatggccgcgtacaagccccagcaaccggccaa

SEQ ID NO: 178008 - DNA, 80 bp, synthetic construct
  source 1..80: mol_type = other DNA
atggtggagacggtggcgccggtggcccaccagacgctggaggagacgccgtcgccggcgccccgtacggagaacaagag

SEQ ID NO: 178009 - DNA, 80 bp, synthetic construct
  source 1..80: mol_type = other DNA
tgatagtacgtctatggtggtgatcgattttggttaacaatttgttcgtttaaaggcttaatgtacttatgctacatgat

SEQ ID NO: 178010 - DNA, 80 bp, synthetic construct
  source 1..80: mol_type = other DNA
tagtaaatttaacaagagaaaatttctcacctgcatctacaaagtacaagtggactagaaataaatttgacatagcagag

SEQ ID NO: 178011 - DNA, 80 bp, synthetic construct
  source 1..80: mol_type = other DNA
cgcaggccccagtgatctgcacgtgcacgcagggcactacaaatatacaaatgcacacttgacaactggcaattcagaca

SEQ ID NO: 178012 - DNA, 80 bp, synthetic construct
  source 1..80: mol_type = other DNA
aggaacacgctcaggtcaggaagaagtttgaaatgtttacttatgttagatttgatttggagatcacaatagtgaccaac

SEQ ID NO: 178013 - DNA, 80 bp, synthetic construct
  source 1..80: mol_type = other DNA
cagtatttaatgcaacacagtgcaaatgtcaccttgtggatattccactatggtccgctttccatggctacattgacttt

SEQ ID NO: 178014 - DNA, 80 bp, synthetic construct
  source 1..80: mol_type = other DNA
agacttttgcgcgattccccttttgtgcgacaacttgaaatggcatggaagcagggtgtggaggataagcttgatgcctt

SEQ ID NO: 178015 - DNA, 80 bp, synthetic construct
  source 1..80: mol_type = other DNA
acagagcttggagcagtgggttcgagtggataacagagtacactggaaagacagtttggtttgttgctagcgtgaaaata

SEQ ID NO: 178016 - DNA, 80 bp, synthetic construct
  source 1..80: mol_type = other DNA
actaccgtccgcaactgctccatccgaggccttgtgcctctggtgctgtgcggacacacccagggaggcagaaactttgc

SEQ ID NO: 178017 - DNA, 80 bp, synthetic construct
  source 1..80: mol_type = other DNA
ccagcaaagtgtggttataatggatgacatcatgcagaatccaagtggtgaggatatgacccttttctgtcaaatggtat

SEQ ID NO: 178018 - DNA, 80 bp, synthetic construct
  source 1..80: mol_type = other DNA
cacatgctcaacctacagacaatgttctcttgaatggacagaaggttcaaatcaaagataaatacaaactagttgaccca

SEQ ID NO: 178019 - DNA, 80 bp, synthetic construct
  source 1..80: mol_type = other DNA
acagggtgacatagtaaagacagggaaagctaaggatatgggctatcataccatcaacacaccatcaaaaagtaaacttc

SEQ ID NO: 178020 - DNA, 80 bp, synthetic construct
  source 1..80: mol_type = other DNA
agacgaaaaagagaaacctacttaggcagcaaatacataaaccataaaacaggactttacagcagtatattcctagcaaa

SEQ ID NO: 178021 - DNA, 80 bp, synthetic construct
  source 1..80: mol_type = other DNA
cagcttaaagctgaacccttgcatgagccgtgacacaagctgccctccactacgcgaaccaacttaaacagctggacata

SEQ ID NO: 178022 - DNA, 80 bp, synthetic construct
  source 1..80: mol_type = other DNA
ccttgagatcggcggggtagggtgccagacgtagactctcggccgtgtagcgctgaaggtcgtagacgggcgaggtagaa

SEQ ID NO: 178023 - DNA, 80 bp, synthetic construct
  source 1..80: mol_type = other DNA
tccaagctgcgcccacacacatgcacagacggcccctgtgacatcaggccggtcatgcaaaaacagacaaagagaccgtg

SEQ ID NO: 178024 - DNA, 80 bp, synthetic construct
  source 1..80: mol_type = other DNA
gcgcacttgaacaagtactcgtcaaccaaagcaggggacgcattaaaattcttagtcaaaaatcggacttcgaagtgcag

SEQ ID NO: 178025 - DNA, 80 bp, synthetic construct
  source 1..80: mol_type = other DNA
actgccgccagtaggtagcagccggctttcagtccttggacggccgtgtgcatgcctttggtggggccttccctgcacat

SEQ ID NO: 178026 - DNA, 80 bp, synthetic construct
  source 1..80: mol_type = other DNA
gaccaagacatgccagttttaacacatcagatcatgtatgtcccacccggtggtccgatcccagctaaggtggacagtta

SEQ ID NO: 178027 - DNA, 80 bp, synthetic construct
  source 1..80: mol_type = other DNA
atggaatcgtggctttcactgacattagaaacctactttggttagaagatgatgcaatggagcaaggtataacagattac

SEQ ID NO: 178028 - DNA, 80 bp, synthetic construct
  source 1..80: mol_type = other DNA
gtcgcggaacaggtaccgtcattctccgcagagtggtgtgaatcacgtcgcgatacgcaatctccgaacgcgacacaccg

SEQ ID NO: 178029 - DNA, 80 bp, synthetic construct
  source 1..80: mol_type = other DNA
agttaaggatgttttggaaaaaggaataccaactctacaatccccaactgttgaagcatgtggttattcagatagaatta

SEQ ID NO: 178030 - DNA, 80 bp, synthetic construct
  source 1..80: mol_type = other DNA
gaagcagaagcccaagaaagtctaccgatacagcagcagctcagaaaacaactcagacagcaacagcagttgcgagtcca

SEQ ID NO: 178031 - DNA, 80 bp, synthetic construct
  source 1..80: mol_type = other DNA
atcttaacctcttagcacctcattacaacagggatttggcagttgtggcaacaggagcgcaaggctcagaaattattccc

SEQ ID NO: 178032 - DNA, 80 bp, synthetic construct
  source 1..80: mol_type = other DNA
tcgctgctctcggagctggaggagaagttggtcttgtaccgacccttgcacttccgaatggctgagttttccacgcccgt

SEQ ID NO: 178033 - DNA, 80 bp, synthetic construct
  source 1..80: mol_type = other DNA
agggtcaggacccggtaatcaatattttggccagtggaccatcaccacgagaagggtggcacagttgcgtcggaagttgg

SEQ ID NO: 178034 - DNA, 80 bp, synthetic construct
  source 1..80: mol_type = other DNA
aagtttacgggcagaacaaacagacccggcagtaaaaaattgggtgacgcaaacactgctgattcagaatgctaacccag

SEQ ID NO: 178035 - DNA, 80 bp, synthetic construct
  source 1..80: mol_type = other DNA
agaaccagtagcaaaagaccacggctgttagaatgtgcacggaaagcgttccagcttcgtccaccacgatcacattggtg

SEQ ID NO: 178036 - DNA, 80 bp, synthetic construct
  source 1..80: mol_type = other DNA
gtgctccattaccgaaatatcggaatgattacacttggcagtctggtaccaatgcttcagtgttttggcagcaagggcaa

SEQ ID NO: 178037 - DNA, 80 bp, synthetic construct
  source 1..80: mol_type = other DNA
cttcagttcctttcattccacccatggcagatctacctgataagggaaaaccattttcctcagattatgtattagcaagt

SEQ ID NO: 178038 - DNA, 80 bp, synthetic construct
  source 1..80: mol_type = other DNA
tttaatacacccaacttttccaattgaggagattcatgagtccatacgatggacaaagaaaccatctcagacacaagaac

SEQ ID NO: 178039 - DNA, 80 bp, synthetic construct
  source 1..80: mol_type = other DNA
caggacgccttcatttgcaccgactacgtgtactgcgccctgcgtctgctggcctgtcccgacagacctattatcggtga

SEQ ID NO: 178040 - DNA, 80 bp, synthetic construct
  source 1..80: mol_type = other DNA
cttagcattgcttggctgctctggctcaccatggcgatatctgaaagacaaggtttgtagatggttgggtattgacccac

SEQ ID NO: 178041 - DNA, 80 bp, synthetic construct
  source 1..80: mol_type = other DNA
cccctattatcctcccaagcataaacaaagcctatatgtttgaaccccagggtcctaaacccatacaggggtacaacgat

SEQ ID NO: 178042 - DNA, 80 bp, synthetic construct
  source 1..80: mol_type = other DNA
ctcaatgcctgggtaaaactggtagaggagaaaaaatttggagcagaagtagtgccaggatttcaggcactctcagaggg

SEQ ID NO: 178043 - DNA, 80 bp, synthetic construct
  source 1..80: mol_type = other DNA
ctggtaacacaaatctaatgcaaataatgtacatacctccaggtgccccatcaccagcagacaacagttctgttgaatgg

SEQ ID NO: 178044 - DNA, 80 bp, synthetic construct
  source 1..80: mol_type = other DNA
ggaggttagtaaaggcatatgtgacgttgaattgtcactggtggaggggctgagtgtctctgagattgaactgggtctca

SEQ ID NO: 178045 - DNA, 80 bp, synthetic construct
  source 1..80: mol_type = other DNA
agcagtgtggtgccagctgatttggtgcaaacccgtcacgtcatccaaactcgaagcaggagtgaatcaacagtcgaatc

SEQ ID NO: 178046 - DNA, 80 bp, synthetic construct
  source 1..80: mol_type = other DNA
aaacctaatgacctggctgttaacatagcacaggcaaaggcagagagatttgagtaccacctaggctggtactctcccat

SEQ ID NO: 178047 - DNA, 80 bp, synthetic construct
  source 1..80: mol_type = other DNA
aaacattctgacaaatggctcgacacaacactttacagtcataaattattataaagatgctgcaagttcatcatctgctg

SEQ ID NO: 178048 - DNA, 80 bp, synthetic construct
  source 1..80: mol_type = other DNA
ctacgtcataagtcacgtggagagggctgcatcacaacccggaagcaatcctcaccacgtgatttgtcacgtgaccgcta

SEQ ID NO: 178049 - DNA, 80 bp, synthetic construct
  source 1..80: mol_type = other DNA
caggatttcgttgtcctcgcccagttgaccgtactgcacgtacgagctgttggcgaaattaaagatgaccacgggtcgtg

SEQ ID NO: 178050 - DNA, 80 bp, synthetic construct
  source 1..80: mol_type = other DNA
ctactacagaatttaatgaaactcaatgtaaatgtgtattacaagatattccaatatgggcaatggcaactggatatgct

SEQ ID NO: 178051 - DNA, 80 bp, synthetic construct
  source 1..80: mol_type = other DNA
aaagttagacatgatggagatataccgaattccagtgcagagtggtaatcaccaaagttcacaagtatttgggttccaag

SEQ ID NO: 178052 - DNA, 80 bp, synthetic construct
  source 1..80: mol_type = other DNA
tttcatatcctacaggaccaccgagaaaaaggccaaaaagagacacagacccgcacacagaggagcaagaagaagactcg

SEQ ID NO: 178053 - DNA, 80 bp, synthetic construct
  source 1..80: mol_type = other DNA
attaaaaaatacagagacaaacgattcacatggctcactgacatgccagccagcaacacctgccacataaatgccactta

SEQ ID NO: 178054 - DNA, 80 bp, synthetic construct
  source 1..80: mol_type = other DNA
ctgctgccagtactccagctacaactggagtaaacactcaggaggtaccagcgttaactgcagtagagactggagccagc

SEQ ID NO: 178055 - DNA, 80 bp, synthetic construct
  source 1..80: mol_type = other DNA
ttatgcacattggtccggcagcataaaacttacatttttattttgcggttccgccatggccaccggcaaacttcttattg

SEQ ID NO: 178056 - DNA, 80 bp, synthetic construct
  source 1..80: mol_type = other DNA
tcgcggtagagctcggtcaacgcgtccagcttctggtaggaggcgcgctgctcctcggagcacgggcgaaacgtcagttc

SEQ ID NO: 178057 - DNA, 80 bp, synthetic construct
  source 1..80: mol_type = other DNA
agcccaaaataattattaaacagtggcagccggggactgttagaaaatgtttaataatagggtacatggctgctcttata

SEQ ID NO: 178058 - DNA, 80 bp, synthetic construct
  source 1..80: mol_type = other DNA
gcaaacgcttactcacacttttatgatggtttcagcagggtgcccttggaaggagaaactaccgactcaggtgatactta

SEQ ID NO: 178059 - DNA, 80 bp, synthetic construct
  source 1..80: mol_type = other DNA
ccgggggcgccattacctaagaaaagggatgactacacttggcaatctggcacaaatgcttctgttttctggcaatatgg

SEQ ID NO: 178060 - DNA, 80 bp, synthetic construct
  source 1..80: mol_type = other DNA
ctacatatgacccctctcgcagcaaatgcatgctaaaagatctaccactctttatacttttctatggctatatagactgg

SEQ ID NO: 178061 - DNA, 80 bp, synthetic construct
  source 1..80: mol_type = other DNA
atatattgatacacttagaattatgttagattcatcaaataagttcttaccactttatgcttctgaaaataaaagaatta

SEQ ID NO: 178062 - DNA, 80 bp, synthetic construct
  source 1..80: mol_type = other DNA
ccatacctagtgatgttattgagactagacatgtggtgaactataaaaccagatcagagtcaactttagaatcattcttt

SEQ ID NO: 178063 - DNA, 80 bp, synthetic construct
  source 1..80: mol_type = other DNA
ataacataccgacgctagtttattcaagataaagttttactactttgtgtagccctcagaaactgtaaagctccactttt

SEQ ID NO: 178064 - DNA, 80 bp, synthetic construct
  source 1..80: mol_type = other DNA
acgaaacttactacccagtaataggaacttctgctttagacaaaggaaccagtaactataaagaatcaaacataaatgaa

SEQ ID NO: 178065 - DNA, 80 bp, synthetic construct
  source 1..80: mol_type = other DNA
ttgtagacagtgtgaaagaacaaataagtgccataaacccagttaataacattagtaaaaagataattaaatggatgctt

SEQ ID NO: 178066 - DNA, 80 bp, synthetic construct
  source 1..80: mol_type = other DNA
acagttggaaacaacagcttgagaatcagaccttggatgacttggatgatgcagtttcatatatcaagcataattttcca

SEQ ID NO: 178067 - DNA, 80 bp, synthetic construct
  source 1..80: mol_type = other DNA
acttgcggtttccgttctgccgaccacaaactgaaaacacttgcgtatacttccaggttttaagcaatgcctggaacaat

SEQ ID NO: 178068 - DNA, 80 bp, synthetic construct
  source 1..80: mol_type = other DNA
gctccatccttgtccaggagacacacgtggcttccagagaggcgcagcccagccctccgcagccgctgaagccaggctcg

SEQ ID NO: 178069 - DNA, 80 bp, synthetic construct
  source 1..80: mol_type = other DNA
tgtgacacagttaaatatactaagagcatcttatcaaatcaaggaccctttaaagggtttaatgaggtttcaacagcatt

SEQ ID NO: 178070 - DNA, 80 bp, synthetic construct
  source 1..80: mol_type = other DNA
ctatacagtcacctgacaatgcgcggggagatgatgtacagaatactggtgaacatattcaggaccccgggccgtggcct

SEQ ID NO: 178071 - DNA, 80 bp, synthetic construct
  source 1..80: mol_type = other DNA
acatgataagcaaaggaccgtacgggggaggcatgactaccacaaaatttactctgagaatactgtacgacgagcttacc

SEQ ID NO: 178072 - DNA, 80 bp, synthetic construct
  source 1..80: mol_type = other DNA
tactcattttccacttggatgcggaaaactcatggcaataaactaggcctccttcaagtggaggttttgaataggcttac

SEQ ID NO: 178073 - DNA, 80 bp, synthetic construct
  source 1..80: mol_type = other DNA
ctcagacacttccattgtgctgatgaacaaggtataactgattatatccatatgcttggagaagcttttggtagtggatt

SEQ ID NO: 178074 - DNA, 80 bp, synthetic construct
  source 1..80: mol_type = other DNA
agggatgggctcacgcggaaagaagccccgcaacttccccgtggcccaagctcctcaggggctgataccaacagcacccc

SEQ ID NO: 178075 - DNA, 80 bp, synthetic construct
  source 1..80: mol_type = other DNA
tctttacaaaatggcggctacagccttccggtttacacaaaatggcggcaaatagcttccgggtcaaagttcacagctac

SEQ ID NO: 178076 - DNA, 80 bp, synthetic construct
  source 1..80: mol_type = other DNA
caagagcatgctgtgggcccactgcggtcgcttcttgcgttatcatctgctcccgctgctgctgtgtagactgccattct

SEQ ID NO: 178077 - DNA, 80 bp, synthetic construct
  source 1..80: mol_type = other DNA
cacattggactggttcattgaggttcacatttcttttctgtggcagcatgatggctacgggaaaattgcttcttagttat

SEQ ID NO: 178078 - DNA, 80 bp, synthetic construct
  source 1..80: mol_type = other DNA
acaactacgtgggtcagaccagcgcgcccaatgcacccacggccatagtcactaacagggactccattactaccatgcca

SEQ ID NO: 178079 - DNA, 80 bp, synthetic construct
  source 1..80: mol_type = other DNA
aagagtgcccaacttgacagcagtggaaacaggtcacacatcgcaagtggtgcctggtgacaccatgcagaccaggcacg

SEQ ID NO: 178080 - DNA, 80 bp, synthetic construct
  source 1..80: mol_type = other DNA
aaggggaggacattggtcatgtagttattcaatacatgtacgtaccaccaggggccccgttgccaaacaaacgcaatgat

SEQ ID NO: 178081 - DNA, 80 bp, synthetic construct
  source 1..80: mol_type = other DNA
gtctcggacaagatcacggcgcgcaacatgccgcgcgccttttccttctacctgctgacgagcgcgcagcgcgggtacga

SEQ ID NO: 178082 - DNA, 80 bp, synthetic construct
  source 1..80: mol_type = other DNA
aatgaccacggccgggataagggtgtaaaccttgcagaatggattggtcggacacccataagacaggggcaccccaaaat

SEQ ID NO: 178083 - DNA, 80 bp, synthetic construct
  source 1..80: mol_type = other DNA
aagtggtcaacacagggccattcggacaacaatccggggccgtatatgtgggcaactacagagtagtgaacagacacctt

SEQ ID NO: 178084 - DNA, 80 bp, synthetic construct
  source 1..80: mol_type = other DNA
ctaaagagaatgggaaggttcagactgctgtttgcaacgcagcaatgggcgtcggtgtgggtaatctaacaatcttcccg

SEQ ID NO: 178085 - DNA, 80 bp, synthetic construct
  source 1..80: mol_type = other DNA
gagctgttcactacctggagaataagttatcttcagacatatcaactcaggcgaaaacttgagttcttcacttactccag

SEQ ID NO: 178086 - DNA, 80 bp, synthetic construct
  source 1..80: mol_type = other DNA
agttaaagatgttctaaccaaaggtattccaactctacaatcacctacagtggaagcttgtgggtattcagatagaataa

SEQ ID NO: 178087 - DNA, 80 bp, synthetic construct
  source 1..80: mol_type = other DNA
tcatgaacaacaagtggtacttcaccagagacttctgtaacataggcctcttccagctctgggccacaggcttagaactc

SEQ ID NO: 178088 - DNA, 80 bp, synthetic construct
  source 1..80: mol_type = other DNA
cactgtacaaactgatgtgtatagcacaaggcccctatactggcttgccacagccaaaaccaagaaaaccagaattgaga

SEQ ID NO: 178089 - DNA, 80 bp, synthetic construct
  source 1..80: mol_type = other DNA
tcttttccgcgtcttgtctcttcgtgtgtccccagggacccgcgtgtctgcgtgtgtggttgtgcagtgtgcccggggcc

SEQ ID NO: 178090 - DNA, 80 bp, synthetic construct
  source 1..80: mol_type = other DNA
acacatatgatgccaaaacaaacaaagacaagttaacacaattaagaaatgcctactttaaacaactaacctctgaggga

SEQ ID NO: 178091 - DNA, 80 bp, synthetic construct
  source 1..80: mol_type = other DNA
ttttttgctcatatgctgtaaggtgttcgaggatcgtggggagtatatgtgttgaatcggaatcatgtttactgaccgcg

SEQ ID NO: 178092 - DNA, 80 bp, synthetic construct
  source 1..80: mol_type = other DNA
tgagaaaacccggagcccatgttctcggcccggtccaggaagaaggagtgctccagcagatgcctcttgaacatggcaat

SEQ ID NO: 178093 - DNA, 80 bp, synthetic construct
  source 1..80: mol_type = other DNA
ggagtagtctttaatacatttagaacagaagaacacattaaagaccctggaattaaaacatgtacagattcagctaatag

SEQ ID NO: 178094 - DNA, 80 bp, synthetic construct
  source 1..80: mol_type = other DNA
atccatacttgaaagagtggaatatcacagtggatgattatgacgttgttattgctaagttgatgcccatggtgtttgac

SEQ ID NO: 178095 - DNA, 80 bp, synthetic construct
  source 1..80: mol_type = other DNA
tcctgggtccaagatggctcctcgcagatccaccatctccaggcgcaacccacaatcttcgatgaatgtcaattccaaca

SEQ ID NO: 178096 - DNA, 80 bp, synthetic construct
  source 1..80: mol_type = other DNA
ttaaagataacacctatgagaactggagaagctggtggacaatagacttctatgcctctaaagcagacagcctatatggc

SEQ ID NO: 178097 - DNA, 80 bp, synthetic construct
  source 1..80: mol_type = other DNA
atggaagaatatcgtattccactcacagtaggcaaagtgaatgaccaagtgtttggtaccagaatgtttataggagatgg

SEQ ID NO: 178098 - DNA, 80 bp, synthetic construct
  source 1..80: mol_type = other DNA
tataaataccaattggatatggaagcaattgctgcagaagggaagaagtatggtttaactataacacctgcagataaatc

SEQ ID NO: 178099 - DNA, 80 bp, synthetic construct
  source 1..80: mol_type = other DNA
caagtatggtcttgatttaccaatgataacttttctgaaagatgaattaagaaaaccagaaaagataaaagctggaaaaa

SEQ ID NO: 178100 - DNA, 80 bp, synthetic construct
  source 1..80: mol_type = other DNA
ttaaacacacggtctgggtgtccactccaagagccacgtgacggctagtactctggtacttcggtacctttgtacgccgg

SEQ ID NO: 178101 - DNA, 80 bp, synthetic construct
  source 1..80: mol_type = other DNA
actatcacttaatgaccccagaagatcaactaaatttaatcactccccatgtcaatagagacttagcagttgtatacact

SEQ ID NO: 178102 - DNA, 80 bp, synthetic construct
  source 1..80: mol_type = other DNA
ttccaacacatcagatgagaacatgcttgagacgcgctgtgttatcaattcacacagtgttgctgaaacctcagtatccc

SEQ ID NO: 178103 - DNA, 80 bp, synthetic construct
  source 1..80: mol_type = other DNA
ccgttcacagactcagtgttaacaggacctatgctgcatcccggcatactcatgaacaccagaaaaaagataatcattcc

SEQ ID NO: 178104 - DNA, 80 bp, synthetic construct
  source 1..80: mol_type = other DNA
tcttattaacaataggacaaaagacataagtagacttaaacaagcaattgataaatatggtgttgatttgcccatggtta

SEQ ID NO: 178105 - DNA, 80 bp, synthetic construct
  source 1..80: mol_type = other DNA
aaatcggagaacctctgcaagcttatccatcaacatggtagtagcacagttgagagaggaaagcagtgccagaaagaaaa

SEQ ID NO: 178106 - DNA, 80 bp, synthetic construct
  source 1..80: mol_type = other DNA
atcaggtaaaggatacttactatatgaaaaaattagaaaacatttaccatactataatacaacacaaacacaggcacaac

SEQ ID NO: 178107 - DNA, 80 bp, synthetic construct
  source 1..80: mol_type = other DNA
atgcttactcacacttttatgacggctttgctaaagtgcccttgaaatccgatgcaaacgatcaagtgggggactccctc

SEQ ID NO: 178108 - DNA, 80 bp, synthetic construct
  source 1..80: mol_type = other DNA
gcgctggagacggcggccttttgcgggcccaggacgggtggcttttgcgctgggaacggtggtggcaccggagacggcgt

SEQ ID NO: 178109 - DNA, 80 bp, synthetic construct
  source 1..80: mol_type = other DNA
ttagcagcaatgcacaccaggctgactgccttagcagtgtggccctttattgtggcatcctaaggagggattctggagtg

SEQ ID NO: 178110 - DNA, 80 bp, synthetic construct
  source 1..80: mol_type = other DNA
caatagaaagggaaataaacaaaatacaatacattcttaactgcttaggtagtttagtcttaattttaggaacactctat

SEQ ID NO: 178111 - DNA, 80 bp, synthetic construct
  source 1..80: mol_type = other DNA
tcgatggtttccctcactcgacgaccaagagcaagaaggcgtctcgagttcaggggaaacaagctcgcagtcctcgcaag

SEQ ID NO: 178112 - DNA, 80 bp, synthetic construct
  source 1..80: mol_type = other DNA
cagtatgacccgttcggaggaggctttagcacactacaattcactctagagacactctttgaagagtatgaaaaactgca

SEQ ID NO: 178113 - DNA, 80 bp, synthetic construct
  source 1..80: mol_type = other DNA
aatcccttcccctcttttctatcacctccaattttccacgtaacttagaagcaaagtacatgagcccaataggagcggct

SEQ ID NO: 178114 - DNA, 80 bp, synthetic construct
  source 1..80: mol_type = other DNA
aaccaggcacaccacaaggcacacaaccaccacaaaagccagatagccaagacggagaccaaatatatgaaaactttact

SEQ ID NO: 178115 - DNA, 80 bp, synthetic construct
  source 1..80: mol_type = other DNA
ttcctaatagcatacacccctccaggtgctagcatcccagctagtcgcaccgacgcaatgcttggcacacacattgtgtg

SEQ ID NO: 178116 - DNA, 80 bp, synthetic construct
  source 1..80: mol_type = other DNA
ttgatttagaaatgacattcgttttaactgaaaggtattacactcagaattctggacatgcaagatcacaagtgtaccaa

SEQ ID NO: 178117 - DNA, 80 bp, synthetic construct
  source 1..80: mol_type = other DNA
cccaccggcgctagcgcggttagttcctcgtggctcatggtggatgaacggaagacaatggctacgccgccactgagtga

SEQ ID NO: 178118 - DNA, 80 bp, synthetic construct
  source 1..80: mol_type = other DNA
tttagaagagtctttggtaacctatatgctagcttccatgccaacccaggaatcctcactggttctgctatcggttgtga

SEQ ID NO: 178119 - DNA, 80 bp, synthetic construct
  source 1..80: mol_type = other DNA
ggtctgagccttatgtattgaagaatttcccaaattatactgcagtgactcacgtcaccgccaaccgtcccaccattaca

SEQ ID NO: 178120 - DNA, 80 bp, synthetic construct
  source 1..80: mol_type = other DNA
gatgacatagcataccctggaccctacggtggaggaatatcctccatgagattcacactcagaatactatatgaccaatt

SEQ ID NO: 178121 - DNA, 80 bp, synthetic construct
  source 1..80: mol_type = other DNA
actcaatagactaacctacaactattctagcccacatgaagtgtattgtattgtgcaaggtaaaatgggggatgatgcta

SEQ ID NO: 178122 - DNA, 80 bp, synthetic construct
  source 1..80: mol_type = other DNA
ttgcaacaaatgcacaaaaatacttccaggctagatcaggatcagtagtaacagcctcaaaatatctaaaccataaaaca

SEQ ID NO: 178123 - DNA, 80 bp, synthetic construct
  source 1..80: mol_type = other DNA
atccacatattatacatggctgaacaaggatttctcagagtagctcatacatatgacactgaagttaacagggagaaatt

SEQ ID NO: 178124 - DNA, 80 bp, synthetic construct
  source 1..80: mol_type = other DNA
gaaaaaaccacctcctgatatgagctactggaggccgcctgtacacaatgtcccggggctcgagcacctctggtacgagt

SEQ ID NO: 178125 - DNA, 80 bp, synthetic construct
  source 1..80: mol_type = other DNA
tttttcacaagatccttccaaattcacccaaccattggcagaggcattaaccaaccccgctctaatgtcacccagtgttg

SEQ ID NO: 178126 - DNA, 80 bp, synthetic construct
  source 1..80: mol_type = other DNA
ccttaactcatcaggtcatgtacatcccacccggtggcccaatccccaaatccactacagattatgcatggcaaacatca

SEQ ID NO: 178127 - DNA, 80 bp, synthetic construct
  source 1..80: mol_type = other DNA
gctccgaaaacagctcaaggagcagaagctcctcaagtgccaggtccaacacctcatacaccagttaataaaaacccaac

SEQ ID NO: 178128 - DNA, 80 bp, synthetic construct
  source 1..80: mol_type = other DNA
ctctggagcaagagcgaaaccgatggcagtaggccaaggacttccggtgtatatcacacctggatcaggtcagtttatga

SEQ ID NO: 178129 - DNA, 80 bp, synthetic construct
  source 1..80: mol_type = other DNA
ggttggtcgctccgttgcaaccccagcaacagacctggcagatgaggctgagcattccccaccagcgatggtggctcagc

SEQ ID NO: 178130 - DNA, 80 bp, synthetic construct
  source 1..80: mol_type = other DNA
cacttagtccagcagcagatgagaggctagcacacaccatgttaggggaaatactgaattattacacccactggacagga

SEQ ID NO: 178131 - DNA, 80 bp, synthetic construct
  source 1..80: mol_type = other DNA
tcataagaatcctggagtcctaacaggttcagcagtgggatgtgatccagatgtattttggtcagtaataccatgtcttt

SEQ ID NO: 178132 - DNA, 80 bp, synthetic construct
  source 1..80: mol_type = other DNA
ggagcaagcaattgaacagactgtaaacaggactctcaatgcaagtttagatagagtgggtacccacacaacagcacaaa

SEQ ID NO: 178133 - DNA, 80 bp, synthetic construct
  source 1..80: mol_type = other DNA
agctattccactacagatggacaacaccctatttgccaccactcttgtgggagaaatactcaattactactctaactggt

SEQ ID NO: 178134 - DNA, 80 bp, synthetic construct
  source 1..80: mol_type = other DNA
tgacatggaaatcaccgtggtcattacaagctcgcaagatcagtctacatcacaaaaccagaatgcaccagtgctaacac

SEQ ID NO: 178135 - DNA, 80 bp, synthetic construct
  source 1..80: mol_type = other DNA
tggaacagggcatcactgactacgttagtgggttgggagcagcttttggagtaggtttcagtactgagatctctagcagg

SEQ ID NO: 178136 - DNA, 80 bp, synthetic construct
  source 1..80: mol_type = other DNA
agacaggtattttgtaatcaaagttaaggcttatgattggtacgaagtccaagaaacagtatattaccctaaacatatcc

SEQ ID NO: 178137 - DNA, 80 bp, synthetic construct
  source 1..80: mol_type = other DNA
agtctcattattgttccacaaagataatatttcctaatcatttttgacctgttgatacctctattggtcttagtgataat

SEQ ID NO: 178138 - DNA, 80 bp, synthetic construct
  source 1..80: mol_type = other DNA
aaacttctcatccacaaacatcactgataagagggacagcatcacctacataccagatactgttaagccagacgtgtcaa

SEQ ID NO: 178139 - DNA, 80 bp, synthetic construct
  source 1..80: mol_type = other DNA
ggttaacacgattgaggcatatagagtccccgtgaagtcaatgagcggaagtgctacacaagtctttggtttcaagctgc

SEQ ID NO: 178140 - DNA, 80 bp, synthetic construct
  source 1..80: mol_type = other DNA
tttatcaacttatattttgataacttcattttgaaaactctaagtttattcataacaatgggggctcaagttactagaca

SEQ ID NO: 178141 - DNA, 80 bp, synthetic construct
  source 1..80: mol_type = other DNA
tggattcactccattgaatatttttactccaaatataattcgtgtggtcttactaattagaaatacttatcacaatggga

SEQ ID NO: 178142 - DNA, 80 bp, synthetic construct
  source 1..80: mol_type = other DNA
gaagtctagattgattgaggctagctctttgaatgattcagttgcgatgaggcaagcttttggcaacctgtacgccacct

SEQ ID NO: 178143 - DNA, 80 bp, synthetic construct
  source 1..80: mol_type = other DNA
atgtaaaatctaacagagacagcaactatgactggtttccctttaccccttataccactgcaaataaccaaaaaataaga

SEQ ID NO: 178144 - DNA, 80 bp, synthetic construct
  source 1..80: mol_type = other DNA
attaggcgactctgcatcagcatcgcttaagtatgagtgggcagcagagaggctcggttattttggttcctgaacatctg

SEQ ID NO: 178145 - DNA, 80 bp, synthetic construct
  source 1..80: mol_type = other DNA
tccaacaaattctcaagcagtgccagcacttactgcagtggagaccgggcacacttcgcaagtagtacctggtgatacca

SEQ ID NO: 178146 - DNA, 80 bp, synthetic construct
  source 1..80: mol_type = other DNA
actcagactgagacgcagacgcaggtggagacgaaagagaatagtactgactcagtggaacccccaaactgttagaaagt

SEQ ID NO: 178147 - DNA, 80 bp, synthetic construct
  source 1..80: mol_type = other DNA
ttgacaaaccaactcatccagacacatcctcaaatagattttatacattggaaagtaaagaatggaaaagtgactctaag

SEQ ID NO: 178148 - DNA, 80 bp, synthetic construct
  source 1..80: mol_type = other DNA
tccaggtgttgaaagacaagtattacacacaaatgtcagttacaccagataccgcaggtacaaaaaaagacgacgaaatt

SEQ ID NO: 178149 - DNA, 80 bp, synthetic construct
  source 1..80: mol_type = other DNA
atacaggaactgcaggagactgttcagaatgttatcactgagaagttgctcaaaaacctagttaagatagtgtccgcact

SEQ ID NO: 178150 - DNA, 80 bp, synthetic construct
  source 1..80: mol_type = other DNA
aatactaccttgaaactcctgattgcatacacaccccctggtgttcctaaaccagatactaggaagaaagctatgcttgg

SEQ ID NO: 178151 - DNA, 80 bp, synthetic construct
  source 1..80: mol_type = other DNA
cgccggcgggcccggggtgttgcggagacggggggtgtgcgggacggtagtgaggacaggggtttcgctggggccgaggc

SEQ ID NO: 178152 - DNA, 80 bp, synthetic construct
  source 1..80: mol_type = other DNA
acttataaacactatcctaatgtttatcaccacaatggggatcatttatatgatttataaaatgtttgcacagatgcagg

SEQ ID NO: 178153 - DNA, 80 bp, synthetic construct
  source 1..80: mol_type = other DNA
atttgattcagaagtaactatggtaccatgcatcgcaggacatggtagtgacataggtcatatagttatgcaatacatgt

SEQ ID NO: 178154 - DNA, 80 bp, synthetic construct
  source 1..80: mol_type = other DNA
tccaaacatacaagaaagccatccgaccacatcaaatgctgctcctgtacttgatgctgcagaaacagggcacacaagca

SEQ ID NO: 178155 - DNA, 80 bp, synthetic construct
  source 1..80: mol_type = other DNA
aatttgcataagatgcccatacacagaaccaccactaacaggcccagatgacaactcaggctttgtactattatcagaga

SEQ ID NO: 178156 - DNA, 80 bp, synthetic construct
  source 1..80: mol_type = other DNA
atataagtttaaacttaactaaacatccaccactctcccaaatacgcaggcgcacaagggggctccgcccccttacaccc

SEQ ID NO: 178157 - DNA, 80 bp, synthetic construct
  source 1..80: mol_type = other DNA
acaaagtgtggttataatggatgatatcatgcaaaatccagatggagaagacatgtcattattttgtcaaatggtgtcta

SEQ ID NO: 178158 - DNA, 80 bp, synthetic construct
  source 1..80: mol_type = other DNA
ggagataactttgcctactgggtgattagcacacgacaagtcgcccaactgcgccggaagctcgaaatgttcacgtatgc

SEQ ID NO: 178159 - DNA, 80 bp, synthetic construct
  source 1..80: mol_type = other DNA
gaatgttaccaccctgctttccgacccatgccgctgcagaagctgctcatctgcgacccgcacgcgcgtttccccgtagc

SEQ ID NO: 178160 - DNA, 80 bp, synthetic construct
  source 1..80: mol_type = other DNA
gcctcctacaagtctcgaacccgaaactgctcggaccgaggacagtgttccacaagtgggacatcagacgtgggcagttt

SEQ ID NO: 178161 - DNA, 80 bp, synthetic construct
  source 1..80: mol_type = other DNA
gggtacggagagttctgtgaatctgaactaaactctgaagtgtggaacttatacatagtatgcattatatgtccgtacac

SEQ ID NO: 178162 - DNA, 80 bp, synthetic construct
  source 1..80: mol_type = other DNA
ccagatcaaagttactgctggtaatgtgcaggataaaaacgcaatattttccttccagttaaatccaggcaatagcaccg

SEQ ID NO: 178163 - DNA, 80 bp, synthetic construct
  source 1..80: mol_type = other DNA
acaattgaaaatttcctcgcacgttcagcctgtgtgtactttcttgagtacgagactggtaccaagactgactccaacgc

SEQ ID NO: 178164 - DNA, 80 bp, synthetic construct
  source 1..80: mol_type = other DNA
ctcaccaccgactgtagcccatagtgatgctttaaatagaagatttgcatttgatatggaaatttgtccaatgtcacaat

SEQ ID NO: 178165 - DNA, 80 bp, synthetic construct
  source 1..80: mol_type = other DNA
taacaatcatgatacgtaatagcgcagacatcccaaccatcaccgccacattggcactactgggttgttcgggctcacca

SEQ ID NO: 178166 - DNA, 80 bp, synthetic construct
  source 1..80: mol_type = other DNA
gggctttaacaggtggacttatagcaacgaggacctggacctagccctctactacgggtgcaaatgggtcttctacagac

SEQ ID NO: 178167 - DNA, 80 bp, synthetic construct
  source 1..80: mol_type = other DNA
cagatccaggagacaccttttacggactggtgaccatcaatgacttcggaaccctggcagtgagggtagtaaatgagtat

SEQ ID NO: 178168 - DNA, 80 bp, synthetic construct
  source 1..80: mol_type = other DNA
ggtaatggaagacaaggtttttcagctcagcttaaaaaacagtattttgtccaaaaacaaggtgaaataattagtaagaa

SEQ ID NO: 178169 - DNA, 80 bp, synthetic construct
  source 1..80: mol_type = other DNA
tcctattcttcatcttactcatctggctgctcagcttggctaccaacccagtccgtcgtcgcgtggtggttctgggaatc

SEQ ID NO: 178170 - DNA, 80 bp, synthetic construct
  source 1..80: mol_type = other DNA
aatatggagattgcagctgctcactacacagcacagttgtcaaccttagatattaacacagagcccctatctttagagga

SEQ ID NO: 178171 - DNA, 80 bp, synthetic construct
  source 1..80: mol_type = other DNA
catactcatgctaaacaagaggcacatactaataccctccctgaaaaccagacccagcagaaaacacagagtggtcatca

SEQ ID NO: 178172 - DNA, 80 bp, synthetic construct
  source 1..80: mol_type = other DNA
atgatccaccgcattcgatctcaaacacggttgcaaacaccaaccctagtggtccaaccaactcagaaaggatcccagcg

SEQ ID NO: 178173 - DNA, 80 bp, synthetic construct
  source 1..80: mol_type = other DNA
gcccatgctgtggttccaacaacaagtactcaatgacatctcaaagactggaccgtacgcctacagagacgaatataaaa

SEQ ID NO: 178174 - DNA, 80 bp, synthetic construct
  source 1..80: mol_type = other DNA
ggtcaccaatgacggcctaaaggccaacacatccttgaaggagggcgtaggaatggtaccaaactcggggcccaccccat

SEQ ID NO: 178175 - DNA, 80 bp, synthetic construct
  source 1..80: mol_type = other DNA
cacgtggcccacgcgctgcgccggcccgcgtcccgcgccgtcggctcacaacacggcgctttcttcctcgcacgccatct

SEQ ID NO: 178176 - DNA, 80 bp, synthetic construct
  source 1..80: mol_type = other DNA
gtagagctgggtagacctgtcgttgtattgggagcagcaaatccagttgtatttaaggtaggggaggtggtggtgctctc

SEQ ID NO: 178177 - DNA, 80 bp, synthetic construct
  source 1..80: mol_type = other DNA
agagacaggacacacctctcaagttgagcctagtgatacagtgcaaacgcggcatgtcattaactcgcacagtaggacag

SEQ ID NO: 178178 - DNA, 80 bp, synthetic construct
  source 1..80: mol_type = other DNA
aaaagtaggctaattgaagcatctagcttaaatgattcagtaaatatgagggtgaaactaggtaatctctataaggcctt

SEQ ID NO: 178179 - DNA, 80 bp, synthetic construct
  source 1..80: mol_type = other DNA
gcaccctctcgccctgcataggcttctatgcactaaaaccatccatatatacctcacttagcaacttaccagcaaaagta

SEQ ID NO: 178180 - DNA, 80 bp, synthetic construct
  source 1..80: mol_type = other DNA
tggatggagatgttaagaagcttgctgaagtagtcgctgaatctatgtccaacacagatgatgatgaaattaaagaacaa

SEQ ID NO: 178181 - DNA, 80 bp, synthetic construct
  source 1..80: mol_type = other DNA
ccacaaactgacaacacttgcatcagtttccaggtactaagttcctgttacaacaacttcctcagcattaacgccttccc

SEQ ID NO: 178182 - DNA, 80 bp, synthetic construct
  source 1..80: mol_type = other DNA
tttgatgctcttgggaaagtattagaccaactaggatttccaggtcacttgatgaggaggttgaacaacaccagacacat

SEQ ID NO: 178183 - DNA, 80 bp, synthetic construct
  source 1..80: mol_type = other DNA
cgactgggcctagctgtttcttccatggaacagatgcttgcatctatgagaatcatgatcccagggaagcccccggaaaa

SEQ ID NO: 178184 - DNA, 80 bp, synthetic construct
  source 1..80: mol_type = other DNA
aaggctacataccaatagcttacagatttaactggtacccatgcatatttcaccaaagaaatgtaattaatgacatagta

SEQ ID NO: 178185 - DNA, 80 bp, synthetic construct
  source 1..80: mol_type = other DNA
tacgcaagctgggagataaacaccaggcaagtggcacagctgagaagaaagctcgaattcttcacttacatcaggtttga

SEQ ID NO: 178186 - DNA, 80 bp, synthetic construct
  source 1..80: mol_type = other DNA
cattttgttttacaaaatggcgtacttccttcctgtttttcaaaaataacggcccggcggcggcgcgcgcgctgcgcgcg

SEQ ID NO: 178187 - DNA, 80 bp, synthetic construct
  source 1..80: mol_type = other DNA
aatggtagaataacctataggttattaacctagtggtggaatagggtattgcagctgggtatatacctataggtatatag

SEQ ID NO: 178188 - DNA, 80 bp, synthetic construct
  source 1..80: mol_type = other DNA
tttgcacccttggattacactgcacaagcatctgagtacgtccctgtgactgtcacaattgccccaatgtgcgctgagta

SEQ ID NO: 178189 - DNA, 80 bp, synthetic construct
  source 1..80: mol_type = other DNA
cgcaccaaatcatcaataacagcgcgacgattgtggcaccttatgtgaattcactggcaattgactgcatggcaaaacac

SEQ ID NO: 178190 - DNA, 80 bp, synthetic construct
  source 1..80: mol_type = other DNA
tttttatctgcaggaagattggcaactgaaattacaggcctatatacagatgttatatacaacccatacacagacaaagg

SEQ ID NO: 178191 - DNA, 80 bp, synthetic construct
  source 1..80: mol_type = other DNA
cagagacatagtctacaaccccctactagacaaggcccagggcaacaagatctggttccaatatcataccaagtgtgata

SEQ ID NO: 178192 - DNA, 80 bp, synthetic construct
  source 1..80: mol_type = other DNA
gctttagattttacagacacccagatgtggactttatagtaacctgggagacctcagcaccctttacagacagtgtagtg

SEQ ID NO: 178193 - DNA, 80 bp, synthetic construct
  source 1..80: mol_type = other DNA
gtgcgtgctctacgtcacgccagacttggacttttactgggtgctgccgggcggctttgccgtctcttcgcgcgtcactc

SEQ ID NO: 178194 - DNA, 80 bp, synthetic construct
  source 1..80: mol_type = other DNA
tgcaatgatttcagtgtacggttactgcgcgacacaacgcacatttcgcagacggccatgccacaaggggtggatgatct

SEQ ID NO: 178195 - DNA, 80 bp, synthetic construct
  source 1..80: mol_type = other DNA
aacaaatgatatgggttccctgtgttctcgtatagtcaccgaagagcacggatcccgtgttgatatttcaactagggtat

SEQ ID NO: 178196 - DNA, 80 bp, synthetic construct
  source 1..80: mol_type = other DNA
tgaaattctaaattacttctcaaactggtcaggttcaatcaaattaacattcctgtgtgtgtgtgatagttttagcactg

SEQ ID NO: 178197 - DNA, 80 bp, synthetic construct
  source 1..80: mol_type = other DNA
atgccaagtttggcaatggcaaatggatagacgggacaggtttcatcccggtagaattccagagcaggtggaaaccagca

SEQ ID NO: 178198 - DNA, 80 bp, synthetic construct
  source 1..80: mol_type = other DNA
cacgctcaggtcaggaagaaatttgaaatgttcacctatgtgcgctgtgatctagaggtcacagttgttacaaacaactc

SEQ ID NO: 178199 - DNA, 80 bp, synthetic construct
  source 1..80: mol_type = other DNA
aaatacagctataacagagggatccttccacgcccctcaaatacaaaaagacaaaacacctataggtacagactacttta

SEQ ID NO: 178200 - DNA, 80 bp, synthetic construct
  source 1..80: mol_type = other DNA
ctttggcatgggcaagtggatagacggaaatggatacattccactactagaaagaggacggtggtatgttatgcttagat

SEQ ID NO: 178201 - DNA, 80 bp, synthetic construct
  source 1..80: mol_type = other DNA
aagacatactggaacgccctaataggcaccaacgacctggccactaatataggccaggccagagcagaaaggttcgagta

SEQ ID NO: 178202 - DNA, 80 bp, synthetic construct
  source 1..80: mol_type = other DNA
cccccgccgccattttgtgcagcccgccaatttctattcaaacaggccaatcagcgtctactacgtacacttcctggggt

SEQ ID NO: 178203 - DNA, 80 bp, synthetic construct
  source 1..80: mol_type = other DNA
gtaacagtcaccactgataaaggagagtttacaggactgggaatacatgaaagaatactggttataccaacccatgcaca

SEQ ID NO: 178204 - DNA, 80 bp, synthetic construct
  source 1..80: mol_type = other DNA
agtccagcgcgtttacgtaagccagacagcagccaattgtcagttctagggagggggaccactgcccctggtataaagtg

SEQ ID NO: 178205 - DNA, 80 bp, synthetic construct
  source 1..80: mol_type = other DNA
ggagatacatattacggtctggtttccatcaatgactttggatccttagctatcagagtagtgaatgaattcaatcccgc

SEQ ID NO: 178206 - DNA, 80 bp, synthetic construct
  source 1..80: mol_type = other DNA
gcataaaaaatgaggccagaatagtcatgagatgtccctacacatacccccaaatgattaaacacacaaacgaaaactat

SEQ ID NO: 178207 - DNA, 80 bp, synthetic construct
  source 1..80: mol_type = other DNA
ggattgccaacgacaaccctgccaggttcgggacagtttctcaccactgatgataggcaatcccccagtgcactaccaaa

SEQ ID NO: 178208 - DNA, 80 bp, synthetic construct
  source 1..80: mol_type = other DNA
atagctgtgcttgtcttcctcttccggatgacagacaaagaggcgcagctgccggctaagaccaccgcccctgtccacct

SEQ ID NO: 178209 - DNA, 80 bp, synthetic construct
  source 1..80: mol_type = other DNA
tgtaatggaacaggtagccgacatacgcacttttggcttcggacaccagaacaaggccatttatgtggcagggtacaaga

SEQ ID NO: 178210 - DNA, 80 bp, synthetic construct
  source 1..80: mol_type = other DNA
aggcggcggtgaggcaggggtcgcaggcgcaggaggagctttcgcagacgttactatacgcgacgcagacgcaggtggcg

SEQ ID NO: 178211 - DNA, 80 bp, synthetic construct
  source 1..80: mol_type = other DNA
cccagataggaagcccactaaggaagattggcagaccgagtatgagacctgcagagcctttgatagaccccctagaacct

SEQ ID NO: 178212 - DNA, 80 bp, synthetic construct
  source 1..80: mol_type = other DNA
ccccatctcccccagttccccgcgcggcgcgcccctgcccggcagtcttgagcgtggcgtggaggttggtgaggaaggtc

SEQ ID NO: 178213 - DNA, 80 bp, synthetic construct
  source 1..80: mol_type = other DNA
cggactacaaaagtcgccatttcagtgacgtcacagcggccattttaagtaaggcggaaccaggctgtcactgacacaaa

SEQ ID NO: 178214 - DNA, 80 bp, synthetic construct
  source 1..80: mol_type = other DNA
aaacagtaggcctagtaatagtacaatgcccatacacagtaccccccttgtatgacaaagagaacccaaacatggggttc

SEQ ID NO: 178215 - DNA, 80 bp, synthetic construct
  source 1..80: mol_type = other DNA
gctggctatggaagctagtgccaataaatatgatagcagaaccagaggacgaggaaacccattgtctggtgcatccagca

SEQ ID NO: 178216 - DNA, 80 bp, synthetic construct
  source 1..80: mol_type = other DNA
cccccctggaacaagttcctcagagccgcgcgctacgccttcggctgcgcgcggcacttcggaccgcccctccacccgaa

SEQ ID NO: 178217 - DNA, 80 bp, synthetic construct
  source 1..80: mol_type = other DNA
ttgcctacaaaaagaaatgattatacatggcaatctggaactaatgcatcagtgttttggcagcatggtcagacttaccc

SEQ ID NO: 178218 - DNA, 80 bp, synthetic construct
  source 1..80: mol_type = other DNA
ctatgtgttcagagttttcaggtgctagaaatcaatctactaagcaaggcttacctgttatgctaactccaggctctgca

SEQ ID NO: 178219 - DNA, 80 bp, synthetic construct
  source 1..80: mol_type = other DNA
acactacagttaattgttatgtaacaatgtttgtttattttcatgttcaataaacgctatgttaatgatgaagaacctgt

SEQ ID NO: 178220 - DNA, 80 bp, synthetic construct
  source 1..80: mol_type = other DNA
acaaaggtaaagaaagagcaccaaatgcactcaatgctataattggcaatagagacagtgttaaaaccatgcctcataat

SEQ ID NO: 178221 - DNA, 80 bp, synthetic construct
  source 1..80: mol_type = other DNA
tccttcgtgacgaagcagcagcggccactctttgttatacgtgagaatcacatctctgtccgggtgcagttcgtcgcgca

SEQ ID NO: 178222 - DNA, 80 bp, synthetic construct
  source 1..80: mol_type = other DNA
agattatgttacaaatcttggtagtgcctttggtgaaggtttcacaaactcaatcaaacaaacactcaccagtgcttgtg

SEQ ID NO: 178223 - DNA, 80 bp, synthetic construct
  source 1..80: mol_type = other DNA
gtacacttgtattacggtacatttgtacgccagtttgcctcccttccctacctcgtaactttagaagatacaactatatg

SEQ ID NO: 178224 - DNA, 80 bp, synthetic construct
  source 1..80: mol_type = other DNA
cctagccaattagctcagacaggaggaaagtatggactgacaattactccagcagataagtccagtaagtttgagaaggt

SEQ ID NO: 178225 - DNA, 80 bp, synthetic construct
  source 1..80: mol_type = other DNA
ataactgactttaataataaattgaaaatcacagattctttagagattcttttccagggacccgtctataaagatttgga

SEQ ID NO: 178226 - DNA, 80 bp, synthetic construct
  source 1..80: mol_type = other DNA
tattagaagcaagacaagtgtgtgttcccatctctcctagtcgccgcctggtcattcggtgctccactagaaaccctggt

SEQ ID NO: 178227 - DNA, 80 bp, synthetic construct
  source 1..80: mol_type = other DNA
acatgttttatgatggttatgatggaatatctgcagacaatgttaattacgggatttccagcacaaatgatatgggcacc

SEQ ID NO: 178228 - DNA, 80 bp, synthetic construct
  source 1..80: mol_type = other DNA
gaactgatcccccacgtccaccacgtcttggtcctggtggtattggctgcggtatagaaacccattcatgagcttagaga

SEQ ID NO: 178229 - DNA, 80 bp, synthetic construct
  source 1..80: mol_type = other DNA
gaaacgtaaacaggaagaacagcaacggcagctactggacggctaccaaaaaaaggtgcagcaggatttgcaacgcgtgg

SEQ ID NO: 178230 - DNA, 80 bp, synthetic construct
  source 1..80: mol_type = other DNA
ccatctataaatgtgcacacctaactgaacccaatgaaaacaccatactcctggctatatcatcagatctccaagttgac

SEQ ID NO: 178231 - DNA, 80 bp, synthetic construct
  source 1..80: mol_type = other DNA
tgtatccgtgtcctgacaacattccccgcaaacatgacatgggttaatttaaacatgttttgtttgcttgggaatgctct

SEQ ID NO: 178232 - DNA, 80 bp, synthetic construct
  source 1..80: mol_type = other DNA
ctgggaagaaggtacaagcagcagtgtgcaatgctggtatgggtgttggcgtaggaaatctaacgatattcccacaccag

SEQ ID NO: 178233 - DNA, 80 bp, synthetic construct
  source 1..80: mol_type = other DNA
cacattcaggaaagagtcgctcgtgatgtcgatacagcagaaatcccaagcagcccttagccggattacgacgcggaacg

SEQ ID NO: 178234 - DNA, 80 bp, synthetic construct
  source 1..80: mol_type = other DNA
ttcgaactcttcacctacctgcgttttgatatggagatcacctttgtcatcaccagtacgcaggaccctgggacccagtt

SEQ ID NO: 178235 - DNA, 80 bp, synthetic construct
  source 1..80: mol_type = other DNA
gggattgtccaagggcgaggcccctattgaatttgagagaacgagcacaacatcagaggttggggtggtgcaaaaggcag

SEQ ID NO: 178236 - DNA, 80 bp, synthetic construct
  source 1..80: mol_type = other DNA
ccagacgccgcacatgtgggcgcgctccatccgtctcatcggacacctgcgccactacctgcagaacagcttcctacacc

SEQ ID NO: 178237 - DNA, 80 bp, synthetic construct
  source 1..80: mol_type = other DNA
tgaaattctaaattatttctccaattggtcaggtagcatcaaagtcacttgtatgtgtgtgtgtgacagcttcagtacag

SEQ ID NO: 178238 - DNA, 80 bp, synthetic construct
  source 1..80: mol_type = other DNA
attcacagacgcacgagacagtaactttctctttgccacctatcacccagaccaagtcacagaagtcataaagcaaatga

SEQ ID NO: 178239 - DNA, 80 bp, synthetic construct
  source 1..80: mol_type = other DNA
cggggctgcgcgctggttaaacagaccgcctgccacgtcggcggccacattgtgcagcaggcgcgcggcggtttagcagc

SEQ ID NO: 178240 - DNA, 80 bp, synthetic construct
  source 1..80: mol_type = other DNA
gtggcaagcacattattcacgcagtcgggccgaatttcaacaaagtggcggagatggaaggtgataagcagctagccgag

SEQ ID NO: 178241 - DNA, 80 bp, synthetic construct
  source 1..80: mol_type = other DNA
tttaaagacgaaaactttccaacatcctggtacggtaacatggcaaactgtcacctgacaggaatatactctccaatata

SEQ ID NO: 178242 - DNA, 80 bp, synthetic construct
  source 1..80: mol_type = other DNA
ccaagctttgttttccaagtacaaaggaaatgttaattgtaacatgtctgaacatatgaaagttgctgtttcacactatt

SEQ ID NO: 178243 - DNA, 80 bp, synthetic construct
  source 1..80: mol_type = other DNA
cactcctgggactggcgacgggggttctttaatccaaaaactctcaaaagaatgcttgaaaaaccagatgatgatgcaga

SEQ ID NO: 178244 - DNA, 80 bp, synthetic construct
  source 1..80: mol_type = other DNA
gcgcaaatgttgttgttgcgtatggtgtgtggcctgagtacctgaatgacaacgaagctacggcggaagatcaaccaact

SEQ ID NO: 178245 - DNA, 80 bp, synthetic construct
  source 1..80: mol_type = other DNA
ctcgagaaagtcgcagaaggtctccacgaacgtgtcctcggtgaagcgaatgcgcttcagatcgtggacgtgtttgcgaa

SEQ ID NO: 178246 - DNA, 80 bp, synthetic construct
  source 1..80: mol_type = other DNA
tggtcagaaaactttactagtcacatagaagacaaaataagcaaaggaccctttgggggagggcatagtactagcagatg

SEQ ID NO: 178247 - DNA, 80 bp, synthetic construct
  source 1..80: mol_type = other DNA
taaacagaaaacaagcaaaagtactaatagaagacatacctctatgggcagccctatttggctacacagaatttgcagcc

SEQ ID NO: 178248 - DNA, 80 bp, synthetic construct
  source 1..80: mol_type = other DNA
tgaaattggaaaggtctcaatttacaacgtcacagtgacaaagaaggctcctaacagtgatggattaatcctatcaatac

SEQ ID NO: 178249 - DNA, 80 bp, synthetic construct
  source 1..80: mol_type = other DNA
acgcagttgcgagggtagcggacacaattggaagtggtccatcaaactcgcaagcagttcccgccttgacagcagtagaa

SEQ ID NO: 178250 - DNA, 80 bp, synthetic construct
  source 1..80: mol_type = other DNA
gctcaagtttcaagccaaaaagttggagcacacgaaaattcaaatagggcatatggtgggtctactattaactacactac

SEQ ID NO: 178251 - DNA, 80 bp, synthetic construct
  source 1..80: mol_type = other DNA
ctcaatgacgaacccagtcgctcaaggcctgccaacattgtcgaccccagggtccaaccagtttcttaccactgacaact

SEQ ID NO: 178252 - DNA, 80 bp, synthetic construct
  source 1..80: mol_type = other DNA
gggtgtttcttttcctcaacgggctcctccagtctcttataggaccagtcccgccggcgcgccagcatgtaggtcacgta

SEQ ID NO: 178253 - DNA, 80 bp, synthetic construct
  source 1..80: mol_type = other DNA
tgggaggtggctacctcccaagtgggcgagccctacttctacaatgctcactctaactgctctacctacattggggatct

SEQ ID NO: 178254 - DNA, 80 bp, synthetic construct
  source 1..80: mol_type = other DNA
ctgccagtacaacattgaaattgcttctggcatacacacctcctggtgtaggaaaaccaacatctaggagagaggcaatg

SEQ ID NO: 178255 - DNA, 80 bp, synthetic construct
  source 1..80: mol_type = other DNA
acccaatcctctctcagctataccgccctctagaggcatgctataataaatgctattgcaagaagtgttgctaccattgt

SEQ ID NO: 178256 - DNA, 80 bp, synthetic construct
  source 1..80: mol_type = other DNA
ggcgcgggatagcgtgcgctaccggatggcgggtaatacatgctatccttacattttggcattttgggcagctggaaggc

SEQ ID NO: 178257 - DNA, 80 bp, synthetic construct
  source 1..80: mol_type = other DNA
tttatctacctctaacgaatcacagtttatagagtcatttttaaaagctgcttttccagacgacaaacccagacatgcta

SEQ ID NO: 178258 - DNA, 80 bp, synthetic construct
  source 1..80: mol_type = other DNA
cagagacacacaactcctcaacgcactatacctaaacagaggattatactacagcgatgggagctcaggtatcatctcaa

SEQ ID NO: 178259 - DNA, 80 bp, synthetic construct
  source 1..80: mol_type = other DNA
ccgatgcgcgcctctatgtcgctctgacctatgaggaagccgggccgcggtttacgtttttccagtcgtcccgcggccac

SEQ ID NO: 178260 - DNA, 80 bp, synthetic construct
  source 1..80: mol_type = other DNA
agacaagttactcaaaaacttaatcaaaattgtatcagcactagtaattgtggcaagaaattatgaggattccattacag

SEQ ID NO: 178261 - DNA, 80 bp, synthetic construct
  source 1..80: mol_type = other DNA
ctggagtctagtaattatacctgtgtcacccctggcttctgaatctacggacaaagttccaataacaatctctataagtc

SEQ ID NO: 178262 - DNA, 80 bp, synthetic construct
  source 1..80: mol_type = other DNA
taataaaatcactagtaaaatagttaaatggacaattagaattatctcagctattactattataatcagaaacaatgctg

SEQ ID NO: 178263 - DNA, 80 bp, synthetic construct
  source 1..80: mol_type = other DNA
cagccagtattcacccagatttcaggctgcagatctgcacaacattcgttacgtgcaggggtgattgccatccacccaag

SEQ ID NO: 178264 - DNA, 80 bp, synthetic construct
  source 1..80: mol_type = other DNA
tcgcactaagcttgagccaagtgtctttcacgatgtgttcgaaggcactaaagagccagcagtgctgactagtaaagacc

SEQ ID NO: 178265 - DNA, 80 bp, synthetic construct
  source 1..80: mol_type = other DNA
gccgctgagattggagcatcgtcaaatgctagtgatgagagcatgattgagacacggtgtgttcttaattcgcacagcac

SEQ ID NO: 178266 - DNA, 80 bp, synthetic construct
  source 1..80: mol_type = other DNA
gggctcatgaaactggcttgaatgccagtggtaactccatcattcactacacaaacataaactactacaaagatgcagcc

SEQ ID NO: 178267 - DNA, 80 bp, synthetic construct
  source 1..80: mol_type = other DNA
tgagttgtttacctatatgcggttcgacatggaagtcacatttgttatcaccagtaggcaattgccaggaactagtattg

SEQ ID NO: 178268 - DNA, 80 bp, synthetic construct
  source 1..80: mol_type = other DNA
ggcaaggctcttaaagcgatcattcttaaaaatgtttattggcagggcatacagaaagaaaaggaaagtgcttctgctct

SEQ ID NO: 178269 - DNA, 80 bp, synthetic construct
  source 1..80: mol_type = other DNA
cgtggaaaactcagccattcggaagtgtagttacttatagtatgtcgtgcacttcctgggcgtggtctacgtcataatat

SEQ ID NO: 178270 - DNA, 80 bp, synthetic construct
  source 1..80: mol_type = other DNA
gcaatggaagcacaaaaacagggtttgcccacccgaatgcccagcggtgcacaacagtttatgacaactgaagatgaaca

SEQ ID NO: 178271 - DNA, 80 bp, synthetic construct
  source 1..80: mol_type = other DNA
gccgtgcgcgctaaaggtatcctcgcccgtcacggggtcgatgagccgcatcttgcggcagtaatccaagatgcgattga

SEQ ID NO: 178272 - DNA, 80 bp, synthetic construct
  source 1..80: mol_type = other DNA
aatggtactttactaggtaatgcgtttgtatttccgcatcaaataatcaacctgcgcaccaacaattgtgcaaccctggt

SEQ ID NO: 178273 - DNA, 80 bp, synthetic construct
  source 1..80: mol_type = other DNA
tcggagtccaactccgatacatcctccaagaagtcctcaaaacgcaagcgggtctccacctaaaccccctattattaggc

SEQ ID NO: 178274 - DNA, 80 bp, synthetic construct
  source 1..80: mol_type = other DNA
tcccattgagagtgaatgggactggccccaccactatccctattactgtttctgtggccccctataaatctgagttctct

SEQ ID NO: 178275 - DNA, 80 bp, synthetic construct
  source 1..80: mol_type = other DNA
gcggttattttaaacccaagcatgtgaaggcatgggtgcctcgtgcaccacgcttgtgcccgtacttgtatgcaagaaac

SEQ ID NO: 178276 - DNA, 80 bp, synthetic construct
  source 1..80: mol_type = other DNA
aaagcagggtcaacaatagagcgtgactttaattatgtacactacatattaaattgtctaggtagtcttgtactcatatt

SEQ ID NO: 178277 - DNA, 80 bp, synthetic construct
  source 1..80: mol_type = other DNA
tggacaatggtatttggataccatgactgggtaaaaaaagagctaaataactgggttgtttcagcacaagccagagtgct

SEQ ID NO: 178278 - DNA, 80 bp, synthetic construct
  source 1..80: mol_type = other DNA
cgtcatcgtcgcgccggcacgatgcagctggcccagcgcctgtgcgagctgctgatgtgccgtcgcaaagccgcgcctgt

SEQ ID NO: 178279 - DNA, 80 bp, synthetic construct
  source 1..80: mol_type = other DNA
gcactgtgcgcagagccatcaacagtgctacaaccatcgagtctgcggctaacacagctccaagttcacaccgattggag

SEQ ID NO: 178280 - DNA, 80 bp, synthetic construct
  source 1..80: mol_type = other DNA
agagtgtcagcagaaccagaaacttctgagtttttattctcaggcccaaaaaggccccgcatcgacctacccaagtacca

SEQ ID NO: 178281 - DNA, 80 bp, synthetic construct
  source 1..80: mol_type = other DNA
gatgtttttattcaaacagaaaccgccctagactacgcgttgggctcctggcttttcggcatacccgtgtgtctcggcgt

SEQ ID NO: 178282 - DNA, 80 bp, synthetic construct
  source 1..80: mol_type = other DNA
agaggatttaatcagctaaatacatttaaaacagaaggaggcatatctcatccacagctacagaaacctccgaaagcagg

SEQ ID NO: 178283 - DNA, 80 bp, synthetic construct
  source 1..80: mol_type = other DNA
aaatgaaaggcggctcagcagacgtacccctcagctggagagtcaagtggtatgttatgatgtaccaccaacaagaattt

SEQ ID NO: 178284 - DNA, 80 bp, synthetic construct
  source 1..80: mol_type = other DNA
tgtgattgtacacagtgcacttattactgcaagagtaaagatagatactacccaataacagttagaaagcatgattggta

SEQ ID NO: 178285 - DNA, 80 bp, synthetic construct
  source 1..80: mol_type = other DNA
atgggaccaacacggtacagacgattgtgacaaatgccggtatgggagtgggagtgggcaatctcactatatacccacat

SEQ ID NO: 178286 - DNA, 80 bp, synthetic construct
  source 1..80: mol_type = other DNA
tggatttacccctgaccacacgcacgcctgacttgattagaatcgttatattgataagacactaccatcacaatgggtgc

SEQ ID NO: 178287 - DNA, 80 bp, synthetic construct
  source 1..80: mol_type = other DNA
taactctaatagtgagataccatacttgtggacctcatgctcacacagccatcctctagtaagtttgtaagacgtctggt

SEQ ID NO: 178288 - DNA, 80 bp, synthetic construct
  source 1..80: mol_type = other DNA
ttacagacatgcttaaacacttaaaacagatgagtgcatataagagagaccatcgccaggaaccggtgtgtttgttgatc

SEQ ID NO: 178289 - DNA, 80 bp, synthetic construct
  source 1..80: mol_type = other DNA
tcaggtcattgtgtatgttagcttggcattcaggagaagaagaatatgagaaatttgtcaagggtatacgtagtaccagt

SEQ ID NO: 178290 - DNA, 80 bp, synthetic construct
  source 1..80: mol_type = other DNA
ggcctgcaaggcatgggatagacccatgaggcagaacctccaagatacccccttctacccctggatgcctaacaacttca

SEQ ID NO: 178291 - DNA, 80 bp, synthetic construct
  source 1..80: mol_type = other DNA
ctttgcaattatcccaacctagacctagcacctcccagcaaagtttacccaacactaccagctcagaaccggtacactca

SEQ ID NO: 178292 - DNA, 80 bp, synthetic construct
  source 1..80: mol_type = other DNA
atatatgatgatgtcttaatcgataatacaggtaagatattgaaaaattaatagtaatgaaggtcgagataactataaag

SEQ ID NO: 178293 - DNA, 80 bp, synthetic construct
  source 1..80: mol_type = other DNA
taattaatattaataaaggaaaccacaaaatttgaattgccgaccacaaactgtcaaacttacaacacttctgctttttg

SEQ ID NO: 178294 - DNA, 80 bp, synthetic construct
  source 1..80: mol_type = other DNA
cgctacagacggtacagacgaaaacgaaagagggctaaaataactataagacagtggcaaccagccaagactagaaaatg

SEQ ID NO: 178295 - DNA, 80 bp, synthetic construct
  source 1..80: mol_type = other DNA
cccccaccttacataccagacctactttttcccaatactggtaaaaaaaaaaaattctctcccttcgactgggaaacgga

SEQ ID NO: 178296 - DNA, 80 bp, synthetic construct
  source 1..80: mol_type = other DNA
agcactaacacaagaatttggactatactctccatactatttaacaccaacaagaatcagcctagactggcacacagtat

SEQ ID NO: 178297 - DNA, 80 bp, synthetic construct
  source 1..80: mol_type = other DNA
ctcctggggggccatgctcagcagcttgtctcgtgtgaggtcaaatcgtaggctgaggtagcacggtgagaagagcccgc

SEQ ID NO: 178298 - DNA, 80 bp, synthetic construct
  source 1..80: mol_type = other DNA
agaagaaatgtacttatggaccaataggtggcggccatccaggtcgttagcggtcaagcacttctgtctccccggtgata

SEQ ID NO: 178299 - DNA, 80 bp, synthetic construct
  source 1..80: mol_type = other DNA
tccaccggcttggccctctcacttctactcttggcagcagtggccaactcatctgccgctgcacaaaggaaactgctgac

SEQ ID NO: 178300 - DNA, 80 bp, synthetic construct
  source 1..80: mol_type = other DNA
tccaattcaggatggcttttggtaggctcttttcctcctttcatcagaatccagggataattaccggttcggcagtaggg

SEQ ID NO: 178301 - DNA, 80 bp, synthetic construct
  source 1..80: mol_type = other DNA
tagaaactacagcagccacctagaagacagaatcttaaagggaccctttggcggggggcacagcactatgagattctcct

SEQ ID NO: 178302 - DNA, 80 bp, synthetic construct
  source 1..80: mol_type = other DNA
ggtacattgtgcaccggtggtctccagaaactcatatgtggttcaggcggtgtagctggcacagtttgcagaagcacttt

SEQ ID NO: 178303 - DNA, 80 bp, synthetic construct
  source 1..80: mol_type = other DNA
atagacaactttttaaaagcagctttacctgacacacccgaaagacatacaaacattttaaatacatttagaactgaagg

SEQ ID NO: 178304 - DNA, 80 bp, synthetic construct
  source 1..80: mol_type = other DNA
ggcgcgggcctgggtaccaagggcggcgtgtggagcgggagtgaagaggcctccgggtgaaggtaagtacctacaccaat

SEQ ID NO: 178305 - DNA, 80 bp, synthetic construct
  source 1..80: mol_type = other DNA
cctgagtctctttaagctgcacaaggagctgaagcgcgccccatccgaagcccgggacctcatgcagagcctctttctga

SEQ ID NO: 178306 - DNA, 80 bp, synthetic construct
  source 1..80: mol_type = other DNA
atctctggtctcaaatatgggcttacaataacacctgctgacaaatctgaccattttgtaaaagttgactggagcaatgc

SEQ ID NO: 178307 - DNA, 80 bp, synthetic construct
  source 1..80: mol_type = other DNA
cgtgtgtcctcgacgcgggttgttgtgccgtactgcgtccccgtccccgcaacgccccgtccccgcacgctgacggcccg

SEQ ID NO: 178308 - DNA, 80 bp, synthetic construct
  source 1..80: mol_type = other DNA
tagcaccaatgtgtgcagaatttagtggaattagatctagatcaattgtaccacaggggttgccgactacaactctgcca

SEQ ID NO: 178309 - DNA, 80 bp, synthetic construct
  source 1..80: mol_type = other DNA
ccgcagttatatgtggggctggaaaatggtcagagaactttaccagtcacatagaggacaagatagccgtgggcagctat

SEQ ID NO: 178310 - DNA, 80 bp, synthetic construct
  source 1..80: mol_type = other DNA
ggtatagtgacagggtgttacaattgacactgggaaattctaccatcacaacccaggaggccgctaactcagtggtcgct

SEQ ID NO: 178311 - DNA, 80 bp, synthetic construct
  source 1..80: mol_type = other DNA
tggatttactccattaacccacacgtctctcaacacactacatttcatcttactactgaacactagaaaatgggagcaca

SEQ ID NO: 178312 - DNA, 80 bp, synthetic construct
  source 1..80: mol_type = other DNA
ttcgatcgaggccacaattgacaacattacccaaaatgcattaagcacagtacagaacacaaacgcatcaggatcaaccc

SEQ ID NO: 178313 - DNA, 80 bp, synthetic construct
  source 1..80: mol_type = other DNA
caacttgacatggaggcaattgctaatgaaggtaccaagtatgggttgacaataacacctgctgataaatctagtacttt

SEQ ID NO: 178314 - DNA, 80 bp, synthetic construct
  source 1..80: mol_type = other DNA
tgtgaagataataaatggataataccagcagagtgcaagatagagagggacctgaacttagcaaacaccattatcacgat

SEQ ID NO: 178315 - DNA, 80 bp, synthetic construct
  source 1..80: mol_type = other DNA
aatcagagcaaaatttgaaggatcgacacttcatggagttcagacgggagatcaagacaacatacccacttgcaactgca

SEQ ID NO: 178316 - DNA, 80 bp, synthetic construct
  source 1..80: mol_type = other DNA
acatgatgggtagtaacaccacagatggaaaggggactataatttacaaaaatgcaaatccaggtgaagcaggaggtaag

SEQ ID NO: 178317 - DNA, 80 bp, synthetic construct
  source 1..80: mol_type = other DNA
tctgcagttagtgtagtgataacgcttgtagattcagcgttggatgaagcattagtagtgttctcacatttacttctgta

SEQ ID NO: 178318 - DNA, 80 bp, synthetic construct
  source 1..80: mol_type = other DNA
gtgtgttatataaaataggtttaatactgggtattcatgtagggggaaatgggaggaatgggttctctgctatgttgttg

SEQ ID NO: 178319 - DNA, 80 bp, synthetic construct
  source 1..80: mol_type = other DNA
atcccagacaaaataaaactaatgagagacgcctactttaacctagccacaagcaaaaacgacgtgtacggggacaacaa

SEQ ID NO: 178320 - DNA, 80 bp, synthetic construct
  source 1..80: mol_type = other DNA
cgcggcggacacagtggtggagacgggggactcttgcggcagggacggtgacgggggtggccccggggacgagggccttt

SEQ ID NO: 178321 - DNA, 80 bp, synthetic construct
  source 1..80: mol_type = other DNA
taaaaaccacatcatcatcgtcaccacgacctggaaacgacacacgttcccccccaatcttgggcatgtgtatatatata

SEQ ID NO: 178322 - DNA, 80 bp, synthetic construct
  source 1..80: mol_type = other DNA
gaaagtgagactcatcatatatctatttgttggatttactcctttgactaagtatactctcaacattatattcattgtaa

SEQ ID NO: 178323 - DNA, 80 bp, synthetic construct
  source 1..80: mol_type = other DNA
ataacaactttcgctgctgttgcaggagttgtgtacgtcatgtatcgattgtttgcaggccagcagggaccatatacagg

SEQ ID NO: 178324 - DNA, 80 bp, synthetic construct
  source 1..80: mol_type = other DNA
tggctagagttgactcatttatgcctataaacaacataaaggcgcacttacaagaagtgggaatctacaacatcacacta

SEQ ID NO: 178325 - DNA, 80 bp, synthetic construct
  source 1..80: mol_type = other DNA
tacatatcagttaaaatagggccccctaaactgtttgaggacaagtggtacccccagtcagacttttgcaaggttgctct

SEQ ID NO: 178326 - DNA, 80 bp, synthetic construct
  source 1..80: mol_type = other DNA
ataagtatggaacggatgtcgatgaagaacatataaaagaaagatatatggcaggtcccagacacaactgtgtttatgct

SEQ ID NO: 178327 - DNA, 80 bp, synthetic construct
  source 1..80: mol_type = other DNA
aaggagagccaacccaccacttccaattctgctccagcattagatgccgctgaaactggtcacactagcaatgtacaacc

SEQ ID NO: 178328 - DNA, 80 bp, synthetic construct
  source 1..80: mol_type = other DNA
tagtccatctggttttcttagagttgcccacacctacgacacttcagcagatagagtaggtttcttatcatctaacggag

SEQ ID NO: 178329 - DNA, 80 bp, synthetic construct
  source 1..80: mol_type = other DNA
acctagtgatgaaaactggctcaattgcaatggaaccttattagggaatttaaccatttttccccatcaattcattaact

SEQ ID NO: 178330 - DNA, 80 bp, synthetic construct
  source 1..80: mol_type = other DNA
gacatggattactggtcttttatgagccattggcatgggcgggacaatcgcaatataaaaccctgaccatcacatggggc

SEQ ID NO: 178331 - DNA, 80 bp, synthetic construct
  source 1..80: mol_type = other DNA
cattagttgcatggcaaaggagcaatgctgaatttgaacagaatttagagaatgcccagtggtttgcttttatgcatgga

SEQ ID NO: 178332 - DNA, 80 bp, synthetic construct
  source 1..80: mol_type = other DNA
aaacaatgatgtcaaagtgtttatcaaacctaaacacataagagcatggtgcccaagatccccaagagccacaagctaca

SEQ ID NO: 178333 - DNA, 80 bp, synthetic construct
  source 1..80: mol_type = other DNA
catgggtgccacgaccccccaggttgtgtcaatataaaaatgcatcaactgtaaacttctcatctacaaacatcaccgat

SEQ ID NO: 178334 - DNA, 80 bp, synthetic construct
  source 1..80: mol_type = other DNA
tggcagcatccatccaatgtggtttgaagcactcaaaatggtcctacacaatttagaatttgaacctagattgattgata

SEQ ID NO: 178335 - DNA, 80 bp, synthetic construct
  source 1..80: mol_type = other DNA
caaaccctagtgttttctttgaagttggcaaaacagccaggttcagtgtaccattcacaggcattgcatcagcttataat

SEQ ID NO: 178336 - DNA, 80 bp, synthetic construct
  source 1..80: mol_type = other DNA
gtctctacttgtacaaaaatgcaccactttcttttcttcagctgctacggagatcttagataatgatttggttaaattca

SEQ ID NO: 178337 - DNA, 80 bp, synthetic construct
  source 1..80: mol_type = other DNA
acgtgctgtactcggagccgcttaagacgcggctgcttagagggctcatccggctctgccgcgctgcgcaaaccggcgtc

SEQ ID NO: 178338 - DNA, 80 bp, synthetic construct
  source 1..80: mol_type = other DNA
acggggcagacgcaggccaaccacagtctacgtcgtccacttcctgggcatggtctacatcataatataataaggcgcac

SEQ ID NO: 178339 - DNA, 80 bp, synthetic construct
  source 1..80: mol_type = other DNA
gcacaacgacagtgctgggctctcacacagggcctgaagctcctgcggccacaggtgcgtggccaggggcgagtccgtcg

SEQ ID NO: 178340 - DNA, 80 bp, synthetic construct
  source 1..80: mol_type = other DNA
cagacttacatgtccacacaggaaatctggtgtataggaatttgcacttatgtgatccagagaacttaaatgattcagta

SEQ ID NO: 178341 - DNA, 80 bp, synthetic construct
  source 1..80: mol_type = other DNA
taaatcgcatagcgtgattacaaagtaaatttctccaagataaaattcccgcttttccactccgtcatgaaagatcgtaa

SEQ ID NO: 178342 - DNA, 80 bp, synthetic construct
  source 1..80: mol_type = other DNA
ttctttgatgacagagacagtctatttctctttgccacttaccacccaaaaaacatattacaagacctcaaaaacatgag

SEQ ID NO: 178343 - DNA, 80 bp, synthetic construct
  source 1..80: mol_type = other DNA
tgacatagaaaataaactccccactagagagtcaacccacaaggaacagaaactgtataatgattggaaaataaacttat

SEQ ID NO: 178344 - DNA, 80 bp, synthetic construct
  source 1..80: mol_type = other DNA
tcatagtgcccaaggaagcagccacctctacgtatataattggatttgcggctgcgaagaacgacttttcgcttcgcctt

SEQ ID NO: 178345 - DNA, 80 bp, synthetic construct
  source 1..80: mol_type = other DNA
acttcagttgtcccaacctagacccaataccccacagttaagtctgcccaacactagcagttcagaaccagtacactcac

SEQ ID NO: 178346 - DNA, 80 bp, synthetic construct
  source 1..80: mol_type = other DNA
agagtgtcagaatactcatcggatgatgaatctcttgcgccaggtctcccatcaaagcgaaacaagctcgactcggcctt

SEQ ID NO: 178347 - DNA, 80 bp, synthetic construct
  source 1..80: mol_type = other DNA
agtagccacttagaagacagagtaatgaaaggaccctttgggggaggacactctactctaagatactctttaaaagtact

SEQ ID NO: 178348 - DNA, 80 bp, synthetic construct
  source 1..80: mol_type = other DNA
ccttacttccactcaacacaagaaatctttataccaggagaagtcaaaaatcttattgaattgtgccaagtagacactat

SEQ ID NO: 178349 - DNA, 80 bp, synthetic construct
  source 1..80: mol_type = other DNA
gaaagttattggtttcttacgcaccacccggagcagaggcccccaagagtcgcaaagaagcaatgcttgggacacatgtg

SEQ ID NO: 178350 - DNA, 80 bp, synthetic construct
  source 1..80: mol_type = other DNA
cgagacgcagacgccgaggaactgctcgatatcctagaagacgtagagtaaggagatggcgacgaaggggtcgcgggtgg

SEQ ID NO: 178351 - DNA, 80 bp, synthetic construct
  source 1..80: mol_type = other DNA
tttccataccactatatgaagattttaggccgtatactgcatttaccctaccatcagtaaacaatgtagaaccaggaaaa

SEQ ID NO: 178352 - DNA, 80 bp, synthetic construct
  source 1..80: mol_type = other DNA
tgttaatctgggcgatcggtacggctttaggccgggaccgcgcgctcctggggcaccaggagtaggcggtcccgacgttc

SEQ ID NO: 178353 - DNA, 80 bp, synthetic construct
  source 1..80: mol_type = other DNA
taacaaacatctaagacaaacaattacgaccttatgcctggtccccaccagtcgaaggcatctagcaataagataggtgg

SEQ ID NO: 178354 - DNA, 80 bp, synthetic construct
  source 1..80: mol_type = other DNA
gggaggacgagtacaccacttgcaaatactgggaccgtcctcctagaaccaaccacctagatacccccacctatccctgg

SEQ ID NO: 178355 - DNA, 80 bp, synthetic construct
  source 1..80: mol_type = other DNA
acatacaacacagtacctccatttaaaatagacaagtacagcagccccatgctgcacccaggcatgctaatgcaaagaaa

SEQ ID NO: 178356 - DNA, 80 bp, synthetic construct
  source 1..80: mol_type = other DNA
tagtaacttcccaagagattctttggttggccgctccgctggtaccccaccagtaggcttggcagatgaggctgagtaat

SEQ ID NO: 178357 - DNA, 80 bp, synthetic construct
  source 1..80: mol_type = other DNA
aggctatcaaaagagtgtcaacaaaaccgactgatgatgactggattacagttccttacaaaaagccaaggtattttccc

SEQ ID NO: 178358 - DNA, 80 bp, synthetic construct
  source 1..80: mol_type = other DNA
ttaatgtcctcaaccatatgggctcaatggcttttagagtggttaatgaacatgacagtcacactacccatgttaaaatc

SEQ ID NO: 178359 - DNA, 80 bp, synthetic construct
  source 1..80: mol_type = other DNA
atagacgaaggctttccatcatcctggtacggtaacatggcaaactgccacctcacaggcatatactctccaatatacct

SEQ ID NO: 178360 - DNA, 80 bp, synthetic construct
  source 1..80: mol_type = other DNA
aacgaggagtatgccattagcatgttcccacatggtgacgagtcagttctccgctactcgtcacgtgatggcactcgcct

SEQ ID NO: 178361 - DNA, 80 bp, synthetic construct
  source 1..80: mol_type = other DNA
accagaggaagaaaagggagcagaaagcagctgcctgatgcacccagcacagacctcttcatgggatgacccccacggtg

SEQ ID NO: 178362 - DNA, 80 bp, synthetic construct
  source 1..80: mol_type = other DNA
taccaggagccgccggccccccgggctccataccagggataccaggagccgccgcccccccgggctccataccagggata

SEQ ID NO: 178363 - DNA, 80 bp, synthetic construct
  source 1..80: mol_type = other DNA
tcactgtcgcgccgatgtgtgcggagtacaatggcctgcgcttagcgacgtccttgcagggtctgccagtgatgaacaca

SEQ ID NO: 178364 - DNA, 80 bp, synthetic construct
  source 1..80: mol_type = other DNA
accacctgaagcaagtaacaaacctaatgcagaacagtactttgctccactagacagcttatggggagacaagatatatg

SEQ ID NO: 178365 - DNA, 80 bp, synthetic construct
  source 1..80: mol_type = other DNA
cagtcaacacagagcatattttttctgttgacaaaaactgtgaaactattgctaaggatatatttggaacacatacactg

SEQ ID NO: 178366 - DNA, 80 bp, synthetic construct
  source 1..80: mol_type = other DNA
aaaggctgccaaaagtttggactagccaagattgggaaacagaacagcaagcggctgctgcctgggacagacccatgcgc

SEQ ID NO: 178367 - DNA, 80 bp, synthetic construct
  source 1..80: mol_type = other DNA
ggagaacctaccgccgccgaagacccctacgatggagacgcagaggagctgctcgccgccctagaagacgtagagtaagg

SEQ ID NO: 178368 - DNA, 80 bp, synthetic construct
  source 1..80: mol_type = other DNA
tccttaaagacaactacaacatggttataggagttttaacaaactataatcaacaagcaggcaataagcaaagttatacc

SEQ ID NO: 178369 - DNA, 80 bp, synthetic construct
  source 1..80: mol_type = other DNA
agacgcggaaaagacgcggaaaagaggaagtccccggggacggccgcgggcggaaaaagaggaagcagtccctgtggacg

SEQ ID NO: 178370 - DNA, 80 bp, synthetic construct
  source 1..80: mol_type = other DNA
cgacgcccaccatttacatgaccaacctctactctactaattttctcacgcttactgtgctaccctttatcgtactcagc

SEQ ID NO: 178371 - DNA, 80 bp, synthetic construct
  source 1..80: mol_type = other DNA
gcctagaccccctccatcggccggagactgggccatggagtacctagcttgcaaagtatttgacaggccccctcgtacca

SEQ ID NO: 178372 - DNA, 80 bp, synthetic construct
  source 1..80: mol_type = other DNA
tagcggcgcccttggtcacatcatgcagctccttaatacaagccatccacatctcccgcttatcctcgggtacaatgtag

SEQ ID NO: 178373 - DNA, 80 bp, synthetic construct
  source 1..80: mol_type = other DNA
ctggagacgctggtcttctcgctcagcgtgttcctggccctgggcaacagcttttactttatggtgggggacatggtgct

SEQ ID NO: 178374 - DNA, 80 bp, synthetic construct
  source 1..80: mol_type = other DNA
tacataaccaatctgggcagagcatttggcacaggctttacagatcacattaatgataaaatagcagagttgcaaagcac

SEQ ID NO: 178375 - DNA, 80 bp, synthetic construct
  source 1..80: mol_type = other DNA
ccctcctgcaaggcaaccgcagcattcctgcgggcagaaccctccgtctccaacgacgacggcaacggcggcgaacgctg

SEQ ID NO: 178376 - DNA, 80 bp, synthetic construct
  source 1..80: mol_type = other DNA
ttggaaatgcaaaatgttgtccatttgtgtgtggtaaggcagtgacatttaaggaccgaaatacatgtaaaacttattca

SEQ ID NO: 178377 - DNA, 80 bp, synthetic construct
  source 1..80: mol_type = other DNA
agagagagattccaaaaagcaacacaaaacgccattccacagtatgccacattaatgcccacagcactctatgaatacca

SEQ ID NO: 178378 - DNA, 80 bp, synthetic construct
  source 1..80: mol_type = other DNA
aaatctaacatggaatatgaaccaccaaaaagcaaatacttaattagtgacttacaattatgggcagcagtaacaggata

SEQ ID NO: 178379 - DNA, 80 bp, synthetic construct
  source 1..80: mol_type = other DNA
ttgtgaccaatgtgcccaaatttccaatgctggacatagaggtaggtgatgttataccatatggagatataaacctaagt

SEQ ID NO: 178380 - DNA, 80 bp, synthetic construct
  source 1..80: mol_type = other DNA
agtgttaccagaggctcaggataaagttgagtacctgtctaagctaaagcaccttgacacccttgaaaatcaagtggcga

SEQ ID NO: 178381 - DNA, 80 bp, synthetic construct
  source 1..80: mol_type = other DNA
gcatattacatgttttatgatggatatgacaaacccaagggttcagaaaacaatgaatatggaattgctcccaccaatga

SEQ ID NO: 178382 - DNA, 80 bp, synthetic construct
  source 1..80: mol_type = other DNA
aaataaagctgcttttcactgcacgttggccgtgggactctcacttagcggtgtctacctcttaaggtcaccaagcactc

SEQ ID NO: 178383 - DNA, 80 bp, synthetic construct
  source 1..80: mol_type = other DNA
ccaattaaggaggaaaatggagatgtttacgtatatgaggtttgacctagagatgacatttgtgatcacgagctcccagc

SEQ ID NO: 178384 - DNA, 80 bp, synthetic construct
  source 1..80: mol_type = other DNA
agcgtgcaatgacttttcagtaaggttgttgcgtgacactcctttcattacacaaactacactataccaaaatgacccaa

SEQ ID NO: 178385 - DNA, 80 bp, synthetic construct
  source 1..80: mol_type = other DNA
ctttgtgcgcctgtttttacttcccttccccgaagtaacttagaagctgtaaaccaacgatcaatagtaggtgtgacacg

SEQ ID NO: 178386 - DNA, 80 bp, synthetic construct
  source 1..80: mol_type = other DNA
atcgcctgggcgctgctgctgcggatgctggtcgttggcttgatggtggaagtcggcgccgccgccgcttggaccttcgt

SEQ ID NO: 178387 - DNA, 80 bp, synthetic construct
  source 1..80: mol_type = other DNA
taacaaaaggcagccgtgtacactgtcacttaacaggaatattttctccaccttttttaaacacaggcagaatagctaga

SEQ ID NO: 178388 - DNA, 80 bp, synthetic construct
  source 1..80: mol_type = other DNA
aagccgtgccagcattgaccgctgttgaaacaggacatacgtcacaggtgactcccagtgacacaatacaaaccagacac

SEQ ID NO: 178389 - DNA, 80 bp, synthetic construct
  source 1..80: mol_type = other DNA
aactgatcaaatgtacaaaattccaaaagacagcaactatggccactgcacatactatgtaaacaacaacatttttaaag

SEQ ID NO: 178390 - DNA, 80 bp, synthetic construct
  source 1..80: mol_type = other DNA
gctggtactcctcaatgtttataagcccccacagataccaactacagtttacaacagcatactttgactgcacatacaac

SEQ ID NO: 178391 - DNA, 80 bp, synthetic construct
  source 1..80: mol_type = other DNA
agggcgacgaaagagacacagacggggcaactttgtaaatatcactttcagtttagaggccatctatgaacaatttctgt

SEQ ID NO: 178392 - DNA, 80 bp, synthetic construct
  source 1..80: mol_type = other DNA
catcaggtgtggatcggtgggcagtttaccttcatcaaatttgcccattaactcagtttcaatacggtgcagagccagac

SEQ ID NO: 178393 - DNA, 80 bp, synthetic construct
  source 1..80: mol_type = other DNA
ctaactcagtggttgcttacgggcgatggccagagtacttgagggatagtgaggctaatccagttgaccaaccgaccgag

SEQ ID NO: 178394 - DNA, 80 bp, synthetic construct
  source 1..80: mol_type = other DNA
gaataatgtagaagggaatgaaaagagaatagatatgtacacagtcaccctaagtagagagacagatgtggccaaggaaa

SEQ ID NO: 178395 - DNA, 80 bp, synthetic construct
  source 1..80: mol_type = other DNA
gtaccctaatatgttccaccaaacagaagtactagagtgcatagctcaaagcggaccgtttgcttatcatggagacgaga

SEQ ID NO: 178396 - DNA, 80 bp, synthetic construct
  source 1..80: mol_type = other DNA
ctgaccaaacaaaataaccaagctacacaaatagggcaagcacgcgacaaacactttgagtatcacacgggcatttacag

SEQ ID NO: 178397 - DNA, 80 bp, synthetic construct
  source 1..80: mol_type = other DNA
aaacaatgatccacgccgggactggggctgtggtcaaatactttaatgtcaactactataaagatgcagcaagttctgga

SEQ ID NO: 178398 - DNA, 80 bp, synthetic construct
  source 1..80: mol_type = other DNA
caggcagctacacaagcaaaagctcatccagcaccaactccaagccctcgcggtccaagttacaaaaacgcaagccaatc

SEQ ID NO: 178399 - DNA, 80 bp, synthetic construct
  source 1..80: mol_type = other DNA
cgctggctccagggagtggcagcgtttgatgcagtcctccgcatcggggcggacgcctcctcccaacgcgtttctgcgga

SEQ ID NO: 178400 - DNA, 80 bp, synthetic construct
  source 1..80: mol_type = other DNA
ctttctgtttgggggcaaccctatacctcaacagacaattaaagatccctccaagcaacccaccttcccgctccccgttc

SEQ ID NO: 178401 - DNA, 80 bp, synthetic construct
  source 1..80: mol_type = other DNA
ccgccaggaaagacccccggggggcatcgggggggatagatggaggcatgggggggctaatttggccccggggagcatcg

SEQ ID NO: 178402 - DNA, 80 bp, synthetic construct
  source 1..80: mol_type = other DNA
gagacatgcccgcgcagccatgtctaatgaactccgcggttaccgcccaaacggtgcccaaactcttgctgttcaagccg

SEQ ID NO: 178403 - DNA, 80 bp, synthetic construct
  source 1..80: mol_type = other DNA
aataagagacaaatacctagctgccactagattagcacttccagcactagcaacactaggagacaaaatgctagagtacc

SEQ ID NO: 178404 - DNA, 80 bp, synthetic construct
  source 1..80: mol_type = other DNA
gacttgttggaaagacagattaacaccatgcatgtttcaaaccccacgcaagagaaaagagagcaactgttcaacaacgt

SEQ ID NO: 178405 - DNA, 80 bp, synthetic construct
  source 1..80: mol_type = other DNA
tgggtgcgtggcagctgatcatcctctgtgtcagtggtggaggacagagggaggcggcggccggaggtgtgcttcttgtg

SEQ ID NO: 178406 - DNA, 80 bp, synthetic construct
  source 1..80: mol_type = other DNA
ctatgccatcccggtccaaacaggaaagacaaagaaacaggcatttggtttcaagttacaaccaggagctgactcagtat

SEQ ID NO: 178407 - DNA, 80 bp, synthetic construct
  source 1..80: mol_type = other DNA
catagagccaaaacctgtgcgtgtaacttttaagctgggctttaaataaacaaggccgtgcactgttcacttgtcggtgt

SEQ ID NO: 178408 - DNA, 80 bp, synthetic construct
  source 1..80: mol_type = other DNA
tacaccattacaactacatttccaccagaatggaacagtagaaactttatgtctcatgactatggcttatacagcccata

SEQ ID NO: 178409 - DNA, 80 bp, synthetic construct
  source 1..80: mol_type = other DNA
agccttagtcctacgtgacaggaggacttcagccagctaccccctattggcagtggttgagcagctgagaacagagaatg

SEQ ID NO: 178410 - DNA, 80 bp, synthetic construct
  source 1..80: mol_type = other DNA
acaacaaccctgaagcacagactacgaactagaaacaacgtcaaccacacaatgtgatcacaaagtaccaacgctaattt

SEQ ID NO: 178411 - DNA, 80 bp, synthetic construct
  source 1..80: mol_type = other DNA
ggccttgcagagttggacgtggaatccatgtccatcccctttgttttagctgggctcatggcagtgtcgtataccgtatc

SEQ ID NO: 178412 - DNA, 80 bp, synthetic construct
  source 1..80: mol_type = other DNA
gggatgatgtaatcatctcgtatccattcactctagatgctgaaaagatatcagaacaagggggtaaatatggcctaact

SEQ ID NO: 178413 - DNA, 80 bp, synthetic construct
  source 1..80: mol_type = other DNA
ctccgctcgacgctcaaatctggatgtactcgcgcacacccgtcaggctctttaagggaaaagggtccgagtacgtcact

SEQ ID NO: 178414 - DNA, 80 bp, synthetic construct
  source 1..80: mol_type = other DNA
acgagcacagcataagtgagggtgagactgcaaaggtatttagtaagaccgctaccaatggagcccatacggtccaaagc

SEQ ID NO: 178415 - DNA, 80 bp, synthetic construct
  source 1..80: mol_type = other DNA
tctcaaccaccacagtaggcagcaccatgcacggtatgtttacacactggacaggcatgttcagcccagcatttttaaac

SEQ ID NO: 178416 - DNA, 80 bp, synthetic construct
  source 1..80: mol_type = other DNA
actctcaacacccaccaccatgacaatgttaagtttcgtgtcagcgtgcaatgatttcactgtacgtttgttgagagaca

SEQ ID NO: 178417 - DNA, 80 bp, synthetic construct
  source 1..80: mol_type = other DNA
ttccactggttatctgtggaaacactcaggcaggcagaaactatgccattagatctgatgactttattagccagatcgag

SEQ ID NO: 178418 - DNA, 80 bp, synthetic construct
  source 1..80: mol_type = other DNA
agaaagaagagggcactgtcactgctacaactgcgagctccagaggcgcctaggagggctgttatgagttggagaccacc

SEQ ID NO: 178419 - DNA, 80 bp, synthetic construct
  source 1..80: mol_type = other DNA
aggtagaagatgggcttggtgcctctgtggttggcgtagcaggaggcatagatactgcggaggaaggcgtagagcccgcc

SEQ ID NO: 178420 - DNA, 80 bp, synthetic construct
  source 1..80: mol_type = other DNA
tggaagtttaaacccaatatggtttcaagcattaaaggaaatattacaaaatctggggtttgaatcaaagcttattgata

SEQ ID NO: 178421 - DNA, 80 bp, synthetic construct
  source 1..80: mol_type = other DNA
gagacctagaatctttcctcccacagaaggagaccagctcgcccgaagtcgagaagaagactcgttttcagaggaagaaa

SEQ ID NO: 178422 - DNA, 80 bp, synthetic construct
  source 1..80: mol_type = other DNA
ggcattgaagatttgatccaacaagtggcttcaaatgctttgcagttgtcccaaccatcacgccctgcgttgcctccctc

SEQ ID NO: 178423 - DNA, 80 bp, synthetic construct
  source 1..80: mol_type = other DNA
gaccaccaacagaaatatacacacagaccaccgggagttcagttaaagatttcatcaggtttattttggctgctgctagt

SEQ ID NO: 178424 - DNA, 80 bp, synthetic construct
  source 1..80: mol_type = other DNA
tataataggtatacatgtgggggggaatggtagagtgggatactgtgcatcactaacaaagagctactttgcttctgccc

SEQ ID NO: 178425 - DNA, 80 bp, synthetic construct
  source 1..80: mol_type = other DNA
aggcgtaggtggcttgacttgttctaatctgtcttttgcttatatatatagagtattaatttagtgtagtgaatttttcc

SEQ ID NO: 178426 - DNA, 80 bp, synthetic construct
  source 1..80: mol_type = other DNA
gccgcaccacccgctgactgccgcagagcgagcagtgtacgagctcggcgtgcgtgttgaagatgacgctcttttcttga

SEQ ID NO: 178427 - DNA, 80 bp, synthetic construct
  source 1..80: mol_type = other DNA
acaggggagtcagtcaataatgaggcacccataacgcaccaagtcatgtatgtaccaccaggagggcccatacctaagaa

SEQ ID NO: 178428 - DNA, 80 bp, synthetic construct
  source 1..80: mol_type = other DNA
tactcgccacctggagccgccccaccaaagagtagaaaagatgcaatgctggggacacacatcatatgggatctgggatt

SEQ ID NO: 178429 - DNA, 80 bp, synthetic construct
  source 1..80: mol_type = other DNA
caggaaactctgcttggccgaggcatagcgcagcagcttgtccttgaggagtgcatactgggagccagccgaggccccaa

SEQ ID NO: 178430 - DNA, 80 bp, synthetic construct
  source 1..80: mol_type = other DNA
tacctggtggcgactctgactttctataggagcccagacactgactttatagtgacttacagtagaaaaagtcccctggg

SEQ ID NO: 178431 - DNA, 80 bp, synthetic construct
  source 1..80: mol_type = other DNA
catcagacgtggattcattagcacaaaaagtattaaaagagtgtcagaacacggagaaactaatgactatttttcatcag

SEQ ID NO: 178432 - DNA, 80 bp, synthetic construct
  source 1..80: mol_type = other DNA
acggtataagtgagggtgagactgcaaaggtattcagcaagaccgctaccaatggagcccatacggtccaaagcatagtg

SEQ ID NO: 178433 - DNA, 80 bp, synthetic construct
  source 1..80: mol_type = other DNA
ttttcaataacgttcagtattactcacactactgtaagaagtacgctcccctatacgccttggaagccaaaagagtggca

SEQ ID NO: 178434 - DNA, 80 bp, synthetic construct
  source 1..80: mol_type = other DNA
tttgaccccccaggccctaagcccatagacggctacgaagcctggagagatgagtttgaaacctgtaagtggtggaacag

SEQ ID NO: 178435 - DNA, 80 bp, synthetic construct
  source 1..80: mol_type = other DNA
ttttgataaccagagaacattaccacaatgggggcacaagtttccactcaaaagaccggcgctcatgagaatcaaaatgt

SEQ ID NO: 178436 - DNA, 80 bp, synthetic construct
  source 1..80: mol_type = other DNA
tatgatagaaagcccactgcccaagactggcagacagagtacgaggcctgcaaagcctttgatagaccccctagatctaa

SEQ ID NO: 178437 - DNA, 80 bp, synthetic construct
  source 1..80: mol_type = other DNA
aacaggtcagggagtcaacaatttacaatgtcgtatgaagacagaatcaaacagattcagaatggcctccagattgttga

SEQ ID NO: 178438 - DNA, 80 bp, synthetic construct
  source 1..80: mol_type = other DNA
cgaccagaagcccggtgccgaacacatgcgtgacgtcagctacaagctgttcgtgggtaatctgcaggcgcgtgacgcca

SEQ ID NO: 178439 - DNA, 80 bp, synthetic construct
  source 1..80: mol_type = other DNA
gtagccatcagatgcccatacacaaaacccgccctggtgggctcagaagacaatgtaggctttattccactgtccaccac

SEQ ID NO: 178440 - DNA, 80 bp, synthetic construct
  source 1..80: mol_type = other DNA
ctgacaagggtgaatttaacctcctgggcattcacgacaattgtgctgtgctaccaacccatgctgactgtggtgagacc

SEQ ID NO: 178441 - DNA, 80 bp, synthetic construct
  source 1..80: mol_type = other DNA
tgacgtcacagttcaaaggtcatcctcggcggtaaccgcaaagatggcggtcaatctctttcgggtcaaaggtcgcgcat

SEQ ID NO: 178442 - DNA, 80 bp, synthetic construct
  source 1..80: mol_type = other DNA
attttgaagggtctattccatacgagttaccatgaagaagaccgacaacttgctattttcttaatggataggagcattat

SEQ ID NO: 178443 - DNA, 80 bp, synthetic construct
  source 1..80: mol_type = other DNA
ttccccggctttagtgattccatcgggcaggcggatcaagggacccatggaggtccaaagacccacccaggctttccaga

SEQ ID NO: 178444 - DNA, 80 bp, synthetic construct
  source 1..80: mol_type = other DNA
tacatgggataccagggtgtggtaaatcacttataaccaccatcattgcaagaggtttagccactgaaggaaacatatat

SEQ ID NO: 178445 - DNA, 80 bp, synthetic construct
  source 1..80: mol_type = other DNA
tgagcagaagatacgcagtgttagcgctggtcgtgcactgtatatccccccctatgacttgctccttcatgagtggtatg

SEQ ID NO: 178446 - DNA, 80 bp, synthetic construct
  source 1..80: mol_type = other DNA
ctggtgaatgctgggaagtctcaaaaaatggtagagactgggagacacttaaattgaatgatttggtgcagaaaataaca

SEQ ID NO: 178447 - DNA, 80 bp, synthetic construct
  source 1..80: mol_type = other DNA
gtttctacatgtttaatacgaaagtatggaaaccaaatgtatgctacaatgtcaccgtgcaccctacgcatcaaacatac

SEQ ID NO: 178448 - DNA, 80 bp, synthetic construct
  source 1..80: mol_type = other DNA
caccattttcgtcctcccaacatggggcaattgggcatacccatgttgtcacgtcactcagctccgcgctcaacaccttc

SEQ ID NO: 178449 - DNA, 80 bp, synthetic construct
  source 1..80: mol_type = other DNA
aataggaaagatgcaatgctgggcacacacattatctgggatgttggactgcagtcatcgtgtgtcttatgtgtgccttg

SEQ ID NO: 178450 - DNA, 80 bp, synthetic construct
  source 1..80: mol_type = other DNA
caccttgcttgagtgcaagaaattaactttatatgaagatcaagtcagagcatttcctcaatccccagaggcttttcaaa

SEQ ID NO: 178451 - DNA, 80 bp, synthetic construct
  source 1..80: mol_type = other DNA
acactataagcagtgttgccccatgttatgtgggaaagcagtggtcctgcaaaacaagaagacacaagccaattactcaa

SEQ ID NO: 178452 - DNA, 80 bp, synthetic construct
  source 1..80: mol_type = other DNA
cctagcgttcggaccggtgcgcagaaacagccggcggtccgagccactgagcggttcacagccccggccgccgatagtta

SEQ ID NO: 178453 - DNA, 80 bp, synthetic construct
  source 1..80: mol_type = other DNA
gcttcagacgcattagccaggcgttttgcatttgatgtggatattgaagtgatgtcgcaatacaacaatagagggcactt

SEQ ID NO: 178454 - DNA, 80 bp, synthetic construct
  source 1..80: mol_type = other DNA
tgggttcactccactaacttcacacactatatatctcattaaggtcgtattactagtaaggaattatcaccaaaatggga

SEQ ID NO: 178455 - DNA, 80 bp, synthetic construct
  source 1..80: mol_type = other DNA
cctcggcgacccgctccaccccgtcctccacacgctcagccgcgactgaacgccggggcgcgccgctacttgggttttta

SEQ ID NO: 178456 - DNA, 80 bp, synthetic construct
  source 1..80: mol_type = other DNA
gtggataaatacaattttggatgattttaaagtttctttggaaagtattggttctttgactcaagaactagaatatagag

SEQ ID NO: 178457 - DNA, 80 bp, synthetic construct
  source 1..80: mol_type = other DNA
tgaatttttggagaggagatggattgacaagttcatttgattacataaatatatatatatggtacacaaattagcttagt

SEQ ID NO: 178458 - DNA, 80 bp, synthetic construct
  source 1..80: mol_type = other DNA
tgaagttctacagagtggacttattcgtggtaatatcatagacgtcgatcccgaggccggttacattgcattggagattg

SEQ ID NO: 178459 - DNA, 80 bp, synthetic construct
  source 1..80: mol_type = other DNA
cccacacttatgattcagatgagaatagaagttcttttttttcttctaatggggtaatcacagttccagctggagagcaa

SEQ ID NO: 178460 - DNA, 80 bp, synthetic construct
  source 1..80: mol_type = other DNA
acagacataaaactacagactttatagtctcatgggaaacctctgccccatttacagactctatagtatcagggccacac

SEQ ID NO: 178461 - DNA, 80 bp, synthetic construct
  source 1..80: mol_type = other DNA
catgcgtgaccgcgaggaggggacagggtcgcaggtggcgtgtctggtgggcgcgggagcgggaggccgcgcgggagccc

SEQ ID NO: 178462 - DNA, 80 bp, synthetic construct
  source 1..80: mol_type = other DNA
gcttggtgtctgcgggcgcgagagggctggctcagcctttaaatatgcaggtcgcggatttgttatcgggtgaaacgtca

SEQ ID NO: 178463 - DNA, 80 bp, synthetic construct
  source 1..80: mol_type = other DNA
aatcatcatctaaagaaacaaatagataaaattagagatcaagcaaattcaatagaaaccatagtgttaatggcagtaca

SEQ ID NO: 178464 - DNA, 80 bp, synthetic construct
  source 1..80: mol_type = other DNA
cgtttggaggtggaattagctctatgagatttaccttaagaatactatatgaccaatttacaaggggacaaaacttttgg

SEQ ID NO: 178465 - DNA, 80 bp, synthetic construct
  source 1..80: mol_type = other DNA
caggaacggaacaactgaagcgactattgagcactttttctctcgagctgccctcgttggaaaggtccacattaatgaca

SEQ ID NO: 178466 - DNA, 80 bp, synthetic construct
  source 1..80: mol_type = other DNA
cccaaaaatgcccacagttgacaatgcagacttatccaagtctccagagtctctaactaaaacaaacgttaccagcaact

SEQ ID NO: 178467 - DNA, 80 bp, synthetic construct
  source 1..80: mol_type = other DNA
gtgccatattactcaaataaaccattgagaaccataagacatgaatcagcacttggtttcttactatgtcaaccactact

SEQ ID NO: 178468 - DNA, 80 bp, synthetic construct
  source 1..80: mol_type = other DNA
ttgtgtgtgtaataagtccatatacagtaccacccttatatgacaaaagccatcctaatacaggatatgtattctatgat

SEQ ID NO: 178469 - DNA, 80 bp, synthetic construct
  source 1..80: mol_type = other DNA
aagctggcgcagagcttgtagcttctgttaaacctagagataatgttagacaagttagaaattatggacctagtgatatg

SEQ ID NO: 178470 - DNA, 80 bp, synthetic construct
  source 1..80: mol_type = other DNA
tttaccaaaagcaaattctaaaagatttcgaaaataatgcccaaaattatttcaccgcaagagcaggaaacaccgttaca

SEQ ID NO: 178471 - DNA, 80 bp, synthetic construct
  source 1..80: mol_type = other DNA
cccccggcaccaccacctccagtaaggcctctgccagctctcccggcacccccaaacccccccggtagcagagcggcatg

SEQ ID NO: 178472 - DNA, 80 bp, synthetic construct
  source 1..80: mol_type = other DNA
ccagaactgaggagggcacctctccaaggaccagaacatgagtttcttcacgcactcatcaaacgaaactgccacattgc

SEQ ID NO: 178473 - DNA, 80 bp, synthetic construct
  source 1..80: mol_type = other DNA
acaactttagtgcaggaaaaactgtagaaggggatctttatgttccaataatgtggagaactaaatggtatccaacaatg

SEQ ID NO: 178474 - DNA, 80 bp, synthetic construct
  source 1..80: mol_type = other DNA
gaaactaaaccaatgggatgtttttagtaattggtttgacttcacctcctggatagcgtatatccaaataggattatatg

SEQ ID NO: 178475 - DNA, 80 bp, synthetic construct
  source 1..80: mol_type = other DNA
cacaaaagagcgacccatcaaactctgagcgcgtgccggccctgactgcagtagagactggtcacacatcccaggttgag

SEQ ID NO: 178476 - DNA, 80 bp, synthetic construct
  source 1..80: mol_type = other DNA
tgacgtcaccgtggcaaacacccaacctagcggggcgtctaactcagtcagcgtgcccatgctaacagctgcagagacgg

SEQ ID NO: 178477 - DNA, 80 bp, synthetic construct
  source 1..80: mol_type = other DNA
acgctggggacggggccgggaggtgtgcgggcccggggggtgtgcgtggccggggggtgtgcgagcccggagggtgtgca

SEQ ID NO: 178478 - DNA, 80 bp, synthetic construct
  source 1..80: mol_type = other DNA
caaacttctacttggtttggctttaatggcactagagcagaaaatagaacatatatctattggcatggtagagacaatag

SEQ ID NO: 178479 - DNA, 80 bp, synthetic construct
  source 1..80: mol_type = other DNA
atcaactattttaaggatgctgcctctagtggtgcttcccgtttagatttttctcaggatcctagcaaatttactgaccc

SEQ ID NO: 178480 - DNA, 80 bp, synthetic construct
  source 1..80: mol_type = other DNA
cagttccatacttcggccctggtgtagattacaaaggagatagtttgaccccacttagcaccaaaagcttgactacttat

SEQ ID NO: 178481 - DNA, 80 bp, synthetic construct
  source 1..80: mol_type = other DNA
cttaccagagtattctactctccgcaggcgctggcttgattctttttagggtaaccctacctcaccccgtgtatcctcca

SEQ ID NO: 178482 - DNA, 80 bp, synthetic construct
  source 1..80: mol_type = other DNA
gacattagaatgttcattgcagatgaaccagaatgtgctgatgcaacattagtcattcattccaataacttcaaagacac

SEQ ID NO: 178483 - DNA, 80 bp, synthetic construct
  source 1..80: mol_type = other DNA
ttgggttcaccgatcaaatttcagccaaggtaacagagttgcaggatgttgccaaagattttctgacaacaaaagtttta

SEQ ID NO: 178484 - DNA, 80 bp, synthetic construct
  source 1..80: mol_type = other DNA
caagacctaggcacacatgtaacatggctaaaacaaacaagtgctaccaatggctttcttactaaaaacaacccagtatt

SEQ ID NO: 178485 - DNA, 80 bp, synthetic construct
  source 1..80: mol_type = other DNA
accgcagacgtaaaaagacccaaaaaattaaactgacacagtggcaaccagccaagacaaaacgctgctttatgataggt

SEQ ID NO: 178486 - DNA, 80 bp, synthetic construct
  source 1..80: mol_type = other DNA
tcagagcccacgctgctttttgtggctgtactaatcctgttattcacttcactagtgtacttgcacgttttaatcttcaa

SEQ ID NO: 178487 - DNA, 80 bp, synthetic construct
  source 1..80: mol_type = other DNA
gtacaactatcagtaacatatcatctgtaagttatgaaatgttcaatacgacaattaataatacacaagaccgtgataaa

SEQ ID NO: 178488 - DNA, 80 bp, synthetic construct
  source 1..80: mol_type = other DNA
aggaaacatgatatggctagactggctgtcaaaaccagacagcagatacgaccccaaaaagagcaagtgccttctaagag

SEQ ID NO: 178489 - DNA, 80 bp, synthetic construct
  source 1..80: mol_type = other DNA
ttgctagacacagggttgtgtttgtgctagcccaacgatacctgtacaatgcatgcaacaagaaaacatatgcgaaatca

SEQ ID NO: 178490 - DNA, 80 bp, synthetic construct
  source 1..80: mol_type = other DNA
aaccagtagtgcgcgtgagttctttagggcatccacgatgtagccgctcgcggggttcccctccccagtgatcatctcgg

SEQ ID NO: 178491 - DNA, 80 bp, synthetic construct
  source 1..80: mol_type = other DNA
gggacagaacccggcggccgaagcgcaagaactggccgtcataccgctggcacccacggtgctccagcagaacgaggaac

SEQ ID NO: 178492 - DNA, 80 bp, synthetic construct
  source 1..80: mol_type = other DNA
ttgctgatgcaaaaggctatgtttgtacattgtaagaaaggatgcacatgcttgcagaagggccatgggcctggaggatg

SEQ ID NO: 178493 - DNA, 80 bp, synthetic construct
  source 1..80: mol_type = other DNA
tatgtaccaccaggagccaaaccacccagtggtaataattcagtggaatggaatacagcctctaatccaagcatattctt

SEQ ID NO: 178494 - DNA, 80 bp, synthetic construct
  source 1..80: mol_type = other DNA
gccagaaaaccgcgtccaacgacacatccacaaaaatcccccatcgactctcacaatcgcatcataacctcagcggggta

SEQ ID NO: 178495 - DNA, 80 bp, synthetic construct
  source 1..80: mol_type = other DNA
acagactgacacctaatgcccaattgccgctctgtgtggctgtcttgtgctgcgcccgcacggctagagcggagaccatg

SEQ ID NO: 178496 - DNA, 80 bp, synthetic construct
  source 1..80: mol_type = other DNA
gtgggacaggcccgctcgtacctgccacacagacacccctacctacccatggatgcgcaaaaacccagagttcaaagtaa

SEQ ID NO: 178497 - DNA, 80 bp, synthetic construct
  source 1..80: mol_type = other DNA
gaaggaggagaagaaggagaaagcttatactaacacaatggcagccagcaaaaataagaaaatgtctagtaataggttat

SEQ ID NO: 178498 - DNA, 80 bp, synthetic construct
  source 1..80: mol_type = other DNA
aatactaaggaatacaaaaacatagaaatagaagtagtaggaaaaaaggtaagagcaactataatgacaggagacacccc

SEQ ID NO: 178499 - DNA, 80 bp, synthetic construct
  source 1..80: mol_type = other DNA
ctccggtcggctcagtctttggcctttaccagagccgagcgggtctctttagcgcagcctcgattacctctggggtcttc

SEQ ID NO: 178500 - DNA, 80 bp, synthetic construct
  source 1..80: mol_type = other DNA
tgggcataatgccaggcgggccatttaccgtcattgacgtcaataggtggcgtacttggcatatgatacacttgatgtac

SEQ ID NO: 178501 - DNA, 80 bp, synthetic construct
  source 1..80: mol_type = other DNA
gggacagtggtggggttgtcggcggggacggggacgagggtggcgacggagacacagggtgacgtcgaggacggtgagtg

SEQ ID NO: 178502 - DNA, 80 bp, synthetic construct
  source 1..80: mol_type = other DNA
aatgacagcagcacaataccagtcaggtggagatgcagatggtatccagccctctggaaccaacaacaagtactagagga

SEQ ID NO: 178503 - DNA, 80 bp, synthetic construct
  source 1..80: mol_type = other DNA
aaaaccaagaaccagaaaagaggcaatgcttggcacgcacttggtgtgggatgttgggcttcaatcaacagcctcactcg

SEQ ID NO: 178504 - DNA, 80 bp, synthetic construct
  source 1..80: mol_type = other DNA
actttgcacaaccacagggtgaaatcaccagtaagagaaatgtcactgaaattggtttgagtccaattaatacacccagg

SEQ ID NO: 178505 - DNA, 80 bp, synthetic construct
  source 1..80: mol_type = other DNA
ttccgcggcgggggtggggttggcggggacagtggtggagacggagacacggggtggcgccggtgactggtgcctttccc

SEQ ID NO: 178506 - DNA, 80 bp, synthetic construct
  source 1..80: mol_type = other DNA
ttcacaatgcttggtatttatgaccgagtcgcagttttgcccacacactccaacccaggagacaccatagtactggcagg

SEQ ID NO: 178507 - DNA, 80 bp, synthetic construct
  source 1..80: mol_type = other DNA
agtgcgtactttgacatgctgaaaacatcacatattgacctttatcctgtccctaccagccgtagagcccccacacactg

SEQ ID NO: 178508 - DNA, 80 bp, synthetic construct
  source 1..80: mol_type = other DNA
gttgaagaaatttacagaatggtgtaatgcagctaaaggattggaatggattgggtacaaaattagtaaatttatagact

SEQ ID NO: 178509 - DNA, 80 bp, synthetic construct
  source 1..80: mol_type = other DNA
gtcaacactcaaggattggacaaccagggggaggaaatcctctctcagctacaccgccctctgagggcatgcaataatac

SEQ ID NO: 178510 - DNA, 80 bp, synthetic construct
  source 1..80: mol_type = other DNA
aaagctgttatacaaggactgcccacagttttaacaccaggttcagagcagtttttgactacagatgataggcaatcacc

SEQ ID NO: 178511 - DNA, 80 bp, synthetic construct
  source 1..80: mol_type = other DNA
taaataccggcctcattatagtctgcttgctcacaaaccatagtaggtgtgtcaatggtgtccaagaaaatatggacgtc

SEQ ID NO: 178512 - DNA, 80 bp, synthetic construct
  source 1..80: mol_type = other DNA
ggtttttggtcagcagtcaggggctgcttatgtgggaaactacagtttagtgaacagacaccttgccacacacaacgact

SEQ ID NO: 178513 - DNA, 80 bp, synthetic construct
  source 1..80: mol_type = other DNA
cgtttttacaccctagactcagtccaatgggagaatgggtcaccaggttggtggtggaagtttcccgacgctctaaggga

SEQ ID NO: 178514 - DNA, 80 bp, synthetic construct
  source 1..80: mol_type = other DNA
cctgcggcctctcgcgaggcccaccccccccccccctcccataactacagtgctttggtaggtaagcatcctgatccacc

SEQ ID NO: 178515 - DNA, 80 bp, synthetic construct
  source 1..80: mol_type = other DNA
accgcatcccactaacccccaatgtacaagaaacacaagtctttggcttctcattattcttgggtggcaccgtcctgaaa

SEQ ID NO: 178516 - DNA, 80 bp, synthetic construct
  source 1..80: mol_type = other DNA
atagattgtcgcacctgattgcccgacattatcgcgagcccatttatacccatataaatcagcatccatgttggaattta

SEQ ID NO: 178517 - DNA, 80 bp, synthetic construct
  source 1..80: mol_type = other DNA
ggacctctcatgtaaattcaatggatttgagtacctcagctggatatagctttgtcaaatctgggtataaaaagaaagat

SEQ ID NO: 178518 - DNA, 80 bp, synthetic construct
  source 1..80: mol_type = other DNA
aagacctttcccatcatgcttgaggggagaactaacgggtatgcatgcgtggtgggcggtaaactatttagacccatgca

SEQ ID NO: 178519 - DNA, 80 bp, synthetic construct
  source 1..80: mol_type = other DNA
aaaccaacagcaagtgctagaggacatatgcctatcaggaccgtttgctaacagagacaacgtacccagtgtccaactga

SEQ ID NO: 178520 - DNA, 80 bp, synthetic construct
  source 1..80: mol_type = other DNA
aaggagcccccgctttgaactcccccaatgtggaggcatgtgggtacagtgacagggtacaacaaatcactcttgggaac

SEQ ID NO: 178521 - DNA, 80 bp, synthetic construct
  source 1..80: mol_type = other DNA
accacaaccaaacccccaactacagcctctacaaccgaacccccaaaaaagatagaagaaaactctacatgcatacaagc

SEQ ID NO: 178522 - DNA, 80 bp, synthetic construct
  source 1..80: mol_type = other DNA
tgacgtcccgcaaacctcccgcagtccggtcccgcgaacaaatagcgtggggcgccacgcaccggtagtgcgcacaaagg

SEQ ID NO: 178523 - DNA, 80 bp, synthetic construct
  source 1..80: mol_type = other DNA
cacctgggactggcgacgcggactgtttggacaaaatgctcttagaagagtgtcagaaaaaccaggagatgatgcagagt

SEQ ID NO: 178524 - DNA, 80 bp, synthetic construct
  source 1..80: mol_type = other DNA
gtgaacaggagactgccacatgccctggtgactcaccataccgagcagccgagaagcgatttctctggttttatcggtaa

SEQ ID NO: 178525 - DNA, 80 bp, synthetic construct
  source 1..80: mol_type = other DNA
taattatgatggtagtctgcaccctgtttggtttagggccctaggcagagtcttggaccaacttggatttccaggtataa

SEQ ID NO: 178526 - DNA, 80 bp, synthetic construct
  source 1..80: mol_type = other DNA
aatcatggtatgctggcaccaccaacaatcacatcattaccagcaatgaacagaagatttttcttagacttggatattat

SEQ ID NO: 178527 - DNA, 80 bp, synthetic construct
  source 1..80: mol_type = other DNA
acttccgcagggcattgatgacctgatttctgaagtcgcacaaggtgccctgactttgtcactcccaaagtcacaggaca

SEQ ID NO: 178528 - DNA, 80 bp, synthetic construct
  source 1..80: mol_type = other DNA
ggtgtgaaggcactagtgtgctagttgtgagtcctccggcccctgaatgcggctaatcctaaccctgcagccattgcaaa

SEQ ID NO: 178529 - DNA, 80 bp, synthetic construct
  source 1..80: mol_type = other DNA
gtgatgccataagaattctttgttatggggatgatgttctgattgtcttttcaaggcaagtccaaattgacaatctggac

SEQ ID NO: 178530 - DNA, 80 bp, synthetic construct
  source 1..80: mol_type = other DNA
gcccccggaggcagacgcgtacggagaaccccggcagtgagccatggcctactggtggcgccgccggaggtggccgtgga

SEQ ID NO: 178531 - DNA, 80 bp, synthetic construct
  source 1..80: mol_type = other DNA
attgcagacaacaatatgtgactgttttctatggcgtacccgcgtggaaaaatgcatccattcccctcttttgtgcaact

SEQ ID NO: 178532 - DNA, 80 bp, synthetic construct
  source 1..80: mol_type = other DNA
aatgctcttcaacgattggaaaataagtctgtctagcttagtgcaacttaggaagaaactggagctttttacctatgtaa

SEQ ID NO: 178533 - DNA, 80 bp, synthetic construct
  source 1..80: mol_type = other DNA
tgcccagccgagacagccgctccagcaggttctggttcagctgccagtaggtgtagcggggctcgtcgtccggccgctgc

SEQ ID NO: 178534 - DNA, 80 bp, synthetic construct
  source 1..80: mol_type = other DNA
ggtgacgacgcaaaaactgttagcaacacacagaaaagtcaaccatccaactcagaacaagtacccgctctgaccgcggt

SEQ ID NO: 178535 - DNA, 80 bp, synthetic construct
  source 1..80: mol_type = other DNA
ccttcgttcgccagacagcattctatcagaatgacgtgcagaacgcaatcgaccgtgctatagtgcgcgtggccgacaca

SEQ ID NO: 178536 - DNA, 80 bp, synthetic construct
  source 1..80: mol_type = other DNA
agacgcaaacaaaataaacacatttattactgagggagcctttcatgaaccaaaagtagaaaagtataagaaaccctttc

SEQ ID NO: 178537 - DNA, 80 bp, synthetic construct
  source 1..80: mol_type = other DNA
ttatggagtttcttcagtgacgtggcttgttcacgtcgttcgtgggctgcggttggcagctccggtctgtaaaccacccg

SEQ ID NO: 178538 - DNA, 80 bp, synthetic construct
  source 1..80: mol_type = other DNA
atcccatcaacggagagaccgaacgattggtatggggagcagaacaaggggatgtagattcagatgatgatgacctagta

SEQ ID NO: 178539 - DNA, 80 bp, synthetic construct
  source 1..80: mol_type = other DNA
agtaatcaatctgaatgtaatgatacctggtactatggaaaaacttatacaaaccaaatagctacggcagccgaaaaaat

SEQ ID NO: 178540 - DNA, 80 bp, synthetic construct
  source 1..80: mol_type = other DNA
gctagaccagcttaatcccgagggcccggcaggtcccggagggccccccgccatcttgccagctctgccggccccggcag

SEQ ID NO: 178541 - DNA, 80 bp, synthetic construct
  source 1..80: mol_type = other DNA
gactttatagtacaatatgatataaatgaaccatttgcactagacaaatacagctctgctagctatcatcccgctaaaat

SEQ ID NO: 178542 - DNA, 80 bp, synthetic construct
  source 1..80: mol_type = other DNA
ccaagtgcacaacaacagggattctcaccaacatgggatgaaattaaaaataacacagtactaaatacacaaggctcaaa

SEQ ID NO: 178543 - DNA, 80 bp, synthetic construct
  source 1..80: mol_type = other DNA
aaataaaaatgttgtgcaagcaactactacagtgaatacaacaaatttgacccaacacccctcagcaccaactatgccct

SEQ ID NO: 178544 - DNA, 80 bp, synthetic construct
  source 1..80: mol_type = other DNA
cccagtcacgatatctccgcctcttactgtcttctctggacccaaggccctcgcccctggcgtctatcctcctactattg

SEQ ID NO: 178545 - DNA, 80 bp, synthetic construct
  source 1..80: mol_type = other DNA
acatacgtgcctgacaccatccgcccagaggtgcgcacggctggtaagtttgggcaacagtctggtgcaatttatgtggg

SEQ ID NO: 178546 - DNA, 80 bp, synthetic construct
  source 1..80: mol_type = other DNA
acatcacctgcacgtacctttatacccacagtaggcccaaaagcactcctgtttccagaaaggctgccacaaccacatag

SEQ ID NO: 178547 - DNA, 80 bp, synthetic construct
  source 1..80: mol_type = other DNA
gagctagcaccagcggtggccaaagtgtaggctgcaatagcatcttcctcatctgactcctcagcgatggcccgtaggtc

SEQ ID NO: 178548 - DNA, 80 bp, synthetic construct
  source 1..80: mol_type = other DNA
gttatggtgtatggccacactacttgacaccagaggatgctactgcaatagataaaccttctcaccccgacacttcatca

SEQ ID NO: 178549 - DNA, 80 bp, synthetic construct
  source 1..80: mol_type = other DNA
agatgaaacccgagaccaggctgctaaacaaaccccccaccgtgctgactaggttggtgatggactgacccacgctaccc

SEQ ID NO: 178550 - DNA, 80 bp, synthetic construct
  source 1..80: mol_type = other DNA
taggttaccccacagggtacgacacaacagcttcctcaaaatttgaggagtggctctatggcaaatgctcacattatcag

SEQ ID NO: 178551 - DNA, 80 bp, synthetic construct
  source 1..80: mol_type = other DNA
tattgttttggacacttacaaaaatattgacctggacaaacttaagattgtagcttatggtgatgatgttgttgtatcct

SEQ ID NO: 178552 - DNA, 80 bp, synthetic construct
  source 1..80: mol_type = other DNA
gctttattagggtgtcacacatccccatggtcatttttaaaggacaaagtgtgcaagtggttaggtataccagtgccagc

SEQ ID NO: 178553 - DNA, 80 bp, synthetic construct
  source 1..80: mol_type = other DNA
cactcccgatctgaatcaaccatcgagaacttcttgtgcagatctgcatgtgtgcacatagcctcatacaacgcgtatgg

SEQ ID NO: 178554 - DNA, 80 bp, synthetic construct
  source 1..80: mol_type = other DNA
gataatatgttggtggctgtggatcactatgctggacaattaatgtcattagacattccaactactgagttgacattgaa

SEQ ID NO: 178555 - DNA, 80 bp, synthetic construct
  source 1..80: mol_type = other DNA
ccatcaatcaccttgtcctgtttgacaacgcccttcgcaagtacgattccggccaggtggcggcgggcttccagagggcc

SEQ ID NO: 178556 - DNA, 80 bp, synthetic construct
  source 1..80: mol_type = other DNA
cacctactattaatgccgggatccgagagcagcaatggttcgagtccatccttagatcccaccactcgttctgtggctgt

SEQ ID NO: 178557 - DNA, 80 bp, synthetic construct
  source 1..80: mol_type = other DNA
gcaagtttctgatggcttacactccgccaggtggaggcctacctacaactaggaaagaagcaatgttgggtgtacacgtt

SEQ ID NO: 178558 - DNA, 80 bp, synthetic construct
  source 1..80: mol_type = other DNA
aaagaatgcaatctatacagtatacacactccatcaaacaccaagttacaacctagtgttttttatgatattttccctgg

SEQ ID NO: 178559 - DNA, 80 bp, synthetic construct
  source 1..80: mol_type = other DNA
ttaacaatacagtaacaggccacaaaaaggtgggtatgtatgcagttcgtgtgggtgtccaaacagcatcagccagagaa

SEQ ID NO: 178560 - DNA, 80 bp, synthetic construct
  source 1..80: mol_type = other DNA
gaaacgaaagcggcgctggtggtggagaaagcggtggacccgtggccgacttcgcagacgatggcctagacgatctcgtc

SEQ ID NO: 178561 - DNA, 80 bp, synthetic construct
  source 1..80: mol_type = other DNA
atataccaaactctgaggatgattatgtcaactgcaatttggctttagttgcaaatcaggacatgccacaaatattagag

SEQ ID NO: 178562 - DNA, 80 bp, synthetic construct
  source 1..80: mol_type = other DNA
tcattgtcagctaatgagacaggagcaaccatgcccacagtaccatcagataatatagaaaccagaactacatatatgaa

SEQ ID NO: 178563 - DNA, 80 bp, synthetic construct
  source 1..80: mol_type = other DNA
gcagaggtatacatgagcctgcgatgtcccaatttctttttccccgttcctgcaccaaaaccagaaaacactaaaagatc

SEQ ID NO: 178564 - DNA, 80 bp, synthetic construct
  source 1..80: mol_type = other DNA
ctctgttccccggggaatcaaacagacacagacacgcgtctgcttttcgccgtgcgcttttattcgccgccgccgtccca

SEQ ID NO: 178565 - DNA, 80 bp, synthetic construct
  source 1..80: mol_type = other DNA
cagctgagactggtgcgacttctaacacatctgatgaaaacatgattgagaccagagcagtggtgaacaaacatagtacc

SEQ ID NO: 178566 - DNA, 80 bp, synthetic construct
  source 1..80: mol_type = other DNA
gggaaagtagcactagcagcggccagagtagcggtgacgagagtaactgcagtctacgcacccacggcgtgtacacacgg

SEQ ID NO: 178567 - DNA, 80 bp, synthetic construct
  source 1..80: mol_type = other DNA
gaaacagacttagatcaagccattatggccaaatacaaaggtaacttggaagtagaatggaatgattatatacaaaccgc

SEQ ID NO: 178568 - DNA, 80 bp, synthetic construct
  source 1..80: mol_type = other DNA
gtctttggcaactggtttgatttaacctcctggatcaaatatattcaatatggggtttatatagtagtaggaataatagc

SEQ ID NO: 178569 - DNA, 80 bp, synthetic construct
  source 1..80: mol_type = other DNA
aagtttcatccatggaggcttatagagtcgaattgagcaccaacactaatgccgggactcaagtgtttggctttcaactg

SEQ ID NO: 178570 - DNA, 80 bp, synthetic construct
  source 1..80: mol_type = other DNA
aactcttaaaatgcttgttgcttatactcctccaggaatagcaaagccagaaactagaaaggatgctatgttaggtactc

SEQ ID NO: 178571 - DNA, 80 bp, synthetic construct
  source 1..80: mol_type = other DNA
tcctatagccagcggaatcacatctggtgacagatgcctctggggccgaaagccaaggtttaacagaccctataggattg

SEQ ID NO: 178572 - DNA, 80 bp, synthetic construct
  source 1..80: mol_type = other DNA
agccccctacacttagagcagttgtgacacaaggacccaatacagagtttgctttatccttgcttagaaagaatatagta

SEQ ID NO: 178573 - DNA, 80 bp, synthetic construct
  source 1..80: mol_type = other DNA
tccccatgttagacgtagaggtgggtgaggtcatcccatatggacaactaaatctgagcggcaaccccacttgccgttta

SEQ ID NO: 178574 - DNA, 80 bp, synthetic construct
  source 1..80: mol_type = other DNA
tccctttcccagccagaggtggctggttaaataatacctaatgtaaccaaacatctaagaaacaataaccacacacctgg

SEQ ID NO: 178575 - DNA, 80 bp, synthetic construct
  source 1..80: mol_type = other DNA
agatcatactttaacgagcaacaagggaaaattgtgtcaaagacagatgttaaagcagaaaatctttatagtatacatac

SEQ ID NO: 178576 - DNA, 80 bp, synthetic construct
  source 1..80: mol_type = other DNA
ggattggggcagtacaaaacaccactgaagaaactaatcataatgaacttcagtgatgtttcggtctctgacatactcta

SEQ ID NO: 178577 - DNA, 80 bp, synthetic construct
  source 1..80: mol_type = other DNA
gcgaccgggcctcggtgaactccctcctctctggcatggtacgtaccgacgtcatacgccaggtcgggaacgccggcgcc

SEQ ID NO: 178578 - DNA, 80 bp, synthetic construct
  source 1..80: mol_type = other DNA
aagggcagaaagagatacagagtgacaataagaccccccaacatgtttgctgacaagtggtacactcaagaggacctttg

SEQ ID NO: 178579 - DNA, 80 bp, synthetic construct
  source 1..80: mol_type = other DNA
gcccggtggttgtacccaccaccgggcacattgtgcgtggtacactggaattacggttcctttgtacgcctgttttccct

SEQ ID NO: 178580 - DNA, 80 bp, synthetic construct
  source 1..80: mol_type = other DNA
gaggtactccagttccagccaggacagcagctccagcaactccacctgcagctcgcgcagcagcagcagatcgggcagca

SEQ ID NO: 178581 - DNA, 80 bp, synthetic construct
  source 1..80: mol_type = other DNA
tatatagacagagtgactcttggttaaagaaattcaccgaggcatgtaatgcagctaaggggttagagtggttggccaat

SEQ ID NO: 178582 - DNA, 80 bp, synthetic construct
  source 1..80: mol_type = other DNA
tctgcatgcaatgacttctcagtacgcatgttgcgtgacacgccattcatagaacaggaagcagaactacagggtgatcc

SEQ ID NO: 178583 - DNA, 80 bp, synthetic construct
  source 1..80: mol_type = other DNA
ccaggaactagcatcgcccaagacatgccaccactaacacaccaaattatgtatattcctcctgggggccctgtaccaaa

SEQ ID NO: 178584 - DNA, 80 bp, synthetic construct
  source 1..80: mol_type = other DNA
acatgcaaacatattaaatacatttagaacagaaggatgcatgtcacatccacaactaccaaaatacaacagtaacatag

SEQ ID NO: 178585 - DNA, 80 bp, synthetic construct
  source 1..80: mol_type = other DNA
agtttatggaaacctattttccaaatttcatttgaatccaggggttgtaacaggatgcgctgtcgggtgtgacccagaga

SEQ ID NO: 178586 - DNA, 80 bp, synthetic construct
  source 1..80: mol_type = other DNA
aggctttattttcaaaatatgtgggaaacacgcttcacgatcccgacgagtttgtcagggaggcggctttgcattatgcc

SEQ ID NO: 178587 - DNA, 80 bp, synthetic construct
  source 1..80: mol_type = other DNA
aggccacaggcggcgcattcgatacgctgcttttggccgtagacgacggtgggtaaacggtggttaccgcgggatacgtc

SEQ ID NO: 178588 - DNA, 80 bp, synthetic construct
  source 1..80: mol_type = other DNA
ggcccgcccactccaaggaagttccggcactgactgcggtcgagaccggtgccaccaatccacttgttccatcagacacc

SEQ ID NO: 178589 - DNA, 80 bp, synthetic construct
  source 1..80: mol_type = other DNA
tttacactctggaatcagtgcaatggaacagggacagtaagggatggtggtggaaattaccagactgtctcaaggatatg

SEQ ID NO: 178590 - DNA, 80 bp, synthetic construct
  source 1..80: mol_type = other DNA
gaatacatgtgggtggtaatggtagggatggcttctcagcaatgttactcagatcttactttagtgaaactcagggtgaa

SEQ ID NO: 178591 - DNA, 80 bp, synthetic construct
  source 1..80: mol_type = other DNA
accttccacgagcaaaacacgtagccccttcagagccagatcctgagcaagatgaacagaaactgaggttttgtaaacgc

SEQ ID NO: 178592 - DNA, 80 bp, synthetic construct
  source 1..80: mol_type = other DNA
aattgaaacctcagcaagatctgttgctggggaggcatgggtgacagctgtcatcctgtgcagtctgccctgggcactca

SEQ ID NO: 178593 - DNA, 80 bp, synthetic construct
  source 1..80: mol_type = other DNA
tacaaccaagtatacaatgaatttaaagaggtatacccactaacagctacatggccaccgcaatggaatgctagacaata

SEQ ID NO: 178594 - DNA, 80 bp, synthetic construct
  source 1..80: mol_type = other DNA
tggctttgtgcctctgtcatccacagtctattcgactctggcattcttaatacaccttaacaataagaaatgggggcgca

SEQ ID NO: 178595 - DNA, 80 bp, synthetic construct
  source 1..80: mol_type = other DNA
cttctctcattgctcggacgctcgctgccaaacttggcaagggccccgacgacttcttctccccatcctctgctgattct

SEQ ID NO: 178596 - DNA, 80 bp, synthetic construct
  source 1..80: mol_type = other DNA
tggattcactccgttgacctataaatccctaaacaccttgtgctatattttgaatttaaacacacgaaaatgggagctca

SEQ ID NO: 178597 - DNA, 80 bp, synthetic construct
  source 1..80: mol_type = other DNA
tatggtaaactttgacttaaattatccctaataaactaggcctgcaaactttcactctcggtgtccatttatataagttt

SEQ ID NO: 178598 - DNA, 80 bp, synthetic construct
  source 1..80: mol_type = other DNA
cagaggagaaaacccagagcaaaaagaatgctattctctcctcaaagcactcgaggaagaagagaccccagaagaagaag

SEQ ID NO: 178599 - DNA, 80 bp, synthetic construct
  source 1..80: mol_type = other DNA
ccgagcctggtgattgcggtgggattttgagatgcgagcatggtgtcatcggaatcgtgaccatgggtggtgaaggcatt

SEQ ID NO: 178600 - DNA, 80 bp, synthetic construct
  source 1..80: mol_type = other DNA
gagcgcactacttcaaggagatgtagtggaggcaattgagagcgcggttgccagggttgcagacacgattagcagtggtc

SEQ ID NO: 178601 - DNA, 80 bp, synthetic construct
  source 1..80: mol_type = other DNA
gcctcggttttaggccttccggactaccaaaatggcggattccgtgacgtcatggccgccattttaggctgttgcccggc

SEQ ID NO: 178602 - DNA, 80 bp, synthetic construct
  source 1..80: mol_type = other DNA
cagcagctcaaacagcaacaacagctcaggagaggaatcaactgcctcttcgagcagctgataaaaacccagcagggggt

SEQ ID NO: 178603 - DNA, 80 bp, synthetic construct
  source 1..80: mol_type = other DNA
tgtcactgtcagcccccttctattctcacaagccattgaggacagttagggacacacacagtttaggtagactcatttgc

SEQ ID NO: 178604 - DNA, 80 bp, synthetic construct
  source 1..80: mol_type = other DNA
agggtgctttagccgtgttcgccgtccctgagtgcgtgttttcaggaaattcaaaggataagaccaactacaccagctat

SEQ ID NO: 178605 - DNA, 80 bp, synthetic construct
  source 1..80: mol_type = other DNA
aagcataactactatgacaaatactggtgcatttggacagcagtcaggggctgtgtatgtcggaaattacagggtggtca

SEQ ID NO: 178606 - DNA, 80 bp, synthetic construct
  source 1..80: mol_type = other DNA
agaccttgcagtcggtatgcggaatcataacaccgcttacatcaaagcatttatccattttccaacggaaattctggatg

SEQ ID NO: 178607 - DNA, 80 bp, synthetic construct
  source 1..80: mol_type = other DNA
gaaatacgaagacttcctagggaaggttggtagttgtaatgttgggaaacagttgtaccttcctccctaccaaagcttgt

SEQ ID NO: 178608 - DNA, 80 bp, synthetic construct
  source 1..80: mol_type = other DNA
aatgatccagtggacacttttgtgcatggtgtgcttgaagaggttgttgttgtcccagacacacatgcttctggaccaca

SEQ ID NO: 178609 - DNA, 80 bp, synthetic construct
  source 1..80: mol_type = other DNA
taaacctcatcacacccctcccagaaagggacctagccatagttggagtgagagcccatggttcagaaactgtaccacat

SEQ ID NO: 178610 - DNA, 80 bp, synthetic construct
  source 1..80: mol_type = other DNA
atagcttattaaatgaagtattagtagtacccaacattcaaccaagcacatctgtctcaagtcactcagtaccagcatta

SEQ ID NO: 178611 - DNA, 80 bp, synthetic construct
  source 1..80: mol_type = other DNA
atatacagtacaatatacttttaggtgagggtccatgtgagcctggagattgtggaggtaaactgctgtgcaaacatggt

SEQ ID NO: 178612 - DNA, 80 bp, synthetic construct
  source 1..80: mol_type = other DNA
ttatgctgttagaggaggaatgccatcagggtgctctggaactagcattttcaattctatgattaataatataataataa

SEQ ID NO: 178613 - DNA, 80 bp, synthetic construct
  source 1..80: mol_type = other DNA
tcagtggttagagagaaataaagagcacgtttgtgcaatcttggattatgcctctgatattattgtggagtcaaaagacc

SEQ ID NO: 178614 - DNA, 80 bp, synthetic construct
  source 1..80: mol_type = other DNA
ctgtaacattctgtaagactcggcgttcaaaggaataccaatgcatgttgagcgaaaactaatattgcaatggactggcg

SEQ ID NO: 178615 - DNA, 80 bp, synthetic construct
  source 1..80: mol_type = other DNA
gtccaggtcttcattgataggcttcatcgaggtgcagacgatattacgttcaaagcgaataagatccgtaccctgtgcca

SEQ ID NO: 178616 - DNA, 80 bp, synthetic construct
  source 1..80: mol_type = other DNA
aaacatgatttaaatatcgtgtgccgcatttatcacaaagccaaacacataaaggcctggtgtccacgtccaccaagggc

SEQ ID NO: 178617 - DNA, 80 bp, synthetic construct
  source 1..80: mol_type = other DNA
cagggccagcacctatgacttactacgagagtatggcctctacagtccatactacctaaaccccacaaggataaaccttg

SEQ ID NO: 178618 - DNA, 80 bp, synthetic construct
  source 1..80: mol_type = other DNA
ggtcaaattaactgagtctctattttcaaagtataaaggaaatgtagaaatgaagcctacagaaaacatgttaattgctg

SEQ ID NO: 178619 - DNA, 80 bp, synthetic construct
  source 1..80: mol_type = other DNA
gaaccaatatgtccaggtagctgttgatcactatgctgcacaactaacagtcttagacataaatactgaacccctaactc

SEQ ID NO: 178620 - DNA, 80 bp, synthetic construct
  source 1..80: mol_type = other DNA
aagtaaaaagctaccttatacctctacagccaaacagacaaggagagatggtgtttggaaccaaactgttcataggagac

SEQ ID NO: 178621 - DNA, 80 bp, synthetic construct
  source 1..80: mol_type = other DNA
acacgaatttattcgtgcacttgtcaagagaaattgtcacatcctaactacaaacagaggagaattcaacctgctaggaa

SEQ ID NO: 178622 - DNA, 80 bp, synthetic construct
  source 1..80: mol_type = other DNA
ggagaccaatactttcaaacactagatggtctctggggaaacccaatatatgctaactctagaaacaacggaggaacaag

SEQ ID NO: 178623 - DNA, 80 bp, synthetic construct
  source 1..80: mol_type = other DNA
acagggtaagggccataacgctaggcaattccaccataaccacacaagaaagtgccaacgtggttgtggcatatggtagg

SEQ ID NO: 178624 - DNA, 80 bp, synthetic construct
  source 1..80: mol_type = other DNA
gcctcatagtagtgcagtgcccctacacttttccccccatgtacaacaaacagctaccagacatggggtacgtgttctat

SEQ ID NO: 178625 - DNA, 80 bp, synthetic construct
  source 1..80: mol_type = other DNA
tttattgttcatgatgatatatttttatcttgtgcaatgtaacatcagagattttgagacacgacctgcaggcatgcaag

SEQ ID NO: 178626 - DNA, 80 bp, synthetic construct
  source 1..80: mol_type = other DNA
tttaggaccctcgggctcaaacatataggccttgtttatgcttgggaagataatagggggtgtaggccgtgccctgcttg

SEQ ID NO: 178627 - DNA, 80 bp, synthetic construct
  source 1..80: mol_type = other DNA
tgaatttgtaaataataaatgagaccccatcctgtaaaaatacagagtccgtgtcagtctctgaaggacagagtattggc

SEQ ID NO: 178628 - DNA, 80 bp, synthetic construct
  source 1..80: mol_type = other DNA
gggttttgtataaaataggtttagttttaggaatacacgtaggtggcaatggaagggatggcttttcagcaatgttactt

SEQ ID NO: 178629 - DNA, 80 bp, synthetic construct
  source 1..80: mol_type = other DNA
gtctcaccacagctgggcccagtgacatgtatgtgcatgtgggtaatcttatttacagaaatctccatctttttaactct

SEQ ID NO: 178630 - DNA, 80 bp, synthetic construct
  source 1..80: mol_type = other DNA
tcagacaagttcaaatattagcagagaaaatgatagcagaaaacatattacaattttttcctgaaagtcttacaagatat

SEQ ID NO: 178631 - DNA, 80 bp, synthetic construct
  source 1..80: mol_type = other DNA
tataaagattcacttaactccgttaacatgctatgtttttataacgacaatgtcttagaaattatacattacttcttatt

SEQ ID NO: 178632 - DNA, 80 bp, synthetic construct
  source 1..80: mol_type = other DNA
cgcgcattcaatcctaaggatattaaaaactacatagtcaccgatggtatgaaagtccgcaagctcctcgatttcataaa

SEQ ID NO: 178633 - DNA, 80 bp, synthetic construct
  source 1..80: mol_type = other DNA
ggttctaaagaaccagcagttcttagttcaaaagaccctagactggaagtggatttggacacagccatatttgccaaata

SEQ ID NO: 178634 - DNA, 80 bp, synthetic construct
  source 1..80: mol_type = other DNA
gtaccggaactaaaatgctagttagaatggttgcagttgctattagcgcggctagtaacagtagtttagtgttacattgt

SEQ ID NO: 178635 - DNA, 80 bp, synthetic construct
  source 1..80: mol_type = other DNA
ttggacccgtgttctagaacagatcttggtcaatcaaagccgtgggcgcgttaaaattctcagccaaaaatccgattttg

SEQ ID NO: 178636 - DNA, 80 bp, synthetic construct
  source 1..80: mol_type = other DNA
catcattttaatttgtttcaaatttccccagaaagcttggaataaattcacacaataccgatacaacagtatgctcgccg

SEQ ID NO: 178637 - DNA, 80 bp, synthetic construct
  source 1..80: mol_type = other DNA
gaatacactccaaacaaaagcaaatgcctcatagcagacatccccctgtggagtgccttcacaggctacatagaatactg

SEQ ID NO: 178638 - DNA, 80 bp, synthetic construct
  source 1..80: mol_type = other DNA
gaagtggcatagccttgtcaagtatctaaaatacaaaacaggagatctagaacaggtgtgctatgttccccaccataagg

SEQ ID NO: 178639 - DNA, 80 bp, synthetic construct
  source 1..80: mol_type = other DNA
tgcaaacacagtagaatcacaggcctcagctgtaactgagttcttaaaaaatgcatttaaaactacaggaacaaaactaa

SEQ ID NO: 178640 - DNA, 80 bp, synthetic construct
  source 1..80: mol_type = other DNA
gacaccaagctgtgggaaaaatcatctaaggggtggtattggaagtttccagacgtgctaactgagaccggagtatttgg

SEQ ID NO: 178641 - DNA, 80 bp, synthetic construct
  source 1..80: mol_type = other DNA
gaaatgcatgagtctgtccttgtatcttactcatctgatctagtcatataccgaacaaacacaaaaggtgatgactacat

SEQ ID NO: 178642 - DNA, 80 bp, synthetic construct
  source 1..80: mol_type = other DNA
ttcactcatccttatgtcttagatgatggcacttctctggcgtgttcccttatatttccacaccagtggattaacttgag

SEQ ID NO: 178643 - DNA, 80 bp, synthetic construct
  source 1..80: mol_type = other DNA
gtaaactcctgtgataaatgtcaacaaaaaggagaagctgttcatggacaggtaaatgcagaactagggacatggcaaat

SEQ ID NO: 178644 - DNA, 80 bp, synthetic construct
  source 1..80: mol_type = other DNA
caattaccgtaacaattgcaccaatgtatgcagagtataatgggctgcgcctgtcaacccaacaccaggggcttccagtg

SEQ ID NO: 178645 - DNA, 80 bp, synthetic construct
  source 1..80: mol_type = other DNA
atcaacatctttggcagaaatattttgacagccttaggcatgtcattaaatttaccagtcgctaggatagagccaataaa

SEQ ID NO: 178646 - DNA, 80 bp, synthetic construct
  source 1..80: mol_type = other DNA
tgacactggacgtggtgtcagacgcaggctgtatgcataccctgtaccaggtattggggtggccacgggactcgttgatg

SEQ ID NO: 178647 - DNA, 80 bp, synthetic construct
  source 1..80: mol_type = other DNA
gaggttggtctggtaatattgggatggcaaccggtggatgggtgggggggacatatttcggtaaaaataaggtggtcaca

SEQ ID NO: 178648 - DNA, 80 bp, synthetic construct
  source 1..80: mol_type = other DNA
ctaccagaccatgaaggagccagagaggccataagaaaaaaactacacccacaatccttaacaggatctgtcccaaacca

SEQ ID NO: 178649 - DNA, 80 bp, synthetic construct
  source 1..80: mol_type = other DNA
atagacacgtgtttggaactctgtccccccacgttttcactgtgtataacaaaaatatgtgtttctcaaaagatcttgag

SEQ ID NO: 178650 - DNA, 80 bp, synthetic construct
  source 1..80: mol_type = other DNA
ccttcacaaacagaaacaacaattccaagtatattagccagaaatgcttacacatactatcaaaaagctaaaacaggcac

SEQ ID NO: 178651 - DNA, 80 bp, synthetic construct
  source 1..80: mol_type = other DNA
gcagaccccagagaggtagtaccaccaggaaacagtggcgaagagaccatcggagaggccttcgaatggctagacaggac

SEQ ID NO: 178652 - DNA, 80 bp, synthetic construct
  source 1..80: mol_type = other DNA
gcccttcataattgcaacatccaactggtctaatccaagtcctaaaacagtctatgttaaagaagccatagatcgtaggt

SEQ ID NO: 178653 - DNA, 80 bp, synthetic construct
  source 1..80: mol_type = other DNA
catgcggccgcagctacgaggtaatcaacgtaacaggacacgttggtggaaacgttattctaaaaaaatgtaatgacacg

SEQ ID NO: 178654 - DNA, 80 bp, synthetic construct
  source 1..80: mol_type = other DNA
tcaatctcaggacaaataactccagtactataattgtgccatacattaattgtgttccaatggataatatgttaaaacat

SEQ ID NO: 178655 - DNA, 80 bp, synthetic construct
  source 1..80: mol_type = other DNA
gagggtggtcgcgcgcgtacagacgatggaggagacggagagggcgacagagacacaaaaaaagacttatactgactcaa

SEQ ID NO: 178656 - DNA, 80 bp, synthetic construct
  source 1..80: mol_type = other DNA
acgggggcatcgaacccagcagtcccttcagacttagtacaaacaagacatgtcattcagacacgcagtagaagtgagtc

SEQ ID NO: 178657 - DNA, 80 bp, synthetic construct
  source 1..80: mol_type = other DNA
atatagcagcacagcacccgacaaaactcacttaagagagagatggacccgtacatggtcatcatgcaagcgtcactggt

SEQ ID NO: 178658 - DNA, 80 bp, synthetic construct
  source 1..80: mol_type = other DNA
tcagagttaaatatcttgaatcatcagttaattcagagcatattttctcaataggacaaaattgtgaaacaatagctaag

SEQ ID NO: 178659 - DNA, 80 bp, synthetic construct
  source 1..80: mol_type = other DNA
ccggttctcatgagaattcagtttcagcatcaggaggttctgttataaaatatttcaacataaactactacaaggactca

SEQ ID NO: 178660 - DNA, 80 bp, synthetic construct
  source 1..80: mol_type = other DNA
acccagaacctataacaatggaacaagcagtatatggcacagattacttagaaccattagacttaaacaccagtgctgga

SEQ ID NO: 178661 - DNA, 80 bp, synthetic construct
  source 1..80: mol_type = other DNA
ggccaccgcgattgtgcccctacttgtacaaggccaacatcaatttcaacccaacacctgttgcagaacatcgccgggac

SEQ ID NO: 178662 - DNA, 80 bp, synthetic construct
  source 1..80: mol_type = other DNA
tatacaaagaacactaggcccctaccaggacatagaaaccgtaggcgttatatgctttataagtccctacacagacccac

SEQ ID NO: 178663 - DNA, 80 bp, synthetic construct
  source 1..80: mol_type = other DNA
tcccttgttttctgatagcatgtttgcgaggttttggatgttaagttcggaagtgagcagttgctccaggtccagcgtgg

SEQ ID NO: 178664 - DNA, 80 bp, synthetic construct
  source 1..80: mol_type = other DNA
acccctgacacacccgcgacacacccggcacacgcccgcgacacacccggcacgcgcccgccacacagccagccgacaca

SEQ ID NO: 178665 - DNA, 80 bp, synthetic construct
  source 1..80: mol_type = other DNA
ccagctttgctttcttaaaaagggcctggggatatgttatgaacgctcgagaaagagatcttcaaaaagggctaagacta

SEQ ID NO: 178666 - DNA, 80 bp, synthetic construct
  source 1..80: mol_type = other DNA
gaattattcacatacactagatttgattctgaaataacaatagttacagcagctgcagcacaaggtgaagatattgggca

SEQ ID NO: 178667 - DNA, 80 bp, synthetic construct
  source 1..80: mol_type = other DNA
agtcaatatctaaactttaaatcaggtctatttagcagtatatttctagataatgccagactaagcccagactttaaagg

SEQ ID NO: 178668 - DNA, 80 bp, synthetic construct
  source 1..80: mol_type = other DNA
gcacctgagtcgaggtgagagggccatggagttcaaggatggtaccacaggagaggaaaactctgtacaagcggcagtgt

SEQ ID NO: 178669 - DNA, 80 bp, synthetic construct
  source 1..80: mol_type = other DNA
cagcttactgaccccccattttacccttactgcaaaaataattacaatgtaacctttcagcttaactacaaataaagctc

SEQ ID NO: 178670 - DNA, 80 bp, synthetic construct
  source 1..80: mol_type = other DNA
acctcaccaagcccaccacagagttcaacgaacagcaatgcaagtgtgttataactgacattccattatatgctgctcta

SEQ ID NO: 178671 - DNA, 80 bp, synthetic construct
  source 1..80: mol_type = other DNA
agctggtaaaacgcgtatcattgaagctgctagtctaaatgatacagcgcacttccgacaagtttttggaaaccttttca

SEQ ID NO: 178672 - DNA, 80 bp, synthetic construct
  source 1..80: mol_type = other DNA
gagcgtcagcgaggagtgcgaccctgggcgtgggtgcaacgccctcggcggccgcgcgctacgccttcggctgcgcgcgg

SEQ ID NO: 178673 - DNA, 80 bp, synthetic construct
  source 1..80: mol_type = other DNA
gtgggccacggggggcgagacatgtacaaggacatcctggcccatctggagcagaactcacagcgcaaggaccccaagaa

SEQ ID NO: 178674 - DNA, 80 bp, synthetic construct
  source 1..80: mol_type = other DNA
ctggcaaacatccaccaaccccagtgtgttctggacagagggaaatgcacccgcccgcatatccattccgttcatcagtg

SEQ ID NO: 178675 - DNA, 80 bp, synthetic construct
  source 1..80: mol_type = other DNA
catggattgacaagtttatttagagtttgtagattctacacatatatatatagaatattatctgattaggaatagtattt

SEQ ID NO: 178676 - DNA, 80 bp, synthetic construct
  source 1..80: mol_type = other DNA
aggtcttcatcatacgtgcacagaggccaacttacgtgcactgggctctccgcaaggtgacccgtgatggaagtaccaag

SEQ ID NO: 178677 - DNA, 80 bp, synthetic construct
  source 1..80: mol_type = other DNA
tcattggaggtgctatttcaaggaccaacatacaaggacttgcacatagatgtaacaactacaccacctccagaatgcat

SEQ ID NO: 178678 - DNA, 80 bp, synthetic construct
  source 1..80: mol_type = other DNA
cctaaacgctacccccttctacccctgggcccccagacccaaaaaccgatactctgcctgctttcgcttaggcttcaaat

SEQ ID NO: 178679 - DNA, 80 bp, synthetic construct
  source 1..80: mol_type = other DNA
aactacatattttccataaatctacactgaacttgagcacaaagatactgacaatagactggatatacagacttttatat

SEQ ID NO: 178680 - DNA, 80 bp, synthetic construct
  source 1..80: mol_type = other DNA
cggcctgcagctacccgaagtgcagcagcgcctacagaacgcgcaactcgcgctaagccgcctctacgaagaggaagagg

SEQ ID NO: 178681 - DNA, 80 bp, synthetic construct
  source 1..80: mol_type = other DNA
aatgggtggatgtcagggaaatgctgtttagatttaaaaaagcaatggataaagattacagaagcatgatgtggcatttt

SEQ ID NO: 178682 - DNA, 80 bp, synthetic construct
  source 1..80: mol_type = other DNA
gtacaacaaagagggaataaaactagaaatcacagttctgatcctatccagaaatgagaagtttagggatattagaaaat

SEQ ID NO: 178683 - DNA, 80 bp, synthetic construct
  source 1..80: mol_type = other DNA
aaggatactaccaaactacaagagatgatcgacacatatggccttgatttaccttatattacatatctaaaggatgagtt

SEQ ID NO: 178684 - DNA, 80 bp, synthetic construct
  source 1..80: mol_type = other DNA
ttgctgaggtggactctgtggtccctgtgaataacatgagcagcaaggtcaaaactatagaagcataccaaataccagtg

SEQ ID NO: 178685 - DNA, 80 bp, synthetic construct
  source 1..80: mol_type = other DNA
gcaaacgtccaatggggccctgtgtgcagcattcagaacagatcctggattggatggcccttggcaagctactattttag

SEQ ID NO: 178686 - DNA, 80 bp, synthetic construct
  source 1..80: mol_type = other DNA
ctggtaagttattacttgcatattcaccacccggtgcctctgtcccaaccagtcgcaaagacgcaatgcttggaacacac

SEQ ID NO: 178687 - DNA, 80 bp, synthetic construct
  source 1..80: mol_type = other DNA
agaaccacttgacttaacaactagtgcagggtatccttatgtcattatgggattgaagaaaagagacatcttgaaccgta

SEQ ID NO: 178688 - DNA, 80 bp, synthetic construct
  source 1..80: mol_type = other DNA
agtaataacacatatgtgggtcttcccgatttgacactgcaggcaatgtttgtacccactggtgcccttaccccagaaaa

SEQ ID NO: 178689 - DNA, 80 bp, synthetic construct
  source 1..80: mol_type = other DNA
acactgagggcaaagtatcttcaattgaagcataccagatacccgtgcaatcaaactcaactaatggttcacaagtattt

SEQ ID NO: 178690 - DNA, 80 bp, synthetic construct
  source 1..80: mol_type = other DNA
gagcacaccagattccacaacacctggagctacccaaacactcagctagacttagccaggttcaaaggagtaaccttcta

SEQ ID NO: 178691 - DNA, 80 bp, synthetic construct
  source 1..80: mol_type = other DNA
atacagacactacatacaaccctaacacagataaaggtttaggaaacagaatgtggctacagtcagtaaccaaaaaaaca

SEQ ID NO: 178692 - DNA, 80 bp, synthetic construct
  source 1..80: mol_type = other DNA
ttgaggaatacttcaccaaggatgagaatagcgccaacaggtacatgtcatggcctataaatgccagaaggatggtacag

SEQ ID NO: 178693 - DNA, 80 bp, synthetic construct
  source 1..80: mol_type = other DNA
tgcgcttgtagtttacgagccaaaaccagttgtgacatatgatacccatcttgaattcggggcctttacaaatttaccac

SEQ ID NO: 178694 - DNA, 80 bp, synthetic construct
  source 1..80: mol_type = other DNA
cccggttcatcttccactcctgggactggcgacgggggtaccttagtgagtcagctctcaaacgcctgttcacaaaacct

SEQ ID NO: 178695 - DNA, 80 bp, synthetic construct
  source 1..80: mol_type = other DNA
tcatccctgaacaccagcaggagtggacaaacatgcacttagcaactaatgtttcaaagtttccaatgttagatgtggaa

SEQ ID NO: 178696 - DNA, 80 bp, synthetic construct
  source 1..80: mol_type = other DNA
gcgacagggtaaggtccatcactcttggcaactcaaccatcaccactcaggagagtgccaatgtggtcgttggctatggg

SEQ ID NO: 178697 - DNA, 80 bp, synthetic construct
  source 1..80: mol_type = other DNA
gttgctagaaggcagcgcgttaatccgcgtgttggcgcgcaccttcacgccggtgcagattcagacggacgctagcggcg

SEQ ID NO: 178698 - DNA, 80 bp, synthetic construct
  source 1..80: mol_type = other DNA
tggatagtcccagcggagtgtcaaatagagagagacttaaatattgctaatagcataataactattatagcaaacatcat

SEQ ID NO: 178699 - DNA, 80 bp, synthetic construct
  source 1..80: mol_type = other DNA
agtggtaccccatgtgcacacaccaggcttccgttttagaagcaatagtttcctgtagtccgtttatggttagagatcag

SEQ ID NO: 178700 - DNA, 80 bp, synthetic construct
  source 1..80: mol_type = other DNA
tgcctatcactatatccataagccccatgtgtgctgaattctctggtgctcgtgcacgcaaccaaggcctgccagtacta

SEQ ID NO: 178701 - DNA, 80 bp, synthetic construct
  source 1..80: mol_type = other DNA
gccacaatttctcgatgcggctgatgcaaacccagtagatgcccctactttgcctgattcttcgagcaatcgtttttaca

SEQ ID NO: 178702 - DNA, 80 bp, synthetic construct
  source 1..80: mol_type = other DNA
caaccctcaaattactacttgcttacacaccaccagggattgctgttccagatagcagaaagaaggctatgctcggtaca

SEQ ID NO: 178703 - DNA, 80 bp, synthetic construct
  source 1..80: mol_type = other DNA
tgtgccatatacacatgcccattccacaaattataaaccacatggtaaagaactgcagatattcattagatctagggatg

SEQ ID NO: 178704 - DNA, 80 bp, synthetic construct
  source 1..80: mol_type = other DNA
caagacaatcccacagagggctttgtattttatgactccctgtttggacaaggaaaaatgccagacggtaccgcccaaat

SEQ ID NO: 178705 - DNA, 80 bp, synthetic construct
  source 1..80: mol_type = other DNA
ttggcaccctagcagtgagggtggtaaatgagttcaaccccgcccgtatcacttcaaaaattagagtgtacatgaaacca

SEQ ID NO: 178706 - DNA, 80 bp, synthetic construct
  source 1..80: mol_type = other DNA
taataacttcatacctggaaacacatcagtacactacaacttctgtacataccggcctcactatgaccacctcaccaact

SEQ ID NO: 178707 - DNA, 80 bp, synthetic construct
  source 1..80: mol_type = other DNA
ggttgtttgcggcgagcgcagaggttacgttgtggacggggatgtgcggcgacgggatcggtggcaacgcgggaccggcg

SEQ ID NO: 178708 - DNA, 80 bp, synthetic construct
  source 1..80: mol_type = other DNA
tggctacagtgacttcatagagtcagagctaggccccttcgtggacgcagagaccgtgggcctaatctgtgtcatatgtc

SEQ ID NO: 178709 - DNA, 80 bp, synthetic construct
  source 1..80: mol_type = other DNA
taatgcacattagggctgcaaaagcatatagcaaggctggcaagttaaatgtaagccaggctatggccataatgtctact

SEQ ID NO: 178710 - DNA, 80 bp, synthetic construct
  source 1..80: mol_type = other DNA
gtgtcaagttgatacacttatcccaattaacaatacaccaggaaatgtaaataccataaacatgtatacagtattactag

SEQ ID NO: 178711 - DNA, 80 bp, synthetic construct
  source 1..80: mol_type = other DNA
actacccctggatgcctactccccccccccagttccgtgtatctttcaaactcggcttccaataaaatttctaggccgtg

SEQ ID NO: 178712 - DNA, 80 bp, synthetic construct
  source 1..80: mol_type = other DNA
gaacatacggtcccgtttttatgtccctcggcggcctgcttaccatggtagccggcgctgtgtggctgacggtgatgact

SEQ ID NO: 178713 - DNA, 80 bp, synthetic construct
  source 1..80: mol_type = other DNA
gaaccagcagtatcagacacaaaagctgaagaatttataaataactttctatctaaagccattccagacacacctgacag

SEQ ID NO: 178714 - DNA, 80 bp, synthetic construct
  source 1..80: mol_type = other DNA
gtgtacgcttgctaagggatacaacacatatcagccagtcaactctgatagctcaaactcaaggaattgatgatgttatt

SEQ ID NO: 178715 - DNA, 80 bp, synthetic construct
  source 1..80: mol_type = other DNA
ccagactggaagtcaagttgactgagtcattgttttctaaatacaaagggaatgtagatatggaacccactgaaaacatg

SEQ ID NO: 178716 - DNA, 80 bp, synthetic construct
  source 1..80: mol_type = other DNA
acagggtaaggtcaatcaccatagggaactctaccattaccacgcaagaatgcgccaacgtcgtggtggcttacggaagg

SEQ ID NO: 178717 - DNA, 80 bp, synthetic construct
  source 1..80: mol_type = other DNA
agacatctgccagctgccgctcgttaacattgcagcatctgcgtgcagcctgcggtttccgttctgctcaccacaaactg

SEQ ID NO: 178718 - DNA, 80 bp, synthetic construct
  source 1..80: mol_type = other DNA
aagcgtttcttgagcttccctgggatgagcgtttgggagagctgattctgcagcccagagagtagtctcagggcatcctc

SEQ ID NO: 178719 - DNA, 80 bp, synthetic construct
  source 1..80: mol_type = other DNA
gtgttactttcatccctcctatggctgatctacctgataaaggtaagccatttgattccagatttgtgttgtgcagtact

SEQ ID NO: 178720 - DNA, 80 bp, synthetic construct
  source 1..80: mol_type = other DNA
aacggtaaatttaacacaggcaacagcacccaatttggccacaatacctataaccctaacgaaacttacctaaaaacagc

SEQ ID NO: 178721 - DNA, 80 bp, synthetic construct
  source 1..80: mol_type = other DNA
gctgaagaactttattaaactaatcaacagcttgatgacaataatcataaactatgatgacaccacaactgtacttgcaa

SEQ ID NO: 178722 - DNA, 80 bp, synthetic construct
  source 1..80: mol_type = other DNA
gggtgtggtggcctcactctatctaggtgagttggttaaaaaacgtctagtgggccaaacccagggtggatccctggctt

SEQ ID NO: 178723 - DNA, 80 bp, synthetic construct
  source 1..80: mol_type = other DNA
tcttagctccgcctactattacatcactgtcagcaatgaatagaaggttctttttagatttagatattgtgattcatgat

SEQ ID NO: 178724 - DNA, 80 bp, synthetic construct
  source 1..80: mol_type = other DNA
gtcattgaggtaaaaagcgggcctgagtccaacattaaagcctcctcgcaacttatgatagcagaagactcctgcctgaa

SEQ ID NO: 178725 - DNA, 80 bp, synthetic construct
  source 1..80: mol_type = other DNA
gaaccgaaccagtttgtgttctaatccatggtacaccaggatcagggaaatcccttaccacctctttgataggtagatct

SEQ ID NO: 178726 - DNA, 80 bp, synthetic construct
  source 1..80: mol_type = other DNA
tagcaaagtagcccgggatatggagcagttgttggccaccaaaaatttggagaagccactggagcagccggagaatgggt

SEQ ID NO: 178727 - DNA, 80 bp, synthetic construct
  source 1..80: mol_type = other DNA
tggaattagctgaaattgataccataatacccatgaatgcaatacaaggtaaggttaacaccatggaagcctacccaatc

SEQ ID NO: 178728 - DNA, 80 bp, synthetic construct
  source 1..80: mol_type = other DNA
gcacaagtctcatcgcaaaaagttggagcacacgaaaacactaatgtggcaacaggtggttcgacagtgaactacactac

SEQ ID NO: 178729 - DNA, 80 bp, synthetic construct
  source 1..80: mol_type = other DNA
ggacgacgccctgctcgccgctttcgagctcgccgcagagtaaggagaaggaggagaagggagaggtggaggaggtctta

SEQ ID NO: 178730 - DNA, 80 bp, synthetic construct
  source 1..80: mol_type = other DNA
gaagcaaatataagatactaatacctagttttaaaacaaaacccaagggaaaaaagacaataagcttcagagccagaccc

SEQ ID NO: 178731 - DNA, 80 bp, synthetic construct
  source 1..80: mol_type = other DNA
aatgacatctcaaagactggaccgtacgcctacagagacgaatataaaaatgtacagctgactctgtactacaactttat

SEQ ID NO: 178732 - DNA, 80 bp, synthetic construct
  source 1..80: mol_type = other DNA
aacccttggggtcttcgcagttccagaatattgtctagcaggagattcaaacattaagaccaattacaccagctatgtca

SEQ ID NO: 178733 - DNA, 80 bp, synthetic construct
  source 1..80: mol_type = other DNA
accaatcttgtactgcaaagacctaaggcaggattcatccatgtcccgtacacacaagcaccatcaggatttgcccaatg

SEQ ID NO: 178734 - DNA, 80 bp, synthetic construct
  source 1..80: mol_type = other DNA
acctagaagggtggtggtgtcagctattgttcacatgtgtcaggatgacgagtttccggatctacaagatcctccagatg

SEQ ID NO: 178735 - DNA, 80 bp, synthetic construct
  source 1..80: mol_type = other DNA
aaatgaatattcccggaaagactgtcgactggctttcagaccatccggattcgaccttccggtctcgactagatcttgga

SEQ ID NO: 178736 - DNA, 80 bp, synthetic construct
  source 1..80: mol_type = other DNA
gcaaaaattgagcaaaactactcacatatataaggataaaatctacacaacagagggaggtatgccttctggtatatgtg

SEQ ID NO: 178737 - DNA, 80 bp, synthetic construct
  source 1..80: mol_type = other DNA
agttcaggaacggaaactatcagagtgtttgggaaacctaaacacacacgtgcttggattccacgaccacccagagcaac

SEQ ID NO: 178738 - DNA, 80 bp, synthetic construct
  source 1..80: mol_type = other DNA
cctaggacgccaaaggaaagacagggtgtgaagacccgagtgtgctaggtgcgagtcctccggcccctgaatgtggctaa

SEQ ID NO: 178739 - DNA, 80 bp, synthetic construct
  source 1..80: mol_type = other DNA
ataagtacccagctgggaaacatccaggaccatgaaacagtaggccttatatgtgtacagtgcccttacacctgcccacc

SEQ ID NO: 178740 - DNA, 80 bp, synthetic construct
  source 1..80: mol_type = other DNA
cgggcggtgggcggcccgggctccagcagaacgtcgcagacccagccctcctcggccctgtccacctgtatgtccaggtg

SEQ ID NO: 178741 - DNA, 80 bp, synthetic construct
  source 1..80: mol_type = other DNA
acaaatttgagtcagttaagtcccccaacagtgactataccagaagcaatatcccgtagatttttccttgacttagattt

SEQ ID NO: 178742 - DNA, 80 bp, synthetic construct
  source 1..80: mol_type = other DNA
atactcatccaggtgaacagggacacaggattggtagtaactcagaaaggaatgagaaccaaccagatgagaatccattt

SEQ ID NO: 178743 - DNA, 80 bp, synthetic construct
  source 1..80: mol_type = other DNA
gtaaactatggaggcccccggctggccgccgtggccaacgcaggcacggccgggctaatcagcttcgaggtctcccctga

SEQ ID NO: 178744 - DNA, 80 bp, synthetic construct
  source 1..80: mol_type = other DNA
ttttgcggttccatgatggccacaggaaaattgttggtcgcctacgcccctccgggagcacagccaccaaccagccgcaa

SEQ ID NO: 178745 - DNA, 80 bp, synthetic construct
  source 1..80: mol_type = other DNA
tcctttttagaaaccgcgggcacatgtcttgtagaaagatgtaatcactctccgcgtatgtcgctagggttgacatcaca

SEQ ID NO: 178746 - DNA, 80 bp, synthetic construct
  source 1..80: mol_type = other DNA
ggccccttcgtggacgcagagaccgtgggcctaatctgtgtcatatgtccttacactaagccccccatgtacaacaagac

SEQ ID NO: 178747 - DNA, 80 bp, synthetic construct
  source 1..80: mol_type = other DNA
gtggccacagcactatgagattctctttgtatgtactgtaccaagaacatttaagacacatgaactactggacgtatact

SEQ ID NO: 178748 - DNA, 80 bp, synthetic construct
  source 1..80: mol_type = other DNA
cgcgtgacttgtcacgtgacgtgcgcgtcaccgccgccattttgtgtcacaaaatggccgacttccttcctctttttcaa

SEQ ID NO: 178749 - DNA, 80 bp, synthetic construct
  source 1..80: mol_type = other DNA
aattgcgctgtgatacccactcacgctgaacctggtgacaccattttacttgatggctatgaggtgaatgttctaaaaca

SEQ ID NO: 178750 - DNA, 80 bp, synthetic construct
  source 1..80: mol_type = other DNA
tggtaacatactactgagtggaagccaaactgctaggatgcttaaatacaactatcccacaaaatcaggatattgtgggg

SEQ ID NO: 178751 - DNA, 80 bp, synthetic construct
  source 1..80: mol_type = other DNA
gtggaggaaagctactatgtaaacatggagtgattgggatcattacagctggtggtgagggtcatgttgctttcattgac

SEQ ID NO: 178752 - DNA, 80 bp, synthetic construct
  source 1..80: mol_type = other DNA
gttctgctcaccacaaactgacaacgtttgtgtaacatttcaagttctttccgcggtttataacgacttcctctctataa

SEQ ID NO: 178753 - DNA, 80 bp, synthetic construct
  source 1..80: mol_type = other DNA
tcatcttgggctgatgtgagtcctaattcatttggaacaatcagcccaagatggatggaccattgggacaggaaaagccc

SEQ ID NO: 178754 - DNA, 80 bp, synthetic construct
  source 1..80: mol_type = other DNA
acatagaaattgacatcacagagaatatgcaaattgccatcgaccaatattcaggcctattattatcactggatatacct

SEQ ID NO: 178755 - DNA, 80 bp, synthetic construct
  source 1..80: mol_type = other DNA
cgaagcagcgtcccattgcgctgagcacccaccttggccttgatgtagtcgttgacttgctggtttccaaaggcctcggc

SEQ ID NO: 178756 - DNA, 80 bp, synthetic construct
  source 1..80: mol_type = other DNA
aattatcgtattgtgcatgtgtcgttcatcacagagtttagtatactaacaacacctgtgtaatgcgtacaaccagaaaa

SEQ ID NO: 178757 - DNA, 80 bp, synthetic construct
  source 1..80: mol_type = other DNA
cagtggggttaactctcaagaagtacctgccttaacagctgtggagactggtgcttctgggcaagcagtacctagtgatg

SEQ ID NO: 178758 - DNA, 80 bp, synthetic construct
  source 1..80: mol_type = other DNA
aataaactacttatgtgtatcatttttatttttaccatgtgcctcatttgtctttactttaaacaccgttgtattcctac

SEQ ID NO: 178759 - DNA, 80 bp, synthetic construct
  source 1..80: mol_type = other DNA
ccgccggcatacaaccttgcccagagagaagagcactggtacaaagcaattcttgagtcgcactctactttttgcggctg

SEQ ID NO: 178760 - DNA, 80 bp, synthetic construct
  source 1..80: mol_type = other DNA
gtgggcctgcaatcaagctgtgtgttatgcgtgccatggattagtcaaacacactatagactcgtggcacaagatgaata

SEQ ID NO: 178761 - DNA, 80 bp, synthetic construct
  source 1..80: mol_type = other DNA
ggggtatctattgtgtcaacctatgctacatgggactaacagttctatggctgaagtttatatgagtctgagatgtccca

SEQ ID NO: 178762 - DNA, 80 bp, synthetic construct
  source 1..80: mol_type = other DNA
gtgcagaggtggcagaactgtaccgattagaattgggggattataaattaatagaagtgacaccaattggcttcgcacct

SEQ ID NO: 178763 - DNA, 80 bp, synthetic construct
  source 1..80: mol_type = other DNA
gtggcccggatccccccagcggcccttctctctgtccccctactcctctccaaccttcgctccaccctagaccccagctt

SEQ ID NO: 178764 - DNA, 80 bp, synthetic construct
  source 1..80: mol_type = other DNA
aacatcagatggaacaaagtggtataattggcagtacacatacaataaacttatgaagccaatttactactcagctgcca

SEQ ID NO: 178765 - DNA, 80 bp, synthetic construct
  source 1..80: mol_type = other DNA
ctaacattttacagatcccctaacacagactttatagttggctacaatagaaagcctccctttatagacactcaaataac

SEQ ID NO: 178766 - DNA, 80 bp, synthetic construct
  source 1..80: mol_type = other DNA
ttctcgcaatccggcgtgtatggcttcactaccctgaatagcatgggacagctgtttttcagacacgtgaataaggacac

SEQ ID NO: 178767 - DNA, 80 bp, synthetic construct
  source 1..80: mol_type = other DNA
agcattccaagccttcgcgagggctgcgagagagactcttacaaccgcctggaggggcttgtggaggacactgggacaga

SEQ ID NO: 178768 - DNA, 80 bp, synthetic construct
  source 1..80: mol_type = other DNA
ttaaaatacccaccaccaacaaaaaaacaaggctcaggcactacagcacaatactcaccagacagccaagatggagatgt

SEQ ID NO: 178769 - DNA, 80 bp, synthetic construct
  source 1..80: mol_type = other DNA
aaacataacaaggcccactagcaccattgacaacataaccacaacagagataaatgacacttcttcatgcatacaaagag

SEQ ID NO: 178770 - DNA, 80 bp, synthetic construct
  source 1..80: mol_type = other DNA
agagttgagattaccaacagtaccacagcagggacgcaagtgttcgggttccagttaaacccaggctcaggcacggtctt

SEQ ID NO: 178771 - DNA, 80 bp, synthetic construct
  source 1..80: mol_type = other DNA
tacccacataaaattgatccaggtttactggcggaagcaggcaaacattatggattagtaatgacaccagcagacaaagg

SEQ ID NO: 178772 - DNA, 80 bp, synthetic construct
  source 1..80: mol_type = other DNA
caccgctagaatgctttgttttgtatctggctgtaaggacttttgtttgcgtatggccagagacacaaatttacacaaac

SEQ ID NO: 178773 - DNA, 80 bp, synthetic construct
  source 1..80: mol_type = other DNA
caagacatgcccttatatatgatgctatatggctatatggactatgccataaaatgcacaggctccaacagcctatggac

SEQ ID NO: 178774 - DNA, 80 bp, synthetic construct
  source 1..80: mol_type = other DNA
gcccaagaagaagagaaaacgatacaggagcagctccagcagcagctctcagagcagcgacgaatcagatgtggcctcca

SEQ ID NO: 178775 - DNA, 80 bp, synthetic construct
  source 1..80: mol_type = other DNA
tctgggaacacctccttgtcgtagagcgggaccctaacgctcgcagactgccccaccgctacctcctgttttaacgatgg

SEQ ID NO: 178776 - DNA, 80 bp, synthetic construct
  source 1..80: mol_type = other DNA
cgagctatgttagaatttactttaaacctaagcacgtcagagcatgggtccccagaccaccgagactgtgccaatatgaa

SEQ ID NO: 178777 - DNA, 80 bp, synthetic construct
  source 1..80: mol_type = other DNA
aagatcctacctacgacgaattgccgtcgcgcccaccccagaaacataagccgccagacaaacctccgcgcttatgcaaa

SEQ ID NO: 178778 - DNA, 80 bp, synthetic construct
  source 1..80: mol_type = other DNA
gagatcaacatccgtgagatggtgcaactgcggaggaagtgcgagatgttcacctacctgcgctttgatatcgaagtgac

SEQ ID NO: 178779 - DNA, 80 bp, synthetic construct
  source 1..80: mol_type = other DNA
agaaagggagtggagagggccaggttgcacatggtgcccaggcgacaccgcaccgcatccacctcactcttcacctcatg

SEQ ID NO: 178780 - DNA, 80 bp, synthetic construct
  source 1..80: mol_type = other DNA
gttgtcccttgggttagtgctagtcactttagatacacaactccagatacatactctgcagcagggtacataacttgctg

SEQ ID NO: 178781 - DNA, 80 bp, synthetic construct
  source 1..80: mol_type = other DNA
tatctttgcttgtgcaaaagtgcacaacttttttctcttctgccgcaacagaaattctggataatgatttagtgaaattc

SEQ ID NO: 178782 - DNA, 80 bp, synthetic construct
  source 1..80: mol_type = other DNA
cctctctataactgaaattaactctactaatgaagaagacaaaataaatgactttttaaacgctgctatgcctaaagaca

SEQ ID NO: 178783 - DNA, 80 bp, synthetic construct
  source 1..80: mol_type = other DNA
tgaacctagtttaattgatagattatgcaattcaaaacatatttttaaggacacatattatgaggttgaaggtggtgtac

SEQ ID NO: 178784 - DNA, 80 bp, synthetic construct
  source 1..80: mol_type = other DNA
actggctctccccccttggcggtcgtgtaggtactgacccccttgagcacgctctccccggacacggccgctaccatctc

SEQ ID NO: 178785 - DNA, 80 bp, synthetic construct
  source 1..80: mol_type = other DNA
gcatccccttccctttacctaacatccctccccaagttatattttgcggtaacgttagaagaagtgaacctagtgcaaca

SEQ ID NO: 178786 - DNA, 80 bp, synthetic construct
  source 1..80: mol_type = other DNA
gtgttacaaccaattaaccaattctgattagaaaaactcatcgagcatcaaatgaaactgcaatttattcatatcaggat

SEQ ID NO: 178787 - DNA, 80 bp, synthetic construct
  source 1..80: mol_type = other DNA
acgcctcacggaggcgtctgaggtcatgttcaacatgaacgtggacgagagcgcctctggcgctctcggctcctcggcca

SEQ ID NO: 178788 - DNA, 80 bp, synthetic construct
  source 1..80: mol_type = other DNA
tttgtcgtaacaatcagcgttatatacgctgtatcggcatcgttttaccggaaagtttatcgtaatgtaacccgcgttgt

SEQ ID NO: 178789 - DNA, 80 bp, synthetic construct
  source 1..80: mol_type = other DNA
tgggaccaactactttgggtgtccgtgtttctcatttttctttgaattgtcttatggtcacagcatatagtaatatatac

SEQ ID NO: 178790 - DNA, 80 bp, synthetic construct
  source 1..80: mol_type = other DNA
ttcatgctcgtctgcaccccagtggacaaggcagtagaggacacccaccaccaggcggttagggaggacactgccaaggt

SEQ ID NO: 178791 - DNA, 80 bp, synthetic construct
  source 1..80: mol_type = other DNA
cacctggcgccccggagccacaaacgtgggatgactacacctggcagtcatcaaccaatccatccatattccacaccacc

SEQ ID NO: 178792 - DNA, 80 bp, synthetic construct
  source 1..80: mol_type = other DNA
cggctccaccacagtctcgcaaagatgcaatgctgggcacccatttaatttgggatctcgggttgcaatcaagcgcgaca

SEQ ID NO: 178793 - DNA, 80 bp, synthetic construct
  source 1..80: mol_type = other DNA
tctgcagcggtccgcgtgtagaagcgggtggagaacgacgttaataaagaatagcggcggtgccgatagggcgaccgctg

SEQ ID NO: 178794 - DNA, 80 bp, synthetic construct
  source 1..80: mol_type = other DNA
taacagacaaaaacagcatatccactcagttccacatttccatataaaggccaaggcatttattctcaggataattgttt

SEQ ID NO: 178795 - DNA, 80 bp, synthetic construct
  source 1..80: mol_type = other DNA
ttaacagtgctaaaagtcactttgactcaaatttatattcagttgctgcttactataacacattccaaacaatagctcaa

SEQ ID NO: 178796 - DNA, 80 bp, synthetic construct
  source 1..80: mol_type = other DNA
cctctcaagtaacacctagtgacaccatgcaaacccgttatgtaaagaattaccattcaaggtctgaatccagcattgag

SEQ ID NO: 178797 - DNA, 80 bp, synthetic construct
  source 1..80: mol_type = other DNA
acagaatccagtagagaattatgtaaatgatgttcttaatgaagtgttagttgttccaaacatacaagaaagccatccaa

SEQ ID NO: 178798 - DNA, 80 bp, synthetic construct
  source 1..80: mol_type = other DNA
ttatgtaaagtcacttggtgatgcttttggtgtgggctttgttgaacaaattaaagaacaagtcagtaatataaacccat

SEQ ID NO: 178799 - DNA, 80 bp, synthetic construct
  source 1..80: mol_type = other DNA
agtatagaaatgatattactaccctgggacccagtgacatgtatgttcacacaaaggaagctatctacaggtgtgcacac

SEQ ID NO: 178800 - DNA, 80 bp, synthetic construct
  source 1..80: mol_type = other DNA
gcagcactgtttggctatgtagactttctaaaaaagacatttaaagacgaccagctagacaaaactgccagactcactct

SEQ ID NO: 178801 - DNA, 80 bp, synthetic construct
  source 1..80: mol_type = other DNA
atcccggtgctgcgtactatggtgccacctctattaatgattttggaattctggcagtgagagtggtcaatgagcacaac

SEQ ID NO: 178802 - DNA, 80 bp, synthetic construct
  source 1..80: mol_type = other DNA
agccaccacagcacaagtgattaggagcagggcccagtgcacccaggtggtcttagggcgccagggatcgattggaaaag

SEQ ID NO: 178803 - DNA, 80 bp, synthetic construct
  source 1..80: mol_type = other DNA
agctcgagtaagagagacgctatatttagggtttccctctcttttttttttctacaccgtgataccctaataaagcacac

SEQ ID NO: 178804 - DNA, 80 bp, synthetic construct
  source 1..80: mol_type = other DNA
caaacccggcatgtgaaaaactaccactcccgatctgagtcaacaatagagaacttccttagccggtccgcctgtgtata

SEQ ID NO: 178805 - DNA, 80 bp, synthetic construct
  source 1..80: mol_type = other DNA
atacaagcttatgtgtatggcccagggaccctactcaggcttaccccaaccaaagaccccaaaacctgagttgaggctgg

SEQ ID NO: 178806 - DNA, 80 bp, synthetic construct
  source 1..80: mol_type = other DNA
tagatgcttataaaaacattgacttggataaacttaagataattgcctatggggatgatgtactcttttcatacaaatat

SEQ ID NO: 178807 - DNA, 80 bp, synthetic construct
  source 1..80: mol_type = other DNA
tagtcggatatggtaggtggccacagtacttaggtgacaaggaggcaacggcagaggaccagccgacacaacctgatgtt

SEQ ID NO: 178808 - DNA, 80 bp, synthetic construct
  source 1..80: mol_type = other DNA
tgctagggacacaccttatctgggacctaggtttacaatcatcatgtaccatggttataccatggatgagttccacatat

SEQ ID NO: 178809 - DNA, 80 bp, synthetic construct
  source 1..80: mol_type = other DNA
ctacccctgggcacctaaacccgctcctcctttcaatgtatccttcaaacttggctacaaataaaaattcaaggccgtgg

SEQ ID NO: 178810 - DNA, 80 bp, synthetic construct
  source 1..80: mol_type = other DNA
ccaacaaaacctaatgaatgacatagtacagtcaggtccctttgcataccacggggacgttaaaagctgcactctagtta

SEQ ID NO: 178811 - DNA, 80 bp, synthetic construct
  source 1..80: mol_type = other DNA
agctgcatgctccttggagcgaaacattgattacatccagtacatactaaattgtcttggtagtctagtaattatccttg

SEQ ID NO: 178812 - DNA, 80 bp, synthetic construct
  source 1..80: mol_type = other DNA
cccgcacgccgcagataagaaacctgccagcgctcccggcgccccagggcgagcccggtgacagagcgccatggcgtggg

SEQ ID NO: 178813 - DNA, 80 bp, synthetic construct
  source 1..80: mol_type = other DNA
attcccacatatccattcacgctggttggacagctgccgtggtgacagtaattataatctgcgttttgacttattttaac

SEQ ID NO: 178814 - DNA, 80 bp, synthetic construct
  source 1..80: mol_type = other DNA
tatatgctgtggaagggaaaagaatcagaactttaaagaacaagatcacaaactttatacagtttagatctaaacacaga

SEQ ID NO: 178815 - DNA, 80 bp, synthetic construct
  source 1..80: mol_type = other DNA
tcacccccgctgacacaatgcaaaccaggcacgtggccaactttcatacaagatcagaatcatctctggaaaacttcctg

SEQ ID NO: 178816 - DNA, 80 bp, synthetic construct
  source 1..80: mol_type = other DNA
ccagactataaggagatgcactataaggggcttcactagcttggttatatgtgggaactccaaatcggggcgaaactacg

SEQ ID NO: 178817 - DNA, 80 bp, synthetic construct
  source 1..80: mol_type = other DNA
gatggcacaaataaatttagaacaggaaacaatagcatatatggccaaccaaattataaacctgattataacaaattaga

SEQ ID NO: 178818 - DNA, 80 bp, synthetic construct
  source 1..80: mol_type = other DNA
gcggccggtggatggtttttttctggttcgagtgtcgtggctgatggtgggagctgctgagcaggaggaggagccggtgt

SEQ ID NO: 178819 - DNA, 80 bp, synthetic construct
  source 1..80: mol_type = other DNA
tcacacatgaaacatatgataatgactatctttgtcgtttgtataaaaatggactacgcgtgcgcgtagctttggatcgt

SEQ ID NO: 178820 - DNA, 80 bp, synthetic construct
  source 1..80: mol_type = other DNA
cctctggggagactacatctacaaaatgtctataatagacgcatttaaaagtaatgcagagaaatactatgctgctagaa

SEQ ID NO: 178821 - DNA, 80 bp, synthetic construct
  source 1..80: mol_type = other DNA
acttcttatggggcggttcccctctcccctcacagccaatcgacgacccctgccagcagggaacccacccgattcccgac

SEQ ID NO: 178822 - DNA, 80 bp, synthetic construct
  source 1..80: mol_type = other DNA
acgcccgtcgtccccgcacacgcatgccgcctcacgagcaaaagcccgaagaaaacgaggaggaagaagaggagctgttt

SEQ ID NO: 178823 - DNA, 80 bp, synthetic construct
  source 1..80: mol_type = other DNA
tgctggaagacaccatcgtccccaagatcttaaagaagctggcttatttcttagagctgctaagctactactcccccaag

SEQ ID NO: 178824 - DNA, 80 bp, synthetic construct
  source 1..80: mol_type = other DNA
catgcgccacgtgaacgggccatcaccactaccgatgactagtatggtaagagtgtacttcaaaccaaaacatgtaaaag

SEQ ID NO: 178825 - DNA, 80 bp, synthetic construct
  source 1..80: mol_type = other DNA
caagactcggaccggagacgctcttccactcatgggacatcagacgtggatacattaacacaaaagctattaaaagaatc

SEQ ID NO: 178826 - DNA, 80 bp, synthetic construct
  source 1..80: mol_type = other DNA
gcagttactgatggtgttgtgaaccaggcggcattatcgaacggggagagaccagtggagttcacagaactaaagtcatc

SEQ ID NO: 178827 - DNA, 80 bp, synthetic construct
  source 1..80: mol_type = other DNA
caactgaaccattacaatgggtgcccaagtgtctgctcaaaacaacggtacccacgagaactccaatagtgcaaatggag

SEQ ID NO: 178828 - DNA, 80 bp, synthetic construct
  source 1..80: mol_type = other DNA
gtggcagtagtacctgagcatcagttggcatacatcggaggtactaatgcacaagtgaaatataaacacacacacccagg

SEQ ID NO: 178829 - DNA, 80 bp, synthetic construct
  source 1..80: mol_type = other DNA
ttagatacaaccataacagcacctagcatacacccaggcctcatggccctagacaaaagagccagatggattccttctct

SEQ ID NO: 178830 - DNA, 80 bp, synthetic construct
  source 1..80: mol_type = other DNA
cagacgggtattaaaagaatgtcagaacaactcccaaatgatgaatttcctacagagcgctacaagaggcccaggaaaga

SEQ ID NO: 178831 - DNA, 80 bp, synthetic construct
  source 1..80: mol_type = other DNA
gctatagacagaagattcttcttagattgtgatgttaagattatgccagcttacaattcaaacaatttattgaatgtctc

SEQ ID NO: 178832 - DNA, 80 bp, synthetic construct
  source 1..80: mol_type = other DNA
agcttgaacgtgacttaaattatgcaaacctgataatatccatgttagcaaatgttattagtataatgggtgtaatatat

SEQ ID NO: 178833 - DNA, 80 bp, synthetic construct
  source 1..80: mol_type = other DNA
cggcgagggtggtgacgtaggggaacaaagaccgggccgcggtaccgtgctgcgcctgagtctgcaagagttttgtgtac

SEQ ID NO: 178834 - DNA, 80 bp, synthetic construct
  source 1..80: mol_type = other DNA
gaggaatttaatggaaattgctgaggtcgactccgttgtgccgttgaacaacatcgtgggaaatgtgaccaacttgaagg

SEQ ID NO: 178835 - DNA, 80 bp, synthetic construct
  source 1..80: mol_type = other DNA
tgaattttgcagaaaaatcagaagtgtacctgtgggaagagcattgacactacctgcatactctagtcttagacggaaat

SEQ ID NO: 178836 - DNA, 80 bp, synthetic construct
  source 1..80: mol_type = other DNA
acaccgacgctatccttccactcgtgggacttccgacggggactatttggcaaggcaagtattaagagaatgtcaacaga

SEQ ID NO: 178837 - DNA, 80 bp, synthetic construct
  source 1..80: mol_type = other DNA
ttcagatagattctacacgctgtccagtgtcccttggacaaacacatcaaagggatggtggtggaaactacccgatgcat

SEQ ID NO: 178838 - DNA, 80 bp, synthetic construct
  source 1..80: mol_type = other DNA
gtctaagtacaagggtaatccacaggttgaatggaatgactatatacagactgctgtggaccactatgctgcccaactat

SEQ ID NO: 178839 - DNA, 80 bp, synthetic construct
  source 1..80: mol_type = other DNA
cggcacaattactcacattagacattgaccctaagcccataactgtagaagatagtgtctttggcatagagggtttagaa

SEQ ID NO: 178840 - DNA, 80 bp, synthetic construct
  source 1..80: mol_type = other DNA
tgataactgtaactacaccataaatagcaccaagcatattatcaccgtggtgccttcacgtcattctaaacaaacaaatt

SEQ ID NO: 178841 - DNA, 80 bp, synthetic construct
  source 1..80: mol_type = other DNA
catcaacgaagtaaccaaacacacctctatagcacaaactctatacacacaaggaaattactaccaaacattccatacaa

SEQ ID NO: 178842 - DNA, 80 bp, synthetic construct
  source 1..80: mol_type = other DNA
gaacctaaaccagtcatagattcaagacaatatttagaatttggttctttaactaatttgccccatgtgttgatgaattt

SEQ ID NO: 178843 - DNA, 80 bp, synthetic construct
  source 1..80: mol_type = other DNA
taggggatgactcaacaccaggattcattgtggacctccttagtgcctctaaagaccccaaagtcatagagttttgtgag

SEQ ID NO: 178844 - DNA, 80 bp, synthetic construct
  source 1..80: mol_type = other DNA
ggcacagcagcaactacatcacacacatggaatcctaccactactgatacaactatgagtggttatagtaattggagaga

SEQ ID NO: 178845 - DNA, 80 bp, synthetic construct
  source 1..80: mol_type = other DNA
gaggccgcccctgcacaatgtcccgggactcgaacacctctggtacgagtcagtgcatcgtggccatgctgctgtttgtg

SEQ ID NO: 178846 - DNA, 80 bp, synthetic construct
  source 1..80: mol_type = other DNA
cacgtacatgcgttttgatattgagatgacaatggtaattactagctgccaagatcaagggacgcaattagagcaagaca

SEQ ID NO: 178847 - DNA, 80 bp, synthetic construct
  source 1..80: mol_type = other DNA
gagctagaaataatagtcctcagggtctaccagtcatgttaacccctggttcagaacaatttctaacaactgatgatgcc

SEQ ID NO: 178848 - DNA, 80 bp, synthetic construct
  source 1..80: mol_type = other DNA
ccctgctcgggatcctccggctccggtccccgtagacagcctcgttcaatacaagtcgatgacccgaagtaccagacacc

SEQ ID NO: 178849 - DNA, 80 bp, synthetic construct
  source 1..80: mol_type = other DNA
tgttgtctttcctcccacccctgtcctggctgtggcaaatgcgaccctcatagagttgtgtttcaggtctgtgtcctgtt

SEQ ID NO: 178850 - DNA, 80 bp, synthetic construct
  source 1..80: mol_type = other DNA
gaccccgcgccacccgcttcatggggggggaggccgccgcaaggacgccgggccggctggtaggtgtgcatccctcgagc

SEQ ID NO: 178851 - DNA, 80 bp, synthetic construct
  source 1..80: mol_type = other DNA
aagatcactaacatgctacacattgcacagattgagtcatttctacccttgaataacatacgggatcatgctggtaagat

SEQ ID NO: 178852 - DNA, 80 bp, synthetic construct
  source 1..80: mol_type = other DNA
tgggttcaccccctgattgcacacacgcctgactcaattagaattgttgcattgataagacactattaacacaatgggtg

SEQ ID NO: 178853 - DNA, 80 bp, synthetic construct
  source 1..80: mol_type = other DNA
attatactccaaaaactgtaggggaaatagaagggttcattaatacaaaaaaatttcacaatgtaaacataaaagtattg

SEQ ID NO: 178854 - DNA, 80 bp, synthetic construct
  source 1..80: mol_type = other DNA
cctgtgactttatagtacactacaacctggttcctcctctaaagatgaaccagtttacaagtcccaacacacacccagga

SEQ ID NO: 178855 - DNA, 80 bp, synthetic construct
  source 1..80: mol_type = other DNA
gtgtcttctcaggtaatgcaaaagacaagaccaattacacaagttatgtgaatgctaatccaggagaagcaggtggagtc

SEQ ID NO: 178856 - DNA, 80 bp, synthetic construct
  source 1..80: mol_type = other DNA
gctgggtatccatatgctgccctggggataaagaaaagagatatcatcaacaagactacaagggacacagtcaaactaca

SEQ ID NO: 178857 - DNA, 80 bp, synthetic construct
  source 1..80: mol_type = other DNA
taccagctggagaacaaatgtcattatcagcccctttctattctcacaagccattgaggacggttagggacactcacagc

SEQ ID NO: 178858 - DNA, 80 bp, synthetic construct
  source 1..80: mol_type = other DNA
gcaggcctcctagctcagacaggaaaagactatggcctgctaatgacaccggcagataaggggaccacctttgaggctgt

SEQ ID NO: 178859 - DNA, 80 bp, synthetic construct
  source 1..80: mol_type = other DNA
ccgcaagcagaaggtaagatattggttataccactagatatgagcaacaccttatttgccacaacactacttggagaggt

SEQ ID NO: 178860 - DNA, 80 bp, synthetic construct
  source 1..80: mol_type = other DNA
gctagtactgactcagtggcaaccggccaccagacgaaaatgtgttataaaaggtgtactacctctagtgtggtgcggct

SEQ ID NO: 178861 - DNA, 80 bp, synthetic construct
  source 1..80: mol_type = other DNA
ggagacaaaagttaaggacgcctatgccctaaaagatatgactgatgtcaatttggaaattactgtagttgaactggata

SEQ ID NO: 178862 - DNA, 80 bp, synthetic construct
  source 1..80: mol_type = other DNA
aatatcaaggaaaagcagacaaccaaagcaaatactttaaagacaaagacgcactctggggagacgccatacatatagta

SEQ ID NO: 178863 - DNA, 80 bp, synthetic construct
  source 1..80: mol_type = other DNA
ctgcgaccccccgcaaccctctaagactcaaggccagagccggagacagagcagggggagtggcagggacaggtgcaggt

SEQ ID NO: 178864 - DNA, 80 bp, synthetic construct
  source 1..80: mol_type = other DNA
ggatcagtcaaactcactatagattggtgcaacaggacgcgtactcagccgcaggatatatttcgtgctggtatcagaca

SEQ ID NO: 178865 - DNA, 80 bp, synthetic construct
  source 1..80: mol_type = other DNA
gcgtgacgatgccatcaaccagctggagctctgccgggttgacaccctcaacccccgagtagccggacgcctagcctcct

SEQ ID NO: 178866 - DNA, 80 bp, synthetic construct
  source 1..80: mol_type = other DNA
gtctggccgagcggcgccatcttggaggagtggcgagtcgcgggcaccgcctcggtaccccctggccgaggcgagtccgc

SEQ ID NO: 178867 - DNA, 80 bp, synthetic construct
  source 1..80: mol_type = other DNA
cagcacgacgactgctcctgtggaatggaagtctcccaaccgtcagattcccaagaatattacctgcgctaattactcag

SEQ ID NO: 178868 - DNA, 80 bp, synthetic construct
  source 1..80: mol_type = other DNA
agacaaaaattccagagagaagagtagtggcacaaggacctgaagaggagtttggaagatctttaattaaacacaactca

SEQ ID NO: 178869 - DNA, 80 bp, synthetic construct
  source 1..80: mol_type = other DNA
cgcctagtagacggagtgactcgtggctcaagaaattcacagagttttgcaacgcagctcggggtctagaatggatcggg

SEQ ID NO: 178870 - DNA, 80 bp, synthetic construct
  source 1..80: mol_type = other DNA
cgcctagataccagaggtacgtcaagttcatcaaaacgcccatcggcgtcccggaatcgtataccgggcacacgaagcgt

SEQ ID NO: 178871 - DNA, 80 bp, synthetic construct
  source 1..80: mol_type = other DNA
aaagaatgtacgatgaacagattaatgttccagactttacagaacagcctaaaatcccccgacttttccccccagtcgag

SEQ ID NO: 178872 - DNA, 80 bp, synthetic construct
  source 1..80: mol_type = other DNA
agcaagaaaaagacttcggttcgagagtccaaagagaaccgaatccgtgggagtcggaacaggaaatggaaaccgaaaca

SEQ ID NO: 178873 - DNA, 80 bp, synthetic construct
  source 1..80: mol_type = other DNA
cgccacccacggccccaatggctacgccaacggcctttcccgcggcgcccaggccgctcatgaggtcgtccagacccttg

SEQ ID NO: 178874 - DNA, 80 bp, synthetic construct
  source 1..80: mol_type = other DNA
gaagaagacgtctacagtttactcaagagcctccaaaaagaacaagagacaagctcatcagaagaagaacaagcacccca

SEQ ID NO: 178875 - DNA, 80 bp, synthetic construct
  source 1..80: mol_type = other DNA
tgaggctagcatcaaaacagggcgtgccagtgctatgcacaccaggcagctcccagtttttgacatccgatgactatcaa

SEQ ID NO: 178876 - DNA, 80 bp, synthetic construct
  source 1..80: mol_type = other DNA
aatacatcaattatccaagaatcatgtgacaaacattattgggatagtttaagatttaggtattgtgctcccccaggatt

SEQ ID NO: 178877 - DNA, 80 bp, synthetic construct
  source 1..80: mol_type = other DNA
acttagcgaacgcctgggtagaccccaaccaccaagaccaccgggcgaaccgccgggccctgctgtgagagttctgcctg

SEQ ID NO: 178878 - DNA, 80 bp, synthetic construct
  source 1..80: mol_type = other DNA
ggtgcgattccatctgcaccccctgcagatccagcagaggagatgctaaagaactacatgcaactagggaagaagcagaa

SEQ ID NO: 178879 - DNA, 80 bp, synthetic construct
  source 1..80: mol_type = other DNA
gactgtactgatgcaacttattattgtaaacacaaggataggtactaccccattaaagtcactagtcatgattggtatga

SEQ ID NO: 178880 - DNA, 80 bp, synthetic construct
  source 1..80: mol_type = other DNA
tgagtaaaatatacttccaaacaacaacctccggaactcaaaaactacccacaccatacaactggaaaaactacaaaacc

SEQ ID NO: 178881 - DNA, 80 bp, synthetic construct
  source 1..80: mol_type = other DNA
cagagattgacacccaagccccgcacgtgactgtgcgtgcataccctcctgtgcttgctgaacatcctcttcccaacccg

SEQ ID NO: 178882 - DNA, 80 bp, synthetic construct
  source 1..80: mol_type = other DNA
aagaaatacgcctcatggaccataaacacacggcaagtggcccaattaagaaggaaaatagaattattcacatacactag

SEQ ID NO: 178883 - DNA, 80 bp, synthetic construct
  source 1..80: mol_type = other DNA
gatcatcctcatcaacatttaacaaaaaaacatttatcactaaatacctaataggtaacatgaaatcctattggcataaa

SEQ ID NO: 178884 - DNA, 80 bp, synthetic construct
  source 1..80: mol_type = other DNA
actcttttcccgcgatgtatcctggtaccacagcatgagcttttcgcgtcggagctcgccgagccgaagagagacgtctt

SEQ ID NO: 178885 - DNA, 80 bp, synthetic construct
  source 1..80: mol_type = other DNA
ccccatacacttttttaatgacccagacacagacactaaaataaaaggttttctaaaaaaagccatgccagaatcaggca

SEQ ID NO: 178886 - DNA, 80 bp, synthetic construct
  source 1..80: mol_type = other DNA
gccaatcttccacctgccagtggagagagaaacatgggaacagtggtggacagactattggcaagtgacctggattccag

SEQ ID NO: 178887 - DNA, 80 bp, synthetic construct
  source 1..80: mol_type = other DNA
caaaggtaatgtcaatgttgaatggaatgaacacatacagacagcagtggaccactatgcagcccaactttttgtattgg

SEQ ID NO: 178888 - DNA, 80 bp, synthetic construct
  source 1..80: mol_type = other DNA
acaccacttatggacaatatcagacacaactatttacaggcaaaaagtactgggactacagggtgggcatgtttagtccc

SEQ ID NO: 178889 - DNA, 80 bp, synthetic construct
  source 1..80: mol_type = other DNA
tacacaggagaaaccacctcctgatatgagctggagtcgccccgttcacaatggccccggcatcgagaggctctggtttg

SEQ ID NO: 178890 - DNA, 80 bp, synthetic construct
  source 1..80: mol_type = other DNA
ggcccggccgggcccggagggccgcccgccatcttggcgctgccggctccgcccgcggagcctgacgacccgcagccacg

SEQ ID NO: 178891 - DNA, 80 bp, synthetic construct
  source 1..80: mol_type = other DNA
aacttgtcgatcagggcccatatagccagcaacctcagagtcataccatgaagttagcttacttggataggggtttctat

SEQ ID NO: 178892 - DNA, 80 bp, synthetic construct
  source 1..80: mol_type = other DNA
ctacgcacccgcatcacggaagcaggacccactaccggaacctacaacagcaagccgtcgagagcgccgtgacgctagcg

SEQ ID NO: 178893 - DNA, 80 bp, synthetic construct
  source 1..80: mol_type = other DNA
taagggcaatttagaggtaaaatggaatgacaatatacaaacagctgttgaccactacaccgcccagctgtacatgctag

SEQ ID NO: 178894 - DNA, 80 bp, synthetic construct
  source 1..80: mol_type = other DNA
ttcaagaacaggcaagtattagaaagaaatttgaactcttcacatacctccgttttgatatggaggttacaatagttaca

SEQ ID NO: 178895 - DNA, 80 bp, synthetic construct
  source 1..80: mol_type = other DNA
actatgttaaaactgattcgtctgacttagggcaattacgggtttatgtttggacccctctttcagtacccacaggagca

SEQ ID NO: 178896 - DNA, 80 bp, synthetic construct
  source 1..80: mol_type = other DNA
attcgtgtcagcctgcaacgatttttctgtacggctcctcagagacaccccattcatcagccagccagctgagctgcaat

SEQ ID NO: 178897 - DNA, 80 bp, synthetic construct
  source 1..80: mol_type = other DNA
ctaggtacttactttaatacacttaaaacatcagaacatattagacaacccccagcagataactacaaacaagcaaataa

SEQ ID NO: 178898 - DNA, 80 bp, synthetic construct
  source 1..80: mol_type = other DNA
tctagcacggaatggacacaaacagactttacaaattttaaaaagcaaacagacagcaactatggctactgtacctactg

SEQ ID NO: 178899 - DNA, 80 bp, synthetic construct
  source 1..80: mol_type = other DNA
acaaccaaaaccaaggaaaccagaactgagaaaagctgtggttcaaggtccagagcatgaatttggcatggcacttataa

SEQ ID NO: 178900 - DNA, 80 bp, synthetic construct
  source 1..80: mol_type = other DNA
ggtggtaatcctatcactcaacagacaattaaagacccctgcacacaaacaacatatccgttccctgaaaccagtggaaa

SEQ ID NO: 178901 - DNA, 80 bp, synthetic construct
  source 1..80: mol_type = other DNA
agccttgttattattttaggaactatttatgctttatacaaattgatgtgcttagcacagggtccttattctggcttacc

SEQ ID NO: 178902 - DNA, 80 bp, synthetic construct
  source 1..80: mol_type = other DNA
tcaacaacgccgaggccactggaacgccccttttccaattcaagcagagtgacccgttctcgggcgtcgacgcggtattc

SEQ ID NO: 178903 - DNA, 80 bp, synthetic construct
  source 1..80: mol_type = other DNA
cttaactacaaataaaagcttgcttctctgtgcaaggccgtgggagtttcacttgtcggtgtctacctctaaaggtcact

SEQ ID NO: 178904 - DNA, 80 bp, synthetic construct
  source 1..80: mol_type = other DNA
ttgggggggttgtttgagacaaggacggggactcgcgagaccggcggtcgcgggggtgtacggggacggaggccatttgc

SEQ ID NO: 178905 - DNA, 80 bp, synthetic construct
  source 1..80: mol_type = other DNA
tcaatatctcgcagatgttgatgcttcatcagttgataagccaacccaccctgaaacatctgcagacagtctacacactg

SEQ ID NO: 178906 - DNA, 80 bp, synthetic construct
  source 1..80: mol_type = other DNA
ccacgcccttcatgctcagacccgaggcgccctccactttgccgatgtaacgtttcttgcagatcatcataagagagacg

SEQ ID NO: 178907 - DNA, 80 bp, synthetic construct
  source 1..80: mol_type = other DNA
gttcaatacccttaacaacatgggaaaagtttacgtaaggcaagtaaatttgaaagcccctatgccaattagcagcactg

SEQ ID NO: 178908 - DNA, 80 bp, synthetic construct
  source 1..80: mol_type = other DNA
tcagactcagattcctctgtcaagagctgctcaaaacgcaagcgggtctccacataaaccccctgttctcatgccagcaa

SEQ ID NO: 178909 - DNA, 80 bp, synthetic construct
  source 1..80: mol_type = other DNA
tctaccccgaagtacgtcactaaccacgtgtctccagcaggccaaccgaagcctacgtcgtcaacttcctggggcggagc

SEQ ID NO: 178910 - DNA, 80 bp, synthetic construct
  source 1..80: mol_type = other DNA
gcgactgggaaacaggtgcagacggcagtatgcaatgcgggaatgggtgtcggggtcggtaatttaaccatcttccccca

SEQ ID NO: 178911 - DNA, 80 bp, synthetic construct
  source 1..80: mol_type = other DNA
acagtagagaaaattaaaaagtacagagaccagagatttaagtggcttactgaaatgccagtaactaacacctgtcacat

SEQ ID NO: 178912 - DNA, 80 bp, synthetic construct
  source 1..80: mol_type = other DNA
ggcaacccgacgttaacagactgtgcagaatcacaggatggctacctcttatagtttgtggcaccggcagggcccaggac

SEQ ID NO: 178913 - DNA, 80 bp, synthetic construct
  source 1..80: mol_type = other DNA
agtgcagatgtccccacagttttagctactctcgcactactgggatgccaccactctccatggacatttcttaaagacaa

SEQ ID NO: 178914 - DNA, 80 bp, synthetic construct
  source 1..80: mol_type = other DNA
ctgcacgccctatgacattaatcaaatgcttaattgtgtgggcgaccatcaagcagctatgcaaataatcagggagatta

SEQ ID NO: 178915 - DNA, 80 bp, synthetic construct
  source 1..80: mol_type = other DNA
atgaacaatcagcaaatttattaccaggtttccatcccacaaagaagatccatatcccagggttagtaaccaatatcatg

SEQ ID NO: 178916 - DNA, 80 bp, synthetic construct
  source 1..80: mol_type = other DNA
cagctacaaagatgacctagcaaacactacactaacagccaggtacaagttcagattcaaatggggcggtaatatcatcc

SEQ ID NO: 178917 - DNA, 80 bp, synthetic construct
  source 1..80: mol_type = other DNA
agatttgacattgagtttacatttgtagtaactgagcgttattacactgctaattccggtcatgcactgaatcaggtgta

SEQ ID NO: 178918 - DNA, 80 bp, synthetic construct
  source 1..80: mol_type = other DNA
aaaagggctgaagccactagtgtcgttatccgcattggtactacgcaaagcctagtattattctggaagtctctcggttg

SEQ ID NO: 178919 - DNA, 80 bp, synthetic construct
  source 1..80: mol_type = other DNA
gctggacccgccgccgacgccgactaccgacccgaagacctcgacgacctgtacgccgctatcgaaagagacgcagagta

SEQ ID NO: 178920 - DNA, 80 bp, synthetic construct
  source 1..80: mol_type = other DNA
tgccagaggcgcaagacaaagtagaatatctttctaaacttaagcacctagacacactagaaaaccaagttgccacacta

SEQ ID NO: 178921 - DNA, 80 bp, synthetic construct
  source 1..80: mol_type = other DNA
agtacagactactaatagtatgtccctacacatttccaagactatacttagaaacaaatccaaactatggctatgtacca

SEQ ID NO: 178922 - DNA, 80 bp, synthetic construct
  source 1..80: mol_type = other DNA
ttaataaaaccaaaatatccagttcattagaggttttgtttcaaggccctgtttacaaagatttgaatattgatgtgaca

SEQ ID NO: 178923 - DNA, 80 bp, synthetic construct
  source 1..80: mol_type = other DNA
ctcacgtggcctgtcacgtgacgtgtgcgtcacggcggccattttgttttacaaaatggcgaacttccttcctctttttc

SEQ ID NO: 178924 - DNA, 80 bp, synthetic construct
  source 1..80: mol_type = other DNA
caggtggcaactatgtccatgtgccactgagcccccgaactctaaatgcttgggtaaaattagtagaggaaaagaagttc

SEQ ID NO: 178925 - DNA, 80 bp, synthetic construct
  source 1..80: mol_type = other DNA
ggaagccaatggatttagccatccttaagtgtaaattgccctttaggtttaagaagaattcaaaatactacaccaataaa

SEQ ID NO: 178926 - DNA, 80 bp, synthetic construct
  source 1..80: mol_type = other DNA
actatgacaaagtacaacaaacatggacaacaaaagcacaatttaattatgacttagttaaagaagaatacaaaacggta

SEQ ID NO: 178927 - DNA, 80 bp, synthetic construct
  source 1..80: mol_type = other DNA
ttttgatccaactaacctaactgaaaaaagggaaagcataacatatgtgcccgacaccatccgcccagatgtccgcacag

SEQ ID NO: 178928 - DNA, 80 bp, synthetic construct
  source 1..80: mol_type = other DNA
cccccagacccaaaaacccatactctgtgtgctttcgcttaggcttcaaataaacgttggccgtgggagtttcgcttgtc

SEQ ID NO: 178929 - DNA, 80 bp, synthetic construct
  source 1..80: mol_type = other DNA
tcacacagtatgggatgttggattgcagtctaccatgtccatggtggtaccatgggtttcagcaagtcattatagatata

SEQ ID NO: 178930 - DNA, 80 bp, synthetic construct
  source 1..80: mol_type = other DNA
agactggtactggcaacaactacaaacaccaaatgacattacctctagctatggaagagctgctaacaaatacctagaat

SEQ ID NO: 178931 - DNA, 80 bp, synthetic construct
  source 1..80: mol_type = other DNA
taatggggaagaaacgtccacagatcggtttgccgtgtggacaataaacattagggaaatggcgcaactcaggagaaagt

SEQ ID NO: 178932 - DNA, 80 bp, synthetic construct
  source 1..80: mol_type = other DNA
cagttagctagtgctcaaaagggtaacgttaccacaggatataattatactcatcctggtgaaggtggcagagatgttag

SEQ ID NO: 178933 - DNA, 80 bp, synthetic construct
  source 1..80: mol_type = other DNA
aaaacacattataaggtacacttgtttaacgaagtatcactatacaacgccttccaaaccatagctcagcttaaagaaac

SEQ ID NO: 178934 - DNA, 80 bp, synthetic construct
  source 1..80: mol_type = other DNA
tgatgaccagcaaacacagaataatgatacccagtctggagaccagacccaaggggaaaaagactgtaaaaataagaata

SEQ ID NO: 178935 - DNA, 80 bp, synthetic construct
  source 1..80: mol_type = other DNA
acaagtcaagggatacccctacgcatctgaggatgcccaacgagagctttgtgtcaacattgataaactcaagaaagggc

SEQ ID NO: 178936 - DNA, 80 bp, synthetic construct
  source 1..80: mol_type = other DNA
ctttggacttcacagcggaagcatcaacgtacgtgccaatcactgtgactgtggcacccatgtgtgctgagtacaacgga

SEQ ID NO: 178937 - DNA, 80 bp, synthetic construct
  source 1..80: mol_type = other DNA
agggaacatctatagaagatggatccagatagggctgcagaagtgtgtcaggatgtacaacccgaccaacatcctagaca

SEQ ID NO: 178938 - DNA, 80 bp, synthetic construct
  source 1..80: mol_type = other DNA
taaatacaattctgatgtttgttagcactttaggcatagtgtatgttatctataaattgtttgcacaaacccagggtcct

SEQ ID NO: 178939 - DNA, 80 bp, synthetic construct
  source 1..80: mol_type = other DNA
tagatgccatcagggaggttgccgccccgctacagtccccatctgttgaggcatgtgggtatagtgaccgcgtcgcacaa

SEQ ID NO: 178940 - DNA, 80 bp, synthetic construct
  source 1..80: mol_type = other DNA
gcaagtccttaactacatcaattgttggacgggcactagcagagcagttcaactcagcagtttattcactgccacctgat

SEQ ID NO: 178941 - DNA, 80 bp, synthetic construct
  source 1..80: mol_type = other DNA
gcataacatatggaaatgcaaatccgggtgaggctggtgggctattctcagcaacttttgtgccttctaccagtgatgaa

SEQ ID NO: 178942 - DNA, 80 bp, synthetic construct
  source 1..80: mol_type = other DNA
tggtgctcttgccagcccccgccgttcccgtaattacataggctgaaaagggcaggaagggaggctccgagatctccggg

SEQ ID NO: 178943 - DNA, 80 bp, synthetic construct
  source 1..80: mol_type = other DNA
cagtggacatacaagattcatcaaggggacaagatcctaaaagtagggaaatatgcaaagattaaaaacacccatacaaa

SEQ ID NO: 178944 - DNA, 80 bp, synthetic construct
  source 1..80: mol_type = other DNA
gtcatcattgccagctttgtttccttagaaagggccttgggatatgctatgcccgctcgagaaagagatcttcaaaaagg

SEQ ID NO: 178945 - DNA, 80 bp, synthetic construct
  source 1..80: mol_type = other DNA
accctaagaaccctcaatttcatattagtgcttaacacagcaaaatgggagctcaagtatcgacacaaaagacgggtgcg

SEQ ID NO: 178946 - DNA, 80 bp, synthetic construct
  source 1..80: mol_type = other DNA
catacgtcacaggcgccattttgttttacaaaatggccgacttccttcctcttttacaaaaaaaaagcggaagtgccgcc

SEQ ID NO: 178947 - DNA, 80 bp, synthetic construct
  source 1..80: mol_type = other DNA
caaggtaaaccccaaataccaggaagcagggaaactgaatttggactgtgcgctaaaaccatgcagtcatgagctaaagg

SEQ ID NO: 178948 - DNA, 80 bp, synthetic construct
  source 1..80: mol_type = other DNA
ctgacgaagggtgaggtcgcgcatttgtttgacaacaacacggtgacaaccggggcccacaaagtgcaagcaaaggtgtg

SEQ ID NO: 178949 - DNA, 80 bp, synthetic construct
  source 1..80: mol_type = other DNA
gtcgtgagcacgctataaatggtgagcaggcccgggctcggcggcgacgtaaacgatccttcatcgcgtttgccatgcag

SEQ ID NO: 178950 - DNA, 80 bp, synthetic construct
  source 1..80: mol_type = other DNA
ggaccaacacacacagtcaagcccacagttctaaatgctatggagattggtgttaccccagatgcaactccagaaagtgt

SEQ ID NO: 178951 - DNA, 80 bp, synthetic construct
  source 1..80: mol_type = other DNA
gtcaaggggcaattcgggctcgggactggccgggctatgggcaaggctcttaaagaatgcacttttctcgaatttctagg

SEQ ID NO: 178952 - DNA, 80 bp, synthetic construct
  source 1..80: mol_type = other DNA
ttaacagtgacaacaaaaaaaacctctggcaatacacatacacaggcctcatgtcaaagtactactacaaaggcaaccca

SEQ ID NO: 178953 - DNA, 80 bp, synthetic construct
  source 1..80: mol_type = other DNA
agtgcttttcggaaatgctttcatttacccacaccaaataataaacttgagaacaaataatagtgcaacactagtactcc

SEQ ID NO: 178954 - DNA, 80 bp, synthetic construct
  source 1..80: mol_type = other DNA
ggctaccgatcatggagggcccacaaagccgcgatcatcgcctgcttgcaagactgcgggaggaacatcgctttcgcccg

SEQ ID NO: 178955 - DNA, 80 bp, synthetic construct
  source 1..80: mol_type = other DNA
cggccctggcctcggtgagaagctcgcgtagccacacggcctggcgtgcaaagatggacatctccggctcgaaagactcg

SEQ ID NO: 178956 - DNA, 80 bp, synthetic construct
  source 1..80: mol_type = other DNA
ttaggagttgccataacagtattagtaacactgtctataggctatttcaagaactggccagaataccatctagaataagt

SEQ ID NO: 178957 - DNA, 80 bp, synthetic construct
  source 1..80: mol_type = other DNA
gtaccaaaagactcaccggcatgagcctgtatgctgtctaataagggggtcccctggttgtggtaaatcactggttacat

SEQ ID NO: 178958 - DNA, 80 bp, synthetic construct
  source 1..80: mol_type = other DNA
tgtatgttagcatggcattcaggagaaaaagaatacaatgactttattcagaaaattagaacaacagatattggcaaatg

SEQ ID NO: 178959 - DNA, 80 bp, synthetic construct
  source 1..80: mol_type = other DNA
ccaacgcttactcacatttttatgatggcttttccaaagtccctttaaaagaccaggcagcagcattaggtgactcgcta

SEQ ID NO: 178960 - DNA, 80 bp, synthetic construct
  source 1..80: mol_type = other DNA
tttctattttactttacatgtcttatggtcacaatatagtgtatacatattgtgatcatgggcgcacaggtgagcaagca

SEQ ID NO: 178961 - DNA, 80 bp, synthetic construct
  source 1..80: mol_type = other DNA
cgcaagacagttaaggttaagatcggccccccccacttgtttcaacacaagtggtacactcagcaagacctgtgttccgt

SEQ ID NO: 178962 - DNA, 80 bp, synthetic construct
  source 1..80: mol_type = other DNA
ccgggtgcagacagtgtaatggagagaactttgctaggcgagattctaaattactatgcaaactggtctggaagtataaa

SEQ ID NO: 178963 - DNA, 80 bp, synthetic construct
  source 1..80: mol_type = other DNA
tgttgagaactacaatgagaccagtgcagtaaagagcaagttatttgcgaagtggaatattacatacactgacactgtgc

SEQ ID NO: 178964 - DNA, 80 bp, synthetic construct
  source 1..80: mol_type = other DNA
ccctttacaggtttaggatcagcatattacatgttctatgatggatatgatggtattaaagccaacaatacaaactatgg

SEQ ID NO: 178965 - DNA, 80 bp, synthetic construct
  source 1..80: mol_type = other DNA
caaaatgcagcagcagctccaactcttccgagagcagctactcaaaacccaagcgggtctccaagtaaaccccctgttat

SEQ ID NO: 178966 - DNA, 80 bp, synthetic construct
  source 1..80: mol_type = other DNA
ggcgatatggctacaatacattaaacaacatggggcaactattctttaggcatgtgaacaaacccagtcccaacacttac

SEQ ID NO: 178967 - DNA, 80 bp, synthetic construct
  source 1..80: mol_type = other DNA
agcagcagcacgccgcgtcgcgcccaggcgtccaggcaacccgaggccggacgctgaaacccgtccaccgtacgcgccag

SEQ ID NO: 178968 - DNA, 80 bp, synthetic construct
  source 1..80: mol_type = other DNA
tttgagaaatggctctatggcaaatgcacccactatcaggcctttgccacagaagcccacctcagacccaggaccaccac

SEQ ID NO: 178969 - DNA, 80 bp, synthetic construct
  source 1..80: mol_type = other DNA
atgatgacatacatggggagacactagtgtggcggtttaactccatgctggcctatgagtacaaggccttcactctatac

SEQ ID NO: 178970 - DNA, 80 bp, synthetic construct
  source 1..80: mol_type = other DNA
tagatgagagattagaggtagactttgaggaatctttattttcaaagtacaagggaaatgtgaaaatgaacattactgaa

SEQ ID NO: 178971 - DNA, 80 bp, synthetic construct
  source 1..80: mol_type = other DNA
tggggcgactacgtatacaaagaaagcataattgactcatttaaaacgaatgccacaaactattataatagcagaaaagg

SEQ ID NO: 178972 - DNA, 80 bp, synthetic construct
  source 1..80: mol_type = other DNA
cgaaacgcagcggctcggggcagcagaggtagctggccagacgctgtgcatcccgtccttcgtcgcgcaccaagcgccag

SEQ ID NO: 178973 - DNA, 80 bp, synthetic construct
  source 1..80: mol_type = other DNA
tcctgccttacgtcaactcattgtccatcgattgcatggctaggcacaataactggggaatagtcatcatcccggtagtt

SEQ ID NO: 178974 - DNA, 80 bp, synthetic construct
  source 1..80: mol_type = other DNA
acggaggtccaggatgtggcaagtcattggccactaccatcatatccagaggattagcctccgaaggggatatttattcc

SEQ ID NO: 178975 - DNA, 80 bp, synthetic construct
  source 1..80: mol_type = other DNA
ccatgttaaagtagctgtttctcactactcagcccaacttatgactttagatattaacccagaacctatctcacttgagg

SEQ ID NO: 178976 - DNA, 80 bp, synthetic construct
  source 1..80: mol_type = other DNA
ccgcgtccgcccggcgcaggatcaaggaccgcccccaggtcttgttgtagagggacacggttaggacggcctcgcgcagc

SEQ ID NO: 178977 - DNA, 80 bp, synthetic construct
  source 1..80: mol_type = other DNA
ctccacctagctcgggagactgggccacggagtacgcggcggccgccgccttcgatagaccccccagaggcaacctgtca

SEQ ID NO: 178978 - DNA, 80 bp, synthetic construct
  source 1..80: mol_type = other DNA
gggccgatgagttcgcctgcgcccgcgcctggaacaggcccgttcgcaccaactacacagacacccccacttatccctgg

SEQ ID NO: 178979 - DNA, 80 bp, synthetic construct
  source 1..80: mol_type = other DNA
gtgtccctacatcaacaagggagatgtgaactttacagttacaggagtgactgatgcgcgagcatccatcaccgaaacac

SEQ ID NO: 178980 - DNA, 80 bp, synthetic construct
  source 1..80: mol_type = other DNA
acaggtgagcaaacaaaatgttggttcccacgaaagtggtatcaatgcctctagtggttctgttatcaagtacttcaata

SEQ ID NO: 178981 - DNA, 80 bp, synthetic construct
  source 1..80: mol_type = other DNA
cctagaatgtgcgccaaagtgacgtcacgagcctacaccaattacgaagacttcgtgaattatcaagaagcagtcggcgc

SEQ ID NO: 178982 - DNA, 80 bp, synthetic construct
  source 1..80: mol_type = other DNA
cgggtcaaagggcaggcatacgtcataagtcacgtgggaaggcactgcgcaaacacggaagcaggtctgtcacgtgactt

SEQ ID NO: 178983 - DNA, 80 bp, synthetic construct
  source 1..80: mol_type = other DNA
aaggagaccaatagaaactgggcttgtcgagacagagaagactcttgcgtttctgataggcacctattggtcttactgac

SEQ ID NO: 178984 - DNA, 80 bp, synthetic construct
  source 1..80: mol_type = other DNA
gtcactgttggtacaaaagtgtacaacattcttctcttcagctgccacagaaattttggataatgatttagtgaagttta

SEQ ID NO: 178985 - DNA, 80 bp, synthetic construct
  source 1..80: mol_type = other DNA
gccgaaagcaactagcaataaggtgggtggatatagacgcttaaagtgtgttgtgcattttcttttctagcctgtgtttt

SEQ ID NO: 178986 - DNA, 80 bp, synthetic construct
  source 1..80: mol_type = other DNA
ctcgtattccacagctgggactaccgacgagggctctttggccacgcaagtattaagagaatgtcagaggaatcagcaac

SEQ ID NO: 178987 - DNA, 80 bp, synthetic construct
  source 1..80: mol_type = other DNA
ttggaaattctaccataaccacacaggaggctgcaaacgccatagttgcatacggtaggtggccatcttatttgaagccc

SEQ ID NO: 178988 - DNA, 80 bp, synthetic construct
  source 1..80: mol_type = other DNA
gctgcttgcgtcacgataatgcaagttgacaacttcaatgccacaactatggaagaaaaaaggagattgttcgcaaaatg

SEQ ID NO: 178989 - DNA, 80 bp, synthetic construct
  source 1..80: mol_type = other DNA
cggaggaggctacatacccctacccgagagggccttctggtacgtcatgctaaggtaccaagagcaggtctttaaagaca

SEQ ID NO: 178990 - DNA, 80 bp, synthetic construct
  source 1..80: mol_type = other DNA
caccattcattgaacaacggaacttctatcaaggagatgtgcacgatgctgttgttggggcaatgactcgcgtggccgat

SEQ ID NO: 178991 - DNA, 80 bp, synthetic construct
  source 1..80: mol_type = other DNA
ggtgacgtccagaatgcagttgagggagctatggttagggtcgcagataccgttagcactagcgcctccaactctgagca

SEQ ID NO: 178992 - DNA, 80 bp, synthetic construct
  source 1..80: mol_type = other DNA
gggagtgcttttggagagggcttcacagcaaacattaaagaccaacttgcagttgtaggtaacacaattatggatggttt

SEQ ID NO: 178993 - DNA, 80 bp, synthetic construct
  source 1..80: mol_type = other DNA
ggagatgcgccataaggggtatgatccccctagtactgtgcgggcacacaacttggaacagaaactatgccatgcgcagc

SEQ ID NO: 178994 - DNA, 80 bp, synthetic construct
  source 1..80: mol_type = other DNA
ctgtgttaacatgcacaacgccttctgtggctgcgacaactttcttacccacctgcagcgcataacaacatacacctctg

SEQ ID NO: 178995 - DNA, 80 bp, synthetic construct
  source 1..80: mol_type = other DNA
tattttatcacaacaactatggagacaattaagaacattgcagatatggctactggagttgttagctctgtggattccac

SEQ ID NO: 178996 - DNA, 80 bp, synthetic construct
  source 1..80: mol_type = other DNA
tgggtacattatgctttagaatagttactgaagaacacaccaacaaagttaaggtcacaactagagtttaccacaaagct

SEQ ID NO: 178997 - DNA, 80 bp, synthetic construct
  source 1..80: mol_type = other DNA
tccgacacttccaccatctccagctcggccggcggttcggcatcctccaccagcggcgtcgtctcatctttgccgcagca

SEQ ID NO: 178998 - DNA, 80 bp, synthetic construct
  source 1..80: mol_type = other DNA
ggacggggaattacttgcctttgattacacaaactatgatggaagtctacacccagtgtggttccaagcccttggtaaag

SEQ ID NO: 178999 - DNA, 80 bp, synthetic construct
  source 1..80: mol_type = other DNA
gaaaaccagaacttagaaaggctgttaaacagggtcctgagcatgagtttgtacattctctcatacgcaggaattgtcat

SEQ ID NO: 179000 - DNA, 80 bp, synthetic construct
  source 1..80: mol_type = other DNA
agcaccacctccttcagcctaaaagtactgtatgaccagcacctaagattcctaaacaggtggtcatctagcaacgacgt

SEQ ID NO: 179001 - DNA, 80 bp, synthetic construct
  source 1..80: mol_type = other DNA
cggacaccgtgcaaacgcgccatgtcatccagagacgaacgcgatcagagtccacggttgagtcattctttgcaagaggg

SEQ ID NO: 179002 - DNA, 80 bp, synthetic construct
  source 1..80: mol_type = other DNA
gttagtttagaatctataggtagcttaacacaggagttagaatacagaggagaaagcttattatgcagtttaatatttag

SEQ ID NO: 179003 - DNA, 80 bp, synthetic construct
  source 1..80: mol_type = other DNA
cactgtctagcactttgataggtgaaattgcaagttactacacacattggacaggtagtctcaggtttagtttcatgttc

SEQ ID NO: 179004 - DNA, 80 bp, synthetic construct
  source 1..80: mol_type = other DNA
cagccaggaaacgcaaagctcccaagaagagacggaagcgcaagggtcggtacaagaccaacttctcctccagctccgag

SEQ ID NO: 179005 - DNA, 80 bp, synthetic construct
  source 1..80: mol_type = other DNA
gctcacaatgtccaagttacaacaagcatttatcacaaagctaaacatgtgaaggcatggtgtcccaggccaccaagagt

SEQ ID NO: 179006 - DNA, 80 bp, synthetic construct
  source 1..80: mol_type = other DNA
aggatctggttctacaatacatgtacgtgcctcccggtgcccctaaacctaccgctcgaaacagctacgagtggcagacg

SEQ ID NO: 179007 - DNA, 80 bp, synthetic construct
  source 1..80: mol_type = other DNA
aaagacacaccatttatatcgcaagacagcttctatcagggggacgtgcacgatgcggtggttggggccatgacccgtgt

SEQ ID NO: 179008 - DNA, 80 bp, synthetic construct
  source 1..80: mol_type = other DNA
cttccaaatacccggagcccgtgacctctttagcacagtacaagtcacgaacccgaaactcatcgacgagggatacttct

SEQ ID NO: 179009 - DNA, 80 bp, synthetic construct
  source 1..80: mol_type = other DNA
gcccccccaggacgaccgcccggcgtcggctaccccagtgagacgcctcctcccgctgccctcctaccccggagagggtc

SEQ ID NO: 179010 - DNA, 80 bp, synthetic construct
  source 1..80: mol_type = other DNA
aatccaggtgtattgacaggttcagctgtcgggtgtgatcccgataccttctggtcagtgattccttgcctgctagatgg

SEQ ID NO: 179011 - DNA, 80 bp, synthetic construct
  source 1..80: mol_type = other DNA
tgtaggagaacatcaagcagccatgcaaattattagagaaataattaatgaggaggcagcagagtgggatcttcaacatc

SEQ ID NO: 179012 - DNA, 80 bp, synthetic construct
  source 1..80: mol_type = other DNA
gaccacttcagcaaactagggcaaactatcaatgataaaatcactacaaaagttgtgaagtggttgattcgcatcattag

SEQ ID NO: 179013 - DNA, 80 bp, synthetic construct
  source 1..80: mol_type = other DNA
atcaagtggacaattagattaatcagtgccttgtcaattatagttagaaatagctcagacacccccacggttatagccac

SEQ ID NO: 179014 - DNA, 80 bp, synthetic construct
  source 1..80: mol_type = other DNA
tgaacagccaggaagtgcctgctctcaccgcagttgagaccggtgcttcgggacaggctatcccttctgatgtggttgag

SEQ ID NO: 179015 - DNA, 80 bp, synthetic construct
  source 1..80: mol_type = other DNA
gcgtcagaccacttcgggctcgcgggggtcggggggctttactaacagactccgagtcgctcttggactctgaggttgcg

SEQ ID NO: 179016 - DNA, 80 bp, synthetic construct
  source 1..80: mol_type = other DNA
tgcaacccaagtgtgttcttcaaaattgatgaccctccagctaggatgaccatcccattcatgtgcataaactcagccta

SEQ ID NO: 179017 - DNA, 80 bp, synthetic construct
  source 1..80: mol_type = other DNA
ttggagactacagcagtactacaccaacagtaaacattcaaagcataattaagaaaatacaacaaaatgcacacaactac

SEQ ID NO: 179018 - DNA, 80 bp, synthetic construct
  source 1..80: mol_type = other DNA
ggcaacatgggcggcacaaacctaaaaacatcagccggggcattcaatactacatgggcaccacctgtggcacaacaatc

SEQ ID NO: 179019 - DNA, 80 bp, synthetic construct
  source 1..80: mol_type = other DNA
atatggactgacaataaccccagcagataagtcaactgaattcagggaggtcacttgggatacagtcactttcctgaaga

SEQ ID NO: 179020 - DNA, 80 bp, synthetic construct
  source 1..80: mol_type = other DNA
aatcagaagtgtgcctgtgggaagggcgttgacactacctgcatactctagtcttagacggaaatggttagattcgtttt

SEQ ID NO: 179021 - DNA, 80 bp, synthetic construct
  source 1..80: mol_type = other DNA
agacgatggcctagacggactgctcgccgccctcgaagaagacgagtaaggaggcgcagacggtggaggagtgggagacg

SEQ ID NO: 179022 - DNA, 80 bp, synthetic construct
  source 1..80: mol_type = other DNA
ccgaacaggttgttaaagaccccagcacacaacccacctacgagctgcccgcagccggtacagtccctcgtagagtacaa

SEQ ID NO: 179023 - DNA, 80 bp, synthetic construct
  source 1..80: mol_type = other DNA
gcgtaaagacgatgagaacgttaaccagaaagaccacgacccagacgccgttgatgagggtaaattgatcggacagggtg

SEQ ID NO: 179024 - DNA, 80 bp, synthetic construct
  source 1..80: mol_type = other DNA
agaagctaaatgcaccatggccaataggaggcaacacaccacgttgtctacggtcaagcacttctgttaccccggcatga

SEQ ID NO: 179025 - DNA, 80 bp, synthetic construct
  source 1..80: mol_type = other DNA
gtcatgaggcaggcgcggaaagtcgctgcggcttgctggggccatgggccgcgcattcctggaaaaagtggaggtggcgt

SEQ ID NO: 179026 - DNA, 80 bp, synthetic construct
  source 1..80: mol_type = other DNA
taaaacccagtgcaacacaaacagacttcaccccttcatggacagatatacaaaataaaactgtattaaatgcatcagga

SEQ ID NO: 179027 - DNA, 80 bp, synthetic construct
  source 1..80: mol_type = other DNA
gtcctcaaactctacctgccgcttgaatgtgacggagttggcctcgatccgtcctggggaaacgtggacgttacacggaa

SEQ ID NO: 179028 - DNA, 80 bp, synthetic construct
  source 1..80: mol_type = other DNA
aattgcaacaacaaataaatcagacttctctagcacagttctccaagattctggtgccttaaaaagaagattcccataca

SEQ ID NO: 179029 - DNA, 80 bp, synthetic construct
  source 1..80: mol_type = other DNA
catatttgggcagcccactactaaactaccacagaataagcccagaaattccaggcctgtacaaagacataatatataat

SEQ ID NO: 179030 - DNA, 80 bp, synthetic construct
  source 1..80: mol_type = other DNA
attttagctttacagcgccgggaaaaggctcagccccaaaagtaaaatacatgtggactaactgcgagagagaattttct

SEQ ID NO: 179031 - DNA, 80 bp, synthetic construct
  source 1..80: mol_type = other DNA
tggcaaatctcagcaaccaaagcccatatgctgaacaaacacagaaacaaactatgaagttggcctatttggacagaggc

SEQ ID NO: 179032 - DNA, 80 bp, synthetic construct
  source 1..80: mol_type = other DNA
tatggttaattcagttgactcaaccattaatgctgtcaatgaaaaagttgaaaatgtcggtaatgaaataggaggtaatc

SEQ ID NO: 179033 - DNA, 80 bp, synthetic construct
  source 1..80: mol_type = other DNA
tgtggaacgggtaccacgggaaccacctacaaaaactatggcagccacataaatgactatacaaagtttgacccctttgg

SEQ ID NO: 179034 - DNA, 80 bp, synthetic construct
  source 1..80: mol_type = other DNA
aagtggtaccaagcgacactatgcaaactaggcacgtccataacttccatactagatcagaatcatccattgagaatttc

SEQ ID NO: 179035 - DNA, 80 bp, synthetic construct
  source 1..80: mol_type = other DNA
cacagtttcacacaccaaagtggataacctttttgggcgagcatggtttttcgaggagcacactttcactaatgaagggc

SEQ ID NO: 179036 - DNA, 80 bp, synthetic construct
  source 1..80: mol_type = other DNA
aacagagtcagaaagtaggatagtaaatcaaatcatagaagaaatgatcaaaaaggaggcgatctatgttgcatgggttc

SEQ ID NO: 179037 - DNA, 80 bp, synthetic construct
  source 1..80: mol_type = other DNA
ccagtaataaacaatacccaactctacaatccacatggacatctactatctatgctaaaaaaacagacagcaactttggc

SEQ ID NO: 179038 - DNA, 80 bp, synthetic construct
  source 1..80: mol_type = other DNA
caagcaactgttcgtacaagtcctcaaaacccaagcgggtgtccacctaaaccctatgttattggcccatgcataaacaa

SEQ ID NO: 179039 - DNA, 80 bp, synthetic construct
  source 1..80: mol_type = other DNA
tagtgccgtacatgaacacattaccctttgactctgccttaaaccactgcaatttcggattggtggttgtacccatcagt

SEQ ID NO: 179040 - DNA, 80 bp, synthetic construct
  source 1..80: mol_type = other DNA
atcagtctacagaatccacccccacctgcaatagctgatcttcttcaatcagttagaactccagaagtgattaaatattg

SEQ ID NO: 179041 - DNA, 80 bp, synthetic construct
  source 1..80: mol_type = other DNA
cttttgtaacgtccattcgtcgtcggtggcacggtaatcgtccacaaacagcggctcgtcggcatccatggcgcccaaac

SEQ ID NO: 179042 - DNA, 80 bp, synthetic construct
  source 1..80: mol_type = other DNA
caaaaagtacaacagaactttttcaagtggaccattaacacccgttcctatgtgcaactcagaaggaagtttgaactctt

SEQ ID NO: 179043 - DNA, 80 bp, synthetic construct
  source 1..80: mol_type = other DNA
tgacgagatatatatgatccttataacctggctactatcatgaacaacaatatccttacttacagtcatcttcgtgagtt

SEQ ID NO: 179044 - DNA, 80 bp, synthetic construct
  source 1..80: mol_type = other DNA
gttcggtagtcgagggcgcgttgaccacgggaggctccagggagcctccaagcggcggctggcaggcctgcaccacgatc

SEQ ID NO: 179045 - DNA, 80 bp, synthetic construct
  source 1..80: mol_type = other DNA
gtggcgatcctgtccttcatttttctcgtatggctgctagttctaatcttcagggaggcccaccaagcccgccggggcca

SEQ ID NO: 179046 - DNA, 80 bp, synthetic construct
  source 1..80: mol_type = other DNA
gagacagaaggtagtaacatactcatacagaaacacttcctagagcacagagcagacatcacaaccctaggacctagtga

SEQ ID NO: 179047 - DNA, 80 bp, synthetic construct
  source 1..80: mol_type = other DNA
tattgataatattaaagaccaaattaatgttattaatcctatcaacaaaatcactagtaaaatagttaaatggatcatta

SEQ ID NO: 179048 - DNA, 80 bp, synthetic construct
  source 1..80: mol_type = other DNA
gaggtttctctccacacatcacggccgtgccacatcgtcgacggccatggttatttcctgcttgctagatgccctcccgg

SEQ ID NO: 179049 - DNA, 80 bp, synthetic construct
  source 1..80: mol_type = other DNA
cttttaccccgaagttcctaaaatcccccctcaattctctgtaagttttaaacttggctggaaataaaatttgcaaggcc

SEQ ID NO: 179050 - DNA, 80 bp, synthetic construct
  source 1..80: mol_type = other DNA
tgagagcccatatagatgcaacaaaagcgaagcaggcccaaaccaacgctacctcaccctcatacaaccaagaccccttt

SEQ ID NO: 179051 - DNA, 80 bp, synthetic construct
  source 1..80: mol_type = other DNA
ggtcagaaatagcgcagatggtccaacagtcattgcaactctggccctactgggatgtaattcatcaccatggtcttttc

SEQ ID NO: 179052 - DNA, 80 bp, synthetic construct
  source 1..80: mol_type = other DNA
tgtaagcgtaattaaaacggtgtatgttctgcgtaaagtgcattcaaacaacgtaacagtatgggatgaatgccaataaa

SEQ ID NO: 179053 - DNA, 80 bp, synthetic construct
  source 1..80: mol_type = other DNA
tttacagggaccccgaaacagactttatagttacataccagagaaaatctcctctgggaggtaacataatgacagcacca

SEQ ID NO: 179054 - DNA, 80 bp, synthetic construct
  source 1..80: mol_type = other DNA
agaggcattcgaatggctagaaagaacagtcacagagatcaacaggatagcagtcaatcatttacccagggagcttattt

SEQ ID NO: 179055 - DNA, 80 bp, synthetic construct
  source 1..80: mol_type = other DNA
cagctggtatgtatactgttcaagttagtcaacaaactcaaccagctcaagagatcttctccatcttggtggatgtggct

SEQ ID NO: 179056 - DNA, 80 bp, synthetic construct
  source 1..80: mol_type = other DNA
catgttcagacaccacaatttcacactaatgattattccctttgtaccattagactattcttcagattcatccacgtacg

SEQ ID NO: 179057 - DNA, 80 bp, synthetic construct
  source 1..80: mol_type = other DNA
accggcgcatccgaaaaacgcttccaagcgttacgggaattggtttactttttccgtaaccatgaatatttctttcaaca

SEQ ID NO: 179058 - DNA, 80 bp, synthetic construct
  source 1..80: mol_type = other DNA
agagatgttacaaaacttaaggaggcaattgacaaatacggtattgatttacccatggttactttcttaaaggatgagct

SEQ ID NO: 179059 - DNA, 80 bp, synthetic construct
  source 1..80: mol_type = other DNA
gatgttcttgggtcgttccgctttgtggtcaaagtttaatctaactggtaagtttgccaagtgggacattagtttccagg

SEQ ID NO: 179060 - DNA, 80 bp, synthetic construct
  source 1..80: mol_type = other DNA
cgcgcagaggtaacaacgtgttcatagcacggtgttttacttttgtcgggctcccagcctctgttaggttgcggagataa

SEQ ID NO: 179061 - DNA, 80 bp, synthetic construct
  source 1..80: mol_type = other DNA
acgtgactcctccgttacgcataccaggagaagtttgcaacttgatggagatcgcagaagtcgactcagtggtcccagtc

SEQ ID NO: 179062 - DNA, 80 bp, synthetic construct
  source 1..80: mol_type = other DNA
atgacatagtgagtcatgaaaatgggatatacgggataagcaccaccaatgatatgggaagtttgtgtttcagaactcca

SEQ ID NO: 179063 - DNA, 80 bp, synthetic construct
  source 1..80: mol_type = other DNA
tgctctggatcaccatggcgattccttaaagagaagttttgcaagtggacacaattaaattatgttcataaagaatcaga

SEQ ID NO: 179064 - DNA, 80 bp, synthetic construct
  source 1..80: mol_type = other DNA
aggtgaaaatggttccacagctttaacaaaaaccaatgctcaaaagattacatttccacttgataacaaagatccaacac

SEQ ID NO: 179065 - DNA, 80 bp, synthetic construct
  source 1..80: mol_type = other DNA
atagctgaactatgtaaaaaaactaaagaaaaatacttcaatgctacaaagtctgcattccctgcctatgctacacttgt

SEQ ID NO: 179066 - DNA, 80 bp, synthetic construct
  source 1..80: mol_type = other DNA
gtcttggtccctgcctgggacacatcttaataaccccagtatcatattgcactaggattatgtgttgcccatagccataa

SEQ ID NO: 179067 - DNA, 80 bp, synthetic construct
  source 1..80: mol_type = other DNA
gtgcttagctggagatagtaacaccacgcccacacacactagttaccagaacgcaaacccaggtgagaagggaggtacct

SEQ ID NO: 179068 - DNA, 80 bp, synthetic construct
  source 1..80: mol_type = other DNA
taagtggttctggcatcagttaacagccacagattcagacacactaggccaatacggccgtgcctccattaagtatatgg

SEQ ID NO: 179069 - DNA, 80 bp, synthetic construct
  source 1..80: mol_type = other DNA
tgctcccttgtatgccagtgaggcacgccgtatctttaaaatggaagctatcattaacaattacatacaattcaagacca

SEQ ID NO: 179070 - DNA, 80 bp, synthetic construct
  source 1..80: mol_type = other DNA
agctgagaaggaaaatagaattgttcacatacaccaggtttgatgtggagattacatttgttattaccacaacacagcaa

SEQ ID NO: 179071 - DNA, 80 bp, synthetic construct
  source 1..80: mol_type = other DNA
ttctatggatactgtgactgggtaactaaatccataggatccacatcagcatggagagacatgagactattagtaaaatg

SEQ ID NO: 179072 - DNA, 80 bp, synthetic construct
  source 1..80: mol_type = other DNA
aacatacagttcagaacagcatacatggatgtcacttataatccactaaatgacaaaggccagtttaacagagtgtggtt

SEQ ID NO: 179073 - DNA, 80 bp, synthetic construct
  source 1..80: mol_type = other DNA
ttgtctttacgcgtaacttagaagcattgcacacagctcaataggaatagtccatccaggactgttacgagcaagtactt

SEQ ID NO: 179074 - DNA, 80 bp, synthetic construct
  source 1..80: mol_type = other DNA
aatatgggatataggccttcaatctacaatatcaatggtagtaccatggattagtgctagccattacagaaatacatcat

SEQ ID NO: 179075 - DNA, 80 bp, synthetic construct
  source 1..80: mol_type = other DNA
aacagtaataccaacgccgaggcagcggtggaaaacttcttaggtagatcagctttgtgggcaaatttaacgttagagga

SEQ ID NO: 179076 - DNA, 80 bp, synthetic construct
  source 1..80: mol_type = other DNA
tcagagtggttaatgaacatgatgtgcacaaaacactagtgaaaatcagagtctatcatagagcaaaacatgttgaggcc

SEQ ID NO: 179077 - DNA, 80 bp, synthetic construct
  source 1..80: mol_type = other DNA
ctggtgcattaaatgcaccggcaactctggcatagtaaaggacgccaggattatggtcaggtgtccctacacagagcctc

SEQ ID NO: 179078 - DNA, 80 bp, synthetic construct
  source 1..80: mol_type = other DNA
aattccagcatgtgattgcactgttggatgttatttctcaaagagccgcaatcggtatttccccatcgaggtagtctccc

SEQ ID NO: 179079 - DNA, 80 bp, synthetic construct
  source 1..80: mol_type = other DNA
agcccagacagtccaggccaaaaactttacgaacaaatatctaagtatttaccatactacaacaccacagaaacaatggc

SEQ ID NO: 179080 - DNA, 80 bp, synthetic construct
  source 1..80: mol_type = other DNA
cgttccacggtccttgcctgtgtcgtttccggccgcgtggtgggtccattccgggccgcgtggtgggtcctcgagggagt

SEQ ID NO: 179081 - DNA, 80 bp, synthetic construct
  source 1..80: mol_type = other DNA
ggagagttaatttagagttcccgaaacagggccatggttcgctttccttgctattcgcttacttcacaggtgaattaaat

SEQ ID NO: 179082 - DNA, 80 bp, synthetic construct
  source 1..80: mol_type = other DNA
aaaaagaagaatcatctttcagacaccgagtcctccagccctgggtccagtcttcccaggaggaggaaacggagtcgcaa

SEQ ID NO: 179083 - DNA, 80 bp, synthetic construct
  source 1..80: mol_type = other DNA
cgggcccgaacacacaccccggcatgctaatgctgcaaaaacagaaaatactaatcccctcctgggagacaagacccaag

SEQ ID NO: 179084 - DNA, 80 bp, synthetic construct
  source 1..80: mol_type = other DNA
cgtcttggcgggaaacgcttttgtttacccccatcaaattatcaaccttcgcaccaacaatagtgcaacaatagtggttc

SEQ ID NO: 179085 - DNA, 80 bp, synthetic construct
  source 1..80: mol_type = other DNA
ctgcctgcatagcagtcattcacacagaacttaaacatgagcatgaaggtcaaaatgtttataatgatgaaggcaaaaat

SEQ ID NO: 179086 - DNA, 80 bp, synthetic construct
  source 1..80: mol_type = other DNA
attgcaaacagaaaaactggctcattccagagatccctactaatgtagaaagagcggtcaatcaggctagtaccataatt

SEQ ID NO: 179087 - DNA, 80 bp, synthetic construct
  source 1..80: mol_type = other DNA
gacgccgggttggcacgacgcggcgttgttaatggacgacggtacggtgcgcgagcacgcgtttcgcaacggaccgctgt

SEQ ID NO: 179088 - DNA, 80 bp, synthetic construct
  source 1..80: mol_type = other DNA
ggtgtgctgcccatgatcctctgtggggccgggaggagcgggtttaactacggactgcacagcgacgactacactgtaca

SEQ ID NO: 179089 - DNA, 80 bp, synthetic construct
  source 1..80: mol_type = other DNA
ggtactttaccaaggacatatgtgacctgggcctctttcagatctgggccacgggggcagagctcagaaacccctggctc

SEQ ID NO: 179090 - DNA, 80 bp, synthetic construct
  source 1..80: mol_type = other DNA
cgcggacgggccaatcaggaggctctacgtccacttcctggggtgtgtcttcgaagagtatataagcagaggcggtgacg

SEQ ID NO: 179091 - DNA, 80 bp, synthetic construct
  source 1..80: mol_type = other DNA
caatatctgataaattgacaagaaaagtgattaagtggttagtgcgtatcattagtgcactcaccattatgattagaaat

SEQ ID NO: 179092 - DNA, 80 bp, synthetic construct
  source 1..80: mol_type = other DNA
taaagatatcatgcacaaggccaaccaatggttctgggataatctcatgcataccaatgacctgcactcctcctatggca

SEQ ID NO: 179093 - DNA, 80 bp, synthetic construct
  source 1..80: mol_type = other DNA
acgcagaaaactacctaaaaaaagtacaacaagaattctcaaccactacagtaggcagcaccatgcacggaatgtttaca

SEQ ID NO: 179094 - DNA, 80 bp, synthetic construct
  source 1..80: mol_type = other DNA
tggggagatgctattcacataacaaatgaccaaaatttaaacaaagtaaaagagattataactaataatgcaaaaaacta

SEQ ID NO: 179095 - DNA, 80 bp, synthetic construct
  source 1..80: mol_type = other DNA
tttacagagagggccaatgcaaatggctggtggaaaacatgcccctgtggagcctcctacacgggtataccgagtaccta

SEQ ID NO: 179096 - DNA, 80 bp, synthetic construct
  source 1..80: mol_type = other DNA
cgccgtggtaggtgatctcctggagccaaaagatggtctcttctagcatggccaccagggtgcagagccccgcgttctgg

SEQ ID NO: 179097 - DNA, 80 bp, synthetic construct
  source 1..80: mol_type = other DNA
agagtttccagccatgacaggctcagcagcacacacacaccttacaggaatatttggaagcagctggctaaaccctggca

SEQ ID NO: 179098 - DNA, 80 bp, synthetic construct
  source 1..80: mol_type = other DNA
taaatgactgcacttccgaatggctgagtttatgctgcccgtccgatgagaggagccgcgccaggggatccgaacgtccc

SEQ ID NO: 179099 - DNA, 80 bp, synthetic construct
  source 1..80: mol_type = other DNA
ccacaaacgaaaaatatttgcatatacttccttgttttagcctcaatctataacgacaaactaagcattacacaaacaga

SEQ ID NO: 179100 - DNA, 80 bp, synthetic construct
  source 1..80: mol_type = other DNA
cgggtcaagcctcaactgaaggcgattcgttgtacggtgctgcctcactgaatgattttggatcactggctgttcgcgtg

SEQ ID NO: 179101 - DNA, 80 bp, synthetic construct
  source 1..80: mol_type = other DNA
ttatatccccacccccatgtaacttagaagttgaacacaacgaccaataggaggcaattaaccaaattgctaaaggtcaa

SEQ ID NO: 179102 - DNA, 80 bp, synthetic construct
  source 1..80: mol_type = other DNA
ctacaatagctctagtccaaataaagtacattgcatcatccaaggaagattaggggatgatgctaggttcttctgtccag

SEQ ID NO: 179103 - DNA, 80 bp, synthetic construct
  source 1..80: mol_type = other DNA
tgtccgcgaacgacgtgtgacgaggacgtggtttccgcaagcctctaccgacgccgcgacaccaggtaggttatgaaaac

SEQ ID NO: 179104 - DNA, 80 bp, synthetic construct
  source 1..80: mol_type = other DNA
tttgctttactgagatgtaatgataccaactattcgggctttatgcccaactgcagtaacgtggtggcatcctcctgcac

SEQ ID NO: 179105 - DNA, 80 bp, synthetic construct
  source 1..80: mol_type = other DNA
aacagggtggcctaataacccagacagcggagacggagacactatataccaacaaaaccaaatagttacaacctggatga

SEQ ID NO: 179106 - DNA, 80 bp, synthetic construct
  source 1..80: mol_type = other DNA
gtctaaaatgaaaacccaagagttttatcagaggtattctgactgcctagccaaattcaaaccaatcatggcgatctgtt

SEQ ID NO: 179107 - DNA, 80 bp, synthetic construct
  source 1..80: mol_type = other DNA
tatcctcccataatcccccctgtagcgccggcagcgtttcgacgctgtgagaggggaaggcccagttctggttgtcttgc

SEQ ID NO: 179108 - DNA, 80 bp, synthetic construct
  source 1..80: mol_type = other DNA
gtatgaccagttcaccagacacatgaacaggtggtcgtaccccaacgaccagctagacctcgccagatacaaaggctgct

SEQ ID NO: 179109 - DNA, 80 bp, synthetic construct
  source 1..80: mol_type = other DNA
ataattataaaaaaacatatgataaattctctgccaaaagaacttccagattagacacaattaaaaaagagtggcaagta

SEQ ID NO: 179110 - DNA, 80 bp, synthetic construct
  source 1..80: mol_type = other DNA
agcaaaagaaagaggcgctcctccagcagctccagcagcagaaacaccaccagcgagtcctcaagcgaggcctcagactc

SEQ ID NO: 179111 - DNA, 80 bp, synthetic construct
  source 1..80: mol_type = other DNA
acataccgttgagctggttttgcaagtggtatcccaacatagctcaccagaaggaagtgcttgaggcaatcatttcctgc

SEQ ID NO: 179112 - DNA, 80 bp, synthetic construct
  source 1..80: mol_type = other DNA
acgtgacgcgcctgctgtccggcgcccgcgtgtcctaccgccgcagctgccgccgtcgagcctcctccgcgcgtctcgtc

SEQ ID NO: 179113 - DNA, 80 bp, synthetic construct
  source 1..80: mol_type = other DNA
cctcaaatacgggctaacaataacacctgctgacaagtctgaccagtttgtgaaggttaactgggacaatgccacatttt

SEQ ID NO: 179114 - DNA, 80 bp, synthetic construct
  source 1..80: mol_type = other DNA
caaagcagtcactggtgcaaccaacacagtgcccattacagtcactatagcaccaatgtgttgtgagttcaatggactca

SEQ ID NO: 179115 - DNA, 80 bp, synthetic construct
  source 1..80: mol_type = other DNA
atgataaataccaattcttgatacacccaacctttccaattgaagaaatacatgagtccatacgatggaccaagaaacca

SEQ ID NO: 179116 - DNA, 80 bp, synthetic construct
  source 1..80: mol_type = other DNA
cactttcaaatcacagtacacacctgggaccacaactgacgatgctagagagttttgccctattgactacttgtttggat

SEQ ID NO: 179117 - DNA, 80 bp, synthetic construct
  source 1..80: mol_type = other DNA
gctttcagacccgcatacatagacgttacctacaaccccatcacagacaaaggagagggaaatatagtatggtttcaata

SEQ ID NO: 179118 - DNA, 80 bp, synthetic construct
  source 1..80: mol_type = other DNA
gaccagcttaaacgccaagggaaattctatcatacactacaccaacataaatttctataaggatgcggcatcgagtgcat

SEQ ID NO: 179119 - DNA, 80 bp, synthetic construct
  source 1..80: mol_type = other DNA
tacggatacaacacgttgaaccacatggggcaattgtatgtgagacatgtaaatggcccctcaccacttccagtaaccag

SEQ ID NO: 179120 - DNA, 80 bp, synthetic construct
  source 1..80: mol_type = other DNA
attccaccacgggcgagtagacgtagacgcggccgccctcgccgatgagtacgggtagcggtgggcggccgatggcttcg

SEQ ID NO: 179121 - DNA, 80 bp, synthetic construct
  source 1..80: mol_type = other DNA
tccaggaaaaacaattcaggtgaatggaatcaacactaccatcagtgactcttatgatttgtacaacaaaaatggaatta

SEQ ID NO: 179122 - DNA, 80 bp, synthetic construct
  source 1..80: mol_type = other DNA
ggattactctgaacatatatcaaaatcagcaaaaaatatctttttggctagtgggttttataagcaacctaacaaaaatg

SEQ ID NO: 179123 - DNA, 80 bp, synthetic construct
  source 1..80: mol_type = other DNA
tttatcaacttgcattttgataactctattcgaaaattctaaactcatttttaataatgggagctcaggttactagacaa

SEQ ID NO: 179124 - DNA, 80 bp, synthetic construct
  source 1..80: mol_type = other DNA
ggatacaataaatgttcatttttatcgcatccgggccctctgggatcgcgatgaagccaataattacccaatataatttt

SEQ ID NO: 179125 - DNA, 80 bp, synthetic construct
  source 1..80: mol_type = other DNA
attaaaaccttaattcaaagtaattttaccaaagagaacaacggaggccaagaatttaaaacaggcaaaagtaccagatt

SEQ ID NO: 179126 - DNA, 80 bp, synthetic construct
  source 1..80: mol_type = other DNA
aaccgtgaaagacacacaaaagagtggcccgtcgaacacggagcaggtacctgcccttaccgctgttgagacagggcaca

SEQ ID NO: 179127 - DNA, 80 bp, synthetic construct
  source 1..80: mol_type = other DNA
aattatgagaattatgatgattcaattgacaatttcaaagtatggaaaataaacctacaagagatggctcagatacgcag

SEQ ID NO: 179128 - DNA, 80 bp, synthetic construct
  source 1..80: mol_type = other DNA
ctgtgcaaccaagaatagagacacatgggggactacacaatgtctcccagataatgatgattatagtgaattagctttaa

SEQ ID NO: 179129 - DNA, 80 bp, synthetic construct
  source 1..80: mol_type = other DNA
gacaatccttgcatcactttccaaaccctagccgcagcttacaacagcttcctctctataactatattccaaggcacctc

SEQ ID NO: 179130 - DNA, 80 bp, synthetic construct
  source 1..80: mol_type = other DNA
gacatggagttcacttttgtggtcacctcaaactacattgatgcaaataacggacatgcattgaaccaagtttatcaaat

SEQ ID NO: 179131 - DNA, 80 bp, synthetic construct
  source 1..80: mol_type = other DNA
ctaattttcaaacaggcaaatcctccctgtttggttttaacacatacaagcctgatgaaactaaattaaaggcaatacga

SEQ ID NO: 179132 - DNA, 80 bp, synthetic construct
  source 1..80: mol_type = other DNA
gccgaatactagcagctcagagccaacccactcccaagaggtcccagccctaactgctgttgaaacaggagcgactagtg

SEQ ID NO: 179133 - DNA, 80 bp, synthetic construct
  source 1..80: mol_type = other DNA
agcgtgtaacgcggccaagggattagagtggatagcacagaagataggcaaatttattgattggataaaaaccaagatct

SEQ ID NO: 179134 - DNA, 80 bp, synthetic construct
  source 1..80: mol_type = other DNA
cacatggacttgaagcagaagttggccggggactggccagtgaggatggatttcagaaactccaatttgtagtagccgag

SEQ ID NO: 179135 - DNA, 80 bp, synthetic construct
  source 1..80: mol_type = other DNA
tagttatctcattccattaacagccaatcagcaaaacacccagatttttggaaccaatttgtttattggtgatggtgtat

SEQ ID NO: 179136 - DNA, 80 bp, synthetic construct
  source 1..80: mol_type = other DNA
ggccaaatactctaggattctggaagtccaattgcaataaatacaaatggactagacaaaaaattgacattgcagaagga

SEQ ID NO: 179137 - DNA, 80 bp, synthetic construct
  source 1..80: mol_type = other DNA
cgggtgtactcacccagctcgccggtacattctcgaccaccggttcctctcgttcagctttcctgcagacgcaggcaaac

SEQ ID NO: 179138 - DNA, 80 bp, synthetic construct
  source 1..80: mol_type = other DNA
gcgcagttgctagagtagcagacacgattagcagtggtccaacaaactcacaagcagtcccagcacttactgcagtggag

SEQ ID NO: 179139 - DNA, 80 bp, synthetic construct
  source 1..80: mol_type = other DNA
tcgcgcgccacccaccaggaggcgcacagcgccccctcgtgtgcggcgggcgcacggcgccgaccccccgccgcaacgtc

SEQ ID NO: 179140 - DNA, 80 bp, synthetic construct
  source 1..80: mol_type = other DNA
tgggaaggggcgtgcctaaacccggaagcatcctcgtccacgtgactgtgacgtgtgtgacacgtcaccgccgccatttt

SEQ ID NO: 179141 - DNA, 80 bp, synthetic construct
  source 1..80: mol_type = other DNA
agattacataacacaagactccatgagcttgaagcaggccctcagtggtcattggatgtctgccacgggcaaccccctgc

SEQ ID NO: 179142 - DNA, 80 bp, synthetic construct
  source 1..80: mol_type = other DNA
atttgtagacagtgtaaaagagcatatacaaaatataaacccaattaataagatcaattccaaaatggttaagtggttac

SEQ ID NO: 179143 - DNA, 80 bp, synthetic construct
  source 1..80: mol_type = other DNA
ttgggtgtccgtgtttccttttattccatttattatctcatggtgacaacgtatacagattatatgttgtttaccatggg

SEQ ID NO: 179144 - DNA, 80 bp, synthetic construct
  source 1..80: mol_type = other DNA
tccacagattattaaaaacccctgcccagacaccggggttcgaccttcgaccggtagagaccgtcgctcagtacaagtcg

SEQ ID NO: 179145 - DNA, 80 bp, synthetic construct
  source 1..80: mol_type = other DNA
gccggtagactgtctaattaagaaatcagcttctaaatacagaataaacaaatttcaagtaaataatgagctatggcaag

SEQ ID NO: 179146 - DNA, 80 bp, synthetic construct
  source 1..80: mol_type = other DNA
ataatgctcatgtgagagtgtatgtaaaacccaaacacaccacagcatggattccccgacccccacgtgccgttcaatac

SEQ ID NO: 179147 - DNA, 80 bp, synthetic construct
  source 1..80: mol_type = other DNA
gcgtgagttcaaaggtcaccatcagccacacctactcaaaatggagggcaatctcttccgggtcaaaggtcaccggcgcc

SEQ ID NO: 179148 - DNA, 80 bp, synthetic construct
  source 1..80: mol_type = other DNA
ttcttcaattggacactaaataccagggagtttgttcaactaaggcggaagatggagttatttacatacttgagatttga

SEQ ID NO: 179149 - DNA, 80 bp, synthetic construct
  source 1..80: mol_type = other DNA
tgaatgcatcacaggcaaataggagcaggtacttgtcgcgtaaggtggagaatatgaaggcagtaacgactaataggatt

SEQ ID NO: 179150 - DNA, 80 bp, synthetic construct
  source 1..80: mol_type = other DNA
tgttttatgatacccactttggcaacggaaagctaggaaacggactgggacaggtaccgagatactggcagcagaggtgg

SEQ ID NO: 179151 - DNA, 80 bp, synthetic construct
  source 1..80: mol_type = other DNA
ttggtgatgaacgtaaacatcatgataaacaacctagtgatgataattggctgaactttgatggtaccttattgggcaat

SEQ ID NO: 179152 - DNA, 80 bp, synthetic construct
  source 1..80: mol_type = other DNA
gaaagctatggaggaggcatgaccaccactatgtttaacctaaaagttccgtacgaacagtttcaactgcaccagaactt

SEQ ID NO: 179153 - DNA, 80 bp, synthetic construct
  source 1..80: mol_type = other DNA
gttgtgcttatggactacaggttgattctctttgttctcttggtcttaataacctttcttgtactttattacagctacta

SEQ ID NO: 179154 - DNA, 80 bp, synthetic construct
  source 1..80: mol_type = other DNA
gcggggctcctggcaggcacacgtgacacctagcgccgggatgtgcgccaggaggccggcgagtaatagcaccagctgtc

SEQ ID NO: 179155 - DNA, 80 bp, synthetic construct
  source 1..80: mol_type = other DNA
ggctgcggttgcggaccaccaaaggcgacaaccgcaacgatcccagcaattcgtaagaaaagctaaccgttacggtcggg

SEQ ID NO: 179156 - DNA, 80 bp, synthetic construct
  source 1..80: mol_type = other DNA
cacgtttacaaaaccaaaccaaacaactaactatactacacaggacgctgctaaatttgtaagtagtgcagacagcaact

SEQ ID NO: 179157 - DNA, 80 bp, synthetic construct
  source 1..80: mol_type = other DNA
gttgcattgctattatacatactgacttagaccatgaagcagaacagtacaatgcacctggtaagaacttttctcagtgg

SEQ ID NO: 179158 - DNA, 80 bp, synthetic construct
  source 1..80: mol_type = other DNA
caagtacaggttcgatttcttatggggtggcaatatgatttccgaacagattatcaagaacccctgcagagacgaaggca

SEQ ID NO: 179159 - DNA, 80 bp, synthetic construct
  source 1..80: mol_type = other DNA
agcatgacccgtacaccagtgctggttacataacgtgttggtaccagacgaacatcgtggttccccctggcgcacccact

SEQ ID NO: 179160 - DNA, 80 bp, synthetic construct
  source 1..80: mol_type = other DNA
gtttttcgcagacctccttgttactttataaaagatagacctacttatccctatgtacctaaacctacaaatgaaaaatg

SEQ ID NO: 179161 - DNA, 80 bp, synthetic construct
  source 1..80: mol_type = other DNA
acgacacaggcactggcgccactggattcactaactgggatatagacataatggggtatgcacaattgcgcaggaaattg

SEQ ID NO: 179162 - DNA, 80 bp, synthetic construct
  source 1..80: mol_type = other DNA
gaggacgccgccgtgcttacctatgtcccgcaacgcttccgcaaccctgtcccgtgccggactggcggaacgaaaagtgc

SEQ ID NO: 179163 - DNA, 80 bp, synthetic construct
  source 1..80: mol_type = other DNA
gtcatcgagtcacgagctcagggcatcgacaccatagcccgttgccagtgcaagtgtggggtgtactattgtgagtccag

SEQ ID NO: 179164 - DNA, 80 bp, synthetic construct
  source 1..80: mol_type = other DNA
ggtagcgacggagacacggagtgacgtcggcgacgggaacggtggtgtggacggcgcgttggggggcgtcgcgggatggc

SEQ ID NO: 179165 - DNA, 80 bp, synthetic construct
  source 1..80: mol_type = other DNA
tgtcgtgggctccgccgcttttcaacgcgaaacagagagaggaccagtggtaccagtcaattattcacagccataatact

SEQ ID NO: 179166 - DNA, 80 bp, synthetic construct
  source 1..80: mol_type = other DNA
aatgagagtagcctggtaccccactctgagacaccagcagcaggtgatagaggccatcactcaaagcgggcccttcgcct

SEQ ID NO: 179167 - DNA, 80 bp, synthetic construct
  source 1..80: mol_type = other DNA
tccccgtcctcaccaccgtccccactcccgtccccgtctccgtccccaccactgtccccgccgcaaaagcccgcaagtcc

SEQ ID NO: 179168 - DNA, 80 bp, synthetic construct
  source 1..80: mol_type = other DNA
tgttccgatttagccgattatcaacgaaaaacatatgaacacaacatttcagtgttcgcagaaacagctgtaagaaaggt

SEQ ID NO: 179169 - DNA, 80 bp, synthetic construct
  source 1..80: mol_type = other DNA
agctgccaaattagaagtaagcaagtgtgtgtgttcccatctctcctagtcgccgcctggtcacctcggtgttcgcgtag

SEQ ID NO: 179170 - DNA, 80 bp, synthetic construct
  source 1..80: mol_type = other DNA
cacgtcccttttttgtttttgcatcgtttatcgtcaccactagtgcaatattttgatcgtaaggctgaaagagtattgtt

SEQ ID NO: 179171 - DNA, 80 bp, synthetic construct
  source 1..80: mol_type = other DNA
ccataaggcctttatcttcttgccatttgttagtgtccggggtcgccataggcttcggcctccattttaggccttccgga

SEQ ID NO: 179172 - DNA, 80 bp, synthetic construct
  source 1..80: mol_type = other DNA
ttaccagggcgggccgtccccgccgggtggccctcggccggacccgcggcccgtactgaggcgagcccttcccgcgccgc

SEQ ID NO: 179173 - DNA, 80 bp, synthetic construct
  source 1..80: mol_type = other DNA
ggctgtcatggtgacggctcgggaaaacatatccttcaggttgggtacaaagtagttgtgaaagttggcataatgcacaa

SEQ ID NO: 179174 - DNA, 80 bp, synthetic construct
  source 1..80: mol_type = other DNA
gcaaggccgtgggagtttcactggtcggtgtctgcttataaaggtcactaagcactccgagcgaagcgaggagtgcgacc

SEQ ID NO: 179175 - DNA, 80 bp, synthetic construct
  source 1..80: mol_type = other DNA
ccgggaaacagtactgtcctgagacgcactttgctgggcgaaattttaaactactacgcacactggtcaggtagcataaa

SEQ ID NO: 179176 - DNA, 80 bp, synthetic construct
  source 1..80: mol_type = other DNA
tgtacgaggagaaccagaggcaccacaacttctggacagccagtaacaaggacctggagctggccaggttctttggcagc

SEQ ID NO: 179177 - DNA, 80 bp, synthetic construct
  source 1..80: mol_type = other DNA
ttacgtgccgcggtcctagcacgtcagtggtgatgctgataattgcaacatggcccatgacgaacccgcttgggacgaac

SEQ ID NO: 179178 - DNA, 80 bp, synthetic construct
  source 1..80: mol_type = other DNA
aaaaatctttgaaaactacctatataaagaagccagtttctaccaacaagtattagtttcaagctacattaaaaaaatag

SEQ ID NO: 179179 - DNA, 80 bp, synthetic construct
  source 1..80: mol_type = other DNA
ccattgctgggcgcctgggatcctaaaagcctcggcagctgacatcggcggattagccaatttagttgcgggcaaggtgt

SEQ ID NO: 179180 - DNA, 80 bp, synthetic construct
  source 1..80: mol_type = other DNA
ggggctcgcgatcttctggggcaccgggagtaggtggcaaccacaaccctccccctatccgtcgagcccgccacccggcg

SEQ ID NO: 179181 - DNA, 80 bp, synthetic construct
  source 1..80: mol_type = other DNA
ccacagaggacatctggtaggtttggtcaacaatccggagctgtctatgtaggtaacttcagagtggtaaaccgacatct

SEQ ID NO: 179182 - DNA, 80 bp, synthetic construct
  source 1..80: mol_type = other DNA
cacttccgcatgttcaatagtgatgcaaaatccataaatgcaaatgtgggatatgtaacttgttttatgcaaacaaattt

SEQ ID NO: 179183 - DNA, 80 bp, synthetic construct
  source 1..80: mol_type = other DNA
agtggctgttactattcaaaatcactagatagatatatacctgttgaatgtgaagcccatgattggtaccctgtagagga

SEQ ID NO: 179184 - DNA, 80 bp, synthetic construct
  source 1..80: mol_type = other DNA
acgcgtaacttagaagcattgcaaacagctcaataggaatagtccatccaggactgttacgagcaagcacttctgtctcc

SEQ ID NO: 179185 - DNA, 80 bp, synthetic construct
  source 1..80: mol_type = other DNA
ttgtgcaataccacgcatatatacaaagatgaaatatatacagtgaaaggaggcatgccttcaggaatctcaggcacttc

SEQ ID NO: 179186 - DNA, 80 bp, synthetic construct
  source 1..80: mol_type = other DNA
ccggctgaccgggcgccatggcctatggctggtggaggagacgaaggtggcgccgccggaggtggccgcgacggaggaga

SEQ ID NO: 179187 - DNA, 80 bp, synthetic construct
  source 1..80: mol_type = other DNA
ctcagtccacacaagccaccagcggagttaactcccaagaggtaccagctctaacagctgttgagaccggggcttcaggt

SEQ ID NO: 179188 - DNA, 80 bp, synthetic construct
  source 1..80: mol_type = other DNA
aaggcttttctgcacagctgaagaaacaatattttgtagaaaaacaaggagcaattaccaccaaaagaaatgtcagggaa

SEQ ID NO: 179189 - DNA, 80 bp, synthetic construct
  source 1..80: mol_type = other DNA
gtttcatcacattgtggcaccagacagcgtttgtatccaatggagctacaggggctataatggtcacatgctccgcatgt

SEQ ID NO: 179190 - DNA, 80 bp, synthetic construct
  source 1..80: mol_type = other DNA
aagtgaaagcaggaaaaacaagggccattgaagcagctagtatgaatgatacagcaaacttcagaagagtatttggtaat

SEQ ID NO: 179191 - DNA, 80 bp, synthetic construct
  source 1..80: mol_type = other DNA
aagttgcgcagttacgcagaaagatggaaatgttcacgtatctacggtatgacgtggaggtaacctttgtcatcaccagc

SEQ ID NO: 179192 - DNA, 80 bp, synthetic construct
  source 1..80: mol_type = other DNA
tgtagtacaattaccactatatggtgtaatagatactccttgttggaaactacacacatcccctctatgtacaaccaaca

SEQ ID NO: 179193 - DNA, 80 bp, synthetic construct
  source 1..80: mol_type = other DNA
tgcctctgctctggtacgttggcttctgctgctgcttgtgatcatggaaaccactcagactctccgctttaagaccaagg

SEQ ID NO: 179194 - DNA, 80 bp, synthetic construct
  source 1..80: mol_type = other DNA
ggactttgactacatagtgtggataagcaggacccctcccttccaggagagcctgctcacagtaatgacccaccagccca

SEQ ID NO: 179195 - DNA, 80 bp, synthetic construct
  source 1..80: mol_type = other DNA
ctgttcttagacgcagatggcttgatttgttttaaaaattttcttgtttaaatatatagagtataaatttagtgtagtgc

SEQ ID NO: 179196 - DNA, 80 bp, synthetic construct
  source 1..80: mol_type = other DNA
ctgatgaaaatttttcaacaggcgtcgtgcacaaaaaaccccgaatggatacaaagtactaccaaacatcagaaacccaa

SEQ ID NO: 179197 - DNA, 80 bp, synthetic construct
  source 1..80: mol_type = other DNA
gacttctaacgttcaagtagtttactcgcttaattttctaaacacattctcagttgttgaattataaacttcacaatggg

SEQ ID NO: 179198 - DNA, 80 bp, synthetic construct
  source 1..80: mol_type = other DNA
aaagtggatttgtcacactgtggcatcaaacagcatttgtatccaatggaactacaggatctataatggttacctgctct

SEQ ID NO: 179199 - DNA, 80 bp, synthetic construct
  source 1..80: mol_type = other DNA
agtaatcgcaaggagggaagccgcagaagagatctgtatttctgatgatgctagcgaagaaccggatgcggaactggtta

SEQ ID NO: 179200 - DNA, 80 bp, synthetic construct
  source 1..80: mol_type = other DNA
aggtaaagtcttagataatctaggtttcccaggacacttggtaaatagactgtgcaacacaacacacatctttaagaacc

SEQ ID NO: 179201 - DNA, 80 bp, synthetic construct
  source 1..80: mol_type = other DNA
atgggagcgcaggtgtccacgcagaaaaccggtgcacacgaaactaggttaaatgctagcaatggatcaatcatccatta

SEQ ID NO: 179202 - DNA, 80 bp, synthetic construct
  source 1..80: mol_type = other DNA
acatccaaagacccggaaggaggccatgttaggagtgcatgtgatctgggatttgggcctgcaatcatcctgcaccatgg

SEQ ID NO: 179203 - DNA, 80 bp, synthetic construct
  source 1..80: mol_type = other DNA
attctggacacatgtgccagacgcctgggcctctaaggccctcgggtccccctggaccccggcctcagcaaccctgctgc

SEQ ID NO: 179204 - DNA, 80 bp, synthetic construct
  source 1..80: mol_type = other DNA
atgctacaaaatttcacagtggtgctttattagtggtcctcatacctgagcatcagttagcttacataggtgcagagaaa

SEQ ID NO: 179205 - DNA, 80 bp, synthetic construct
  source 1..80: mol_type = other DNA
agcctcaggaccaatacatacaactaaacccactgtacttaatgccatggaaattggtgccacaccggatgtgaatccag

SEQ ID NO: 179206 - DNA, 80 bp, synthetic construct
  source 1..80: mol_type = other DNA
catatgtttatgagttggacatggaagcaatagctatggaaggcaagaaatatggattgaccattacccctgctgataag

SEQ ID NO: 179207 - DNA, 80 bp, synthetic construct
  source 1..80: mol_type = other DNA
actatgttaaaacggattcgtctgacttagggcaattaaaagtctatgtgtggacgccactgtcagtcccacaaggggca

SEQ ID NO: 179208 - DNA, 80 bp, synthetic construct
  source 1..80: mol_type = other DNA
atgtagaattactggctacttacccattgtatggtgcggacacggaagggcctcttttaactatgcctggcactcagatg

SEQ ID NO: 179209 - DNA, 80 bp, synthetic construct
  source 1..80: mol_type = other DNA
accggctaaacgggctcagggtgatatgagctggagaccacccgttcacgatggggcaggtatcgagaggcagttctttg

SEQ ID NO: 179210 - DNA, 80 bp, synthetic construct
  source 1..80: mol_type = other DNA
atccagatgctctgctatccacgaccggctacctgtcggtctgggttcaaaatcccctcactggccccaatactgcccct

SEQ ID NO: 179211 - DNA, 80 bp, synthetic construct
  source 1..80: mol_type = other DNA
ctccaccagctcggtcagcatctcgcctacggcttgacgttgcgccgctatcgagtcttcgggggtgacgccgcttgtgc

SEQ ID NO: 179212 - DNA, 80 bp, synthetic construct
  source 1..80: mol_type = other DNA
tcaaggggcaattcgggctcgggactggccgggctatgggcaagtgtcttaaaaatgcgcttctctaggatatacagaca

SEQ ID NO: 179213 - DNA, 80 bp, synthetic construct
  source 1..80: mol_type = other DNA
gccaatcgttctcaatggacccgtcaaaatttactgaaccggtcaaggacataatgcttaaaggtgcaccagctctaaat

SEQ ID NO: 179214 - DNA, 80 bp, synthetic construct
  source 1..80: mol_type = other DNA
ggattcataacatgttggtatcagacaaattttgtttttcccccaaacactcccaatagggctgacatgctgtgtttcgt

SEQ ID NO: 179215 - DNA, 80 bp, synthetic construct
  source 1..80: mol_type = other DNA
aatatcttactttgtacgcttcacattcgttatttggatagagagttgtctagagaaaatctgtgattctctatgagtgt

SEQ ID NO: 179216 - DNA, 80 bp, synthetic construct
  source 1..80: mol_type = other DNA
cgggttgaggaatatcacaattccctctatccagggcttaccggttatgaatactccaggcagtaatcagtacctaacat

SEQ ID NO: 179217 - DNA, 80 bp, synthetic construct
  source 1..80: mol_type = other DNA
ccataacagtaactgatatatatacaatagtttactggtcagccttgcttctagtcaccatagggtgggtgctcttgcct

SEQ ID NO: 179218 - DNA, 80 bp, synthetic construct
  source 1..80: mol_type = other DNA
acacaaaagacaccacaaagctgcaacagatgatggacctgtacggtatagatttgccatacataacatatctaaaggat

SEQ ID NO: 179219 - DNA, 80 bp, synthetic construct
  source 1..80: mol_type = other DNA
cccgggcagggagaaccagtggtttgcgagcgttttccacgcgcatgcagctttttgcgggtgcggtgacgttgttggcc

SEQ ID NO: 179220 - DNA, 80 bp, synthetic construct
  source 1..80: mol_type = other DNA
acaacatacctaagacatctacaaccagtgaactggagcaaaaacactttttgattcctagagaggacataaagaatgtg

SEQ ID NO: 179221 - DNA, 80 bp, synthetic construct
  source 1..80: mol_type = other DNA
tgcactggatagaaatgttagcaagttagggcttgctgtctcatcaatggagcaaatgcttgcatcaatgaggattatga

SEQ ID NO: 179222 - DNA, 80 bp, synthetic construct
  source 1..80: mol_type = other DNA
gatgccgttgttggggccatgaccagggtcgccgacaccataagcagtgggcctagtaactctgagagtgttccagcatt

SEQ ID NO: 179223 - DNA, 80 bp, synthetic construct
  source 1..80: mol_type = other DNA
gggctatgggcaaggctcttagggtctatcgctctttaaaatgccgttcctcggcagggtctggagaaagaaaaggaaac

SEQ ID NO: 179224 - DNA, 80 bp, synthetic construct
  source 1..80: mol_type = other DNA
caagactcgtcagttgagataccgatcactgtgacgatcgccccaatttgtagtgagttcaacggtcttcgcaacgtgac

SEQ ID NO: 179225 - DNA, 80 bp, synthetic construct
  source 1..80: mol_type = other DNA
ccacatatccaattcaggacatttatgaatccataaggtggacaaagaacccaagatgcttacaagagcacgttctcagc

SEQ ID NO: 179226 - DNA, 80 bp, synthetic construct
  source 1..80: mol_type = other DNA
ttatgggtgacaacagccaaccttcaacttcggagggtatagatgcaaggggatattttaaatgggcagctagtaaagcg

SEQ ID NO: 179227 - DNA, 80 bp, synthetic construct
  source 1..80: mol_type = other DNA
gtgtggaaaagcagttgttctagtgaataggaaaacccaggtaagttacagtgtgaacatgatagttgaacagctcaaaa

SEQ ID NO: 179228 - DNA, 80 bp, synthetic construct
  source 1..80: mol_type = other DNA
gaagaaacacccgccgccaacctccgagcgcccgcaacacccccgggtccgcgaaaaaaaacaccgcgggacgccacgca

SEQ ID NO: 179229 - DNA, 80 bp, synthetic construct
  source 1..80: mol_type = other DNA
cttgctcctccatgaatggtatgaaaaattttagattgtttagatatagaaataataaacaattagttttttagttttat

SEQ ID NO: 179230 - DNA, 80 bp, synthetic construct
  source 1..80: mol_type = other DNA
tcacagttactgccaccttagcccttttgggttgcgatggctccccatggaggtttcttaaaatgtatatctctaaacac

SEQ ID NO: 179231 - DNA, 80 bp, synthetic construct
  source 1..80: mol_type = other DNA
aaagggcaatcaaatcaccacaatttttttcacttgtttaaaggatgaactgaggaaaatggacaaaatctcagcaggcg

SEQ ID NO: 179232 - DNA, 80 bp, synthetic construct
  source 1..80: mol_type = other DNA
tgcaaacttgttgcagaaccctgtagaacaatttgtagataatgttctagaagaagttttagttgtgcccaatacccaac

SEQ ID NO: 179233 - DNA, 80 bp, synthetic construct
  source 1..80: mol_type = other DNA
cttgcatcaatctataacgacaaagtgagcattgccaaagatgaagttacaaaaaattacgatacacttgttgacgccat

SEQ ID NO: 179234 - DNA, 80 bp, synthetic construct
  source 1..80: mol_type = other DNA
gagacctccataaagccatgtgtcaagctgacgccgctgtgtgtggcaatgaactgttctggaaataatacaggagccaa

SEQ ID NO: 179235 - DNA, 80 bp, synthetic construct
  source 1..80: mol_type = other DNA
tgtttctagaatctcggagccaataactacctgcccctctaatctgtacgctgcatgaaaaaccacatacacgtgatgta

SEQ ID NO: 179236 - DNA, 80 bp, synthetic construct
  source 1..80: mol_type = other DNA
ggccaaggctcaggacgtggtggccgttgaggcccacgttgtctgctcggtagcagcggactcgctggcggcggcgctta

SEQ ID NO: 179237 - DNA, 80 bp, synthetic construct
  source 1..80: mol_type = other DNA
tcaaaccaaagcacataactgcttggattcctagaccgcccagagctactgagtatacccatgcatacagtacaaactat

SEQ ID NO: 179238 - DNA, 80 bp, synthetic construct
  source 1..80: mol_type = other DNA
actcatcaaagttactagctatccaggggaggaaaagatcggctcctatgctattctttctcctcaagctgtgctgaaga

SEQ ID NO: 179239 - DNA, 80 bp, synthetic construct
  source 1..80: mol_type = other DNA
ctagactatgtagtaaaatgcacaggcaataaatcagcctggacagacatgagagtctgtgtaagatgtccatacacaga

SEQ ID NO: 179240 - DNA, 80 bp, synthetic construct
  source 1..80: mol_type = other DNA
gctgtggatagactggctaagtaaaaaaaacatgaaatatgacaaagtgcaaagtaagtgcctagtagcagacctaccac

SEQ ID NO: 179241 - DNA, 80 bp, synthetic construct
  source 1..80: mol_type = other DNA
cggatttactccagccaatttcttcacatacaaactcattaccacagttttattgattagaaatatatatcacgatgggt

SEQ ID NO: 179242 - DNA, 80 bp, synthetic construct
  source 1..80: mol_type = other DNA
tgtatttgttttccgtgtcctgcgtgggaatcacaggtaccgtatctattatactcgtctccctatcgctgctcatcctc

SEQ ID NO: 179243 - DNA, 80 bp, synthetic construct
  source 1..80: mol_type = other DNA
ccgtgccgctgacaaagaccgtgggatacaacaccggcagtgcgcaggcagcgacggacgcaacacgccgcagacgccgc

SEQ ID NO: 179244 - DNA, 80 bp, synthetic construct
  source 1..80: mol_type = other DNA
tgaatttagtgacatcctaccccagtagagatttagccatagtgtttacaggtgcacatggggctgagactgtaccacac

SEQ ID NO: 179245 - DNA, 80 bp, synthetic construct
  source 1..80: mol_type = other DNA
gtgcccaagacctcccagagcagtcaactacacccataaattttcaacaaactaccacatcaaagatggtgagcagggaa

SEQ ID NO: 179246 - DNA, 80 bp, synthetic construct
  source 1..80: mol_type = other DNA
tcaacatggttgtttcgcaattgagagaagagtccaacactagaaagagaatacacacaaacttaaatgctattttccaa

SEQ ID NO: 179247 - DNA, 80 bp, synthetic construct
  source 1..80: mol_type = other DNA
ccctacgggctccggcaacagccccccagaccctgccgattacaatatccatcgcccctatcaagtcagaattctctggc

SEQ ID NO: 179248 - DNA, 80 bp, synthetic construct
  source 1..80: mol_type = other DNA
cacctagaaagttccacacagacacacctttttacccttggatgcctaagccccccccgcaatgccgtgtctcctttaag

SEQ ID NO: 179249 - DNA, 80 bp, synthetic construct
  source 1..80: mol_type = other DNA
tccatcatacattacaccaacataaactactacaaagatgccgcatccaactcttctaacagacaagacatggatcaaga

SEQ ID NO: 179250 - DNA, 80 bp, synthetic construct
  source 1..80: mol_type = other DNA
tggttcagctaataccacgcttaagctcttagtggcatacacaccaccgggaattgccaagccaacagataggaaagcag

SEQ ID NO: 179251 - DNA, 80 bp, synthetic construct
  source 1..80: mol_type = other DNA
atgttagaaaaaataactaaatttgaaaaatggctatatgaatcctgcacacactaccagacatttgccacagagagcag

SEQ ID NO: 179252 - DNA, 80 bp, synthetic construct
  source 1..80: mol_type = other DNA
aatctgagctaaactctgaggtgtggaacctatacattgtgtgtgtcatatgtccgtacactaggcctcagctatactca

SEQ ID NO: 179253 - DNA, 80 bp, synthetic construct
  source 1..80: mol_type = other DNA
aaaactagatccatagaagctgccagcatgaatgatacagttcactttcgaatggtctttggtaatttgtatagcacttt

SEQ ID NO: 179254 - DNA, 80 bp, synthetic construct
  source 1..80: mol_type = other DNA
accaatcctatgtatattgtccacagaaatatagtgtatttgagactctttccaaatatcaataattttgtaaatagttt

SEQ ID NO: 179255 - DNA, 80 bp, synthetic construct
  source 1..80: mol_type = other DNA
tctcgagtggcttggggtcctcgtcaaagacgaccccaggaccaagctcgcccaccagcacgataagattcttgagctct

SEQ ID NO: 179256 - DNA, 80 bp, synthetic construct
  source 1..80: mol_type = other DNA
agaggatgaactgacactacactataaaaataaagttttcccaattgaacaaccatccgtgacgcatgttacacctagtt

SEQ ID NO: 179257 - DNA, 80 bp, synthetic construct
  source 1..80: mol_type = other DNA
caaaccccagtgtcttcttcaaggtaggagatacagctaggtttagtgttccattcgtgggactcgcttcagcatatagc

SEQ ID NO: 179258 - DNA, 80 bp, synthetic construct
  source 1..80: mol_type = other DNA
agatttggttttgatttggacatttgcttgcattcaacatacacaaagaatggtaaactgaatgcctcaatggctaccag

SEQ ID NO: 179259 - DNA, 80 bp, synthetic construct
  source 1..80: mol_type = other DNA
aagaattcatatacagaaatgcccatttggccacccctagtgataagacagtgttgttatcttatacctctgatttacag

SEQ ID NO: 179260 - DNA, 80 bp, synthetic construct
  source 1..80: mol_type = other DNA
aaccatacaaaactcaaacagtgaaattagatgggaatatacatacacagcactaatgaggccaatatataactcatgca

SEQ ID NO: 179261 - DNA, 80 bp, synthetic construct
  source 1..80: mol_type = other DNA
ctgtaccacgcctctccgcagaccccatttctgacacgcagcggtgctctataccgcttcgtcacctgttgcaactgcac

SEQ ID NO: 179262 - DNA, 80 bp, synthetic construct
  source 1..80: mol_type = other DNA
aaaactgggagccaccaaatgatccagacttaataatatctgactttcctttttggattatgctatggggatgggaagac

SEQ ID NO: 179263 - DNA, 80 bp, synthetic construct
  source 1..80: mol_type = other DNA
tcagcgtgtggtgacagacgggcagctcctccaaccgacactcgccgcgcaatccgcggtcgaagcggcagagaccacgc

SEQ ID NO: 179264 - DNA, 80 bp, synthetic construct
  source 1..80: mol_type = other DNA
acagatgagatgtcactcaaggaagctttatacggcacagatggcctagaacccattgatatcaacaccagtgctggcta

SEQ ID NO: 179265 - DNA, 80 bp, synthetic construct
  source 1..80: mol_type = other DNA
aaactagaattgtagtaccagcgagcacaccaacgaccatggcaatgctcgcctttgtaagtgcttgtccagactttagt

SEQ ID NO: 179266 - DNA, 80 bp, synthetic construct
  source 1..80: mol_type = other DNA
gaccaggaaaaaaacactatattaaaataagagtaggggcacctaaaatgttcacagataaatggtacccccaaacagat

SEQ ID NO: 179267 - DNA, 80 bp, synthetic construct
  source 1..80: mol_type = other DNA
taactgtgacagaggagttaaaaacagagtgtgggttcagcctctcactaaacccaccacagagtttgatgaaaagagat

SEQ ID NO: 179268 - DNA, 80 bp, synthetic construct
  source 1..80: mol_type = other DNA
gcctgtagagtgcctcatcaaaaggtcagcagccaaatatagagtcaacaaatttcaagttaataatgaactttggcagg

SEQ ID NO: 179269 - DNA, 80 bp, synthetic construct
  source 1..80: mol_type = other DNA
gtgcagacccagtgcccgcaacggcaccaggtatcgcggacacgtgtcgcaaaacgtctgcaccgcttgtcgggccagta

SEQ ID NO: 179270 - DNA, 80 bp, synthetic construct
  source 1..80: mol_type = other DNA
aaagctacgtggggatgagcagccagggactttggttggcaagcagacaggcggcgcattggaaccccagaggagtgtcc

SEQ ID NO: 179271 - DNA, 80 bp, synthetic construct
  source 1..80: mol_type = other DNA
aattcatggggttcccaaatggacctcagcgacccattatgtatagaagacagtgtagaagagtgcaagcaaaccctttc

SEQ ID NO: 179272 - DNA, 80 bp, synthetic construct
  source 1..80: mol_type = other DNA
gcagattgccatagatcattattcaggacaattactatcattggatataccaacagaggaattaacactaaaggatgcac

SEQ ID NO: 179273 - DNA, 80 bp, synthetic construct
  source 1..80: mol_type = other DNA
ggtgtccggaaaaaggatatagtcaacaaagtgacaaaggatgtaaccaaacttcaggaaatgattgacaaatatggaat

SEQ ID NO: 179274 - DNA, 80 bp, synthetic construct
  source 1..80: mol_type = other DNA
ctgtacccgcgactatccctctgtcctcagtaattgtggctgagaacagtgatcaggaagaaagtgagcagagtgatgag

SEQ ID NO: 179275 - DNA, 80 bp, synthetic construct
  source 1..80: mol_type = other DNA
catatataaagtcttaccgcaaggatggaagggatcaccagcaatttttcagcacacaatgagacagatcttagaaccat

SEQ ID NO: 179276 - DNA, 80 bp, synthetic construct
  source 1..80: mol_type = other DNA
tccacttccaccctcccatggggccgcctgcgcacgtctcccggcgcagtcgactccatccctcccctgcgtttggtgcc

SEQ ID NO: 179277 - DNA, 80 bp, synthetic construct
  source 1..80: mol_type = other DNA
tggacgccattaagggcgagatgctctccaccatcccgcaccaaccactggaggccacactcgagctgctcttgggccta

SEQ ID NO: 179278 - DNA, 80 bp, synthetic construct
  source 1..80: mol_type = other DNA
tatttactaacactaatccaccaatcaatcaattgtagattaggaaacaaatcacttactaatactaagattattataca

SEQ ID NO: 179279 - DNA, 80 bp, synthetic construct
  source 1..80: mol_type = other DNA
caaacgcttactcacacttctatgacgggtttgccaccgtccctattgaaggagagaccacagaccctggtgcagcgtac

SEQ ID NO: 179280 - DNA, 80 bp, synthetic construct
  source 1..80: mol_type = other DNA
caaccatacataccaatagagtacagattcaaatggtatccatgcatgttccaccaacaaaacttaatgaatgacatagt

SEQ ID NO: 179281 - DNA, 80 bp, synthetic construct
  source 1..80: mol_type = other DNA
acttaggaaaaacatacttacaatcaccacagaaaaaggagagtttactagtttaggtattcatgaccgtatctgtgttc

SEQ ID NO: 179282 - DNA, 80 bp, synthetic construct
  source 1..80: mol_type = other DNA
gtgcgcgacccgggcagccgcggctcggcgctgacactggccttggtacaggagcagctagctcaactggaagcgctagg

SEQ ID NO: 179283 - DNA, 80 bp, synthetic construct
  source 1..80: mol_type = other DNA
tggaagtatacacccaatatggtttgaagcacttaaaatgattttaacaaatttgaattttgaacccagtttaattgata

SEQ ID NO: 179284 - DNA, 80 bp, synthetic construct
  source 1..80: mol_type = other DNA
tgcggcgcggtgcgggggtgaaaattggagttgcctgtgcggtgcggaggacggcgaataaaaaaagcgacgtgcggcgc

SEQ ID NO: 179285 - DNA, 80 bp, synthetic construct
  source 1..80: mol_type = other DNA
caaaccaagctgcaaacactagtgagaaccagtactttaatacatacgatggatactggggcgatcctatatatgccaga

SEQ ID NO: 179286 - DNA, 80 bp, synthetic construct
  source 1..80: mol_type = other DNA
gagtgcggggaatgcctcctgcagaaagctgcagggctgctccagaaacacgtcagtgccagcaatcactacaaactgca

SEQ ID NO: 179287 - DNA, 80 bp, synthetic construct
  source 1..80: mol_type = other DNA
tccacctgcatacctccgatatgggatcagctggttccaagaagcaatccaagcagcagccagggctgcgggagagactc

SEQ ID NO: 179288 - DNA, 80 bp, synthetic construct
  source 1..80: mol_type = other DNA
agctggagatgttcacatacgttcgattcgacatagaagtgacctttgtgatcaccagtaaacaagatcaagggacacaa

SEQ ID NO: 179289 - DNA, 80 bp, synthetic construct
  source 1..80: mol_type = other DNA
taatattcccttgggaattcatgctgtatgggcaggcgtagtagtatcagtggcgctcatagcgttgtacatgggtagcc

SEQ ID NO: 179290 - DNA, 80 bp, synthetic construct
  source 1..80: mol_type = other DNA
ctaaccaaagttgcagatgatgcatctaatgtgcttggaccaaattgttatgctacaacagctgagccagagaataaaga

SEQ ID NO: 179291 - DNA, 80 bp, synthetic construct
  source 1..80: mol_type = other DNA
tgctaagtcagccaaagaaagagggatcaatggagaccctgctttctgtcacttaacaggaatatactcacctccctggt

SEQ ID NO: 179292 - DNA, 80 bp, synthetic construct
  source 1..80: mol_type = other DNA
agatcttactttactgatgtgcagggtcaaatagtttcatcaaagaaaactagtgagtgtaatctccccagtatacatag

SEQ ID NO: 179293 - DNA, 80 bp, synthetic construct
  source 1..80: mol_type = other DNA
agtgtaagaagattccattgtacaaagagcaagtcaaagcattcgccacagcatcagaggaagcacaagatgaattaatg

SEQ ID NO: 179294 - DNA, 80 bp, synthetic construct
  source 1..80: mol_type = other DNA
ccaatagaattagcacccaaaatgatttaattagagtggaaccaattggtgtgtggatacaaggcgaaccaggacaagga

SEQ ID NO: 179295 - DNA, 80 bp, synthetic construct
  source 1..80: mol_type = other DNA
ccacagtcgttaccaatcacaatatctattgcacctgtgaagtcagaattttccggtgctagacaagccaccagtcaggg

SEQ ID NO: 179296 - DNA, 80 bp, synthetic construct
  source 1..80: mol_type = other DNA
ggagtatttggacaaaatgcccaataccactacctttatagatcaggtttttgtgttcatgtccaatgcaatgcgagcaa

SEQ ID NO: 179297 - DNA, 80 bp, synthetic construct
  source 1..80: mol_type = other DNA
agtttgcgacatggaaagtcagtgttaggcaggccgcacaattaagaaggaagctggaattgttcacatatttgcgctgt

SEQ ID NO: 179298 - DNA, 80 bp, synthetic construct
  source 1..80: mol_type = other DNA
tcagacaaatgacagtgatagggagattctgttcaacaatgtaatgtggctagagcagatgtcacagaaatttgcaccac

SEQ ID NO: 179299 - DNA, 80 bp, synthetic construct
  source 1..80: mol_type = other DNA
ggtagaacatttactagtaaatatgtgttagctagcaccaatctttgcaatttgacaccacccactgttaccataccaga

SEQ ID NO: 179300 - DNA, 80 bp, synthetic construct
  source 1..80: mol_type = other DNA
tgtcacataaatgccaccttcgcccgaggcactataaaatactgggagtaccacctaggctggtactcaaacatatttat

SEQ ID NO: 179301 - DNA, 80 bp, synthetic construct
  source 1..80: mol_type = other DNA
gggtaaatttgttataacctctaaaacaattctcaactcagcgctcaggttctcacgaaacgagcaatgtggctcgggat

SEQ ID NO: 179302 - DNA, 80 bp, synthetic construct
  source 1..80: mol_type = other DNA
catgctcatgaggagcaaatacaagataataatccccagctttaaaactagacccaagggcagaaagaccatcagtgtta

SEQ ID NO: 179303 - DNA, 80 bp, synthetic construct
  source 1..80: mol_type = other DNA
tagtaaaaggacaaccaaggaagtgggattaaacccaatcaatacacctagtaaaaccaaattataccccagtgtgtttt

SEQ ID NO: 179304 - DNA, 80 bp, synthetic construct
  source 1..80: mol_type = other DNA
ccataaatcctataaacaatattagtaaaaaagtgattaagtggttattaaggattgtctctgccatggttataataatt

SEQ ID NO: 179305 - DNA, 80 bp, synthetic construct
  source 1..80: mol_type = other DNA
tggtttctgtggtggtgtcttgtataaagttggttccattcttggtatacatgtgggtggcaatggtagagatggcttct

SEQ ID NO: 179306 - DNA, 80 bp, synthetic construct
  source 1..80: mol_type = other DNA
tttagatcgtgggactggagacgcggacagtttaatgaaaaaagtattaaaagaatcgcagaacaacaagagacttctga

SEQ ID NO: 179307 - DNA, 80 bp, synthetic construct
  source 1..80: mol_type = other DNA
caatctactagaacgcacttggatcgataaattcatttaaatcttttagcaatgtagaagtctacctgagtaggagtagg

SEQ ID NO: 179308 - DNA, 80 bp, synthetic construct
  source 1..80: mol_type = other DNA
gcagacatgcccctgtgggcctcagtatatggctacacagaatactgcagcaaagttacaggagacacaaacatagaaca

SEQ ID NO: 179309 - DNA, 80 bp, synthetic construct
  source 1..80: mol_type = other DNA
aaaaattcccggtagcggatgaggtacgcgcagaggaaaatcatgaaaacggaacagacgaccacagccgcgatgccagg

SEQ ID NO: 179310 - DNA, 80 bp, synthetic construct
  source 1..80: mol_type = other DNA
gtaattataccttgttcagtcatccatattacatactttcaaaatattgtcccaattttattgggactgaaagtatgtta

SEQ ID NO: 179311 - DNA, 80 bp, synthetic construct
  source 1..80: mol_type = other DNA
agtcaaaatactcaaagattgagcgtgatttcaactacgcacaatactgtatcaactgtgtgggtagtatagtattgatt

SEQ ID NO: 179312 - DNA, 80 bp, synthetic construct
  source 1..80: mol_type = other DNA
ccacaaataacacgaggcagactaatacacacacacttaacaggaatatactcctctacatttttaaacccaggcagagt

SEQ ID NO: 179313 - DNA, 80 bp, synthetic construct
  source 1..80: mol_type = other DNA
tggatttactacattatccacgttcactctagatttaattcgcatagttcttttgactagaagattttaccaacataaca

SEQ ID NO: 179314 - DNA, 80 bp, synthetic construct
  source 1..80: mol_type = other DNA
atcaacctgcactgtacaacacttttcaaaccatagctcagcttaaagaaacaggacaaatagagccacaaaactctgaa

SEQ ID NO: 179315 - DNA, 80 bp, synthetic construct
  source 1..80: mol_type = other DNA
gtaacaggtgatgcgcggcacggtacggatcatgagctccatggtctggatgctgccgcccgcgcggacgacgctgaagg

SEQ ID NO: 179316 - DNA, 80 bp, synthetic construct
  source 1..80: mol_type = other DNA
acaccaagtataaaacaaaagacacagacccatccgagatgtattctagttggaaggttactaccaggcaagttgcacaa

SEQ ID NO: 179317 - DNA, 80 bp, synthetic construct
  source 1..80: mol_type = other DNA
ccaattataacaagccaaagacaagtggcagcactgagttagaaccaaaacacttctttaagtacagacaagacatcaca

SEQ ID NO: 179318 - DNA, 80 bp, synthetic construct
  source 1..80: mol_type = other DNA
aatatttaactctaacgacaacacattaatcccatggctacaaagtaaaggaaatactcaatttcaaactggtaacagca

SEQ ID NO: 179319 - DNA, 80 bp, synthetic construct
  source 1..80: mol_type = other DNA
attacaaacctatgagaggggatgtacaaatctttattaaagagagagcaagcccaaaagtagttacttttggaccaagt

SEQ ID NO: 179320 - DNA, 80 bp, synthetic construct
  source 1..80: mol_type = other DNA
cagtatagtagtcccaccagacacgcccacccagtgtgatattcttggtttcgtatcagcatgcaatgacttctccgtgc

SEQ ID NO: 179321 - DNA, 80 bp, synthetic construct
  source 1..80: mol_type = other DNA
acagtttacaccacaaggacaacctattagcggacaagcattaactaatattactattaataaaaatcctaccaaaactc

SEQ ID NO: 179322 - DNA, 80 bp, synthetic construct
  source 1..80: mol_type = other DNA
attttagggccgaaaaactaccaaaatggccgactttgtgacgtcacggccgccattttgagtaaggcggaaaaggctga

SEQ ID NO: 179323 - DNA, 80 bp, synthetic construct
  source 1..80: mol_type = other DNA
caaattttgagaatttgaggaggaattggctcgaattgttctgaatctacagtatgtaactgaaccccaccagaaatctg

SEQ ID NO: 179324 - DNA, 80 bp, synthetic construct
  source 1..80: mol_type = other DNA
agagacacaaagtttattagtcaaactactttctttcagggggatgttcagaatgctgttgagggtgcaatggtcagggt

SEQ ID NO: 179325 - DNA, 80 bp, synthetic construct
  source 1..80: mol_type = other DNA
cacggcaggctggtggttccgaagacgccgctggcgtccgtggaggagaaggagatggcggtggggcctacggagaagaa

SEQ ID NO: 179326 - DNA, 80 bp, synthetic construct
  source 1..80: mol_type = other DNA
tccaacagcagcagaagaaaaactgcaagacgaagactacgctttacaggagaaaagaggcccgctctcgccagaagagg

SEQ ID NO: 179327 - DNA, 80 bp, synthetic construct
  source 1..80: mol_type = other DNA
caactaccaccttgccactgtggaggatctgcaaaatgctgttaacatcatgtggaatagagacctcttggttgctaaat

SEQ ID NO: 179328 - DNA, 80 bp, synthetic construct
  source 1..80: mol_type = other DNA
ttgattacacccacaaatactcaccaaattatcatacacgaactggggagaacaatggcacacttgaagaaaagcactac

SEQ ID NO: 179329 - DNA, 80 bp, synthetic construct
  source 1..80: mol_type = other DNA
gctccaaagaaggctaggcggcttctaggtatgtggcagcccccagtgcacaatgtccccggcatcgagagaaactggta

SEQ ID NO: 179330 - DNA, 80 bp, synthetic construct
  source 1..80: mol_type = other DNA
tattggtcacaccaggttcaagccagtatcttacttccgatgatttccagtcaccatgtgcattaccaaattttgatgtc

SEQ ID NO: 179331 - DNA, 80 bp, synthetic construct
  source 1..80: mol_type = other DNA
accgccggtcccgcgagtccccgtccccaacggaacccccgtccccgccggcgccaccccagttaccgtcctgaacgtaa

SEQ ID NO: 179332 - DNA, 80 bp, synthetic construct
  source 1..80: mol_type = other DNA
cggattccagcagctcgggcatgcaaacgaattgcgcgtccaggcatttgtaaaaggtaatgccaaaaaaaccttcgggg

SEQ ID NO: 179333 - DNA, 80 bp, synthetic construct
  source 1..80: mol_type = other DNA
ttgattggatgaaatctatgttacctcaagcacaacttaaggttaaatatcttagtgaattgaagaaattaaacttacta

SEQ ID NO: 179334 - DNA, 80 bp, synthetic construct
  source 1..80: mol_type = other DNA
gtatatcagcaaccaataatatgggcacactatgtttcagggctcttgaggatgaagtgaaacaaactgttaaagtatac

SEQ ID NO: 179335 - DNA, 80 bp, synthetic construct
  source 1..80: mol_type = other DNA
acagatgtgacaccagagacagcagatcaattattgcatggatcttattttgattgctttacagctggtgaagtaagaag

SEQ ID NO: 179336 - DNA, 80 bp, synthetic construct
  source 1..80: mol_type = other DNA
catagaaacatacaagaatattgacctggataaactaaggataatcgcctacggcgatgatgtgattgcatcttacccta

SEQ ID NO: 179337 - DNA, 80 bp, synthetic construct
  source 1..80: mol_type = other DNA
aaaaacgagaaaggatgctatgcttggcacccatgttatttgggatttagggttacaatctagttgcaccatggttgccc

SEQ ID NO: 179338 - DNA, 80 bp, synthetic construct
  source 1..80: mol_type = other DNA
tagttcgtcctcgtccatggcgtccagttcgtcgtcaataagcgccagcatctgttgttgttgcggtccggtggacgatc

SEQ ID NO: 179339 - DNA, 80 bp, synthetic construct
  source 1..80: mol_type = other DNA
ccagggctgaccccggcaaacgtgacccggggccccggggttacccaggcaagcgtgaccaagaggcccctggtgaccca

SEQ ID NO: 179340 - DNA, 80 bp, synthetic construct
  source 1..80: mol_type = other DNA
tatgacactataggcatagttgacacacaagaatcttacacttcagttaataataaaacaatatgtcaaacatacaataa

SEQ ID NO: 179341 - DNA, 80 bp, synthetic construct
  source 1..80: mol_type = other DNA
caacttcacgttgatggtgataccattcgcaaagttgtccgtaattgggtctaacctcaatagtgtaccaattacggtaa

SEQ ID NO: 179342 - DNA, 80 bp, synthetic construct
  source 1..80: mol_type = other DNA
agatgggtctccatgtagacccccaattattgggccctgtataaataaagtatacatgtttcctcctgcagaacccaaac

SEQ ID NO: 179343 - DNA, 80 bp, synthetic construct
  source 1..80: mol_type = other DNA
cgcgacggactcgccgagaagaagaccgccacccccgacgccggacgccgcgccgacgccactgggcgcgaagagcgccg

SEQ ID NO: 179344 - DNA, 80 bp, synthetic construct
  source 1..80: mol_type = other DNA
atgtgcctcatttgtctttactttaaacaccgttgtattcctactccgtctccagataagatagatctgcgagtggaatt

SEQ ID NO: 179345 - DNA, 80 bp, synthetic construct
  source 1..80: mol_type = other DNA
tgaaacacagagatgatatcaaaaacttggatcccagtgacttatttgtccacactaaggaagccatttaccgcaatgca

SEQ ID NO: 179346 - DNA, 80 bp, synthetic construct
  source 1..80: mol_type = other DNA
cagaggagtaggtaacatgatctggttccagtacagcacaaaaatggacaccacctttaataaacaacaatgtaaatgtg

SEQ ID NO: 179347 - DNA, 80 bp, synthetic construct
  source 1..80: mol_type = other DNA
actctatgcttcagaagctaagcaagttagagaaatgcagcaagatattaagaggatgatgtgcttcaaaaagacccacc

SEQ ID NO: 179348 - DNA, 80 bp, synthetic construct
  source 1..80: mol_type = other DNA
tggcaccatggcacagtttctaggaaagtacatcaaggtcaagaaggaaactggaatgtacacactggtcaagctttatt

SEQ ID NO: 179349 - DNA, 80 bp, synthetic construct
  source 1..80: mol_type = other DNA
tgtgggcagcagcatatggttatgtagaattctgctctaaaagcacaggagacacaaacatacacatgaatgccagacta

SEQ ID NO: 179350 - DNA, 80 bp, synthetic construct
  source 1..80: mol_type = other DNA
acaaggtccaattagtgattatgtaacacaactaggtaatgcctttggtaacggcttcacacagactcttgaaaccaatc

SEQ ID NO: 179351 - DNA, 80 bp, synthetic construct
  source 1..80: mol_type = other DNA
ggtttcttacccatttaatttagagtcaaaggaaatagctgctactgggaagaactatggccttactatcacaccacctg

SEQ ID NO: 179352 - DNA, 80 bp, synthetic construct
  source 1..80: mol_type = other DNA
ggaaaaagttatggattgacaattacacccccagataaatcagcaaccttctctaaaataacatgggaaaatctcacctt

SEQ ID NO: 179353 - DNA, 80 bp, synthetic construct
  source 1..80: mol_type = other DNA
cggaagtagctgacccacgtgacttgtcacgtgactagtacgtcacagccgccattttgtgtcacaaaatggccgacttc

SEQ ID NO: 179354 - DNA, 80 bp, synthetic construct
  source 1..80: mol_type = other DNA
tggatttattccactaacttctcacacgttattttttatcaaagttactttgttgctgagatattactatcacaatgggt

SEQ ID NO: 179355 - DNA, 80 bp, synthetic construct
  source 1..80: mol_type = other DNA
gaaattatacaggtagacacattaattccaatgaacaacgtgcatactagtgatgaggtaaacagttatcttataccttt

SEQ ID NO: 179356 - DNA, 80 bp, synthetic construct
  source 1..80: mol_type = other DNA
gagataacagcacccagcatacacccaggaatgctcatactctctaagaaacacatactaatacccagcctaaaaaccag

SEQ ID NO: 179357 - DNA, 80 bp, synthetic construct
  source 1..80: mol_type = other DNA
acttaggaaaaatatagtcaccatcaccacagagaagggagagtttacagggttaggagtgtatgatcacgtctgtgtcg

SEQ ID NO: 179358 - DNA, 80 bp, synthetic construct
  source 1..80: mol_type = other DNA
ccacagcctcctgcaataagacccctgccagcgctcccggcacctccgggtgagtccggtcgcagagcgccatggcctgg

SEQ ID NO: 179359 - DNA, 80 bp, synthetic construct
  source 1..80: mol_type = other DNA
gtggtacgtcgtgcacttcgtgggcgaagtttacctcataatataactagctgctcttccgtgctacgtcgtgcacttcc

SEQ ID NO: 179360 - DNA, 80 bp, synthetic construct
  source 1..80: mol_type = other DNA
gcaaacagagactaagccctgacttcccaggattctatcaagaagtagtatataatcctgcaaatgataaaggaattggt

SEQ ID NO: 179361 - DNA, 80 bp, synthetic construct
  source 1..80: mol_type = other DNA
cactgtggtgcaacaattacgccaggaaaggaaaaataggaagtgtgtagaacacaacctcactgctatattccaaggtc

SEQ ID NO: 179362 - DNA, 80 bp, synthetic construct
  source 1..80: mol_type = other DNA
agcgtcctccagcggggtgaactcccaggaggtgcccgccctgacagcagtagaaacgggcgcatcgggacaggctgtgc

SEQ ID NO: 179363 - DNA, 80 bp, synthetic construct
  source 1..80: mol_type = other DNA
tcattcctacactagtatttattgcccaaggagtttgtgagggttatattggtgtcatagcacaatgccaccactgaacc

SEQ ID NO: 179364 - DNA, 80 bp, synthetic construct
  source 1..80: mol_type = other DNA
tgtcaacaacagatttcatagtgcctatggcatcactagaagacaagggcaagtctttcaccagtcaatatgtgcttgcc

SEQ ID NO: 179365 - DNA, 80 bp, synthetic construct
  source 1..80: mol_type = other DNA
catgcacgcaatcaagtgtatcagatcatgtacataccccctggagcaccaaggccctcagcatgggatgattacacatg

SEQ ID NO: 179366 - DNA, 80 bp, synthetic construct
  source 1..80: mol_type = other DNA
ttgtctgggatgttggtttacagtctacaatttctatgattgtaccatgggtcagtgctagccactttagaaataccaca

SEQ ID NO: 179367 - DNA, 80 bp, synthetic construct
  source 1..80: mol_type = other DNA
tcggcaacgagacaggatttcagccaggacccctccaagtttactgaaccagtcaaggatctcatgctgaagagcgcgcc

SEQ ID NO: 179368 - DNA, 80 bp, synthetic construct
  source 1..80: mol_type = other DNA
tgaaatcctggccgcgacggaggagaagcagagacgaacaacgtctgcaccgggcgcggcgtcagagcgagcgtggcgcg

SEQ ID NO: 179369 - DNA, 80 bp, synthetic construct
  source 1..80: mol_type = other DNA
aagcttgacgccctggtggatgggatggtcaacatgtctctggatacggtccagaacacgatggccagtgggtctgtaca

SEQ ID NO: 179370 - DNA, 80 bp, synthetic construct
  source 1..80: mol_type = other DNA
aaaaaaactgtaaaagttaacatagcaccccccactctatttgtgcacaaatggtactttcaaaaagacatatgtgactt

SEQ ID NO: 179371 - DNA, 80 bp, synthetic construct
  source 1..80: mol_type = other DNA
ccaggctaaacggattcacgtaccaggtttggttacccgcgacgatgacggccagaccgtgggcgctacagttggagagg

SEQ ID NO: 179372 - DNA, 80 bp, synthetic construct
  source 1..80: mol_type = other DNA
cctatcattgttgtttgcatatttcacaggggagctaaacatacatgtactattcctatcagacaaaggtttcttgagag

SEQ ID NO: 179373 - DNA, 80 bp, synthetic construct
  source 1..80: mol_type = other DNA
tttgtgtgtgtgacagtttcagtacaggtaaattcctaatagcctacactccaccagggggtgctctccccacagataga

SEQ ID NO: 179374 - DNA, 80 bp, synthetic construct
  source 1..80: mol_type = other DNA
atgagggatagccctgacattggacaatcacaacaactagaaggggctaccgctgctttccaaatagaggaagtcatgaa

SEQ ID NO: 179375 - DNA, 80 bp, synthetic construct
  source 1..80: mol_type = other DNA
ccaccaccaggaaagaggcaatgttaggtacccatgtagtgtgggacattggcttgcaatcaactgtagtgatgaacata

SEQ ID NO: 179376 - DNA, 80 bp, synthetic construct
  source 1..80: mol_type = other DNA
tgaaggctggagctccatgtttaaaatcgcccagtgctgaagcatgtggatacagtgacagggttttacaattgaaatta

SEQ ID NO: 179377 - DNA, 80 bp, synthetic construct
  source 1..80: mol_type = other DNA
gtgacaagccatgattttaacaatgagggacaatggcccttagatttgacttttccatttgaaggtcatggttctttatc

SEQ ID NO: 179378 - DNA, 80 bp, synthetic construct
  source 1..80: mol_type = other DNA
cacaaaatgacaaaggcataggaaacaaaatatggatagacacctgcgttaaaaatgacagctactggagaccaaatata

SEQ ID NO: 179379 - DNA, 80 bp, synthetic construct
  source 1..80: mol_type = other DNA
aaacccctctggtgctgtttctatggttatgttgactttataaagagtgttagagagggccaagacatagactttgaaaa

SEQ ID NO: 179380 - DNA, 80 bp, synthetic construct
  source 1..80: mol_type = other DNA
ccaatttacacacacaatctggtactattgaacaaaatccagtagaaaattatatagatgaagttcttaatgaggtatta

SEQ ID NO: 179381 - DNA, 80 bp, synthetic construct
  source 1..80: mol_type = other DNA
cgccgacaaaacgccgtataagctacacaccccaaaaacccgcacgcctatgggcgccaaacgtgtgtattatctcaacg

SEQ ID NO: 179382 - DNA, 80 bp, synthetic construct
  source 1..80: mol_type = other DNA
gagtagagagtggacaagtgatagtaaagggtggtggtggaaattgccagatgcactaaaggacatgggtgtatttggtg

SEQ ID NO: 179383 - DNA, 80 bp, synthetic construct
  source 1..80: mol_type = other DNA
atgttacacgttactacacaaacacatcgtgttccccgcaattcatctgcataaacgaaactaaaggtctgcagttatat

SEQ ID NO: 179384 - DNA, 80 bp, synthetic construct
  source 1..80: mol_type = other DNA
tctccaacgtgcaaataggctacgtggctcaccagaaacatgtcgcgtccgccgttttcactgaaattattgacaccttg

SEQ ID NO: 179385 - DNA, 80 bp, synthetic construct
  source 1..80: mol_type = other DNA
tagcatctctggaattatttatgttatctataagttgttttgcacactacaaggaccatattcaggagagcctaaaccaa

SEQ ID NO: 179386 - DNA, 80 bp, synthetic construct
  source 1..80: mol_type = other DNA
gaacacatgtcatctgggacataggactgcagtctagtgtcacactagtggcgccatggatttcaaacacggactatcgg

SEQ ID NO: 179387 - DNA, 80 bp, synthetic construct
  source 1..80: mol_type = other DNA
gtccaccttaattgaacagatggaagcatttattgagccaaaaccaagtgtgtttaagtgttttgcaaacaaggttgggg

SEQ ID NO: 179388 - DNA, 80 bp, synthetic construct
  source 1..80: mol_type = other DNA
ccagaataccacaacacggaataccacaataatagaggataatgacccttgtataagtagaaacaactgcacaggattag

SEQ ID NO: 179389 - DNA, 80 bp, synthetic construct
  source 1..80: mol_type = other DNA
caccagacgaaagagacgttataggggtcgccgctttaaaaagaaactagtactgactcagtggcaccctagtaccatga

SEQ ID NO: 179390 - DNA, 80 bp, synthetic construct
  source 1..80: mol_type = other DNA
aacggtaccgctcccgatggagagcccggggtatgctgaaattcctcttaagattccgtaaacgacgttgtccagtcgtt

SEQ ID NO: 179391 - DNA, 80 bp, synthetic construct
  source 1..80: mol_type = other DNA
aatgggagcacaagtatcaactcagaagaccggcgctcacgagaccagcttaagtgcaacaggcaattctgttatccatt

SEQ ID NO: 179392 - DNA, 80 bp, synthetic construct
  source 1..80: mol_type = other DNA
gtgaggctcttgagagataccgctcatatatcacaagccacccttatggcacgcacccagggtatcgaggagaccattga

SEQ ID NO: 179393 - DNA, 80 bp, synthetic construct
  source 1..80: mol_type = other DNA
aactatagatacagtgattagcaatgctctccaattgtcacaacccaaaccacaaaagcaattgactgctcagtccacag

SEQ ID NO: 179394 - DNA, 80 bp, synthetic construct
  source 1..80: mol_type = other DNA
agttcatcaaggaaacagaatcctaaaagtaggtaaatatgcaaagataaaaaatacccatacaaatggagtaagattat

SEQ ID NO: 179395 - DNA, 80 bp, synthetic construct
  source 1..80: mol_type = other DNA
tcatgaaaataatacaatatcaaaagaacctgaaacattattgtatgcggtacaaggagacaatattactataacacaca

SEQ ID NO: 179396 - DNA, 80 bp, synthetic construct
  source 1..80: mol_type = other DNA
aagtatgtgggaaagagacttgatggtagtggaatccagggcacaagggactgaccagatcgccaggtgtacatgcacga

SEQ ID NO: 179397 - DNA, 80 bp, synthetic construct
  source 1..80: mol_type = other DNA
caatctgttgctttggtgggtgagagagccttctatgaccctagaacagcaggtagcaaatctagatttgatgatttagt

SEQ ID NO: 179398 - DNA, 80 bp, synthetic construct
  source 1..80: mol_type = other DNA
ctgcccgcgatctgtgccacctctgttacgccactcctcgtgagggggcagctggacagtctttttccggtcaggtggtt

SEQ ID NO: 179399 - DNA, 80 bp, synthetic construct
  source 1..80: mol_type = other DNA
gacaaaaacaccctacaaaatcctgtggaacaatttgtagacaatgttttagaagaggttttggtggtacctaatacaca

SEQ ID NO: 179400 - DNA, 80 bp, synthetic construct
  source 1..80: mol_type = other DNA
cggcgggaacgtcaatggcatgaactgcccgtggtggcggatgatgaatcgtgccatggtatccaaaccgaggctccagg

SEQ ID NO: 179401 - DNA, 80 bp, synthetic construct
  source 1..80: mol_type = other DNA
tccgttcatcagccgatggcctttgacggcgtccaggatgagctcgtcgctgccgtcgtgggaacgacagaaacgtgcgc

SEQ ID NO: 179402 - DNA, 80 bp, synthetic construct
  source 1..80: mol_type = other DNA
actgtgactgtggccccaatgtgtgcagaatataatggtttaagactttcagcacacccacaaggccttcctgtgctcaa

SEQ ID NO: 179403 - DNA, 80 bp, synthetic construct
  source 1..80: mol_type = other DNA
gttctggggagacactcaactcgccactgctggaggagttcgtcgggctcaactccgcagccatattcacatccatgttc

SEQ ID NO: 179404 - DNA, 80 bp, synthetic construct
  source 1..80: mol_type = other DNA
actcaattctaatatcatactcttcagatttagtcatttaccgaacaaacactataggtaatgactatattcccacctgt

SEQ ID NO: 179405 - DNA, 80 bp, synthetic construct
  source 1..80: mol_type = other DNA
tcctcggccccagcgaggaacaaaagaggtgtgttcgtgctagggctcttgggttttctcgcgacagcaggttctgcaat

SEQ ID NO: 179406 - DNA, 80 bp, synthetic construct
  source 1..80: mol_type = other DNA
ctctacctggcgagtgccccgcggcgatgtctccgcccgcgagctatgttggtaccgctcagttcgagagagccacgatg

SEQ ID NO: 179407 - DNA, 80 bp, synthetic construct
  source 1..80: mol_type = other DNA
gatggtgatgtcaagaagttagctgaggtcgttgctgagtctatgtctaacactgatgatgacgaaatcaaggaacaaat

SEQ ID NO: 179408 - DNA, 80 bp, synthetic construct
  source 1..80: mol_type = other DNA
gccggcgacgtggtctcataattctcggcccacatcttttcggcaatgtcagcggtggcgaaggggaacgaagaggaaga

SEQ ID NO: 179409 - DNA, 80 bp, synthetic construct
  source 1..80: mol_type = other DNA
gtatggtgggaagaagcactaatgcacaccgactgggtagaacctgctaaatgtgttttgggtggaacaacagtaagaat

SEQ ID NO: 179410 - DNA, 80 bp, synthetic construct
  source 1..80: mol_type = other DNA
gacaaggaatatattcgttccggtatatccgtaaacaggttgtactccctcagcgcctcctccgcctcctggatgtagct

SEQ ID NO: 179411 - DNA, 80 bp, synthetic construct
  source 1..80: mol_type = other DNA
ccacctctacactcccagatgtcgtccccgatgtcaataacccaaacattagcctggctctagagaagtattttctcatg

SEQ ID NO: 179412 - DNA, 80 bp, synthetic construct
  source 1..80: mol_type = other DNA
ggagagccatccaacaacgtctaatgctgctccagctttagatgcagctgaaactggccataccagccatgttcaaccag

SEQ ID NO: 179413 - DNA, 80 bp, synthetic construct
  source 1..80: mol_type = other DNA
tatggtgcagcctctctaaatgactttggcatcttggccgtgagggtggttaatgaccataatccaaccaaggtcacttc

SEQ ID NO: 179414 - DNA, 80 bp, synthetic construct
  source 1..80: mol_type = other DNA
cagaacagcgcccgaaagagtgcccagcagaagttcctgggcaacaaccgaggggctcggtgagatagattggaggctgt

SEQ ID NO: 179415 - DNA, 80 bp, synthetic construct
  source 1..80: mol_type = other DNA
acctgctagcaacagtagtgaccttatattagctataccacttgacatgaataacactctgttctccacaacactgctag

SEQ ID NO: 179416 - DNA, 80 bp, synthetic construct
  source 1..80: mol_type = other DNA
cctttatcttcttgccatttgtccgtatcgggggtcgccataggcttcggcctccattttagggcctaaaaactacccaa

SEQ ID NO: 179417 - DNA, 80 bp, synthetic construct
  source 1..80: mol_type = other DNA
gagccgggtccagcccacgtactgcgtggggtccattatggccgccctggggacgacgaagcggtcgacgtaggccagga

SEQ ID NO: 179418 - DNA, 80 bp, synthetic construct
  source 1..80: mol_type = other DNA
ccaacattattgacacctggatctggtcaattcttaacaacggacgattaccagtcccctagtgcattaccatggtatca

SEQ ID NO: 179419 - DNA, 80 bp, synthetic construct
  source 1..80: mol_type = other DNA
ctacaaatttggagaaggccgcatgccagacggcagcacatatgtacccatacaatttagaggcaagtggtatcccacaa

SEQ ID NO: 179420 - DNA, 80 bp, synthetic construct
  source 1..80: mol_type = other DNA
aaggatggatagggcgtgtatcttcctccatagaaagggatataaacaaggtgcagtatatactaaattgcctaggtagt

SEQ ID NO: 179421 - DNA, 80 bp, synthetic construct
  source 1..80: mol_type = other DNA
agcaaagagaataaaaacactcaaaaacaaaatgacaaactttatccagttcagatccaaacatagaactgaacctgtgt

SEQ ID NO: 179422 - DNA, 80 bp, synthetic construct
  source 1..80: mol_type = other DNA
ccatctctcgctagagccgagaccaggccgagtcctgcgtagaacgatggggcgcccaggaaggcggcagcgtaggccgg

SEQ ID NO: 179423 - DNA, 80 bp, synthetic construct
  source 1..80: mol_type = other DNA
tggattcacctcgttgtcatacaaatcccttaacactttgtgctttatcttgagtttgaattcaaaaagatgggggctca

SEQ ID NO: 179424 - DNA, 80 bp, synthetic construct
  source 1..80: mol_type = other DNA
ttgacaatgtttttggtcgagcttggtttttcaaagaacacacttttactgatgagggacaatggcgaattgaactgaca

SEQ ID NO: 179425 - DNA, 80 bp, synthetic construct
  source 1..80: mol_type = other DNA
acgccaccaacaacgcaaccaccactagcgccacacccacagtagagtccacggcaaactcaacgatagatgaaaattct

SEQ ID NO: 179426 - DNA, 80 bp, synthetic construct
  source 1..80: mol_type = other DNA
catcactagagggtccctccaacaaccctccccagatccgtagagcgctgcctgccccggccgctccggagcccccacag

SEQ ID NO: 179427 - DNA, 80 bp, synthetic construct
  source 1..80: mol_type = other DNA
aacccgaccagcacacctccggttcttttgtttctttcttggtgaaccaacaaggcgtcgccttcgatctccctagaatg

SEQ ID NO: 179428 - DNA, 80 bp, synthetic construct
  source 1..80: mol_type = other DNA
catctaacaaatatggttactcatcaattaatgactttggtacactggcagtaagaattgttaatgaatttgatccagta

SEQ ID NO: 179429 - DNA, 80 bp, synthetic construct
  source 1..80: mol_type = other DNA
tgtctgcctgtgatgtgtcagataaactcaccggaaaaatcatcaaatggacaattaggttaatcagtgctctatcaatc

SEQ ID NO: 179430 - DNA, 80 bp, synthetic construct
  source 1..80: mol_type = other DNA
cgtcgtgccggtcccaggtgtgtcggtactcaagcttgccctggatgcgatactggctggtgaaggtggggtgctcgctg

SEQ ID NO: 179431 - DNA, 80 bp, synthetic construct
  source 1..80: mol_type = other DNA
gttgacccagagggagtgaatttagaaattaccatagtggaacttgacagaaatgaaaagttcagagacataagaacaca

SEQ ID NO: 179432 - DNA, 80 bp, synthetic construct
  source 1..80: mol_type = other DNA
caaaactcgtaaagacgcaatgttgggcacacatgttatatgggacgtgggcctacagtcctcttgtgtgctgtgcatcc

SEQ ID NO: 179433 - DNA, 80 bp, synthetic construct
  source 1..80: mol_type = other DNA
gggacccatttccttagatggtcctcccccagctgctatcagtgatcttcttcaatctgttaggactcctgaagtcatta

SEQ ID NO: 179434 - DNA, 80 bp, synthetic construct
  source 1..80: mol_type = other DNA
ggcctaatttcattagtgacaaagaagcaaaccctgttgatgcaccaaccgaaccagatgcctcagcaaacagattctac

SEQ ID NO: 179435 - DNA, 80 bp, synthetic construct
  source 1..80: mol_type = other DNA
acaaactggcacccacgaaaatgccaacattgccacaaatggatctcatattacatacaatcagataaacttttataagg

SEQ ID NO: 179436 - DNA, 80 bp, synthetic construct
  source 1..80: mol_type = other DNA
cgggatatctgagcctgtggtcggtttattggctgttcaagctggccaccagcaaagaaggtatgggctatggcgatttc

SEQ ID NO: 179437 - DNA, 80 bp, synthetic construct
  source 1..80: mol_type = other DNA
tatgtaccaccaggtgccaaaccacctaataacaatagctcaatggaatggaacacagcctctaacccaagcatattctt

SEQ ID NO: 179438 - DNA, 80 bp, synthetic construct
  source 1..80: mol_type = other DNA
cactagttatgcaaatgcaaatccaggcgaaaggggagggaaattttactcccagttcaacaaggataacgcagtaacac

SEQ ID NO: 179439 - DNA, 80 bp, synthetic construct
  source 1..80: mol_type = other DNA
ttgcggtgggttatttcccccctcagtgttcgccagcttatttccccagtccccacgtactggggcctgtggacacctga

SEQ ID NO: 179440 - DNA, 80 bp, synthetic construct
  source 1..80: mol_type = other DNA
caacagtgcatcaaatacatcagcaaaccaatactttaatacttatgatggctactggggtgatgccatatatgctcgag

SEQ ID NO: 179441 - DNA, 80 bp, synthetic construct
  source 1..80: mol_type = other DNA
cgaattggctctgacgctgttgagaaatacatcaaaacaatctccaactcccttcatgtgtttgggaagaaggcttaccg

SEQ ID NO: 179442 - DNA, 80 bp, synthetic construct
  source 1..80: mol_type = other DNA
aaatatggtgttgatttaccatttgtcacctttgttaaagatgagctcagatcaagagagaaagtagaaaaagggaaatc

SEQ ID NO: 179443 - DNA, 80 bp, synthetic construct
  source 1..80: mol_type = other DNA
gcccgtacataaatcggcgagataccaattttgaggtcactcccatcaccgagaaacgagacgacataaattgggtccct

SEQ ID NO: 179444 - DNA, 80 bp, synthetic construct
  source 1..80: mol_type = other DNA
gtgacaatagttttgaaatcaccatcccatactcattttccacctggatgcggaaaacagatggtcaccctattggactg

SEQ ID NO: 179445 - DNA, 80 bp, synthetic construct
  source 1..80: mol_type = other DNA
tccaaaacaatgatccagtggacacatttgtgcatggtgtacttgaagaggttgttgttgtcccagacacacacgcttct

SEQ ID NO: 179446 - DNA, 80 bp, synthetic construct
  source 1..80: mol_type = other DNA
agatcatattttagtgaaactcaaggccaaataacattaaagaaaaaagtgcaggaatgtgggtatcctaccatacacaa

SEQ ID NO: 179447 - DNA, 80 bp, synthetic construct
  source 1..80: mol_type = other DNA
catcctacacttgaactcaagaaaatgggagcacaagtctcgacgcaaaagtctggtagccatgaaaccagtaatatagc

SEQ ID NO: 179448 - DNA, 80 bp, synthetic construct
  source 1..80: mol_type = other DNA
agttgtgcccactggtgtttatccggtcccaaatgtcacaacagaacacaggaggctggatttggcagcagcacgtgtgc

SEQ ID NO: 179449 - DNA, 80 bp, synthetic construct
  source 1..80: mol_type = other DNA
tcagtattggaaatgcttacagcaacttttacgatgggtggtcccacttctcacagaacggtgtttatggctacaacacg

SEQ ID NO: 179450 - DNA, 80 bp, synthetic construct
  source 1..80: mol_type = other DNA
gctaccagaaacagagatacctggggaactgtacaatgcctcccagataatgatgactataccgaaatccaattaaatat

SEQ ID NO: 179451 - DNA, 80 bp, synthetic construct
  source 1..80: mol_type = other DNA
taaatcttccatctgcgtcagcggtgcaagcccattccccgagctcattttcagacacataccctaccgccacggccttg

SEQ ID NO: 179452 - DNA, 80 bp, synthetic construct
  source 1..80: mol_type = other DNA
cgctggggacggggacgggggttgcggcgaagacgggggggtgtgcgaggccggggggtgtgcgggaccgaaggcctttt

SEQ ID NO: 179453 - DNA, 80 bp, synthetic construct
  source 1..80: mol_type = other DNA
accctacttttccagtaacagagatttatgattctattagatggacaaagaatccgtcatgcatgcaagagcatgtgtta

SEQ ID NO: 179454 - DNA, 80 bp, synthetic construct
  source 1..80: mol_type = other DNA
gctgggtgccatacaacgacaccttcggtagaggcaagtggatagacggtgggggatacgtgcccctcatcgagagaggc

SEQ ID NO: 179455 - DNA, 80 bp, synthetic construct
  source 1..80: mol_type = other DNA
aatggtagaccccttggacttttccaggttgaggttctgaatagattaacatacaatagttcatgcccaaacaaagtcca

SEQ ID NO: 179456 - DNA, 80 bp, synthetic construct
  source 1..80: mol_type = other DNA
ttaatagacttcagagaacttaacagggtaacccaggactttactgaagtccagttgggcatacctcaccctgcaggttt

SEQ ID NO: 179457 - DNA, 80 bp, synthetic construct
  source 1..80: mol_type = other DNA
agtatggagtttacatagtagtaggaataatagctcttagaatagtgatctatgtagtacaaatgttaagtaggcttaga

SEQ ID NO: 179458 - DNA, 80 bp, synthetic construct
  source 1..80: mol_type = other DNA
agcgcttggatgtcaagcttgatgacgatggtgattttcatttgatcaatgaccctggagtgccatggaagatttgggtc

SEQ ID NO: 179459 - DNA, 80 bp, synthetic construct
  source 1..80: mol_type = other DNA
actgaagcttgtagcgcagcaaaagggttggaatgggtgagcaataaaatctcaaagttcattgattggttaaaggagag

SEQ ID NO: 179460 - DNA, 80 bp, synthetic construct
  source 1..80: mol_type = other DNA
gggctctatccttgttacttgctctgcatgttcagacatggcagtgcgcatgctccgtgatactccaatgatcaaacaag

SEQ ID NO: 179461 - DNA, 80 bp, synthetic construct
  source 1..80: mol_type = other DNA
cgccattgcaagggtagccgacaccatacagcgtggacccagtaattctgaacaaattccagccttgactgcaaccgaga

SEQ ID NO: 179462 - DNA, 80 bp, synthetic construct
  source 1..80: mol_type = other DNA
cttacacaaaacctatgctatataacaaaacaaacccagcaatgggctatatattttatgatactttatttggcgacgga

SEQ ID NO: 179463 - DNA, 80 bp, synthetic construct
  source 1..80: mol_type = other DNA
atgcagaatcagtgggcctagtgtgctgcatatgcccttatactgaaccccctatgtacaaaaaagacaatcccaacatg

SEQ ID NO: 179464 - DNA, 80 bp, synthetic construct
  source 1..80: mol_type = other DNA
accaagttcagagtcagtttcaaactggagcgaggagtgcgacccttccccctggtgcaacgccctcggcggccgcgcgc

SEQ ID NO: 179465 - DNA, 80 bp, synthetic construct
  source 1..80: mol_type = other DNA
agaaggtgttttcggtatggagggtttagaagcactagacctcaataccagtgcaggatttccctatgtttccatgggca

SEQ ID NO: 179466 - DNA, 80 bp, synthetic construct
  source 1..80: mol_type = other DNA
accccctaacagacaaaggcataggaaacatgatatggatagacccaataacaaaaactaacagcagatacgaagaaggc

SEQ ID NO: 179467 - DNA, 80 bp, synthetic construct
  source 1..80: mol_type = other DNA
tacattagtaagcattttcacttaccctacattgaaagacagtcaaatgatttatggttcaagaaatttaacgacatgtg

SEQ ID NO: 179468 - DNA, 80 bp, synthetic construct
  source 1..80: mol_type = other DNA
tgacatctatgacaatgggccaaacaataggaataggattaacaagaggaaaatactgactgcttcaaccaaatataaat

SEQ ID NO: 179469 - DNA, 80 bp, synthetic construct
  source 1..80: mol_type = other DNA
ggacggcgacggcgaatagttgcgtgtgctgcggtgcggtgtggtgccgtagggacggcggtcgcggaagccggcgacgg

SEQ ID NO: 179470 - DNA, 80 bp, synthetic construct
  source 1..80: mol_type = other DNA
gctgtccataacgctggaatgggtattgcagcaggtaacctgacaatctacccgcaccaatgggtcaatttgagaaccaa

SEQ ID NO: 179471 - DNA, 80 bp, synthetic construct
  source 1..80: mol_type = other DNA
tgcaaactcggcatgtgaaaaactaccattcccgatctgagtcgacaatagagaatttcctcagtcggtctgcctgtgtg

SEQ ID NO: 179472 - DNA, 80 bp, synthetic construct
  source 1..80: mol_type = other DNA
aaggacggtcaagttttcgggaccccctatgttctggatgccgggattcccctgagtcaagcgctggtttccccccatca

SEQ ID NO: 179473 - DNA, 80 bp, synthetic construct
  source 1..80: mol_type = other DNA
ccgcggctccggaccacccccctgccttgccatggcatggggatggtggaagagacggcggcgcggctggttccgacggc

SEQ ID NO: 179474 - DNA, 80 bp, synthetic construct
  source 1..80: mol_type = other DNA
gaagagttcttgcagctcggtgacccgctcgatgtggcggtccggatcgacggtgtggcgcgtggcggggtagtcggcga

SEQ ID NO: 179475 - DNA, 80 bp, synthetic construct
  source 1..80: mol_type = other DNA
gttgaatacaccgggttctaaccagtttcttaccacagacaactttcagtccccgtgtatagtcccgaattacgatgtga

SEQ ID NO: 179476 - DNA, 80 bp, synthetic construct
  source 1..80: mol_type = other DNA
aggttgcaaataggaatgagagacaaccatcatatgacagctggttgaattgcaatggtacattgttgggcaatgccttg

SEQ ID NO: 179477 - DNA, 80 bp, synthetic construct
  source 1..80: mol_type = other DNA
accaagtaagaccaaattacaacccagtgttttttatgatgtgtttgaaggtactaaagagccagcagtactaacagaga

SEQ ID NO: 179478 - DNA, 80 bp, synthetic construct
  source 1..80: mol_type = other DNA
ggaccaggactaaagttgatatagctgaggggcctggctctatgaatatggcaaatgtgctgagtaccactggtgcacaa

SEQ ID NO: 179479 - DNA, 80 bp, synthetic construct
  source 1..80: mol_type = other DNA
gaccaacgacatgggaaccctgtgtttccgcgcgttggatggcgccacaacaagtgacatcaaggtgtttgccaaaccca

SEQ ID NO: 179480 - DNA, 80 bp, synthetic construct
  source 1..80: mol_type = other DNA
cgctatttatactttatatatccttttgcataaccatagacagtcaaggattttaatgatttgctcatccgcctttgagc

SEQ ID NO: 179481 - DNA, 80 bp, synthetic construct
  source 1..80: mol_type = other DNA
cgctgccaccgcgcgactatcctcaacgcgacgagcgggaccgtcaccgtcgcgaccgccgcgacagcggggaatactgt

SEQ ID NO: 179482 - DNA, 80 bp, synthetic construct
  source 1..80: mol_type = other DNA
caaattgccattgatcagtattcaggtcaattactgtcgctggacatacctacaaatgaattatcacttaaggaagcttt

SEQ ID NO: 179483 - DNA, 80 bp, synthetic construct
  source 1..80: mol_type = other DNA
gcggggtgatatggcaaatttttcaaatgaaagtccctatgaggtgcaaaacaacccaaaaactatgaaattggcttatt

SEQ ID NO: 179484 - DNA, 80 bp, synthetic construct
  source 1..80: mol_type = other DNA
actagaaaacttcttcggtagagcagcatgcgtgtgcgtgaagcggtatcaaattcgagggactgaggggtcaacagaca

SEQ ID NO: 179485 - DNA, 80 bp, synthetic construct
  source 1..80: mol_type = other DNA
cggaagtaggctgtcactttcacaaaatggcggcgacagccttccgctttgcacaaaatggaggtatttatcttccgggt

SEQ ID NO: 179486 - DNA, 80 bp, synthetic construct
  source 1..80: mol_type = other DNA
tccatgatagccaatgtaatcagcataatgggtgtaatttatattatatacaaattgttttgttccttacaagggccata

SEQ ID NO: 179487 - DNA, 80 bp, synthetic construct
  source 1..80: mol_type = other DNA
agagcagcagctcgcatgctggctcaagcgccccatgcgcttctatccaacagaccccccgttctacccctggctacccc

SEQ ID NO: 179488 - DNA, 80 bp, synthetic construct
  source 1..80: mol_type = other DNA
ggttttcttttgctatggactgtgtaattagaatactaattaattaggacactaattcggaacatcactgtggatgatta

SEQ ID NO: 179489 - DNA, 80 bp, synthetic construct
  source 1..80: mol_type = other DNA
gtcaaggggcaattcgggcacgggactggccgggctatgggcaaggctcttaaagctatcattctttaatgcgtctctct

SEQ ID NO: 179490 - DNA, 80 bp, synthetic construct
  source 1..80: mol_type = other DNA
ctcccagggccgtgagttatagagggcctggtgtggatcttttatccacttctgtgacacctttatccaagcatgacttg

SEQ ID NO: 179491 - DNA, 80 bp, synthetic construct
  source 1..80: mol_type = other DNA
ggtgtgaaggacggagctttttcgccgaaacgacggtgggaaccgggctgcgggacggagggtgtgcggagcgccggttg

SEQ ID NO: 179492 - DNA, 80 bp, synthetic construct
  source 1..80: mol_type = other DNA
ttacacccaagtgttttttatgatgtgtttccaggtagcaaagaaccagcagtgcttaatgagaatgatccaaggcttga

SEQ ID NO: 179493 - DNA, 80 bp, synthetic construct
  source 1..80: mol_type = other DNA
gcgtcgctgatacagtagcaagtggccctgcaaactctgagagcgtgcctgctctcactgcggtagaaactggacacacg

SEQ ID NO: 179494 - DNA, 80 bp, synthetic construct
  source 1..80: mol_type = other DNA
acgaaacaatggtacacgctggctctggtgcagttgttaaatacttcaacatcaactattacaaggatgctgctagttct

SEQ ID NO: 179495 - DNA, 80 bp, synthetic construct
  source 1..80: mol_type = other DNA
ccttacaaagggtgagacagcacacaagtttgagccaactaaaaccatgggggaacacaccgtacagtcaatagtgtgca

SEQ ID NO: 179496 - DNA, 80 bp, synthetic construct
  source 1..80: mol_type = other DNA
acatttgagaaatacaatgagaaaaactttacagtgtgggctattaatctacaagaaatggctcaaatcagaaggaaatt

SEQ ID NO: 179497 - DNA, 80 bp, synthetic construct
  source 1..80: mol_type = other DNA
tcaccaaaaactacttcgcatcaatgcaaggggaaattgtcacaaagtttaatgtaaaggatttaggtttaaaccccatc

SEQ ID NO: 179498 - DNA, 80 bp, synthetic construct
  source 1..80: mol_type = other DNA
aataaccacctccaaaagcaccactgaatgtaatttacccagtatacacacaccaagtaaaacaaagttacagcctagtg

SEQ ID NO: 179499 - DNA, 80 bp, synthetic construct
  source 1..80: mol_type = other DNA
ccccccactctgttagaggacaagtggtacactcagcaagacctgtgtccggtaaacctggcgcaacttgtggttactgc

SEQ ID NO: 179500 - DNA, 80 bp, synthetic construct
  source 1..80: mol_type = other DNA
ggaaaacgtgaggacgatggagtcttttcgagtcaaggttcagactggaagccacgacgcaaacaccgctatatttggct

SEQ ID NO: 179501 - DNA, 80 bp, synthetic construct
  source 1..80: mol_type = other DNA
atttctatgacgggtttgcaagggtgccaattaaaggtgagacatcagactcaggagacacattctatgggctagtatcc

SEQ ID NO: 179502 - DNA, 80 bp, synthetic construct
  source 1..80: mol_type = other DNA
tgcgacccttgcactaaagaatcattttcatacaacccaccacaaagcaaatttgtaatagaaaacatacagctatgggc

SEQ ID NO: 179503 - DNA, 80 bp, synthetic construct
  source 1..80: mol_type = other DNA
ttcatcacacagaaaaacttcttccaaggcgacaaggcttctgaggtcacggtctcagacacacaacctagcgggcctag

SEQ ID NO: 179504 - DNA, 80 bp, synthetic construct
  source 1..80: mol_type = other DNA
taatcatggtgttataggaataataactgcaggtggtgataactcagtagcatttacagatttgaggacttttagattta

SEQ ID NO: 179505 - DNA, 80 bp, synthetic construct
  source 1..80: mol_type = other DNA
tgtgttatcggataccagggcacggtcgaacgtttcgtggacatcttgcaaaaggacacgtttatcgaacgcacgccctg

SEQ ID NO: 179506 - DNA, 80 bp, synthetic construct
  source 1..80: mol_type = other DNA
gaaatgaaaaatttagagatattagacactttcttccaacatatgaggatgattacaatgatgcagttttgagtgtaaac

SEQ ID NO: 179507 - DNA, 80 bp, synthetic construct
  source 1..80: mol_type = other DNA
acattcaagcagcaacttcaatcctacttaatggagttatgcctccatggaaaagacacttacctacactacacttatcc

SEQ ID NO: 179508 - DNA, 80 bp, synthetic construct
  source 1..80: mol_type = other DNA
gacatgttgaacccacactcaagcgtccagagctacgcaaagccgtaacacaaggccctgaacatgagttcatgtatgca

SEQ ID NO: 179509 - DNA, 80 bp, synthetic construct
  source 1..80: mol_type = other DNA
cactaatggtgtaaacagtcaagaagttcctgccttgacagcagttgaaactggggcatcagggcaagcgatcccaagtg

SEQ ID NO: 179510 - DNA, 80 bp, synthetic construct
  source 1..80: mol_type = other DNA
agcacactcacaatgcaaaatgccaataagtggttttgggaaaacctacaagtcgaaaatgacttacaatcaaagtatgg

SEQ ID NO: 179511 - DNA, 80 bp, synthetic construct
  source 1..80: mol_type = other DNA
tactcattttcttacttgatgcggaaaaccaatgtatgcactgggggttgtttcaaaattgaggttttaaacagattgac

SEQ ID NO: 179512 - DNA, 80 bp, synthetic construct
  source 1..80: mol_type = other DNA
ccaatcaacagctaatgacacctggtacttaggaaaagcctacacatcccaaattactaaagcagcagaacaaattagaa

SEQ ID NO: 179513 - DNA, 80 bp, synthetic construct
  source 1..80: mol_type = other DNA
attcgatcaaaagcagtagcaatacagggtttgccaacactaactactccggggtctggccaatttttgactacagatga

SEQ ID NO: 179514 - DNA, 80 bp, synthetic construct
  source 1..80: mol_type = other DNA
caacacagatgatattagttttgttataatatcagaggccttcatgaacggggacatgccctacctagctccacacatac

SEQ ID NO: 179515 - DNA, 80 bp, synthetic construct
  source 1..80: mol_type = other DNA
ctcccggtggtgagggacggcggccagacgcggaaaaagaggaagtccccggggacagtctgccgggagcggcaggcgca

SEQ ID NO: 179516 - DNA, 80 bp, synthetic construct
  source 1..80: mol_type = other DNA
tacctgagatttgacatggagatcacggtagttattaccagttcacaggaccaatccacttcacaaaaccagaatgcacc

SEQ ID NO: 179517 - DNA, 80 bp, synthetic construct
  source 1..80: mol_type = other DNA
cgtagtttaattaaacataacagctgtgtggtcactacatgtaatggaaagttcacagggttagggatatatgataatgt

SEQ ID NO: 179518 - DNA, 80 bp, synthetic construct
  source 1..80: mol_type = other DNA
atcctgacaaatggttcaacacaacattttactgtcatcaactattacaaggatgcagcaagttcatcatctgctggtca

SEQ ID NO: 179519 - DNA, 80 bp, synthetic construct
  source 1..80: mol_type = other DNA
cgaagacggtgaggtaggagtggaggccgggccgcatagcgcggccgcgccgctgggttcagcggcgtgatccaggtggt

SEQ ID NO: 179520 - DNA, 80 bp, synthetic construct
  source 1..80: mol_type = other DNA
gactacgctgaaacgttttcgcctttggggagttttacgcgcctgggttacgatcgtctcgtttctgccgatgccggcgt

SEQ ID NO: 179521 - DNA, 80 bp, synthetic construct
  source 1..80: mol_type = other DNA
tcaacgcgtcgcggcgtgcgtggcactgtgtccacggcgcttagtgcgcgctgcctgtgcgtgccgtcccgcggtatttg

SEQ ID NO: 179522 - DNA, 80 bp, synthetic construct
  source 1..80: mol_type = other DNA
tagaacacacgcgataggggtacttggtggtattgacccccaccacatctccgtacttgagggtagtgttgtagatggtc

SEQ ID NO: 179523 - DNA, 80 bp, synthetic construct
  source 1..80: mol_type = other DNA
ctctagtgcccatacttttacatgaacaaaaaaaggcgttttactggcgactttttctgcaaagtcaacatgtagaagca

SEQ ID NO: 179524 - DNA, 80 bp, synthetic construct
  source 1..80: mol_type = other DNA
gcctgggacttccgtagagggctctttggccaagcagctattaaaagagtgtcgggagaacaaacaaatgcttcacttta

SEQ ID NO: 179525 - DNA, 80 bp, synthetic construct
  source 1..80: mol_type = other DNA
tggtgccagtacatgtttcagatgaggcaagcaatgatgagactcattgcctggtgcatccagcacagaccagtcaggag

SEQ ID NO: 179526 - DNA, 80 bp, synthetic construct
  source 1..80: mol_type = other DNA
agcctttatggctacagctcctttacacccaaagaccaaaacggaattacaaacataaaatacataagagatgcaaactt

SEQ ID NO: 179527 - DNA, 80 bp, synthetic construct
  source 1..80: mol_type = other DNA
ataaggattttgttgacaaaataagatcaaccagtatcggcaagtgtttgctgataccagaatacagtgtcttgcgccgc

SEQ ID NO: 179528 - DNA, 80 bp, synthetic construct
  source 1..80: mol_type = other DNA
ttacggactttagactatttttcgaagtcaccctgggtcggagaatcgcagattgcgttgtggtagctctgcagccttcc

SEQ ID NO: 179529 - DNA, 80 bp, synthetic construct
  source 1..80: mol_type = other DNA
ggtgacccacgtgaaaacatcactgcagcacaccctagtgatgataattggcttaattttgatggtacaatgctaggtaa

SEQ ID NO: 179530 - DNA, 80 bp, synthetic construct
  source 1..80: mol_type = other DNA
gaacctaacgaagggtgagacagcgcacaagtttgagccgaccaaaaccacgggtgagcacactgtacaatcaatagtgt

SEQ ID NO: 179531 - DNA, 80 bp, synthetic construct
  source 1..80: mol_type = other DNA
ccatggatatgtataggatcccgctaagcaccacaggcggaacggacccaattttctgtttgagtctctctccggcatct

SEQ ID NO: 179532 - DNA, 80 bp, synthetic construct
  source 1..80: mol_type = other DNA
cagaatatgggtacagtggtgcagtgaaaaaaacagtagttatgactctacaaaaagcaaatgtatgctacaagacctgc

SEQ ID NO: 179533 - DNA, 80 bp, synthetic construct
  source 1..80: mol_type = other DNA
gaaaaagcgccagctacaagtaaaccaacagcaccacctagtggcagaaattatccagtgcagcaggtggccggtaatta

SEQ ID NO: 179534 - DNA, 80 bp, synthetic construct
  source 1..80: mol_type = other DNA
tatctgaagccatgtttccgaaccagatttatgatttccatacatccacttagataaaggatgataatcggataaacaga

SEQ ID NO: 179535 - DNA, 80 bp, synthetic construct
  source 1..80: mol_type = other DNA
gcggaccgttcgcctaccacggggacgagagaaagactgtactgactgccaaatacaagttcagatggaagtggtgaggc

SEQ ID NO: 179536 - DNA, 80 bp, synthetic construct
  source 1..80: mol_type = other DNA
ctaccctattttatgacaaacgcatgagaaccacgaatactcgccctacgaaaattgaaattgatacagtaggaggcaca

SEQ ID NO: 179537 - DNA, 80 bp, synthetic construct
  source 1..80: mol_type = other DNA
aacgctggagtctactattgtaggcataaggacagaagttatccagtctgttttgaggggcctggaatccagtggattgg

SEQ ID NO: 179538 - DNA, 80 bp, synthetic construct
  source 1..80: mol_type = other DNA
ttatgatttaaagcggagagttgataacggtcctgaacaagtggatacttggtttcttattgtaactaagtaacgttgat

SEQ ID NO: 179539 - DNA, 80 bp, synthetic construct
  source 1..80: mol_type = other DNA
atgatgcttaagacaaaaaataagatactcatacccagctttaacactaaaccaaagggcaggagcacagtgtctgtcag

SEQ ID NO: 179540 - DNA, 80 bp, synthetic construct
  source 1..80: mol_type = other DNA
tgttaagggataccactcatatatctcaaactgccttgccacagggtattgaggatttgattgaaaaggttgcgagtaac

SEQ ID NO: 179541 - DNA, 80 bp, synthetic construct
  source 1..80: mol_type = other DNA
cggttcctaccccgatatacaaaccctttcaagagacccagatatcttcccccgacagacggagaagactaccgacaaga

SEQ ID NO: 179542 - DNA, 80 bp, synthetic construct
  source 1..80: mol_type = other DNA
ccgatctaacttagaagcaacgtacatgagcccaataggagcggctaatccacagccgtatagggcaagcacttctgtta

SEQ ID NO: 179543 - DNA, 80 bp, synthetic construct
  source 1..80: mol_type = other DNA
ttagggtccaggagtgcgcagacatactgacccacgctctcatcccccacaacatctgacccggccaggcgcatcagggc

SEQ ID NO: 179544 - DNA, 80 bp, synthetic construct
  source 1..80: mol_type = other DNA
tcaaatgagcaacacattaataaatttaaagtatggcacattaatttacaagaaatggcccagatcaggcgtaaatatga

SEQ ID NO: 179545 - DNA, 80 bp, synthetic construct
  source 1..80: mol_type = other DNA
atgaatgatactgtgtatttccgtatggtgtttggaaatctatacagtgctttccacaagaatccaggtgtgttaactgg

SEQ ID NO: 179546 - DNA, 80 bp, synthetic construct
  source 1..80: mol_type = other DNA
aagacctcccccagctcggccagggacgtgacggcggccaggctctgaccagactcggaagtaaatagctccgtgaggtg

SEQ ID NO: 179547 - DNA, 80 bp, synthetic construct
  source 1..80: mol_type = other DNA
aagttgcttaaacatttagtgaaactcatcagcagcttagtgataattatcagaaattatgaggacactactacagtgtt

SEQ ID NO: 179548 - DNA, 80 bp, synthetic construct
  source 1..80: mol_type = other DNA
ggagacattagtgtggaggtttgaccctatgctagcccatgagtacacggcctttaagaaatacccagaggagttcggat

SEQ ID NO: 179549 - DNA, 80 bp, synthetic construct
  source 1..80: mol_type = other DNA
ccctttctcgggatagaacgtaccctgtacacgccatacagcgtccaacacgccgtctttgacgacgcagctggcctgat

SEQ ID NO: 179550 - DNA, 80 bp, synthetic construct
  source 1..80: mol_type = other DNA
gcagaggagaatttttctactgcaacatgacttggttcctcaattggatagaaaatggttcgaagccacaacgcaattat

SEQ ID NO: 179551 - DNA, 80 bp, synthetic construct
  source 1..80: mol_type = other DNA
gataaccagtcctccagcaatgacacctggtactatggaaacacatacaacactgaaattagcaaattaactaaagcagc

SEQ ID NO: 179552 - DNA, 80 bp, synthetic construct
  source 1..80: mol_type = other DNA
ctaacgccacaacaagcaaagacacctggtacaaaggcaacacatacaatacccacattacaaccctagcagaaaaaacc

SEQ ID NO: 179553 - DNA, 80 bp, synthetic construct
  source 1..80: mol_type = other DNA
tattccattcgtgcctctggattatagtgacggtgcctccacgtacgtgcccataacaatcaccattgcgccgatggatg

SEQ ID NO: 179554 - DNA, 80 bp, synthetic construct
  source 1..80: mol_type = other DNA
ttttaaacttggttttcaataaacaaggccgtgggagtttcacttgtcggtgtcaacctcttaaggtcactaagcactcc

SEQ ID NO: 179555 - DNA, 80 bp, synthetic construct
  source 1..80: mol_type = other DNA
aacagatatcgaagcagaagaatggaccaatgttaccatacaaagcaatttcacgataccccattgtcacaaggtggttt

SEQ ID NO: 179556 - DNA, 80 bp, synthetic construct
  source 1..80: mol_type = other DNA
ggcggccaatcccggggtaactgtcacgtcccggggtgaggaggtaggagacagccagtccctgggcctgccaggtgcca

SEQ ID NO: 179557 - DNA, 80 bp, synthetic construct
  source 1..80: mol_type = other DNA
aagcgtctcgcttacggccggcacgtagagccctcgcgcctccacaaaagcgctgcgcgcatccagcgagacctcgtcgg

SEQ ID NO: 179558 - DNA, 80 bp, synthetic construct
  source 1..80: mol_type = other DNA
aacacagaattcgaggcctgccacgccttcgacaggccccctagaaagtacctcacagacacacctacctacccctggct

SEQ ID NO: 179559 - DNA, 80 bp, synthetic construct
  source 1..80: mol_type = other DNA
tggatttaccccactaaaaccacatacgcctggccttagtgttgttggtgagacgctaccatcaaaatgggtgctcaggt

SEQ ID NO: 179560 - DNA, 80 bp, synthetic construct
  source 1..80: mol_type = other DNA
tcatactttatcaagacagttacaaaaatcatgtaaactcaatggagttttcaccaacccaactgccagtgagttcatgg

SEQ ID NO: 179561 - DNA, 80 bp, synthetic construct
  source 1..80: mol_type = other DNA
cgcgcttcgcgcgccgcccactagggggcgctgcgcgcccccccgccgctacgtcatacttcctctttttttttttgaaa

SEQ ID NO: 179562 - DNA, 80 bp, synthetic construct
  source 1..80: mol_type = other DNA
gacacccccgggggcccggcccggccaagagcgaagacgaggagtctgagcgtcgagacgcccctccacccccgctcgat

SEQ ID NO: 179563 - DNA, 80 bp, synthetic construct
  source 1..80: mol_type = other DNA
ataaaaaccctagcaagctaattaggttaaaaacagaattctgggagcggacatatgccaggcagcacctcatagtggat

SEQ ID NO: 179564 - DNA, 80 bp, synthetic construct
  source 1..80: mol_type = other DNA
aggaaaagttttagacaatttaggctttccaggacatttaaccagtaaattatgcaacaccacacacatctacagagacc

SEQ ID NO: 179565 - DNA, 80 bp, synthetic construct
  source 1..80: mol_type = other DNA
aatagtcacttccaaacacaccaatgagtgtaatttgcctagcattcacacaccaagcaagactaaattacaaccaagtg

SEQ ID NO: 179566 - DNA, 80 bp, synthetic construct
  source 1..80: mol_type = other DNA
ttcggcaacgtcgacgggctcggcggctgcatgccgtttctgaaggcaaactgcaggaagagaagaaacgacagtctgct

SEQ ID NO: 179567 - DNA, 80 bp, synthetic construct
  source 1..80: mol_type = other DNA
cacttgttgatactttaaccaaccctgcactcatgtcaccgtctgtggaagcttgtgggttttccgataggttaaagcaa

SEQ ID NO: 179568 - DNA, 80 bp, synthetic construct
  source 1..80: mol_type = other DNA
cccctaaaaggaggagcatgcctagaggtccaagggtattggaatctgaccccggaaaggggattcttgagttcctatgc

SEQ ID NO: 179569 - DNA, 80 bp, synthetic construct
  source 1..80: mol_type = other DNA
atgggcgcacaagtgtctagacagagtgttggaagccatgagaccatgattcacgctgggactggagctgtggttaagta

SEQ ID NO: 179570 - DNA, 80 bp, synthetic construct
  source 1..80: mol_type = other DNA
acttataaacatacaaagattatcccaaattattattacaagcggatcaataaagggaaattcaaacagaattggatgat

SEQ ID NO: 179571 - DNA, 80 bp, synthetic construct
  source 1..80: mol_type = other DNA
cacatcgccaccacagacagaggagacttcaatctacttggtgtgtatgataactgcgctgtgataccaacgcatgcgca

SEQ ID NO: 179572 - DNA, 80 bp, synthetic construct
  source 1..80: mol_type = other DNA
cttacagaggaccctaggaccctaccaagacgtagaaacagtgggcatagtttgctttatatgcccctacaccgagcccg

SEQ ID NO: 179573 - DNA, 80 bp, synthetic construct
  source 1..80: mol_type = other DNA
gcggactgcgtctgcgggggcaggaggtctcaaccttctgggctcgggccgcggtgtcgatatccgatggcctttccctg

SEQ ID NO: 179574 - DNA, 80 bp, synthetic construct
  source 1..80: mol_type = other DNA
agcatggcgggcggcgacgtcacatgtcaaaggtcaccgcacttccgtgcttgcacaaaatggccgccaattacttccgg

SEQ ID NO: 179575 - DNA, 80 bp, synthetic construct
  source 1..80: mol_type = other DNA
gtgccacgaccccccaggttgtgtcaatataaaaatgcaccaactgtgaacttctcatccacaaacatcactgacaagag

SEQ ID NO: 179576 - DNA, 80 bp, synthetic construct
  source 1..80: mol_type = other DNA
aacgaccctgcacagtacccagctttttcagtaactaacccagggaaaaatgggagagagtttgcggacccgtacgtctt

SEQ ID NO: 179577 - DNA, 80 bp, synthetic construct
  source 1..80: mol_type = other DNA
aaaaacttgccaaactggagaccacctgataaatacacaaacaacgaaccatatccatttgaatattacacaggcctata

SEQ ID NO: 179578 - DNA, 80 bp, synthetic construct
  source 1..80: mol_type = other DNA
gattggcagaactaattatgataaatcaggacacgtgattcctaagagagatggcatatcaacttacggacttggcccaa

SEQ ID NO: 179579 - DNA, 80 bp, synthetic construct
  source 1..80: mol_type = other DNA
ggatggcgtgttttctgaggttatccccgctacgtgcagtgctgggtgagagagaccctagaatgtgtcgaaatgaccaa

SEQ ID NO: 179580 - DNA, 80 bp, synthetic construct
  source 1..80: mol_type = other DNA
ttggtaatgctaaatgttgcccatttatttgtggtaaagctgttatgtttaaagacagaaacacatgcacatcatacacc

SEQ ID NO: 179581 - DNA, 80 bp, synthetic construct
  source 1..80: mol_type = other DNA
gctggacccagcgacctttatgtgcacactgcagatgccatctatcgcaatgctcacttaaccacggtgagtgatgacac

SEQ ID NO: 179582 - DNA, 80 bp, synthetic construct
  source 1..80: mol_type = other DNA
tcctcctcggacgaaggtgaggacgatgacgacggggaggatgacgataacgaggagcggcaacagaagctgcggctctg

SEQ ID NO: 179583 - DNA, 80 bp, synthetic construct
  source 1..80: mol_type = other DNA
cccaagaagagatgcaaacgcaggggacggtacaggaacaactcctcctccagctccgagagcagcgagtactccggttc

SEQ ID NO: 179584 - DNA, 80 bp, synthetic construct
  source 1..80: mol_type = other DNA
aaacttcgatggcaccttattaggtaatgctcttatatttcctcaccagttcattaatcttagaagtaataattcagcaa

SEQ ID NO: 179585 - DNA, 80 bp, synthetic construct
  source 1..80: mol_type = other DNA
tacgcctggattgccggctggtggctggggtcccgggacgccccctccctgctcccacccggttccctcccccagggcgt

SEQ ID NO: 179586 - DNA, 80 bp, synthetic construct
  source 1..80: mol_type = other DNA
tccgaaacagatccaacatgttgacttttccggcttgtggaaaggttgtacaatgctggatgctctgttgccctcgatcc

SEQ ID NO: 179587 - DNA, 80 bp, synthetic construct
  source 1..80: mol_type = other DNA
cccacatcaactcataaatttgaggacaaataactcgagcactattgttgtgccatacatcaactgcacccctatggaca

SEQ ID NO: 179588 - DNA, 80 bp, synthetic construct
  source 1..80: mol_type = other DNA
ttcccagggaatgttagatcttaccaagtaagcacccgaagatgaacagcacaattccaaggtacaatgcctgtccgtgc

SEQ ID NO: 179589 - DNA, 80 bp, synthetic construct
  source 1..80: mol_type = other DNA
acagtgttccacaaatgggactggagacgtgggatgcttagcaaaagaagtattaaaagagtccaggaggactcaacaga

SEQ ID NO: 179590 - DNA, 80 bp, synthetic construct
  source 1..80: mol_type = other DNA
tgctgacctacaggtagattcttctgacacgcagggaccagatcatatacccacttgtgattgcactcaagcctgttatt

SEQ ID NO: 179591 - DNA, 80 bp, synthetic construct
  source 1..80: mol_type = other DNA
tttccttcgttcttttattacttgcgtatggtgacaattgtatgaaatacgattgacaccatgggcgcgcaagtttccaa

SEQ ID NO: 179592 - DNA, 80 bp, synthetic construct
  source 1..80: mol_type = other DNA
gctaagcccaaacacacaacagcatggattccaagaccccctagggccacccagtacactctcaaatatagcacaaacta

SEQ ID NO: 179593 - DNA, 80 bp, synthetic construct
  source 1..80: mol_type = other DNA
gaagtgactgtggtgacgaataatcatagtctaatgcaaattatgttcatacctccagggattgacccaccctcggctca

SEQ ID NO: 179594 - DNA, 80 bp, synthetic construct
  source 1..80: mol_type = other DNA
tcaccagagaactcttgtatttgtttacagaggcaatagagatagacatagcgcatggccggcatctgaggtggacggtc

SEQ ID NO: 179595 - DNA, 80 bp, synthetic construct
  source 1..80: mol_type = other DNA
aagttggattggcaccaatcaatacaccctgcaaaactaaattatatcctagtgtcttttatgatattttccctggtgag

SEQ ID NO: 179596 - DNA, 80 bp, synthetic construct
  source 1..80: mol_type = other DNA
ttgattcatccggtaatgcccatgcatgacatacaagaatccatcagatggactaaagatcctagaaacacacaggaccc

SEQ ID NO: 179597 - DNA, 80 bp, synthetic construct
  source 1..80: mol_type = other DNA
ctcagggtccatattctggattagacagtaaagccaaactgaaagcaccggtactacgtgcagtagttactcaagggccc

SEQ ID NO: 179598 - DNA, 80 bp, synthetic construct
  source 1..80: mol_type = other DNA
tgaccacggacgatcactcgtcagctcctgcattcccagatttctcaccaacccctgaaattcacatcccaggtagagta

SEQ ID NO: 179599 - DNA, 80 bp, synthetic construct
  source 1..80: mol_type = other DNA
accaagcaaaaccaaattgcaacctagtgtgttttatgatgtgtttccagggaataaggaaccagctgtactttcagaac

SEQ ID NO: 179600 - DNA, 80 bp, synthetic construct
  source 1..80: mol_type = other DNA
ggcacaagttgaaccttttataccaatcaacaacatccaggcccaaattggccggattagtatgtacactatccctgtaa

SEQ ID NO: 179601 - DNA, 80 bp, synthetic construct
  source 1..80: mol_type = other DNA
agtatagtactaatcctaggaactgtttatgcactgtacaaattgatgtgtatagcacaaggcccctataccggcttacc

SEQ ID NO: 179602 - DNA, 80 bp, synthetic construct
  source 1..80: mol_type = other DNA
atcacgacgggtttctcgaatgcataggcataaaacctacaaaacatacacccataatctataaatacgatcttaaccca

SEQ ID NO: 179603 - DNA, 80 bp, synthetic construct
  source 1..80: mol_type = other DNA
aagcagacacagctatattcaaagaccacctatataaaaaccctgaatactggcaatcacaccacactgctgctagacta

SEQ ID NO: 179604 - DNA, 80 bp, synthetic construct
  source 1..80: mol_type = other DNA
acgccgccgattcacggtgtgtgtaattgtagtcatacaggattgacgttttgcaacgtaacgcaaggcaacgaaggatc

SEQ ID NO: 179605 - DNA, 80 bp, synthetic construct
  source 1..80: mol_type = other DNA
actgtgacgtcaaagtcacgtggggagtgcggcgttaaacccggaagccatcctcgtcacgtgacctgacgtcacggccg

SEQ ID NO: 179606 - DNA, 80 bp, synthetic construct
  source 1..80: mol_type = other DNA
attatgcagccagtgatagtgttgacatttttataaaatcaaggcaaaacttgcaaacagctgggccaagcgacatgtat

SEQ ID NO: 179607 - DNA, 80 bp, synthetic construct
  source 1..80: mol_type = other DNA
gccgggttccgcgtgttcgtgtacgacctggcgaacaacacgctgatcctggcggcgcgcgacgcggacgagtggtttcg

SEQ ID NO: 179608 - DNA, 80 bp, synthetic construct
  source 1..80: mol_type = other DNA
atcttgtgtcacttgcggtttctgcggcgagcttctcgcatccgttcagccaaccgtcaagtaacaacatttgcacaacc

SEQ ID NO: 179609 - DNA, 80 bp, synthetic construct
  source 1..80: mol_type = other DNA
acagttgcggataccttacctagcacgtccaggaacacagaacaggtccctgctctcaccgctgttgaaacagggcacac

SEQ ID NO: 179610 - DNA, 80 bp, synthetic construct
  source 1..80: mol_type = other DNA
gggctgcaaactcatattctttaagcaccccaccgtagactttatagtcaggataaacacacagcctccatttctagaca

SEQ ID NO: 179611 - DNA, 80 bp, synthetic construct
  source 1..80: mol_type = other DNA
gagacagctccttcctatttgccacctatcacccagacaaaattacaacttatattaaacagatgagagacaataacttt

SEQ ID NO: 179612 - DNA, 80 bp, synthetic construct
  source 1..80: mol_type = other DNA
gtagttccggggaggaatccgccacggcggtggaggccgactccacgtcacacgacgacgtgcattgcacctgttccaac

SEQ ID NO: 179613 - DNA, 80 bp, synthetic construct
  source 1..80: mol_type = other DNA
atggccgacttccttcctgtttttcaaaaaaataccggaagtaacgtaccgggtgcggggcgcgcgcttcgcgcgcgccc

SEQ ID NO: 179614 - DNA, 80 bp, synthetic construct
  source 1..80: mol_type = other DNA
tctttcatgatgttttccccggtaccaaagaaccagcagtcttatctccatatgacaatagattagaagtagatttggat

SEQ ID NO: 179615 - DNA, 80 bp, synthetic construct
  source 1..80: mol_type = other DNA
ccattgtctgttatttcattgtctttttacaaactcatatatttgctgagggtttgaaggatgcgattaaggaccttgtt

SEQ ID NO: 179616 - DNA, 80 bp, synthetic construct
  source 1..80: mol_type = other DNA
ccacacgcaaagtagcccagctgcgcaggaagctagaaatgttcacatacttgaggttcgatttagaagtgaccttcgtg

SEQ ID NO: 179617 - DNA, 80 bp, synthetic construct
  source 1..80: mol_type = other DNA
ttgggaagtacagtagcaactccaccaagcaagatgagcagtacatgtcgtgggtgatcaacacgcgacaaatggtgcag

SEQ ID NO: 179618 - DNA, 80 bp, synthetic construct
  source 1..80: mol_type = other DNA
cttacactacatataagaatgccaacccaggagagtctgggggggtgtttgtggattcattcaccgcaacgacacagccc

SEQ ID NO: 179619 - DNA, 80 bp, synthetic construct
  source 1..80: mol_type = other DNA
gtgagtttaatggtctgaggaacattaccctgccaagattgcaagggctaccagtcatgaacacacccggtagcaatcag

SEQ ID NO: 179620 - DNA, 80 bp, synthetic construct
  source 1..80: mol_type = other DNA
gtgaagttgcccgacatcctccccttgaagtacagcatgcccatatggaaccagcattggttctcctccactcgaaagtg

SEQ ID NO: 179621 - DNA, 80 bp, synthetic construct
  source 1..80: mol_type = other DNA
acacctccggtatcataactatatggtaccaaacaaacttcgtggtcccttctggcacaccgacccaagctcacattata

SEQ ID NO: 179622 - DNA, 80 bp, synthetic construct
  source 1..80: mol_type = other DNA
actaacttggtatacagaaaagttctggacagatgttaccccagactgtgcagactccctaatacatagcacttattttt

SEQ ID NO: 179623 - DNA, 80 bp, synthetic construct
  source 1..80: mol_type = other DNA
ctggaaaaggcccaaacaaatttcaaactggaaacagcactcaatttggccataacagctacaaacccacagaaaacaat

SEQ ID NO: 179624 - DNA, 80 bp, synthetic construct
  source 1..80: mol_type = other DNA
gctctgcaaatttctcagcctaggcctagcactagccaacagtccttaccaaacacaaacagctcagaaccagtacactc

SEQ ID NO: 179625 - DNA, 80 bp, synthetic construct
  source 1..80: mol_type = other DNA
tggggtgtgctgacacaagcacaactttccctgctacagagttaaccactgaggaagaaccccatgtgttcacctcggat

SEQ ID NO: 179626 - DNA, 80 bp, synthetic construct
  source 1..80: mol_type = other DNA
tctaaatcaaaatccagatggtcaagatattagtatgttttgtcaaatggtttcctctgttgattttataccaccaatgg

SEQ ID NO: 179627 - DNA, 80 bp, synthetic construct
  source 1..80: mol_type = other DNA
taataaaaatacaaggccgtgggagtttcacttgtcggtgtctgcttcttaaggtcaccaagcactccgagcgaagcgag

SEQ ID NO: 179628 - DNA, 80 bp, synthetic construct
  source 1..80: mol_type = other DNA
aagcagactggcaaaaatttaaaaagaacacagacagcaactatggctactgcacctactgcccctcaaatgaaaataac

SEQ ID NO: 179629 - DNA, 80 bp, synthetic construct
  source 1..80: mol_type = other DNA
aagaggtactttaaccagcaacaaggtcaaattactgttaaaaaaccagtaaaagaagtggactatcccagcattcatac

SEQ ID NO: 179630 - DNA, 80 bp, synthetic construct
  source 1..80: mol_type = other DNA
ttatgtacgtacccccgggggctccagtgcccagtaagtgggatgattttacgtggcaaacttccacgaacccatctgtg

SEQ ID NO: 179631 - DNA, 80 bp, synthetic construct
  source 1..80: mol_type = other DNA
aagaaggccagagcaagtgtttaattgccaacctacccctgtggatggccacaaacggttatatagactgggtaaaaaaa

SEQ ID NO: 179632 - DNA, 80 bp, synthetic construct
  source 1..80: mol_type = other DNA
ttagggaaacatgttcaggtctatttgataaaatcacatcaaagaccgtgaaatggttagtgagaatcatcagtgcactg

SEQ ID NO: 179633 - DNA, 80 bp, synthetic construct
  source 1..80: mol_type = other DNA
ctgacactactgattgtaccactggtaatgttaagagctagcattagtgcaacaccagaggtgtctataacaatcactat

SEQ ID NO: 179634 - DNA, 80 bp, synthetic construct
  source 1..80: mol_type = other DNA
attggtggatccatactttgtttaaaattaaggacatggtacttaatgtttttaaaccaagtatggagagtagagctata

SEQ ID NO: 179635 - DNA, 80 bp, synthetic construct
  source 1..80: mol_type = other DNA
aacgggcactaccggaaccacctacaaaaactatgctagcaatgccaataactatgtaaaaattgacccctttggaggag

SEQ ID NO: 179636 - DNA, 80 bp, synthetic construct
  source 1..80: mol_type = other DNA
ctcttagaactgtccgagattcggctgcacttgggttcttgctttgtcagccaatgctgcatggaacttctagtaccatg

SEQ ID NO: 179637 - DNA, 80 bp, synthetic construct
  source 1..80: mol_type = other DNA
aaggaggcaatgttactataaaaggcaattatacatggaattgcagttcagtctcctgggtacgacattacaatctgtcc

SEQ ID NO: 179638 - DNA, 80 bp, synthetic construct
  source 1..80: mol_type = other DNA
gagaaaagggagcaactgttcaataatgtcatgtggttagagcagatgtctcaaaagtttgcccccctttatgctgcaga

SEQ ID NO: 179639 - DNA, 80 bp, synthetic construct
  source 1..80: mol_type = other DNA
atgcccaccaatttcaaagtcagcttcaaacttggatttaaaccctaaataaaaatttcaaggccgtacactgttcactt

SEQ ID NO: 179640 - DNA, 80 bp, synthetic construct
  source 1..80: mol_type = other DNA
atttagaacagaaggctgctactcacatccaaaattgcagaaaaaacaagtacaagctgcaactgatgaaaaatattttg

SEQ ID NO: 179641 - DNA, 80 bp, synthetic construct
  source 1..80: mol_type = other DNA
gtataaacgtaacagaggcttttgatgcatggaataatacagtaacagaacaggcagtagaggatgtgtggagtcttttt

SEQ ID NO: 179642 - DNA, 80 bp, synthetic construct
  source 1..80: mol_type = other DNA
gcacaatgtcttggccgtgcacgcaggccgagctgaactccatattgaaatcgggcgcgcacatggagatcttggccgaa

SEQ ID NO: 179643 - DNA, 80 bp, synthetic construct
  source 1..80: mol_type = other DNA
ataagtaccctccaagaatacaaatctcagacccgcagaccctcggaccggcgacgcttttccacagctgggacatcaga

SEQ ID NO: 179644 - DNA, 80 bp, synthetic construct
  source 1..80: mol_type = other DNA
ggttagttgacaatgatgaaatcaatctcgaaattactgttgtgacccttgacaggaatgaaaaattcagagatattaga

SEQ ID NO: 179645 - DNA, 80 bp, synthetic construct
  source 1..80: mol_type = other DNA
ttagtcaaacaggggtatatggctacacaactctcaacaacatgggcaccttgtattttaggcatgtgaataattcaacc

SEQ ID NO: 179646 - DNA, 80 bp, synthetic construct
  source 1..80: mol_type = other DNA
accaccttccaggtgttgcgagacaactacaatgcggtcattggacttccctttacagttaaccacagcaatactacaga

SEQ ID NO: 179647 - DNA, 80 bp, synthetic construct
  source 1..80: mol_type = other DNA
cctagtgcattctatgatgtttttcccggaaagaaagaaccggcagctctacacccaaaggactctagactggaagtgga

SEQ ID NO: 179648 - DNA, 80 bp, synthetic construct
  source 1..80: mol_type = other DNA
aaatggtttagcagatccatgaccagggccgagtcctgcacgcagtacatgccgagccgcctgcgcccctcggggcccgc

SEQ ID NO: 179649 - DNA, 80 bp, synthetic construct
  source 1..80: mol_type = other DNA
gattattatcaataggcttggttttcaaaggtcagcctgtgtattgtcgtgtcttttttttcgttctcatgatcgcggag

SEQ ID NO: 179650 - DNA, 80 bp, synthetic construct
  source 1..80: mol_type = other DNA
cagatgaattagaaaaagttaggttacggcccggcgcaaagaaaaggtataagctaaagcatgtaatatgggcagtgaac

SEQ ID NO: 179651 - DNA, 80 bp, synthetic construct
  source 1..80: mol_type = other DNA
cccaggacgccacagtatagacagggtgtgaagaccggcgtgcgctaattgtgagtcctccggcccctgaatgcggctaa

SEQ ID NO: 179652 - DNA, 80 bp, synthetic construct
  source 1..80: mol_type = other DNA
tggggttgcaatcaagttgtgtcctatgtgtgccttggattagtcaaacacactacagatttgtgcaagatgacatatac

SEQ ID NO: 179653 - DNA, 80 bp, synthetic construct
  source 1..80: mol_type = other DNA
gccgacgtggtgaaccgctcatatagaccaaaccggacgctgcctcagtctctcggtgcgtggaccagacggcgtccatg

SEQ ID NO: 179654 - DNA, 80 bp, synthetic construct
  source 1..80: mol_type = other DNA
acacatacaacagcaacatacaagagttagctaaatacacaagagaaagattccaaaaagccacacaaaacgccattcca

SEQ ID NO: 179655 - DNA, 80 bp, synthetic construct
  source 1..80: mol_type = other DNA
cacatatgtaagatttgattcagagataacaattgtaccatgtgttgcagccatagagggcgaccttggacacatagtcc

SEQ ID NO: 179656 - DNA, 80 bp, synthetic construct
  source 1..80: mol_type = other DNA
cgggacagagctcagagagtgttaagaaacgtaaggacggggagctttggcgctggggacgcggagctgtcgcgctggcg

SEQ ID NO: 179657 - DNA, 80 bp, synthetic construct
  source 1..80: mol_type = other DNA
gaagtggagaaggagccggggcggctgattgcggaggctgctgctgagttggaggaggagaaagagtcgtggtcgtggtg

SEQ ID NO: 179658 - DNA, 80 bp, synthetic construct
  source 1..80: mol_type = other DNA
cagtcgccggcacctggtggctctgctgcgtgcctagctgaccctgaaacggatggcgtgtatatcgtcacacaggtagg

SEQ ID NO: 179659 - DNA, 80 bp, synthetic construct
  source 1..80: mol_type = other DNA
ctgtttccccggtcgacgttgatatgcttcaacaaggcaaaaacaacagagatcgttatccgcaagatgcctacacaaag

SEQ ID NO: 179660 - DNA, 80 bp, synthetic construct
  source 1..80: mol_type = other DNA
attgaccaaggatgatatagttagagaggtatacaggaaccaattagtaatcctcagtaaagtcgaggagaacaatgcaa

SEQ ID NO: 179661 - DNA, 80 bp, synthetic construct
  source 1..80: mol_type = other DNA
ttgtccttggttagccccgggacaagcaaacaccactgctgctgctggttgaacagtagaattgtctccaggttgaggtg

SEQ ID NO: 179662 - DNA, 80 bp, synthetic construct
  source 1..80: mol_type = other DNA
gcagacgcagacggggacgtaagagacttatactaactcagtggcagccccagacccgtagaaagtgcaccatcaccggg

SEQ ID NO: 179663 - DNA, 80 bp, synthetic construct
  source 1..80: mol_type = other DNA
tttgtctacgcatggccagagacactgacatgcatgtacaaaacgtgccaatagaacaaaatcctgtggaaaggtatgtt

SEQ ID NO: 179664 - DNA, 80 bp, synthetic construct
  source 1..80: mol_type = other DNA
aagtgcttctgcaaactgtgcgagctgcaaagaaggctaggcggcttctaggtatgtggcagccccccgcgcacaatgtc

SEQ ID NO: 179665 - DNA, 80 bp, synthetic construct
  source 1..80: mol_type = other DNA
caacatggcattggccactcaactctgcaaggattgccacaaaccaaccaatttctcctcgtgctgccctcttgtctgtg

SEQ ID NO: 179666 - DNA, 80 bp, synthetic construct
  source 1..80: mol_type = other DNA
gggagagcaactcggatgacgaggaggaggaggaggagtgggagatgcggtccgagaggaccgctttcccgccgttcgcg

SEQ ID NO: 179667 - DNA, 80 bp, synthetic construct
  source 1..80: mol_type = other DNA
gcactgcagctatcccaacccaccaggccagctctcccacctgctgaacagagtgttccaaacaccacacaatcctctcc

SEQ ID NO: 179668 - DNA, 80 bp, synthetic construct
  source 1..80: mol_type = other DNA
attgtagtacacccaagtttccagattaaccaaggcaaactaaatcttgttgctgcactcaaaccttgtgacactggtaa

SEQ ID NO: 179669 - DNA, 80 bp, synthetic construct
  source 1..80: mol_type = other DNA
cttccgagagaaacaacggtctctttattattgtttcgaatggatccccaggagctgaaccggtagacctcaccgttcgt

SEQ ID NO: 179670 - DNA, 80 bp, synthetic construct
  source 1..80: mol_type = other DNA
tcgcgaacaaatagcgtgggacgccacgcaccggtagtgtgtaccaagggaggcgtgctcacggcccgcaaacctccgtg

SEQ ID NO: 179671 - DNA, 80 bp, synthetic construct
  source 1..80: mol_type = other DNA
caacgctacacacatccgtcatctcacaaacgtcagctaatggcaacatcactaacgttacatcaggcctgagcaccatc

SEQ ID NO: 179672 - DNA, 80 bp, synthetic construct
  source 1..80: mol_type = other DNA
ccaccgagagctgtagagtacaccgggccatcggttgactacaaacaaaacaacactgtgatggagcaggtcgcaactat

SEQ ID NO: 179673 - DNA, 80 bp, synthetic construct
  source 1..80: mol_type = other DNA
acatggagggcagatttgaattttcccacgcaaggccatggtactttgacaaggctcttcacatattactctggtgaatt

SEQ ID NO: 179674 - DNA, 80 bp, synthetic construct
  source 1..80: mol_type = other DNA
acctcttcgttttctgcaccgaacgcgactaccgcaagttccaccagggcatcgcacagctcaagcgcgcgccggccgaa

SEQ ID NO: 179675 - DNA, 80 bp, synthetic construct
  source 1..80: mol_type = other DNA
cacgtgattggcagtaattcagacagaaacaatcaccaaccagatgagagtgctttcttcaattgtaatgggaccttgtt

SEQ ID NO: 179676 - DNA, 80 bp, synthetic construct
  source 1..80: mol_type = other DNA
gcacagaacacgcaagccagcacacaccaaattggaacaggagaagtcccagcattgcaagccgctgaaaccggcgctac

SEQ ID NO: 179677 - DNA, 80 bp, synthetic construct
  source 1..80: mol_type = other DNA
agaattagaatactaccacctaaaatgtttgatgataaatggtatgcacagtcagatctatgcaaggtgccccttgtcag

SEQ ID NO: 179678 - DNA, 80 bp, synthetic construct
  source 1..80: mol_type = other DNA
tctcatgtgtgtgcttggtcagcatatctgagacgatgttccgctgtcccagaccagtccagtaatggacgggccagtgc

SEQ ID NO: 179679 - DNA, 80 bp, synthetic construct
  source 1..80: mol_type = other DNA
aaacaacatccagttaccagcattcctattttgtttttctttcattctgagttatctaataagtagttagaatgggagct

SEQ ID NO: 179680 - DNA, 80 bp, synthetic construct
  source 1..80: mol_type = other DNA
ataaacaatgttgcccactgatctgtggaaaggcactcatcctgcagaacaagagaacaaaagctagttactccattaac

SEQ ID NO: 179681 - DNA, 80 bp, synthetic construct
  source 1..80: mol_type = other DNA
acaagtactgttcctagaaaagatagagcctgctcaggaagaacatgaaaaatatcataccaatgtaaaagagctatgcc

SEQ ID NO: 179682 - DNA, 80 bp, synthetic construct
  source 1..80: mol_type = other DNA
acttcaaaaagtgctgtccactagtgtgtggtaaagctttacaactgatggacaagcacaccagacagagatttacacta

SEQ ID NO: 179683 - DNA, 80 bp, synthetic construct
  source 1..80: mol_type = other DNA
gatgaggttggaaattacctcatacctctaaatgttaataaacagaatgaacagatatttggaacaaatcttttcattgg

SEQ ID NO: 179684 - DNA, 80 bp, synthetic construct
  source 1..80: mol_type = other DNA
acatgcttggggaagcctttggtagtgggtttgtagacagtgttaaggatcaaattaatgcaataaatcctataaacaat

SEQ ID NO: 179685 - DNA, 80 bp, synthetic construct
  source 1..80: mol_type = other DNA
gtcaaatggagaatgaccaccctggccgctggttggcctatgggttaccaggcatacagtagctggatgtacagctacac

SEQ ID NO: 179686 - DNA, 80 bp, synthetic construct
  source 1..80: mol_type = other DNA
cactccgagcgcagcgaggagtgcgaccctcccccccggtagcaacttcttcggagtccggcgctacgccttcggctgcg

SEQ ID NO: 179687 - DNA, 80 bp, synthetic construct
  source 1..80: mol_type = other DNA
gcatttccaggcacaagacaacattccgtgaatgctctcaacacatttagaacagaagggtgcatgtctcatccgaaaat

SEQ ID NO: 179688 - DNA, 80 bp, synthetic construct
  source 1..80: mol_type = other DNA
ctcagggggaggaggtggcgatacagacgcaaaaaactggtactaacacagtggaaccccgctgtggtaaaaaaatgcgt

SEQ ID NO: 179689 - DNA, 80 bp, synthetic construct
  source 1..80: mol_type = other DNA
accaggtctcccaaaacgcccaaagctcgacactcgcccagcaggcctaccagacgaccaaagaggcgcctacaatttac

SEQ ID NO: 179690 - DNA, 80 bp, synthetic construct
  source 1..80: mol_type = other DNA
gcagacggtggagaccccgcagacgtaggagacgacgccctgctcgccgctttcgacctcgtcgaagagtaaggaggcac

SEQ ID NO: 179691 - DNA, 80 bp, synthetic construct
  source 1..80: mol_type = other DNA
tcctacaggcagtgccattgaaaatgaaacagctacctcacctaaaaacacatggaatcctacaacaacacaatggacaa

SEQ ID NO: 179692 - DNA, 80 bp, synthetic construct
  source 1..80: mol_type = other DNA
ggatgtattcatatttcaacacttgagatagattatacaaactataatggagaaggcaaaaacttcactcagtggccaat

SEQ ID NO: 179693 - DNA, 80 bp, synthetic construct
  source 1..80: mol_type = other DNA
caaagaaaaaaccacctgctatgagtgactggatcccacctgcccaaaatgttgccgatagagagagcgattggttccga

SEQ ID NO: 179694 - DNA, 80 bp, synthetic construct
  source 1..80: mol_type = other DNA
ctagattgtctcattacgactatgaacaattcagagttttcaatagtctcatgaggaaccctaatgttagtgcatatatc

SEQ ID NO: 179695 - DNA, 80 bp, synthetic construct
  source 1..80: mol_type = other DNA
gctttaagcttggatggaaataaagcagctttaaattgcaaggccgtgggagtttcacttgtcggtgtctacctctataa

SEQ ID NO: 179696 - DNA, 80 bp, synthetic construct
  source 1..80: mol_type = other DNA
acgtgcgtgtctttgcccccgatgtcggctgtcctgcaggccagctccgcgtacagcttcctatccttcctcagggaggc

SEQ ID NO: 179697 - DNA, 80 bp, synthetic construct
  source 1..80: mol_type = other DNA
cctatacattattgtgctcctgctggtaatgccattggaaagtgtactagcaatacagtcaatggaatacgacgaagcaa

SEQ ID NO: 179698 - DNA, 80 bp, synthetic construct
  source 1..80: mol_type = other DNA
attttgattaaccatgccccactcggattggtttgggatatagtgtggcatgggtaaattttcttttaattcggaggaaa

SEQ ID NO: 179699 - DNA, 80 bp, synthetic construct
  source 1..80: mol_type = other DNA
ccgcaccccagtccacagccaccggccaaggtcctgggcctcccaccaccgttatgcctccccctttacccattaattac

SEQ ID NO: 179700 - DNA, 80 bp, synthetic construct
  source 1..80: mol_type = other DNA
gaggcagctttgcagggtggagatgatgacactcacagtacacaagatccaactgtgaagaacacacgaaagagtgggcc

SEQ ID NO: 179701 - DNA, 80 bp, synthetic construct
  source 1..80: mol_type = other DNA
tatccgttagcataaagccccccaacctatttcagcacaagtggtacactcagactgacctctgttccgttagtctggtg

SEQ ID NO: 179702 - DNA, 80 bp, synthetic construct
  source 1..80: mol_type = other DNA
gccttcggttacacgcatgactacaccacttggatttcttatttgacgactggtggcttttccacccctttcggtttcaa

SEQ ID NO: 179703 - DNA, 80 bp, synthetic construct
  source 1..80: mol_type = other DNA
ctaccccaaatgtaacttagaagcaagcacaaacgtccaataggcggtgattatccaaatcacttacggacaagcacttc

SEQ ID NO: 179704 - DNA, 80 bp, synthetic construct
  source 1..80: mol_type = other DNA
ctcactgtctacagtgtcctttaaccttaaagtactatttgacgaaaaccaaagaggactgaacaaatggagctactcaa

SEQ ID NO: 179705 - DNA, 80 bp, synthetic construct
  source 1..80: mol_type = other DNA
caactgaagttaaaattagagtctatcatagagcaaaacatgtccgtgcttggattccaagaccacccagagcccttcca

SEQ ID NO: 179706 - DNA, 80 bp, synthetic construct
  source 1..80: mol_type = other DNA
taccataaagctaaacatgtgaaagcatggtgccccagaccacccagagctgttccatacaggtatgttggatcaacaaa

SEQ ID NO: 179707 - DNA, 80 bp, synthetic construct
  source 1..80: mol_type = other DNA
acaacatatatacaaatgagatacttacagcattccaagacaacgcacaaaacatgtacaaggcaagaaaacaccaaaca

SEQ ID NO: 179708 - DNA, 80 bp, synthetic construct
  source 1..80: mol_type = other DNA
tataaagaaaaaggataaaaacaaatggagaatgctaatagacttcagggaattaaataaggtaacccaagaatttacag

SEQ ID NO: 179709 - DNA, 80 bp, synthetic construct
  source 1..80: mol_type = other DNA
attggctgaaagggaaactagtccctgctgtccagaggaaaagagaaaccctagatagatgcaagaaaatatccctctta

SEQ ID NO: 179710 - DNA, 80 bp, synthetic construct
  source 1..80: mol_type = other DNA
gctaaggatgggcttctttcctaatgccacagcagattcaacatccaccttagacaaggctatatacacaatatgtgata

SEQ ID NO: 179711 - DNA, 80 bp, synthetic construct
  source 1..80: mol_type = other DNA
actgttaaactactattagcatatacaccacctggcattgacgagcctagaacacgaaaggatgcaatgttaggtactca

SEQ ID NO: 179712 - DNA, 80 bp, synthetic construct
  source 1..80: mol_type = other DNA
tgccgcatcgataccagcggttacgcaccgaggactgaacggataaccgcaaaggccacgtgcaacgttcacgctgctat

SEQ ID NO: 179713 - DNA, 80 bp, synthetic construct
  source 1..80: mol_type = other DNA
ggaccagcattatcgagcgctaagctcctaatagcatacaccccacccggtgcacagggaccaactaccagaaaagaagc

SEQ ID NO: 179714 - DNA, 80 bp, synthetic construct
  source 1..80: mol_type = other DNA
gctgcgtaacgtcattgtccaccgacacgcgcacggtgcgggtgaaagtggggcaggtcatgaatgaggcgctgaggtcc

SEQ ID NO: 179715 - DNA, 80 bp, synthetic construct
  source 1..80: mol_type = other DNA
tttgtcaaggaggcggccctacattatgccaaccaactcaagcagttagatatcaagaccaccaagatgagcatggagga

SEQ ID NO: 179716 - DNA, 80 bp, synthetic construct
  source 1..80: mol_type = other DNA
cagctatggccacgggaaaattccttctcgcgtatgcaccaccgggagcgaacgccccgaagagtaggaaagatgcaatg

SEQ ID NO: 179717 - DNA, 80 bp, synthetic construct
  source 1..80: mol_type = other DNA
cgcaaatgttagtaacaccctctattgtacttgggatttcgttccgcagataccccatctgtagattagggcgatgaggc

SEQ ID NO: 179718 - DNA, 80 bp, synthetic construct
  source 1..80: mol_type = other DNA
tcggccgacgacgacggtaggtgggccgggtggacggtggtgaggacgggcgacgccccggctcgacggcagtcggtccc

SEQ ID NO: 179719 - DNA, 80 bp, synthetic construct
  source 1..80: mol_type = other DNA
taattgacaaggtcatcagcaatgcactacagttgtcacagcccactagatcagttaacgaagcggcatcaacgccagca

SEQ ID NO: 179720 - DNA, 80 bp, synthetic construct
  source 1..80: mol_type = other DNA
attgtaattgcacttctggggtgtactattccagatattataataagtactatcccataatttgtgagaaacccacatgc

SEQ ID NO: 179721 - DNA, 80 bp, synthetic construct
  source 1..80: mol_type = other DNA
ttacggttcagtttccatcaatgactttggaactttggcagttagggtggttaatgagttcaatccagctcgtatcacag

SEQ ID NO: 179722 - DNA, 80 bp, synthetic construct
  source 1..80: mol_type = other DNA
tggatttactccattaacaaccttttctccagaagtaattcgcatcaccttactgttgagaagcatatatcacaatgggt

SEQ ID NO: 179723 - DNA, 80 bp, synthetic construct
  source 1..80: mol_type = other DNA
gacgtcctggtgctccacaacctccggtacctcccagaggaccccaaataagacccctcccggcactgccggcgcctgaa

SEQ ID NO: 179724 - DNA, 80 bp, synthetic construct
  source 1..80: mol_type = other DNA
ttatttggaacagcaatggctggacaaattcatataaacaacatataataaattgactgtgtaggttcaatatattataa

SEQ ID NO: 179725 - DNA, 80 bp, synthetic construct
  source 1..80: mol_type = other DNA
ccgaggtggactcggtcgttcctgtacacaatactgagggacatgtaaactcaatggaggcttacagtataccagtaagg

SEQ ID NO: 179726 - DNA, 80 bp, synthetic construct
  source 1..80: mol_type = other DNA
agccctctaactatggaacaagcagtttatggtattgaaaatctagagcccctggacttgaccaccagtgcagggtttcc

SEQ ID NO: 179727 - DNA, 80 bp, synthetic construct
  source 1..80: mol_type = other DNA
tagacaagatcacacacaccccgtctgctcgaacaacgggagcctttggacaacaatcgggagccatttacgttggcaat

SEQ ID NO: 179728 - DNA, 80 bp, synthetic construct
  source 1..80: mol_type = other DNA
gccatcatcgttcgctcggtgagcgggtagcgacggtgacgacaatgacgatggacgagcagcagtcgcaggctgtggcg

SEQ ID NO: 179729 - DNA, 80 bp, synthetic construct
  source 1..80: mol_type = other DNA
acccatttgaagatgaaagtccttatagtcctcaattacgtaaacagaacttgatgaaattggcttatctggataggggt

SEQ ID NO: 179730 - DNA, 80 bp, synthetic construct
  source 1..80: mol_type = other DNA
cgcggcacgcacctgcgactccactgtggtggtacgcgacgtgacggtcccgcgtctcctgcgcctcacttcgcacgggc

SEQ ID NO: 179731 - DNA, 80 bp, synthetic construct
  source 1..80: mol_type = other DNA
ctttatgaactcaatagtcagctgtggaccatttgcatatcagggagacgagaaatctgtagtactaactgcaaaatata

SEQ ID NO: 179732 - DNA, 80 bp, synthetic construct
  source 1..80: mol_type = other DNA
aggaacttcttctctttctatcgctgtctcccccttacctctaccgctcccatcattgacattccaatcaacacacccta

SEQ ID NO: 179733 - DNA, 80 bp, synthetic construct
  source 1..80: mol_type = other DNA
agtagcaccacaaactaatcaaaaagacagtgcagatagccaagacggagaccctatatatcaaaaagatcaaatactaa

SEQ ID NO: 179734 - DNA, 80 bp, synthetic construct
  source 1..80: mol_type = other DNA
cacccgggggcccaatccccgagagcgttgacagcttcgcatggcagacatcaaccaaccccagtgtgttttggacagaa

SEQ ID NO: 179735 - DNA, 80 bp, synthetic construct
  source 1..80: mol_type = other DNA
ctagaagccttagcacagtcgggcccctttgcatatcactcagatattaaaaaagtgtcactgggcttaaaatacagatt

SEQ ID NO: 179736 - DNA, 80 bp, synthetic construct
  source 1..80: mol_type = other DNA
acgatggccaacttgacgttcaagcagcgtcggaacgcgaatccaggcgggccaccggccaagaaacgcaagccggctaa

SEQ ID NO: 179737 - DNA, 80 bp, synthetic construct
  source 1..80: mol_type = other DNA
acactgcaaaatgtgtggatatagtgatagggtaagagccatcacactaggcaattccacaattaccacccaggagtgtg

SEQ ID NO: 179738 - DNA, 80 bp, synthetic construct
  source 1..80: mol_type = other DNA
tgcctttctgctcaattggctgcaccacggcctggatctgcggcgcatgcacgactacctgagccacaagaccaccaaag

SEQ ID NO: 179739 - DNA, 80 bp, synthetic construct
  source 1..80: mol_type = other DNA
agatcatatttttcagagatacaagggaaaatagttacttcaaaacctactagtgaatgtggactgcctagtatccatac

SEQ ID NO: 179740 - DNA, 80 bp, synthetic construct
  source 1..80: mol_type = other DNA
agttagaaatcacagctatattattagatagaaatgagaaattcagagatatacgcaagtatataccagagaaggaggat

SEQ ID NO: 179741 - DNA, 80 bp, synthetic construct
  source 1..80: mol_type = other DNA
ccagattagcacggacagcccaccaccaacgacggctctccacctcggtgagcgcacagaagggccaaatgcggtgtaac

SEQ ID NO: 179742 - DNA, 80 bp, synthetic construct
  source 1..80: mol_type = other DNA
gactttggcttattagcagtgcgcgtggttaatgaacacaacccagtgcgcgtgtcttccaaaattagagtttacatgaa

SEQ ID NO: 179743 - DNA, 80 bp, synthetic construct
  source 1..80: mol_type = other DNA
taattatatgcggagagcccagggcagcctttaactatggctaccacatggaggactacactcctcaacctttccccttc

SEQ ID NO: 179744 - DNA, 80 bp, synthetic construct
  source 1..80: mol_type = other DNA
ttacagattacatacataatcttggtgaagcatttggggctgggtttatagataacatcaaagagcaaatacaggtgatc

SEQ ID NO: 179745 - DNA, 80 bp, synthetic construct
  source 1..80: mol_type = other DNA
atgggtgcccaagtgagcagacagagtgttggatctcacgaaaatgcaataaacgcaggtagtggttcaattgtaaagta

SEQ ID NO: 179746 - DNA, 80 bp, synthetic construct
  source 1..80: mol_type = other DNA
taaatgaggtcttagttgttccaaatataaaagaaagtaaaccccagtctagtaactctgctccagttttggatgctgca

SEQ ID NO: 179747 - DNA, 80 bp, synthetic construct
  source 1..80: mol_type = other DNA
ctcagaacgggggcggaaatacacccggccctcgcataattcctgggccccagaacccgtacctgcttttcccggagcag

SEQ ID NO: 179748 - DNA, 80 bp, synthetic construct
  source 1..80: mol_type = other DNA
agaaacttggaacagatttataacacacaccgaacatgtggacctggattttaactcagtatttttagagatatttcacc

SEQ ID NO: 179749 - DNA, 80 bp, synthetic construct
  source 1..80: mol_type = other DNA
tggatttactccactcactcagtttacccctagcataataatagcagtactactgataaggaattattgccaccatggga

SEQ ID NO: 179750 - DNA, 80 bp, synthetic construct
  source 1..80: mol_type = other DNA
tgatgagcccgccacgtcagagccggttcttgatcagctactgcccgccccaggacttggacctcttgcaattcaaccat

SEQ ID NO: 179751 - DNA, 80 bp, synthetic construct
  source 1..80: mol_type = other DNA
aggcggcaatgaaccacattgtcaacggtcaagcacttctgtctccccggtcaatctggatatgctttaccaaaggcaaa

SEQ ID NO: 179752 - DNA, 80 bp, synthetic construct
  source 1..80: mol_type = other DNA
gcgctgaaactgtcacagcccaagcccaatactcagcaaagtttgcctaacacaagtagttcagagccgacccactccca

SEQ ID NO: 179753 - DNA, 80 bp, synthetic construct
  source 1..80: mol_type = other DNA
gtatggagcctggtaggaatcagctgcttgctgtcattttattaacaagtgcttgcttaatatattgcaaacaatatgtg

SEQ ID NO: 179754 - DNA, 80 bp, synthetic construct
  source 1..80: mol_type = other DNA
ggcaattcgggctcgggactggccgggctatgggcaaggctcttagggttctcattcttaatatgtttctcggcagggta

SEQ ID NO: 179755 - DNA, 80 bp, synthetic construct
  source 1..80: mol_type = other DNA
gacctctaacaccaccccagaggaggcaattcagactagggcggtgatcaaccaacacggcaccagtgaaaccttagtgg

SEQ ID NO: 179756 - DNA, 80 bp, synthetic construct
  source 1..80: mol_type = other DNA
cactactgaccaaaaactaaaagactttttaaatgaagcctttaaaacatctacagaagggacaacatacagagccttta

SEQ ID NO: 179757 - DNA, 80 bp, synthetic construct
  source 1..80: mol_type = other DNA
gttacgcgagatggctcttaaagcgtttatggaagcgaacggtaatcaccccgaacaaatctgccgatccccaccacccc

SEQ ID NO: 179758 - DNA, 80 bp, synthetic construct
  source 1..80: mol_type = other DNA
ggcggcgcgcgtcttccccgtcgtcgctgccgcgggtggttgagggcatgccccccctcccggaggctggactcctgacc

SEQ ID NO: 179759 - DNA, 80 bp, synthetic construct
  source 1..80: mol_type = other DNA
cctatcttgataggggtttttacaagcattatggtattattgtaggtgatcaggtttaccaattagattcagatgacata

SEQ ID NO: 179760 - DNA, 80 bp, synthetic construct
  source 1..80: mol_type = other DNA
gattcggtgtccaaagggctcgtttggccaggtccacggccgtgggatacagtagcaacgtggtgcgtggtggtgtttgt

SEQ ID NO: 179761 - DNA, 80 bp, synthetic construct
  source 1..80: mol_type = other DNA
aataacgtcactaaccacgtgattccgctccgccaatcaggtactggtacgtgcatttcctgggctgggcttaccgctgc

SEQ ID NO: 179762 - DNA, 80 bp, synthetic construct
  source 1..80: mol_type = other DNA
tgaggctagaaaacccccactggcgacagtgttctagcctgcgtggctgcctgcgtgccttgcaaggcacgaagccctgt

SEQ ID NO: 179763 - DNA, 80 bp, synthetic construct
  source 1..80: mol_type = other DNA
tgccgtatagaggagagggggtagacttaaaacaaggggcaattacaccattaacaccagttgccagcataacaacatat

SEQ ID NO: 179764 - DNA, 80 bp, synthetic construct
  source 1..80: mol_type = other DNA
tactgaggatcgggtggtatggaagaccctggccggggacccgtggatcaagacacttacagccaagtacgcgggcaact

SEQ ID NO: 179765 - DNA, 80 bp, synthetic construct
  source 1..80: mol_type = other DNA
agtgcaagaagattccattatacagggaacaggtgaaagcatttgctacagcatcagaagatgcacaagatgagctgatg

SEQ ID NO: 179766 - DNA, 80 bp, synthetic construct
  source 1..80: mol_type = other DNA
ggtcctcacacgtgccctcccccccccgggccgatggctgaggcccggaatatgcaagtgcatctttctaaccagtaggg

SEQ ID NO: 179767 - DNA, 80 bp, synthetic construct
  source 1..80: mol_type = other DNA
aagacatttctaaacttaaactagcattagacaaatatggtgttgatttgcccatgattactttcttaaaagatgaactc

SEQ ID NO: 179768 - DNA, 80 bp, synthetic construct
  source 1..80: mol_type = other DNA
cattaactcatggtaaacagtccagtgatgtctctatattttccattagtctcagccccggttcggacgctcgcctctcc

SEQ ID NO: 179769 - DNA, 80 bp, synthetic construct
  source 1..80: mol_type = other DNA
cgggaccgggggctttagcggcgagaccgaggacggggcgttgcgaagacggggggcgcgcgggaccgaggggctttagc

SEQ ID NO: 179770 - DNA, 80 bp, synthetic construct
  source 1..80: mol_type = other DNA
catgcgactttatttttaaatacaatagaaaaccaccatttacagaaacacaaataacaggggcaacattacatccagga

SEQ ID NO: 179771 - DNA, 80 bp, synthetic construct
  source 1..80: mol_type = other DNA
tctcacatggctgtggggtagtaaggcatacgatgccaactactaccgccttggctcccctgctgtcttccctcccactc

SEQ ID NO: 179772 - DNA, 80 bp, synthetic construct
  source 1..80: mol_type = other DNA
tatccctcccctaaaatagcaacttagaagctgaacatttacacgaccaatagtgggcgtggcgcaccagccacgtcatg

SEQ ID NO: 179773 - DNA, 80 bp, synthetic construct
  source 1..80: mol_type = other DNA
aacaccttagtattagctccactatggatgctactaacaaaactcattataataacaacctatttaacaaaactgaacta

SEQ ID NO: 179774 - DNA, 80 bp, synthetic construct
  source 1..80: mol_type = other DNA
agcaacatttggaaaaaattatggacttgtgattaccccaccagataaatcagaaaagttcacaaaaatgacatgggata

SEQ ID NO: 179775 - DNA, 80 bp, synthetic construct
  source 1..80: mol_type = other DNA
gcggcggtgtcctcagcgcgtttgcggcgtgcggaggtttttgggccgtgagcgcggcggcgctggtaacgggagttacg

SEQ ID NO: 179776 - DNA, 80 bp, synthetic construct
  source 1..80: mol_type = other DNA
ggctacggtggtgaactgcgtcgcggatcccgtcacgggtttcaacagatcgacgtcggtcagcggcgccgtcaccgcca

SEQ ID NO: 179777 - DNA, 80 bp, synthetic construct
  source 1..80: mol_type = other DNA
gcactctcatagtagctatgataccagaacatcaattggccagtgctgaaaaaggtaatgtcacggctggttacaagcta

SEQ ID NO: 179778 - DNA, 80 bp, synthetic construct
  source 1..80: mol_type = other DNA
actaataatgatttgattagaatcgaacccattggcatttggatccagggtgaaccagggcaaggtaagtcttttttaac

SEQ ID NO: 179779 - DNA, 80 bp, synthetic construct
  source 1..80: mol_type = other DNA
cactcacagggcccactgggcgccagcacactggtatcaaggtacctttgtgcgcctgttttacccaccctcccccaaag

SEQ ID NO: 179780 - DNA, 80 bp, synthetic construct
  source 1..80: mol_type = other DNA
catcaatgcccattaaccgaaatccaacaacgttatggactggcagtttacggttaagtggacgttactgatcatcacgt

SEQ ID NO: 179781 - DNA, 80 bp, synthetic construct
  source 1..80: mol_type = other DNA
ggactacaaaaatggcgcatttagtgacgtcacgtcggccattttaagtaaggcggaagcagccccactttcttacaaaa

SEQ ID NO: 179782 - DNA, 80 bp, synthetic construct
  source 1..80: mol_type = other DNA
ccgcccagacacatcttccaataggttttatactttaaagagtgtgacttggtctaactcttcaaaagggctggtggtgg

SEQ ID NO: 179783 - DNA, 80 bp, synthetic construct
  source 1..80: mol_type = other DNA
ttgcacgcatctatttcaaaccaaaacacgtgcgtgcctgggtgcctaggccaccgcgcttgtgtccatatattaacagc

SEQ ID NO: 179784 - DNA, 80 bp, synthetic construct
  source 1..80: mol_type = other DNA
agtacaatgaattcctagagaaaattaggacaactagtgttggaaggaatttggttctaccaccttacagttatctagaa

SEQ ID NO: 179785 - DNA, 80 bp, synthetic construct
  source 1..80: mol_type = other DNA
cttgagattacatttgttattaccagctcccagcgcacttcaaccacatacgcatcggattcccctccactaacgcacca

SEQ ID NO: 179786 - DNA, 80 bp, synthetic construct
  source 1..80: mol_type = other DNA
ccttattagctccaccaaccatcacctccctctctgcaatgaataggagattctatttagatttagatattacagttcat

SEQ ID NO: 179787 - DNA, 80 bp, synthetic construct
  source 1..80: mol_type = other DNA
taacaacaaccccgatggcagttcaattagtacaactataggcacaatgcccccaatgacagagtacaataattgggtct

SEQ ID NO: 179788 - DNA, 80 bp, synthetic construct
  source 1..80: mol_type = other DNA
attggcagacacctttacccagcccttcacacaccacacaggtagcaaggacccgggcgttgccagactccgccaccaac

SEQ ID NO: 179789 - DNA, 80 bp, synthetic construct
  source 1..80: mol_type = other DNA
cagacagcccaggccgaactcggccgtgagcgccaggctagccagatcgctcatgtgacgcgccgagtcggtgggcgagc

SEQ ID NO: 179790 - DNA, 80 bp, synthetic construct
  source 1..80: mol_type = other DNA
gaagttgaaaatttcaatgcaacaaccattgcagacaagaagaaacagtttaccacttggcctattacctacactaacac

SEQ ID NO: 179791 - DNA, 80 bp, synthetic construct
  source 1..80: mol_type = other DNA
aacaaacagaacccccagcaggggtacgtgttctatgactcacagtggggcaacggcaagtggatagacggcagcgggtt

SEQ ID NO: 179792 - DNA, 80 bp, synthetic construct
  source 1..80: mol_type = other DNA
caacagacctccaagagcaagaaagaggctcagatttcacagtgcaggagctcaggatcctctcggagagggcgccgtcg

SEQ ID NO: 179793 - DNA, 80 bp, synthetic construct
  source 1..80: mol_type = other DNA
cgaatgtggtagtggggtatggaaggtggccagattatctatccgatgatcaagccacggcagaagaccaaccaacgcaa

SEQ ID NO: 179794 - DNA, 80 bp, synthetic construct
  source 1..80: mol_type = other DNA
cctatggattctatggtgagacacaataattggagtattatcattattcccatttcccctttggcagcagaggtgacaga

SEQ ID NO: 179795 - DNA, 80 bp, synthetic construct
  source 1..80: mol_type = other DNA
caaccgcacccacaagcacaagtgcagggagcacagccacacccaaacccataatggtaaatgagaacacttcatgcatg

SEQ ID NO: 179796 - DNA, 80 bp, synthetic construct
  source 1..80: mol_type = other DNA
cgataatgcatgggattcagcatcaaacccaagcgtgttctaccagcccaagagtggtttccctcgcttcaccatacctt

SEQ ID NO: 179797 - DNA, 80 bp, synthetic construct
  source 1..80: mol_type = other DNA
gctaactctaatgctgccaccctcaagctcccctacattggagtcactcccaacacctccactgaaggcttgcataacta

SEQ ID NO: 179798 - DNA, 80 bp, synthetic construct
  source 1..80: mol_type = other DNA
ctgactctcttaattgttcctcttgtcagacttagatttggcacggaggcctctcctacagtgtcaataactgttacaat

SEQ ID NO: 179799 - DNA, 80 bp, synthetic construct
  source 1..80: mol_type = other DNA
gaaagtccttatgtaccaactgataataggaaaatgcagttagcctatttagataggggtttttacaagcactatggtat

SEQ ID NO: 179800 - DNA, 80 bp, synthetic construct
  source 1..80: mol_type = other DNA
caatcaccaagtgcattgccatggtttcacccaaccaaagagatctctataccaggagaagtaaaaaacttggtagagat

SEQ ID NO: 179801 - DNA, 80 bp, synthetic construct
  source 1..80: mol_type = other DNA
tcttgcacaagaatgatggagacacagacctctacatggtttggcttcaatggtacaagagcagaaaataggacgtatat

SEQ ID NO: 179802 - DNA, 80 bp, synthetic construct
  source 1..80: mol_type = other DNA
caggtgaatagcctcgccctcggggccgtcgccccccgtgccatcgggcagcggacgtcgaatctcctcgagaatatgct

SEQ ID NO: 179803 - DNA, 80 bp, synthetic construct
  source 1..80: mol_type = other DNA
ggaactttactaaacagactccgaggtgccattggacactgaggtggcgtacagcaacgaaagtgagtggggccagactt

SEQ ID NO: 179804 - DNA, 80 bp, synthetic construct
  source 1..80: mol_type = other DNA
gtccgtgattagtcggctgtctcaggaggcggaaaggaaatcggataacggcacgcggaaaggtctcagcgagttggaca

SEQ ID NO: 179805 - DNA, 80 bp, synthetic construct
  source 1..80: mol_type = other DNA
caatacaaactttcaaacaggcaaatcgtccctgtttggctttaacacatacaaacctaacaaagataagttacttagaa

SEQ ID NO: 179806 - DNA, 80 bp, synthetic construct
  source 1..80: mol_type = other DNA
gtcctccagccctggctccactcctcccaagaggagcagacggagtcgcaaagcgagcaagaagaagcgacgatacaaga

SEQ ID NO: 179807 - DNA, 80 bp, synthetic construct
  source 1..80: mol_type = other DNA
agtgaaagatgttcttactaaaggaattcctacattacaatcacctacagttgaagcatgtggatactcagataggataa

SEQ ID NO: 179808 - DNA, 80 bp, synthetic construct
  source 1..80: mol_type = other DNA
gaggggaatcagacacctgttcggagacgtcctccgactcagaaaaggagtccacttcaacccagacctattataatacc

SEQ ID NO: 179809 - DNA, 80 bp, synthetic construct
  source 1..80: mol_type = other DNA
ctggacccccacgagatccagcaagtcacggccagtatccgctgccgcctgcagcccagtctccgcgagccgcccacgcc

SEQ ID NO: 179810 - DNA, 80 bp, synthetic construct
  source 1..80: mol_type = other DNA
gagccttggcctggcgggtgtcttgggcatcatccagattcagaacattcatcacactcccgcttagccgcttcagctgg

SEQ ID NO: 179811 - DNA, 80 bp, synthetic construct
  source 1..80: mol_type = other DNA
ttcccccgcggcccctggggacttcctcttttccgcgtcttttccgcgtctctggccgtcgtcccctgggaacttcctct

SEQ ID NO: 179812 - DNA, 80 bp, synthetic construct
  source 1..80: mol_type = other DNA
agccccccgtccacgccccgaagacactcttagcccggttcggcgaacaaagaccgtgggacgacacgcacagtcggcgg

SEQ ID NO: 179813 - DNA, 80 bp, synthetic construct
  source 1..80: mol_type = other DNA
cgaacacaaccaacataacctcatccacaagcgtgatagtaaatgattcctccccatgcgcgagcaataacagctgccca

SEQ ID NO: 179814 - DNA, 80 bp, synthetic construct
  source 1..80: mol_type = other DNA
gctgacaccaacagcacctccaatggatccagcaacggacctattggagaagtatatgcagcaaggaagaaagcagaggg

SEQ ID NO: 179815 - DNA, 80 bp, synthetic construct
  source 1..80: mol_type = other DNA
tgttcattcccccagggctcaagattccagagaatgatgaagatcgcctgtgggactctgcatccaaccctagtgtattc

SEQ ID NO: 179816 - DNA, 80 bp, synthetic construct
  source 1..80: mol_type = other DNA
ggagaccgcaacattcctgaagaggttcttcagagcggacgagcaatacccctttttggttcacccagtaatgcccatga

SEQ ID NO: 179817 - DNA, 80 bp, synthetic construct
  source 1..80: mol_type = other DNA
atacagggaaatttggtcagcaatctggagccatctatgtgggaaactttagagtggtaaaccgccatctcgccacccat

SEQ ID NO: 179818 - DNA, 80 bp, synthetic construct
  source 1..80: mol_type = other DNA
cagaaaacatgcaagtggcaattgaccattatgctggtcaacttttatccttagatattcccacagaagaacttaccctt

SEQ ID NO: 179819 - DNA, 80 bp, synthetic construct
  source 1..80: mol_type = other DNA
gtaatcattcttaaaatgttcctcggtaggccttacagacaaaagaaaaggaaagtgctactgcgaagcctgtcagctac

SEQ ID NO: 179820 - DNA, 80 bp, synthetic construct
  source 1..80: mol_type = other DNA
catacttaggaattgcttctgcttacaactgtttctatgatggatactctcatgataattctacaacaccatatggaatt

SEQ ID NO: 179821 - DNA, 80 bp, synthetic construct
  source 1..80: mol_type = other DNA
ggaacaggatgcatgcaaggtctgggacagaccaatgcgacagaacctttcagacactcctttctatccatgggtacccc

SEQ ID NO: 179822 - DNA, 80 bp, synthetic construct
  source 1..80: mol_type = other DNA
ttaaaactggaaacaatagtatttatggacaacctaactatagcccagacaacactatactaacaaaattaagagaatgg

SEQ ID NO: 179823 - DNA, 80 bp, synthetic construct
  source 1..80: mol_type = other DNA
ccacccacatctagtggacactctgtaccacgcctctccgcagaccccatttctgacacgcagcggtgctctataccgct

SEQ ID NO: 179824 - DNA, 80 bp, synthetic construct
  source 1..80: mol_type = other DNA
atacgcctgtgatgttctaacgggaagtgtgtaagcacacacgtaatttgcaagcggtgcttcacgctcttcgttaaaat

SEQ ID NO: 179825 - DNA, 80 bp, synthetic construct
  source 1..80: mol_type = other DNA
ggtcgaatatagacatacacatgtaaacaattatagaccagatgaaggagaagcagccatagcaatcccaaccagaactg

SEQ ID NO: 179826 - DNA, 80 bp, synthetic construct
  source 1..80: mol_type = other DNA
acacatccagacatatcctcaaataggttttacacactagaaagtaaagaatggactggagaatctaagggctggtggtg

SEQ ID NO: 179827 - DNA, 80 bp, synthetic construct
  source 1..80: mol_type = other DNA
ctggcagaccgaattcgaggcctgcaaaacctggaatagaccacctagaaagtaccttacagacacccccttctacccct

SEQ ID NO: 179828 - DNA, 80 bp, synthetic construct
  source 1..80: mol_type = other DNA
caaaacacacagttgagcagccatcgactagacaccggtgaagttccagcgctccaagctgctgagatcggggcatcatc

SEQ ID NO: 179829 - DNA, 80 bp, synthetic construct
  source 1..80: mol_type = other DNA
gcatgggttccacgaccaccacggttgtgtccatacctgaacaagagggaagtaaactttgaggtacagcccgtaacaaa

SEQ ID NO: 179830 - DNA, 80 bp, synthetic construct
  source 1..80: mol_type = other DNA
atccaccctgtctactctatggatgatgtacatgaatccatcagatggacccgcgatcctaagaacactcaggatcacgt

SEQ ID NO: 179831 - DNA, 80 bp, synthetic construct
  source 1..80: mol_type = other DNA
cacgattgtgtccatacatcaagtctagcaatgtaaattttgacccgaccaacctgactgattcaagagcgagcatcaca

SEQ ID NO: 179832 - DNA, 80 bp, synthetic construct
  source 1..80: mol_type = other DNA
aatctttgtctgggtgctctccgctacccaggccacaaattgtacccatctgtctacaccttgttcccagatgtttcccc

SEQ ID NO: 179833 - DNA, 80 bp, synthetic construct
  source 1..80: mol_type = other DNA
tcattatacaaacatcaattattacaaggatgcagcatcgaactctgctaatagacaagatttccagcaggaccccggta

SEQ ID NO: 179834 - DNA, 80 bp, synthetic construct
  source 1..80: mol_type = other DNA
acttctagacaaagccatgggcaaccacatatggttccaatacaacactaaagcagacacccagctagtcacaggagggt

SEQ ID NO: 179835 - DNA, 80 bp, synthetic construct
  source 1..80: mol_type = other DNA
agaagaacttttcgccgccgccgacgaagacgatatgtgagtagatggcggcgccgccgatacaggcgcagacgaaggac

SEQ ID NO: 179836 - DNA, 80 bp, synthetic construct
  source 1..80: mol_type = other DNA
atatggccgaccaacttataatgcagtagaatatcatttaggaaagtacagtcctatatttttaagtccatacagaacta

SEQ ID NO: 179837 - DNA, 80 bp, synthetic construct
  source 1..80: mol_type = other DNA
gataatggattcttaagggtagcccatacatatgacacagaaaataaaagacaagagttcttatcctctaatggagttat

SEQ ID NO: 179838 - DNA, 80 bp, synthetic construct
  source 1..80: mol_type = other DNA
agtactgactcagtggaacccccagactgtcagaaaatgctatatcaggggtctaatgccagttatctgggccggtatgg

SEQ ID NO: 179839 - DNA, 80 bp, synthetic construct
  source 1..80: mol_type = other DNA
gcatatactcatccagctttttaacctacaacagaataagtccagaggtgccaggcttgtacacagacataatttacaac

SEQ ID NO: 179840 - DNA, 80 bp, synthetic construct
  source 1..80: mol_type = other DNA
tatactccctatgccttctcatgtggcacaacggggaagaaacctatagacactttgttgacaagatcagaacaactgag

SEQ ID NO: 179841 - DNA, 80 bp, synthetic construct
  source 1..80: mol_type = other DNA
taaaatgggagcgcaggtctcaacccaaaagactggtgcacacgagactcttcttgaggcggcccagggtgctactataa

SEQ ID NO: 179842 - DNA, 80 bp, synthetic construct
  source 1..80: mol_type = other DNA
gaagattaccaggaaaggcagaaaaactatgactgctggaagcagcagctggagaatcagactctggatgatttggacga

SEQ ID NO: 179843 - DNA, 80 bp, synthetic construct
  source 1..80: mol_type = other DNA
tctagagaagtattttctcatgttccctccctcaggcaccattatgagaaatgtcagattcgccacccccatcgtccggc

SEQ ID NO: 179844 - DNA, 80 bp, synthetic construct
  source 1..80: mol_type = other DNA
agagcggttgactacacccataagtactcaccaaattatcatacacaaactagagaaaacaatggtacacttgaggagaa

SEQ ID NO: 179845 - DNA, 80 bp, synthetic construct
  source 1..80: mol_type = other DNA
tcaggtaattcaggcatttataagaaaaaaacagacagtaactatggataccactctttccaagttaaaggcaaaaaaaa

SEQ ID NO: 179846 - DNA, 80 bp, synthetic construct
  source 1..80: mol_type = other DNA
gttttagctcaactaaatccaaactttcgccctgcaaataaaagtaaccaaactttaggtgacacagttactgatttaaa

SEQ ID NO: 179847 - DNA, 80 bp, synthetic construct
  source 1..80: mol_type = other DNA
gctagtagaccacagcaatgacaaccaaggctttgtaccttactcttttaactttggaaacggcaaaatgccaggagggt

SEQ ID NO: 179848 - DNA, 80 bp, synthetic construct
  source 1..80: mol_type = other DNA
atggtggtggaaattaccggatgcacttaaggatatgggtatttttggagagaatatgttttatcactatctaggaagga

SEQ ID NO: 179849 - DNA, 80 bp, synthetic construct
  source 1..80: mol_type = other DNA
aatacagaatggctcctgactagggtaatcaactacctgtcggacttcctcgagtggcttggtgtcaaggtcaagtcgga

SEQ ID NO: 179850 - DNA, 80 bp, synthetic construct
  source 1..80: mol_type = other DNA
agggttggttggtaaatatctcgagccaggttcagttagagcggaacatcaatagagctatgaccatccttcaagctgtt

SEQ ID NO: 179851 - DNA, 80 bp, synthetic construct
  source 1..80: mol_type = other DNA
gaattcatgtggggggcaatggtagggatggattttcagctatgctacttagatcatattttagtgaaacccaagggcaa

SEQ ID NO: 179852 - DNA, 80 bp, synthetic construct
  source 1..80: mol_type = other DNA
atgtgcttacacaccacgcacctagattaaggtgcgcgcgctagcgcgcgcaccttaatctaggtgcgtggtgtgtaagc

SEQ ID NO: 179853 - DNA, 80 bp, synthetic construct
  source 1..80: mol_type = other DNA
actagcacagttgatgtaacagttttagggagtttattacaattggatttccaaaacccaagagtctacaacacccaagt

SEQ ID NO: 179854 - DNA, 80 bp, synthetic construct
  source 1..80: mol_type = other DNA
actggagatgttcacttacatcagatttgatgtggaaataacatttgtaattacaagcacccaagggacatcacctcaaa

SEQ ID NO: 179855 - DNA, 80 bp, synthetic construct
  source 1..80: mol_type = other DNA
ccacaacagggagcacaacagggatgtcagagataaatgaaacttctccatcatactcagacaactgcacaggattgggg

SEQ ID NO: 179856 - DNA, 80 bp, synthetic construct
  source 1..80: mol_type = other DNA
cgaaccaacgagacagatcgaagaagccagaatcttccgactttaaattacataaatccaacgtattatgaccacagctc

SEQ ID NO: 179857 - DNA, 80 bp, synthetic construct
  source 1..80: mol_type = other DNA
agtaggcttcataccagttagtgacaccttttgcaatggagacatgcccttcctggcaccatatgtgccaataaagtggt

SEQ ID NO: 179858 - DNA, 80 bp, synthetic construct
  source 1..80: mol_type = other DNA
tatttagatcgtacagatgtagttctgtgttgttgcacgaacgacataagtcatggtacagtgaaggtctttcatgttga

SEQ ID NO: 179859 - DNA, 80 bp, synthetic construct
  source 1..80: mol_type = other DNA
gatcagcggttgcaatacactatgcttggtgaaatcttaaattactacacccattggaccggatccctcaggttcacatt

SEQ ID NO: 179860 - DNA, 80 bp, synthetic construct
  source 1..80: mol_type = other DNA
tagactggatgaaatccatgctgccacaagctcagttaaaagttaaatatcttagtgagctaaagaaattaaatttgttg

SEQ ID NO: 179861 - DNA, 80 bp, synthetic construct
  source 1..80: mol_type = other DNA
ccagatttcaagttaagattaatgaaagatacccaaactatttctcagactgatgctctaacagaagggttaggagatga

SEQ ID NO: 179862 - DNA, 80 bp, synthetic construct
  source 1..80: mol_type = other DNA
cactgggaaatagtagctgtactgcattcttctgttgagggggtatggggactgagtgtcattgtacatcttttgcaggc

SEQ ID NO: 179863 - DNA, 80 bp, synthetic construct
  source 1..80: mol_type = other DNA
cccttgcagagttgcggtttccgatctgctcaccacaaactgacaccaattgtgtcaccttcctggtgttagacaacacc

SEQ ID NO: 179864 - DNA, 80 bp, synthetic construct
  source 1..80: mol_type = other DNA
cctgatgcactgaaagacatgggagtctttggtcaaaacatgtttttccattctcttggcagaacgggatacacaataca

SEQ ID NO: 179865 - DNA, 80 bp, synthetic construct
  source 1..80: mol_type = other DNA
cagaaataacacttgtaccatgcattgcagcaaagagtgataacatcggtcatgttgtcatgcaatatatgtatgttcct

SEQ ID NO: 179866 - DNA, 80 bp, synthetic construct
  source 1..80: mol_type = other DNA
cttataccacatataagaatgccaacccaggggagtctgggggagtgtttgtggattcattcctcgcatcgacacaggct

SEQ ID NO: 179867 - DNA, 80 bp, synthetic construct
  source 1..80: mol_type = other DNA
ttggagccagcgggcacccgaggtcccagcacccggtccctccgggtggcagagacaggcagggccccccggcagctggc

SEQ ID NO: 179868 - DNA, 80 bp, synthetic construct
  source 1..80: mol_type = other DNA
caacgcacaggaccacaccgtcgtacgcgtgctgcgaccgccctccacgttcgaacaggaccacagtcggctggtgttgg

SEQ ID NO: 179869 - DNA, 80 bp, synthetic construct
  source 1..80: mol_type = other DNA
cttggttaaagaagaaggcttgtgacattctggaaattccctatatcatcaagcagggagactcctggcttaaaaaattt

SEQ ID NO: 179870 - DNA, 80 bp, synthetic construct
  source 1..80: mol_type = other DNA
aacgttacttttggcgattcaggaacatacacggaatacatctacgaatgtcatctttcatgtaatacaatcgattataa

SEQ ID NO: 179871 - DNA, 80 bp, synthetic construct
  source 1..80: mol_type = other DNA
ccagcaggtcctgctccaccgtctggatattcacatcggactggcttgacggacggtggaccgctatatggttgcacagc

SEQ ID NO: 179872 - DNA, 80 bp, synthetic construct
  source 1..80: mol_type = other DNA
ttgcgcctaagcactcaaggggcgtctgggcatcaagcaggtgctgcatacgttggcaattaccgggtggttaacagaca

SEQ ID NO: 179873 - DNA, 80 bp, synthetic construct
  source 1..80: mol_type = other DNA
tttctaggggtcttgcaggggagggcgatgtatactccctgcctccaaacccgaaacactttgatggttacaatcagcaa

SEQ ID NO: 179874 - DNA, 80 bp, synthetic construct
  source 1..80: mol_type = other DNA
gtgcagtaaccttagtggtgacattgatggtggatgcgttggaagttgttgggactggtgtgacagttgtcccagtggat

SEQ ID NO: 179875 - DNA, 80 bp, synthetic construct
  source 1..80: mol_type = other DNA
tgtagatagtatcaaacaacaagtaaattttattaatcccactagcaaaattggctcaaaagtaattaaatggctgctga

SEQ ID NO: 179876 - DNA, 80 bp, synthetic construct
  source 1..80: mol_type = other DNA
tgcaaatgtgcccctaagcatgagagtaaggtggtatgtcatgctgttccaccaactagaagttatagaagccatagcac

SEQ ID NO: 179877 - DNA, 80 bp, synthetic construct
  source 1..80: mol_type = other DNA
tgccgggaaagcacattccttttcagtaaacaacaatgacatcataacaaatcattttattcgcgaggtggataataacc

SEQ ID NO: 179878 - DNA, 80 bp, synthetic construct
  source 1..80: mol_type = other DNA
caaggtactgtatgaccagtacgagaggggcttcaacaggtggtcttttagcaacgaggacctagacctcgccctgtatt

SEQ ID NO: 179879 - DNA, 80 bp, synthetic construct
  source 1..80: mol_type = other DNA
caacactgcaaacaccatacatggcaactaccaaaaacccactaactcagcagtagactaccatataggaaaatatagcc

SEQ ID NO: 179880 - DNA, 80 bp, synthetic construct
  source 1..80: mol_type = other DNA
tcacaatttcccacaggaaacaacagcacctttggctttaactcatataatccaaataaagaaaaactagaaaaactatt

SEQ ID NO: 179881 - DNA, 80 bp, synthetic construct
  source 1..80: mol_type = other DNA
gaccaggcaaaaaacactatgtaaagattaaagtgggagccccccgaatgttcacagataagtggtacccccagacagac

SEQ ID NO: 179882 - DNA, 80 bp, synthetic construct
  source 1..80: mol_type = other DNA
caccgaagaaacggcctagcatgagcgtcttcacccgaccggcctacgatgccgctggccaagagagggagttctttgag

SEQ ID NO: 179883 - DNA, 80 bp, synthetic construct
  source 1..80: mol_type = other DNA
cctcggggccaccatggtggccacccatctgcgaccccccgcaaccctctaagactcaaggccagagccggagacagagc

SEQ ID NO: 179884 - DNA, 80 bp, synthetic construct
  source 1..80: mol_type = other DNA
accaaacgggcatagtggtcccacctggcactcccaacaaatgtgtagtgctgtgctttgtatcggcctgtaatgatttc

SEQ ID NO: 179885 - DNA, 80 bp, synthetic construct
  source 1..80: mol_type = other DNA
ctattggatgttacttttcaaagagccgtaatagatacttccctatccaagtaacaccccacgactggtatgaaattcaa

SEQ ID NO: 179886 - DNA, 80 bp, synthetic construct
  source 1..80: mol_type = other DNA
agcagatccggagctgcgccgtgggtaggcgcttgcagcttccaccatactccagtctgtacaggcagtggatagatgaa

SEQ ID NO: 179887 - DNA, 80 bp, synthetic construct
  source 1..80: mol_type = other DNA
atttgaacttggtgacctcatatcctagtagggacctagcaattgtttcaacaggagcacatggtgcagagaccatacca

SEQ ID NO: 179888 - DNA, 80 bp, synthetic construct
  source 1..80: mol_type = other DNA
tgtgttggcctcaacaaactcacacactattacacctccaacagtctcacacagcgatgctttaaacaggaggtttgctt

SEQ ID NO: 179889 - DNA, 80 bp, synthetic construct
  source 1..80: mol_type = other DNA
cagaaaactttaccagccacatagaagacaaggtagccatagggtcctttgggggaggacacagcaccagcaggtggtcc

SEQ ID NO: 179890 - DNA, 80 bp, synthetic construct
  source 1..80: mol_type = other DNA
ccatgctagaccttcttgaaaaggacgaccagcacatggagcagcaggttatggcaaccctactgccaccagaaccacac

SEQ ID NO: 179891 - DNA, 80 bp, synthetic construct
  source 1..80: mol_type = other DNA
agtcacagacatgctcaaacaactgaaacaaatgagtgcttacaaaagagaccaccgccaagaaccagtctgcttgttaa

SEQ ID NO: 179892 - DNA, 80 bp, synthetic construct
  source 1..80: mol_type = other DNA
caggaatgagaagtttagagacattagggcacacatacccacaactatatgtgagaccagtgaagctatattagcagtga

SEQ ID NO: 179893 - DNA, 80 bp, synthetic construct
  source 1..80: mol_type = other DNA
agaagtacactgattgcttgtctaaattcaaaccaattatggctatctgcttcagaagttgccacaatagcatcagtaat

SEQ ID NO: 179894 - DNA, 80 bp, synthetic construct
  source 1..80: mol_type = other DNA
agtctgagaaatttgtgaaaatgacttgggaaaatttaacattcttaaagagatacttcagaccagatgaacagtttcct

SEQ ID NO: 179895 - DNA, 80 bp, synthetic construct
  source 1..80: mol_type = other DNA
tactttgcagcaacacagggtgaaataacaacaagaaagtcagtcagagatgttggcatgtcaccaattaacacaccttg

SEQ ID NO: 179896 - DNA, 80 bp, synthetic construct
  source 1..80: mol_type = other DNA
cccacccaggtgaacgtggacacgaaataggtcgcaacacaaatagggatgataaccagccagatgaaaacccttttttt

SEQ ID NO: 179897 - DNA, 80 bp, synthetic construct
  source 1..80: mol_type = other DNA
cgccggtgcccccgagtgcgtggcgggaggagggtggaaggtgaggaggatagtggtccggatcgccttcggtatcatcg

SEQ ID NO: 179898 - DNA, 80 bp, synthetic construct
  source 1..80: mol_type = other DNA
ggctaacatcagtttcccgtgctcgcagtcccctctgtgttatgacaagaaaccagcggacaccctggcattgctaagtg

SEQ ID NO: 179899 - DNA, 80 bp, synthetic construct
  source 1..80: mol_type = other DNA
acctctgcccagttccgttagtccaactgaacgtaaccgcagcggatctgctgggtgtaccacttgtgcaggaacagttt

SEQ ID NO: 179900 - DNA, 80 bp, synthetic construct
  source 1..80: mol_type = other DNA
tagatggggagttgctagcatttgattattcaaactttgatgccagcttatctcctatctggtttgattgtctagaacta

SEQ ID NO: 179901 - DNA, 80 bp, synthetic construct
  source 1..80: mol_type = other DNA
cgacttgcaatatccgttcggctcaccactaacgaactcagtgtgctgcaacttccaggttttagacagcaattatgaca

SEQ ID NO: 179902 - DNA, 80 bp, synthetic construct
  source 1..80: mol_type = other DNA
attataattaacacatcacctccatttctagacaccgagataacaggccctagcatacacccgggtatgatggccctcaa

SEQ ID NO: 179903 - DNA, 80 bp, synthetic construct
  source 1..80: mol_type = other DNA
ttgatgttgcgtgtctttgaatccccggggaaaagaggaggaagaagagtccctggggacgcgcagaccaactcccggtg

SEQ ID NO: 179904 - DNA, 80 bp, synthetic construct
  source 1..80: mol_type = other DNA
atattattaccgtgttgtcttcacgttattctaaacgcaccgattaccacgtagatacttacattggttatgcaaccact

SEQ ID NO: 179905 - DNA, 80 bp, synthetic construct
  source 1..80: mol_type = other DNA
caaggggcaattcgggctcgggactggccgggctatgggcaaggctcttaaaaagccatgtttctcggtaaactttacag

SEQ ID NO: 179906 - DNA, 80 bp, synthetic construct
  source 1..80: mol_type = other DNA
tgctttgcagcctttgctgtgcgacaagccattagaggagaaaaggtaacatccttctgcagttatccacaagctcataa

SEQ ID NO: 179907 - DNA, 80 bp, synthetic construct
  source 1..80: mol_type = other DNA
ggacgccggacggcgacggcgaagagttgcgtgtggtgcggtgtggtgcggtggggacggcggtcgcggaggacggcgac

SEQ ID NO: 179908 - DNA, 80 bp, synthetic construct
  source 1..80: mol_type = other DNA
gaacacagattcaactggttctataataaaagtacggatttttccatcgggactgtgtttccacacgacgcccatccatg

SEQ ID NO: 179909 - DNA, 80 bp, synthetic construct
  source 1..80: mol_type = other DNA
caaaaagaatacttataccactatcccaacaatgtaactacagacttaataactaaaaacacactaacacatgactgggg

SEQ ID NO: 179910 - DNA, 80 bp, synthetic construct
  source 1..80: mol_type = other DNA
accacaacatgcgcacaacaggacaactgcgcaggattagaagaggaagatataatgacttgtgagtggaatatgacagg

SEQ ID NO: 179911 - DNA, 80 bp, synthetic construct
  source 1..80: mol_type = other DNA
ggccgctccggagccccagcaggagaacaacaacaacaacctgcagctgcagagatggcctggggatggtggagacgccg

SEQ ID NO: 179912 - DNA, 80 bp, synthetic construct
  source 1..80: mol_type = other DNA
atttttgtaatatactagaaatagttttagggtttcttgtgagctatgcgtgctattattatgatatactctggctcatc

SEQ ID NO: 179913 - DNA, 80 bp, synthetic construct
  source 1..80: mol_type = other DNA
gagaggggtcgccataggcttcggatccaattttaggccttccggactacaaaaatggcggattcgtgacgtcacggccg

SEQ ID NO: 179914 - DNA, 80 bp, synthetic construct
  source 1..80: mol_type = other DNA
accgcatcctgcatcagagcgtcaatcagactttcgacgtgcgccagttcgtctttgacaacgcccgtctggtcaactgc

SEQ ID NO: 179915 - DNA, 80 bp, synthetic construct
  source 1..80: mol_type = other DNA
ccatatacacatgtgcgcatctcacccaacctaatgaaaacacaattttactagcattgacagcagatttgcaagtggat

SEQ ID NO: 179916 - DNA, 80 bp, synthetic construct
  source 1..80: mol_type = other DNA
atgagctcactaccaaactgcaaattttaaagaaaaacttagatgatatgtgtcccctctatgctgcagaaaacaaaaga

SEQ ID NO: 179917 - DNA, 80 bp, synthetic construct
  source 1..80: mol_type = other DNA
aaaaaaatacaacaagaatctacaataataactaaaggatgtagagcacactgccaccttacaggcatcttttcaccacc

SEQ ID NO: 179918 - DNA, 80 bp, synthetic construct
  source 1..80: mol_type = other DNA
acgtcagataatgttgcaacgtcatggagctgagcccatgcagtgacttcacgtaatgacatccccccggggccgtaagc

SEQ ID NO: 179919 - DNA, 80 bp, synthetic construct
  source 1..80: mol_type = other DNA
gctgccctggtacagcgatacaactccaactccatgcaacaccagcaccgactgccatcaacacccgaaataaggtctcc

SEQ ID NO: 179920 - DNA, 80 bp, synthetic construct
  source 1..80: mol_type = other DNA
tttatgacaaaatttatcaaactccgtgttactattctggattggcagtaggtatcaacccctacaaagattggcatttt

SEQ ID NO: 179921 - DNA, 80 bp, synthetic construct
  source 1..80: mol_type = other DNA
ttgctaaccctgtcaaggacatattcgctgaaatggctgcccctctaaagtctccatccgctgaagcttgtggttacagt

SEQ ID NO: 179922 - DNA, 80 bp, synthetic construct
  source 1..80: mol_type = other DNA
aggttacacgcatcaaacatcttttatagattacttgtgtcattcggtacatttatataaggacaaaaaatacatagtta

SEQ ID NO: 179923 - DNA, 80 bp, synthetic construct
  source 1..80: mol_type = other DNA
ggcacggtgccctcctacccacgtaacttcctccgtgacttaaagtcgcgtgtggtagatctcctgctccgtggacgaac

SEQ ID NO: 179924 - DNA, 80 bp, synthetic construct
  source 1..80: mol_type = other DNA
tagtggctatggtggcgctggtctggaacacgacggtgccgtagagacgtaccatccagagaaagtgttgaacgctccgc

SEQ ID NO: 179925 - DNA, 80 bp, synthetic construct
  source 1..80: mol_type = other DNA
tttttcaacttggatgaggaaaactgctggacaccccattgggttacttcaaattgaagtgttgaatagattgacttata

SEQ ID NO: 179926 - DNA, 80 bp, synthetic construct
  source 1..80: mol_type = other DNA
cccgctcccaagcgccgcggaaagtgctccgatttttcaccgtcgttcgcgacgttgatttgcctcggtctgagaaccga

SEQ ID NO: 179927 - DNA, 80 bp, synthetic construct
  source 1..80: mol_type = other DNA
cacgcatgtgcgctaaagttacatcaagagcttatactaaccaggaagactttattaattatcaagaggcgattggtgcg

SEQ ID NO: 179928 - DNA, 80 bp, synthetic construct
  source 1..80: mol_type = other DNA
gattatactgattatgatgattctatccagaacttcaagaagtggaaaattagcttacaggagatggcccaaatacgtag

SEQ ID NO: 179929 - DNA, 80 bp, synthetic construct
  source 1..80: mol_type = other DNA
tattcattataacgggggagagaaagagagagctgctgagataggtggtgctggcctcgtatagcgccgagcctcggacc

SEQ ID NO: 179930 - DNA, 80 bp, synthetic construct
  source 1..80: mol_type = other DNA
aactgtatgtgaggaacctgggtgcttagacgactaacgtgtaatgctttttacaggactgttcgacaggtgatagtacc

SEQ ID NO: 179931 - DNA, 80 bp, synthetic construct
  source 1..80: mol_type = other DNA
gtcacagttggctataattatacacaccctggtgaacaaggccgtgaaataggtacatttggacccagtagcacattgga

SEQ ID NO: 179932 - DNA, 80 bp, synthetic construct
  source 1..80: mol_type = other DNA
cctgtcatattgagaaggagatcaagtatttgcaatacatactaaattgcttaggcagtcttattttaattttagggaca

SEQ ID NO: 179933 - DNA, 80 bp, synthetic construct
  source 1..80: mol_type = other DNA
agatcatattttactgaacaacaaggccaaattcaaatctctaaacatgttaaagacatcggtctaccttcaatacacac

SEQ ID NO: 179934 - DNA, 80 bp, synthetic construct
  source 1..80: mol_type = other DNA
cccaggaacgacaaagacgcaattatgtaccctgccatattaggcagataattaacacatggcacaaagtaggaaaaaat

SEQ ID NO: 179935 - DNA, 80 bp, synthetic construct
  source 1..80: mol_type = other DNA
ggagacggtggtgcggggagcatggcgttattcttggcgcgccacaccttatctggcacgggtgctggcggtcacggccg

SEQ ID NO: 179936 - DNA, 80 bp, synthetic construct
  source 1..80: mol_type = other DNA
ttcccacaccagataattaacctgcgcacaaataactgtgccactctggtactcccatatgtcaactcactggctatcga

SEQ ID NO: 179937 - DNA, 80 bp, synthetic construct
  source 1..80: mol_type = other DNA
tcaagtggagcacaacttgagaaccgccggagcctttggacaacaatcaggggcggtttacgtgggcaattacaggctgg

SEQ ID NO: 179938 - DNA, 80 bp, synthetic construct
  source 1..80: mol_type = other DNA
tacagctagtaacaactgctttctaaaagtcagcagtctgtggggagaccacgtctatgacaaaagcaaattaataaccg

SEQ ID NO: 179939 - DNA, 80 bp, synthetic construct
  source 1..80: mol_type = other DNA
agagcaagtgtataatgagagacctgccactgtgggttatattctatggctacgtagactgggtcatcaaatccacaggt

SEQ ID NO: 179940 - DNA, 80 bp, synthetic construct
  source 1..80: mol_type = other DNA
agagtgaacctaacaaaggttatgtattttatgatacaatgtttggtaatggaaagatgccagacggctcagggcacata

SEQ ID NO: 179941 - DNA, 80 bp, synthetic construct
  source 1..80: mol_type = other DNA
acccctcccctaagcagtaacttagaagcttcacactatcacgaccaatagtaggcgtggtgcaccagtcacgtcttggt

SEQ ID NO: 179942 - DNA, 80 bp, synthetic construct
  source 1..80: mol_type = other DNA
cccctaccccttgcaacatagaagcattgtaccacggatcaatagcaggtgtgtcgatccagacgcatcttgatcaagca

SEQ ID NO: 179943 - DNA, 80 bp, synthetic construct
  source 1..80: mol_type = other DNA
tcttattcctggtaattatcttctctcctacggcttctccggtacagctgtcactggtcagatttccatttctgcttccg

SEQ ID NO: 179944 - DNA, 80 bp, synthetic construct
  source 1..80: mol_type = other DNA
taagcttgattacgcggctggttcatcaacgtacattcccattaccgtaaccgttgcaccgatgtgcgctgagtacaacg

SEQ ID NO: 179945 - DNA, 80 bp, synthetic construct
  source 1..80: mol_type = other DNA
ctcgcctatgatccaccccaatctcgcccccctaattgcgccatctgcctacgcgaggctgaacctcctgaatcactgca

SEQ ID NO: 179946 - DNA, 80 bp, synthetic construct
  source 1..80: mol_type = other DNA
tggattcactcctttaactcaccacacactaattctcataagagttactttattgctaagaagttgttacaacaatgggt

SEQ ID NO: 179947 - DNA, 80 bp, synthetic construct
  source 1..80: mol_type = other DNA
atggcctttggcgccggtttcagtgccgaggttgcaaacaaagtctctgagatatcagctagtgtgcaaaacataattac

SEQ ID NO: 179948 - DNA, 80 bp, synthetic construct
  source 1..80: mol_type = other DNA
tatgcgccgttgtcatcttcgactataaggatcgcgaccgagtcttcgggcatggtaaaagccacacggtgtggttgata

SEQ ID NO: 179949 - DNA, 80 bp, synthetic construct
  source 1..80: mol_type = other DNA
gagacgtaggcgccgcaaaaagatagtcctcactcagtggaacccccagaccgtacgcagatgctacataagaggcctca

SEQ ID NO: 179950 - DNA, 80 bp, synthetic construct
  source 1..80: mol_type = other DNA
acacaaaagttaatgatacacaagtcctgaaagaagaacactacatcaagttcagggaatcccctagaactattgtgact

SEQ ID NO: 179951 - DNA, 80 bp, synthetic construct
  source 1..80: mol_type = other DNA
cgcaggagtacgttggaatgctttggagccgagagggatgggcccgcttgtgcgcttatgtgttacacggtgccaataac

SEQ ID NO: 179952 - DNA, 80 bp, synthetic construct
  source 1..80: mol_type = other DNA
ccacttcttctctcgctctggtctagtgggagtggttaatctaaccgatggaggaacagacgttgccgggtatgctactt

SEQ ID NO: 179953 - DNA, 80 bp, synthetic construct
  source 1..80: mol_type = other DNA
gatgtacctggagtagatcgaacaaagatttagaactagtaaggtatctggggggcagctttaccctatacagacatcca

SEQ ID NO: 179954 - DNA, 80 bp, synthetic construct
  source 1..80: mol_type = other DNA
caggccgacgaggaggcgcagccaccgcctcatggcggcttcgccagtcaatcgtctttagcctcttcttcccgtgaggt

SEQ ID NO: 179955 - DNA, 80 bp, synthetic construct
  source 1..80: mol_type = other DNA
agggcaaagtggtcatcgaatacgagggcctaaccaatcaaatgaccgaggtgatagtaaaccagatgaggacccactat

SEQ ID NO: 179956 - DNA, 80 bp, synthetic construct
  source 1..80: mol_type = other DNA
tgcttcttggtgttagggacgaactcgaacgttacagaatcctcgctgtcgctctcctctttcgcgtcgttaaagtaatt

SEQ ID NO: 179957 - DNA, 80 bp, synthetic construct
  source 1..80: mol_type = other DNA
caagtcacttccctaaaaattaattagtaatcaccatcacaaagggaggagctaacacactatataactaactacacttc

SEQ ID NO: 179958 - DNA, 80 bp, synthetic construct
  source 1..80: mol_type = other DNA
agagacactaccactttcaaatccatctttattgacaattatcaaaaaaccaccttatttccaaactttaatattcttcg

SEQ ID NO: 179959 - DNA, 80 bp, synthetic construct
  source 1..80: mol_type = other DNA
tcaggaagtagatcatttagtaagtcagggcatcagacaagtattattcctagaaaaaatagagcccgctcaggaagaac

SEQ ID NO: 179960 - DNA, 80 bp, synthetic construct
  source 1..80: mol_type = other DNA
aatgactattatccagctagatatcagtcacacatgacaatgggacatggctttgccgaaccaggagactgtggtggcat

SEQ ID NO: 179961 - DNA, 80 bp, synthetic construct
  source 1..80: mol_type = other DNA
ggatagtaacaggctctgcagttggatgtgatccagaaaccttctggtcaaaaatccctgttatgttagatggtgagtgc

SEQ ID NO: 179962 - DNA, 80 bp, synthetic construct
  source 1..80: mol_type = other DNA
gacccacgggagtcgctgctggactgtgaaacctgagctttcgttttgctcttctgggtcttgggcgttggtgtctctcc

SEQ ID NO: 179963 - DNA, 80 bp, synthetic construct
  source 1..80: mol_type = other DNA
ctcaaggccgtgagcgccgcgccgcattagcggcgtgttgcggccgacgcgttgtgcatttcggcagtacgccacgcggt

SEQ ID NO: 179964 - DNA, 80 bp, synthetic construct
  source 1..80: mol_type = other DNA
acatttagtgtaaatgcacatccataaagtccataggcaaaactccattcctacttaattgagttatgcctccatggaaa

SEQ ID NO: 179965 - DNA, 80 bp, synthetic construct
  source 1..80: mol_type = other DNA
cacccaccgaaccagatgtgagcagcaatcgcttttatactctagagtcggtgcagtggactactgcatcccgtgggtgg

SEQ ID NO: 179966 - DNA, 80 bp, synthetic construct
  source 1..80: mol_type = other DNA
gctctgtgacacaaccctgctaaccgtctatgcaaccgcatgtgacctgcaatttccgttcggctcaccactaactgaca

SEQ ID NO: 179967 - DNA, 80 bp, synthetic construct
  source 1..80: mol_type = other DNA
atctacaagattggaacatcactgtagatgattatgatgtggtcattactaagttgattattgcattgtttacagaatga

SEQ ID NO: 179968 - DNA, 80 bp, synthetic construct
  source 1..80: mol_type = other DNA
ttcatggctcaagaaatttacagagatgtgcaatgcagcaagaggattagaatggattggtaacaagatatctaaattta

SEQ ID NO: 179969 - DNA, 80 bp, synthetic construct
  source 1..80: mol_type = other DNA
gtgtactaatccatggcacacctgggtctggaaaatccttgactacatcaatcgtgggacgagcattagccgaacactac

SEQ ID NO: 179970 - DNA, 80 bp, synthetic construct
  source 1..80: mol_type = other DNA
ccctcaaagcttcacaaaacaacgctagtgaatctatcttttctatatcactgagtcctgcagcagataataggttatcc

SEQ ID NO: 179971 - DNA, 80 bp, synthetic construct
  source 1..80: mol_type = other DNA
agcatataaaagcgtgggtcccgcgtccaccacgactctgtgactacatgtacaaggctaacattgacttcaaaacacaa

SEQ ID NO: 179972 - DNA, 80 bp, synthetic construct
  source 1..80: mol_type = other DNA
tacatgagatttgacattgaaatcaccattgtcatcacgagttatcaagaacagggtacaaaccttgatcaggacatgcc

SEQ ID NO: 179973 - DNA, 80 bp, synthetic construct
  source 1..80: mol_type = other DNA
acagcactattacaaggtgatacagatgtggccatcaacaatgcgatggctagggtagcggacacaattgccagtgggcc

SEQ ID NO: 179974 - DNA, 80 bp, synthetic construct
  source 1..80: mol_type = other DNA
tctgccataacagccaactacagactaacactacgcagcccctacacagaccccatgctaatagacagaaacaacgacga

SEQ ID NO: 179975 - DNA, 80 bp, synthetic construct
  source 1..80: mol_type = other DNA
cgttgtcaatccggtaatgatgataggtgccaagcttggccaggtagctgaacatttggtcccagcgtgccgaccacacc

SEQ ID NO: 179976 - DNA, 80 bp, synthetic construct
  source 1..80: mol_type = other DNA
ggctgataaaggttttctgagagtggcacacacttatgacacagaacaaaatagacaaacagtgattgagtccaatggtg

SEQ ID NO: 179977 - DNA, 80 bp, synthetic construct
  source 1..80: mol_type = other DNA
tccgcatgttctgatatgtcagtccgcatgttgcgtgatacacctatgatgcaacaggatgaaaatatagcccaaaaccc

SEQ ID NO: 179978 - DNA, 80 bp, synthetic construct
  source 1..80: mol_type = other DNA
aatggaatcctagtactgtttctagatgctttatagtaggatacttaccaataattattacaggacaaggtacagcatct

SEQ ID NO: 179979 - DNA, 80 bp, synthetic construct
  source 1..80: mol_type = other DNA
aagaagctgaactacagggcgacagggtggcaaccgtggaagatacgaaagccagtgggccaagcaattctgagcaggtg

SEQ ID NO: 179980 - DNA, 80 bp, synthetic construct
  source 1..80: mol_type = other DNA
gtattaccactcaatgggtagagcagggtacataatacatacacaatgtaatgccaccaaattccacagtggagctttga

SEQ ID NO: 179981 - DNA, 80 bp, synthetic construct
  source 1..80: mol_type = other DNA
gtatttgtgtcgactttcacacctgacacatcagccaatccagaacgcaaattccagccggttgattacctatttggtag

SEQ ID NO: 179982 - DNA, 80 bp, synthetic construct
  source 1..80: mol_type = other DNA
gccatgatcagacgctgctatataatagggtacatggccgggctggtagaaggacacggcagcttttcaaaaaactacag

SEQ ID NO: 179983 - DNA, 80 bp, synthetic construct
  source 1..80: mol_type = other DNA
aactacgtgttaattccccataggccggacacagtgtacgtcattcacttcctgggcatggtctacatcattatataaag

SEQ ID NO: 179984 - DNA, 80 bp, synthetic construct
  source 1..80: mol_type = other DNA
accaacagatgttgaccttcctacaggcaggggcaagagacccaagagagatacagacggcccgcaagaccaaggccaag

SEQ ID NO: 179985 - DNA, 80 bp, synthetic construct
  source 1..80: mol_type = other DNA
tcctaggccggcgctgagacgccagctcgccctgccggcgccccccgccgatccgcagcaggctaacccgggatggcctg

SEQ ID NO: 179986 - DNA, 80 bp, synthetic construct
  source 1..80: mol_type = other DNA
cacgggtcgatgcacctccttctcgcgtatcaaatcgcagtatccccccaggcaacgaatcacgctgttcacatcggcgt

SEQ ID NO: 179987 - DNA, 80 bp, synthetic construct
  source 1..80: mol_type = other DNA
tactaacacagaaagatcccagattggaaactgatttgaagacagccgtcatgtccaaatacaaagggaacgtgaaaatt

SEQ ID NO: 179988 - DNA, 80 bp, synthetic construct
  source 1..80: mol_type = other DNA
cacaaaatggcggacttccttcctcttttttaaaaattaaccgtcggcggcgctaccggcgcgcgccctgcgcccccccc

SEQ ID NO: 179989 - DNA, 80 bp, synthetic construct
  source 1..80: mol_type = other DNA
gttcatccctccaggacttgaaaaacccaccagtgatgtagatcgactatgggactctgcatccaaccctagtgtctttt

SEQ ID NO: 179990 - DNA, 80 bp, synthetic construct
  source 1..80: mol_type = other DNA
ttgcgaccagtcatggtgcaaggtcccaacacagagtttgcactgtccttgttaagaaagaatatagttaccatcacaac

SEQ ID NO: 179991 - DNA, 80 bp, synthetic construct
  source 1..80: mol_type = other DNA
tttgttcagtcctgtttggagaaagagatgatagaatatagacttaaatcttatgattggtggagaatgagattttatga

SEQ ID NO: 179992 - DNA, 80 bp, synthetic construct
  source 1..80: mol_type = other DNA
cggaagaacggtccagcacatcatccaccagttagtaaagacccagcatcacctccacgtacccattatccattagtagg

SEQ ID NO: 179993 - DNA, 80 bp, synthetic construct
  source 1..80: mol_type = other DNA
ttcaccttgttttagtgtggcattggggtggtggcattgcgggtggatagcctcgcgactcgtgggaaaatgtgcggaag

SEQ ID NO: 179994 - DNA, 80 bp, synthetic construct
  source 1..80: mol_type = other DNA
acatcctggccagcacaaatttggattcgcttgcaccacctacaatcaccattccagatgcaatcaggagacggttcttt

SEQ ID NO: 179995 - DNA, 80 bp, synthetic construct
  source 1..80: mol_type = other DNA
taccccggtcagcgttgatatgctccaacagggcaaaaacagcaatgatcgttatccgcaagatgcctacacagagccta

SEQ ID NO: 179996 - DNA, 80 bp, synthetic construct
  source 1..80: mol_type = other DNA
tgtacgtgccgcctggtgggccaaccccaaacagcgcaaccagttatgcttggcaaacgtccaccaacccaagtgtcttt

SEQ ID NO: 179997 - DNA, 80 bp, synthetic construct
  source 1..80: mol_type = other DNA
cctgatcatcttacctttatcaaaactggactactctccagactcaagtaccaaattaccaattacgatcacaatcgctc

SEQ ID NO: 179998 - DNA, 80 bp, synthetic construct
  source 1..80: mol_type = other DNA
gcctagtctcgaggaccccaaggcaggcgagggggggggggagtcgcgggcgtggacggcgacggcgaatagttgcgtgt

SEQ ID NO: 179999 - DNA, 80 bp, synthetic construct
  source 1..80: mol_type = other DNA
ggcagggacgccttccaatggcaaacagcaaccaatccatcagtttttgttaagctcaccgacccccctgcacaagtttc

SEQ ID NO: 180000 - DNA, 80 bp, synthetic construct
  source 1..80: mol_type = other DNA
tattccaggagaggtccacaaccttctagaaattatacaggtggatactttaatacctatgaataacacaggtgctagag

SEQ ID NO: 180001 - DNA, 80 bp, synthetic construct
  source 1..80: mol_type = other DNA
ggaaaaatgccagacggacagaattatataccagtagagtacagatttaggtggtacccatgcatgtttcaccagcaaaa

SEQ ID NO: 180002 - DNA, 80 bp, synthetic construct
  source 1..80: mol_type = other DNA
gtggggacagtcatcccatatggtgaaatcaatctaagtggtaatcccacctgcagattaatgaaatataactaccctac

SEQ ID NO: 180003 - DNA, 80 bp, synthetic construct
  source 1..80: mol_type = other DNA
agggctggttggttgacatctcaagtcaagtgcagctggagcgcaacatcaacagagcaatgactattctccaggctgta

SEQ ID NO: 180004 - DNA, 80 bp, synthetic construct
  source 1..80: mol_type = other DNA
aaactaggattccagaaagaagggtagtagcacaaggaccagaggaagagtttggtagatccctaatcaaacataactca

SEQ ID NO: 180005 - DNA, 80 bp, synthetic construct
  source 1..80: mol_type = other DNA
actataatactacacaaacactagcacaactaaaaccatacgtagacaacatgcagtctgtaactgcaactcaaacatgg

SEQ ID NO: 180006 - DNA, 80 bp, synthetic construct
  source 1..80: mol_type = other DNA
caccggaaatgctttcgccaagaatttcgtcgtaattcggcatgttccgaacggtgaccccgcgcgcctcccggctcccg

SEQ ID NO: 180007 - DNA, 80 bp, synthetic construct
  source 1..80: mol_type = other DNA
accttctacttttacagagacaaaaagatagactacatagttaagtttcagaggagagggccctttaagataaacaagta

SEQ ID NO: 180008 - DNA, 80 bp, synthetic construct
  source 1..80: mol_type = other DNA
agatacacagtaaggaggcgcagacggagagggaggcgagggcgaccgagacgcagactgtacagacgcaggtacaccct

SEQ ID NO: 180009 - DNA, 80 bp, synthetic construct
  source 1..80: mol_type = other DNA
gaggctgcccctgtccaagccatcatcgtcgggcgaaagctcctcggtggtgtgtttgagtacatgcatggctgccctgg

SEQ ID NO: 180010 - DNA, 80 bp, synthetic construct
  source 1..80: mol_type = other DNA
cagaattagcagaagcagagctagaagaaaacaaaattatcttaagccaggaacaggagggatgctattaccaggaggaa

SEQ ID NO: 180011 - DNA, 80 bp, synthetic construct
  source 1..80: mol_type = other DNA
aatgccaacccagactgtaagttagtactaaaagggctgggaatgaatcccaccctagaagagatgctgaccgcctgcca

SEQ ID NO: 180012 - DNA, 80 bp, synthetic construct
  source 1..80: mol_type = other DNA
actccagctagtaacgtaacaaccatcgtcacgacgacatcgacggtgaccggcgcgaaaagtaacgttacggggaacgc

SEQ ID NO: 180013 - DNA, 80 bp, synthetic construct
  source 1..80: mol_type = other DNA
taggctatttttccctttcccttttccctgttttgtgtaaatattaattcctgcaggctcagggttctttaatctgtttc

SEQ ID NO: 180014 - DNA, 80 bp, synthetic construct
  source 1..80: mol_type = other DNA
tgtggcataatggtgaagaaccatacaaggagttcatagacaagatcagaagaacggaagtgggtcgtaggttgtatctt

SEQ ID NO: 180015 - DNA, 80 bp, synthetic construct
  source 1..80: mol_type = other DNA
aaccccaaacagtgtccaaacggctgtttgcaatgccgcaatgggagtgggtgtgggaaacttgacaatatacccccacc

SEQ ID NO: 180016 - DNA, 80 bp, synthetic construct
  source 1..80: mol_type = other DNA
tcataaaggtagggacagagatcaaagtaatacccagaagaaaagcaaagatcataaggcactatggagggggaaaagaa

SEQ ID NO: 180017 - DNA, 80 bp, synthetic construct
  source 1..80: mol_type = other DNA
cagagtgcactactccaaggtgacgtggtggaagcaattgagggtgcagttgccagagtagcggacacaattagcagtgg

SEQ ID NO: 180018 - DNA, 80 bp, synthetic construct
  source 1..80: mol_type = other DNA
gcaaacatattaaacacttttttaactgaaggctcatacagaaaaccacaagttgacaagtacagaaaacctttaggtga

SEQ ID NO: 180019 - DNA, 80 bp, synthetic construct
  source 1..80: mol_type = other DNA
ctcctctttatgacaaaaaactacccaacaaggggtacatattctatgacaccctgtttggcaacggcaaaatgcccgac

SEQ ID NO: 180020 - DNA, 80 bp, synthetic construct
  source 1..80: mol_type = other DNA
ttatgagtgttgacaattataatgagactctcactggtgaccaaaagtctaagctcttttccacttggaatataacttac

SEQ ID NO: 180021 - DNA, 80 bp, synthetic construct
  source 1..80: mol_type = other DNA
tcccggatgcggcgaaaggtctttccgtcgcactcgagaatgtagccaaggtcgctggtgatgccaatattgccacatcc

SEQ ID NO: 180022 - DNA, 80 bp, synthetic construct
  source 1..80: mol_type = other DNA
gagcagttcaacaataaactacaccaatattaactactacaaagatgctgcctcgaactcttccaataggcagaccttag

SEQ ID NO: 180023 - DNA, 80 bp, synthetic construct
  source 1..80: mol_type = other DNA
ccaagactctttcaggacaagtggtacccccagagcgagctctgtgacgtcacattactcgttatctatgcaaccgcatg

SEQ ID NO: 180024 - DNA, 80 bp, synthetic construct
  source 1..80: mol_type = other DNA
tgcttcattatgtgtatggtgtcagcatgcaatgacttttcagtgcgcctactaaaagatacaccattcattgaacaacg

SEQ ID NO: 180025 - DNA, 80 bp, synthetic construct
  source 1..80: mol_type = other DNA
catggatatgtatagggtaccagtgaccaccagtgcaaacttggatcaaccaatactttgcttatcgttatccccagcct

SEQ ID NO: 180026 - DNA, 80 bp, synthetic construct
  source 1..80: mol_type = other DNA
ggtgacacctactatggattggtcgccatcaatgattttggatccttggcaattagagtggtgaatgagttcaatcctgc

SEQ ID NO: 180027 - DNA, 80 bp, synthetic construct
  source 1..80: mol_type = other DNA
catataaaaattgcatcttcacactatgcagctcagttaattactttagatattgacccaagtcccatcactcttgaaga

SEQ ID NO: 180028 - DNA, 80 bp, synthetic construct
  source 1..80: mol_type = other DNA
gaaagaggagtccaaagacgagagagcttacaacccaacactgccagtggcaaaacctaaagggaccttcccagtttctc

SEQ ID NO: 180029 - DNA, 80 bp, synthetic construct
  source 1..80: mol_type = other DNA
gagcagccagtcagaagaagagacagcccaagaagaagagatccaaaagcagcaactacttcgtacacttcctggggtgt

SEQ ID NO: 180030 - DNA, 80 bp, synthetic construct
  source 1..80: mol_type = other DNA
ttgtcaccaatgtgcccaaattccccatgctagatatagagataggtgatgtcataccatatggagacatcaatctgagt

SEQ ID NO: 180031 - DNA, 80 bp, synthetic construct
  source 1..80: mol_type = other DNA
ccacgatccctgaggcgggagcaaccgggaactctggaccccgggaggacaccaaccctcagcagcccaccaccgagggc

SEQ ID NO: 180032 - DNA, 80 bp, synthetic construct
  source 1..80: mol_type = other DNA
taatttaacaatacattgtaagaggccaggaaacaagacagttgtaccaataacactcatgtcagggttagtgttccatt

SEQ ID NO: 180033 - DNA, 80 bp, synthetic construct
  source 1..80: mol_type = other DNA
gtcctggccacaactcagatcaaaagacaaaaaaacacagaaacccatcccaaaaaatgtattctactctcaagcatgag

SEQ ID NO: 180034 - DNA, 80 bp, synthetic construct
  source 1..80: mol_type = other DNA
acattcggttaagggcaagctgaacatggccacagcaacccaactatgtaaggagtgtccacccccagcaaacttcaaga

SEQ ID NO: 180035 - DNA, 80 bp, synthetic construct
  source 1..80: mol_type = other DNA
tgattctaccaactcatgctgatgtagggagaactgtagacatagatggcatacaaacaaaagtagcagatgcctatgac

SEQ ID NO: 180036 - DNA, 80 bp, synthetic construct
  source 1..80: mol_type = other DNA
ttacagagttgactaatatggtgacaagcacttttacggacaaattgtttaaaaacttgattaaaatagtgtcttcgttg

SEQ ID NO: 180037 - DNA, 80 bp, synthetic construct
  source 1..80: mol_type = other DNA
aaaagactgacatcgacgtcaaagacccacgtaatttggaacatgtgcgaccgcaaagtgcgtcagaataacacgtggct

SEQ ID NO: 180038 - DNA, 80 bp, synthetic construct
  source 1..80: mol_type = other DNA
gcggtttttcctctttttctacgtgtctgtctcaggacgagacgtcgatatcaataaaaataccgtcgacgtggtttttt

SEQ ID NO: 180039 - DNA, 80 bp, synthetic construct
  source 1..80: mol_type = other DNA
gcaaatatttacaagctacaaggtcagcactaccattactacaaacagtaggacacgaactattagaataccacacaggt

SEQ ID NO: 180040 - DNA, 80 bp, synthetic construct
  source 1..80: mol_type = other DNA
ggggtggcgtagactatacagacgatggagacgcagggggcgacgcagacacagacgaaaaaaactggtaatgagacagt

SEQ ID NO: 180041 - DNA, 80 bp, synthetic construct
  source 1..80: mol_type = other DNA
agatatggtgcaattgcgcaggaagtgcgagatgttcacctacctccgctttgacctggaagtcacctgcgtaataacca

SEQ ID NO: 180042 - DNA, 80 bp, synthetic construct
  source 1..80: mol_type = other DNA
tattcgcttcgtggactataagcgctcggcgcatggttcagatgaggcgtaagctagaaattttcacatacatccggttc

SEQ ID NO: 180043 - DNA, 80 bp, synthetic construct
  source 1..80: mol_type = other DNA
atgacacaggtaaccaagaaatgaaaaacaaaacatataattggaagaactacaaagagaatttttccaaagtaaaaact

SEQ ID NO: 180044 - DNA, 80 bp, synthetic construct
  source 1..80: mol_type = other DNA
gtttacgcggtcagatacaaggtaaatgagaaccctctctactcaccgacgtcggagcatgtcaatgtcctgctcacgcg

SEQ ID NO: 180045 - DNA, 80 bp, synthetic construct
  source 1..80: mol_type = other DNA
ctgcggcgcgtacagcaagtgtttgtgcggcaagtatgccaaaccagtcggcggcattccgcagccgcttcaggagagcc

SEQ ID NO: 180046 - DNA, 80 bp, synthetic construct
  source 1..80: mol_type = other DNA
aaagaaagggcttgatggactagcgccactttatgctgcagaaaataaaactgttacacaaatgcagagagaaatcaaac

SEQ ID NO: 180047 - DNA, 80 bp, synthetic construct
  source 1..80: mol_type = other DNA
agtgagataactattgttcctacccttagactctatacatccaccggtgcatcatattcgggtctccctaatttaacact

SEQ ID NO: 180048 - DNA, 80 bp, synthetic construct
  source 1..80: mol_type = other DNA
cataggaatattgtctacttaaaattgtgtactagcatatacacttacccttggcactactcatactttagaggctcagt

SEQ ID NO: 180049 - DNA, 80 bp, synthetic construct
  source 1..80: mol_type = other DNA
accattttccctcaccagctcataaatctgaggacaaataactccagcaccatagttgtgccttacattaactgcacacc

SEQ ID NO: 180050 - DNA, 80 bp, synthetic construct
  source 1..80: mol_type = other DNA
acatttggtccaagtgatcaatttgtacacacacaacatgccaagtacaccaacgctcatctgaccaacccgaatgagca

SEQ ID NO: 180051 - DNA, 80 bp, synthetic construct
  source 1..80: mol_type = other DNA
gactgcggtgtgtaaactcacctccggcacccgccctcgtgactcccgcaggccaaccagagtctatgtcgtgcacttcc

SEQ ID NO: 180052 - DNA, 80 bp, synthetic construct
  source 1..80: mol_type = other DNA
cacaactaaaaaaaccaacagaagcaactaaccgacctgctgaaaatgagtacttcgcaaaattagatagcttatgggga

SEQ ID NO: 180053 - DNA, 80 bp, synthetic construct
  source 1..80: mol_type = other DNA
acgcgcgctagccgtctttgacgtactaagtcgcgagaacttggaacgccgcggcgcacagctctgtctgacggaagcga

SEQ ID NO: 180054 - DNA, 80 bp, synthetic construct
  source 1..80: mol_type = other DNA
aaagttccaacggtggactcttgcttactataccattagaaatgagcaacacactcttttccaccactttactaggtgaa

SEQ ID NO: 180055 - DNA, 80 bp, synthetic construct
  source 1..80: mol_type = other DNA
tgtaagagcttcagccaagagttacacataaaggcaatgttgtgttgcagtccacagactgcaaagtctgctccaggatg

SEQ ID NO: 180056 - DNA, 80 bp, synthetic construct
  source 1..80: mol_type = other DNA
aagaatattacctttggaagtccagacaaaaactcagacccagaagtggcatacatgtggaccaactgcagaggagaatt

SEQ ID NO: 180057 - DNA, 80 bp, synthetic construct
  source 1..80: mol_type = other DNA
tagggaaaaccaatggtttgcagcagtgtttcactcgcatgcttcttggtgcggctgtgctgacgttgttggccatctta

SEQ ID NO: 180058 - DNA, 80 bp, synthetic construct
  source 1..80: mol_type = other DNA
tatataaagaccctaacttataccaaacagtacacacattaggccaactaaactcaacacaaaaacctgcattaaaaagt

SEQ ID NO: 180059 - DNA, 80 bp, synthetic construct
  source 1..80: mol_type = other DNA
cccccgcaagtaaaccaacttgtaggtggtcgtaatgagtaattacgggatggaaccgactactttgggtgtccgtgttt

SEQ ID NO: 180060 - DNA, 80 bp, synthetic construct
  source 1..80: mol_type = other DNA
ctaatgaaaaccttgaactcattagatacaggggttgcaaatttactatctacagacatccaacagcagactttatttta

SEQ ID NO: 180061 - DNA, 80 bp, synthetic construct
  source 1..80: mol_type = other DNA
agagggttttacaagcactatggaattattgttggaaatcaagtttaccaactggattctgatgatatattcaaaactgc

SEQ ID NO: 180062 - DNA, 80 bp, synthetic construct
  source 1..80: mol_type = other DNA
caccccagtgtgttctatgacatatttcctggagaaaaagaaccggctgtactaacacagaaagatcccagattggaaac

SEQ ID NO: 180063 - DNA, 80 bp, synthetic construct
  source 1..80: mol_type = other DNA
cagactcgggagatgcatactatggtgccacttccatcaatgactttggcattctggcagtgagagttgttaacgaacac

SEQ ID NO: 180064 - DNA, 80 bp, synthetic construct
  source 1..80: mol_type = other DNA
tatcaactactacaaggacagtgctagcaacgccgcctccaaacaagattttagtcaagatccatctaagttcactgaac

SEQ ID NO: 180065 - DNA, 80 bp, synthetic construct
  source 1..80: mol_type = other DNA
ccacaaccgcaagcctgcggtttccgttctgctcaccacaaactgacaacccttgcgtatacttcctcgttctcaacaag

SEQ ID NO: 180066 - DNA, 80 bp, synthetic construct
  source 1..80: mol_type = other DNA
acaagcagttaaacaaggctttccagttgtacttaatccaggctcaaatcagttcctaaccacgagtgataggagtgccc

SEQ ID NO: 180067 - DNA, 80 bp, synthetic construct
  source 1..80: mol_type = other DNA
tatgacattgaacgtatgctaatcaaaacaagataaaccgtacatatgtgtcaccaatctcttaatataaatgtgtataa

SEQ ID NO: 180068 - DNA, 80 bp, synthetic construct
  source 1..80: mol_type = other DNA
atcccagcccaagtccacgattggttggaattcgctcaccgtcccggtctcatggccaccgtgccgtggaccatggcgga

SEQ ID NO: 180069 - DNA, 80 bp, synthetic construct
  source 1..80: mol_type = other DNA
agggcagtcccatatcagaattccacagttgactttgctcagaacgctgtcgccatgaatcaagtggcatcaatcagaac

SEQ ID NO: 180070 - DNA, 80 bp, synthetic construct
  source 1..80: mol_type = other DNA
ctacttgagtgaaggtgacatcgccaaagagttcacagaagcttccgtttccacgtcacacggggtgcagacggcggtgc

SEQ ID NO: 180071 - DNA, 80 bp, synthetic construct
  source 1..80: mol_type = other DNA
atggacagtgtccaaataacatgttgggaaccttcgccattcgagtggtcagtgagaacgtgtccggttacaatttcacc

SEQ ID NO: 180072 - DNA, 80 bp, synthetic construct
  source 1..80: mol_type = other DNA
gggccccgtggttacccaggcaagcgtgaccaaggggcccctggtgacccaggcaaacctgacaaataaggccccccagg

SEQ ID NO: 180073 - DNA, 80 bp, synthetic construct
  source 1..80: mol_type = other DNA
atgcggggcactgtacaagaaatttcctgatagcttcgacatgcaggctatagaagttggaaaggcccggttagtgaaag

SEQ ID NO: 180074 - DNA, 80 bp, synthetic construct
  source 1..80: mol_type = other DNA
tggccttccaacaacaagtaatgcatgactttacactaacaggcccctttagctacaaagatgactatgcaaacacaaca

SEQ ID NO: 180075 - DNA, 80 bp, synthetic construct
  source 1..80: mol_type = other DNA
atcctctatgttcgtgcatgtgggtaatttgatttacagaaaccttcatctcttcaactctgatctagatgattctattc

SEQ ID NO: 180076 - DNA, 80 bp, synthetic construct
  source 1..80: mol_type = other DNA
agctctattttctcaaaatataagggtaatgaggcagtaaaaatttctgaaaacatgcttgttgctgctgcgcactacac

SEQ ID NO: 180077 - DNA, 80 bp, synthetic construct
  source 1..80: mol_type = other DNA
aatcgcctcaatggtcaatagtgtcgtcacagagaagttgctgaaaaacctgattaaactaatcagcagcttggtgataa

SEQ ID NO: 180078 - DNA, 80 bp, synthetic construct
  source 1..80: mol_type = other DNA
tgtgttccagagtggtaacagaaaaacacattcatgatgtgcgcataatgacaagggtctaccacaaggctaaacatgtc

SEQ ID NO: 180079 - DNA, 80 bp, synthetic construct
  source 1..80: mol_type = other DNA
gtgtagtcccaacccacgcagagtgtggagatgttgtagacattgatggtagggaagtgaaggtgcttaaacaacaaata

SEQ ID NO: 180080 - DNA, 80 bp, synthetic construct
  source 1..80: mol_type = other DNA
tacatgctaaaatatccaccaccaacaaaaaaaccagcctcaggcactacagtacaatactcaccagacagccaagatgg

SEQ ID NO: 180081 - DNA, 80 bp, synthetic construct
  source 1..80: mol_type = other DNA
atgcatgtgcagaatgttcccattacacaaaacccagtagagaattatgtgaatgatgttcttaatgaagtgttagttgt

SEQ ID NO: 180082 - DNA, 80 bp, synthetic construct
  source 1..80: mol_type = other DNA
ccgaggctcagtttagagtacccacttacaagccagatggttcacaaaatgagaacaaagagaagtggacccaaatgtgg

SEQ ID NO: 180083 - DNA, 80 bp, synthetic construct
  source 1..80: mol_type = other DNA
gtataacctatgggaatgcaaatccaggtgaggctggtgggaagttctctgctacttttaccccttccactgatgatgag

SEQ ID NO: 180084 - DNA, 80 bp, synthetic construct
  source 1..80: mol_type = other DNA
gagacatacgacaatgattacctttgtcgtctctacaaacgcgggcttaaagtccgtgtcgcgctcgatcgcgacaattt

SEQ ID NO: 180085 - DNA, 80 bp, synthetic construct
  source 1..80: mol_type = other DNA
tgtgaagaagaagggcttattctgaggagctccaccaccttagacagacacatagacagggtacagcaagccatcaattg

SEQ ID NO: 180086 - DNA, 80 bp, synthetic construct
  source 1..80: mol_type = other DNA
gctcgctaacattccacttttcaacagcgagcatccacccagaatttacaatgcaaatttgcacctcagaggtgctttgc

SEQ ID NO: 180087 - DNA, 80 bp, synthetic construct
  source 1..80: mol_type = other DNA
ccctccgagtgaccagtcaccttccagactatgcatacactgaatttagcctgatattgtccccctagccccgggcccag

SEQ ID NO: 180088 - DNA, 80 bp, synthetic construct
  source 1..80: mol_type = other DNA
caagcggtaataccgccgaaccatattacaattacaaaaagccatcaaactggatgccaggtccgggcaccaggctaaac

SEQ ID NO: 180089 - DNA, 80 bp, synthetic construct
  source 1..80: mol_type = other DNA
atgatcatcaacccagtgacgacaactggctaaattttgatggtactttccttggaaatctgctgatattcccacaccaa

SEQ ID NO: 180090 - DNA, 80 bp, synthetic construct
  source 1..80: mol_type = other DNA
atttacaacataacagtcactaggaaatcatcaagcagacaggaggacttgatactagtcctgcctctcaaaatggatga

SEQ ID NO: 180091 - DNA, 80 bp, synthetic construct
  source 1..80: mol_type = other DNA
gcgaaaaaagtgcagtattatcatgtagatacaaatttacctttctttttggtggcaaccctattacccagcagactctc

SEQ ID NO: 180092 - DNA, 80 bp, synthetic construct
  source 1..80: mol_type = other DNA
gagtgcaagatcctctgttttgtgtcagcatgcaacgatttttccgtgcgtctgctgaaagatactccctttattgagca

SEQ ID NO: 180093 - DNA, 80 bp, synthetic construct
  source 1..80: mol_type = other DNA
atttcaagttaataatgaattatggcagggtgtgaaagcttgtgtaaagtccaaatttagagaactgtttggcaccaatg

SEQ ID NO: 180094 - DNA, 80 bp, synthetic construct
  source 1..80: mol_type = other DNA
tagaggaagtcatagtcgaaaaaacgaaacagacattggcttcagttgcaacaggttcaaaatatacccaaaaagtgcca

SEQ ID NO: 180095 - DNA, 80 bp, synthetic construct
  source 1..80: mol_type = other DNA
ttctctacctggaaaatcacactcaaggaaatggctcagattaggagaaagtgtgaactcttcacttacctacgctttga

SEQ ID NO: 180096 - DNA, 80 bp, synthetic construct
  source 1..80: mol_type = other DNA
aaagaaaaacacttaacaacgacggacaattcactttctcataaaccaaaccattactcaagaacctcacaccgcagtgc

SEQ ID NO: 180097 - DNA, 80 bp, synthetic construct
  source 1..80: mol_type = other DNA
aagagggccccggccgcttcctccgctcctcgccctcctcctccttctttggcggtagccgcgggtgtggcgtgccaagc

SEQ ID NO: 180098 - DNA, 80 bp, synthetic construct
  source 1..80: mol_type = other DNA
aatagaccacaatccagacgggtcttcagtagccaacaacagtactaccagtggaaatagttttccatcattagaaaact

SEQ ID NO: 180099 - DNA, 80 bp, synthetic construct
  source 1..80: mol_type = other DNA
atacaaacactgtgtgaacagaccaggaaaaaatactttgctgctacaaagtctgcctttcctgcttatgctacacttgt

SEQ ID NO: 180100 - DNA, 80 bp, synthetic construct
  source 1..80: mol_type = other DNA
acccatctgtatggcagtctaatgtagccagatggtttttagaaaatgtaaagaaaccattagacactaaacaaaatatg

SEQ ID NO: 180101 - DNA, 80 bp, synthetic construct
  source 1..80: mol_type = other DNA
tatcataaagctaaacatataaaagcatggtgccctagaccacctagagctgttccatacaaatatgttaactataataa

SEQ ID NO: 180102 - DNA, 80 bp, synthetic construct
  source 1..80: mol_type = other DNA
gccgggtctcaatttagatatacagacccagacacttacacacacccaggctttatatcatgctggtatcaaacctcatt

SEQ ID NO: 180103 - DNA, 80 bp, synthetic construct
  source 1..80: mol_type = other DNA
aagaccaatggcaataacaccgtgcaggctatcgtcaccaacgcaggcatgggcgtaggggttggaaatctgaccattta

SEQ ID NO: 180104 - DNA, 80 bp, synthetic construct
  source 1..80: mol_type = other DNA
acatcagcacacccttcaaaatagataaagacagcagcccaagctaccatcctggtatactaatgactaccaaacacaaa

SEQ ID NO: 180105 - DNA, 80 bp, synthetic construct
  source 1..80: mol_type = other DNA
aaaaaaatggcttcgaccgttcttagacttatagattagtctaaccgggtattaaaacactatttaacaatgaataacca

SEQ ID NO: 180106 - DNA, 80 bp, synthetic construct
  source 1..80: mol_type = other DNA
gaaaagcagatggaacacctacgggtagctgattctaaaactcaggagaaaattaagcatgagattgacacactccatga

SEQ ID NO: 180107 - DNA, 80 bp, synthetic construct
  source 1..80: mol_type = other DNA
cctgtaagtactgggacaggcctagtagaattaaccacacagacccccccttttacccctggatgcctaaatacaatgta

SEQ ID NO: 180108 - DNA, 80 bp, synthetic construct
  source 1..80: mol_type = other DNA
acactactatcaactattacaaggactcttacgcagccacagcaggcaagcagagcctcaaacaagaccccgacaaattt

SEQ ID NO: 180109 - DNA, 80 bp, synthetic construct
  source 1..80: mol_type = other DNA
acaagagcgatccccgccttaaggtagactttgaggaggcgattttctcaaagtacattggcaattccatcttagaggtg

SEQ ID NO: 180110 - DNA, 80 bp, synthetic construct
  source 1..80: mol_type = other DNA
ggcaaggatccacacacatctgataaggccgggcaaggtatctctgcatgggacaagacacttaacatcttaatgtcccc

SEQ ID NO: 180111 - DNA, 80 bp, synthetic construct
  source 1..80: mol_type = other DNA
taaactcagaagtacacaacctgtacatatgctgtattatatgtccctacacaaaacctaaactatacaataacacagat

SEQ ID NO: 180112 - DNA, 80 bp, synthetic construct
  source 1..80: mol_type = other DNA
gcttcgggctcggttttaggccttccggactacaaatatggccgatttagtgacgtcacggcagccattttaagtagttg

SEQ ID NO: 180113 - DNA, 80 bp, synthetic construct
  source 1..80: mol_type = other DNA
aaaatttgggacaggcccgctagacaaaacctacaagacacccctttctatccctggatgcctaaggctcccccccagtg

SEQ ID NO: 180114 - DNA, 80 bp, synthetic construct
  source 1..80: mol_type = other DNA
gaattgtgtctgctatggtcatcattattagaaactcttcagatccacatactgttattgctactctaacactaattggt

SEQ ID NO: 180115 - DNA, 80 bp, synthetic construct
  source 1..80: mol_type = other DNA
tggtatgttttatgatgggtttgctgggtttgaaaagacagccaatggcctttatggtatcaacccggcaaacacaatgg

SEQ ID NO: 180116 - DNA, 80 bp, synthetic construct
  source 1..80: mol_type = other DNA
aatgtgtggtggcttactcatttctaaagttgaagggaatttcaaaatccttggcatgcatattgcgggcaatggagaaa

SEQ ID NO: 180117 - DNA, 80 bp, synthetic construct
  source 1..80: mol_type = other DNA
ttcttgtgcacagcaacaactgattgtagaggtagatacattgaagaaaggcttagacaatcttgctccactgtatgctt

SEQ ID NO: 180118 - DNA, 80 bp, synthetic construct
  source 1..80: mol_type = other DNA
catgacagagtggtcctgcagctaaaagaacttctaaatggcctaggattttccactccagatgagaaattccaaaagga

SEQ ID NO: 180119 - DNA, 80 bp, synthetic construct
  source 1..80: mol_type = other DNA
taactgggatatctttggtaactggtttgatctcacctcatgggttaaatatgtatacttaggactgtatgtagtagcag

SEQ ID NO: 180120 - DNA, 80 bp, synthetic construct
  source 1..80: mol_type = other DNA
cagaggcatatactgcctactagaagacatgccactgtgggccatgacctttggatacactgactatgttagcacacagc

SEQ ID NO: 180121 - DNA, 80 bp, synthetic construct
  source 1..80: mol_type = other DNA
gccttccggactacaaaaatcgccatttttgtgacgtcacggacgccattttaagtaaggcggaagttcgtgtactatac

SEQ ID NO: 180122 - DNA, 80 bp, synthetic construct
  source 1..80: mol_type = other DNA
gggctgtaccataccggggtgagggagtagacctgaagcaaggggctataacaccgctgaccccagtgaccagcatcaca

SEQ ID NO: 180123 - DNA, 80 bp, synthetic construct
  source 1..80: mol_type = other DNA
ttgactggataaagagcatgttaccacaagcccaactgaaagtggagtatctaaataaactcaaacagcttaatctccta

SEQ ID NO: 180124 - DNA, 80 bp, synthetic construct
  source 1..80: mol_type = other DNA
taacgttttctggaagtgtcaaactcacttccggccacttgaaatgccgagtgaagatggaaaagctaacactgaaaggg

SEQ ID NO: 180125 - DNA, 80 bp, synthetic construct
  source 1..80: mol_type = other DNA
tcttcctacctcctcagaagacacatttatagacaactttttaaagactgtttttccagacgaaaaacctagacattcaa

SEQ ID NO: 180126 - DNA, 80 bp, synthetic construct
  source 1..80: mol_type = other DNA
ctcaatgcaaatcttgccgcacattagaagagatcttaaggaatggctggaagatttgcatggaataaatgctgacgagc

SEQ ID NO: 180127 - DNA, 80 bp, synthetic construct
  source 1..80: mol_type = other DNA
tggggtgattggcattatcactgcaggtggtgaaggaatagtagcctttgctgacatcagggacctttgggtgtatgaag

SEQ ID NO: 180128 - DNA, 80 bp, synthetic construct
  source 1..80: mol_type = other DNA
tacacgaattaagaaaagcatactttaaacaactaacatcacaaggaccacaaacaacaaattcagacgacggctacagc

SEQ ID NO: 180129 - DNA, 80 bp, synthetic construct
  source 1..80: mol_type = other DNA
tcgagaagcgcaatggttttcaagcgtttggcatagccatgatgctttttgcggttgtggcgaccctattgggcatatta

SEQ ID NO: 180130 - DNA, 80 bp, synthetic construct
  source 1..80: mol_type = other DNA
tacagacatgaaacctgtgacttttttgtaacatacaatagaaaacatccatttacagacagccaactaacaggaccaat

SEQ ID NO: 180131 - DNA, 80 bp, synthetic construct
  source 1..80: mol_type = other DNA
gggtgccttggagaatataaccttgtgggttgttgtggtggcattggtagccgttcgtgtgataatgagtgtcttgggtg

SEQ ID NO: 180132 - DNA, 80 bp, synthetic construct
  source 1..80: mol_type = other DNA
gcgcatgctgatcttgatccagcataccaggtagtagatggtcacggctaaaaagacgagctgcatgaacacggcgtagc

SEQ ID NO: 180133 - DNA, 80 bp, synthetic construct
  source 1..80: mol_type = other DNA
cgccgccgcggtggcggcgacagcgacgagcgaggtgggcgagaaaaccgcggagcaagaggtagcggctgcgtgtccgg

SEQ ID NO: 180134 - DNA, 80 bp, synthetic construct
  source 1..80: mol_type = other DNA
aaaacctctcagcctgacacatcagtgtgtaggttctacactttagagagcaaaacatggacaaattcatcaaagggatg

SEQ ID NO: 180135 - DNA, 80 bp, synthetic construct
  source 1..80: mol_type = other DNA
cgggaagcaggagagtgtgcagcacttttacatgcggttagccggcttctgtgcctcaaccacctgcctctacgcgggtc

SEQ ID NO: 180136 - DNA, 80 bp, synthetic construct
  source 1..80: mol_type = other DNA
gaggatataggattttcttctcagttaattgaccaaatttgcaattcaaagcatatatttaagtccaaatattatgaagt

SEQ ID NO: 180137 - DNA, 80 bp, synthetic construct
  source 1..80: mol_type = other DNA
atggaagggatccccagcaattttccagtacaccatggcaaaggtactagaccctttcagaaaagccaacaatgatgtca

SEQ ID NO: 180138 - DNA, 80 bp, synthetic construct
  source 1..80: mol_type = other DNA
gtgtggcatttatacctccaatggctgatcttccggataaaggaaaaccatttgattctagatttgtcttttgtagtaca

SEQ ID NO: 180139 - DNA, 80 bp, synthetic construct
  source 1..80: mol_type = other DNA
atgtcatgccatccataatttcaaggtctgaaattatagaatgtaactatgaatgagtcgagaatttatacacaggacgt

SEQ ID NO: 180140 - DNA, 80 bp, synthetic construct
  source 1..80: mol_type = other DNA
gggaggatctgtcatcgggagcaccggcggcaacgacgagacggcgtttttccaggacgatgataccaccaccgcgcccg

SEQ ID NO: 180141 - DNA, 80 bp, synthetic construct
  source 1..80: mol_type = other DNA
ctttgacagcagtagaaacaggacatacctcccaggtcgtgccaggcgatacaatgcagaccagacatgttaagaactac

SEQ ID NO: 180142 - DNA, 80 bp, synthetic construct
  source 1..80: mol_type = other DNA
tgaactcgaagagatgggggcacaagtatccacgcagcggtccgggtctcacgagaccagcactgtagcgagagagggtt

SEQ ID NO: 180143 - DNA, 80 bp, synthetic construct
  source 1..80: mol_type = other DNA
gaagcaagttaagggtgtgttcccatctctcctagtcgccgcctggtcattcggtgttcatctaagtaacaagaccctgg

SEQ ID NO: 180144 - DNA, 80 bp, synthetic construct
  source 1..80: mol_type = other DNA
gccgtagcccagtccgcgaccccctctgtttcttcatctattagcagcctccgggccgcgacttcggtggcgactgccgc

SEQ ID NO: 180145 - DNA, 80 bp, synthetic construct
  source 1..80: mol_type = other DNA
caatagaaaccaaagatgtaagatgggaatacacatacaccaatctaatgagacctatttataactcatgttctacctta

SEQ ID NO: 180146 - DNA, 80 bp, synthetic construct
  source 1..80: mol_type = other DNA
tttatacagctggatacaagatctgtaactaccatctggctacacaagaggaccttcagaatgcagtgagtgtgatgtgg

SEQ ID NO: 180147 - DNA, 80 bp, synthetic construct
  source 1..80: mol_type = other DNA
ggcggcgcgctgcgcgcgccgcccagtagggagcgccatgcgccccgccccgcgcatgcgcgaggccccccctcgcgggc

SEQ ID NO: 180148 - DNA, 80 bp, synthetic construct
  source 1..80: mol_type = other DNA
agagattcacccgtggcagacttcggagacgacggattagacgccctcgtcgccgcactcgacgaagaacagtaaggagg

SEQ ID NO: 180149 - DNA, 80 bp, synthetic construct
  source 1..80: mol_type = other DNA
cgcagccgggactcgctgctcctgacgcgaatacgcttctccaaccaacggtgtttcggacgcgggcgtttgagacatcc

SEQ ID NO: 180150 - DNA, 80 bp, synthetic construct
  source 1..80: mol_type = other DNA
ctatgagccactggagcagacccgtccaccatgcaacggggatcgagcacctctggtaccagtctgttattaacagccat

SEQ ID NO: 180151 - DNA, 80 bp, synthetic construct
  source 1..80: mol_type = other DNA
gttttattactggctggatgcccctcattatatgtggcactgggaacactcaatttaactttataacccatgaagacgat

SEQ ID NO: 180152 - DNA, 80 bp, synthetic construct
  source 1..80: mol_type = other DNA
aaggcaactggacagaagccatgcaggaggtaaagcaaacccttgcggagcatcccaggtataaaggaaccaaaaacata

SEQ ID NO: 180153 - DNA, 80 bp, synthetic construct
  source 1..80: mol_type = other DNA
ttttcggcagaaatatattacagctattaggaatgactttaaattgtccattggcaaaagtagagccaataccagtacac

SEQ ID NO: 180154 - DNA, 80 bp, synthetic construct
  source 1..80: mol_type = other DNA
accctcactgggacacactatacgggggcttagcctatggatttacacccaatccatcgtcagaaaatttaaacaacgca

SEQ ID NO: 180155 - DNA, 80 bp, synthetic construct
  source 1..80: mol_type = other DNA
tgatcgacaactttctagaacacagctcacccagccgcgaccgcttcgtgcagcttcttttctatatgtgggccggcacc

SEQ ID NO: 180156 - DNA, 80 bp, synthetic construct
  source 1..80: mol_type = other DNA
gttgtgacgtcacggccgccattttgtttaacaaaatggccgacttccttccgctttttcaaaaagtaacgtaccggcgg

SEQ ID NO: 180157 - DNA, 80 bp, synthetic construct
  source 1..80: mol_type = other DNA
aattgctttggccacaaaaatttgtaaacattatggtgttgagcctgagaagaatatatacacaaaacctgttgcatctg

SEQ ID NO: 180158 - DNA, 80 bp, synthetic construct
  source 1..80: mol_type = other DNA
cagcaggtattgtgacaatctggtaccagacaaattttgtggtaccgtctggagctcccacttcagcatacataatagct

SEQ ID NO: 180159 - DNA, 80 bp, synthetic construct
  source 1..80: mol_type = other DNA
cttcttctcccgttccgggttggtaggagtggtcaatctcactgatggtggcaccgataccacaggatatgccacctggg

SEQ ID NO: 180160 - DNA, 80 bp, synthetic construct
  source 1..80: mol_type = other DNA
aaatgtatggttatataatcaaattgcattacaacttaaaaatcatgcattatgtaacaacaaattatatttggatatat

SEQ ID NO: 180161 - DNA, 80 bp, synthetic construct
  source 1..80: mol_type = other DNA
ttaattccccacctgaaactaacaagagggcactaaagaacctcctagaccagggcttggcaaactgtttttgtaagagc

SEQ ID NO: 180162 - DNA, 80 bp, synthetic construct
  source 1..80: mol_type = other DNA
gactttccaaaagatggattggtccacagttactttcttaaagaggcacttcaaaccagacactaagtacaaattcttga

SEQ ID NO: 180163 - DNA, 80 bp, synthetic construct
  source 1..80: mol_type = other DNA
actgacattcacattttgcggatcagcgatggcaacgggaaagctgttattagcatactccccgcctggtgccgatgtgc

SEQ ID NO: 180164 - DNA, 80 bp, synthetic construct
  source 1..80: mol_type = other DNA
tcttgatgagatgagtccactatatgcctcagaaaacaagcgggtcacttgtatgctaaaggatctgaaaactatgacag

SEQ ID NO: 180165 - DNA, 80 bp, synthetic construct
  source 1..80: mol_type = other DNA
ccttcaccagggtctggaacgggtgccaagattgtgcaggcacctgttttctatccacccgtcctacagcccatacaagt

SEQ ID NO: 180166 - DNA, 80 bp, synthetic construct
  source 1..80: mol_type = other DNA
aaaatcagcaaatttattgactggctcaaagaaaaacttttaccaactgtccaacggaaaaaagagactctaaccgaatg

SEQ ID NO: 180167 - DNA, 80 bp, synthetic construct
  source 1..80: mol_type = other DNA
gtgtctctgtgctagtctaacaacacctgtgtaatgcgtacaaccagaaaaaagacgcgaaagcaacgtgtatggggggg

SEQ ID NO: 180168 - DNA, 80 bp, synthetic construct
  source 1..80: mol_type = other DNA
ttagaaacactttagtaggaaacatatctagatattacactcattggtctggatccctagaaatgacgtttatgttttgt

SEQ ID NO: 180169 - DNA, 80 bp, synthetic construct
  source 1..80: mol_type = other DNA
gcaagaacctcacggcgcacaccaagatcaagcacacttgtgcgctcatcggcagtcgtctagccaacaacgtgcccaag

SEQ ID NO: 180170 - DNA, 80 bp, synthetic construct
  source 1..80: mol_type = other DNA
tggacttactccattaactcaactcacgcctgatttgatatctatagtgttattgatttggaaaaagctatcataatggg

SEQ ID NO: 180171 - DNA, 80 bp, synthetic construct
  source 1..80: mol_type = other DNA
gatgtttacctacgctcgttttgacatggaagttacagtggtcactaacaacaggggtctcatgcaaatcatgtttgtac

SEQ ID NO: 180172 - DNA, 80 bp, synthetic construct
  source 1..80: mol_type = other DNA
gccaagccccacaaatgcccctcctctgtcaagagatagtgaaccatcatacaacttcaagtcagttatttcctcaagat

SEQ ID NO: 180173 - DNA, 80 bp, synthetic construct
  source 1..80: mol_type = other DNA
ggtggtgagggacgacggccagagacaagacgcggaaaagaggaagtccccaggaggacggccgcgcgcggcgctactcg

SEQ ID NO: 180174 - DNA, 80 bp, synthetic construct
  source 1..80: mol_type = other DNA
gttcaacaggtgtatacttttgtgcatcaaagaacaagcactaccccgtaactttcgagggacccggactcgtggaggtg

SEQ ID NO: 180175 - DNA, 80 bp, synthetic construct
  source 1..80: mol_type = other DNA
atgtcaaagtactactacaaaggcaacccaaacagcacatatgacttcagcaactatagtactccaacaaactatgctaa

SEQ ID NO: 180176 - DNA, 80 bp, synthetic construct
  source 1..80: mol_type = other DNA
agtcaaggatgttttaacaaaaggcatccctactctacaatccccctcagttgaagcatgtggatattctgacaggatca

SEQ ID NO: 180177 - DNA, 80 bp, synthetic construct
  source 1..80: mol_type = other DNA
catttacaaaatcgggcaaattgaatactgccatggcatgtgaactgtgtaaagattgtcataaaccaacaaactttaaa

SEQ ID NO: 180178 - DNA, 80 bp, synthetic construct
  source 1..80: mol_type = other DNA
cttctgcaccctcggctcctgcgtccccggccttgccttccccctctaagttgagggggcgcagtccgaccgcctgggtg

SEQ ID NO: 180179 - DNA, 80 bp, synthetic construct
  source 1..80: mol_type = other DNA
acagacactccttactacccctgggcacctattcccaaacaacctttctctgtatcttttaaacttggctacaaataaaa

SEQ ID NO: 180180 - DNA, 80 bp, synthetic construct
  source 1..80: mol_type = other DNA
gcaccaccgagaacacggaaggatgccatgttgggtactcacttaatctgggacattggactgcaatctagcgcgacaat

SEQ ID NO: 180181 - DNA, 80 bp, synthetic construct
  source 1..80: mol_type = other DNA
ataagtataaaggagatggcacaaataagaagaaagtttgagcttttcacgtatgtgagatttgattcagaaatcactct

SEQ ID NO: 180182 - DNA, 80 bp, synthetic construct
  source 1..80: mol_type = other DNA
tagtagctgaatttaaagctcagggaaccgacaccatagccaggtgcggctgcaagatgggtgtgtactactgtgaatct

SEQ ID NO: 180183 - DNA, 80 bp, synthetic construct
  source 1..80: mol_type = other DNA
cactttaatggttctgagacagacatagaaagctttttgggacgtgcagcttgtgtgcatataactgaaatagaaaacaa

SEQ ID NO: 180184 - DNA, 80 bp, synthetic construct
  source 1..80: mol_type = other DNA
ctcggagctgtgttacctcatctatgtacaactgccgtcgctgcgcgaagactacgcgcagcttagtgacgtgctctact

SEQ ID NO: 180185 - DNA, 80 bp, synthetic construct
  source 1..80: mol_type = other DNA
gaaccaaaacctgttgtggatgccaatgaccatatggaatttggggcacgaacaaatttgccccatgttctaatgaattt

SEQ ID NO: 180186 - DNA, 80 bp, synthetic construct
  source 1..80: mol_type = other DNA
aagtggcaaccaccagagctcacaggtgtttggcttccaagtgcaaccagggttggatagtgtgtttaagcatactttgc

SEQ ID NO: 180187 - DNA, 80 bp, synthetic construct
  source 1..80: mol_type = other DNA
ccactatcacccatggccaggcccggcacctcctcgaaggcgcagctggcccacctaaagagagatctggggccaaggac

SEQ ID NO: 180188 - DNA, 80 bp, synthetic construct
  source 1..80: mol_type = other DNA
gggttcggctcgagaagtgacggagcgcctcacgtcagtatgatgtccgatccgcgtcagccccgacgtggttatggtca

SEQ ID NO: 180189 - DNA, 80 bp, synthetic construct
  source 1..80: mol_type = other DNA
atgtcttcatcctctgtggtggggatatcggaggctaagtcgctctccgcttcttcagagtcggacatggataggaaagg

SEQ ID NO: 180190 - DNA, 80 bp, synthetic construct
  source 1..80: mol_type = other DNA
gtacttgcacaaatttagcaccaattataacaagccaaagacaaagggcagcaatgagttagaacccaaacatttcctca

SEQ ID NO: 180191 - DNA, 80 bp, synthetic construct
  source 1..80: mol_type = other DNA
cacaaatattcagaccacaacatgtaccaacactagcacgaacgtcgtttgtgatagtttgaattatacggtccataaaa

SEQ ID NO: 180192 - DNA, 80 bp, synthetic construct
  source 1..80: mol_type = other DNA
ttgttgaagaaggagagctgggtggagctaaactcctgaggcacatgaacctgggacctattgatgcagatctcgcagtg

SEQ ID NO: 180193 - DNA, 80 bp, synthetic construct
  source 1..80: mol_type = other DNA
gtattagaaaacatacctctatacacagctttttatggctacacagactttattcaaatggaaataggcaaaggacaaga

SEQ ID NO: 180194 - DNA, 80 bp, synthetic construct
  source 1..80: mol_type = other DNA
tcaacaagaagtggtgatgatggatgatctcggccagaacccagatgggcaagatttagctatgttttgccaaatggttt

SEQ ID NO: 180195 - DNA, 80 bp, synthetic construct
  source 1..80: mol_type = other DNA
tgtgggctggtggatcaagtggtaccccatgattgcacaccaaaaggaagtgtttgaggcaatagtaaactgtggaccgt

SEQ ID NO: 180196 - DNA, 80 bp, synthetic construct
  source 1..80: mol_type = other DNA
caaagtggcagattacactcaaagaaatggctcagatcaggaggaaatgtgaactcttcacatacctgcgctttgattca

SEQ ID NO: 180197 - DNA, 80 bp, synthetic construct
  source 1..80: mol_type = other DNA
aaggtacatttataaagtcctaccacagggatggaagggatccccagcaatttttcaatactccatgagaaaggtactag

SEQ ID NO: 180198 - DNA, 80 bp, synthetic construct
  source 1..80: mol_type = other DNA
agcaatggaaggtgttaagtatggcctaactataactcctgctgataaatctactactttcagaaaactggactataata

SEQ ID NO: 180199 - DNA, 80 bp, synthetic construct
  source 1..80: mol_type = other DNA
tgtacccgcctgtgtgaggcgaaactctgagaagtctaccgagtcgagttacaagtcactaaaacacttacacgagttat

SEQ ID NO: 180200 - DNA, 80 bp, synthetic construct
  source 1..80: mol_type = other DNA
actatgacacaggtaaaggtgttggcttcaatacatggaaaattagtttacaagagatggcacaaattagaagaaaattt

SEQ ID NO: 180201 - DNA, 80 bp, synthetic construct
  source 1..80: mol_type = other DNA
atcttagaagtagaaaacttcaacgcaactgacgcagctgataaaaagaaacaattcactgtgtggcctatcacttacac

SEQ ID NO: 180202 - DNA, 80 bp, synthetic construct
  source 1..80: mol_type = other DNA
aaattcaacagttaccaataaaagcagctaaattatacttagaggcaacaaaaaccttgctaggaaacaccttcacaaat

SEQ ID NO: 180203 - DNA, 80 bp, synthetic construct
  source 1..80: mol_type = other DNA
gacaagctgctgatgcccacggcggcttaattttggccataccactggatatgactaataccatgttttccacaacacta

SEQ ID NO: 180204 - DNA, 80 bp, synthetic construct
  source 1..80: mol_type = other DNA
agggggacagttttcagcgcggacgggggtgtgcggagacggtgacgagggtggagacggcgcgttgcggggccgggcag

SEQ ID NO: 180205 - DNA, 80 bp, synthetic construct
  source 1..80: mol_type = other DNA
agcccgacgcgcgcaaactccatgaggttgcgggccaggtagtagacggcggtgtcctcgcgtacatagcaaaagacata

SEQ ID NO: 180206 - DNA, 80 bp, synthetic construct
  source 1..80: mol_type = other DNA
tgcatatacaaaatgatgccattacacaaaattcagttgaaaattacattgataatgtgcttaatgaagttttggtggta

SEQ ID NO: 180207 - DNA, 80 bp, synthetic construct
  source 1..80: mol_type = other DNA
cggctaatgccgtagttggatatggtgaatggccaacactgctcaattccaatgaagcaaattcagtggatgcacccaca

SEQ ID NO: 180208 - DNA, 80 bp, synthetic construct
  source 1..80: mol_type = other DNA
cattgtaattgcacttcaggtgtttattattcccagtactatggaaaatattacccaataatatgtgaaaaacccacaaa

SEQ ID NO: 180209 - DNA, 80 bp, synthetic construct
  source 1..80: mol_type = other DNA
acaacactggaaccaacactacaagcatcaacatgtacacagtgcagttggaaagaacagctgatttgatgagtgaagtt

SEQ ID NO: 180210 - DNA, 80 bp, synthetic construct
  source 1..80: mol_type = other DNA
aaatctacagaacaaattgactcaaagaatttctaatctagaggacatggttggaaggaagtgcaatttcaatccattgg

SEQ ID NO: 180211 - DNA, 80 bp, synthetic construct
  source 1..80: mol_type = other DNA
cgggttccatgggttctgcgccactatcgtcatcgtcctctccctgctcctcatcgtccgccaaggcgtcgtggatcacc

SEQ ID NO: 180212 - DNA, 80 bp, synthetic construct
  source 1..80: mol_type = other DNA
tttggatagaaggtggtccctattacccaagcagataccaggctggtgtaatgaaaggagttggaccagcagaacctggg

SEQ ID NO: 180213 - DNA, 80 bp, synthetic construct
  source 1..80: mol_type = other DNA
gggacctgggtttacagtctagttgttccatggtggcgccctggatttccaatacggtgtacaggcgatgtgttcgcgac

SEQ ID NO: 180214 - DNA, 80 bp, synthetic construct
  source 1..80: mol_type = other DNA
tctgttgccttagttggagaaagggctttttactacctgcagattttgggtagtaaatctagatttgatgaccttgttaa

SEQ ID NO: 180215 - DNA, 80 bp, synthetic construct
  source 1..80: mol_type = other DNA
taggttacaaccagtcactgctatcaagcctactcagttcccaacgcagcacataccccccgcctctcctgccatgagga

SEQ ID NO: 180216 - DNA, 80 bp, synthetic construct
  source 1..80: mol_type = other DNA
aattatgcaattctaaacacatatataagacatcatattatgaagtagaagggggaatgccttcaggctgtgctggaact

SEQ ID NO: 180217 - DNA, 80 bp, synthetic construct
  source 1..80: mol_type = other DNA
gtgctggaaactaccagacgcacttaaagaaatgggtgtatttggacaaaacatgtttttccacgcactcgggagaacag

SEQ ID NO: 180218 - DNA, 80 bp, synthetic construct
  source 1..80: mol_type = other DNA
gatgagaggctggaagtagacttagatacagcagtcttatcaaagtataagggaaacccagatgtaaagtggaatgagta

SEQ ID NO: 180219 - DNA, 80 bp, synthetic construct
  source 1..80: mol_type = other DNA
cactaatttgtggtaaggccttaatactccagaataaaagaactaaggccagctattctataaatacagtggtccaacaa

SEQ ID NO: 180220 - DNA, 80 bp, synthetic construct
  source 1..80: mol_type = other DNA
agcacatagttcaacccaaagcagactcatataagcaaacatctgcaaataacaactactatacaaaagtacagagtgtg

SEQ ID NO: 180221 - DNA, 80 bp, synthetic construct
  source 1..80: mol_type = other DNA
gactgcacacaagctacttactactgtaaacacaagaataggtattttccaatcacagttactagccatgactggtatga

SEQ ID NO: 180222 - DNA, 80 bp, synthetic construct
  source 1..80: mol_type = other DNA
aatccagtacagagacattaaaatcgatgtcaaggagactccagcccccgaatacattaacgacctgctacaatcagtag

SEQ ID NO: 180223 - DNA, 80 bp, synthetic construct
  source 1..80: mol_type = other DNA
gggccccggcgctgccatggcatggagatggtggaaacgaaggcgccgctggtggtggagacgccgcttcgccggagaga

SEQ ID NO: 180224 - DNA, 80 bp, synthetic construct
  source 1..80: mol_type = other DNA
cacaactaactaccctcagacagtactactttttctgggaaacatacgcagcagcaagcaacaccacccctataacacac

SEQ ID NO: 180225 - DNA, 80 bp, synthetic construct
  source 1..80: mol_type = other DNA
attttgctacgtcactaaccacgtgacacccacaggccaaccgaatgctatgtcatccatttcctgggccgggtctacgt

SEQ ID NO: 180226 - DNA, 80 bp, synthetic construct
  source 1..80: mol_type = other DNA
cacttgatatgagcaacagtcttttctccactacattactgggtgagatactcaactactttaccaactggtcaggtagt

SEQ ID NO: 180227 - DNA, 80 bp, synthetic construct
  source 1..80: mol_type = other DNA
tcctatttagaatgactttcgggaatcttttctcaaaatttcacctaaaccctggagttgtgacaggttctgctgttggg

SEQ ID NO: 180228 - DNA, 80 bp, synthetic construct
  source 1..80: mol_type = other DNA
ccatctcaggctaccaagcctggaaagatgagtttgaaacctgttccgcctggaacagacccccaagaaaataccacaca

SEQ ID NO: 180229 - DNA, 80 bp, synthetic construct
  source 1..80: mol_type = other DNA
actgttcccgctgcgagctactaagaaaacacggcctagcatgagcgactggatcccacctacacaaaatgtcccagata

SEQ ID NO: 180230 - DNA, 80 bp, synthetic construct
  source 1..80: mol_type = other DNA
gtgttttatacaaaattggaaatatcctggggatccatgtgggtggtaatggcagggatgggttttctgcaatgttactg

SEQ ID NO: 180231 - DNA, 80 bp, synthetic construct
  source 1..80: mol_type = other DNA
tggtgttctcgctgcggacgggcgtggaaaactcagccattcggaagtccacttcctgggaggagtctacgtcctcatat

SEQ ID NO: 180232 - DNA, 80 bp, synthetic construct
  source 1..80: mol_type = other DNA
actgcatgaagccggcagtgcaccttcctaccacgtggtgcgaggtgatatcgctaccgcgtcagaaactgttatagtta

SEQ ID NO: 180233 - DNA, 80 bp, synthetic construct
  source 1..80: mol_type = other DNA
gtcacggccgccattttgtgtcacaaaatggcggctaacttccgcttttttgaaaaaaggcgcgaaaaaacggcggcggc

SEQ ID NO: 180234 - DNA, 80 bp, synthetic construct
  source 1..80: mol_type = other DNA
ttggctttcctggtgagttagcatacaaactgtgtaacaccacacacatttatagggatgaaatatacacagtaaaaggt

SEQ ID NO: 180235 - DNA, 80 bp, synthetic construct
  source 1..80: mol_type = other DNA
atagtatcagggccacaccaacacccaggcatacaaatgcttatgaaaaagaaagtactcataccaagcttcagaacaaa

SEQ ID NO: 180236 - DNA, 80 bp, synthetic construct
  source 1..80: mol_type = other DNA
ctgatacatggtgaccctggatcaggaaaatcgcttgccaccacagttatatctagaggtctagccagtgaaggtgaagt

SEQ ID NO: 180237 - DNA, 80 bp, synthetic construct
  source 1..80: mol_type = other DNA
ttccaccgatgggacctcagacgtggcttctttgggccggcagctgttaaaagaatgcaagcagaatcaacagatgctct

SEQ ID NO: 180238 - DNA, 80 bp, synthetic construct
  source 1..80: mol_type = other DNA
ctgtgaacaacaaggttccattaccaacatcagagatgtaagggagttgggctacgctccaatcaacacccccactaaaa

SEQ ID NO: 180239 - DNA, 80 bp, synthetic construct
  source 1..80: mol_type = other DNA
ctatatttttaagtccacacagaacaaacttacaatttccaactgcatatgtagacactacatacaaccccctaaatgac

SEQ ID NO: 180240 - DNA, 80 bp, synthetic construct
  source 1..80: mol_type = other DNA
cgtggtactcttgcacctcggtacatttgtacgccagttttatctcccccaccccaattgtaacttagaagtcaaacaaa

SEQ ID NO: 180241 - DNA, 80 bp, synthetic construct
  source 1..80: mol_type = other DNA
gtccagtgcctaatcaccgttcctcattttgtgtgcctcctcaaatgttccagaagtcggccacaggggaggtggctgaa

SEQ ID NO: 180242 - DNA, 80 bp, synthetic construct
  source 1..80: mol_type = other DNA
ggtaaacttccaaataaagcttgcagagtaacacattcgaggccctcctctgttcacttagcggtgtctacctcttaaag

SEQ ID NO: 180243 - DNA, 80 bp, synthetic construct
  source 1..80: mol_type = other DNA
atcaagtggaccattagactaattagtgctttatccattatagttagaaacagtacagatacccccactgtcatagccac

SEQ ID NO: 180244 - DNA, 80 bp, synthetic construct
  source 1..80: mol_type = other DNA
tcccgttcaagacgaccgtcgtcagcgcctcattaccgtctcgccagctgaagatggaaccctcgcgcttcatgcacagg

SEQ ID NO: 180245 - DNA, 80 bp, synthetic construct
  source 1..80: mol_type = other DNA
tcacccaccaaattatgtatgtacctccaggcggcccagtacccacgaaagtaaatagctatagctggcaaacgtctact

SEQ ID NO: 180246 - DNA, 80 bp, synthetic construct
  source 1..80: mol_type = other DNA
cggcttctttggtgcgagagctctccagcgaatgtcacaacaacaaattacttctaaatttattacaggcccaccaaaaa

SEQ ID NO: 180247 - DNA, 80 bp, synthetic construct
  source 1..80: mol_type = other DNA
taatttacaacaaaatatcagcaatactgatatgtattcagttgtattaaacaatgaaacagaactagcaaaagagatct

SEQ ID NO: 180248 - DNA, 80 bp, synthetic construct
  source 1..80: mol_type = other DNA
ggtaaccacagaacaggaaatacaattcttccaagcaaaaaatttaaaatttcaaaatttccaggtctattacagagaag

SEQ ID NO: 180249 - DNA, 80 bp, synthetic construct
  source 1..80: mol_type = other DNA
ccctcctctgttcacttagcggtgtctacctctaaaagtcaccaagcactccgagcgaagcgaggagtgcgaccctcctg

SEQ ID NO: 180250 - DNA, 80 bp, synthetic construct
  source 1..80: mol_type = other DNA
ttcctctttttcaaataaaaagcggaagtgccgccgcggcggcgggtggcggcgcgctgcgcgcgccgcccagtaggtgg

SEQ ID NO: 180251 - DNA, 80 bp, synthetic construct
  source 1..80: mol_type = other DNA
tgcaggatatgaatgcttaccacatagaagtgaacacaggaaaccaccagggcgaaaagatatttgcattccaaatacag

SEQ ID NO: 180252 - DNA, 80 bp, synthetic construct
  source 1..80: mol_type = other DNA
aattcagcagtgtactcattaccaccagatcctaaacactttgatggataccagcaacaagaagttgtcatcatggatga

SEQ ID NO: 180253 - DNA, 80 bp, synthetic construct
  source 1..80: mol_type = other DNA
catggataacaaatacatttaacacaggaaacaacagcacatttggttttaattcctataaaccagacaaaactaacatg

SEQ ID NO: 180254 - DNA, 80 bp, synthetic construct
  source 1..80: mol_type = other DNA
cacaaaaacagttcagactctacagtacatcttatttttgaacttgaagaaatgggagcacaggtctcaacgcagaagtc

SEQ ID NO: 180255 - DNA, 80 bp, synthetic construct
  source 1..80: mol_type = other DNA
cctgccagcagctaagaaagaaccaactgctatgagccgctggtgtccacctgtccacggagtgaatgggcgcgagcacc

SEQ ID NO: 180256 - DNA, 80 bp, synthetic construct
  source 1..80: mol_type = other DNA
cttggcacggggaatccgcgttccaatgcaccgttcccggccgcggaggctggatcggtcccggtgtcttctatggaggt

SEQ ID NO: 180257 - DNA, 80 bp, synthetic construct
  source 1..80: mol_type = other DNA
gccattctaccgactcatgccaacccaggtgagaccgtggtgattggtggcaaggaggtcaggattattgatgccaagag

SEQ ID NO: 180258 - DNA, 80 bp, synthetic construct
  source 1..80: mol_type = other DNA
ctttgaagcatacgtccctcgccaaacccctggtgttggccctgtgcccacgagcacttccatcgttcgtgtcgcccgcc

SEQ ID NO: 180259 - DNA, 80 bp, synthetic construct
  source 1..80: mol_type = other DNA
ggatagactcactcactagaaataataaccactttaaagagggtcagagcaaatgccacctacaagacatgcccctctgg

SEQ ID NO: 180260 - DNA, 80 bp, synthetic construct
  source 1..80: mol_type = other DNA
ttaaaaaagcatgtttctcggcagggcataccgaaagaaaagggcactgctactgctaccggtgccagctaaaccaaaag

SEQ ID NO: 180261 - DNA, 80 bp, synthetic construct
  source 1..80: mol_type = other DNA
agggtcaccatgatgcaaaagtagagactcagattgtccagcagggccaagccaaggggccctggcacctccgggagagc

SEQ ID NO: 180262 - DNA, 80 bp, synthetic construct
  source 1..80: mol_type = other DNA
ggtgcttactctggaaatccaacaccagtggttaaaaagccagagctcaggaaagccacgttgcaaggaccacagcatga

SEQ ID NO: 180263 - DNA, 80 bp, synthetic construct
  source 1..80: mol_type = other DNA
ctccgtgacaaggtggcggccgccgtcaccctgccggagaagattcttgtgttcctgctgattgaaggcatcttcttcat

SEQ ID NO: 180264 - DNA, 80 bp, synthetic construct
  source 1..80: mol_type = other DNA
ccttgtggacactaatgatgtaaacctggaaataactattgttgagcttgacagaaatgagaagttcagagacattagag

SEQ ID NO: 180265 - DNA, 80 bp, synthetic construct
  source 1..80: mol_type = other DNA
gaaaggagtaggccctgctgaacctggggattgtggaggcatcttgagatgtgtacacggtccaataggactcctgactg

SEQ ID NO: 180266 - DNA, 80 bp, synthetic construct
  source 1..80: mol_type = other DNA
ctggcgttgatatcaaacaagatgcattgacaccaattaccccagtttcctccatgaccacttacggatttgggcaccat

SEQ ID NO: 180267 - DNA, 80 bp, synthetic construct
  source 1..80: mol_type = other DNA
gactacccagattgtaatttggctttatctgctaaccaaccagaaaccactataattagtgttggggatgttgtatcata

SEQ ID NO: 180268 - DNA, 80 bp, synthetic construct
  source 1..80: mol_type = other DNA
ttcctccccaactactactaccgtgtgtactcccaccggcgagctgacgagcggcggaggagaaacaccgacggcacttc

SEQ ID NO: 180269 - DNA, 80 bp, synthetic construct
  source 1..80: mol_type = other DNA
tttaaaacaggagctagtgtacattacaactacacccaatataacccagataaaacaaagctagacacattaagaaagta

SEQ ID NO: 180270 - DNA, 80 bp, synthetic construct
  source 1..80: mol_type = other DNA
tgtcccgtggacaatgtccctccagcgtggtggctgcctttgggatgcatcactttgagccactaagcccccgttgctcg

SEQ ID NO: 180271 - DNA, 80 bp, synthetic construct
  source 1..80: mol_type = other DNA
acaaagataataccagaagcaagagataaggttgagtacgtcactaaactaaaacaactagggatgcttgaaaaccaaat

SEQ ID NO: 180272 - DNA, 80 bp, synthetic construct
  source 1..80: mol_type = other DNA
gcccggtgcggcgggtcgggaccgagacctggtgtaccggatcgccaaccagatctttggtgaggacgtgccccccttct

SEQ ID NO: 180273 - DNA, 80 bp, synthetic construct
  source 1..80: mol_type = other DNA
ctgtgggacgagcaccaaaaattccagaacagatggtcctacccaaacacagaactagacctagccagatacagaggagt

SEQ ID NO: 180274 - DNA, 80 bp, synthetic construct
  source 1..80: mol_type = other DNA
cccacatagatgctgacaaagctcagtcagccagtacaaactatcccacctcagacaaaaatacagcctacaataccagt

SEQ ID NO: 180275 - DNA, 80 bp, synthetic construct
  source 1..80: mol_type = other DNA
accatacccgagaggtcttctcaacactatcaccccggagcacttcaagagtaaacttcacatcccgaccacatacaggc

SEQ ID NO: 180276 - DNA, 80 bp, synthetic construct
  source 1..80: mol_type = other DNA
catatggaccaccagaaactaggaagatgaaattagcttacttggataggggtttttataggcactatggcattattgtg

SEQ ID NO: 180277 - DNA, 80 bp, synthetic construct
  source 1..80: mol_type = other DNA
tgcagcagagacacaagatcctgctacccagctacgaaactaaacccaagggcaggccaaagataacagttagaataaag

SEQ ID NO: 180278 - DNA, 80 bp, synthetic construct
  source 1..80: mol_type = other DNA
aaagtgagtggggccagacttcgccataaggcctttatcttcttgccatttgtcagtgttggtggtcgccataggcttcg

SEQ ID NO: 180279 - DNA, 80 bp, synthetic construct
  source 1..80: mol_type = other DNA
catttcaaaggttcagaaacagatgtggaaagtttcttgggtagagcagcatgtgtgcatatgacagagatagtaaataa

SEQ ID NO: 180280 - DNA, 80 bp, synthetic construct
  source 1..80: mol_type = other DNA
ccaattacaacaagcaaaagccagacagtggtggtcaagttgagccaaaacatttcctcaacactaggaatgacataaag

SEQ ID NO: 180281 - DNA, 80 bp, synthetic construct
  source 1..80: mol_type = other DNA
catacatgaggttcaatgctgaattcacctttgtcacaaccactgagagtggcgaggcccgtccatacatgctgcagtac

SEQ ID NO: 180282 - DNA, 80 bp, synthetic construct
  source 1..80: mol_type = other DNA
gaaccaggtgaggatttcatacctacatgtgactgcacatttggatgctactactccagaagcaaggatcgctatttccc

SEQ ID NO: 180283 - DNA, 80 bp, synthetic construct
  source 1..80: mol_type = other DNA
cggcgtgatgatacggagcgcgaagagattgagtgataagcgcacgatggccatgcgcgtcagttgctggtcgattactg

SEQ ID NO: 180284 - DNA, 80 bp, synthetic construct
  source 1..80: mol_type = other DNA
acccacaaaagactggtgggaatacagaataggcctcttttctcctatattcctaagtccctacagaacaagtcctgtag

SEQ ID NO: 180285 - DNA, 80 bp, synthetic construct
  source 1..80: mol_type = other DNA
gcagagagctctcttcctgcactttcgaggagactgtagatgctccaggattggagggaacgcaggcggaaatcctctat

SEQ ID NO: 180286 - DNA, 80 bp, synthetic construct
  source 1..80: mol_type = other DNA
ataggtaatggacctagcaagcctggagactgtggtggtaagttactctgtaaacacggtgtgattggaataattacagc

SEQ ID NO: 180287 - DNA, 80 bp, synthetic construct
  source 1..80: mol_type = other DNA
gatacccccttttacccctggatgcccaaagaccaattccgtgtaacctttaagcttggctggcaataaaaatgcaaggc

SEQ ID NO: 180288 - DNA, 80 bp, synthetic construct
  source 1..80: mol_type = other DNA
ctccatgaacatgtacccggcagtcctcggtcgagtgggcgagcaaggtccagatcaaatgtttgaggtgcagcatggcc

SEQ ID NO: 180289 - DNA, 80 bp, synthetic construct
  source 1..80: mol_type = other DNA
gactgcaggatactcctttagatttaactcgggtggcgacttaatctaccaccaggttgtcaaaaagccatatgactcag

SEQ ID NO: 180290 - DNA, 80 bp, synthetic construct
  source 1..80: mol_type = other DNA
taattgacagattgtgtaactccaaacacatattcaaggattcctactatgaggttgaggggggggtgccctcggggtgt

SEQ ID NO: 180291 - DNA, 80 bp, synthetic construct
  source 1..80: mol_type = other DNA
aaatttagtactaattacaacaagataaaagttgaagccaccaaagaattggaacagaagcattttcttaaaccaaggca

SEQ ID NO: 180292 - DNA, 80 bp, synthetic construct
  source 1..80: mol_type = other DNA
tcgcatatggtgtatggccacactacctaacaccacaagatgcaactgccattgacaagccatcacaaccggaaacatcc

SEQ ID NO: 180293 - DNA, 80 bp, synthetic construct
  source 1..80: mol_type = other DNA
ccgccggtccataacgtgccaggtagagagaatcaatggtttgcagcgttctttcacggtcatgctgctttctgcgggcg

SEQ ID NO: 180294 - DNA, 80 bp, synthetic construct
  source 1..80: mol_type = other DNA
tcagatgtaatttaatagagtccctttcatttaatttaatagtttttttgatacttcgaattggtttagtaaggtaaaac

SEQ ID NO: 180295 - DNA, 80 bp, synthetic construct
  source 1..80: mol_type = other DNA
tattgttggcattcatgttggtgggaatgggcgcgtgggttactgtgcggccctacttcgaaagtacttctgtgaagccc

SEQ ID NO: 180296 - DNA, 80 bp, synthetic construct
  source 1..80: mol_type = other DNA
caggtaccagctggttcgtacctgttaaataaatcgcagacgggcgctcacccctacggtcaggagcacaagaacaacca

SEQ ID NO: 180297 - DNA, 80 bp, synthetic construct
  source 1..80: mol_type = other DNA
cccatacctcacatgtttgatgggttctggttgtataagttagaacctgacaccgaagttgtatcctatagaatcacagg

SEQ ID NO: 180298 - DNA, 80 bp, synthetic construct
  source 1..80: mol_type = other DNA
gtgtctggaataggccggtaagaacataccacacagacacccccttctacccctgggcacccaaagtccccgaccagttc

SEQ ID NO: 180299 - DNA, 80 bp, synthetic construct
  source 1..80: mol_type = other DNA
accataatctgatagcaccctatccaaatagagatttagcaatagtctcaacaggaggacatggtgcagaaacaatacca

SEQ ID NO: 180300 - DNA, 80 bp, synthetic construct
  source 1..80: mol_type = other DNA
ttgaaaggtgggacaccggggttcgccccggtgttctcccccctttcgaccgccctatggcaggcgggcttgtggacggc

SEQ ID NO: 180301 - DNA, 80 bp, synthetic construct
  source 1..80: mol_type = other DNA
acacgtacaaacatcaagacgtttggaccaagtgatcagtttgtacatactcaacatgcaaagtacaccaatgctcacct

SEQ ID NO: 180302 - DNA, 80 bp, synthetic construct
  source 1..80: mol_type = other DNA
taatgttaattttgaaccgaccaacctaactgactcaagatcaagcataacatacgtgcccgatactatccgtccagaag

SEQ ID NO: 180303 - DNA, 80 bp, synthetic construct
  source 1..80: mol_type = other DNA
gtgccagaatatatcccctctcctcgggggtgagtgccaattggcctttaataacaaagcccccaggcagcaccaaaaat

SEQ ID NO: 180304 - DNA, 80 bp, synthetic construct
  source 1..80: mol_type = other DNA
taaatcatttccaaataacaacggttggcttacaggagaaccaggacaaaacaaatttaaaacaggaaacaacagtatat

SEQ ID NO: 180305 - DNA, 80 bp, synthetic construct
  source 1..80: mol_type = other DNA
gcagaggcacctgtcgccaggtggggggttccgctgcctgcaaagggtcgctacagacgttgtttgtcttcaagaagctt

SEQ ID NO: 180306 - DNA, 80 bp, synthetic construct
  source 1..80: mol_type = other DNA
gatttatcatctgcaaatgaagtgggagggcctgtcaaggatgtcatatacaatatgaatggtactttattaggaaatct

SEQ ID NO: 180307 - DNA, 80 bp, synthetic construct
  source 1..80: mol_type = other DNA
ggaagttctagtggtaccaaatactcaaccaagtgggccaattcacactaccaaaccaacagtactctcagcaatggaga

SEQ ID NO: 180308 - DNA, 80 bp, synthetic construct
  source 1..80: mol_type = other DNA
aagcgactcaggttcaccggcgaaaagatcccgcacctggcaagaagagacccagacggagacggggtcgcagtcctcgg

SEQ ID NO: 180309 - DNA, 80 bp, synthetic construct
  source 1..80: mol_type = other DNA
aaagctttattattgaataaaaaacacgagtacaacaccgagttgcggtgtcctgtctactgggtgggggaggtttatcg

SEQ ID NO: 180310 - DNA, 80 bp, synthetic construct
  source 1..80: mol_type = other DNA
acatctttggcacccatacacttagccaacaccaggctatagggttagtaggtacaatcctcttaaccgctggcttgatg

SEQ ID NO: 180311 - DNA, 80 bp, synthetic construct
  source 1..80: mol_type = other DNA
ttaaaataaaacagtggaacccagcagtaactaaattctgcaggataatagggtactaccccttaattatctgcggagaa

SEQ ID NO: 180312 - DNA, 80 bp, synthetic construct
  source 1..80: mol_type = other DNA
acatattaaatacatttagaacagaaggttgcttttcacatccacccttaccaaaatttaaaccaccatcatcaggacca

SEQ ID NO: 180313 - DNA, 80 bp, synthetic construct
  source 1..80: mol_type = other DNA
ggccaatatactacctgagttcagtccaaccaagcagatacacataccaggaaaaatagatagcattctacacatggcaa

SEQ ID NO: 180314 - DNA, 80 bp, synthetic construct
  source 1..80: mol_type = other DNA
atcctcccagaactatgccatacactcagacgactacctactacaggtgctgtcttttgggggaggaatgagcaccataa

SEQ ID NO: 180315 - DNA, 80 bp, synthetic construct
  source 1..80: mol_type = other DNA
ttgactggtttaaatccatgctcccacaagccaaactaaaggttgagtacataaagaaccttaagcagttgccactgttg

SEQ ID NO: 180316 - DNA, 80 bp, synthetic construct
  source 1..80: mol_type = other DNA
tctgggtactaaagcccagcatctacaatggagctatgactaacttagcagaccaacaaaacaaccaaaaaagaaaagat

SEQ ID NO: 180317 - DNA, 80 bp, synthetic construct
  source 1..80: mol_type = other DNA
ctcagcgggctggtggtggaagttcccggatgcgctgaaggacatgggcctgttcggccaaaacatggcataccactatc

SEQ ID NO: 180318 - DNA, 80 bp, synthetic construct
  source 1..80: mol_type = other DNA
tcaattcattagctattgattgcatggctaagcataacaactgggggctagtaatcttgcctttggagcctctagcttat

SEQ ID NO: 180319 - DNA, 80 bp, synthetic construct
  source 1..80: mol_type = other DNA
tatggggacactttgcttcagagctatggaagacaccaatgaacacagcattagagtctttgtaaagcctaaacatacca

SEQ ID NO: 180320 - DNA, 80 bp, synthetic construct
  source 1..80: mol_type = other DNA
tgatcacaaccccactaaagtaacgtcaaaggtgcggatatacatgaaacccaagcacgtgagggtgtggtgcccaagac

SEQ ID NO: 180321 - DNA, 80 bp, synthetic construct
  source 1..80: mol_type = other DNA
agagcaggaaggatcctattacaaagaaggggtacctttagaagcaacagtgcagaaaaatctagcaaatcagtggacat

SEQ ID NO: 180322 - DNA, 80 bp, synthetic construct
  source 1..80: mol_type = other DNA
caaaccgctatagtggtcccaagtggcgcaccaaaggacatgagtatgctggcgtttgttagcgcctgtaatgatttttc

SEQ ID NO: 180323 - DNA, 80 bp, synthetic construct
  source 1..80: mol_type = other DNA
cgccaccaccgccgccgccacgcgacttgccgctgttcccgacgtaatttttatcgaagggatcgccacgctggaaaggt

SEQ ID NO: 180324 - DNA, 80 bp, synthetic construct
  source 1..80: mol_type = other DNA
atattctgtttgagcctttcacctgcttctgatcagagacttcagtatactatgctgggcgagatcttgaattattatgc

SEQ ID NO: 180325 - DNA, 80 bp, synthetic construct
  source 1..80: mol_type = other DNA
gtcactgacccgaaataccaagtcccagagtacctcttccacgcgtgggacttcaaaagaggactgtttagctctaaaag

SEQ ID NO: 180326 - DNA, 80 bp, synthetic construct
  source 1..80: mol_type = other DNA
ttcttgccattggatagtggagaggggttgccataacgcggaccccgtttttaccccttccggactacaaaaatggccgt

SEQ ID NO: 180327 - DNA, 80 bp, synthetic construct
  source 1..80: mol_type = other DNA
agacaccaaaatttcactctgatgataataccatttgtgcaactggctacaaatagtgcggcctctagcacggtccccat

SEQ ID NO: 180328 - DNA, 80 bp, synthetic construct
  source 1..80: mol_type = other DNA
ggctacctctgatttaccaatccttgtgtgcctgttttaatcccttccctaattccaaacatagaagtaatgcgcaccac

SEQ ID NO: 180329 - DNA, 80 bp, synthetic construct
  source 1..80: mol_type = other DNA
cctgtcatccaatggagttattacaatcccagctggagaacaaatgacattatctgcaccttactactcaaataaacctc

SEQ ID NO: 180330 - DNA, 80 bp, synthetic construct
  source 1..80: mol_type = other DNA
gctctttgcagggatgcagggaccctacacagggttgccaactgccaaaccaaaagtacccaccctcaggacagcaaagg

SEQ ID NO: 180331 - DNA, 80 bp, synthetic construct
  source 1..80: mol_type = other DNA
gggcagcagggacactgcactaccgccaggtccaggggcagccggtgttcctggcgctccggtggcagccaggcggccgc

SEQ ID NO: 180332 - DNA, 80 bp, synthetic construct
  source 1..80: mol_type = other DNA
ggtcatgagattcgggaacccactggcagagatgacaaaaagcctgacgaagacccacttttcaactgcaatggcacctt

SEQ ID NO: 180333 - DNA, 80 bp, synthetic construct
  source 1..80: mol_type = other DNA
tccaacttttaggtacatggatgctaatgagtactaccccgcccgataccaatcgcacatgctcataggagctgggtttg

SEQ ID NO: 180334 - DNA, 80 bp, synthetic construct
  source 1..80: mol_type = other DNA
atgcgtgttatgtatcccttggattagccaaacccattacagattggtacaccaagatgagtacaccagtgccggaaatg

SEQ ID NO: 180335 - DNA, 80 bp, synthetic construct
  source 1..80: mol_type = other DNA
aaaccgggcacacctcgcaggtggtgcctagcgatacgatgcagacacgtcacgtgtataactaccacactagatcagaa

SEQ ID NO: 180336 - DNA, 80 bp, synthetic construct
  source 1..80: mol_type = other DNA
ccgtggctgcagcgctgcggacgggcgtggaaaactcagccaatccgccgcctctacgtacacttcctgggctgggtctt

SEQ ID NO: 180337 - DNA, 80 bp, synthetic construct
  source 1..80: mol_type = other DNA
ttcgactgatttgcaaattgatgcagctgacacacctggaccagattttatacctacatgtgattgtatgtcaggttgtt

SEQ ID NO: 180338 - DNA, 80 bp, synthetic construct
  source 1..80: mol_type = other DNA
aattatgtatacacccccaggagcaccaagacccagcgcgtgggatgactacacatggcaatcatcatcaaatccatcca

SEQ ID NO: 180339 - DNA, 80 bp, synthetic construct
  source 1..80: mol_type = other DNA
atagatacaatcttagaagtgaacaacctcacagaaaacgagtccaatccaatgcaacgcctcgtaattccagtcaaagt

SEQ ID NO: 180340 - DNA, 80 bp, synthetic construct
  source 1..80: mol_type = other DNA
gctcagcagtagggtgtgatcctgaggtcttttggtcgaagataccagtaatgcttgatggtgaatgtcttatggctttt

SEQ ID NO: 180341 - DNA, 80 bp, synthetic construct
  source 1..80: mol_type = other DNA
ccttccaaagactggtgggaatacagaataggcctatactctccaatattcctcagtccttacagaaccagtccaataga

SEQ ID NO: 180342 - DNA, 80 bp, synthetic construct
  source 1..80: mol_type = other DNA
tagctgaagtggattccgttgtcccagtaaataatgtggcaggaaacttacaaactatggacatttatcggatcccggtg

SEQ ID NO: 180343 - DNA, 80 bp, synthetic construct
  source 1..80: mol_type = other DNA
tgaaaaacatacatttcttattcaccctacatttccagtagaagagatatatgaatcaattagatggactaaaaaaccct

SEQ ID NO: 180344 - DNA, 80 bp, synthetic construct
  source 1..80: mol_type = other DNA
acgtgcccctcttagagaggggacggtggtacgtgatgctcagataccagaaggacgtgttccatgacatagtgacttgc

SEQ ID NO: 180345 - DNA, 80 bp, synthetic construct
  source 1..80: mol_type = other DNA
cccagtccaggtccagatgtgcctactaccagagctacgcgacacgttacagcgcctgctgcccccacccaatcttgaag

SEQ ID NO: 180346 - DNA, 80 bp, synthetic construct
  source 1..80: mol_type = other DNA
tggcccaagttccacaggggctaacaccaacagcacccccattggatccagcagtggatctactggagaaatatatgcag

SEQ ID NO: 180347 - DNA, 80 bp, synthetic construct
  source 1..80: mol_type = other DNA
ggggcaccagtacaaaaataacctcagtattagttccattaatgatatggctaacaaaacacactatgataccaatttat

SEQ ID NO: 180348 - DNA, 80 bp, synthetic construct
  source 1..80: mol_type = other DNA
cagcacgcctcaaatagcaatcacttattatcacccacactttattcttgaattgtctctagacagtcaaaatgggtgct

SEQ ID NO: 180349 - DNA, 80 bp, synthetic construct
  source 1..80: mol_type = other DNA
agtacacagcttatggggaaaaaagctcacagagagaaaaaaacaccaagctcaggcacgcgtacatcattatcatcatc

SEQ ID NO: 180350 - DNA, 80 bp, synthetic construct
  source 1..80: mol_type = other DNA
ggaggaagaattgacactacactacaagaacaaggtgttccctattgaaagcccatcagtaacccaggtgacccttgggg

SEQ ID NO: 180351 - DNA, 80 bp, synthetic construct
  source 1..80: mol_type = other DNA
agttggataagattgcatctggtaaaactaggtgcattgaagcttgtgaggttgactattgcattgtttacaggatgatt

SEQ ID NO: 180352 - DNA, 80 bp, synthetic construct
  source 1..80: mol_type = other DNA
ttagtgttttctatcagaccagaatagtggtccccctctcaacacccagagaaatggatattctcggttttgtgtctgca

SEQ ID NO: 180353 - DNA, 80 bp, synthetic construct
  source 1..80: mol_type = other DNA
aggtcccacacacacggtgaaacccacagtgttaaatgccatggaaattggggcttcgtctgatgcaactccagagagtg

SEQ ID NO: 180354 - DNA, 80 bp, synthetic construct
  source 1..80: mol_type = other DNA
gggatactacccactaataatatgcggtcaaggtaccacagcctataactttacctcccacgcggacgactatgtaatgg

SEQ ID NO: 180355 - DNA, 80 bp, synthetic construct
  source 1..80: mol_type = other DNA
aagcaagcggcgctaccagtccagcagcagctccgactccaactgcgagaacaacagcgactccgagtccacttgcagca

SEQ ID NO: 180356 - DNA, 80 bp, synthetic construct
  source 1..80: mol_type = other DNA
cgggggggcttttgcggcggggacgtgggcctttcgcggccgggaacacagagagaagtagcggacggggacgagggtgg

SEQ ID NO: 180357 - DNA, 80 bp, synthetic construct
  source 1..80: mol_type = other DNA
taatcaacaaccagtactagaagacctattccagtcaggcccctttgcataccaaggagatgctaaatcagccacactag

SEQ ID NO: 180358 - DNA, 80 bp, synthetic construct
  source 1..80: mol_type = other DNA
ccggttctatcaaatttactttcttgttctgtggtagtgcaatggcaacaggaaaactcctattaagctacagcccaccg

SEQ ID NO: 180359 - DNA, 80 bp, synthetic construct
  source 1..80: mol_type = other DNA
accgcgcctccggcggcggtgcccgcggaccccggccccttctcgcgtgcgcggtgtgactggttgagcgaatgagcagc

SEQ ID NO: 180360 - DNA, 80 bp, synthetic construct
  source 1..80: mol_type = other DNA
aatgtggcatggtagttccagagggtggtggtggaaaataccagattgtcttacggatatgggtatgtttggccagaata

SEQ ID NO: 180361 - DNA, 80 bp, synthetic construct
  source 1..80: mol_type = other DNA
agtcgaagtcctccaaacgccgacagtacagctccagctccagcgaaacatccaggagcagctcgcaatcaagcagcagc

SEQ ID NO: 180362 - DNA, 80 bp, synthetic construct
  source 1..80: mol_type = other DNA
caccgtggatatcgaacaccaactacaggaggtgcgttaaagatgatttcacggagggtgggtacatatgtgccttttac

SEQ ID NO: 180363 - DNA, 80 bp, synthetic construct
  source 1..80: mol_type = other DNA
cccctaagcggtggtcgccactatcacccgggcacttttgatcgtcacgtgctggtgcggcttttccacaaacgcggcgt

SEQ ID NO: 180364 - DNA, 80 bp, synthetic construct
  source 1..80: mol_type = other DNA
ggggccggtcggctgggctggccgagcccgggtctaggaggtctggcgtggcgagcctgctgtctcaggagtggcctggc

SEQ ID NO: 180365 - DNA, 80 bp, synthetic construct
  source 1..80: mol_type = other DNA
agagaaatgatgtgaaaatttttgctaaacccaaacacacatctgcgtggataccacgccctcccagagctacacagtac

SEQ ID NO: 180366 - DNA, 80 bp, synthetic construct
  source 1..80: mol_type = other DNA
ccaaccaatccctcgcagcccgtttgctccagggccaaagagacctctcctattcttatccccagaataccatggccccg

SEQ ID NO: 180367 - DNA, 80 bp, synthetic construct
  source 1..80: mol_type = other DNA
gtctgtgtaatatgtccatacacactccccaaactagtacatgtagaacaagaccaaaaaggatggggttttgtatttta

SEQ ID NO: 180368 - DNA, 80 bp, synthetic construct
  source 1..80: mol_type = other DNA
gtacactcaagaggatctgtgttccgttaatcttgtgtcacttgcggtttctgcggcttcctttctccacccattcggct

SEQ ID NO: 180369 - DNA, 80 bp, synthetic construct
  source 1..80: mol_type = other DNA
taagaaccaacaacagtgccaccctagtactaccctatgtgaacgcactgtctatagattcaatggtcaaacacaacaat

SEQ ID NO: 180370 - DNA, 80 bp, synthetic construct
  source 1..80: mol_type = other DNA
gcatcaaatcccagtgtgttttaccagccaaagtccggcttcccaagattcaccataccattcacagggataggatctgc

SEQ ID NO: 180371 - DNA, 80 bp, synthetic construct
  source 1..80: mol_type = other DNA
ccaacgcgaatggtcaaatatgcatcttgccacaaatgtaactaaattccccatgctagatgtggaggttggcactgtaa

SEQ ID NO: 180372 - DNA, 80 bp, synthetic construct
  source 1..80: mol_type = other DNA
gtgcgtccgccccagccacgcgtaaggatgccatgctgggtactcacataatatgggatttgggtttacaatcgagttgt

SEQ ID NO: 180373 - DNA, 80 bp, synthetic construct
  source 1..80: mol_type = other DNA
gtaaatgatcacaaccccacgcggctcacctccaagatcagagtgtacatgaagccaaagcatgtcagagtctggtgccc

SEQ ID NO: 180374 - DNA, 80 bp, synthetic construct
  source 1..80: mol_type = other DNA
tctgtgtaagatgtccatacacagaacccccactaacagggtcagacagtaactccggctttgtactattatcagaaagc

SEQ ID NO: 180375 - DNA, 80 bp, synthetic construct
  source 1..80: mol_type = other DNA
gcttactggaaaaatcatcaagtggacaatcaggttaatcagtgctctatcaatcatagtcagaaacagcactgacaccc

SEQ ID NO: 180376 - DNA, 80 bp, synthetic construct
  source 1..80: mol_type = other DNA
atgacatctcagctccctttaaactagacaaatacagctgccctagctaccaccctggcatgctcatgcagagcaagagc

SEQ ID NO: 180377 - DNA, 80 bp, synthetic construct
  source 1..80: mol_type = other DNA
tataacccagagcatgaagattgatctacgtttccgagaagtttatgaacctggacaaaaaagcaaagcaccctaaagaa

SEQ ID NO: 180378 - DNA, 80 bp, synthetic construct
  source 1..80: mol_type = other DNA
ggggatcacaaatggacttgagtgaccccttatgtttggagagtgatgaagctgaggattgtaagcaaacaatatcacca

SEQ ID NO: 180379 - DNA, 80 bp, synthetic construct
  source 1..80: mol_type = other DNA
acccttggttgtagagggaggtgttggttggcgacattggcttctgacatctcccagccgatcctggtccatgggatatc

SEQ ID NO: 180380 - DNA, 80 bp, synthetic construct
  source 1..80: mol_type = other DNA
aagagaaagatggacagtaaatgatattcagaaactagtgggagtactaaactgggcagctcaactctttcctgggatta

SEQ ID NO: 180381 - DNA, 80 bp, synthetic construct
  source 1..80: mol_type = other DNA
tacgagcttttcctgaacaacaggtcctacaaggatctgaaactccatcgtgatggggagctcgccttcttcctccttcc

SEQ ID NO: 180382 - DNA, 80 bp, synthetic construct
  source 1..80: mol_type = other DNA
ttgattactgctggtggtgaaggggttgttgcatttgcagatgtgagagatctgtttgcatatgaagaagaggccatgga

SEQ ID NO: 180383 - DNA, 80 bp, synthetic construct
  source 1..80: mol_type = other DNA
tcatgagtgattcaacaactccctctgcaagttcaggtattgatgataaaggctattttgaatggaaagctacagctaca

SEQ ID NO: 180384 - DNA, 80 bp, synthetic construct
  source 1..80: mol_type = other DNA
aggcagattgagaatgggattttttccaaattgcacacatgacacccagctggaactagacaatgccatatacacgatct

SEQ ID NO: 180385 - DNA, 80 bp, synthetic construct
  source 1..80: mol_type = other DNA
ccagaatgaaagggatttatataggggcctttgggaattttcatttcccaccacccccaccacctcagcgcagggatgcc

SEQ ID NO: 180386 - DNA, 80 bp, synthetic construct
  source 1..80: mol_type = other DNA
cgattttacccaagaccctgggaaattcactcaacctgtattggatgctctgcgagaggctgtgccgcctctgcagtcac

SEQ ID NO: 180387 - DNA, 80 bp, synthetic construct
  source 1..80: mol_type = other DNA
ccgtcccatactttggacctggcgtggattacaagggagatagtttaaccccactcagtaccaagaacttgactacatac

SEQ ID NO: 180388 - DNA, 80 bp, synthetic construct
  source 1..80: mol_type = other DNA
gaccaatacaagggtggctgctgttgtacaaggtgacaaccaatccattgcaatcacacacaaagttcaccccaatatgt

SEQ ID NO: 180389 - DNA, 80 bp, synthetic construct
  source 1..80: mol_type = other DNA
tccaggtgatactctggtgattgacggaaaggaagtcaaaatacttgatgcacaagccttggtggaccaagctggcacca

SEQ ID NO: 180390 - DNA, 80 bp, synthetic construct
  source 1..80: mol_type = other DNA
cccatatatgcaaacagtaacaacacctctaacacatcaaactcaggtttaattacaataatttccaaaaacatgacaaa

SEQ ID NO: 180391 - DNA, 80 bp, synthetic construct
  source 1..80: mol_type = other DNA
cggataacgtttaaaacagcggatgggttcccccaccatccgacccactgggtgtagtactctggtattatgtacctttg

SEQ ID NO: 180392 - DNA, 80 bp, synthetic construct
  source 1..80: mol_type = other DNA
cagttggctagtgctcataagggtaatgtcactacaggatacaattacacccatcctggtgaaagtggcagagatgttag

SEQ ID NO: 180393 - DNA, 80 bp, synthetic construct
  source 1..80: mol_type = other DNA
ttctagaaggcatacccctatacactgcattctatggctacaaagactttatacagtctgagctaggcccacaccaagac

SEQ ID NO: 180394 - DNA, 80 bp, synthetic construct
  source 1..80: mol_type = other DNA
acaacaggtgacaaacaactcaacataaaaatatcaggagacagcaactacaactggtacccctataaccttaaaaataa

SEQ ID NO: 180395 - DNA, 80 bp, synthetic construct
  source 1..80: mol_type = other DNA
aagatacagggagggtcgctgtttgagcagctctttagcgacgtggccacgaccccacgggcgcccgaggcgttgtctct

SEQ ID NO: 180396 - DNA, 80 bp, synthetic construct
  source 1..80: mol_type = other DNA
cagtgaaccaaatgcctggcatcggaccggtttatctagccgagaaccagcacgacatcctcgttcaagaatgtctcaaa

SEQ ID NO: 180397 - DNA, 80 bp, synthetic construct
  source 1..80: mol_type = other DNA
tgaaaggagtttcacccttgataccaatgccaccaaccccgctcgggagttttgtccagttgattacctttttggaagtg

SEQ ID NO: 180398 - DNA, 80 bp, synthetic construct
  source 1..80: mol_type = other DNA
cacttaacaacccccacagatgataccattctggttgcctatactgctgacttacaagttgtccctgctacccacccggg

SEQ ID NO: 180399 - DNA, 80 bp, synthetic construct
  source 1..80: mol_type = other DNA
gcaaagcaattgaatccgcaatttctagggtggccgacaccataagtagtgggccaaccaattcagaacaagtaccagca

SEQ ID NO: 180400 - DNA, 80 bp, synthetic construct
  source 1..80: mol_type = other DNA
aaaaaagtctggtaaatcatgaatctaataattgcggaagtgatgaataactatcgtaatctttaacaaaaaatattgtg

SEQ ID NO: 180401 - DNA, 80 bp, synthetic construct
  source 1..80: mol_type = other DNA
ctacaattgggtgtcctaggtgggatatacgcctgtggtgttctaacgggaagtgtgtaagcacacacgtaatttgcaag

SEQ ID NO: 180402 - DNA, 80 bp, synthetic construct
  source 1..80: mol_type = other DNA
aaatctttctctggttttttgtgctaacttttcgatatcgctattgtatgtattgcctttgtaccacgtgactcccacag

SEQ ID NO: 180403 - DNA, 80 bp, synthetic construct
  source 1..80: mol_type = other DNA
tgtctcataaaagaccagcccttgtgggcctccttcaatgggtacagcgaattctgtgccaaaagcacaggagacggggc

SEQ ID NO: 180404 - DNA, 80 bp, synthetic construct
  source 1..80: mol_type = other DNA
atacagtccaaaccagacacgtgaggaacatgcactctagaactgaatctacaatagaaaacttcttcagtcgcgctgcg

SEQ ID NO: 180405 - DNA, 80 bp, synthetic construct
  source 1..80: mol_type = other DNA
aaatttccactaaataaaaacaaccctgaacacagagacacactctacgggggcagtccatatactacagatatatttca

SEQ ID NO: 180406 - DNA, 80 bp, synthetic construct
  source 1..80: mol_type = other DNA
gcgtggtggtgaccaccgtgcgacgcagcttctcgcccgggatgcccgcgactgagcgtccggtttttttgcaggtcttt

SEQ ID NO: 180407 - DNA, 80 bp, synthetic construct
  source 1..80: mol_type = other DNA
agtaggggaaatgcctacagtttgtcctgtctcttttagttgagctatggtttgaaaggtgttgtatagttcagttttgt

SEQ ID NO: 180408 - DNA, 80 bp, synthetic construct
  source 1..80: mol_type = other DNA
gattatgtacatcccgccaggcggccccattcccaaatccaccacagattatgcatggcaaacctctaccaaccctagca

SEQ ID NO: 180409 - DNA, 80 bp, synthetic construct
  source 1..80: mol_type = other DNA
aacagcatactttgactgcacatataatcccctaaacgaccaggctagcaaaaacagaatctggtttcagtacatgacaa

SEQ ID NO: 180410 - DNA, 80 bp, synthetic construct
  source 1..80: mol_type = other DNA
tcttttcttcaaatggcgtcattaccgttccagcagagtggatgacactatcagtgccattctactctgctaagcctttg

SEQ ID NO: 180411 - DNA, 80 bp, synthetic construct
  source 1..80: mol_type = other DNA
aacttgagaacaaacaattcagccactataatgctcccttggatgaactgtgcaccaatggactttgcactcagacacaa

SEQ ID NO: 180412 - DNA, 80 bp, synthetic construct
  source 1..80: mol_type = other DNA
gccccggagttgcctgtttcatcactaaccccgggcctgaagaggttgacaagaagggtcaaggtttcgtctgtgtgttg

SEQ ID NO: 180413 - DNA, 80 bp, synthetic construct
  source 1..80: mol_type = other DNA
tgctcagcaagaggcacatactgataccctctctaaaaacccggcccagcagaaaacacagggtggtcgttaaggtgggc

SEQ ID NO: 180414 - DNA, 80 bp, synthetic construct
  source 1..80: mol_type = other DNA
tccagtgaattcaaagaacttgattatgggaatgtaacatttctaaaaagaggttttaggcaagatgacaaatataaatt

SEQ ID NO: 180415 - DNA, 80 bp, synthetic construct
  source 1..80: mol_type = other DNA
aaactcaaagacaagagcccgtgtgcttgctgatccatggaactcctggcagtggtaagtcactggtaaccaccattgta

SEQ ID NO: 180416 - DNA, 80 bp, synthetic construct
  source 1..80: mol_type = other DNA
ttgacgtgatgggatatgtccaaatcaggcgcaaattagagatgttcacttatatgagatttgatgctgaatttactttt

SEQ ID NO: 180417 - DNA, 80 bp, synthetic construct
  source 1..80: mol_type = other DNA
agggtaaggctataattgtaacccccgttagttatatgagttccgttgttggaagtagctacggccaagggcagttgtcc

SEQ ID NO: 180418 - DNA, 80 bp, synthetic construct
  source 1..80: mol_type = other DNA
ggctgtgtaaatcaaaacatatttttaaaaacatgtattatgaagttgaaggtggaatcccatcaggatgctctggtaca

SEQ ID NO: 180419 - DNA, 80 bp, synthetic construct
  source 1..80: mol_type = other DNA
aaaacttcaacaagaaagtacaatagtaactaaaggctgcagggcacactgccacctaacaggtatattctcaccgcctt

SEQ ID NO: 180420 - DNA, 80 bp, synthetic construct
  source 1..80: mol_type = other DNA
acagaaagctaggccatctgtgagaggtatgtggagaccccccaggcgaaatgaattcactattcaacgtaactggttct

SEQ ID NO: 180421 - DNA, 80 bp, synthetic construct
  source 1..80: mol_type = other DNA
atttaccttttacagagaccctaaagtagactacattgttatatacaacacaaatccaccatttaaaattaacaaataca

SEQ ID NO: 180422 - DNA, 80 bp, synthetic construct
  source 1..80: mol_type = other DNA
tcagatttacaggtggattacacagatacacctggttcagattacatcccagaatgtgattgtttagaaggctgctatta

SEQ ID NO: 180423 - DNA, 80 bp, synthetic construct
  source 1..80: mol_type = other DNA
tgtgtagcctttacagacctgagaccatataacataaatgcatccacacaagggcctgtcaccaattacctcaatcaact

SEQ ID NO: 180424 - DNA, 80 bp, synthetic construct
  source 1..80: mol_type = other DNA
gtttttaatgcatactcacatgaactagagcaaataatatacacaaggggctcctactggaactcttttcacgcccttga

SEQ ID NO: 180425 - DNA, 80 bp, synthetic construct
  source 1..80: mol_type = other DNA
tccccacccccggtcccgcacatagcgccggcgcccagcacgcccgaaagccctccgtccgcagcgcaacccgcctgaaa

SEQ ID NO: 180426 - DNA, 80 bp, synthetic construct
  source 1..80: mol_type = other DNA
tagtgcttacataatcgcacttggtgctgcccagaaaaacttctccctcaaattgtgcagagatactgagtctgtatctc

SEQ ID NO: 180427 - DNA, 80 bp, synthetic construct
  source 1..80: mol_type = other DNA
tggatacggcagtcataatattagcttgcatccgcttaataactcattatttcaagacgatgtttttgaatggtacatag

SEQ ID NO: 180428 - DNA, 80 bp, synthetic construct
  source 1..80: mol_type = other DNA
gtccatcaaactcacaagcggtacccgccctaacagcagtggaaaccgggcatacatctcaggtggcccccagcgacact

SEQ ID NO: 180429 - DNA, 80 bp, synthetic construct
  source 1..80: mol_type = other DNA
aacatgggctcacaagtatctacccagcgatctggatctcatgaaaactttaattcagccacagaaggctccactattaa

SEQ ID NO: 180430 - DNA, 80 bp, synthetic construct
  source 1..80: mol_type = other DNA
ttcatgttttgtggtacagctaatactagccttaaactgctcatagcatacacaccacctggggttcctaaaccagattc

SEQ ID NO: 180431 - DNA, 80 bp, synthetic construct
  source 1..80: mol_type = other DNA
actactcccactcaaaagacagatactttgtgattgatgtaaaaccttatgactggtatgagatacaagaatcatcatat

SEQ ID NO: 180432 - DNA, 80 bp, synthetic construct
  source 1..80: mol_type = other DNA
aaatgtttcaccagtaattatgtactggccagcacaaatttgagtcaactgagccctccaacagtaaccatacctgaagc

SEQ ID NO: 180433 - DNA, 80 bp, synthetic construct
  source 1..80: mol_type = other DNA
aaatacaaggagaaaaagatgttagatgggaatacacatataccaacctaatgaaacccatatacaatgccgcaccagat

SEQ ID NO: 180434 - DNA, 80 bp, synthetic construct
  source 1..80: mol_type = other DNA
gccctcgtccgagatgaggcacacggcggtcttcttctgctgatccggcgacaacacggcctcgttcacgaagcgaccca

SEQ ID NO: 180435 - DNA, 80 bp, synthetic construct
  source 1..80: mol_type = other DNA
gttatggggttgttggaaatgttccggaccgtcagcttgagggtctggcccggcttccactcctgtgggtagacgtagaa

SEQ ID NO: 180436 - DNA, 80 bp, synthetic construct
  source 1..80: mol_type = other DNA
gtggatttacacagcaaattggggacaaagtttctgagatcaccaacatgataaccagtactatcactgagaagctgttg

SEQ ID NO: 180437 - DNA, 80 bp, synthetic construct
  source 1..80: mol_type = other DNA
aactgtgtggctctctgcaccacgtctggcaaaacatgctgcagaccgaggagaaccttttagatttcgtgcgtttcatg

SEQ ID NO: 180438 - DNA, 80 bp, synthetic construct
  source 1..80: mol_type = other DNA
cgcgaagatacacaagagaatggtacacagcctgggagtatgtaagatacaacccactatcagacaaaggtctaggtaac

SEQ ID NO: 180439 - DNA, 80 bp, synthetic construct
  source 1..80: mol_type = other DNA
gataccaggaaagacatcaacactgtaacctcaatacaaagcaagcgccgaggtgacatgtccgcgctaagcacccacgg

SEQ ID NO: 180440 - DNA, 80 bp, synthetic construct
  source 1..80: mol_type = other DNA
actcagtgtaccaaataatgtacgtaccaccaggtgcccccagaccaaatgcttgggacgattatacctggcagtcttcc

SEQ ID NO: 180441 - DNA, 80 bp, synthetic construct
  source 1..80: mol_type = other DNA
tgaaaatattgtctcagcaagcaatggagctgttgtcaaatactttaatataaactattacaaggattcggccagctcag

SEQ ID NO: 180442 - DNA, 80 bp, synthetic construct
  source 1..80: mol_type = other DNA
aaaggctgtgccactgctcttcctcgccgccacctggcttctgaccggggtgctgccggccggcgcttccagtcccacaa

SEQ ID NO: 180443 - DNA, 80 bp, synthetic construct
  source 1..80: mol_type = other DNA
aacatgggctcacaggtgtctgcacaacgctccggctctcatgagaactccaactcagctactgaaggctccactataaa

SEQ ID NO: 180444 - DNA, 80 bp, synthetic construct
  source 1..80: mol_type = other DNA
gcaacacgacgggaatgacgggctccctccccctccctactctccacgggatgactcatctcaacacatatacgaagaag

SEQ ID NO: 180445 - DNA, 80 bp, synthetic construct
  source 1..80: mol_type = other DNA
tacggtgcagcgacgaatctcggcggcgcgcgccctggtgaacacgttccgccaatatttttttttgctggaacggcgct

SEQ ID NO: 180446 - DNA, 80 bp, synthetic construct
  source 1..80: mol_type = other DNA
gggcgaatacagcacacaagcatcagatgagaccaaaaagtacatgtcatggaccataagcccaaggaggatggttcaaa

SEQ ID NO: 180447 - DNA, 80 bp, synthetic construct
  source 1..80: mol_type = other DNA
actcgggacgacgcggaaggtacgctgtcgagccgtatcacggcaaggtggtggtcccagaaggacatgccattccagtc

SEQ ID NO: 180448 - DNA, 80 bp, synthetic construct
  source 1..80: mol_type = other DNA
tcacaaactggtggcatatactataaaaaaacagacagtaactatggttaccactcctttcaagttaaaaacaagaaaca

SEQ ID NO: 180449 - DNA, 80 bp, synthetic construct
  source 1..80: mol_type = other DNA
ctcaactcaaatggctcagacagtattactttgactgggagacatacaagctagcagacgtgaagccagacggcctcact

SEQ ID NO: 180450 - DNA, 80 bp, synthetic construct
  source 1..80: mol_type = other DNA
agttcaacagcggttgtctgctagttgctgtggtgccagaacatcaattggcatacatcggcggcacaaacgcatctgtt

SEQ ID NO: 180451 - DNA, 80 bp, synthetic construct
  source 1..80: mol_type = other DNA
gagagcggctaaggaggttgtggattggttcagcagtaaaattaagtcaatgttaagttttgttgagagaaataaagctt

SEQ ID NO: 180452 - DNA, 80 bp, synthetic construct
  source 1..80: mol_type = other DNA
cagaggctcagtttagagtacccacacattgtccagatggtgaaaacaattctaacgcatcgtcatggcgtgacacatgg

SEQ ID NO: 180453 - DNA, 80 bp, synthetic construct
  source 1..80: mol_type = other DNA
cccttaggttcacatttttattttgtggtagtatgatggcaaccggaaaactaatactcacatactcccccccaggagca

SEQ ID NO: 180454 - DNA, 80 bp, synthetic construct
  source 1..80: mol_type = other DNA
tcaagtgaatttaagcaactggattataacaatgtaacctttttgaagagaggattcagacaagatgataaataccaatt

SEQ ID NO: 180455 - DNA, 80 bp, synthetic construct
  source 1..80: mol_type = other DNA
agccacctgttggaacccatggaggaggcctcactggacgacgtcaacatcatcagcgccgtgctcagcggcgtgtacag

SEQ ID NO: 180456 - DNA, 80 bp, synthetic construct
  source 1..80: mol_type = other DNA
agcgacactatgcaaactaggcatgtccataacttccatactagatcagaatcatccattgagaatttcatgagtcggtc

SEQ ID NO: 180457 - DNA, 80 bp, synthetic construct
  source 1..80: mol_type = other DNA
cagtccccaagcacactcatggagcttttggtcagcaatcgggcgcggtgtatgtagggaactataggctgctcaacagg

SEQ ID NO: 180458 - DNA, 80 bp, synthetic construct
  source 1..80: mol_type = other DNA
ttggctttagctccactaaacaggaacaagtattagaatccatgtatgagaaaaatcaatactgggcatcacatttaact

SEQ ID NO: 180459 - DNA, 80 bp, synthetic construct
  source 1..80: mol_type = other DNA
cgaaataaagttgaagtaaccactagaatatatcacaaagccaaacatataaaagcttggtgtccgaggccgcccagggc

SEQ ID NO: 180460 - DNA, 80 bp, synthetic construct
  source 1..80: mol_type = other DNA
cccaaataggagacacccaggaccacgaaaccgtgggcatagttgttgtaatctgcccttacactagaccccaactattt

SEQ ID NO: 180461 - DNA, 80 bp, synthetic construct
  source 1..80: mol_type = other DNA
aagaaagggcaggcgcagaaaaaaggctaaaataataataagacaatggcaaccaaactacaggaggagatgtaacatag

SEQ ID NO: 180462 - DNA, 80 bp, synthetic construct
  source 1..80: mol_type = other DNA
ggtgaatgctgggaagtgtcaaagaatggtagagactgggaaacattgaaattaaaagacctggttgacaagatcacatt

SEQ ID NO: 180463 - DNA, 80 bp, synthetic construct
  source 1..80: mol_type = other DNA
catccaacatttcccgaaagtgaaatctttgaatcaattagatggaccagagatccaaagaacacccaagatcatgtcta

SEQ ID NO: 180464 - DNA, 80 bp, synthetic construct
  source 1..80: mol_type = other DNA
aggaccagggaagccagtccggtaccgccgaggagcccgacgccgagccacagccacaccatgatcttctctcctgcttg

SEQ ID NO: 180465 - DNA, 80 bp, synthetic construct
  source 1..80: mol_type = other DNA
caccactcgaaggactctttgttcttgtcttctccaaaccactgtaagtagcattgaaagcaccagcagtgtccccatac

SEQ ID NO: 180466 - DNA, 80 bp, synthetic construct
  source 1..80: mol_type = other DNA
tggatacacacacaggtacagtacaaattataacagaaaggtgaataatgatgacagtacattagttagagatcactaca

SEQ ID NO: 180467 - DNA, 80 bp, synthetic construct
  source 1..80: mol_type = other DNA
tagaagagtgtggctacagtgatcgagtacgctcgatcacattggggaattccacaatcaccacgcaggaatgtgccaat

SEQ ID NO: 180468 - DNA, 80 bp, synthetic construct
  source 1..80: mol_type = other DNA
tagaacaggcagtgtgtggtatcaagaatctggaaccattagatctcactactagtgctggcttcccatatgtcacaatg

SEQ ID NO: 180469 - DNA, 80 bp, synthetic construct
  source 1..80: mol_type = other DNA
tggtggaagcgaaggcgcaagtggtggtggagacgccgctggacccgtggccgagttcgcagacgacggactagacgagc

SEQ ID NO: 180470 - DNA, 80 bp, synthetic construct
  source 1..80: mol_type = other DNA
atacctataccaacagtgggtggataattttgtttaaacaattatagatacagtatatcatttgtagaagaattaatata

SEQ ID NO: 180471 - DNA, 80 bp, synthetic construct
  source 1..80: mol_type = other DNA
atgcgtgtacatgggggaatacttcaccacaaacgcggatgaaactaaaagatttgccaattggacaattaatgcaagac

SEQ ID NO: 180472 - DNA, 80 bp, synthetic construct
  source 1..80: mol_type = other DNA
caactaaactacaccccagtgttttctatgacatattccctggaaagaaggaacccgcagcattacacccaaaggataaa

SEQ ID NO: 180473 - DNA, 80 bp, synthetic construct
  source 1..80: mol_type = other DNA
gccgctggagaagatggaggacgcggcgcagaccgtggagaaccaggagacgtagacgacgacgcgctgctcgccgcttt

SEQ ID NO: 180474 - DNA, 80 bp, synthetic construct
  source 1..80: mol_type = other DNA
gagtactaaattgggcagcacaagtttatccaggaataaagacaaaacatctttgtaaattaattaaggggaaaatgaca

SEQ ID NO: 180475 - DNA, 80 bp, synthetic construct
  source 1..80: mol_type = other DNA
ctagaacatgataaggtagtgtctcaactaaaagagctactaaatgacatgggattttccaccccagaagaaaaattcca

SEQ ID NO: 180476 - DNA, 80 bp, synthetic construct
  source 1..80: mol_type = other DNA
aagtatgtaattggttgcacttaaattacatacacaaagaatcagatggatggattaagaagtttacagagatgtgtaat

SEQ ID NO: 180477 - DNA, 80 bp, synthetic construct
  source 1..80: mol_type = other DNA
tttctctttgccacctatcacccagaccaagtcacagaagtcataaagcaaatgagagacaataactataaactagaaac

SEQ ID NO: 180478 - DNA, 80 bp, synthetic construct
  source 1..80: mol_type = other DNA
cagtaagcaacccacctttgaaatacccggagccggtggaatccctcgtccaatacaaattatcaacccgaaacacatcg

SEQ ID NO: 180479 - DNA, 80 bp, synthetic construct
  source 1..80: mol_type = other DNA
actatgttaagactgactcgtcagacttagggcaactaaaggtgtacgtctggactccactgactattcccacagggtct

SEQ ID NO: 180480 - DNA, 80 bp, synthetic construct
  source 1..80: mol_type = other DNA
ataagatggacaaagaaaccatcacaaatgcaggagcacgtcctttcattgtgtcatttaatgtggcacaatggtaggga

SEQ ID NO: 180481 - DNA, 80 bp, synthetic construct
  source 1..80: mol_type = other DNA
cacagagaccaataggtgacaatcagccagattgttaacggtcaagcacttctgtttccccggtacccttgtatacgctt

SEQ ID NO: 180482 - DNA, 80 bp, synthetic construct
  source 1..80: mol_type = other DNA
ccaggccccgcgggagggtcgccctgcgcatgcgccggtaaaattccactgggtgtgtgtcgtgcgcatgcgccagtatt

SEQ ID NO: 180483 - DNA, 80 bp, synthetic construct
  source 1..80: mol_type = other DNA
ctaatgaggcaaagagaatcaaaattttacacaacagctgctcgggatgcagcacaattattaaacaaaagaagaggtgt

SEQ ID NO: 180484 - DNA, 80 bp, synthetic construct
  source 1..80: mol_type = other DNA
taaaaattcaagacataagaaaccagtactggaaagcactacaagaaaaaaatgacttacactccagttatggcaaggcc

SEQ ID NO: 180485 - DNA, 80 bp, synthetic construct
  source 1..80: mol_type = other DNA
agatacaccataccaaatgtccagtacgatacgtgtatatttcaaacctaaacacatcagggtgtgggtaccacgaccac

SEQ ID NO: 180486 - DNA, 80 bp, synthetic construct
  source 1..80: mol_type = other DNA
ttttatgatgggtggtcacatttcacacaagagggtgtttacggattcaactctttaaacaacatgggccacatttacgt

SEQ ID NO: 180487 - DNA, 80 bp, synthetic construct
  source 1..80: mol_type = other DNA
cccccgtagacgacctagagacgtacaagtggttgacccgcaatccatcgggccgccgtgggtcttccacgagtgggacc

SEQ ID NO: 180488 - DNA, 80 bp, synthetic construct
  source 1..80: mol_type = other DNA
ggatgccaaaaccttactctgtcagcttcaaactaggctttaaggcccaataaaatttgctaggccgtgggagttacgct

SEQ ID NO: 180489 - DNA, 80 bp, synthetic construct
  source 1..80: mol_type = other DNA
aacattattaaacaatgcaacaaatatcacgtcactagttaatacaacagcaactatagacgtaacatccaatgaaaatt

SEQ ID NO: 180490 - DNA, 80 bp, synthetic construct
  source 1..80: mol_type = other DNA
ctacaggacccacccggggggcaaaccctatgtaactgcaaaagttaggccccccagactcctaactgacaagtggtact

SEQ ID NO: 180491 - DNA, 80 bp, synthetic construct
  source 1..80: mol_type = other DNA
catttggtgagggctttacccagaatattaaagacagtttctctaacatcagcacttccatttctgataagctaacttct

SEQ ID NO: 180492 - DNA, 80 bp, synthetic construct
  source 1..80: mol_type = other DNA
ggttttaggccttccggactaccaaaatggcggattccgtgacgtcatgcccgccattttaagtagttgaggcggacggt

SEQ ID NO: 180493 - DNA, 80 bp, synthetic construct
  source 1..80: mol_type = other DNA
aaaagagagcaaagacaccaacattaggctaaactgcctactgttagtgagatgcccgtacaccagacccaaactataca

SEQ ID NO: 180494 - DNA, 80 bp, synthetic construct
  source 1..80: mol_type = other DNA
ggccatggtcagcagcacctggccctcggtgtgcccgaagacgctgatgaaccacgagggcgaggtggggcagaggaaga

SEQ ID NO: 180495 - DNA, 80 bp, synthetic construct
  source 1..80: mol_type = other DNA
ttcatggcttaagaaatttactgaaatgtgcaatgcagctaggggtcttgaatggattggcaacaaaatttcaaagttta

SEQ ID NO: 180496 - DNA, 80 bp, synthetic construct
  source 1..80: mol_type = other DNA
ccgtggccggcgaggcggtgagcacttttgctggtcacgtgaccatcagcgcaggaagcgaggcccgtagaaccgcccaa

SEQ ID NO: 180497 - DNA, 80 bp, synthetic construct
  source 1..80: mol_type = other DNA
ctactaacaaaggagaattcacaggattgggtatatatgacaaaattttagtcgtgccaactcatgcacaacctacagaa

SEQ ID NO: 180498 - DNA, 80 bp, synthetic construct
  source 1..80: mol_type = other DNA
cagacgctggcgcagacgcaaggggcgacgcaggcataagagaaaactcatacttaaacagtggcagccagcctatatca

SEQ ID NO: 180499 - DNA, 80 bp, synthetic construct
  source 1..80: mol_type = other DNA
ataccgccagcctctctaagtaggggactacctcctcgacggtccattctagcgggacgacatgaagcatggcgacaagc

SEQ ID NO: 180500 - DNA, 80 bp, synthetic construct
  source 1..80: mol_type = other DNA
taaacagtgtaattccggggaggagctattaacctatataactaagtacacttccgaatggctgagttttccacgcccgt

SEQ ID NO: 180501 - DNA, 80 bp, synthetic construct
  source 1..80: mol_type = other DNA
catgaagacttggttacagttactgcaactttagcactactagggtgtgatggctcaccttggagattcctgaaaatgta

SEQ ID NO: 180502 - DNA, 80 bp, synthetic construct
  source 1..80: mol_type = other DNA
ttaccgtgtttatttattcattatatttacacaatcacaatgggagctcaagtgtctacacagaaatcagggtcacatga

SEQ ID NO: 180503 - DNA, 80 bp, synthetic construct
  source 1..80: mol_type = other DNA
agtgtttaattctacctgaatacagtgttcttaggaaacgctggttggacctcttttaaacagtttgaatatagacgaga

SEQ ID NO: 180504 - DNA, 80 bp, synthetic construct
  source 1..80: mol_type = other DNA
ttaaacacaattgttgtactgtaacaactgataaaggaaaatttactggtcttggaatctatgatcagattatggttctc

SEQ ID NO: 180505 - DNA, 80 bp, synthetic construct
  source 1..80: mol_type = other DNA
taaactatcaacaaaattactcacaaacataccaaacctttaaacaaaaaatgcaagacaacttacaactaatacaaaaa

SEQ ID NO: 180506 - DNA, 80 bp, synthetic construct
  source 1..80: mol_type = other DNA
aaccccgtcgtcacctttgccgtccaaacccccgtccttggcgtcgacgttgtaacgccgaccgaagctgcccaaaatat

SEQ ID NO: 180507 - DNA, 80 bp, synthetic construct
  source 1..80: mol_type = other DNA
ttaccaccatatgagtacttagaaagaagatggatagataaattcatataattagatatggtattcaagttgtttagaat

SEQ ID NO: 180508 - DNA, 80 bp, synthetic construct
  source 1..80: mol_type = other DNA
gtgtgtttgattattatactacaggtttggttagcatatggtaccagacgaactacgtggtcccaattggagcacccaat

SEQ ID NO: 180509 - DNA, 80 bp, synthetic construct
  source 1..80: mol_type = other DNA
agcttgtcagggagtataacaacagacccctcactgggaacaccattgaagctctcttccagggaccccctaaatttaga

SEQ ID NO: 180510 - DNA, 80 bp, synthetic construct
  source 1..80: mol_type = other DNA
caccgataagcaaatttgccaaatgcgtaagtttgcccaaattaaccaaacccctgaattccgcttcatatcccttgaac

SEQ ID NO: 180511 - DNA, 80 bp, synthetic construct
  source 1..80: mol_type = other DNA
tgtggccgtccccggggacttcctcttttccgcgtccgatcttcgcgtccccagggagtcgcgccgccgtcccctcggga

SEQ ID NO: 180512 - DNA, 80 bp, synthetic construct
  source 1..80: mol_type = other DNA
agctgggaaactagaccccgaggtaaaaagagaatacctgtaagaataggaccacctagactatttacagatcactggta

SEQ ID NO: 180513 - DNA, 80 bp, synthetic construct
  source 1..80: mol_type = other DNA
ccaaggcctacccctcctacccctctgccacctgcaacactaacggtgccaccaaggcctacccgtcctaccactctgcc

SEQ ID NO: 180514 - DNA, 80 bp, synthetic construct
  source 1..80: mol_type = other DNA
gcatgaaaacgagtgcagaagacgtgttaagcacaacctagaagcaatattccaaggtcttggtgatgataccacacctg

SEQ ID NO: 180515 - DNA, 80 bp, synthetic construct
  source 1..80: mol_type = other DNA
ctttggcttgccgggcctctttggcccccctccacccgtgcctccttactacggatcccacttgcgggcagactacgtcc

SEQ ID NO: 180516 - DNA, 80 bp, synthetic construct
  source 1..80: mol_type = other DNA
tgtccgatattgtgtggccaggcattagtattgaaagacaggagaacctcagctggctaccccttactagcagttgttga

SEQ ID NO: 180517 - DNA, 80 bp, synthetic construct
  source 1..80: mol_type = other DNA
aaccagaacaaaatctaaagaacagacacttcatgaaatttagggaagagatcaaaacaacatatccactcgtatcagca

SEQ ID NO: 180518 - DNA, 80 bp, synthetic construct
  source 1..80: mol_type = other DNA
ccagaagatgttatggaaaccagatatgtgatcactgatcaaactagggatgaaatgagcattgagagcttcttgggcag

SEQ ID NO: 180519 - DNA, 80 bp, synthetic construct
  source 1..80: mol_type = other DNA
agattgttacatcaaaaaaagttcatgaatgtggatatccaactatacacacccctgcaaaaacaaaattgcaacctagt

SEQ ID NO: 180520 - DNA, 80 bp, synthetic construct
  source 1..80: mol_type = other DNA
tcctaatataaagcgcagcacttccgaatggctgagttttccacgcccgtccgcagccagatcgccacggagggagatca

SEQ ID NO: 180521 - DNA, 80 bp, synthetic construct
  source 1..80: mol_type = other DNA
ggtggcgactctatatttccacagattattaaaaacccctgcccagacaacagcctgcgtcccggcggccatagggagcc

SEQ ID NO: 180522 - DNA, 80 bp, synthetic construct
  source 1..80: mol_type = other DNA
attcaattctaatatcatattcatcagatctagtcatttatcgaacaaacactacaggtaatgactatatccctacttgt

SEQ ID NO: 180523 - DNA, 80 bp, synthetic construct
  source 1..80: mol_type = other DNA
tacacaaacagaacttaccaaaaactataagcagttaattcaagacattaaaaacggaccaaagggaaaaacagttttta

SEQ ID NO: 180524 - DNA, 80 bp, synthetic construct
  source 1..80: mol_type = other DNA
atttcccccccagaagtgccggatccgaaaagaagaactaactcgttgtggagaataacaaaaatggtcatctggagctt

SEQ ID NO: 180525 - DNA, 80 bp, synthetic construct
  source 1..80: mol_type = other DNA
tttactattactgtgaccttaacatctttgctttctcgccagaattccgtgtctagctgcaattacactcatgtaaggta

SEQ ID NO: 180526 - DNA, 80 bp, synthetic construct
  source 1..80: mol_type = other DNA
gctctcaccatcatggttagaaacagtgctgacactcccactgtgttagctacattagccctactaggctgcagtaaatc

SEQ ID NO: 180527 - DNA, 80 bp, synthetic construct
  source 1..80: mol_type = other DNA
cggaagtgccgccgcggcggcgtgtggcggcgcgctgcgcgcgccgcccagtagggagcgccatgcgccccctactgggc

SEQ ID NO: 180528 - DNA, 80 bp, synthetic construct
  source 1..80: mol_type = other DNA
agtgggaacggtacctttgccacaaactttaccagtcacataaatgacagaataatgaaaggccccttcgggggaggaca

SEQ ID NO: 180529 - DNA, 80 bp, synthetic construct
  source 1..80: mol_type = other DNA
acagactgtagtaataatggatgatgtgatgcagaacccagatggagaagacatgagcactttctgccaaatggtttcct

SEQ ID NO: 180530 - DNA, 80 bp, synthetic construct
  source 1..80: mol_type = other DNA
acttagtgctgtccggagacggactcacaaaatatacagcaaaaaactttagatcaaaactagctgtatatttttatgca

SEQ ID NO: 180531 - DNA, 80 bp, synthetic construct
  source 1..80: mol_type = other DNA
tctgtctctagagggaaggtggggaacgtctaagcgagcgggagcgtgtcatctcccccatctttttacaacaagctgag

SEQ ID NO: 180532 - DNA, 80 bp, synthetic construct
  source 1..80: mol_type = other DNA
atctcctgcagcactaggttccagcccggcggccagaccacgggcaacacctggcctgcgttgatgcgcacgtaagcttc

SEQ ID NO: 180533 - DNA, 80 bp, synthetic construct
  source 1..80: mol_type = other DNA
gaagaggagccgccgcaaacgatccgagagcagctgcagcagcagctcgaagagcagctccgaatccgaaagcagctcaa

SEQ ID NO: 180534 - DNA, 80 bp, synthetic construct
  source 1..80: mol_type = other DNA
tgttgaaaaacttgatcaaactgattagtagcttggtgataatcatcaggaattatgaggacactacaactgtactcgca

SEQ ID NO: 180535 - DNA, 80 bp, synthetic construct
  source 1..80: mol_type = other DNA
caacccacccgcctcaaccacgtccagacgattagtcgatgtgtttgtaaatgatgctgagtttgacccctatgagataa

SEQ ID NO: 180536 - DNA, 80 bp, synthetic construct
  source 1..80: mol_type = other DNA
ggtaaccttgtacgcctgttttataatccccttcccccgtaacagtagaagcacaaaagcaaccgctcaatagatgccat

SEQ ID NO: 180537 - DNA, 80 bp, synthetic construct
  source 1..80: mol_type = other DNA
acacaagggccaggtagctatctatggtgtccaggtggcggctcagacaacacacaatgggcatatactcactataccat

SEQ ID NO: 180538 - DNA, 80 bp, synthetic construct
  source 1..80: mol_type = other DNA
gacatatgttgtgggaatcggggatgcccagccaaatcattccgcagaaagccgtactgatggcgatgtgaaagaccact

SEQ ID NO: 180539 - DNA, 80 bp, synthetic construct
  source 1..80: mol_type = other DNA
aggaagtccccggggacggtcgcgcctcgtccctagaggaccgcggaggaaacgacagacgaagtacggcacaacccgcg

SEQ ID NO: 180540 - DNA, 80 bp, synthetic construct
  source 1..80: mol_type = other DNA
gcgccgcggggacggagacacgggggcgtttgcgccggggacgggagtgtgcttggccggggacggtggtgggcactgag

SEQ ID NO: 180541 - DNA, 80 bp, synthetic construct
  source 1..80: mol_type = other DNA
tacacccagcacaaacaagcaggcatgatgacatgcatggggagacactggtctggaagtttgactccatgctggccctt

SEQ ID NO: 180542 - DNA, 80 bp, synthetic construct
  source 1..80: mol_type = other DNA
aaggatataaccaagttgaaaatggctcttgacaagtatggtgttgacttgcccatggtgacattcctcaaagatgaact

SEQ ID NO: 180543 - DNA, 80 bp, synthetic construct
  source 1..80: mol_type = other DNA
tgcaagaatcaagtaaagtaataaatgaaacagagccttgtatacgaaataatagctgctcaggattagaacaagaacca

SEQ ID NO: 180544 - DNA, 80 bp, synthetic construct
  source 1..80: mol_type = other DNA
tttggcacgcgattggggcaaagctctgccataaccgtgtcgggaacaaataggtgcacgaggagcggggtcccgaggcc

SEQ ID NO: 180545 - DNA, 80 bp, synthetic construct
  source 1..80: mol_type = other DNA
aaaacaggcaatgcttgggactcacatcatctgggacatagggctacagtctagctgtgttttatgcatcccgtggatta

SEQ ID NO: 180546 - DNA, 80 bp, synthetic construct
  source 1..80: mol_type = other DNA
tgggcggccttccatggctacgcagacttcatagaacaagaactaagcattagctcagaaatacgcaactttggcatagt

SEQ ID NO: 180547 - DNA, 80 bp, synthetic construct
  source 1..80: mol_type = other DNA
ggtagaagcaacattggttgtccactcaaacaactacaccaatacaatacttgaagttggcccagtaacaatggcgggtc

SEQ ID NO: 180548 - DNA, 80 bp, synthetic construct
  source 1..80: mol_type = other DNA
ccaccagcgagagctccgtggtgctgcaaccgctcatcaccaagggcgggctctgctcgtccatggcggtttacgacgag

SEQ ID NO: 180549 - DNA, 80 bp, synthetic construct
  source 1..80: mol_type = other DNA
cctgaagagatagttgctcaaggtccagaagaagaatttggaaggtcaattctcaaaaacaatacttgtgtgattactac

SEQ ID NO: 180550 - DNA, 80 bp, synthetic construct
  source 1..80: mol_type = other DNA
ctagtgaagctaagaggattaaaatattgcataataaatgctgcaatataattaaacagaaaaagagaagtgaaccagtt

SEQ ID NO: 180551 - DNA, 80 bp, synthetic construct
  source 1..80: mol_type = other DNA
tggatttgtgcctttatcacccacagtttattcaaccttagtatttttgatatatcttaacaataggcgatgggggcgca

SEQ ID NO: 180552 - DNA, 80 bp, synthetic construct
  source 1..80: mol_type = other DNA
ttatatccccctccccatgtaacttagaagatgagctcacagaccaatagccggcaatcatccagattgtcaatggtcaa

SEQ ID NO: 180553 - DNA, 80 bp, synthetic construct
  source 1..80: mol_type = other DNA
aaaagctcttaaccgttatccgccaattaactacgcaacggctagtaacatcttgttatttttagggcgttcgatcaggt

SEQ ID NO: 180554 - DNA, 80 bp, synthetic construct
  source 1..80: mol_type = other DNA
cacacttcagtcaatctggggtgtatggctacactactttaaataacatgggctccctgtacttcaggcatgtcaacaat

SEQ ID NO: 180555 - DNA, 80 bp, synthetic construct
  source 1..80: mol_type = other DNA
atctgaccacacggggcctggatggggagtccgggcacactcatgagctcataaccgaaccagtcacaagaaacttcacg

SEQ ID NO: 180556 - DNA, 80 bp, synthetic construct
  source 1..80: mol_type = other DNA
ccactgaccacgctatgaatcacacaaaactaagtaatattggccaagcaatggagttcagcgcagagaagagtacagac

SEQ ID NO: 180557 - DNA, 80 bp, synthetic construct
  source 1..80: mol_type = other DNA
tctgcgctgtggtcaaatctaacattagatagtggttttgtggaatggaaaattaactttcaagagcacgcccaggtgag

SEQ ID NO: 180558 - DNA, 80 bp, synthetic construct
  source 1..80: mol_type = other DNA
cctcaagctcatccacgtcggccatctggaccaaagaagtcgtctgccaagagttcagctaccagacctggaagatgagg

SEQ ID NO: 180559 - DNA, 80 bp, synthetic construct
  source 1..80: mol_type = other DNA
cgtcggcgcattttaatgacgtcacggcagccattttgactgtgacgtcaaagtcacgtggggagtgcggcgtgtaaccc

SEQ ID NO: 180560 - DNA, 80 bp, synthetic construct
  source 1..80: mol_type = other DNA
agttttatcaatctacatgttccgccgtaagtaaggggtatctatccgcacttagaaccggatggtatactagcgtaata

SEQ ID NO: 180561 - DNA, 80 bp, synthetic construct
  source 1..80: mol_type = other DNA
cccccccccgaagtccgtcactaaacacgtgactcccgcaggccaaccgaagtgtatgtcgtgcatttcctgggcgtggt

SEQ ID NO: 180562 - DNA, 80 bp, synthetic construct
  source 1..80: mol_type = other DNA
gaaaaacaaattgaacaccttagagtggcagactcacaaacacaagagaaaattaaatgtgaaattgatactttgcatga

SEQ ID NO: 180563 - DNA, 80 bp, synthetic construct
  source 1..80: mol_type = other DNA
ggatactatataagattggtcaagtcttgggtatccacgttggtggtaatgggagggatggatttgcagctatgctatta

SEQ ID NO: 180564 - DNA, 80 bp, synthetic construct
  source 1..80: mol_type = other DNA
ggaggatggtgcaattgaggagaaaattcgaactcttcacctatatgcgctttgacatggagattacgtttgtcataacg

SEQ ID NO: 180565 - DNA, 80 bp, synthetic construct
  source 1..80: mol_type = other DNA
tttataagagacgcagacgaaagactggcagactgtacagaaagcccaaaaagaaactaatactaactcagtggcacccc

SEQ ID NO: 180566 - DNA, 80 bp, synthetic construct
  source 1..80: mol_type = other DNA
tgctgaaccgggcgattgtggaggcatcttgaggtgcaaccatggtgtaatggggattatcactgcaggtggtaacggga

SEQ ID NO: 180567 - DNA, 80 bp, synthetic construct
  source 1..80: mol_type = other DNA
gccttataaaagacttccaccctctccccgctggccaagacacgccgctcgtggaccacgccatcttcctcccggctgat

SEQ ID NO: 180568 - DNA, 80 bp, synthetic construct
  source 1..80: mol_type = other DNA
aaagcagccaagaacaagcaccccaagaaaaagagggccagaaagaggcgctgctcgagcagctccagctccagaaacac

SEQ ID NO: 180569 - DNA, 80 bp, synthetic construct
  source 1..80: mol_type = other DNA
ggccatgaaattggaagcaatagtgatagaggtgacaaacaacctgcagaggatccactctttaattgcaatggcacctt

SEQ ID NO: 180570 - DNA, 80 bp, synthetic construct
  source 1..80: mol_type = other DNA
gcctgcccgtccgatgtggtggccaggtggacgcagtgcccgtcagttccaagggctactagctgggaagcagccccaac

SEQ ID NO: 180571 - DNA, 80 bp, synthetic construct
  source 1..80: mol_type = other DNA
tgcaacatcagccaaacaaaggggagtgaacggagaccccgcattttgccatcttacaggcatatactcacctccctggc

SEQ ID NO: 180572 - DNA, 80 bp, synthetic construct
  source 1..80: mol_type = other DNA
tgggtacgtccttcttgactacaagacccttcagactcttaagtacatcttgtaccttaatcaaaagagatgggagcaca

SEQ ID NO: 180573 - DNA, 80 bp, synthetic construct
  source 1..80: mol_type = other DNA
ttccataccgtggtgaaggagtcgacataaagcaaggcaccatcactcccttgacacctgtcagcaaaatcacaacatac

SEQ ID NO: 180574 - DNA, 80 bp, synthetic construct
  source 1..80: mol_type = other DNA
gaagtaggggatagttgttcatatggtaacatattacttagtggtaatcaaacagcccgcatgatcaaatataattaccc

SEQ ID NO: 180575 - DNA, 80 bp, synthetic construct
  source 1..80: mol_type = other DNA
acccctcctgataaatcagataagtttcaagaagtaacatgggacaatgtgacctttctcaaaagagctttcagaccaga

SEQ ID NO: 180576 - DNA, 80 bp, synthetic construct
  source 1..80: mol_type = other DNA
aaaccaccagcagccaaaggacccaagaatacgcagaagaccgctaaatcaaagaacaagcctggtaaacgccaaagaac

SEQ ID NO: 180577 - DNA, 80 bp, synthetic construct
  source 1..80: mol_type = other DNA
tggtcgatgaaactgtgtctgctcaagtgacgtccatttcttgtacggagaaaaaagtcatcgggataaataaggctata

SEQ ID NO: 180578 - DNA, 80 bp, synthetic construct
  source 1..80: mol_type = other DNA
gtcgtttccggccgcgccccgacacacccaaaacaccgacgtgcgaggccgcgtggtgggtcctcgagggagtgttgagg

SEQ ID NO: 180579 - DNA, 80 bp, synthetic construct
  source 1..80: mol_type = other DNA
actatgctggatgggaaattgcttgcttttgattacacaaattatgatggtagtttgcacccagtttggttcaaagcact

SEQ ID NO: 180580 - DNA, 80 bp, synthetic construct
  source 1..80: mol_type = other DNA
actaacaaaaatattagaatggtactggcaacaaattacagcagatgatgatatacatggacaatatggaaatgcaacaa

SEQ ID NO: 180581 - DNA, 80 bp, synthetic construct
  source 1..80: mol_type = other DNA
gccaaccagcggaggtccacgcagccattgccagtctcacccacggcatgacccaccttaaagaaggccacagaaacctc

SEQ ID NO: 180582 - DNA, 80 bp, synthetic construct
  source 1..80: mol_type = other DNA
cagcggaccaagcaactctgagcaggtacccgccttaactgctgccgagactgggcacacatcacaggtggaacctagtg

SEQ ID NO: 180583 - DNA, 80 bp, synthetic construct
  source 1..80: mol_type = other DNA
aaccaccaatgtatgacaaacaaaggcccacctggggatacgtagtatatgacacaaactttggcaatggaaaaatgccc

SEQ ID NO: 180584 - DNA, 80 bp, synthetic construct
  source 1..80: mol_type = other DNA
ttaatctcagtggaaatccaacatgtagactgcttaaatatgattacccaacaaaacctgggcagtgtgggggtgtgatt

SEQ ID NO: 180585 - DNA, 80 bp, synthetic construct
  source 1..80: mol_type = other DNA
aagacaatacagacatgggcttcctaccctatgactacaattttggcaacggaagaatgccagatggaaacggatacatc

SEQ ID NO: 180586 - DNA, 80 bp, synthetic construct
  source 1..80: mol_type = other DNA
tattaagtttaattgctgtggggctgctcctctactgtaaagcaagaagtactccagtaactctcagcaaggaccagcta

SEQ ID NO: 180587 - DNA, 80 bp, synthetic construct
  source 1..80: mol_type = other DNA
tactacacaaacctcagcaacctaccagaacataaagctaccagaatacaaatacaacagagttttcacccttcatcaat

SEQ ID NO: 180588 - DNA, 80 bp, synthetic construct
  source 1..80: mol_type = other DNA
actacttcaaagcatgggatctcagacacggattctttggagcgaaagctattaaaagaatgcaagaacaacaaattaat

SEQ ID NO: 180589 - DNA, 80 bp, synthetic construct
  source 1..80: mol_type = other DNA
catacaacacaacaataaggaagataccaacatttttgactactacacaggcatgtactgcagtatatttctgtccagcg

SEQ ID NO: 180590 - DNA, 80 bp, synthetic construct
  source 1..80: mol_type = other DNA
gtgacactcgtgattactagcaccacgaccacaggggaatcagtcaataatgaggcacccataacgcaccaagtcatgta

SEQ ID NO: 180591 - DNA, 80 bp, synthetic construct
  source 1..80: mol_type = other DNA
cagtgttttttatgaaatttttcctggagagaaagaaccagcagtactaagtgacaaagatccacgtctacagacaagcc

SEQ ID NO: 180592 - DNA, 80 bp, synthetic construct
  source 1..80: mol_type = other DNA
tggaaagctgaatgcagcaatggcaacagaactttgcaaggattgccacaagcccagtaatttcaataagtgttgtccac

SEQ ID NO: 180593 - DNA, 80 bp, synthetic construct
  source 1..80: mol_type = other DNA
gtggtacaacagctacggcaggagaagaaaaacagaaaatgtgtggagcacaatctcactgccattttccaggggttggg

SEQ ID NO: 180594 - DNA, 80 bp, synthetic construct
  source 1..80: mol_type = other DNA
gggattaattacgccttgcttacgcaagctcagttaattcgcccacgacttgaaaaatgtagcccttaaccaattggcgg

SEQ ID NO: 180595 - DNA, 80 bp, synthetic construct
  source 1..80: mol_type = other DNA
ccgggcgcacacgctcagctcaaccgccagggcgtacacctggctgtacgccgccgccagcagccccgacatcgccgccc

SEQ ID NO: 180596 - DNA, 80 bp, synthetic construct
  source 1..80: mol_type = other DNA
agaaattaaaacaaatcctgatggtagttctataattgcaggtcctaacaataaacccagctcaaatcaaatgactgaat

SEQ ID NO: 180597 - DNA, 80 bp, synthetic construct
  source 1..80: mol_type = other DNA
tttaagaccagacccggaggaaaaccctccattaaagttaaagtaaagccccccactactctaatagacaagtggtactt

SEQ ID NO: 180598 - DNA, 80 bp, synthetic construct
  source 1..80: mol_type = other DNA
tgtcattatccccagcatctgatccgcgcttgtcacacaccatgcttggggaagtactgaactattatactcattgggcc

SEQ ID NO: 180599 - DNA, 80 bp, synthetic construct
  source 1..80: mol_type = other DNA
agggcaacagcagtcaggactctgcggtggccattgcctcaatcattggggaatcctgccccctcccctgcgccttcgtg

SEQ ID NO: 180600 - DNA, 80 bp, synthetic construct
  source 1..80: mol_type = other DNA
catcccggggttcccgtgtctcctgccgttaaccaatatcatttcagccaggctgcctttgggttacctattgatgagga

SEQ ID NO: 180601 - DNA, 80 bp, synthetic construct
  source 1..80: mol_type = other DNA
tgccactagatgtccagataaggcttgtctcacagatgagtatcatggccaggacagcgcctgccttgtctctggcgtgt

SEQ ID NO: 180602 - DNA, 80 bp, synthetic construct
  source 1..80: mol_type = other DNA
aactcggagacggcgccgcgcacgacgtcgctccgtggaaagagaccggcgcgcagctgcacctggggacgcttgatttt

SEQ ID NO: 180603 - DNA, 80 bp, synthetic construct
  source 1..80: mol_type = other DNA
gagggacccttaagccagacaatgtagtgccccttttttttgcaaattggccttattattaatttcttgttaacactaat

SEQ ID NO: 180604 - DNA, 80 bp, synthetic construct
  source 1..80: mol_type = other DNA
ctcgcgggggtcgggaaatttattaaacagactccgagttgccattggacttagaagctatgaatcagtaacgaaagtga

SEQ ID NO: 180605 - DNA, 80 bp, synthetic construct
  source 1..80: mol_type = other DNA
gaggaaccctgcggcgccgtccggacaccgggcgccgtcaggacgtaaaagacccgatccccgaccgagggtagctcctc

SEQ ID NO: 180606 - DNA, 80 bp, synthetic construct
  source 1..80: mol_type = other DNA
taaacttgcaaactccactcccagaaagggacttagcagtggttaacattaatgcccatggatcagagactgttccccat

SEQ ID NO: 180607 - DNA, 80 bp, synthetic construct
  source 1..80: mol_type = other DNA
taaaacctacaggccaaaccacaggtgtcacaccacagtggactgctgtacaaaataatacagcattaaatgcccaagga

SEQ ID NO: 180608 - DNA, 80 bp, synthetic construct
  source 1..80: mol_type = other DNA
taacaagccaaaaacaagtggcagtactgagttggaaccaaaacacttcttcaagtacagacaagacatcacaagtatca

SEQ ID NO: 180609 - DNA, 80 bp, synthetic construct
  source 1..80: mol_type = other DNA
ccattggtccgtgtagggggtcgccataggcttcgacctcccttttaggccttccggactacaaaaatggcggattcagt

SEQ ID NO: 180610 - DNA, 80 bp, synthetic construct
  source 1..80: mol_type = other DNA
ggtggcgccggagacacggggtgacgtcggtgacggtgggccttctgcggcagggacagtggtgaggacggcgcagacgt

SEQ ID NO: 180611 - DNA, 80 bp, synthetic construct
  source 1..80: mol_type = other DNA
ccacctacgacgctgaaagttcttccaggacagaacaggatagtcagccatcttcacagtctacctcttaggccgtatcc

SEQ ID NO: 180612 - DNA, 80 bp, synthetic construct
  source 1..80: mol_type = other DNA
caatttcttccgggtcaaaggtcatcggcgccatattggtcacgtgaccaactacgtcacgggcgccattttgttttaca

SEQ ID NO: 180613 - DNA, 80 bp, synthetic construct
  source 1..80: mol_type = other DNA
tttttctttaatttgtcttatggtcacaatatatatataacgtatattgtgatcatgggcgctcaggtatcaagacaaaa

SEQ ID NO: 180614 - DNA, 80 bp, synthetic construct
  source 1..80: mol_type = other DNA
gtccttggtacggttgtgtgtggatgaattctaccggtttctccaaagcatgtggggctccgccatgtatcatcggcaat

SEQ ID NO: 180615 - DNA, 80 bp, synthetic construct
  source 1..80: mol_type = other DNA
cgcgtcgagtacacacgcagaagaagcgcccgcgccggtgcggggggggggatcgcgggccccggagcacactgcttcca

SEQ ID NO: 180616 - DNA, 80 bp, synthetic construct
  source 1..80: mol_type = other DNA
cgtgtgtctaggtacatcaattccatccgccattctcaccacatctatggcaatcagacctatgacatgatcgggggtaa

SEQ ID NO: 180617 - DNA, 80 bp, synthetic construct
  source 1..80: mol_type = other DNA
agggtggtggctatccaagtcatctaagatcaagcacttctgtctccccggtgagtgtgaatatgctttacccaaggcaa

SEQ ID NO: 180618 - DNA, 80 bp, synthetic construct
  source 1..80: mol_type = other DNA
gagtgttacagttaacgttgggcaactccaccataactacgcaggaggcggcgaattcagtggttgcatatggacgatgg

SEQ ID NO: 180619 - DNA, 80 bp, synthetic construct
  source 1..80: mol_type = other DNA
aatggttggtctctgattggcatgactgcaggccgagaaaggttgctggaggacatattaatgttatagaggtgggagat

SEQ ID NO: 180620 - DNA, 80 bp, synthetic construct
  source 1..80: mol_type = other DNA
gacccggaggagacgtcccatacgccgcagacgagctagaagaccttttcgccgccgtcgaagaagagtaaggagaagga

SEQ ID NO: 180621 - DNA, 80 bp, synthetic construct
  source 1..80: mol_type = other DNA
ccaattggtcaggatccattaagctcacattcttttgtgtgtgtgacagtttcagtactggtaaatttctgatagcatac

SEQ ID NO: 180622 - DNA, 80 bp, synthetic construct
  source 1..80: mol_type = other DNA
ccgaggcccagtttagagtacctacttattgtccagatggcacagaaaatacagacaaaacgaagtggactcagatgtgg

SEQ ID NO: 180623 - DNA, 80 bp, synthetic construct
  source 1..80: mol_type = other DNA
atatgggacctgggtctgcagtcatcatgccacatggttatcccatggatcagttctcacttcttcagaagaacaagaaa

SEQ ID NO: 180624 - DNA, 80 bp, synthetic construct
  source 1..80: mol_type = other DNA
caccaatgatgaaacaggagagcaacttctttcaaaacccagtcgaagaatttgtggacactacattgaaagaggttttg

SEQ ID NO: 180625 - DNA, 80 bp, synthetic construct
  source 1..80: mol_type = other DNA
cttggctgaagaaaaaggcatgtgacattcttgagataccgtatgctgtgagacaaggcgactcatggctgaagaaattc

SEQ ID NO: 180626 - DNA, 80 bp, synthetic construct
  source 1..80: mol_type = other DNA
ggtattgatgatatcattgacaaggtggttaacaacgcactacaactgtcacaacccacacgacctgtcaccgcatcaga

SEQ ID NO: 180627 - DNA, 80 bp, synthetic construct
  source 1..80: mol_type = other DNA
accagcaaacaggaagcaggccatgcttgggacacatctgatttgggatttgggtttacaatcatcttgtactatggttg

SEQ ID NO: 180628 - DNA, 80 bp, synthetic construct
  source 1..80: mol_type = other DNA
ttactcgtcctcatcctccgcggtctcttcttcctccaacaaccaccaccaccatcatcaccaccataacgccgtgacgg

SEQ ID NO: 180629 - DNA, 80 bp, synthetic construct
  source 1..80: mol_type = other DNA
tggcaacttgttcaggttgccctgatttgtctgtgcgcatgcttagagacacacccctaatggaacaaccagtcaacaac

SEQ ID NO: 180630 - DNA, 80 bp, synthetic construct
  source 1..80: mol_type = other DNA
taagggacagagaagctacagctgaagaccaaccaacccagccagacgttgcgacttgcagattttacacactagagtcc

SEQ ID NO: 180631 - DNA, 80 bp, synthetic construct
  source 1..80: mol_type = other DNA
tttactaaccttgctactcgctttaactatctgcctgctacctcttcgcctctggaccctcccggcccagcgccgcgagg

SEQ ID NO: 180632 - DNA, 80 bp, synthetic construct
  source 1..80: mol_type = other DNA
caattcccaaaaagcaagccagacctagtctagtagtcatagaagaagatgatgaagatcagaagagcgaaccgatagaa

SEQ ID NO: 180633 - DNA, 80 bp, synthetic construct
  source 1..80: mol_type = other DNA
agctcccgggccacgtccacactgagcccggcccaggcccgcatgagtccgtcatcggggtcgtggtcccacgtgtatgg

SEQ ID NO: 180634 - DNA, 80 bp, synthetic construct
  source 1..80: mol_type = other DNA
aatttctctttcaaacaggccaatcagataccactacgtacacttcctggggcgtgtctatgaagtctatataagcaatg

SEQ ID NO: 180635 - DNA, 80 bp, synthetic construct
  source 1..80: mol_type = other DNA
gtgtcttatataaggttggctctatccttggtatacatgtgggtggtaatggtagagatggattttctgcaatgctcctt

SEQ ID NO: 180636 - DNA, 80 bp, synthetic construct
  source 1..80: mol_type = other DNA
ttacaccactttcaactatgacaaagattcctatgctgcaacagggggcaaactgagcctcagacaagaccctgataagt

SEQ ID NO: 180637 - DNA, 80 bp, synthetic construct
  source 1..80: mol_type = other DNA
tagtatcaatgacacaattatctttagacaaacctatggtaacctatttgcagcatttcacaaaaatcctggcattatta

SEQ ID NO: 180638 - DNA, 80 bp, synthetic construct
  source 1..80: mol_type = other DNA
gcgatgggcatgtgatggcatttgattatacaaattatgatggaagcttgcatccaatatggtttagactacttgaaaga

SEQ ID NO: 180639 - DNA, 80 bp, synthetic construct
  source 1..80: mol_type = other DNA
atgctattagcgacctattggctagcgttgatagtgaagaggtccgccaatactgtagagaccagggatggattgtacct

SEQ ID NO: 180640 - DNA, 80 bp, synthetic construct
  source 1..80: mol_type = other DNA
gttcgtctgctgcttttgctgcttccagttactgcgtaaactatgcggttgctgcggaaattcacaatccgatagcaaaa

SEQ ID NO: 180641 - DNA, 80 bp, synthetic construct
  source 1..80: mol_type = other DNA
gcgtgtggccgctcgggaacagacccgatacagtcagcgaacgacgcagtgcgtggccgcacacctgttggagcaacggg

SEQ ID NO: 180642 - DNA, 80 bp, synthetic construct
  source 1..80: mol_type = other DNA
ggcttagcaaatggtgaggaacccattgaattcgatgcaaacaaaactgttgcagaagtcggtaaggttcagagggctgt

SEQ ID NO: 180643 - DNA, 80 bp, synthetic construct
  source 1..80: mol_type = other DNA
gtacctgacacgtctagtgacaggttttacaccctggacagcgtagactgggagaagacttcgcgcggctggtggtggaa

SEQ ID NO: 180644 - DNA, 80 bp, synthetic construct
  source 1..80: mol_type = other DNA
ccaggggagcctcctacgggggcaacttcacaaacatgactttctccctggaggcaatatacgaacagtttctgtaccac

SEQ ID NO: 180645 - DNA, 80 bp, synthetic construct
  source 1..80: mol_type = other DNA
aagcgtctttggtattgaaggactggaggccctagatctaaacactagtgcaggattcccttatgtctcattagggatta

SEQ ID NO: 180646 - DNA, 80 bp, synthetic construct
  source 1..80: mol_type = other DNA
caatgcggtggacgtaaacttcaaaccaacacccgtgactgagaaaaggaagaatctaatcaccacggggccattcgggc

SEQ ID NO: 180647 - DNA, 80 bp, synthetic construct
  source 1..80: mol_type = other DNA
gccaaggtgccactacagacagacgccaatgaccaagttggtgattccctgtatagtgccatgactgtggatgactttgg

SEQ ID NO: 180648 - DNA, 80 bp, synthetic construct
  source 1..80: mol_type = other DNA
actatatctgaaataagaactaaaattaaatcaaacatgcaaaactactacaaaaaactacaagaagaaaatacaatact

SEQ ID NO: 180649 - DNA, 80 bp, synthetic construct
  source 1..80: mol_type = other DNA
caaccagggaacctatacctttcgtaagcgtgggcaatgcgtacagctgcttttacgatggttggtcgcacttctcgcag

SEQ ID NO: 180650 - DNA, 80 bp, synthetic construct
  source 1..80: mol_type = other DNA
tactaagcagagcctagtatcacttcgacccttccactggctggtcgttcaatgagaaaacccactcatagacctggcag

SEQ ID NO: 180651 - DNA, 80 bp, synthetic construct
  source 1..80: mol_type = other DNA
ggctaactaaaggtacctcagtatatgacaaaacacagagtaaatgtcttatagaaaacatgcccttgtgggcgtctgtg

SEQ ID NO: 180652 - DNA, 80 bp, synthetic construct
  source 1..80: mol_type = other DNA
aagaactacagtggcaaaattggtggtccaagaaacaagaaacatatacaggaaagccttatcctcaaacagacacaaca

SEQ ID NO: 180653 - DNA, 80 bp, synthetic construct
  source 1..80: mol_type = other DNA
acatttcgcactcggccaagcgggcggctggcgctacctcgaagggccagcaatccgtcaagcagccgaaactggtcagg

SEQ ID NO: 180654 - DNA, 80 bp, synthetic construct
  source 1..80: mol_type = other DNA
aggggccagacaacaaataattactaatatgcaccctgcaactttaaatacaggaggtaaagagtggcagtacacttata

SEQ ID NO: 180655 - DNA, 80 bp, synthetic construct
  source 1..80: mol_type = other DNA
tgagaattccgccgctgggaacatggctctcgtatccactgcaggtgatgttaaatttgttgtctccgggcagaacttgt

SEQ ID NO: 180656 - DNA, 80 bp, synthetic construct
  source 1..80: mol_type = other DNA
gttgcattgctatcatacatactgacttagatcatgaagcacaacaatataatgcacccggaaaaaatttctctcagtgg

SEQ ID NO: 180657 - DNA, 80 bp, synthetic construct
  source 1..80: mol_type = other DNA
agaaactacgccgtccgctcggacgacaccgtcataaaaggaggattcggagggtccttcgggacagagacattctccct

SEQ ID NO: 180658 - DNA, 80 bp, synthetic construct
  source 1..80: mol_type = other DNA
atacaaagtacaagttcctgatacatccagtttataagatggaagatgtctatgaatctatcagatggaccaaagacccc

SEQ ID NO: 180659 - DNA, 80 bp, synthetic construct
  source 1..80: mol_type = other DNA
tgcatgttgattcatggagaaccaggtactggaaagtcaatagtcacatccctcataggtagggccattgcagagaaaga

SEQ ID NO: 180660 - DNA, 80 bp, synthetic construct
  source 1..80: mol_type = other DNA
ctaagagactttcatgttgcagaaacacagggaatcacagactacatacataacctaggtgaagcttttggtgctggatt

SEQ ID NO: 180661 - DNA, 80 bp, synthetic construct
  source 1..80: mol_type = other DNA
tccttccaccggtgggacttccggcgtggcctctttggctcacaagctattaaaagagtgtcagagcaatcaacaacttc

SEQ ID NO: 180662 - DNA, 80 bp, synthetic construct
  source 1..80: mol_type = other DNA
atcagcaggaccggaccgttcagctacagagacgaacacccctccatcacgctgactgctaactacaagttctactttaa

SEQ ID NO: 180663 - DNA, 80 bp, synthetic construct
  source 1..80: mol_type = other DNA
ctaactactgaggctgaaatctactcattacctccagacccaaaacactttgatggttacaatcagcaacgtgtcgtcat

SEQ ID NO: 180664 - DNA, 80 bp, synthetic construct
  source 1..80: mol_type = other DNA
tgttatcaccagtagacaattgccagggactagcattgctcaagacatgccaccgttaacacaccaaatcatgtacatac

SEQ ID NO: 180665 - DNA, 80 bp, synthetic construct
  source 1..80: mol_type = other DNA
catttgtggggattgctaatgcctactcacacttttatgatggatatagtacagtgccacttaaaacagacaccacagac

SEQ ID NO: 180666 - DNA, 80 bp, synthetic construct
  source 1..80: mol_type = other DNA
gatgaatcctaccttagaagagatgctaactgcctgtcaaggagtaggtggaccaggccagaaagctagactaatggcag

SEQ ID NO: 180667 - DNA, 80 bp, synthetic construct
  source 1..80: mol_type = other DNA
ccaagacgcggcgcaccaatgccgaatccaatagccgccgtgcctccggttggtggccggcggcatctagagacatgatt

SEQ ID NO: 180668 - DNA, 80 bp, synthetic construct
  source 1..80: mol_type = other DNA
ggtcgcgcacgccactacggaggatgtttttatctttgtcgaccgcctctttcaacacttttccttccttttccaggccg

SEQ ID NO: 180669 - DNA, 80 bp, synthetic construct
  source 1..80: mol_type = other DNA
ctacaaaaagaaatgagactaactctaatatgcccctacacggagccaaaactgtttaataacaacaacacagaccaggg

SEQ ID NO: 180670 - DNA, 80 bp, synthetic construct
  source 1..80: mol_type = other DNA
tagaccttataacaaacaagtcaatatttatgataatgggcccaaaaggattattaataaaaagaaaatcttaacaatga

SEQ ID NO: 180671 - DNA, 80 bp, synthetic construct
  source 1..80: mol_type = other DNA
gatttgtatcggcctgtaatgacttctctgtgcgtctgctgaaggacacaccattcataagtcagcaaaatttctaccag

SEQ ID NO: 180672 - DNA, 80 bp, synthetic construct
  source 1..80: mol_type = other DNA
agagaggaataaacttagatgatatagaaaaagaaggaggagcaacacataacccagtgtattcaatgaatggaacctta

SEQ ID NO: 180673 - DNA, 80 bp, synthetic construct
  source 1..80: mol_type = other DNA
tctcaacacagcaatattcagcaagtacaagggaaatctacagatagaatgtaaccaatatatagaaattgcagctgacc

SEQ ID NO: 180674 - DNA, 80 bp, synthetic construct
  source 1..80: mol_type = other DNA
aaatacattgatggtgtattgaatgaagttttagttgttccaaatatcaatgagagtcaccctagcacatccaatgcagc

SEQ ID NO: 180675 - DNA, 80 bp, synthetic construct
  source 1..80: mol_type = other DNA
caggtatgattacaaatgtgatgcacatggctagagtagattcattcatacccattaataatattgaaacagaagttggc

SEQ ID NO: 180676 - DNA, 80 bp, synthetic construct
  source 1..80: mol_type = other DNA
aaaagggatggattgtgaatgtcaacagtgaagtgcaattggagcgtaatctgaacagagctatgaccattctgcaagca

SEQ ID NO: 180677 - DNA, 80 bp, synthetic construct
  source 1..80: mol_type = other DNA
ttgactcagcacttttctctaagtataaaggaaatgttaattgccaattgaccccacacatggaagtagctgttgcacac

SEQ ID NO: 180678 - DNA, 80 bp, synthetic construct
  source 1..80: mol_type = other DNA
agggacctaagggatgccttcagtcgtgttaaaacctttttccagacaaaggacgaggtagataaccttttgctcaagga

SEQ ID NO: 180679 - DNA, 80 bp, synthetic construct
  source 1..80: mol_type = other DNA
accgagccgagaccggaaaaattatgaaacaggacgcgcttggacatttgggtttccacccctttcggtgtgtgtctata

SEQ ID NO: 180680 - DNA, 80 bp, synthetic construct
  source 1..80: mol_type = other DNA
aaaccgccattttagtgacgtcacggcggccattttaagtaagcatggcgggcggtgacgtataactttaaaggtcaccg

SEQ ID NO: 180681 - DNA, 80 bp, synthetic construct
  source 1..80: mol_type = other DNA
aggcctagcatttggaggaggcatgagcacagtaacattttcccttagagtactatacgatgaatataccagaaaactaa

SEQ ID NO: 180682 - DNA, 80 bp, synthetic construct
  source 1..80: mol_type = other DNA
gggcacacatcgcaggtggttccaggggacacgatacaaacgcgtcatgttaagaactatcactccagatcagagtccac

SEQ ID NO: 180683 - DNA, 80 bp, synthetic construct
  source 1..80: mol_type = other DNA
agccttaagacattttgatccccgcttgctaactgcgcttggtaattttatctacagtaggcatggagatacccttgcag

SEQ ID NO: 180684 - DNA, 80 bp, synthetic construct
  source 1..80: mol_type = other DNA
aaagcgcgggccaaggtaccaaaaggcggcgtgtggagcgggagtgaaagaggcctccgggtgaaggtaagtgcctacac

SEQ ID NO: 180685 - DNA, 80 bp, synthetic construct
  source 1..80: mol_type = other DNA
caccataacttcacgctgatgataataccctttgtgcctttggattattcatcagattcatccacatacgtgcccatcac

SEQ ID NO: 180686 - DNA, 80 bp, synthetic construct
  source 1..80: mol_type = other DNA
tcaaggggcaattcgggctcgggactggccgggctatgggcaaggctcttagggttatcgctctttaaaatgtttctcgg

SEQ ID NO: 180687 - DNA, 80 bp, synthetic construct
  source 1..80: mol_type = other DNA
aaaaaaagcggaagtgccgccgcggcggcgtgtggcggcgcgctgcgcgcgccgcccagtagagggcgccaagcgccccc

SEQ ID NO: 180688 - DNA, 80 bp, synthetic construct
  source 1..80: mol_type = other DNA
tgttggattcgttccattggattcatacactttgcacttgattagttacgacagcatcatcacaatgggtgcacaagttt

SEQ ID NO: 180689 - DNA, 80 bp, synthetic construct
  source 1..80: mol_type = other DNA
gacagtggaatccttcttcgcccggggtgcatgcgtcaccataatgacagtggagaatttcaacgccaccgagatgtcgg

SEQ ID NO: 180690 - DNA, 80 bp, synthetic construct
  source 1..80: mol_type = other DNA
tgagaagtttttccttattcattctgctgattggttgacaacacatgctttgtttcatgaagttgcaaaattggatgtgg

SEQ ID NO: 180691 - DNA, 80 bp, synthetic construct
  source 1..80: mol_type = other DNA
aatggatatatacagggtcacagtaacacaaaaagcagataatggccttattgtagtgataccactacaaatgggcaaca

SEQ ID NO: 180692 - DNA, 80 bp, synthetic construct
  source 1..80: mol_type = other DNA
acgaaagctggtgaggaactcactatgatccatggccgcagggcccgagatcccgggattctgcgggtgctgaccgagtg

SEQ ID NO: 180693 - DNA, 80 bp, synthetic construct
  source 1..80: mol_type = other DNA
cagaccacggagctgcagagtgatgtcagagaggcagtggaaggggcgattggaagggtggcagacaccatacgcagtgg

SEQ ID NO: 180694 - DNA, 80 bp, synthetic construct
  source 1..80: mol_type = other DNA
agcaggacccatggcgtggacctggtggtggtggagacggcgcggcagaaggaggccgtggaggaggagacgctggcgga

SEQ ID NO: 180695 - DNA, 80 bp, synthetic construct
  source 1..80: mol_type = other DNA
atgaaaaacgcagcaagtgcgttatctgtgacctgcctctgtgggccgctttgtactgctaccacaactttgtagaagag

SEQ ID NO: 180696 - DNA, 80 bp, synthetic construct
  source 1..80: mol_type = other DNA
cttaagtgcctctaaagatccaaaagtcattgaattctgtgagaaagaagggtggatcaaacaatccaaacactcaaaaa

SEQ ID NO: 180697 - DNA, 80 bp, synthetic construct
  source 1..80: mol_type = other DNA
gcgttttactggcgactttttctgcagagtcaacaaagtcaacatatagacgcacctattacagtaattcagggagatac

SEQ ID NO: 180698 - DNA, 80 bp, synthetic construct
  source 1..80: mol_type = other DNA
gaggagctttaaaacgcaccccaggggaccctcgtacgtcagaatgaaagttagacccccgagactacttacagacaagt

SEQ ID NO: 180699 - DNA, 80 bp, synthetic construct
  source 1..80: mol_type = other DNA
acttcagggtcaagtatttggaatcctcagttaactcagaacatatattctcaatagataaaaattgtgagacaattgcc

SEQ ID NO: 180700 - DNA, 80 bp, synthetic construct
  source 1..80: mol_type = other DNA
ccataaggcctttatcttcttgccatttgtcagtaacaggggtcgccatagacttcggcctccattttaccttgtaaaaa

SEQ ID NO: 180701 - DNA, 80 bp, synthetic construct
  source 1..80: mol_type = other DNA
gagacaagcacgcagtcctcgcaagaagagaaagatcaagaagtccaagaggtcccggtacaccagtacctcctcaagca

SEQ ID NO: 180702 - DNA, 80 bp, synthetic construct
  source 1..80: mol_type = other DNA
ataaacttacatggaaccatgagtgtgaaatacagaaaatcacagctgtttttcaaccttcaatacctaaggattttaaa

SEQ ID NO: 180703 - DNA, 80 bp, synthetic construct
  source 1..80: mol_type = other DNA
gaagaagagcacatcgtcggacgcggggatctcctcgcgcacgctcagaatctcgtacacggccatcacttcggggtcgc

SEQ ID NO: 180704 - DNA, 80 bp, synthetic construct
  source 1..80: mol_type = other DNA
cacaacatgctagagttagtgcaagtagaatcaatgatggagataaacaatgtagctggtgcaagtggtatggaaagatt

SEQ ID NO: 180705 - DNA, 80 bp, synthetic construct
  source 1..80: mol_type = other DNA
gtagccagaataagaactatgcccccttttgatgacacagacgccacagccatgaccttacacccaggaatgatcatgtt

SEQ ID NO: 180706 - DNA, 80 bp, synthetic construct
  source 1..80: mol_type = other DNA
tccaactcaacccaggaggtaatagtgttctcaatcgcaccctgttgggtgaagtgatcaattactatgcacactggtcg

SEQ ID NO: 180707 - DNA, 80 bp, synthetic construct
  source 1..80: mol_type = other DNA
aagttccagccctcactgcagttgagacgggtgcaactagcagtgttgtcccagcagatttggtgcaaacacgacatgta

SEQ ID NO: 180708 - DNA, 80 bp, synthetic construct
  source 1..80: mol_type = other DNA
aacagttttacacaaaaagagatagcaactatggctggtgtaactttaaccccaccgcttttaactcaaataacgtaaca

SEQ ID NO: 180709 - DNA, 80 bp, synthetic construct
  source 1..80: mol_type = other DNA
caagcactttgttaggtgaaatttgcagttattacacacactggactggcagcttacgctttagctttatgttttgtggt

SEQ ID NO: 180710 - DNA, 80 bp, synthetic construct
  source 1..80: mol_type = other DNA
catgagattggcatataaagatagagggttttacaagcattatggcatcattgttggtgatcaggtttaccaattggatt

SEQ ID NO: 180711 - DNA, 80 bp, synthetic construct
  source 1..80: mol_type = other DNA
cacaagatcctcatacccagcttcacaaccagacccaagggcaaggagctagttaaagttaaaattcagccccccaagat

SEQ ID NO: 180712 - DNA, 80 bp, synthetic construct
  source 1..80: mol_type = other DNA
tagaaccaacactaacaccaaaaataaaaatgaggaacaaagtcaacacactaacagtacacatcaccataaacgcaatc

SEQ ID NO: 180713 - DNA, 80 bp, synthetic construct
  source 1..80: mol_type = other DNA
cccaacaaagagaaatgattatacttggcaatcaggcacaaatgcatctgttttctggcaacatggacagacatacccca

SEQ ID NO: 180714 - DNA, 80 bp, synthetic construct
  source 1..80: mol_type = other DNA
gagcagttaagacaagagaagaaaaaccgccagagtgttcgggttaatttggatgccatattccagggtttaggtgatga

SEQ ID NO: 180715 - DNA, 80 bp, synthetic construct
  source 1..80: mol_type = other DNA
tcacttacagtaccaacactgcagggactacccaccatgtctactcctggatcaaatcagtttttgacttcggatgattt

SEQ ID NO: 180716 - DNA, 80 bp, synthetic construct
  source 1..80: mol_type = other DNA
accgcgattgtgtcagtacaaggctaaggctagtgtagattttgaggttaccaaggtcacggaggaaaggcgagatatca

SEQ ID NO: 180717 - DNA, 80 bp, synthetic construct
  source 1..80: mol_type = other DNA
cccccgtgtgtctaatgtgctgtttgaaacacgtaaagtagctggtggaagaacagataaacctttaataaaaaaaaagt

SEQ ID NO: 180718 - DNA, 80 bp, synthetic construct
  source 1..80: mol_type = other DNA
ggcacacactacataccctttaacctcagaaacaagtggtacccaacactactaaaccagcagtccgtgctggaggacat

SEQ ID NO: 180719 - DNA, 80 bp, synthetic construct
  source 1..80: mol_type = other DNA
atggtagacctggcagatgaggcaagaggtaccccactggtaacagtgttcttgcctgcgtggctgcctgcacaccctta

SEQ ID NO: 180720 - DNA, 80 bp, synthetic construct
  source 1..80: mol_type = other DNA
gtgccgcgattcgtacggttcatcgtctacgtcgttttgttcaccgtcgctgtgcaacgcgtgaaacaagagcgtgatgc

SEQ ID NO: 180721 - DNA, 80 bp, synthetic construct
  source 1..80: mol_type = other DNA
actataaaaaatatgatccatttggaggaggaatatccacactgaatttcacactaagttacctctatgacgaatatgta

SEQ ID NO: 180722 - DNA, 80 bp, synthetic construct
  source 1..80: mol_type = other DNA
ctacgttcctgaagagagggttccgagcggataagaggtatagcttccttattcacccggttttcccagagaaagaaatc

SEQ ID NO: 180723 - DNA, 80 bp, synthetic construct
  source 1..80: mol_type = other DNA
cagaggctcaatttagagtacccgcacaggctccagatggtacaacatataacgaaaaaagcacgtggaataacatgtgg

SEQ ID NO: 180724 - DNA, 80 bp, synthetic construct
  source 1..80: mol_type = other DNA
tttacttcaagcccaaacacgtgcgagcttgggtgcctcgcccgcctagactatgtccttataagaacaaggcaaatgta

SEQ ID NO: 180725 - DNA, 80 bp, synthetic construct
  source 1..80: mol_type = other DNA
tctcaattctccacaacatccgagtacccatcacaaccctcatctccacccaacacatcacgctagtagttattaaaaaa

SEQ ID NO: 180726 - DNA, 80 bp, synthetic construct
  source 1..80: mol_type = other DNA
tgcaataacacatatatcattagtatagaatttctatagccgcgataacagtaccgcatgcaacatgacggttgttgtta

SEQ ID NO: 180727 - DNA, 80 bp, synthetic construct
  source 1..80: mol_type = other DNA
ttaactgagcctaatgaagacactatacttctagctatatcatcagatcttcaagttgacagcacaaatgttcctggtcc

SEQ ID NO: 180728 - DNA, 80 bp, synthetic construct
  source 1..80: mol_type = other DNA
cggatgacagacagtcgcctagtgcaatgccaaattatgagcccactcctccaattcatattccaggggaagttcataac

SEQ ID NO: 180729 - DNA, 80 bp, synthetic construct
  source 1..80: mol_type = other DNA
atggctaccaaaaaagcccactacccaacctccatgtaaagtaagtttcaaattaaagctcgattcctaactctcaaggc

SEQ ID NO: 180730 - DNA, 80 bp, synthetic construct
  source 1..80: mol_type = other DNA
actggggttgtcgtgccagccgggacgcctacgtcatgctcaataatgtgttttgtgtcagcctgcaacgacttttccgt

SEQ ID NO: 180731 - DNA, 80 bp, synthetic construct
  source 1..80: mol_type = other DNA
gtgtctttcatgatgtcttccctggcaccaaagaaccagcagttctatccccatatgacaatagattagaagtagatttg

SEQ ID NO: 180732 - DNA, 80 bp, synthetic construct
  source 1..80: mol_type = other DNA
gctgccaaagatgtcctcaaactctacaaaatctagacgccatccgggtggcgctgaaacgggaaggctaatgttcatat

SEQ ID NO: 180733 - DNA, 80 bp, synthetic construct
  source 1..80: mol_type = other DNA
cctaccagtgagaatgccaagtggagccaatcagttcatgacaacagaggatgaacagtccccaaacatactccccagct

SEQ ID NO: 180734 - DNA, 80 bp, synthetic construct
  source 1..80: mol_type = other DNA
tggagatggaaaaatgcccaacggtagcacatacataccgtttctatacagaaacaagtggtaccctattacactacacc

SEQ ID NO: 180735 - DNA, 80 bp, synthetic construct
  source 1..80: mol_type = other DNA
gtttaccgcagctagcttccagtatccgttctgctcaccacaaacgaacactaacgcaaccaccttccaggtgttgcaaa

SEQ ID NO: 180736 - DNA, 80 bp, synthetic construct
  source 1..80: mol_type = other DNA
cagcagccacaaccagagattatgtttaccaaataatgtatgtaccaccaggagcccccataccaaatacctgggacgac

SEQ ID NO: 180737 - DNA, 80 bp, synthetic construct
  source 1..80: mol_type = other DNA
ggtaaacccaagcacataactgcatggattcctcgcccgcccagagcaacccaatacctgcacaagttcagtactaatta

SEQ ID NO: 180738 - DNA, 80 bp, synthetic construct
  source 1..80: mol_type = other DNA
gctttcgacctcgtcgaagagtaaggaggcgcggggggcggtggcgcacttccgaatggctgagttttccacgcccgtcc

SEQ ID NO: 180739 - DNA, 80 bp, synthetic construct
  source 1..80: mol_type = other DNA
actcattaaacaacatgggtcacatatacgtcaggcatgtaaacgaacagaatctgggcgtctccaccagcaccgtgcgc

SEQ ID NO: 180740 - DNA, 80 bp, synthetic construct
  source 1..80: mol_type = other DNA
taaattcagtacccatggattccatgactagacacaacaatatatctttactagtcatccccattgtaccgctgtcaagt

SEQ ID NO: 180741 - DNA, 80 bp, synthetic construct
  source 1..80: mol_type = other DNA
caatgcaggcaaacaattatcagcaaaagaaaaccaactataccaaaacaaacttttatactacaagagacgcaacaggt

SEQ ID NO: 180742 - DNA, 80 bp, synthetic construct
  source 1..80: mol_type = other DNA
caatttccattaaatgcccaagaacctaaacacagagatacactgtacgggggcagtccatacacaacacaaatatttga

SEQ ID NO: 180743 - DNA, 80 bp, synthetic construct
  source 1..80: mol_type = other DNA
aagagtgataagtacacctctggtgggtatattacactgtggtaccagacagatttcatcccgggtgctagtggtggaat

SEQ ID NO: 180744 - DNA, 80 bp, synthetic construct
  source 1..80: mol_type = other DNA
gtacaagcgacagcgagagctcgggaagcagatccagttcctcatgttacaactcaccaaaacccaaacaaacctgcaca

SEQ ID NO: 180745 - DNA, 80 bp, synthetic construct
  source 1..80: mol_type = other DNA
cacagtatcatttaacctaagagtgctttttgaccagcaccaaaggggacttaacaagtggtctttccctaatgaccagc

SEQ ID NO: 180746 - DNA, 80 bp, synthetic construct
  source 1..80: mol_type = other DNA
gcaaaagaggaacttgcccaggcagtcagttattttgcatgccacctccctgcctggtggacttccagactattttctgc

SEQ ID NO: 180747 - DNA, 80 bp, synthetic construct
  source 1..80: mol_type = other DNA
gtcctcaggagacgctggttggacttgttttaaattacatatatatagacctctaatttagattagaaatagaagtttat

SEQ ID NO: 180748 - DNA, 80 bp, synthetic construct
  source 1..80: mol_type = other DNA
cgtactccgcgtaggtggcctccagatccgtgttgaccaccgctgatttcatgtccggggactgcagggcctggcgcgtc

SEQ ID NO: 180749 - DNA, 80 bp, synthetic construct
  source 1..80: mol_type = other DNA
cgaaaagcgaagcgccgcgcaaaagcttactagaaactccgtgcaaacacccgccgccaaagccctccgagcgcccgaaa

SEQ ID NO: 180750 - DNA, 80 bp, synthetic construct
  source 1..80: mol_type = other DNA
aaccagataccatctcaccacccacataaacacattatttactggaacaaaagacatgcaagaagcaaaactaacaggca

SEQ ID NO: 180751 - DNA, 80 bp, synthetic construct
  source 1..80: mol_type = other DNA
atatcctatactggagtccacaagattgacgaggtatatgcacaagtttgtcagaaagatcataggttacacctacctca

SEQ ID NO: 180752 - DNA, 80 bp, synthetic construct
  source 1..80: mol_type = other DNA
gttaatgctagtaaatttaacaagagaaaattcttgactgcttcaactaagtataagtggacacgaacaaaagtcgatat

SEQ ID NO: 180753 - DNA, 80 bp, synthetic construct
  source 1..80: mol_type = other DNA
aaagggggtttatggatataatacactaaataagatggggcaattgtttgtcagacatgtgaacaaagaaactcccacgc

SEQ ID NO: 180754 - DNA, 80 bp, synthetic construct
  source 1..80: mol_type = other DNA
ccccacctggattcattgtggacctattatccagctcaaaagaccctaaggtgatggaatactgcatggagcagggatgg

SEQ ID NO: 180755 - DNA, 80 bp, synthetic construct
  source 1..80: mol_type = other DNA
ctccaggtagaggtacacacgcggatagccaattcagagtaataaactgtgataatcaaccctcatcaatgatgacgaac

SEQ ID NO: 180756 - DNA, 80 bp, synthetic construct
  source 1..80: mol_type = other DNA
ggtaggcattacaggcgaaagaagaggccactgccactgtgcgacctgcgaactccacagtgtatgtcgtgcacttcctg

SEQ ID NO: 180757 - DNA, 80 bp, synthetic construct
  source 1..80: mol_type = other DNA
accaagtaattcatcagttaaacctactcaaacattagacaacgttaaaactattataaccacaaacatgaaaaactggc

SEQ ID NO: 180758 - DNA, 80 bp, synthetic construct
  source 1..80: mol_type = other DNA
gccagtttttccctgaagctagcagaaattctgagggccactgaaatgaggaagcgaaactccctctctggagctcccaa

SEQ ID NO: 180759 - DNA, 80 bp, synthetic construct
  source 1..80: mol_type = other DNA
ttccccaggacaccttcttgtggtgggtggtcttctacctgaagcccatagttacaaacctgtacctggggtgccttgcc

SEQ ID NO: 180760 - DNA, 80 bp, synthetic construct
  source 1..80: mol_type = other DNA
gaaactgtagaggacgacgcccgactgacgctcatatgtccctactgccagcccatgctgtacaactggcaaaacccact

SEQ ID NO: 180761 - DNA, 80 bp, synthetic construct
  source 1..80: mol_type = other DNA
cccgtgagtacagctccagggaggcaaagtcaatgttctcgatgagggaggtgtttagtgagatgaaggtctgcagggtg

SEQ ID NO: 180762 - DNA, 80 bp, synthetic construct
  source 1..80: mol_type = other DNA
cactaatattaactactataaggattcctatgcagcatcagccactcgacaagactttgcgcaagatccaaagaaattta

SEQ ID NO: 180763 - DNA, 80 bp, synthetic construct
  source 1..80: mol_type = other DNA
agtatatcaacagatcagttattgggaacaccattgaagctcttttccaaggaccccctaaatttagaccaataaggatt

SEQ ID NO: 180764 - DNA, 80 bp, synthetic construct
  source 1..80: mol_type = other DNA
aaggtggatttgtaaccctatggcatcaaacagcttttgtatctgctggtgttgttggtgccatcatggtgacgtgttct

SEQ ID NO: 180765 - DNA, 80 bp, synthetic construct
  source 1..80: mol_type = other DNA
aacctttttatgaactcatatttatattttagaggttctctcattctaagactatctatctatgctagcactttcaatag

SEQ ID NO: 180766 - DNA, 80 bp, synthetic construct
  source 1..80: mol_type = other DNA
cagctccccggcgttggactccacgtcgggccaggtgtcccagtaggagtcggcggcggcggcgctgaggcgtgcggaag

SEQ ID NO: 180767 - DNA, 80 bp, synthetic construct
  source 1..80: mol_type = other DNA
caacacaaggacaacacccagcacaaccacatcccagaacttattaaatgaaagctcttcatgcataaataataacaact

SEQ ID NO: 180768 - DNA, 80 bp, synthetic construct
  source 1..80: mol_type = other DNA
ctgtatacgtctgcggctttgtggagcgcccggacgccccacccaaggacgcctgccttcacctggatcccctcaccgtc

SEQ ID NO: 180769 - DNA, 80 bp, synthetic construct
  source 1..80: mol_type = other DNA
tgcacgcgcggagaaaggtttttccttggacgttgtcaaggcctatgctcgtactcttgtttccgagatccgtcttggtg

SEQ ID NO: 180770 - DNA, 80 bp, synthetic construct
  source 1..80: mol_type = other DNA
aaagttttggtttttctttgttatggactatatcattagaacactaattcagttagaacactaatttggaatattgcaat

SEQ ID NO: 180771 - DNA, 80 bp, synthetic construct
  source 1..80: mol_type = other DNA
tgtaccagaacaccagttagcatacattggaggtactaaagtcaacataggatacaaccatacacaccctggtgaagatg

SEQ ID NO: 180772 - DNA, 80 bp, synthetic construct
  source 1..80: mol_type = other DNA
tgggttttcttcttttacttgaacaatacctctaataataactgctatattgtcaataagacattatcatcacaatgggg

SEQ ID NO: 180773 - DNA, 80 bp, synthetic construct
  source 1..80: mol_type = other DNA
ttgaatcagtggctcaaaatgctcttcaaatttcccagccgagaccagctcagaggccagcaatcaccaatacggctgca

SEQ ID NO: 180774 - DNA, 80 bp, synthetic construct
  source 1..80: mol_type = other DNA
caacctattagcacctcccacaataacttctctgccagctatgaacaggaggttctttcttgatttagatatagtggtat

SEQ ID NO: 180775 - DNA, 80 bp, synthetic construct
  source 1..80: mol_type = other DNA
ccccgcatggccttgcagcttcaagttatgcacgatataacactaacagggccctttagctacaaagatgatctagtaat

SEQ ID NO: 180776 - DNA, 80 bp, synthetic construct
  source 1..80: mol_type = other DNA
aaaagctaagataatcataaaacagtggcagccggggatggtcagacggtgcaggataataggctacatggctgctctta

SEQ ID NO: 180777 - DNA, 80 bp, synthetic construct
  source 1..80: mol_type = other DNA
cctagcacacaattagtaatgaaatataagttcgcctttaactgggggggaaatcctatcattgaacagattgttaaaga

SEQ ID NO: 180778 - DNA, 80 bp, synthetic construct
  source 1..80: mol_type = other DNA
gacatgcacgttcataatgaaattattactcaaaatccgattgaaaattatgtagatgaggtgcttaatgaagttttagt

SEQ ID NO: 180779 - DNA, 80 bp, synthetic construct
  source 1..80: mol_type = other DNA
gctgctcctgagagcgctgccggcccccgaggtccgcaggcagacgcgcacggagaacccgggcgcctccgatgggccgt

SEQ ID NO: 180780 - DNA, 80 bp, synthetic construct
  source 1..80: mol_type = other DNA
tgcagggataggactagaagaaatgatagactgtcaattcaaaatgacaggattaaaaagagatgagtcaaaacaatata

SEQ ID NO: 180781 - DNA, 80 bp, synthetic construct
  source 1..80: mol_type = other DNA
aaccacaagctctaggtgccgtagaaataggagcaactgctgatgtgggcccagaaacactaattgaaacaagatacgta

SEQ ID NO: 180782 - DNA, 80 bp, synthetic construct
  source 1..80: mol_type = other DNA
tgcccctctccacccccagggaaatggacatacttgggttcgtttcagcttgcaatgattttagtgtgcgcctgctacgt

SEQ ID NO: 180783 - DNA, 80 bp, synthetic construct
  source 1..80: mol_type = other DNA
ctaagtggaaaacaattattaaagacgcctatgacttagtaagagaggaataccaacaattatacaccacaactatggca

SEQ ID NO: 180784 - DNA, 80 bp, synthetic construct
  source 1..80: mol_type = other DNA
cccccctccttaatgtaacttagaagcttgaacaatcgcccaataggatatgaccactccatggttatgaagggcaagca

SEQ ID NO: 180785 - DNA, 80 bp, synthetic construct
  source 1..80: mol_type = other DNA
ttttgttaaacctaaacatatcactgcatggattcccagaccacctagggcagtacagtacacacacaagtatagcacca

SEQ ID NO: 180786 - DNA, 80 bp, synthetic construct
  source 1..80: mol_type = other DNA
acatcaaaaacccagaatacacacagtacaaatataaagacacagacacaccctttgaaaacagcttttacaaaaagaac

SEQ ID NO: 180787 - DNA, 80 bp, synthetic construct
  source 1..80: mol_type = other DNA
gcatatacaccccctggggcagacatacccacgaagcgaaaggacgccatgctaggtacacatgtaatttgggaccttgg

SEQ ID NO: 180788 - DNA, 80 bp, synthetic construct
  source 1..80: mol_type = other DNA
gatatggcttcccggtcgggccgagagctcctggggcaccgggagtaggtggcaacccttccaaccccccgatccgtcga

SEQ ID NO: 180789 - DNA, 80 bp, synthetic construct
  source 1..80: mol_type = other DNA
tattccccacctggggcagcccccccgaaaaacaggaaagacgcaatgctagggacacatattatatgggatttgggatt

SEQ ID NO: 180790 - DNA, 80 bp, synthetic construct
  source 1..80: mol_type = other DNA
tgtgtataagagacagcttcctgggcatggtctacataattatataaatgcttgcacttccgaatggctgagtttatgct

SEQ ID NO: 180791 - DNA, 80 bp, synthetic construct
  source 1..80: mol_type = other DNA
aggttcaggacagtttctcactacagatgacaggcaatcacccagtgcactgcctaactatgaaccaactcccagaattc

SEQ ID NO: 180792 - DNA, 80 bp, synthetic construct
  source 1..80: mol_type = other DNA
caagagagactcttgcgggcgcgtgcagggacgtgtggggaatgttacaacgcattggaaggggaatccttgcggtccca

SEQ ID NO: 180793 - DNA, 80 bp, synthetic construct
  source 1..80: mol_type = other DNA
atgataaagtgagtcatgatgaagggacatatggaactagtgtaaccaatgatatgggcagattgtgtttcagaacccca

SEQ ID NO: 180794 - DNA, 80 bp, synthetic construct
  source 1..80: mol_type = other DNA
aatggagactaccacatcatgtgcaaatagcactaccaacgtcacatgcaacggcactttatacactattcataaattgt

SEQ ID NO: 180795 - DNA, 80 bp, synthetic construct
  source 1..80: mol_type = other DNA
ataatttagaacaaaatattaggaaagtagatatgtattcagtaattttaggccaagaaacaacaccagctaaagaaata

SEQ ID NO: 180796 - DNA, 80 bp, synthetic construct
  source 1..80: mol_type = other DNA
acaagtaggccttgtatgcatgatatgcccatacaccagaccacaaatgtacaacaaaacatcaccagactatggatatg

SEQ ID NO: 180797 - DNA, 80 bp, synthetic construct
  source 1..80: mol_type = other DNA
caggaccctttgcatacaaaggagaacaaaaaactgccaccctagcaagcaaatatgcctttaaatggctatggggtggc

SEQ ID NO: 180798 - DNA, 80 bp, synthetic construct
  source 1..80: mol_type = other DNA
ggagcaggaaatggaaaccgaaacagaagcagcccaagaagaggagacgctctccgtccgagagcagctgcagcagcaat

SEQ ID NO: 180799 - DNA, 80 bp, synthetic construct
  source 1..80: mol_type = other DNA
ttggtacaaccgggaggacggggtggatcacgaccaaccagaaatacaccgctgagaggattgcgtaaaccattactacc

SEQ ID NO: 180800 - DNA, 80 bp, synthetic construct
  source 1..80: mol_type = other DNA
tgaagagcagatttccgtcagccagggtgacctggctcaggtccggcgccctgcgcagtccaagctgcgcccacacacat

SEQ ID NO: 180801 - DNA, 80 bp, synthetic construct
  source 1..80: mol_type = other DNA
ggacccaaaagtcattgagtactgtgtggaacaagggtgggttggtaaagcaaactctaccattgaaagggacttaaact

SEQ ID NO: 180802 - DNA, 80 bp, synthetic construct
  source 1..80: mol_type = other DNA
ttaagtactgtgaggataacaagtggataataccagctgactgtagactagagagagatctcaattatgcaaatttagtt

SEQ ID NO: 180803 - DNA, 80 bp, synthetic construct
  source 1..80: mol_type = other DNA
gaaatcaatctaagtgggaatctgacatgccgacttttaaaatacaactatcctacacaacctggtcaatgtggagccgt

SEQ ID NO: 180804 - DNA, 80 bp, synthetic construct
  source 1..80: mol_type = other DNA
gcaatttcagagcttggctatcgcagagcttccagagcctccaagcggcctgccagagagtactgacagcaatcagagaa

SEQ ID NO: 180805 - DNA, 80 bp, synthetic construct
  source 1..80: mol_type = other DNA
tactatcggaaactccactattactactcaggattctttaaacaccattgcagcatatggagaatggccccagtacttat

SEQ ID NO: 180806 - DNA, 80 bp, synthetic construct
  source 1..80: mol_type = other DNA
gtcaactgccgtccccgccgcaagcaacccccgtcaccgcaagtccccaccaccgtccctcagcccggtcccgcaagtcc

SEQ ID NO: 180807 - DNA, 80 bp, synthetic construct
  source 1..80: mol_type = other DNA
acaaggccaaacatgttaaggtgtggtgccccagaccccctagagcagttgaatatacgaatgtgcatcttacaaactac

SEQ ID NO: 180808 - DNA, 80 bp, synthetic construct
  source 1..80: mol_type = other DNA
tggattcctttatgcccataaacaacatacccagtcagatccaggaagtaggtgtatacaatatcacagtgtctggtact

SEQ ID NO: 180809 - DNA, 80 bp, synthetic construct
  source 1..80: mol_type = other DNA
atcatgagtgtggacaattataatgagagtcttactagcaatcagaagtccagcttgtttgctacctggaatgtcactta

SEQ ID NO: 180810 - DNA, 80 bp, synthetic construct
  source 1..80: mol_type = other DNA
gatatgtcacattttataaaagaaaaggggggactggaagggatttattacagtgaaagaaagcatagaatcttagacat

SEQ ID NO: 180811 - DNA, 80 bp, synthetic construct
  source 1..80: mol_type = other DNA
tgtgaatcaaggaaaaagtattatcccatttcgttcactgggcccacatttagatacatggaggccaacgaatactttcc

SEQ ID NO: 180812 - DNA, 80 bp, synthetic construct
  source 1..80: mol_type = other DNA
tcaaccgtttccaagattttcattaccattcctgagtgttgcatcagcctattacatgttttatgatggttataatggag

SEQ ID NO: 180813 - DNA, 80 bp, synthetic construct
  source 1..80: mol_type = other DNA
ggaggagttcacttactttccctaagaaaggccatggcatgttgtcccaattttttggttatttcactggggaattaaat

SEQ ID NO: 180814 - DNA, 80 bp, synthetic construct
  source 1..80: mol_type = other DNA
atgttggtatcagacaaatttagttgtcccacccaacacccccactagtgctaagatgttgtgctttgtatccggttgta

SEQ ID NO: 180815 - DNA, 80 bp, synthetic construct
  source 1..80: mol_type = other DNA
tgcccctgtcagcatgcgtttcagttcatgagtataatttttcctatcgttatacatatcatcactgtagttgactttgc

SEQ ID NO: 180816 - DNA, 80 bp, synthetic construct
  source 1..80: mol_type = other DNA
ctgggccccaccatcatactctgtaaccttcaagctcaacttcaaataaacaaggccgtgggactttcacttgtcggtgt

SEQ ID NO: 180817 - DNA, 80 bp, synthetic construct
  source 1..80: mol_type = other DNA
tacttgttcaaagccaacccaaattacgccggtaactccattaaaccgaccggtactagtcgtaccgctattactaccct

SEQ ID NO: 180818 - DNA, 80 bp, synthetic construct
  source 1..80: mol_type = other DNA
aggcgaaagctagagctgttcacgtatgcccgatttgacgcagaattcacttttatagcatcaacaccggatggcgaagt

SEQ ID NO: 180819 - DNA, 80 bp, synthetic construct
  source 1..80: mol_type = other DNA
aagacacagtggaaaccaggtatgtcatcacagatcaaactcgtgatgaaatgagtgttgaaagtttcttagggagatca

SEQ ID NO: 180820 - DNA, 80 bp, synthetic construct
  source 1..80: mol_type = other DNA
ctctgaacaacatgggcaaactatacgcgaggcacgttaacaaagatacaccataccaaatggcaagtgcaatccgtgta

SEQ ID NO: 180821 - DNA, 80 bp, synthetic construct
  source 1..80: mol_type = other DNA
gaaagggttcttcatcaagttatgacacagacaccaggagatgcatcctttctcgattgggcaagtgatccatactcagc

SEQ ID NO: 180822 - DNA, 80 bp, synthetic construct
  source 1..80: mol_type = other DNA
tagtatgaacatcccaggagaagtgaagaacctaatggaaatagcagaagtggactcggtcgtgcccgtgaacaatgtcc

SEQ ID NO: 180823 - DNA, 80 bp, synthetic construct
  source 1..80: mol_type = other DNA
cctaacaccactcagtaagaaagggttaaccacgtacggattcgggcatcagaacaaagcagtgtacacagctggttaca

SEQ ID NO: 180824 - DNA, 80 bp, synthetic construct
  source 1..80: mol_type = other DNA
tcctgggctgtacctatgtgcttatataagtaactgcacttccgaatggctgagttttccacgcccgtccgcagcggtga

SEQ ID NO: 180825 - DNA, 80 bp, synthetic construct
  source 1..80: mol_type = other DNA
gtacaccgacgctggtaatgtgacatgttggtaccagacgggcatagttgttcccccagaaacccccacgcactgcacca

SEQ ID NO: 180826 - DNA, 80 bp, synthetic construct
  source 1..80: mol_type = other DNA
ggaccccccctcgacccgaatcgctcgcgcgattcggacctgcggcctcggggtggtcggtggctttactaaacagactc

SEQ ID NO: 180827 - DNA, 80 bp, synthetic construct
  source 1..80: mol_type = other DNA
aggaagcgcgcggcgcgactcgtccctggggaccgcgggtggaatcacggcaacccgcgtccagcacacacgcagaagaa

SEQ ID NO: 180828 - DNA, 80 bp, synthetic construct
  source 1..80: mol_type = other DNA
tcactttcgtcatcactagcaagctgtctaccgccaccggctcaacaagtgacacccccatcacccatcaagtaatgtac

SEQ ID NO: 180829 - DNA, 80 bp, synthetic construct
  source 1..80: mol_type = other DNA
gacaacataatttggttcaaaatcgatgagaccaaccatttaattctggggtcttcagaattcatgtacttgattctgtg

SEQ ID NO: 180830 - DNA, 80 bp, synthetic construct
  source 1..80: mol_type = other DNA
agactctaatatagctaataaaattactgaatttttacaacaagcatttccaatgtcaggcacaaaacctacttcactaa

SEQ ID NO: 180831 - DNA, 80 bp, synthetic construct
  source 1..80: mol_type = other DNA
caaaagcgctttcgtttacgccgcgcacgtgcaccgtctgggccgggcaatcctggtgttgcgcgcgaaaatggtcctga

SEQ ID NO: 180832 - DNA, 80 bp, synthetic construct
  source 1..80: mol_type = other DNA
aactgatttacttcgatctgtcaagacacctgaagttattaagtattgtgaggataataaatggattattccagctgatt

SEQ ID NO: 180833 - DNA, 80 bp, synthetic construct
  source 1..80: mol_type = other DNA
gaaaaactgaacgccaacatacaagcaagcaacccagtgatgacaactggctcaattttgatggaacactgttgggtaat

SEQ ID NO: 180834 - DNA, 80 bp, synthetic construct
  source 1..80: mol_type = other DNA
gcgggcacgctgctgccgctcggacggccgtacggattctacgcgcgagtgacgccgcgcagccagatgaacggcgtgtg

SEQ ID NO: 180835 - DNA, 80 bp, synthetic construct
  source 1..80: mol_type = other DNA
cctaccagtttggagcaggccaaatgccagacggagctgcatatgtacctataaaatggagaggcaaatggtatccacac

SEQ ID NO: 180836 - DNA, 80 bp, synthetic construct
  source 1..80: mol_type = other DNA
ataccacaaccaactcagaagaagccagaactgaggaaagcagtacttcagggcccagaacatgagtttatgtatgccct

SEQ ID NO: 180837 - DNA, 80 bp, synthetic construct
  source 1..80: mol_type = other DNA
acttagaggtcagttacccgatcatcctcaacgtagaactcatgctcggtgctttcgtgatcccgctcagtgtcatcagc

SEQ ID NO: 180838 - DNA, 80 bp, synthetic construct
  source 1..80: mol_type = other DNA
tggatacaccaaagttaactgcaatacactaaccttgattcgcatagtgttgttaattagatatcattaccacaatggga

SEQ ID NO: 180839 - DNA, 80 bp, synthetic construct
  source 1..80: mol_type = other DNA
ggggaatttaatttgcttggaatacacgacaactgtgcagttgtccccacccatgctgaatgtggtgatgaagttaacat

SEQ ID NO: 180840 - DNA, 80 bp, synthetic construct
  source 1..80: mol_type = other DNA
acacaccctggagaggttggtcgaaatgttgatccaataaccagagataacccaactaaacaacccagtgacgatagttg

SEQ ID NO: 180841 - DNA, 80 bp, synthetic construct
  source 1..80: mol_type = other DNA
ggtgcggacacggtagagctaacagaaactatgctttccactctgacgacctcacccctcagccagacccttacggggga

SEQ ID NO: 180842 - DNA, 80 bp, synthetic construct
  source 1..80: mol_type = other DNA
acttaagtctgtttaacctcaatgccacaatggccgacttgcggtttccgttctgctcaccacaaactgacaacacttgc

SEQ ID NO: 180843 - DNA, 80 bp, synthetic construct
  source 1..80: mol_type = other DNA
cccccgatccgtcgagcccgccactcggcggccgctccggaccccccagcaggtagccagcctccggcgctgccatggca

SEQ ID NO: 180844 - DNA, 80 bp, synthetic construct
  source 1..80: mol_type = other DNA
gggttaactcacaagaggtcccagcattaaccgctgtggaaaccggagcatctgggcaggccattccaagtgatgttata

SEQ ID NO: 180845 - DNA, 80 bp, synthetic construct
  source 1..80: mol_type = other DNA
aagacgacctagacggcctgctcgccgccctagacgacgaagagtaaggaggcgcagacggtggaggagtgggcgactta

SEQ ID NO: 180846 - DNA, 80 bp, synthetic construct
  source 1..80: mol_type = other DNA
ggtgatcctgtagaggatataatccatgatgccctcgggagtaccgtgcgtagggccatcaacaacactacaaatgtaga

SEQ ID NO: 180847 - DNA, 80 bp, synthetic construct
  source 1..80: mol_type = other DNA
aacccagttgaaaattacattgatgatgtattaaatgaagtcttagttgttccaaatataaaggaaagccacccaagtac

SEQ ID NO: 180848 - DNA, 80 bp, synthetic construct
  source 1..80: mol_type = other DNA
gaatctcacgaagggagaaacagcgcatgagtttgcatcgactaagactacgggtgaacacacagtgcagtcaatagtat

SEQ ID NO: 180849 - DNA, 80 bp, synthetic construct
  source 1..80: mol_type = other DNA
aggccaaactacaggggtcacccctacatggcaagatgtacaaaacacaacagcactaaacgctgaaggctcaaaccaag

SEQ ID NO: 180850 - DNA, 80 bp, synthetic construct
  source 1..80: mol_type = other DNA
agacccatggggccttcggccaacagtctggggcggcctatgtgggcaattacagactagtcaacaggcatttagctaca

SEQ ID NO: 180851 - DNA, 80 bp, synthetic construct
  source 1..80: mol_type = other DNA
ttatcttaaccagcaagtggccgtcagggtctcttgagagtatgccgctgtggccaagcgaggccccaaattaaatagtg

SEQ ID NO: 180852 - DNA, 80 bp, synthetic construct
  source 1..80: mol_type = other DNA
tgtgggagaaaaagtcaattccatggaagcgtaccagattcccgttcgatcgaacgagggttccgggactcaggtgtttg

SEQ ID NO: 180853 - DNA, 80 bp, synthetic construct
  source 1..80: mol_type = other DNA
tagtcaatcgcatgggtgcactgtgtatgagggttgtgacaaacaaacaaatcaataaagttgaaatcacaactaatata

SEQ ID NO: 180854 - DNA, 80 bp, synthetic construct
  source 1..80: mol_type = other DNA
tttgatgctagtctttcaccagtttggtttgagtgtttggaacaagtattaaagaagataggattccaatgttcagagtt

SEQ ID NO: 180855 - DNA, 80 bp, synthetic construct
  source 1..80: mol_type = other DNA
cccaactcattcagagtgtcctttaagctaggctttcaataaaatatgctcagttttaacttgcaaggccgtgggagttt

SEQ ID NO: 180856 - DNA, 80 bp, synthetic construct
  source 1..80: mol_type = other DNA
tgcagctcttgattatttgctgggctgcggggttttagcaggtaacgcatttgtgttcccacatcagataatcaatttga

SEQ ID NO: 180857 - DNA, 80 bp, synthetic construct
  source 1..80: mol_type = other DNA
aaacgcaaacagaaaatttgataagttaaatagttctgcacaggacattcaacataaaacctggctaggtaaaaacaata

SEQ ID NO: 180858 - DNA, 80 bp, synthetic construct
  source 1..80: mol_type = other DNA
cgagctaaaccgaaagcaccacttgctatgagctgggttccaagcgctcacaatgtacaggcaagagaacaccagttctt

SEQ ID NO: 180859 - DNA, 80 bp, synthetic construct
  source 1..80: mol_type = other DNA
gtaatagcaaccaccagttggcatagtagccatggcctggctctccaagactctggaacattaaagagaagattccctta

SEQ ID NO: 180860 - DNA, 80 bp, synthetic construct
  source 1..80: mol_type = other DNA
tttgaagacaagtggtacacacaggaagacctttgcgaagtcaatcttgtgtcacttgcggttagcgcagcttcctttac

SEQ ID NO: 180861 - DNA, 80 bp, synthetic construct
  source 1..80: mol_type = other DNA
tataactacttcagccacaaccaactccacagtgaatgtgacagacatgaccgcaacaattattacatctccagccgcaa

SEQ ID NO: 180862 - DNA, 80 bp, synthetic construct
  source 1..80: mol_type = other DNA
tcgaaaccaggtacacgatttgactgcttgtacatcacccttcgctgcaatcagtaaagacagcaaagtgacaagagtca

SEQ ID NO: 180863 - DNA, 80 bp, synthetic construct
  source 1..80: mol_type = other DNA
tgacaaatcaaagtccttatgaccatcagccacaaaaccaggtgatgaaattggcctatttagatagaggcttctataag

SEQ ID NO: 180864 - DNA, 80 bp, synthetic construct
  source 1..80: mol_type = other DNA
atcctatttttgaatacgaggaaatgggagcacaggtttcaacacaaaagtccggcagccatgaaactggcaacatagcc

SEQ ID NO: 180865 - DNA, 80 bp, synthetic construct
  source 1..80: mol_type = other DNA
tcctattttgtggatccatgatggccactggaaaattactggtcgcctatgctccaccaggcgcaaaaccaccacgaaca

SEQ ID NO: 180866 - DNA, 80 bp, synthetic construct
  source 1..80: mol_type = other DNA
cagagagcagactcggtgcccctccaaaatattgcccaaatggtaccaccaatactaaacaaacagactggcaaaattat

SEQ ID NO: 180867 - DNA, 80 bp, synthetic construct
  source 1..80: mol_type = other DNA
catcacaagatgttgccaatgcagtcgttggttatggtgtttggccacattacttaagtggtgcagatgctactgctatt

SEQ ID NO: 180868 - DNA, 80 bp, synthetic construct
  source 1..80: mol_type = other DNA
ggacatgaaattggaagaaatacaggcagggatgataaacaaccagatgaagatccacttttcaattgtaatggcaccct

SEQ ID NO: 180869 - DNA, 80 bp, synthetic construct
  source 1..80: mol_type = other DNA
gtgtcaaaaatagacagcccagttgaaatatgcatggcatgcagcagacattcatcatttagaaatgtatccaagatttc

SEQ ID NO: 180870 - DNA, 80 bp, synthetic construct
  source 1..80: mol_type = other DNA
ccccggcatgcgaggaataggctccaaaagggctgaagccactagtgtcgttatccgcattggtactacgcaaagcctag

SEQ ID NO: 180871 - DNA, 80 bp, synthetic construct
  source 1..80: mol_type = other DNA
tggcgtaccagctaataggaaagaggcaatgcttggcacacacctcatttgggacttaggactacaatcctcatgtacat

SEQ ID NO: 180872 - DNA, 80 bp, synthetic construct
  source 1..80: mol_type = other DNA
atttgttatcaccagcagacagctgcctggaaccagcatcgcacaggatatgccaccactaacacatcaaatcatgtaca

SEQ ID NO: 180873 - DNA, 80 bp, synthetic construct
  source 1..80: mol_type = other DNA
actcaatagtagcaggaatagagttagggagcgactacagtccaaagatagtagggggaatagggggattcataaatacc

SEQ ID NO: 180874 - DNA, 80 bp, synthetic construct
  source 1..80: mol_type = other DNA
atagcattgctcctcgctttcctcgcgccggtccaccaaggccccctccggggctagagcagcctaaccccccgcagcag

SEQ ID NO: 180875 - DNA, 80 bp, synthetic construct
  source 1..80: mol_type = other DNA
ccgcgacacacccggcacacacccacccggccgcgccccgacacacccaaaacaccgccggtgcggggccgcgtgtccat

SEQ ID NO: 180876 - DNA, 80 bp, synthetic construct
  source 1..80: mol_type = other DNA
acacgcaaaacaacggccagagacaagacgcggaaagaacagacccacgcagaagctcgcgggcgcaagggagcggggtg

SEQ ID NO: 180877 - DNA, 80 bp, synthetic construct
  source 1..80: mol_type = other DNA
gagaggctggcagattgagccctgggaggttctctccagcactagcaggtagagcctgggtgttccctgctagactctca

SEQ ID NO: 180878 - DNA, 80 bp, synthetic construct
  source 1..80: mol_type = other DNA
tcacaggttactcccagtgacaacttgcaaacgcgccacgtcaagaactatcactcccggtctgagtcaactatcgaaaa

SEQ ID NO: 180879 - DNA, 80 bp, synthetic construct
  source 1..80: mol_type = other DNA
cctacacagatgtcacatacaatcccaccgtagacaaaggcaagggcaatatagtatggttccaatacctcacaaaaccc

SEQ ID NO: 180880 - DNA, 80 bp, synthetic construct
  source 1..80: mol_type = other DNA
taaaacctatctgagtgagggtgataccgccaaagagttcacagaaacctccgtttccacatcgcatggagtgcagacag

SEQ ID NO: 180881 - DNA, 80 bp, synthetic construct
  source 1..80: mol_type = other DNA
aaatgcgcagaaagtttgaactcttcacgtacttgcgctttgatgttgagatcacttttgtgattactagtaggcaagat

SEQ ID NO: 180882 - DNA, 80 bp, synthetic construct
  source 1..80: mol_type = other DNA
caagcagtgtatggaataacaaacttggagcctctagatctaacaactagtgctggatatccatatgctgcccttggtat

SEQ ID NO: 180883 - DNA, 80 bp, synthetic construct
  source 1..80: mol_type = other DNA
aactgtttatactcactctactttctgtgggtgcaatgatcctgtcggccacttctgttgcttggctactctgtctaacc

SEQ ID NO: 180884 - DNA, 80 bp, synthetic construct
  source 1..80: mol_type = other DNA
aaggtgggcttgtgcagtcggtagcaaggacacgccgtggcgtcgcccttctccgtgaagctgtgcaggtgctcttcgca

SEQ ID NO: 180885 - DNA, 80 bp, synthetic construct
  source 1..80: mol_type = other DNA
agaggtgcaaaaccagagcgtaattttgtgcttcgtgtccgcatgcaatgatttctcggttaggctgctaagggattcgc

SEQ ID NO: 180886 - DNA, 80 bp, synthetic construct
  source 1..80: mol_type = other DNA
tgtgccagcattgacagctgttgagacaggtcatacatctcaagtagtgcccggggacaccatgcagaccagacacgtaa

SEQ ID NO: 180887 - DNA, 80 bp, synthetic construct
  source 1..80: mol_type = other DNA
acgccataacacaagtaccattacttgcagccacattatatgaaaatcaaactaaaaacctactctccacaacattcaca

SEQ ID NO: 180888 - DNA, 80 bp, synthetic construct
  source 1..80: mol_type = other DNA
gttgcacagaaatgaaaaattcagagatatcagaaaatacataccagagtctgaagatgactacccagagtgtcatttag

SEQ ID NO: 180889 - DNA, 80 bp, synthetic construct
  source 1..80: mol_type = other DNA
caacccaactatgtaaggagtgtccacccccagcaaacttcaagaaatgttgccccctgatatgcggtaaagccatacaa

SEQ ID NO: 180890 - DNA, 80 bp, synthetic construct
  source 1..80: mol_type = other DNA
aaaggtatacgtagtgtatctgctggacgggcactatatataccagcttacgaagttcttgagcatgaatggtatgaaaa

SEQ ID NO: 180891 - DNA, 80 bp, synthetic construct
  source 1..80: mol_type = other DNA
gagtcagatcactcacgttaggcaattccactattaccacacaggagagcgcgaacgttgtggttggctacggcaggtgg

SEQ ID NO: 180892 - DNA, 80 bp, synthetic construct
  source 1..80: mol_type = other DNA
aaaagcaagagggatacctacagattaggcaggaaataacagcttgaagaggaactagctgacagtgcataagaaagaac

SEQ ID NO: 180893 - DNA, 80 bp, synthetic construct
  source 1..80: mol_type = other DNA
cggcggtggtccccatcaccgccatgttccccaacctggggtacccctgctactttaacgcactggttgattacggggca

SEQ ID NO: 180894 - DNA, 80 bp, synthetic construct
  source 1..80: mol_type = other DNA
tggatgggcaactcatggcttttgattactcaaactttgatgcctctctatctccagtgtggttcaaatgtctagaacaa

SEQ ID NO: 180895 - DNA, 80 bp, synthetic construct
  source 1..80: mol_type = other DNA
gcaggcaatctcagcatttgcggtcactgcggggatggtttatgtggtctacaaactttttgcaggcttccaaggcgcct

SEQ ID NO: 180896 - DNA, 80 bp, synthetic construct
  source 1..80: mol_type = other DNA
cccttcctttaactcattacttgttcttttgtaatcgcagctctaacttggcatctcttttacagtggttctcctgattt

SEQ ID NO: 180897 - DNA, 80 bp, synthetic construct
  source 1..80: mol_type = other DNA
ggcatactagattactattccacggggatagtaactatatggtaccagacgaactttgttgttcctactggtgctcctac

SEQ ID NO: 180898 - DNA, 80 bp, synthetic construct
  source 1..80: mol_type = other DNA
gccagtgacgccctagccagaaggtttgcctttgacatggacatttacacaatgtccgagtattcaacaaaaggtaagct

SEQ ID NO: 180899 - DNA, 80 bp, synthetic construct
  source 1..80: mol_type = other DNA
cacaactgggaaatgcatttggagatgggttcactagctccattagagaaactctggtgtctgcctgtgatgtatcagat

SEQ ID NO: 180900 - DNA, 80 bp, synthetic construct
  source 1..80: mol_type = other DNA
tttgactacacaaattatgatggtagtatacacccaatctggtttcaggctctcaaagaagtactatccaacttaggatt

SEQ ID NO: 180901 - DNA, 80 bp, synthetic construct
  source 1..80: mol_type = other DNA
gatcagcagtgggatgtgatccagaaacattctggtcaaaaataccagttatgctggatggtgagtgtctgatggctttt

SEQ ID NO: 180902 - DNA, 80 bp, synthetic construct
  source 1..80: mol_type = other DNA
tagagacccagcaccccctgccatacggagcctgccggcactgccggcagctccaccgccccctgaagaaccacggcgtg

SEQ ID NO: 180903 - DNA, 80 bp, synthetic construct
  source 1..80: mol_type = other DNA
tcttgcagttcttctactgttttaacggcggttgaggtggtaaagacgtgggccgtggtcagatctgtgcaggtgactac

SEQ ID NO: 180904 - DNA, 80 bp, synthetic construct
  source 1..80: mol_type = other DNA
gaatataataggtatccatgtaggtggaaatggtagggtaggttactgtgcttcactcactaagagttacttttgctcca

SEQ ID NO: 180905 - DNA, 80 bp, synthetic construct
  source 1..80: mol_type = other DNA
ccaagtcggctacatgcgccctgggtctgacgctccaaagcgtacgcagtctgatgaagcggacccatcgagcgtcacgg

SEQ ID NO: 180906 - DNA, 80 bp, synthetic construct
  source 1..80: mol_type = other DNA
aaaacagaacagaagttatagacttaatattaaaaaatgcagaaaactacctcaaaaaagtacaacaggaataccaagga

SEQ ID NO: 180907 - DNA, 80 bp, synthetic construct
  source 1..80: mol_type = other DNA
cgtagtgatacctgaacaccaactagcatcagtagaaggtggtaatgtctcagtcttgtatgataaaacgcaccctggag

SEQ ID NO: 180908 - DNA, 80 bp, synthetic construct
  source 1..80: mol_type = other DNA
tagtagacctgcccctgtgggcagcactaatgggatatgcagactatgcaaaaaaacacttccacgacccaggatatata

SEQ ID NO: 180909 - DNA, 80 bp, synthetic construct
  source 1..80: mol_type = other DNA
aaacgatacgagagcagctccaacagcagctccaagagcagctccagctccggagaggagtcgagtgcctcttccagcag

SEQ ID NO: 180910 - DNA, 80 bp, synthetic construct
  source 1..80: mol_type = other DNA
tcgatgaccgtattggaccatgtcgtaaatcatcgtctccttgtaacacgctgaacagcagcggctgcaggggcccgaga

SEQ ID NO: 180911 - DNA, 80 bp, synthetic construct
  source 1..80: mol_type = other DNA
aggtctagcattaaagttagaatacagcccccaaagctaatgatagacaagtggtacccacaaactgacttctgtgaagt

SEQ ID NO: 180912 - DNA, 80 bp, synthetic construct
  source 1..80: mol_type = other DNA
ccatgaaggggtcaagttagagattacagttgttaaattagaccgcaatgagaaatttagagacatcaggaaatacttgc

SEQ ID NO: 180913 - DNA, 80 bp, synthetic construct
  source 1..80: mol_type = other DNA
tatagttacctccgtcaccggtggttggatcagttcatataagtataatatagatataatacacaatttgtctagaatta

SEQ ID NO: 180914 - DNA, 80 bp, synthetic construct
  source 1..80: mol_type = other DNA
ctagtggatacattgactaaccctgctcttatgtcaccaactgtggaggcatgtgggttttccgataggcttaaacagat

SEQ ID NO: 180915 - DNA, 80 bp, synthetic construct
  source 1..80: mol_type = other DNA
aacggtcgttacgggtataatacactaaataacatgggacagttgtttttccgacacgtgaacaaacccagccccaacac

SEQ ID NO: 180916 - DNA, 80 bp, synthetic construct
  source 1..80: mol_type = other DNA
tgctgttatcacgggaggaagaactcgttccgtggagtcgtctcatcatcactaagcagttctacggaggcctgattttc

SEQ ID NO: 180917 - DNA, 80 bp, synthetic construct
  source 1..80: mol_type = other DNA
agctggcagacctcaacaaaccccagtgtgttctggaccgaaggaaatgccccaccgcgtatgtcaatcccgttcatgag

SEQ ID NO: 180918 - DNA, 80 bp, synthetic construct
  source 1..80: mol_type = other DNA
taccattgcacggtgtcaatgcagaacaggggtgtattactgtgaatctaggaacaaacactatcctgtaaccataacat

SEQ ID NO: 180919 - DNA, 80 bp, synthetic construct
  source 1..80: mol_type = other DNA
gcacgtgaataaggatacaccatatcaaatggctagcacaatccgagtgtacttcaagccaaaacacattagagtttggg

SEQ ID NO: 180920 - DNA, 80 bp, synthetic construct
  source 1..80: mol_type = other DNA
ctaactaaacccaccacacagtacatagagacccaagcaaagtgctccattacaaacattcccttatacgcggccttcta

SEQ ID NO: 180921 - DNA, 80 bp, synthetic construct
  source 1..80: mol_type = other DNA
tggtaatgtttcagttttctatgaccagacacatccaggagagagaggaattgatttgggaacagttattgaaaagggac

SEQ ID NO: 180922 - DNA, 80 bp, synthetic construct
  source 1..80: mol_type = other DNA
ggattacaatggctgggcctagtgatatgtatgtacatgtaggtaatcttatatatagaaatttacatttgttcaactca

SEQ ID NO: 180923 - DNA, 80 bp, synthetic construct
  source 1..80: mol_type = other DNA
aacccacaatggacacaaagtgagtttacatcttttaaacgacaaacagacagcaactatggctactgcacttactgtcc

SEQ ID NO: 180924 - DNA, 80 bp, synthetic construct
  source 1..80: mol_type = other DNA
taaggtcaaatatagagctcaagtcacaactattgggccctctgatatgtttgtacatactactagtcttatgtatagaa

SEQ ID NO: 180925 - DNA, 80 bp, synthetic construct
  source 1..80: mol_type = other DNA
tgggctgacgagtaccaaacctgcagggcgtgggatagaccccctagaaagtaccttacagacaggcccttctacccctg

SEQ ID NO: 180926 - DNA, 80 bp, synthetic construct
  source 1..80: mol_type = other DNA
cgcagaggtcgactcagtagttcctgttaataacactgccgccaatctgcaaagtatggatgcttatcacatagaggtga

SEQ ID NO: 180927 - DNA, 80 bp, synthetic construct
  source 1..80: mol_type = other DNA
cacaatggagaggaacagtacaatactttcttatccaaaatccgaaccgtgccggtgggtagaaccttgagtttgccgcc

SEQ ID NO: 180928 - DNA, 80 bp, synthetic construct
  source 1..80: mol_type = other DNA
cccgatgctgtcgctcacttcaatcatcttgctactgtacttcgtgctccggaaaacccgggaccccccgggggacatcg

SEQ ID NO: 180929 - DNA, 80 bp, synthetic construct
  source 1..80: mol_type = other DNA
ttttctgttgttttttcacatcatggtgacaaatggctcctctggaagatcctgcagatgtgaaactgggtggtggtgtc

SEQ ID NO: 180930 - DNA, 80 bp, synthetic construct
  source 1..80: mol_type = other DNA
gtagatgtgatggggtttgtgcagttgcgcaggaaattagagttattcacctacatgagatttgatgctgaatttacctt

SEQ ID NO: 180931 - DNA, 80 bp, synthetic construct
  source 1..80: mol_type = other DNA
cacgaatgaaccacccagccgctccgcccagccccacaccctcacacggcggcccacaatccggagacctccacggaaca

SEQ ID NO: 180932 - DNA, 80 bp, synthetic construct
  source 1..80: mol_type = other DNA
attctggagaaagggagtatgaggaatttgtgagtggcattcgtagcacagcaatcggaaaagcgctcataattccatca

SEQ ID NO: 180933 - DNA, 80 bp, synthetic construct
  source 1..80: mol_type = other DNA
aggtgttgtgtacagagtggttgttgcgtgttgaggtgttgttacgttttgaggcacagttgcggtgtacacgggctcca

SEQ ID NO: 180934 - DNA, 80 bp, synthetic construct
  source 1..80: mol_type = other DNA
acgacttttctgttaggttgctgaaggatacaccgttcatctctcaggagaatttttaccaaggtcctgtagaggatgca

SEQ ID NO: 180935 - DNA, 80 bp, synthetic construct
  source 1..80: mol_type = other DNA
acgcactgctgggtcatgactttctgcagcgcatgcggcagtgtttccgcggccagttgctggaccgccgcgctttcctg

SEQ ID NO: 180936 - DNA, 80 bp, synthetic construct
  source 1..80: mol_type = other DNA
ggtgggaagctcagcagttgtttttgtggcattggacgtccctttggaggacagcgtggaggccaaggtggtagcgttgg

SEQ ID NO: 180937 - DNA, 80 bp, synthetic construct
  source 1..80: mol_type = other DNA
taccatctcacacctgaattagtactgatgtactgtgatgtcatagaaggaagactaatgattgatactgtgatgaaagc

SEQ ID NO: 180938 - DNA, 80 bp, synthetic construct
  source 1..80: mol_type = other DNA
tggtatcgcagaaccaaccaacaggaaggatgcaatgttaggcacccacgttatatgggatgtagggttacaatccacaa

SEQ ID NO: 180939 - DNA, 80 bp, synthetic construct
  source 1..80: mol_type = other DNA
tggtgccaaagtaccagagaaaaggaaagacgcaatgttagggactcacatcatatgggatttgggactccagtctagct

SEQ ID NO: 180940 - DNA, 80 bp, synthetic construct
  source 1..80: mol_type = other DNA
acaacatacagaatccagtggacaactttgtggatgaggtgcttaaagaagttcttgttgtcccagataccaagccttca

SEQ ID NO: 180941 - DNA, 80 bp, synthetic construct
  source 1..80: mol_type = other DNA
tagactggggaacaccttggacatatgttagatacaatccactagcagacaagggcataggcaatgctgtctatgcacag

SEQ ID NO: 180942 - DNA, 80 bp, synthetic construct
  source 1..80: mol_type = other DNA
tatatatcataaaaaacttaggagtcaagaaatgatcagcaacagaattcgacaaaaagacgaccatcatggaggctact

SEQ ID NO: 180943 - DNA, 80 bp, synthetic construct
  source 1..80: mol_type = other DNA
ttgtgtttatggaacagacaatttagaagctttagatttaaacaccagtgcaggatttccatatgtggcattaggtatta

SEQ ID NO: 180944 - DNA, 80 bp, synthetic construct
  source 1..80: mol_type = other DNA
gcaccctgggggcccttggggctctgggcgctcttgctcccggtggcaggtgtcggcgcttgccataactttcatcggtg

SEQ ID NO: 180945 - DNA, 80 bp, synthetic construct
  source 1..80: mol_type = other DNA
gataacacatcgacgtcagtgatgattacaagcacatccacggaaactaacgttagttctacggaaataaccgttacatc

SEQ ID NO: 180946 - DNA, 80 bp, synthetic construct
  source 1..80: mol_type = other DNA
ggtgaatgctgggaagtttccaaaaacggtagggattgggagacattaaaattgagggacttagttgataaaatcacgga

SEQ ID NO: 180947 - DNA, 80 bp, synthetic construct
  source 1..80: mol_type = other DNA
atggccttgatctacctatggtaactttcctaaaagatgaacttcgaaggaaagaaaaaatcaaagatggaaaaaccaga

SEQ ID NO: 180948 - DNA, 80 bp, synthetic construct
  source 1..80: mol_type = other DNA
aaatacacccatcccaacataaagagtggaaaatttagtaaccattcattaaagatcctccattcgcgtgtactgtgtga

SEQ ID NO: 180949 - DNA, 80 bp, synthetic construct
  source 1..80: mol_type = other DNA
tatgcctacaaaagactactgggaatacagaataggcatgttctctccaacattcctcagtccttatagaacaagcccaa

SEQ ID NO: 180950 - DNA, 80 bp, synthetic construct
  source 1..80: mol_type = other DNA
ggttcgcatgacaatgcaataaatgcttcttctggatcggttgttaagtattttaacataaattattacaaggatgctgc

SEQ ID NO: 180951 - DNA, 80 bp, synthetic construct
  source 1..80: mol_type = other DNA
cagaccaggcaggagacacatagtaaagataagagtaggggcccccagaatgtatgaagacaaatggtacccccagtcag

SEQ ID NO: 180952 - DNA, 80 bp, synthetic construct
  source 1..80: mol_type = other DNA
acaagggtggctcctcctcctctcccaagtcctcgtccgatggcaacgtcgtgcgcggatcccgctactccaagtggtgg

SEQ ID NO: 180953 - DNA, 80 bp, synthetic construct
  source 1..80: mol_type = other DNA
gcaacgagccctcttcacgcacttcagggcaggatgcaaccactcaagaattggccaaactaggggaggaaatcctctct

SEQ ID NO: 180954 - DNA, 80 bp, synthetic construct
  source 1..80: mol_type = other DNA
agccattgccagtctcacccacggcatgacccaccttaaagaaggccacagaaacctcaaacatggtagtcagcgtttcc

SEQ ID NO: 180955 - DNA, 80 bp, synthetic construct
  source 1..80: mol_type = other DNA
acaacagaaactttggcagaggcaagtggatagacggagggggctacatccccctgcacgagaggacaaagtggtacgtg

SEQ ID NO: 180956 - DNA, 80 bp, synthetic construct
  source 1..80: mol_type = other DNA
gacaccgtacagactagacatgtcatccagcacaggtcacgatcagagtccagtgttgagtcctttttcgcgcgtggtgc

SEQ ID NO: 180957 - DNA, 80 bp, synthetic construct
  source 1..80: mol_type = other DNA
gcgtcatgctgcaggcaaaaaagtgcataatagtaaagagctacaggacccacccggggggcaaaccctatgtaactgca

SEQ ID NO: 180958 - DNA, 80 bp, synthetic construct
  source 1..80: mol_type = other DNA
atgtgttgtgagttcaatggtctgagaaatgccataacgcagggggtccccacatatctactaccaggatcttctcaatt

SEQ ID NO: 180959 - DNA, 80 bp, synthetic construct
  source 1..80: mol_type = other DNA
acgacgacgacgatgacggcggggacgacggcgatggcgacggggacgacgttgctgccggtggcgagcggcacggagac

SEQ ID NO: 180960 - DNA, 80 bp, synthetic construct
  source 1..80: mol_type = other DNA
aaattatgccatcaaccgactggcaaaaaagattctttgacaacagaaacagtctctttctatttgccacctatcaccct

SEQ ID NO: 180961 - DNA, 80 bp, synthetic construct
  source 1..80: mol_type = other DNA
agcacaaacatccctggccctgacaatatacctacctgtgattgcaccacaggcacctattattgcaaaagcagggacag

SEQ ID NO: 180962 - DNA, 80 bp, synthetic construct
  source 1..80: mol_type = other DNA
gacttcaacttgagattgatgagggacagcccagacattggtcaaagtaaaatactcccagagcaagcagccagcacgca

SEQ ID NO: 180963 - DNA, 80 bp, synthetic construct
  source 1..80: mol_type = other DNA
ctactcatgctcactaaacacaagataataatacccagcttcttaacaagaccaggaggtcgcagattcgtaaagataag

SEQ ID NO: 180964 - DNA, 80 bp, synthetic construct
  source 1..80: mol_type = other DNA
atattacctttacagcgccagggaaaggctcagacccagaagtggcatacatgtggactaattgcaggggggagtttctc

SEQ ID NO: 180965 - DNA, 80 bp, synthetic construct
  source 1..80: mol_type = other DNA
ttttactcaaacaaaccattaagaacagtgcgccatgagtcagcattgggtttcctcatgtgtagaccaatgatgcacgg

SEQ ID NO: 180966 - DNA, 80 bp, synthetic construct
  source 1..80: mol_type = other DNA
caaaagagcagtgggcagacgagtatgaaactgccaaatactgggatagaccagtaaaaggtaaccctctagacacccct

SEQ ID NO: 180967 - DNA, 80 bp, synthetic construct
  source 1..80: mol_type = other DNA
atagaatacctctacgtacacttcctggggtgtgtcttcagccaaaatataagcagcgggggtgacgaatggtagagttt

SEQ ID NO: 180968 - DNA, 80 bp, synthetic construct
  source 1..80: mol_type = other DNA
acggtgattgcgctggcccggagtgttgcgtggacggggcttgcgctggtgacgggggtgggggggttgtttgcagcaag

SEQ ID NO: 180969 - DNA, 80 bp, synthetic construct
  source 1..80: mol_type = other DNA
aaacacagaccttagagacagaggcatctactgcctactagaagacatgcccctgtgggccatgacctttggatacagtg

SEQ ID NO: 180970 - DNA, 80 bp, synthetic construct
  source 1..80: mol_type = other DNA
ctgtccttctctctgccattgcctcccgcattgctgcccgttctgaccaacctggtcgtgttctggactatctctcttac

SEQ ID NO: 180971 - DNA, 80 bp, synthetic construct
  source 1..80: mol_type = other DNA
gagaacaagcagaagaagactcgcgttcggagacgttctcgctcacctcgtcccaagaaaaagaagcagaagcccaagaa

SEQ ID NO: 180972 - DNA, 80 bp, synthetic construct
  source 1..80: mol_type = other DNA
caagtgtataacaagttacacattacacgacaatgtcttggaaatcatacattacttcttattaatttgacaactcacca

SEQ ID NO: 180973 - DNA, 80 bp, synthetic construct
  source 1..80: mol_type = other DNA
cgataaactatcacagatcctccaacattcaacttattggtagtgttgtgaacttcaaagcctttagaaattactcgaca

SEQ ID NO: 180974 - DNA, 80 bp, synthetic construct
  source 1..80: mol_type = other DNA
tacagaccagaccaaaaggcaaaaagacaatcagagttaaaataagaccacctacactattcacagataagtggtacttt

SEQ ID NO: 180975 - DNA, 80 bp, synthetic construct
  source 1..80: mol_type = other DNA
ttagggaccatctatgctatttacaaactactgtgtgtttcacagggtgcttacacaggtaatgcaaaccctgttcccag

SEQ ID NO: 180976 - DNA, 80 bp, synthetic construct
  source 1..80: mol_type = other DNA
acacagactactacctacctaaagatgcacaatggggagacgcaattcatattattaacactaatgaaacagccccaaac

SEQ ID NO: 180977 - DNA, 80 bp, synthetic construct
  source 1..80: mol_type = other DNA
ataggagcttcaaccagcacaacaccagaaaccatgttggaaactaggtatgtcatcaactccaaaacaaatgatgaagc

SEQ ID NO: 180978 - DNA, 80 bp, synthetic construct
  source 1..80: mol_type = other DNA
tcttgtgccaaggggctgagcttggcaccatggcacagtttctaggaaagtacatcaaggtcaagaaggaaaccggaatg

SEQ ID NO: 180979 - DNA, 80 bp, synthetic construct
  source 1..80: mol_type = other DNA
agtcctcatcaggtgtccctacaccaagccgccattagcagaccccaaagacgagactgcaggatacgtagtttacaaca

SEQ ID NO: 180980 - DNA, 80 bp, synthetic construct
  source 1..80: mol_type = other DNA
cggggcacatgagactagtttgaatgccagtggaagctcagttatacattacaccaacataaacttttacaaagatgctg

SEQ ID NO: 180981 - DNA, 80 bp, synthetic construct
  source 1..80: mol_type = other DNA
acagacacccacacacagactttatagtagaatatgaaataaagcctcccatgaaaatggaccagttcacggggcccaac

SEQ ID NO: 180982 - DNA, 80 bp, synthetic construct
  source 1..80: mol_type = other DNA
taaacatgaaggatcatatgatttgaggagaaggtttgataatggtccagaggatgttggtacatggtttgtagttgtga

SEQ ID NO: 180983 - DNA, 80 bp, synthetic construct
  source 1..80: mol_type = other DNA
agcacatccgagcttgggttccgagaccaccaaggttatgtgagtacataaagtcgagcaatgttggtttcaccccaaca

SEQ ID NO: 180984 - DNA, 80 bp, synthetic construct
  source 1..80: mol_type = other DNA
ggcgccgcagaccagtacgcagaagaagacctagacgccctgttcgccgccgtcgacagagacgagtaaggaggcggttt

SEQ ID NO: 180985 - DNA, 80 bp, synthetic construct
  source 1..80: mol_type = other DNA
ttctaaagagaggctttaggcaagatgaaaagcataacttccttattcacccaactttcccaattgatgaaattcatgaa

SEQ ID NO: 180986 - DNA, 80 bp, synthetic construct
  source 1..80: mol_type = other DNA
gggaccaataactcttgaagggccaccaccagctgcaataaatgatcttctaaaatctgttaggacccccgaagtaatca

SEQ ID NO: 180987 - DNA, 80 bp, synthetic construct
  source 1..80: mol_type = other DNA
agcaacaatttgtcgaaagacatcctaatgccagcggaacaacacctggtgacaggtgcctctggggccgaaagccaagg

SEQ ID NO: 180988 - DNA, 80 bp, synthetic construct
  source 1..80: mol_type = other DNA
gttgcacctctgtgttcagagttcggtggattacggcaagcagttaagcaaggagtgccagtggaaatgaaacccgggac

SEQ ID NO: 180989 - DNA, 80 bp, synthetic construct
  source 1..80: mol_type = other DNA
gcggagaagacgggccgcattgtccggccatcttttagacatggaagacaatgtgccgccgtggtttcctccacacgata

SEQ ID NO: 180990 - DNA, 80 bp, synthetic construct
  source 1..80: mol_type = other DNA
cgcgcgcccaaccaccgtcgtctcgtcctccccccctccctcgccgccctcccgcgtgcaaacgtggcgagggttaatct

SEQ ID NO: 180991 - DNA, 80 bp, synthetic construct
  source 1..80: mol_type = other DNA
aggacaagctataacacagggtacaaatcaacctaacatgtggtcaaaagtacagaacacaactgcactatcacctgagg

SEQ ID NO: 180992 - DNA, 80 bp, synthetic construct
  source 1..80: mol_type = other DNA
atgggcgctcaagtatccagacagagtgttgggagtcacgagaccatgattcatgcaggaactggtgctgttgtcaaata

SEQ ID NO: 180993 - DNA, 80 bp, synthetic construct
  source 1..80: mol_type = other DNA
ggggacgggggtgtttgcgctggggacgggtgtgtttgcgctggggactggggtctgcagcggggttttcggcgagcacg

SEQ ID NO: 180994 - DNA, 80 bp, synthetic construct
  source 1..80: mol_type = other DNA
tgcgatgaagtcacgcgtacgcctctggtgtggcgcggtgtcgtgacaggagagtgtgttttcagtgcagagctgtcttg

SEQ ID NO: 180995 - DNA, 80 bp, synthetic construct
  source 1..80: mol_type = other DNA
ttaggagtgcaaccgcacttggacaccttatgtgcaaacctatgttacatggaactactagaactacagcagaagtttat

SEQ ID NO: 180996 - DNA, 80 bp, synthetic construct
  source 1..80: mol_type = other DNA
cagagaattactaccgtgtttattgagtctactcttgaaaaacctaactcctcaacgtactagaattatttgaagacagg

SEQ ID NO: 180997 - DNA, 80 bp, synthetic construct
  source 1..80: mol_type = other DNA
catcgccgtcgagtacgtgctgattcgcgccgtgcgcgacgagatctacgctgtactacgacgggacagcggcgcgttgc

SEQ ID NO: 180998 - DNA, 80 bp, synthetic construct
  source 1..80: mol_type = other DNA
ttcaggagttgccacaatagtatcagtaatacagtttacaggctatttcaagaattagcaagaataccatccagaattag

SEQ ID NO: 180999 - DNA, 80 bp, synthetic construct
  source 1..80: mol_type = other DNA
atactgtctgcgtcatttggtgcatacacgcagaagagaaagtgaaagatactgaacaagcaagacaaatagtgcagaga

SEQ ID NO: 181000 - DNA, 80 bp, synthetic construct
  source 1..80: mol_type = other DNA
cagtatttaacacctttaagactgaggagcacctaaagtgccctgcagcaaaagacctaaaacaagcagacccccaagaa

SEQ ID NO: 181001 - DNA, 80 bp, synthetic construct
  source 1..80: mol_type = other DNA
tttcttccctttcccaacttgtaacttagaagcatgagcacgtaggccaataggcaataatcatccagattattaaaggc

SEQ ID NO: 181002 - DNA, 80 bp, synthetic construct
  source 1..80: mol_type = other DNA
cagggctgggcagatgaatactgtaccgccagacactggaataggcccactcgcattaactacacagaccagcctaccta

SEQ ID NO: 181003 - DNA, 80 bp, synthetic construct
  source 1..80: mol_type = other DNA
acagacacaaaaagactgactttatagtcacttggagccgcaggcccccctttaagcttaacaagtacagcaccgccatg

SEQ ID NO: 181004 - DNA, 80 bp, synthetic construct
  source 1..80: mol_type = other DNA
actaccatctgatgacacatgaagatcacttaaaccttttggctccttactataacagagatttggcagtggtggcaaca

SEQ ID NO: 181005 - DNA, 80 bp, synthetic construct
  source 1..80: mol_type = other DNA
aatagagaatttcatgggaagagcggcgtgtgtgtatatcgctcagtatgccacagagaaggtcaatgacgagttggaca

SEQ ID NO: 181006 - DNA, 80 bp, synthetic construct
  source 1..80: mol_type = other DNA
cttcaaatatattaggaccaaattgctatgcaacaacctcagaaccagaaaataaaaatgttgtgcaagctacaaccacc

SEQ ID NO: 181007 - DNA, 80 bp, synthetic construct
  source 1..80: mol_type = other DNA
acaagtgcgtggtgctgtgctttgtatcagcatgtaatgatttttccgtgcgcatgctacgtgacaccccattcatcgga

SEQ ID NO: 181008 - DNA, 80 bp, synthetic construct
  source 1..80: mol_type = other DNA
tgcagactcagtagacacacaagtaaataatgtaactaactttttaaaacaagcaattaaaccctcaggaacaaaactaa

SEQ ID NO: 181009 - DNA, 80 bp, synthetic construct
  source 1..80: mol_type = other DNA
gggaaggctggttccacagtggaaagagatttcaactatgtccactacatattaaattgcctgggtagtctcatcatcat

SEQ ID NO: 181010 - DNA, 80 bp, synthetic construct
  source 1..80: mol_type = other DNA
ctttggatttgaatactagtgcaggttttccatacataagcatgggaataaagaaaagagacctaatcgacaaaaacacc

SEQ ID NO: 181011 - DNA, 80 bp, synthetic construct
  source 1..80: mol_type = other DNA
ggctccactggaggaacactcagtacactaactgcatacaatgagtgggttacaggtacaggaccaaacaaattcatacc

SEQ ID NO: 181012 - DNA, 80 bp, synthetic construct
  source 1..80: mol_type = other DNA
ggttctgatattgcaggaacaactagcacagtggaagagcagatacagtggatgtacaggccgcaaaatccaataccggt

SEQ ID NO: 181013 - DNA, 80 bp, synthetic construct
  source 1..80: mol_type = other DNA
ctatttcaggatcaaatatctcgagcattccgtggacacagagcacattttctctgtggatactaactgcgagacaattg

SEQ ID NO: 181014 - DNA, 80 bp, synthetic construct
  source 1..80: mol_type = other DNA
aaatgtgcacatccatttataaggatgtcaactacagtcagagaacccctttgtgtttggtcccccccccgtgtcacatg

SEQ ID NO: 181015 - DNA, 80 bp, synthetic construct
  source 1..80: mol_type = other DNA
gcaaacaaagactcagcccagactttccaggattctacacagaagtagtttacaacccatacaatgacaaaggtatagga

SEQ ID NO: 181016 - DNA, 80 bp, synthetic construct
  source 1..80: mol_type = other DNA
tggtggaggagacgctggacccgtggcagacttcgcagacgatggcctagacgaagtcgtcgccgccctcgacgaagacg

SEQ ID NO: 181017 - DNA, 80 bp, synthetic construct
  source 1..80: mol_type = other DNA
gtctccaccgcgcaggccccctccaggtagaaggccatttttccaccctgtaggggaagccgattattttgaataccacc

SEQ ID NO: 181018 - DNA, 80 bp, synthetic construct
  source 1..80: mol_type = other DNA
ctccttaccacccaatcccaagcattttgatggatataaccagcaagatgttgtaattatggatgatgtgtgccaaaacc

SEQ ID NO: 181019 - DNA, 80 bp, synthetic construct
  source 1..80: mol_type = other DNA
cgtaacctccttcatttacagacgtaacgttacacagcgttaaatgcacatggctgcaattacatatgccaccgaccaat

SEQ ID NO: 181020 - DNA, 80 bp, synthetic construct
  source 1..80: mol_type = other DNA
atcaattactataaggactccgccagctcaggactcgcaaagcaagatttctcacaggatccttcaaagttcacccaacc

SEQ ID NO: 181021 - DNA, 80 bp, synthetic construct
  source 1..80: mol_type = other DNA
agtagaggccataaacagagaggcagtgaaccacctgcctcgggagcttattttccaggtgtggcaaaggtcctggagat

SEQ ID NO: 181022 - DNA, 80 bp, synthetic construct
  source 1..80: mol_type = other DNA
gaaattcctctgatccccaaactgtcgttgccactttaacattgattgggtgttctggatcaccatggaggttcttgaaa

SEQ ID NO: 181023 - DNA, 80 bp, synthetic construct
  source 1..80: mol_type = other DNA
tccaccacacttgtttcctcgaagcgctagataagatgcagacccgcgggcatgacttagagaagttgaaagatatcccg

SEQ ID NO: 181024 - DNA, 80 bp, synthetic construct
  source 1..80: mol_type = other DNA
atccacactaggagagcagactctcagaggatcggcccccagaatgtactgggcaaagaccttcatgcagatctcctcaa

SEQ ID NO: 181025 - DNA, 80 bp, synthetic construct
  source 1..80: mol_type = other DNA
caactgtacccatcacaatatcaattagccctatgtgtgctgaattctctggagctagagccaggaatgttacacaaggt

SEQ ID NO: 181026 - DNA, 80 bp, synthetic construct
  source 1..80: mol_type = other DNA
tttctctcgcacgtcgaggtgcaggcttacttcaagcggctgcacgagcagatccgcctgagcgagcgccaccgtctctt

SEQ ID NO: 181027 - DNA, 80 bp, synthetic construct
  source 1..80: mol_type = other DNA
tgccctacatcaactgtacgcctatggacagcatgctacgccacaacaatgtatcacttgtcattataccaatttgcccc

SEQ ID NO: 181028 - DNA, 80 bp, synthetic construct
  source 1..80: mol_type = other DNA
ccgccgagccaaaatttactgcaaagagaagaggcctggtactcagcttttcttagctcgcattctacattttgcggttg

SEQ ID NO: 181029 - DNA, 80 bp, synthetic construct
  source 1..80: mol_type = other DNA
attataggctactctagtgaccctcaaaaagttaaaaatgtttttgataacacattatacaaacatccatactactacca

SEQ ID NO: 181030 - DNA, 80 bp, synthetic construct
  source 1..80: mol_type = other DNA
acggcgtggtccgagacgcccaggttgttcatggtttcgcgcagtagcagcgtttcgagaccgcggtgaaagaggaggac

SEQ ID NO: 181031 - DNA, 80 bp, synthetic construct
  source 1..80: mol_type = other DNA
ctgactggccggtgtaattagaggagagggcaacaacgcaaggctgttgttttatttgggttacaagagctgcggtggtc

SEQ ID NO: 181032 - DNA, 80 bp, synthetic construct
  source 1..80: mol_type = other DNA
ctcggccggaggtccctcccctccccccgctcgacccgcccatccgacggcccggccgggctgggacccccgcaccggag

SEQ ID NO: 181033 - DNA, 80 bp, synthetic construct
  source 1..80: mol_type = other DNA
atggtattcgctggcggctgctccgttccgtgtcgacggcgaggttggacttcgctcgcgtcggaacttccgtggcacgg

SEQ ID NO: 181034 - DNA, 80 bp, synthetic construct
  source 1..80: mol_type = other DNA
gaaaatctagggcgagagggtggacaacggcgtcgacgacgaagcatgggacaggtcgttcggcgttaacgtcatcgcgt

SEQ ID NO: 181035 - DNA, 80 bp, synthetic construct
  source 1..80: mol_type = other DNA
aattggattggccatccagtgaaaatcagagtgatcgcatacctatttgttggatttactgcattaacacctaaccaccc

SEQ ID NO: 181036 - DNA, 80 bp, synthetic construct
  source 1..80: mol_type = other DNA
gaagtggaaaacttcaatgcaacaagtacagatgacaaaaagaagcaatttactgtgtggccaatcacatacaccaatac

SEQ ID NO: 181037 - DNA, 80 bp, synthetic construct
  source 1..80: mol_type = other DNA
ggctctcattgcttgtgcaaaagtgtaccactttcttttcatccgctgctacagagatcctagataatgatttggtcaag

SEQ ID NO: 181038 - DNA, 80 bp, synthetic construct
  source 1..80: mol_type = other DNA
aagtagatactttaatcccaatgaacaatacccacaacaaggatgcagtgaaaagctaccttatacccctgcaaccaaac

SEQ ID NO: 181039 - DNA, 80 bp, synthetic construct
  source 1..80: mol_type = other DNA
cggcctacggcgttattgcatgtcggagctgtcggcgctgggtaacgtgctgggcttttgcctcatgcggctgttggacc

SEQ ID NO: 181040 - DNA, 80 bp, synthetic construct
  source 1..80: mol_type = other DNA
tgatcgtagtgtgatatgtgataatgattatgcattaccaatgtccaatcaattgatagagtgtttaagaggtgatacta

SEQ ID NO: 181041 - DNA, 80 bp, synthetic construct
  source 1..80: mol_type = other DNA
ctactgtcacctagaagacgtacccctgtgggccggcttctatggctactctgactttgtagacaacgagctaggccctt

SEQ ID NO: 181042 - DNA, 80 bp, synthetic construct
  source 1..80: mol_type = other DNA
tctgagccatggcctggagatggtggtggagacggcgctggaagccaagaaggcggccagcgtggaccaagtaccgcaga

SEQ ID NO: 181043 - DNA, 80 bp, synthetic construct
  source 1..80: mol_type = other DNA
aaatttaatgttttggttttcttttgctatggactttataattaggacactaatatgaagtgtcttttccatggaggcat

SEQ ID NO: 181044 - DNA, 80 bp, synthetic construct
  source 1..80: mol_type = other DNA
gtcattagtgctgagattgaatgtgtatgctagcacattcaatagaggaagacttagaatggggttctttcctaatgcca

SEQ ID NO: 181045 - DNA, 80 bp, synthetic construct
  source 1..80: mol_type = other DNA
tgccccccgtccgcgccgccaactctcccccgtccccgccggcgccacccctgtcctcgcaacaccccgtcctcgccggc

SEQ ID NO: 181046 - DNA, 80 bp, synthetic construct
  source 1..80: mol_type = other DNA
tacatagactactgtaaaaaaaaacacaacgacaaaggcctagacaaagaagtcagagtcactataatatgtccctacac

SEQ ID NO: 181047 - DNA, 80 bp, synthetic construct
  source 1..80: mol_type = other DNA
tagaattaaccataatagttttggatagaaatgaaaaatttagggacataagagcatttatagcagaagatccagaggga

SEQ ID NO: 181048 - DNA, 80 bp, synthetic construct
  source 1..80: mol_type = other DNA
ccttgacaaggctgtgttcagcaaatacaaagggaatgtggaaatacaattcaaccagtacatggaagtagcagttgacc

SEQ ID NO: 181049 - DNA, 80 bp, synthetic construct
  source 1..80: mol_type = other DNA
ccgcgctgctgctacagagcaaacacagggtaaagatatacagctggaaaaccaggcctttcggccctaaaaaagtcaca

SEQ ID NO: 181050 - DNA, 80 bp, synthetic construct
  source 1..80: mol_type = other DNA
aaactaccatcaggtccaggtcttgttccattttattggcaaagcagatggtatccaaaactagcttggcaacaacaagt

SEQ ID NO: 181051 - DNA, 80 bp, synthetic construct
  source 1..80: mol_type = other DNA
ttaggccactcaccatctgctgaagagtgtgggtacagtgaccgagtgagatcaatcacgattggaaactctacaataac

SEQ ID NO: 181052 - DNA, 80 bp, synthetic construct
  source 1..80: mol_type = other DNA
ccccccggatccaccatcgcagccggcagaggatgcacgagacgcggacgcagaacgtgccgaatcaccacatagtgcag

SEQ ID NO: 181053 - DNA, 80 bp, synthetic construct
  source 1..80: mol_type = other DNA
taaaacccagcgccacagaaaatggatttagtcccacttggcaaagctgccaaaactctacgaaacttgatcaatcaggc

SEQ ID NO: 181054 - DNA, 80 bp, synthetic construct
  source 1..80: mol_type = other DNA
cgtcacaggcgccatcttagattggcgcccgggaactgacgtcaaagttcaaaggtcaggccctcggcgtcaacacaaga

SEQ ID NO: 181055 - DNA, 80 bp, synthetic construct
  source 1..80: mol_type = other DNA
atcggatccggcctcaatatcatctggtggaccggcatcgtgcttctggcggtggacgctctcggacttggcgagcgttg

SEQ ID NO: 181056 - DNA, 80 bp, synthetic construct
  source 1..80: mol_type = other DNA
atgccaaaatgctttgttttgtttctggctgtaaagatttttgcttaaggatggcgagggataccaacttacataaacaa

SEQ ID NO: 181057 - DNA, 80 bp, synthetic construct
  source 1..80: mol_type = other DNA
aaactaaagttccagaaagaagagtggtcgcacaaggccctgaagaagaatttggccgctctctgatcaaacataacaca

SEQ ID NO: 181058 - DNA, 80 bp, synthetic construct
  source 1..80: mol_type = other DNA
tcgcctctggccccatactcccgccatgcgactgctcgccccctcccaggcctccctggtgagcccttgccgctccccgc

SEQ ID NO: 181059 - DNA, 80 bp, synthetic construct
  source 1..80: mol_type = other DNA
agacaattaaagacccctgcaaacaaccagatttccccattcccggctcccgtgacttctttggtgcagtacaagtcacg

SEQ ID NO: 181060 - DNA, 80 bp, synthetic construct
  source 1..80: mol_type = other DNA
gacactggaatgtacttaatacatacaaaacagaaggctgcttctcacacccacaactgcaaaaatacaaaatacctact

SEQ ID NO: 181061 - DNA, 80 bp, synthetic construct
  source 1..80: mol_type = other DNA
tttaaccgcccgttccaggcgagagctcatgccgcaccagacgctgtaacgccgcacgggcccgtagcgggctgtttgtt

SEQ ID NO: 181062 - DNA, 80 bp, synthetic construct
  source 1..80: mol_type = other DNA
gcactctgggagtgttcgctatcccagagtattgtttagcaggggactctgatgttaagaattcatacactttatacgtc

SEQ ID NO: 181063 - DNA, 80 bp, synthetic construct
  source 1..80: mol_type = other DNA
acctgaaagggaccttgccatcgtgagcacgggtgctcacggttcagagaccgtcccacaatgtaattgtatgtcaggag

SEQ ID NO: 181064 - DNA, 80 bp, synthetic construct
  source 1..80: mol_type = other DNA
gtcaccaggcctgccaaagagccagatctaaggccgggagaggcagccccaaagcgggtgcagtaacaggtaatctctgg

SEQ ID NO: 181065 - DNA, 80 bp, synthetic construct
  source 1..80: mol_type = other DNA
cccgggcctcgtccccccgttcgtcgtcctggttgtttcgttatattaacattataccacctgccatcgttatgtgtatc

SEQ ID NO: 181066 - DNA, 80 bp, synthetic construct
  source 1..80: mol_type = other DNA
aatggagagaagccttacagagaatttgtagacaggatcaggaagactgacgttggtcgtaggctgtatcttccaccata

SEQ ID NO: 181067 - DNA, 80 bp, synthetic construct
  source 1..80: mol_type = other DNA
ctgccttgcctgccaactccaaagaaaaaaccacctactgctatgagctactggtgccctccagttcacgatgtacgcgg

SEQ ID NO: 181068 - DNA, 80 bp, synthetic construct
  source 1..80: mol_type = other DNA
attagatcaaaaaccatagttccaaatgttgcacctcagggattgccaaccacaactttaccaggttcagggcaattcct

SEQ ID NO: 181069 - DNA, 80 bp, synthetic construct
  source 1..80: mol_type = other DNA
tgaatctgaacttaactctgaagtgtggaacctatacattgtttgtattatatgtccctacaccaggcctcaactatact

SEQ ID NO: 181070 - DNA, 80 bp, synthetic construct
  source 1..80: mol_type = other DNA
aattttcaggctgacgcggtgccgtcgggcgtccccaccacggccggtggccccgtcggacgacaccagatctacttcat

SEQ ID NO: 181071 - DNA, 80 bp, synthetic construct
  source 1..80: mol_type = other DNA
tagctaaatacaaaggcaacccaaaagtagagtttaatgaatttatccaggtggcggtggatcattatgcagcacaactc

SEQ ID NO: 181072 - DNA, 80 bp, synthetic construct
  source 1..80: mol_type = other DNA
aactaagactggtcaatgtggaggtgtgttgtgtacaactggaaaaatctttggcatccatgtcggaggcaatggtagac

SEQ ID NO: 181073 - DNA, 80 bp, synthetic construct
  source 1..80: mol_type = other DNA
cataccgctatggtgtgcactatttggatatgcagactgggtaaaaaaagatacaggcaactggggcatagtagattggg

SEQ ID NO: 181074 - DNA, 80 bp, synthetic construct
  source 1..80: mol_type = other DNA
tgcaaaccaggcacgtccataacttccatactagatcagagtcctccattgagaatttcatgagtcgatctgcttgtgta

SEQ ID NO: 181075 - DNA, 80 bp, synthetic construct
  source 1..80: mol_type = other DNA
caaccagctataaaccaagttctcctgttccccgagagggcccccaagcctgctcccagcccaggtgactgggagacaga

SEQ ID NO: 181076 - DNA, 80 bp, synthetic construct
  source 1..80: mol_type = other DNA
gagcagcttatgttataatgttagtgtacaccttacccaccaaacacattgtcatacaaccacattatccctgtatccac

SEQ ID NO: 181077 - DNA, 80 bp, synthetic construct
  source 1..80: mol_type = other DNA
tttatcatgcaagtttcttccactttatgctagtgaagcaaagagaataaaggcgctacacaacaaatgtaacatcatca

SEQ ID NO: 181078 - DNA, 80 bp, synthetic construct
  source 1..80: mol_type = other DNA
ggggctatctttgcccaatccctttttcctcttgggagtctgaggcgctgcgccgcccgacgcccttggtggcgtggagg

SEQ ID NO: 181079 - DNA, 80 bp, synthetic construct
  source 1..80: mol_type = other DNA
ccatggaaatgtacccaatccccttggatgacaagggtggagctgggcccatattcagtatttccctcagcccggcctca

SEQ ID NO: 181080 - DNA, 80 bp, synthetic construct
  source 1..80: mol_type = other DNA
ttatccgccaatcaactacgtgacgactggtagcaccattttgacactttgacgttcgatcaggtaggcttaccccacct

SEQ ID NO: 181081 - DNA, 80 bp, synthetic construct
  source 1..80: mol_type = other DNA
ggcattcactccacttaactcatacacaccaagtttaatcaaagcagttttactaattagatcagcataccacaatgggt

SEQ ID NO: 181082 - DNA, 80 bp, synthetic construct
  source 1..80: mol_type = other DNA
aatccctcgatggcttcctcccgtcgacaaccaagagcgagaagaaggcttcagttcacagggacaaagctcgcagtcct

SEQ ID NO: 181083 - DNA, 80 bp, synthetic construct
  source 1..80: mol_type = other DNA
ataggcctgcttcacaaagtcgcgcaggtagtcctgaaatgcgaccgggccctccagcgggcgcaatgagtgccagagct

SEQ ID NO: 181084 - DNA, 80 bp, synthetic construct
  source 1..80: mol_type = other DNA
acaatttccagatacatccagcacagagatcccaatcaccattacaatcgccccaatgtgttgtgagtttaatgggctca

SEQ ID NO: 181085 - DNA, 80 bp, synthetic construct
  source 1..80: mol_type = other DNA
tccgggcaaagaggtacagatagatggcattacaactgcagttcaagattcttatgacctgtacaataaggatggagtga

SEQ ID NO: 181086 - DNA, 80 bp, synthetic construct
  source 1..80: mol_type = other DNA
gttcgtgacgtcatgaccgccattttaagtaaggcggaacaggctgtcaccctgtgtcaaaggtcaagggtcagccttcc

SEQ ID NO: 181087 - DNA, 80 bp, synthetic construct
  source 1..80: mol_type = other DNA
atccctggggaagttaatagtatacttgaattgtgtcaagtggaaactatacttgaagtaaataatgtaactgatgtgca

SEQ ID NO: 181088 - DNA, 80 bp, synthetic construct
  source 1..80: mol_type = other DNA
ccaatgataacattcttgaaagatgagcttaggaagaaagacaaaattgtggcaggcaaaaccagagttatagaggccag

SEQ ID NO: 181089 - DNA, 80 bp, synthetic construct
  source 1..80: mol_type = other DNA
cgcaccaccccaaagtactgagtgtcgcccagcatgatgccgtgcagcggcggccagcacagcgggagccaacgacccgc

SEQ ID NO: 181090 - DNA, 80 bp, synthetic construct
  source 1..80: mol_type = other DNA
gatcagagactacaatacactatgttgggggagatcctgaactactacactcactggactggatctctcaggtttacatt

SEQ ID NO: 181091 - DNA, 80 bp, synthetic construct
  source 1..80: mol_type = other DNA
atcgggccgccgtgggtcttccacgagtgggaccagagacgtggacagtttactgactcagctctcagacgtatgttact

SEQ ID NO: 181092 - DNA, 80 bp, synthetic construct
  source 1..80: mol_type = other DNA
taccatcagacgtagtagagaccagacatgtggttaactataagacaaggtctgagagcacactggaatctttctttggc

SEQ ID NO: 181093 - DNA, 80 bp, synthetic construct
  source 1..80: mol_type = other DNA
tcataagtcacgtgggaaggggcgtgcccttaaacccgggagcatcctcgtccacgtgactgtgacgtgtgtgacacgtc

SEQ ID NO: 181094 - DNA, 80 bp, synthetic construct
  source 1..80: mol_type = other DNA
tgctagtggctgtggatcattatgctggacaactactgtcattagacattcctacagaggaactcacaattaaggaagcc

SEQ ID NO: 181095 - DNA, 80 bp, synthetic construct
  source 1..80: mol_type = other DNA
aaggcccaattgatgtagttaataaaccacccccacctgccatattggatcttctcaaatcagttaggaatccagatgtt

SEQ ID NO: 181096 - DNA, 80 bp, synthetic construct
  source 1..80: mol_type = other DNA
catacactatatcaccgccaacagtgtctgcctcggacgcgctggctcgccgctttgcgtttgacgtggacattgaagtg

SEQ ID NO: 181097 - DNA, 80 bp, synthetic construct
  source 1..80: mol_type = other DNA
ggtccctggggacacacgcaaatcaacggccagagacaagacgcggaaaagaggaaagaacagacacacgcaaaacaacg

SEQ ID NO: 181098 - DNA, 80 bp, synthetic construct
  source 1..80: mol_type = other DNA
tgaaagaagaggtgagaaagccgaacagcagatggaaagctacaaaaggattctcaatagaactcctcaagagaatttgt

SEQ ID NO: 181099 - DNA, 80 bp, synthetic construct
  source 1..80: mol_type = other DNA
agaattacaaaaagctcaacttatgactcaaatgtgttcacagatggaagaacaacttcaacagacatcccactcttcca

SEQ ID NO: 181100 - DNA, 80 bp, synthetic construct
  source 1..80: mol_type = other DNA
aagatagtactgactcagtggaacccccagactgtcagaaagtgcattatccgcggacttatgcccgttatctgggcgtg

SEQ ID NO: 181101 - DNA, 80 bp, synthetic construct
  source 1..80: mol_type = other DNA
ccggggtcagggtgatggaggcaggcgcaaaaaaggagggtggtatggaaagcatcgtggtgaaggaggttccagccaga

SEQ ID NO: 181102 - DNA, 80 bp, synthetic construct
  source 1..80: mol_type = other DNA
agtggaaccccgccaaagtgcggaggtgcctaattaaggggtacactcccctcatcctgtgcggagcccagagatctggg

SEQ ID NO: 181103 - DNA, 80 bp, synthetic construct
  source 1..80: mol_type = other DNA
atgtgactacacacacaagaagaatgtagactttacccctacgggggtgactaccaccagggataaaataacactggata

SEQ ID NO: 181104 - DNA, 80 bp, synthetic construct
  source 1..80: mol_type = other DNA
aaaacaatataaaactcactatgacactaatttatataacaatgtacaactatatcaaacatttcaaacaatagctcaaa

SEQ ID NO: 181105 - DNA, 80 bp, synthetic construct
  source 1..80: mol_type = other DNA
gcaacagaatatgggttgactactgcagtaaaaaaggcaacgaatatgacaatacaagtaaatgccttttagaagacatg

SEQ ID NO: 181106 - DNA, 80 bp, synthetic construct
  source 1..80: mol_type = other DNA
ttaaagaaacacccgctccagagtgcattaatgatctcttgcaggcggtagatagtcaggagattagggattattgtgaa

SEQ ID NO: 181107 - DNA, 80 bp, synthetic construct
  source 1..80: mol_type = other DNA
tcgacgaatgggtctccgccgagaaaggttaccgtttcaagagagaccgcaaaaccaacaaggtatctttctcttggctt

SEQ ID NO: 181108 - DNA, 80 bp, synthetic construct
  source 1..80: mol_type = other DNA
cagctataccaacccctagaagaatgtgataactcatgctattgtaagcgatgctgctatcattgccagctatgttttct

SEQ ID NO: 181109 - DNA, 80 bp, synthetic construct
  source 1..80: mol_type = other DNA
aagaaaagtaatagtgcctagctacaaaactaaacctaaaggcagacccgtaaaaagaataagaataaagcccccaactc

SEQ ID NO: 181110 - DNA, 80 bp, synthetic construct
  source 1..80: mol_type = other DNA
ctattggctcatgtagtccaaaaaataggaaaggaagcattggtcatctggggagagataccaatgttccatctaccagt

SEQ ID NO: 181111 - DNA, 80 bp, synthetic construct
  source 1..80: mol_type = other DNA
gacatcacccagtcgacgccgcctgtgtcacaaagaacatgggccaggcgtatgacctgctcaaaaagtcaatggaaatg

SEQ ID NO: 181112 - DNA, 80 bp, synthetic construct
  source 1..80: mol_type = other DNA
cagagaaaaggtactctagataattacaatgacacaaacagattattaacagtatttaatacatttaaaactgaagaaca

SEQ ID NO: 181113 - DNA, 80 bp, synthetic construct
  source 1..80: mol_type = other DNA
acccagtaagacaaaattgcaaccaagtgttttctttgatgtctttgagggcacgaaagaaccagcagtattatctgaga

SEQ ID NO: 181114 - DNA, 80 bp, synthetic construct
  source 1..80: mol_type = other DNA
gtaccccacgcaggcacaaaacctacaaaaaactggtgggagtacagaacaggcctattttcacctatatttcttagtcc

SEQ ID NO: 181115 - DNA, 80 bp, synthetic construct
  source 1..80: mol_type = other DNA
atatgtaattaccacctagctactcaagaagaccacaataacgcagtaagcgtgttgtggaatagagatctaatggtagt

SEQ ID NO: 181116 - DNA, 80 bp, synthetic construct
  source 1..80: mol_type = other DNA
taatagggatcatcacagcagggggcgaaggacacgtggctttcacagacctcagatgttatcgagtagaggctacaaca

SEQ ID NO: 181117 - DNA, 80 bp, synthetic construct
  source 1..80: mol_type = other DNA
cgcgttatgggcctggtggacatggactgcgagaaaagcgcgtacatgctcgaggccggcgcggctgcgacggttgcacc

SEQ ID NO: 181118 - DNA, 80 bp, synthetic construct
  source 1..80: mol_type = other DNA
tttctattttttttacaaaatatatgatgaaccaagaataaaactctagctctcgtctatttttaatatgctctacttag

SEQ ID NO: 181119 - DNA, 80 bp, synthetic construct
  source 1..80: mol_type = other DNA
gaacttgcaaggtacttaagatcacacatgtggagaaggttatctcagggacgattaatttacggcctagaagtccctga

SEQ ID NO: 181120 - DNA, 80 bp, synthetic construct
  source 1..80: mol_type = other DNA
actgtgcatgaagggaagaacatcttaaaggacaggcattttataataccaaggagcaacatactgggactacagaatgt

SEQ ID NO: 181121 - DNA, 80 bp, synthetic construct
  source 1..80: mol_type = other DNA
cactaaaccaagttccactactcacgaccctaatgtgatgaaacgacatactcacgatgatttttacaaggcacattgta

SEQ ID NO: 181122 - DNA, 80 bp, synthetic construct
  source 1..80: mol_type = other DNA
ctgcagatacgtgctgaaagacatgcccctgtgggccatgtgccagggctacgcagactatatagactcccaaataggag

SEQ ID NO: 181123 - DNA, 80 bp, synthetic construct
  source 1..80: mol_type = other DNA
aggcacaccgccaccgagaacccaccatggcatggaggtggtggtggagacggagagggtggccgcgtcgcaggagatgg

SEQ ID NO: 181124 - DNA, 80 bp, synthetic construct
  source 1..80: mol_type = other DNA
caggtataatgatggataaactgagtaacaccacacacatatataaagacatcatatacactaccgagggtggtatgcct

SEQ ID NO: 181125 - DNA, 80 bp, synthetic construct
  source 1..80: mol_type = other DNA
atatactaggttttatcagtgcctgccctgacttcaagcttagacttatgaaagacacacagtcgatacatcaagaaaca

SEQ ID NO: 181126 - DNA, 80 bp, synthetic construct
  source 1..80: mol_type = other DNA
ggtccaatagatgtcattaataaaccaccaccaccagcaattttagacctactcaaatcagtcagaaaccctgatgttat

SEQ ID NO: 181127 - DNA, 80 bp, synthetic construct
  source 1..80: mol_type = other DNA
agtgtaaaaagatccccttatacaaagagcaggtaaaggcatttggagccgcatcagaggaagcacaaaatgaacttatt

SEQ ID NO: 181128 - DNA, 80 bp, synthetic construct
  source 1..80: mol_type = other DNA
acgctgacgccaccgcggtggacaagcccactcgcccagacgtctcggtaaacagattctacacactagacaccaagctg

SEQ ID NO: 181129 - DNA, 80 bp, synthetic construct
  source 1..80: mol_type = other DNA
acgaccgggaacgctgcgaagacgcccggcgtctaataatacagccgcgccgagccagcgggcccccgactaagaggcac

SEQ ID NO: 181130 - DNA, 80 bp, synthetic construct
  source 1..80: mol_type = other DNA
gagcagctctggttggtaaggtggagttaaatgacacaggtacgagtgccacagggttcaccaattgggatatagatata

SEQ ID NO: 181131 - DNA, 80 bp, synthetic construct
  source 1..80: mol_type = other DNA
gtatctatttgttactcctgtttagttgaagaaaacaagctattggattgtaacacacattttacgctttgttccttaga

SEQ ID NO: 181132 - DNA, 80 bp, synthetic construct
  source 1..80: mol_type = other DNA
ggggagtaaggccgtgccaggccgccatgctcagggccacggcgtgccagaggccctcgtagtcgtgcgcatccgagagg

SEQ ID NO: 181133 - DNA, 80 bp, synthetic construct
  source 1..80: mol_type = other DNA
tgattctgatacaccatccaccacacatgggcacgatgccaagggatattttaaatggtctgctactaccaatcccatgt

SEQ ID NO: 181134 - DNA, 80 bp, synthetic construct
  source 1..80: mol_type = other DNA
atcaaaccggtatagtggttccacctggcacacccaacaagtgtgtggtcctgtgctttgtttcagcctgtaatgacttc

SEQ ID NO: 181135 - DNA, 80 bp, synthetic construct
  source 1..80: mol_type = other DNA
gacgggcgcgtgtgagaggcctgccagccctccccgctcctgagaacccaccggcgccatggcctggcgctggtggagac

SEQ ID NO: 181136 - DNA, 80 bp, synthetic construct
  source 1..80: mol_type = other DNA
gctccgtgatgaaattaggaggaataatcacaggggagccaaagtagcggatgtctgtggattccccgtcccagcgccag

SEQ ID NO: 181137 - DNA, 80 bp, synthetic construct
  source 1..80: mol_type = other DNA
atacaacaacaacataaaagatgtatcaaaaaaagcagcagaactatactcaaaagcaacaaaagctttactaggaaaca

SEQ ID NO: 181138 - DNA, 80 bp, synthetic construct
  source 1..80: mol_type = other DNA
tcactaaagccaaggtgtcaagtgcacaaggcgttgtccaaacggccgtatgcaacgctgccatgggtgtaggagtgggc

SEQ ID NO: 181139 - DNA, 80 bp, synthetic construct
  source 1..80: mol_type = other DNA
atgggtttcccaccatccgacccactgggtgtagtgctctggtattttgtacccttgcacgcctgtttcccatttgtacc

SEQ ID NO: 181140 - DNA, 80 bp, synthetic construct
  source 1..80: mol_type = other DNA
tcagcttgtaacgatttctcagtgcgcatgctcagagacacaccgttcattgagcaaacccagttgctgcagggcgatgt

SEQ ID NO: 181141 - DNA, 80 bp, synthetic construct
  source 1..80: mol_type = other DNA
cactaaccaacatcaatgtaatgacacctggtactatggaaaaacttatacatcacaaataacagacgcagcaaaaaaaa

SEQ ID NO: 181142 - DNA, 80 bp, synthetic construct
  source 1..80: mol_type = other DNA
ccagcatatttctgtcctcaggcagatcaaacccagaagtaaaaggcagctacacagacatatcctacaatccaaatgta

SEQ ID NO: 181143 - DNA, 80 bp, synthetic construct
  source 1..80: mol_type = other DNA
attcatatacagaaattaccatcttactccagagaaggaaatggaagaggcatgtcaggttgtgtatactgccgatttag

SEQ ID NO: 181144 - DNA, 80 bp, synthetic construct
  source 1..80: mol_type = other DNA
ttaaaagaaacgaaacctacaagtctttactaaatataataactatatataataccacacaaacagctgcacaactaagt

SEQ ID NO: 181145 - DNA, 80 bp, synthetic construct
  source 1..80: mol_type = other DNA
ttagggaacttgtacaataactgcctcaacattgacctcccccaatttactaaggacggagaccttgaaactgaaacacc

SEQ ID NO: 181146 - DNA, 80 bp, synthetic construct
  source 1..80: mol_type = other DNA
atgctaatggtaccaacatcatggtttatataaagcccaaacatataacggcatggatacctagaccacctagagccaca

SEQ ID NO: 181147 - DNA, 80 bp, synthetic construct
  source 1..80: mol_type = other DNA
atttgttggtattggttcagcgtactcgcacttttatgacgggttttccatagttccacatgataacattagtgccggca

SEQ ID NO: 181148 - DNA, 80 bp, synthetic construct
  source 1..80: mol_type = other DNA
cgaaaaacgcagcaaatgcgttatcactgacttgcctctgtgggccgccctgtactgctaccacaactttgtggaagagg

SEQ ID NO: 181149 - DNA, 80 bp, synthetic construct
  source 1..80: mol_type = other DNA
ttaagaacatgatggaactagctgagatcgatactatgatccccttcgatcttagcgccacgaagaaaaacaccatggag

SEQ ID NO: 181150 - DNA, 80 bp, synthetic construct
  source 1..80: mol_type = other DNA
cttgacaactggcaactcagacacagttttgctagcactcacagcagacttgcaaattgattacactgaagagagaggac

SEQ ID NO: 181151 - DNA, 80 bp, synthetic construct
  source 1..80: mol_type = other DNA
tcctacactttttacaggaccagcgggcaagcggccccgcagagataccagtgtccaacaggcggaagaagaccagcaaa

SEQ ID NO: 181152 - DNA, 80 bp, synthetic construct
  source 1..80: mol_type = other DNA
gcctgaagatgtaattgaaaccagatatgtacagacatcacaaacaagagatgagatgagtttagagagttttcttggta

SEQ ID NO: 181153 - DNA, 80 bp, synthetic construct
  source 1..80: mol_type = other DNA
gaaacatgatatgggtagactactgtcaaaaaaaagacaacttatataaagaaggccaaagtaaatgtctaatagctaat

SEQ ID NO: 181154 - DNA, 80 bp, synthetic construct
  source 1..80: mol_type = other DNA
gactgagacccccaacagggccacagccagatggaagttcatatgacgcgacattcctatcacagtggaaatcagcatgg

SEQ ID NO: 181155 - DNA, 80 bp, synthetic construct
  source 1..80: mol_type = other DNA
tgcggtagtgaaagagcaactgcggtggtagggcgccatcagccaggtgttcggcgatcaacgtcaccagcgcgtagctg

SEQ ID NO: 181156 - DNA, 80 bp, synthetic construct
  source 1..80: mol_type = other DNA
ctatacaatgaacggtttcggtggctccttcggcaccgagaccttctcccttaaggtactctttgaccagtacgagaggg

SEQ ID NO: 181157 - DNA, 80 bp, synthetic construct
  source 1..80: mol_type = other DNA
tgtgcggcggggacggactgagggacggcgggggggacttgcgaggacgggagttgcgaggacaagagtggggtggccgg

SEQ ID NO: 181158 - DNA, 80 bp, synthetic construct
  source 1..80: mol_type = other DNA
gggaaaacaatgtccacatcattggactctaacttcacggtggcatgctctcgtccaaataccgggggcataacactgag

SEQ ID NO: 181159 - DNA, 80 bp, synthetic construct
  source 1..80: mol_type = other DNA
acagcactccccagccagaaaagttcggagggggcatgagcacagttacattcagcctgtttgtcttatatgaccagtac

SEQ ID NO: 181160 - DNA, 80 bp, synthetic construct
  source 1..80: mol_type = other DNA
ggaaagacaactacacagaaagtggatttgtcacattgtggcatcagacagcatttgtatccaatggaactacaggatct

SEQ ID NO: 181161 - DNA, 80 bp, synthetic construct
  source 1..80: mol_type = other DNA
gccataaggtcggacgatacggagaccatgcggttcgctttcgggggaggggtgagcacggtgactttcagcctaaaggt

SEQ ID NO: 181162 - DNA, 80 bp, synthetic construct
  source 1..80: mol_type = other DNA
ccccatggtcctttctgaaagacagaatttgtaagtggcttcagatacaaagacccccatccaaacagagtgactcgtgg

SEQ ID NO: 181163 - DNA, 80 bp, synthetic construct
  source 1..80: mol_type = other DNA
agacagggcactagctagagtggctgacaccgtgagaagcgggccatccaactcggaacaaataccggcactgacggcgg

SEQ ID NO: 181164 - DNA, 80 bp, synthetic construct
  source 1..80: mol_type = other DNA
cagcagcaggaacgagtgtgagtgaacacagcataggtacgggctcggtgccagcattgcaagctgcagagacaggtgcc

SEQ ID NO: 181165 - DNA, 80 bp, synthetic construct
  source 1..80: mol_type = other DNA
ataatggtgaaatggagtacaacaaattcttggacagaatacgcagttgcccagtaggtagacgcctacagttacctcca

SEQ ID NO: 181166 - DNA, 80 bp, synthetic construct
  source 1..80: mol_type = other DNA
ccctggtcgtgaagtgcaaatagatggtatttcaaccaaggtggaggattcttttgacctgtacaacaaggatggagtta

SEQ ID NO: 181167 - DNA, 80 bp, synthetic construct
  source 1..80: mol_type = other DNA
ctaccaggagcaaacatatacaacacatacatagtgtgtattatatgtccttacactaaacctgcactactaaacaaaac

SEQ ID NO: 181168 - DNA, 80 bp, synthetic construct
  source 1..80: mol_type = other DNA
tggtattaacacctttaatggcacaaccacagacgatgaaactcagccccttgcaaaattaaacgaatttttaaaggcag

SEQ ID NO: 181169 - DNA, 80 bp, synthetic construct
  source 1..80: mol_type = other DNA
agttatgagagacatttgtgagaccgggccctttagctacaaagatgactatcaaaactcctgtcttgttatgagatacc

SEQ ID NO: 181170 - DNA, 80 bp, synthetic construct
  source 1..80: mol_type = other DNA
gcagatgaggctggataaaccccactggcgacagtgatccagcctgcgtggctgcctgcacacctggaaacaggtgtgaa

SEQ ID NO: 181171 - DNA, 80 bp, synthetic construct
  source 1..80: mol_type = other DNA
tgaattatgtcagtattttacacactgggcaggctcactgcgcctatcctttatgtacactggcccagcactatctagtg

SEQ ID NO: 181172 - DNA, 80 bp, synthetic construct
  source 1..80: mol_type = other DNA
tctggaaaggccaacaccatggacatgtacaggattccactgaataccacaggtaaaacagacccgatcttctgtttaag

SEQ ID NO: 181173 - DNA, 80 bp, synthetic construct
  source 1..80: mol_type = other DNA
ctcaccctggtgagcaaggtagggaagtagttccaactcgaagctccactgacaacaaaagacccagtgatgatagttgg

SEQ ID NO: 181174 - DNA, 80 bp, synthetic construct
  source 1..80: mol_type = other DNA
ttccaggggaagttagaaacctactagagctatgccaaatagatacgataatggaggtcaacaatctcaccagtaacgag

SEQ ID NO: 181175 - DNA, 80 bp, synthetic construct
  source 1..80: mol_type = other DNA
tgggaagatctgctttgtgggcaaatctaaggctggatcagggtttcaggaaatgggagataaacttccaagaacatgcc

SEQ ID NO: 181176 - DNA, 80 bp, synthetic construct
  source 1..80: mol_type = other DNA
aacaaaaacatgaggttaacataactagcaggatttaccacaaagccaaacatgtcagtgcatggtgccctcgtcctcct

SEQ ID NO: 181177 - DNA, 80 bp, synthetic construct
  source 1..80: mol_type = other DNA
acagttgtggccactctggcattaataggatgctctggatctccctggagattcattaaagaaaaggtatgtaattggtt

SEQ ID NO: 181178 - DNA, 80 bp, synthetic construct
  source 1..80: mol_type = other DNA
ttacagattccctagaaacactgtttcaaggaccagtgtataaagatttagagattgatgtttgcaacacaccacctcca

SEQ ID NO: 181179 - DNA, 80 bp, synthetic construct
  source 1..80: mol_type = other DNA
caatgctaggcacacatattatatgggatgtaggcctacagtcctcttgtgtgttatgcatcccctggattagtcagacc

SEQ ID NO: 181180 - DNA, 80 bp, synthetic construct
  source 1..80: mol_type = other DNA
ggtgacttacggactagggcccagatttggtggggtgttcaccagcaatgtcaaaataatgaactatcacctaatgactc

SEQ ID NO: 181181 - DNA, 80 bp, synthetic construct
  source 1..80: mol_type = other DNA
aacggtgacacaggcacccacggaatataccggggaaaggaggttagggaggcctatgtctcccactgatattccgccgt

SEQ ID NO: 181182 - DNA, 80 bp, synthetic construct
  source 1..80: mol_type = other DNA
cacttatgtcaggacataggtttcattctcaggcagtcatcaacaaaaaacctagacaggcatggtgctggtttaaaggc

SEQ ID NO: 181183 - DNA, 80 bp, synthetic construct
  source 1..80: mol_type = other DNA
ggtggcggtgttcattaaatgcattctgtgtatttattggtacatttgcaaatcgccgagtataccggtataatgtggca

SEQ ID NO: 181184 - DNA, 80 bp, synthetic construct
  source 1..80: mol_type = other DNA
gcgcatactggccctgggcagcagggtcaccatgatgcaaaagtagagactcagattgtccagcagggccaagccaaggg

SEQ ID NO: 181185 - DNA, 80 bp, synthetic construct
  source 1..80: mol_type = other DNA
gaaaaacaccgtcacgtcgttaacgtcgttttggagctgccgaccgagatatcagaggccacccacccggtgttggccac

SEQ ID NO: 181186 - DNA, 80 bp, synthetic construct
  source 1..80: mol_type = other DNA
accgagtaaggtccataactctaggaaactccactatcacaacccaagagtgtgctaacgttgttgctgcgtatggggaa

SEQ ID NO: 181187 - DNA, 80 bp, synthetic construct
  source 1..80: mol_type = other DNA
gctactgccactgcgcggcctgcgagctaaaccgaaagcaccacctgctatgagctggcgagaaccccttgacaatgtac

SEQ ID NO: 181188 - DNA, 80 bp, synthetic construct
  source 1..80: mol_type = other DNA
gcttaaaggagccccagcactaaattccccaaatgttgaggcatgtggttacagtgacagagtgcaacaaatcaccctcg

SEQ ID NO: 181189 - DNA, 80 bp, synthetic construct
  source 1..80: mol_type = other DNA
gatagttgctgttataccagaacatcagttatcttatgtgggtgcagatgatgtcaaggtacgctatgatcacacgcacc

SEQ ID NO: 181190 - DNA, 80 bp, synthetic construct
  source 1..80: mol_type = other DNA
ctaaaactaatgaggacttggacctagccagatacttaggcacacgctttagattttacagacacccagatgtggacttt

SEQ ID NO: 181191 - DNA, 80 bp, synthetic construct
  source 1..80: mol_type = other DNA
ctacttacatgcacttcaatggttcggaaacagatgtggagagtttcctcggtagggcggcttgtgtgcatgtgacagaa

SEQ ID NO: 181192 - DNA, 80 bp, synthetic construct
  source 1..80: mol_type = other DNA
cagattttacactttggctagtaaaacttggtctcaatcttctaaaggatggtgttggaaactgcctgatgctttaaagg

SEQ ID NO: 181193 - DNA, 80 bp, synthetic construct
  source 1..80: mol_type = other DNA
tacgtaccacaacaagttatacatcgcaatgttgtgaagttaaatcagttttctaatttaaaaccctttgttaatgcata

SEQ ID NO: 181194 - DNA, 80 bp, synthetic construct
  source 1..80: mol_type = other DNA
gccagctatcctcttttagcagtggtggagcaactcaggaatgaaaatgacacaaggaagaaggttaaatcaaatctgag

SEQ ID NO: 181195 - DNA, 80 bp, synthetic construct
  source 1..80: mol_type = other DNA
ggtgctcgaaacacatccagacaaggtctaccagttatgctcaccccaggttcaggacaatttctcaccacagatgatgc

SEQ ID NO: 181196 - DNA, 80 bp, synthetic construct
  source 1..80: mol_type = other DNA
agctcagactcagacagggaatcaaacacctcttcgagcagctagtcagaacccagcagggagtccacgtaaatccttcc

SEQ ID NO: 181197 - DNA, 80 bp, synthetic construct
  source 1..80: mol_type = other DNA
tgtctaaattaaaacaccttgatactctagagaatcaagtggcaaccctccaccagtcatgcccaagtcaggaagaccaa

SEQ ID NO: 181198 - DNA, 80 bp, synthetic construct
  source 1..80: mol_type = other DNA
ggtatggatattcctggtgaggttcaaaacatgatggagattgctgaggtcgattcactagtccccatcaacaacaccca

SEQ ID NO: 181199 - DNA, 80 bp, synthetic construct
  source 1..80: mol_type = other DNA
acagtccatttggctacccaagataaccatgcacaagaagttttttcaataccagttgatgttgcatcacagccattagc

SEQ ID NO: 181200 - DNA, 80 bp, synthetic construct
  source 1..80: mol_type = other DNA
tacagagaccaagtttatttagtggaaggtggtatgccctcaggaatatgtggtaccagtatctttaacactatgatgaa

SEQ ID NO: 181201 - DNA, 80 bp, synthetic construct
  source 1..80: mol_type = other DNA
gcattaactgagggtttggaagaagatttggtagaagtcattgttgacaaaacacggcaaacgctggcttctattaagag

SEQ ID NO: 181202 - DNA, 80 bp, synthetic construct
  source 1..80: mol_type = other DNA
gatcttcttaggaggggtgaaatgatcctccgaacttcaaaaaggacagaaccagttggagtattgttccatggtgaacc

SEQ ID NO: 181203 - DNA, 80 bp, synthetic construct
  source 1..80: mol_type = other DNA
gaggaggacatagttacatgccaattcaacatgacaggattagagagagacaaaataaaaaagtacgaggaaacatggta

SEQ ID NO: 181204 - DNA, 80 bp, synthetic construct
  source 1..80: mol_type = other DNA
tgcgccaaagtgacgtcacgggcctacaccaattacgaagacttcgtgaattatcaagaagcagttggagcccaactcag

SEQ ID NO: 181205 - DNA, 80 bp, synthetic construct
  source 1..80: mol_type = other DNA
acattgtaggtgaccttgacccgttcttcatcctgctcggttcccaccgggaccatgtcttggtcggcgaactgcgagta

SEQ ID NO: 181206 - DNA, 80 bp, synthetic construct
  source 1..80: mol_type = other DNA
ctgagtataccatactagctactgcatcacagccaaacgcatctgagtatgctagtaatttaacagtacaagcaatgtat

SEQ ID NO: 181207 - DNA, 80 bp, synthetic construct
  source 1..80: mol_type = other DNA
atggggctggaaataccccactggcgacagtgttccagcccgcgtggctgcctgtcccccattttggtggaaagccaatg

SEQ ID NO: 181208 - DNA, 80 bp, synthetic construct
  source 1..80: mol_type = other DNA
ccactcctttgactggcgaaggggctatcttagcgagggagctatcaaacgcctgcacgagaaacctctcgactatgaaa

SEQ ID NO: 181209 - DNA, 80 bp, synthetic construct
  source 1..80: mol_type = other DNA
gctgtatcactgtccaacagcggtcgggttcctcgtccggacatgcgggtttccagcaatcctcggcgtcggcgcgtccg

SEQ ID NO: 181210 - DNA, 80 bp, synthetic construct
  source 1..80: mol_type = other DNA
taggtgttatggaacaaaacccagtggaaaggtacacagaagctattttaaatgaagttcttgtagttccaaatatcaca

SEQ ID NO: 181211 - DNA, 80 bp, synthetic construct
  source 1..80: mol_type = other DNA
cttcatgtgtagggcggcatgtgtgtactatgtggattatcacacccaaaatgaccgggaagataagaaatacgcctctt

SEQ ID NO: 181212 - DNA, 80 bp, synthetic construct
  source 1..80: mol_type = other DNA
cccgctgaggtcaccagttacatcaggatatactttaaacctaagcacgtcagggcatgggtgccaagaccaccgcgatt

SEQ ID NO: 181213 - DNA, 80 bp, synthetic construct
  source 1..80: mol_type = other DNA
caacactggactactcccaccacagacagttatgagtaccatctaggcatgtttagcacaatatttctagctccagacag

SEQ ID NO: 181214 - DNA, 80 bp, synthetic construct
  source 1..80: mol_type = other DNA
attttgctacgtcactaaccacgtgactcttctccgccaatcagagtctacgtgattcatttcctgggctgtacctacat

SEQ ID NO: 181215 - DNA, 80 bp, synthetic construct
  source 1..80: mol_type = other DNA
gacagcgcgcgcacagcaggccgtgcccgtgcgaagtgaggcgcaggagacgcgggaccgtcacgccgcgtaccaccaca

SEQ ID NO: 181216 - DNA, 80 bp, synthetic construct
  source 1..80: mol_type = other DNA
gtcgaggtcttgcttcgttttcttttttctttttagtcgatggaacttttcttcggtacgggttcttgttatggaagctt

SEQ ID NO: 181217 - DNA, 80 bp, synthetic construct
  source 1..80: mol_type = other DNA
tgctagattgctaaaggatacaccattcattagacaacttgctacggtgtggtcgcaaggagttggtgacgctctggagg

SEQ ID NO: 181218 - DNA, 80 bp, synthetic construct
  source 1..80: mol_type = other DNA
aatggctagtcagggtcattagtgctatcactattatggttagaaatagctcagatattcccactgtattagctacttta

SEQ ID NO: 181219 - DNA, 80 bp, synthetic construct
  source 1..80: mol_type = other DNA
agaagaggaattgacactacactataaaaataaggtatttcccattgaacaaccatctgtgacccaagtcacgttagggg

SEQ ID NO: 181220 - DNA, 80 bp, synthetic construct
  source 1..80: mol_type = other DNA
ttttgttttgtggtagcatgatggcaaccggaaaactgatcctgacgtattcaccaccaggagcatcccccccaaagagc

SEQ ID NO: 181221 - DNA, 80 bp, synthetic construct
  source 1..80: mol_type = other DNA
atgaaaccatgattcacgctgggactggagctgtggtgaagtatttcaatgtcaattattacaaggatgcggcaagctcc

SEQ ID NO: 181222 - DNA, 80 bp, synthetic construct
  source 1..80: mol_type = other DNA
tttgaaatgtttacatacaccaggtttgattctgagatcacattggtgccaagtattgcaaacaaagagggtcacattgg

SEQ ID NO: 181223 - DNA, 80 bp, synthetic construct
  source 1..80: mol_type = other DNA
gactcagcccaatcggaagaaagcgacgaagaagagatgccacccctcgaagaagaacaagcaccccaagaaaagacaga

SEQ ID NO: 181224 - DNA, 80 bp, synthetic construct
  source 1..80: mol_type = other DNA
gttatagaatactgtactgaacagggatggataggtaaagcaaactcaaccatagagagggatttcaattatgtacacta

SEQ ID NO: 181225 - DNA, 80 bp, synthetic construct
  source 1..80: mol_type = other DNA
ataccatgattagggttattaattttgttttactcttaataataatcgcactctatttgaagttaattactttgatcata

SEQ ID NO: 181226 - DNA, 80 bp, synthetic construct
  source 1..80: mol_type = other DNA
cataatggatgggcaggaagggaaagcccgggacatagggctggaaatctgagccccctgggcagagttcggtgtccagg

SEQ ID NO: 181227 - DNA, 80 bp, synthetic construct
  source 1..80: mol_type = other DNA
agttgttcccactataaccacccacgtggtgttgtggacttgtatttcggtacacttccatgccagttttatctcccccc

SEQ ID NO: 181228 - DNA, 80 bp, synthetic construct
  source 1..80: mol_type = other DNA
gaagataatgcattttctaacaaagacagtttagataaattactaaaacaactgttcctaaatggacagtactggcagac

SEQ ID NO: 181229 - DNA, 80 bp, synthetic construct
  source 1..80: mol_type = other DNA
tgcagcgttccctgcagctgggactcttcctgggcctcctggatgatggcctccagtcgggagaggcgccttttccagtc

SEQ ID NO: 181230 - DNA, 80 bp, synthetic construct
  source 1..80: mol_type = other DNA
acgagaaaatgaggcgagccaacatcgggaactgcatggaggcattgtttcaaggaccgatacaatacaaggatttgaaa

SEQ ID NO: 181231 - DNA, 80 bp, synthetic construct
  source 1..80: mol_type = other DNA
caataaacatttttggcagaaatattctaaataccttgggcatgactctaaatttcccagtagcaaaaatagaaccagta

SEQ ID NO: 181232 - DNA, 80 bp, synthetic construct
  source 1..80: mol_type = other DNA
ggtttagcctgcgtcaccgaggcggaggtggaaatgagccgtcctgtggtggagtgtacgaccctgtagtgcccatgggt

SEQ ID NO: 181233 - DNA, 80 bp, synthetic construct
  source 1..80: mol_type = other DNA
acctatgtgaacctgaaaaccttaatgattcagtcctgatatgctactcaagtgatctagtcatataccgaacaaacaca

SEQ ID NO: 181234 - DNA, 80 bp, synthetic construct
  source 1..80: mol_type = other DNA
ctgaagcgcttgaagatcaatcagggattaaccttgagatcaccattgttagattgaagagaaatgaaaagtttagagac

SEQ ID NO: 181235 - DNA, 80 bp, synthetic construct
  source 1..80: mol_type = other DNA
gatcgcttctacacccttgccagtgttacttggacttcctcttcacacggttggtggtggaaactgcccgatgcaatcac

SEQ ID NO: 181236 - DNA, 80 bp, synthetic construct
  source 1..80: mol_type = other DNA
cagccacaagcgcagcaagaagaaggctccggtacgagacaccagagagaaccgagaccctgggagtcggaagaagagat

SEQ ID NO: 181237 - DNA, 80 bp, synthetic construct
  source 1..80: mol_type = other DNA
ctctctttcttcactcatactgccacccctctcaacttagctgctccaactaacatcactgtctctatcccttatgcctc

SEQ ID NO: 181238 - DNA, 80 bp, synthetic construct
  source 1..80: mol_type = other DNA
gggttcgccgcgtctttttgcgctcattcagctgtgtcgtgtattgttgcccgagcaggtgacgctgtaccagaacctgg

SEQ ID NO: 181239 - DNA, 80 bp, synthetic construct
  source 1..80: mol_type = other DNA
gtcatgcttacacctggatctggacaatttttaacgactgatgatacacaatctccatcagcatttccatactttcaccc

SEQ ID NO: 181240 - DNA, 80 bp, synthetic construct
  source 1..80: mol_type = other DNA
atgtccgtgtgtggatcgattgtaatgtcgtatccaggcgactgaaagacaatcccacgtagaattaccttttatggtga

SEQ ID NO: 181241 - DNA, 80 bp, synthetic construct
  source 1..80: mol_type = other DNA
aggtgaggttctaaactatttttccacatgggcagggagcatcactctgaattttctatgtgtttgtgacagttttagca

SEQ ID NO: 181242 - DNA, 80 bp, synthetic construct
  source 1..80: mol_type = other DNA
aaactaggtatgaaacatcattagaatctttcttaggaagggcagggtgcattaaaatcataacactaaatttagatcat

SEQ ID NO: 181243 - DNA, 80 bp, synthetic construct
  source 1..80: mol_type = other DNA
gccgctggactacgctgctcaagcgtccgagtacgtccccgttactgtcactatcgcaccaatgtgtgcggagtacaacg

SEQ ID NO: 181244 - DNA, 80 bp, synthetic construct
  source 1..80: mol_type = other DNA
gaaggtcatggttctttatcattgttgtttgcatatttcactggggaattaaatatacatgtcctattcttatcagacaa

SEQ ID NO: 181245 - DNA, 80 bp, synthetic construct
  source 1..80: mol_type = other DNA
ttgggggtacgggggttacggtggcgacggtgactcgcggggacgaggcttgcgctgggggggggaatatctgcgctggg

SEQ ID NO: 181246 - DNA, 80 bp, synthetic construct
  source 1..80: mol_type = other DNA
cacccccccccttctcctccggaaccgggggtggcaaatttttaccaaatttgggcaaccatgttttccaatggtacggc

SEQ ID NO: 181247 - DNA, 80 bp, synthetic construct
  source 1..80: mol_type = other DNA
aaaacatggatacaaaaccaatttcctacaggcaacaacagcacctttggctttaactcatatgctccagacaaagacaa

SEQ ID NO: 181248 - DNA, 80 bp, synthetic construct
  source 1..80: mol_type = other DNA
ggatctgagaacctcgtcgggaaccgctgccaaacgggctgctgccgccactatcgtccgtgtcgtccaacaggttgacg

SEQ ID NO: 181249 - DNA, 80 bp, synthetic construct
  source 1..80: mol_type = other DNA
cgatgactacgtacagagaacactaggccccttcacagacacggaacaggtgggcattatgtgcataatatgtccgtaca

SEQ ID NO: 181250 - DNA, 80 bp, synthetic construct
  source 1..80: mol_type = other DNA
ttcggccaccagcgcgtggctgcgatggagcggcacgatggtgaccgtcggcgactcatggtgttcggaaaccgaggcgg

SEQ ID NO: 181251 - DNA, 80 bp, synthetic construct
  source 1..80: mol_type = other DNA
gggtggcccatacctatgacaccactggtggccgagtggaatatctttcctccaatggtgttataactataccagctggt

SEQ ID NO: 181252 - DNA, 80 bp, synthetic construct
  source 1..80: mol_type = other DNA
gttctatgatggctatgatggtgatgcacctgggtcaaggtatgggacctcagtcactaaccacatgggtacattgtgct

SEQ ID NO: 181253 - DNA, 80 bp, synthetic construct
  source 1..80: mol_type = other DNA
ggtcaggttactaagagacaccactcacatttctcaaactgctctaccacagggaattgaggatttgatcgagaaggtcg

SEQ ID NO: 181254 - DNA, 80 bp, synthetic construct
  source 1..80: mol_type = other DNA
tccagctttgagtccaagggtctgtatggttattcaaatcttaatcacatgggtaaattgtacatcaggcacgtgggagc

SEQ ID NO: 181255 - DNA, 80 bp, synthetic construct
  source 1..80: mol_type = other DNA
taaagctgatgacagaagtggtggcggtgcttgagggcaccacccaagactttttctcagacgtcaggcacctgccagac

SEQ ID NO: 181256 - DNA, 80 bp, synthetic construct
  source 1..80: mol_type = other DNA
aggaggcgatgctcggaacacatgtggtgtgggacattggattacagtccacaatagttatgacaataccctggacttca

SEQ ID NO: 181257 - DNA, 80 bp, synthetic construct
  source 1..80: mol_type = other DNA
ggttgtaatcatggatgacgtagggcaaaacccagatggaggggatttgggggtcttctgtcaaatggtgtctacaactg

SEQ ID NO: 181258 - DNA, 80 bp, synthetic construct
  source 1..80: mol_type = other DNA
tgataagtatggtatagatttaccatatgtcacctacttaaaagatgagctaagagctccagagaagatcaaaatgggaa

SEQ ID NO: 181259 - DNA, 80 bp, synthetic construct
  source 1..80: mol_type = other DNA
gaactaacgggtccaaacacgcaccccggcatgctaatgcttcaaaaacagaaaatactaatcccctcctgggagacaag

SEQ ID NO: 181260 - DNA, 80 bp, synthetic construct
  source 1..80: mol_type = other DNA
ccagacccaaaggaaaaaagaccaaaaaactaagaatagggccccccactctctttactgacaagtggtactttcaaaag

SEQ ID NO: 181261 - DNA, 80 bp, synthetic construct
  source 1..80: mol_type = other DNA
acacatgcccaaccagaagacacgatcttgattgatggtgttgagacaaagattttgaagcagacaatcatcacagatga

SEQ ID NO: 181262 - DNA, 80 bp, synthetic construct
  source 1..80: mol_type = other DNA
ccagacgtgggttctatagcgcagcttctctcaaaagaatgcttcaaaaaccaacagatgatgagctctatcttaaaaaa

SEQ ID NO: 181263 - DNA, 80 bp, synthetic construct
  source 1..80: mol_type = other DNA
tgcatccattacgctatccaacactgcctctaccacttttgtaaccaacatatattctactccgaataacaacacatcaa

SEQ ID NO: 181264 - DNA, 80 bp, synthetic construct
  source 1..80: mol_type = other DNA
actaggcaactatcatcaaaccacaccacgacgtgacatatgttttgactgcaacgatacctccctgaccatctacaact

SEQ ID NO: 181265 - DNA, 80 bp, synthetic construct
  source 1..80: mol_type = other DNA
tgacttggctatacagcagctgcagggacttgctatccaggatttgccagagcctccagccgttgttccagagcatcaga

SEQ ID NO: 181266 - DNA, 80 bp, synthetic construct
  source 1..80: mol_type = other DNA
ccacaaacgtgagtcaagatgctcccgtgttgacacaccaacttatgtacgtgccacccggaggtcccgttccaaaaagc

SEQ ID NO: 181267 - DNA, 80 bp, synthetic construct
  source 1..80: mol_type = other DNA
cgcatgatgggttaaacgttcccatccggcagtgccgtctcgggtccgtgcacacaacagctgcacagcgttatgatgct

SEQ ID NO: 181268 - DNA, 80 bp, synthetic construct
  source 1..80: mol_type = other DNA
gtatgaggtagcggtaataagcgccacgttctggatcacgtaaaagacggatctgaaataggcgtaggccagcagcggct

SEQ ID NO: 181269 - DNA, 80 bp, synthetic construct
  source 1..80: mol_type = other DNA
tgcttgttacttatgtatgcgatgaataagaccgtggtgttataacaaatcgttttcgtaagcataattagacctgtgtg

SEQ ID NO: 181270 - DNA, 80 bp, synthetic construct
  source 1..80: mol_type = other DNA
gccatacccaagtgagtccatacggagcacatcaggcccaagaacatcatgttctgggtcaaaaggcagagaccggtaga

SEQ ID NO: 181271 - DNA, 80 bp, synthetic construct
  source 1..80: mol_type = other DNA
aacaatgttgtccgctgacttgtggaaaggccttgatattgcaaaacaaaagaacaaaagccagctattctatcaacact

SEQ ID NO: 181272 - DNA, 80 bp, synthetic construct
  source 1..80: mol_type = other DNA
ccgtcgagcaagaagagtaaggaggaggcgatgggggaggcggaggtggagacggtggtacagacgcagactaagactga

SEQ ID NO: 181273 - DNA, 80 bp, synthetic construct
  source 1..80: mol_type = other DNA
aactagtaagtgacatgcagaagcaacttaaacagatgtttagctatcaaagaacccatagatgtgagcccgtctgtgtg

SEQ ID NO: 181274 - DNA, 80 bp, synthetic construct
  source 1..80: mol_type = other DNA
acagaggcagttttaaatgaggttcttgtagttccgaatacacaagctagtaatgggtctatagcaaattcagcacctgc

SEQ ID NO: 181275 - DNA, 80 bp, synthetic construct
  source 1..80: mol_type = other DNA
gaatcagatcaccacaatttttaacacttgtttaaaggatgagttgagaaaattggacaaaatttcagcaggtaagacca

SEQ ID NO: 181276 - DNA, 80 bp, synthetic construct
  source 1..80: mol_type = other DNA
agcccgagcgtgtcaagctggtactgggtcgtctgttactgggacccgtggccgtaccctgtttttgcgacggtgaagtg

SEQ ID NO: 181277 - DNA, 80 bp, synthetic construct
  source 1..80: mol_type = other DNA
atttgacaccagagaagggatggctatcctcttatgcagtaaggttaacttggtacacaagaggtttttggacagatgta

SEQ ID NO: 181278 - DNA, 80 bp, synthetic construct
  source 1..80: mol_type = other DNA
aaacattctgaccaatggctcaaatcaaaccttcacagtcataaattattataaagatgcagctagctcgtcatcagctg

SEQ ID NO: 181279 - DNA, 80 bp, synthetic construct
  source 1..80: mol_type = other DNA
gtgccgccgtcgcctcctcctggtgggaaacaaaacaggtcacctcgccagacgtcagcgagacggagaccgaagcagaa

SEQ ID NO: 181280 - DNA, 80 bp, synthetic construct
  source 1..80: mol_type = other DNA
agaagtccgtcactaaccacgtgactcccacaggccaatcacccgcctctacgtgcacttcctgggctgggtctacccgg

SEQ ID NO: 181281 - DNA, 80 bp, synthetic construct
  source 1..80: mol_type = other DNA
aacgatcccattacaaatgcagtggaaagcgctgtgagcgcgcttgctgacaccacaatatcccgggtgaccgcagccaa

SEQ ID NO: 181282 - DNA, 80 bp, synthetic construct
  source 1..80: mol_type = other DNA
agcaggtgcgaaagcaggaggagcagatgcggaagcaggaggagcagatgcggaagcaggaggagcagatgcggaagcag

SEQ ID NO: 181283 - DNA, 80 bp, synthetic construct
  source 1..80: mol_type = other DNA
ttggctagaaagaactgtgagagatatcaacagggcagcagtgcaacatcttcccagggaacttattttccaggtctggc

SEQ ID NO: 181284 - DNA, 80 bp, synthetic construct
  source 1..80: mol_type = other DNA
atcgagcagcagcctgggagctgttccataaatcttcacttgatgaagccggacctgaagaactgcctcttaaagaagga

SEQ ID NO: 181285 - DNA, 80 bp, synthetic construct
  source 1..80: mol_type = other DNA
gagggtctccatcaggtgctgatggtgctcacgggcttcggcgtgcagctgtcgcccgctttctactatgaggccctttt

SEQ ID NO: 181286 - DNA, 80 bp, synthetic construct
  source 1..80: mol_type = other DNA
ttcaggatcagttattaagtattttaatattaactattacaaagactcagctagtagtggtctgagtaagcaggattttt

SEQ ID NO: 181287 - DNA, 80 bp, synthetic construct
  source 1..80: mol_type = other DNA
gaaaaaaaaattcgtcaggcagtagataccagattctccgacgttacggcgtctttttttcttttgagagagtatctgct

SEQ ID NO: 181288 - DNA, 80 bp, synthetic construct
  source 1..80: mol_type = other DNA
gagtgccaccaggaaacagcgacgaagagacagtaggagaggcattcgcatggctagaaagaacaatagtagaactcaac

SEQ ID NO: 181289 - DNA, 80 bp, synthetic construct
  source 1..80: mol_type = other DNA
ggaagcaccaaatagccaggtgcaggtgcaacactggtgtatactactgcagacacaaggataggagttatccagttcgt

SEQ ID NO: 181290 - DNA, 80 bp, synthetic construct
  source 1..80: mol_type = other DNA
gaaagggaaaacgagagcaatagaggcagctagtataaatgacacaacccacttccgtatggtgtttggtaatctctttt

SEQ ID NO: 181291 - DNA, 80 bp, synthetic construct
  source 1..80: mol_type = other DNA
cagagtatttgaaggatgaggaggcaacagctgaagatcagccaacacagccggacgtagccacatgtagattttacaca

SEQ ID NO: 181292 - DNA, 80 bp, synthetic construct
  source 1..80: mol_type = other DNA
cgcaaatgtgagatgttcacgtatctgcgcttcgacgtggaggttacgtttgtgattaccagctatcagcatcagggaac

SEQ ID NO: 181293 - DNA, 80 bp, synthetic construct
  source 1..80: mol_type = other DNA
ttggtgtgagagactgtgaagaggaacacactttcaccgatgaagggcaatggagagttaacttagaattcccaaaacaa

SEQ ID NO: 181294 - DNA, 80 bp, synthetic construct
  source 1..80: mol_type = other DNA
tggctagcaggtggccaataacacacttacacacagataatggtgccaacttcacttcacaggaagtaaagatggtagca

SEQ ID NO: 181295 - DNA, 80 bp, synthetic construct
  source 1..80: mol_type = other DNA
tctacaattccgttataggttcctcaattaaccttgcagacactacagtagacacagttttcaataactttttatacagt

SEQ ID NO: 181296 - DNA, 80 bp, synthetic construct
  source 1..80: mol_type = other DNA
gccggagcccgacgccccgggcgctgagccgctaccatggcgtggagctggtggtggcaacgatggaggcgccgcggctg

SEQ ID NO: 181297 - DNA, 80 bp, synthetic construct
  source 1..80: mol_type = other DNA
cagatatagcaggaaccaccagtactgtagaagagcaaatagagtggatgtatagacaaggaaatcctgtcccagtagga

SEQ ID NO: 181298 - DNA, 80 bp, synthetic construct
  source 1..80: mol_type = other DNA
attaccacctgactccagaacaagaattagataatgcaattcaagtagtttacactgcagatttagtcatacaccgcaca

SEQ ID NO: 181299 - DNA, 80 bp, synthetic construct
  source 1..80: mol_type = other DNA
agatacttctatgcctgaagtttgtcccgtctctttaagttgagctatggtttgaaaggtgttgtatagctcagttttgt

SEQ ID NO: 181300 - DNA, 80 bp, synthetic construct
  source 1..80: mol_type = other DNA
aagagcatcacttacgtaccagatactgtaaggcctgacgtgtcgaaccgcggggcatacggtcagcagtccggtgccgt

SEQ ID NO: 181301 - DNA, 80 bp, synthetic construct
  source 1..80: mol_type = other DNA
gctagagggcaccgcccagttgtgtgactgtgccaattttcttcgcacgtcctgcccccccgtgctgggcagtcagggcc

SEQ ID NO: 181302 - DNA, 80 bp, synthetic construct
  source 1..80: mol_type = other DNA
ttggcactgtggctgtgcgggttgtaaatgaacatgatccagttgatatccacgcaaaggttagagtgtactttaaaccc

SEQ ID NO: 181303 - DNA, 80 bp, synthetic construct
  source 1..80: mol_type = other DNA
agtttgcaaatggttgggtgttgatccacctcccagcaaacagggtgactcatggttgaaaaagttcacagagttttgta

SEQ ID NO: 181304 - DNA, 80 bp, synthetic construct
  source 1..80: mol_type = other DNA
cggatttggatgctacatcagttgataagccaacacaccctgagacctcatcagatcggttctacacattggagagtgtt

SEQ ID NO: 181305 - DNA, 80 bp, synthetic construct
  source 1..80: mol_type = other DNA
tggacgaaacaggactagcactaactacagcagccacatagatgactttacatataacaacgaggcctacggaggaggtc

SEQ ID NO: 181306 - DNA, 80 bp, synthetic construct
  source 1..80: mol_type = other DNA
tcaggtactagcggcatttactcaaaaaaaacagacagtaactatggttaccactcttttcaagttaaaaaccaaaaaca

SEQ ID NO: 181307 - DNA, 80 bp, synthetic construct
  source 1..80: mol_type = other DNA
cagctgtgcaagggccgagcttggacttcgccctatctctgcttaggagaaacattaggcaggtccaaaccgatcatggg

SEQ ID NO: 181308 - DNA, 80 bp, synthetic construct
  source 1..80: mol_type = other DNA
actgtcaccagactttccaggactatacgatgacatagtatacaatcccaccacagacgaaggcataggaaacattgtgt

SEQ ID NO: 181309 - DNA, 80 bp, synthetic construct
  source 1..80: mol_type = other DNA
tttagttttataagggcgacacgcgattgcagtgtaacacgagtgatcctgagttcagatcaactgccgtcgaacccatc

SEQ ID NO: 181310 - DNA, 80 bp, synthetic construct
  source 1..80: mol_type = other DNA
ctagacctgacacatctgcttgcagattttacacacttgccagtaagacgtggagtcgtgagtctaagggctggtgttgg

SEQ ID NO: 181311 - DNA, 80 bp, synthetic construct
  source 1..80: mol_type = other DNA
actgcacatactatcaaacaggccaagtcctagcacaactaaatccaaactttaaaccagcacaaaacgggggcacaaac

SEQ ID NO: 181312 - DNA, 80 bp, synthetic construct
  source 1..80: mol_type = other DNA
cgtgcagtcccataccaaaattcttcagttgattttgcccagaacgcggtggcaatgaatcaggtggctactattagaac

SEQ ID NO: 181313 - DNA, 80 bp, synthetic construct
  source 1..80: mol_type = other DNA
gtgagagtgtacttcaagcccaagcacgtgaaggcctgggttccaagagcacctaggctgtgccagtacacgaacgcctc

SEQ ID NO: 181314 - DNA, 80 bp, synthetic construct
  source 1..80: mol_type = other DNA
cgcgcttcgcgcgccgcccactaggaggcgctgcgcgcccccccccgcgcatgcgcggggacccccccccgggttggctc

SEQ ID NO: 181315 - DNA, 80 bp, synthetic construct
  source 1..80: mol_type = other DNA
tgtccgccgcgaaatgcccccgtccccgtcctcaccaccgtccccgccgcaaacgcccccgtctccgcaacgccccgtcc

SEQ ID NO: 181316 - DNA, 80 bp, synthetic construct
  source 1..80: mol_type = other DNA
cagtttagcaccacaactacgtgccgtcgctggattctccaatcagacgcctttggaaaacaacacgcacatggccttgg

SEQ ID NO: 181317 - DNA, 80 bp, synthetic construct
  source 1..80: mol_type = other DNA
agccattccggaacaccaactgggtaaatataacacagggacatcagcatcctttgacgacgtcatgaaggggaaggctg

SEQ ID NO: 181318 - DNA, 80 bp, synthetic construct
  source 1..80: mol_type = other DNA
aacagagagaatacttacaatacccttagatattagtaatactattttctccaccaccctactaggtgaggttcttaact

SEQ ID NO: 181319 - DNA, 80 bp, synthetic construct
  source 1..80: mol_type = other DNA
actgcagatccaggcgaagggccgtctgcgcccccacggggccacacgctgagtggtcagggatgtgcccagcccccctc

SEQ ID NO: 181320 - DNA, 80 bp, synthetic construct
  source 1..80: mol_type = other DNA
ctcttgcgtgactcccccttcgccacccaagacgccttgttccaaaacgatcctgctcaagccatacagggggcaattgg

SEQ ID NO: 181321 - DNA, 80 bp, synthetic construct
  source 1..80: mol_type = other DNA
gtcaatttaacaaagtatggttccaatacagcactaaacctacaacacagtttgaccctatgcaatgcaaatgtgtatta

SEQ ID NO: 181322 - DNA, 80 bp, synthetic construct
  source 1..80: mol_type = other DNA
ccgattattgaaagacaccccattcattgaacagagcacactactccaaggagatgtggtggaggcaattgagagcgcag

SEQ ID NO: 181323 - DNA, 80 bp, synthetic construct
  source 1..80: mol_type = other DNA
acaggtagaatctttcttacctatcaacaatatcccaagcaacaagggcaaaattgatatctacaccatcccgatatcaa

SEQ ID NO: 181324 - DNA, 80 bp, synthetic construct
  source 1..80: mol_type = other DNA
actggccgggccccgggcaaggctcttaaaaatgcacttttctaaaataagcagaaagaaaaggaaactgctactgcaaa

SEQ ID NO: 181325 - DNA, 80 bp, synthetic construct
  source 1..80: mol_type = other DNA
ccatctgccaaaggagggttccaatgatctgactgagaaacactacctagattccagaaatgacattaccactgcaggtc

SEQ ID NO: 181326 - DNA, 80 bp, synthetic construct
  source 1..80: mol_type = other DNA
cactaagagctagtaccaccactactcccacagtgtccataactgttacaatagcaccttacaaatctgagttctctggt

SEQ ID NO: 181327 - DNA, 80 bp, synthetic construct
  source 1..80: mol_type = other DNA
ttactttaagaattctgtatgacgagtacaaaaggtttatgaactactggacagcatctaacgaagacctagacctttgt

SEQ ID NO: 181328 - DNA, 80 bp, synthetic construct
  source 1..80: mol_type = other DNA
gtgtcacaggacgccaaaatgcaacaaagcaacccagtgatgataattggttaaattttgatggcacattacttggcaat

SEQ ID NO: 181329 - DNA, 80 bp, synthetic construct
  source 1..80: mol_type = other DNA
atgctgactgtggtgagacaataaacatagatggtagggaagttaaggtgcttgaaagacaaatcataactgaccttaag

SEQ ID NO: 181330 - DNA, 80 bp, synthetic construct
  source 1..80: mol_type = other DNA
tgtgtctagactgtaacagaacctctctcaccatctacaacgtaaccgtcgaacacgctggaaaatacgttttacatcgc

SEQ ID NO: 181331 - DNA, 80 bp, synthetic construct
  source 1..80: mol_type = other DNA
tttagaagtaaccaagttatggctcaatagtcgccacacctccagtgtggttccgagcaagcacttctgttccccggttg

SEQ ID NO: 181332 - DNA, 80 bp, synthetic construct
  source 1..80: mol_type = other DNA
aacttgttagggtttgtgtcagcttgcaatgatttcagcgtgcgattactgcgagacactactcacatctcacaaactgc

SEQ ID NO: 181333 - DNA, 80 bp, synthetic construct
  source 1..80: mol_type = other DNA
acgaagcaaggggtgaccccgagagcacagatcgcttcgatgcgtgggagataagtgtgcgtgacatggtccaaatgcgc

SEQ ID NO: 181334 - DNA, 80 bp, synthetic construct
  source 1..80: mol_type = other DNA
tgctttttgcccccgacatcgaaattgatagttgcattgacatctgccgtgcaaacattgcacgctgggtaaaatgggaa

SEQ ID NO: 181335 - DNA, 80 bp, synthetic construct
  source 1..80: mol_type = other DNA
acaccgcagtcaaggggcaattcgggctcgggactggccgggctatgggcaaggctcttaaaaaagccatgtttctcggt

SEQ ID NO: 181336 - DNA, 80 bp, synthetic construct
  source 1..80: mol_type = other DNA
ccactttactgacagggtgtgaaggcgctagtgtgctagttgtgagtcctccggtccctgaatgtggctaatcctaaccc

SEQ ID NO: 181337 - DNA, 80 bp, synthetic construct
  source 1..80: mol_type = other DNA
cagcacagggaacaacacaacctcaaagagcacaagcacaaccacaaccacacccacagaccaggagcaagagataagtg
